United States Patent Application Publication US 2025/0327063 A1 - sequence listing, part 7

SEQ ID NO: 90140 - DNA, 80 bp, synthetic construct; identical to SEQ ID NO: 32834
  misc_feature 1..80: note = Artificially Synthesized Probe
  source 1..80: mol_type = other DNA

SEQ ID NO: 90141 - DNA, 80 bp, synthetic construct
  misc_feature 1..80: note = Artificially Synthesized Probe
  source 1..80: mol_type = other DNA
gaccaacatggtgaaaccccgtttctactaaaaataaaaaattagccgggcgtggtggcacatgcctgtattcccagcta

SEQ ID NO: 90142 - DNA, 80 bp, synthetic construct
  misc_feature 1..80: note = Artificially Synthesized Probe
  source 1..80: mol_type = other DNA
actttatgcaagcttgatgaatgacaaaatttgacaaattctgtagcttagtgacttttctatcatttatctcataattt

SEQ ID NO: 90143 - DNA, 80 bp, synthetic construct; identical to SEQ ID NO: 32835
  misc_feature 1..80: note = Artificially Synthesized Probe
  source 1..80: mol_type = other DNA

SEQ ID NO: 90144 - DNA, 80 bp, synthetic construct
  misc_feature 1..80: note = Artificially Synthesized Probe
  source 1..80: mol_type = other DNA
tgaaatggcaactttagtggtctgcagaagctgctaggggcttaaggtgcatctgcctataacccacaccttgctcagct

SEQ ID NO: 90145 - DNA, 80 bp, synthetic construct
  misc_feature 1..80: note = Artificially Synthesized Probe
  source 1..80: mol_type = other DNA
aaatcagtaatgtcagcactccttttatgaagtcaaccttattcttttctcactctggcttgcctctctctgctttgggc

SEQ ID NO: 90146 - DNA, 80 bp, synthetic construct
  misc_feature 1..80: note = Artificially Synthesized Probe
  source 1..80: mol_type = other DNA
tttataggtgaaatgtgaacctgaagaatatcctcagtgctcatgacctgacaatcctgttacctactgctgcttaacaa

SEQ ID NO: 90147 - DNA, 80 bp, synthetic construct; identical to SEQ ID NO: 32836
  misc_feature 1..80: note = Artificially Synthesized Probe
  source 1..80: mol_type = other DNA

SEQ ID NO: 90148 - DNA, 80 bp, synthetic construct
  misc_feature 1..80: note = Artificially Synthesized Probe
  source 1..80: mol_type = other DNA
tcccccctccccccaccccaccacagtccccagagtgtgatattccccttcctgtgtccatgtgatctcattgttcaatt

SEQ ID NO: 90149 - DNA, 80 bp, synthetic construct
  misc_feature 1..80: note = Artificially Synthesized Probe
  source 1..80: mol_type = other DNA
ttaatccagtctatcattgttggacatttgggttggttccaagtctttgctattgtgaataatgccgcaataaacatacg

SEQ ID NO: 90150 - DNA, 80 bp, synthetic construct; identical to SEQ ID NO: 65157
  misc_feature 1..80: note = Artificially Synthesized Probe
  source 1..80: mol_type = other DNA

SEQ ID NO: 90151 - DNA, 80 bp, synthetic construct
  misc_feature 1..80: note = Artificially Synthesized Probe
  source 1..80: mol_type = other DNA
atctagtccccaggcaagaatgaagtcagctttgggaaagggctgttactgtctttgtttaaactataaactaagtttct

SEQ ID NO: 90152 - DNA, 80 bp, synthetic construct; identical to SEQ ID NO: 32837
  misc_feature 1..80: note = Artificially Synthesized Probe
  source 1..80: mol_type = other DNA

SEQ ID NO: 90153 - DNA, 80 bp, synthetic construct
  misc_feature 1..80: note = Artificially Synthesized Probe
  source 1..80: mol_type = other DNA
aggttttcttctagggtttttatggttttaggtctaacgtttaaatctttaatccatcttgaattgatttttgtataagg

SEQ ID NO: 90154 - DNA, 80 bp, synthetic construct
  misc_feature 1..80: note = Artificially Synthesized Probe
  source 1..80: mol_type = other DNA
ctgttccattgatctatatctctgttttggtaccagtaccatgctgttttggttactgtagccttgtagtatagtttgaa

SEQ ID NO: 90155 - DNA, 80 bp, synthetic construct
  misc_feature 1..80: note = Artificially Synthesized Probe
  source 1..80: mol_type = other DNA
accttgggcagtgggtctcagttctttgctggctgttagcctctccttagggttactcatatggcagcttgtttcccaaa

SEQ ID NO: 90156 - DNA, 80 bp, synthetic construct
  misc_feature 1..80: note = Artificially Synthesized Probe
  source 1..80: mol_type = other DNA
cacactgaaggcaaatggattatatgaataccaacaggtgggaatcacaggagcctttttaaaggttttcacaattactt

SEQ ID NO: 90157 - DNA, 80 bp, synthetic construct
  misc_feature 1..80: note = Artificially Synthesized Probe
  source 1..80: mol_type = other DNA
tcgacttcccaggctcaggcaatcctcctgccgcagcctcccaagtagctgggactacaggcatgcgccaccacacctgg

SEQ ID NO: 90158 - DNA, 80 bp, synthetic construct; identical to SEQ ID NO: 32838
  misc_feature 1..80: note = Artificially Synthesized Probe
  source 1..80: mol_type = other DNA

SEQ ID NO: 90159 - DNA, 80 bp, synthetic construct
  misc_feature 1..80: note = Artificially Synthesized Probe
  source 1..80: mol_type = other DNA
aagcaaccaatgcaaacaatcacatcttagtggcacaactattaagaacatagctcaaatggcaggcagctgatgcactt

SEQ ID NO: 90160 - DNA, 80 bp, synthetic construct
  misc_feature 1..80: note = Artificially Synthesized Probe
  source 1..80: mol_type = other DNA
actctcctccctttagaagaaatggtgcagcctgtaaacacaactacgtaccgaagtaaacttgcttaatcctctggttg

SEQ ID NO: 90161 - DNA, 80 bp, synthetic construct
  misc_feature 1..80: note = Artificially Synthesized Probe
  source 1..80: mol_type = other DNA
cagcctctcaagtaactgggattacaggtgtgcagcaccatgcctggctaatttttaaatatttggtacagatggggttt

SEQ ID NO: 90162 - DNA, 80 bp, synthetic construct; identical to SEQ ID NO: 32839
  misc_feature 1..80: note = Artificially Synthesized Probe
  source 1..80: mol_type = other DNA

SEQ ID NO: 90163 - DNA, 80 bp, synthetic construct; identical to SEQ ID NO: 32807
  misc_feature 1..80: note = Artificially Synthesized Probe
  source 1..80: mol_type = other DNA

SEQ ID NO: 90164 - DNA, 80 bp, synthetic construct
  misc_feature 1..80: note = Artificially Synthesized Probe
  source 1..80: mol_type = other DNA
gagtagctgggattacaggcatgtgccaccatgcccagctcatttttgtgtgtgtttttttttttttttttttttttttt

SEQ ID NO: 90165 - DNA, 80 bp, synthetic construct
  misc_feature 1..80: note = Artificially Synthesized Probe
  source 1..80: mol_type = other DNA
gcaatctaccttcccaaacctccaacttaaatgtctttagcaacacacaaaaaaacttccttcccagttggcctcaggtt

SEQ ID NO: 90166 - DNA, 80 bp, synthetic construct
  misc_feature 1..80: note = Artificially Synthesized Probe
  source 1..80: mol_type = other DNA
tgcccaggctagaatgcagtggcgtgatcatagcacactgcagccttgaaatcctgggctcaagcaatcctcctgcctca

SEQ ID NO: 90167 - DNA, 80 bp, synthetic construct; identical to SEQ ID NO: 32840
  misc_feature 1..80: note = Artificially Synthesized Probe
  source 1..80: mol_type = other DNA

SEQ ID NO: 90168 - DNA, 80 bp, synthetic construct
  misc_feature 1..80: note = Artificially Synthesized Probe
  source 1..80: mol_type = other DNA
aattaaagggggttgtaaacccacctgtttgttggctcttttgagatagctacaagctctcctgtaacagcactaaggtt

SEQ ID NO: 90169 - DNA, 80 bp, synthetic construct
  misc_feature 1..80: note = Artificially Synthesized Probe
  source 1..80: mol_type = other DNA
caaattaactagaacaatttatgtagttcaggtgtaggtggggaaagatgaataacactaaaaactaccacaaataaaaa

SEQ ID NO: 90170 - DNA, 80 bp, synthetic construct; identical to SEQ ID NO: 32841
  misc_feature 1..80: note = Artificially Synthesized Probe
  source 1..80: mol_type = other DNA

SEQ ID NO: 90171 - DNA, 80 bp, synthetic construct
  misc_feature 1..80: note = Artificially Synthesized Probe
  source 1..80: mol_type = other DNA
cttggctcactgcaacctccaaggttcaagtgattctcctgcctcagtctcccaagtagctgggactacaggtgcacgcc

SEQ ID NO: 90172 - DNA, 80 bp, synthetic construct
  misc_feature 1..80: note = Artificially Synthesized Probe
  source 1..80: mol_type = other DNA
aagcctcaaaaatgtgctctctggcccagacagttcaagaatctatccaagaaatgagataagtgtatgaaagcctgtgt

SEQ ID NO: 90173 - DNA, 80 bp, synthetic construct
  misc_feature 1..80: note = Artificially Synthesized Probe
  source 1..80: mol_type = other DNA
gagaaaaacaaccacccctgacaaatcttctggaagaaagtgctattggatgtagggaaaaacaattaaaaaaaaaatgc

SEQ ID NO: 90174 - DNA, 80 bp, synthetic construct
  misc_feature 1..80: note = Artificially Synthesized Probe
  source 1..80: mol_type = other DNA
cactctgttgcccagcctggagtgcaatggcacaatctcatctcactgcaacttctgcctcccgggttcaagtcattctc

SEQ ID NO: 90175 - DNA, 80 bp, synthetic construct; identical to SEQ ID NO: 32842
  misc_feature 1..80: note = Artificially Synthesized Probe
  source 1..80: mol_type = other DNA

SEQ ID NO: 90176 - DNA, 80 bp, synthetic construct
  misc_feature 1..80: note = Artificially Synthesized Probe
  source 1..80: mol_type = other DNA
gggtacctggaagatcaagatctacagctgcctatttccacatctttcaatccatctggctccttaaataggggaaaaag

SEQ ID NO: 90177 - DNA, 80 bp, synthetic construct
  misc_feature 1..80: note = Artificially Synthesized Probe
  source 1..80: mol_type = other DNA
gataattcagttctagtctattgctttagatgtaaaaacagctgaaaacccaaagtggattagaattgctgaaggatttc

SEQ ID NO: 90178 - DNA, 80 bp, synthetic construct
  misc_feature 1..80: note = Artificially Synthesized Probe
  source 1..80: mol_type = other DNA
taaatggattgcataacggcaccacttttcctttgtcactgtggtggataaatgacaaagtagattccaatctcctgtat

SEQ ID NO: 90179 - DNA, 80 bp, synthetic construct; identical to SEQ ID NO: 32843
  misc_feature 1..80: note = Artificially Synthesized Probe
  source 1..80: mol_type = other DNA

SEQ ID NO: 90180 - DNA, 80 bp, synthetic construct
  misc_feature 1..80: note = Artificially Synthesized Probe
  source 1..80: mol_type = other DNA
aaacaaaacaagaccaacaaaaaaaagtgccatcccacccctccccttggttctttcatttggggttatattaaagactc

SEQ ID NO: 90181 - DNA, 80 bp, synthetic construct
  misc_feature 1..80: note = Artificially Synthesized Probe
  source 1..80: mol_type = other DNA
aacccagatctccgttctaccatcatcctgatcctttagttatggggcaataaactcaagtgcaatgagtaaagtgccag

SEQ ID NO: 90182 - DNA, 80 bp, synthetic construct
  misc_feature 1..80: note = Artificially Synthesized Probe
  source 1..80: mol_type = other DNA
actgaagattcaaagatcttaactattaaaggatgaaaggaatttgacagtgctttgaacagtgataaaatggtacccaa

SEQ ID NO: 90183 - DNA, 80 bp, synthetic construct; identical to SEQ ID NO: 32844
  misc_feature 1..80: note = Artificially Synthesized Probe
  source 1..80: mol_type = other DNA

SEQ ID NO: 90184 - DNA, 80 bp, synthetic construct
  misc_feature 1..80: note = Artificially Synthesized Probe
  source 1..80: mol_type = other DNA
gatctccacagggtcaagtaagcaaacccaaatgaacatgttggattaaaaaaaaaacaagatctagaaactcttgaagg

SEQ ID NO: 90185 - DNA, 80 bp, synthetic construct
  misc_feature 1..80: note = Artificially Synthesized Probe
  source 1..80: mol_type = other DNA
attacaggcgtgagccaccgcgcccggcaatctgctgttatttttctattaagagaaaaaccactgtttagatccaacaa

SEQ ID NO: 90186 - DNA, 80 bp, synthetic construct
  misc_feature 1..80: note = Artificially Synthesized Probe
  source 1..80: mol_type = other DNA
aacatgggcagtaagaaatctgtgaagccagctgcctcttcctgcgaccactcatacttctccactagaacctcaaaaag

SEQ ID NO: 90187 - DNA, 80 bp, synthetic construct
  misc_feature 1..80: note = Artificially Synthesized Probe
  source 1..80: mol_type = other DNA
acaaatgacaaggtactcttgtggaaacccacaaactaacccatgtagtctatgaggaatcaaattttgcaatcagaatc

SEQ ID NO: 90188 - DNA, 80 bp, synthetic construct
  misc_feature 1..80: note = Artificially Synthesized Probe
  source 1..80: mol_type = other DNA
ttggtcccagtcaaactgggtgtgacaatcaagaagtaggtatttactactaaaataaacatgaaatgcctatgtcttca

SEQ ID NO: 90189 - DNA, 80 bp, synthetic construct; identical to SEQ ID NO: 32845
  misc_feature 1..80: note = Artificially Synthesized Probe
  source 1..80: mol_type = other DNA

SEQ ID NO: 90190 - DNA, 80 bp, synthetic construct
  misc_feature 1..80: note = Artificially Synthesized Probe
  source 1..80: mol_type = other DNA
tctaggttgcatgttccataaaagaacctaatgcctgacaatctgaggtgacacagttttatctccaaaccaccccccaa

SEQ ID NO: 90191 - DNA, 80 bp, synthetic construct
  misc_feature 1..80: note = Artificially Synthesized Probe
  source 1..80: mol_type = other DNA
ctgctttaaaattttaagttggccaggcacagtggctcatgcctgtaattccagcactttgggaggctgagtcgggtgga

SEQ ID NO: 90192 - DNA, 80 bp, synthetic construct
  misc_feature 1..80: note = Artificially Synthesized Probe
  source 1..80: mol_type = other DNA
gttgcagtgagccaagatcgtgccactgtactccagcctgggtgacagagtgataccctgtctcaataataataataata

SEQ ID NO: 90193 - DNA, 80 bp, synthetic construct; identical to SEQ ID NO: 32846
  misc_feature 1..80: note = Artificially Synthesized Probe
  source 1..80: mol_type = other DNA

SEQ ID NO: 90194 - DNA, 80 bp, synthetic construct
  misc_feature 1..80: note = Artificially Synthesized Probe
  source 1..80: mol_type = other DNA
tgccaaggattgagaaaagtcatttttctcagcacttctgtagaagttgtgaggaaaaagggaaccatggcacaatgggg

SEQ ID NO: 90195 - DNA, 80 bp, synthetic construct
  misc_feature 1..80: note = Artificially Synthesized Probe
  source 1..80: mol_type = other DNA
agttcgtttgtatgactaatgtacttcgagtgactgtgttaggtgtcactgggatgcaaagatgagtgagatgtagtccc

SEQ ID NO: 90196 - DNA, 80 bp, synthetic construct
  misc_feature 1..80: note = Artificially Synthesized Probe
  source 1..80: mol_type = other DNA
ttattattatctccattaagaaatcagcaaactgaggcacagttagatcctgtcaaaggtcacatggctagtggagtagc

SEQ ID NO: 90197 - DNA, 80 bp, synthetic construct; identical to SEQ ID NO: 32808
  misc_feature 1..80: note = Artificially Synthesized Probe
  source 1..80: mol_type = other DNA

SEQ ID NO: 90198 - DNA, 80 bp, synthetic construct; identical to SEQ ID NO: 32847
  misc_feature 1..80: note = Artificially Synthesized Probe
  source 1..80: mol_type = other DNA

SEQ ID NO: 90199 - DNA, 80 bp, synthetic construct
  misc_feature 1..80: note = Artificially Synthesized Probe
  source 1..80: mol_type = other DNA
cgatcttggctcactgcaacctccgcctcccagattcaagtgattctcctgtctcagcctcctgagtagctgggattaca

SEQ ID NO: 90200 - DNA, 80 bp, synthetic construct
  misc_feature 1..80: note = Artificially Synthesized Probe
  source 1..80: mol_type = other DNA
tctctgctcttgaccactttttttacctcttttttatctctttgctaagtcacaggttagcattcaaggcaggcccatca

SEQ ID NO: 90201 - DNA, 80 bp, synthetic construct
  misc_feature 1..80: note = Artificially Synthesized Probe
  source 1..80: mol_type = other DNA
tgccacaatgagcttgcgaggcaccttccccagaagttctatgatcaatgcaatgtgatctgtatatttcaaacatttca

SEQ ID NO: 90202 - DNA, 80 bp, synthetic construct; identical to SEQ ID NO: 32848
  misc_feature 1..80: note = Artificially Synthesized Probe
  source 1..80: mol_type = other DNA

SEQ ID NO: 90203 - DNA, 80 bp, synthetic construct
  misc_feature 1..80: note = Artificially Synthesized Probe
  source 1..80: mol_type = other DNA
ggtaagaagaacagatcaaggacaagctgtaaaagaggtttttctatgaatagctttttcaaggactagctgtttaaaag

SEQ ID NO: 90204 - DNA, 80 bp, synthetic construct
  misc_feature 1..80: note = Artificially Synthesized Probe
  source 1..80: mol_type = other DNA
ggtaggttctttaggtaagataaaaaactgtccaaatatgtgttaggcattctagaactattatttgtgatcattctgtc

SEQ ID NO: 90205 - DNA, 80 bp, synthetic construct
  misc_feature 1..80: note = Artificially Synthesized Probe
  source 1..80: mol_type = other DNA
caggcctgagccaccacctggctgataccccattttaaagatgagaaaatagaacttcaaaaagcatgaatggcctaact

SEQ ID NO: 90206 - DNA, 80 bp, synthetic construct; identical to SEQ ID NO: 32849
  misc_feature 1..80: note = Artificially Synthesized Probe
  source 1..80: mol_type = other DNA

SEQ ID NO: 90207 - DNA, 80 bp, synthetic construct
  misc_feature 1..80: note = Artificially Synthesized Probe
  source 1..80: mol_type = other DNA
cacctcaggtagatctactgcccccccccttttttttttctctctgcaggtgacagaagttaagaatataaaactttttt

SEQ ID NO: 90208 - DNA, 80 bp, synthetic construct
  misc_feature 1..80: note = Artificially Synthesized Probe
  source 1..80: mol_type = other DNA
tgtatctgtagtagagacagggtttcacatgttggccaggctggtctcgaactcctgacttcaagtgatctgccgccttg

SEQ ID NO: 90209 - DNA, 80 bp, synthetic construct
  misc_feature 1..80: note = Artificially Synthesized Probe
  source 1..80: mol_type = other DNA
cacctgtaatcccagctactcgggaggctgaagcagaagaattgtttcaatttgggaggcagaggttgcagtgagccaag

SEQ ID NO: 90210 - DNA, 80 bp, synthetic construct
  misc_feature 1..80: note = Artificially Synthesized Probe
  source 1..80: mol_type = other DNA
accaccacacccgggcataatactcctggccagaaaaaaagctttagaaaatacttttatcgtgtagttacagaatcatt

SEQ ID NO: 90211 - DNA, 80 bp, synthetic construct; identical to SEQ ID NO: 32850
  misc_feature 1..80: note = Artificially Synthesized Probe
  source 1..80: mol_type = other DNA

SEQ ID NO: 90212 - DNA, 80 bp, synthetic construct
  misc_feature 1..80: note = Artificially Synthesized Probe
  source 1..80: mol_type = other DNA
ttcccttgaaattgttactttacacttaattcttgcaacctattttggcttatgataggattgatatacttgacagataa

SEQ ID NO: 90213 - DNA, 80 bp, synthetic construct
  misc_feature 1..80: note = Artificially Synthesized Probe
  source 1..80: mol_type = other DNA
aacagcatcggtggggctgatgtttgacctaaggactattagtactaactggtataggatggaataaattagaatttaaa

SEQ ID NO: 90214 - DNA, 80 bp, synthetic construct
  misc_feature 1..80: note = Artificially Synthesized Probe
  source 1..80: mol_type = other DNA
aggggaaaaaaattaattaccctcccaaacaaacatagtaggtagtctctaggcctataatcccaaacactgtaagccta

SEQ ID NO: 90215 - DNA, 80 bp, synthetic construct
  misc_feature 1..80: note = Artificially Synthesized Probe
  source 1..80: mol_type = other DNA
taaataggcattcatgggaattacatagcatagcattttccaaatggtattcattaggaatattagcaggtcctactaac

SEQ ID NO: 90216 - DNA, 80 bp, synthetic construct; identical to SEQ ID NO: 32851
  misc_feature 1..80: note = Artificially Synthesized Probe
  source 1..80: mol_type = other DNA

SEQ ID NO: 90217 - DNA, 80 bp, synthetic construct
  misc_feature 1..80: note = Artificially Synthesized Probe
  source 1..80: mol_type = other DNA
ccgaggcaggagaatcgcttgaacgagggaagtggaggttgtagtgagccgagatcgcaccaccgcactccagcctggcg

SEQ ID NO: 90218 - DNA, 80 bp, synthetic construct
  misc_feature 1..80: note = Artificially Synthesized Probe
  source 1..80: mol_type = other DNA
aagtaactggcagcctaggcttttcccactggctaccacaacatgtaaatccattctactttgttttaaaatggaattcc

SEQ ID NO: 90219 - DNA, 80 bp, synthetic construct; identical to SEQ ID NO: 32852
  misc_feature 1..80: note = Artificially Synthesized Probe
  source 1..80: mol_type = other DNA

SEQ ID NO: 90220 - DNA, 80 bp, synthetic construct
  misc_feature 1..80: note = Artificially Synthesized Probe
  source 1..80: mol_type = other DNA
tttctgggatttacatgttttgcacactaacaagactaaggctcttcggtactaacaaatgatgttagcttaatgtggaa

SEQ ID NO: 90221 - DNA, 80 bp, synthetic construct
  misc_feature 1..80: note = Artificially Synthesized Probe
  source 1..80: mol_type = other DNA
gtgtgcacagtgtttcactactgaaaataaataaaagagctctaattggcttaagaaaataaaagcacttgaacacttta

SEQ ID NO: 90222 - DNA, 80 bp, synthetic construct
  misc_feature 1..80: note = Artificially Synthesized Probe
  source 1..80: mol_type = other DNA
gcctttggaaagctgattgctatttggctcaatatgaagtaactcttgttcccttgggaaaacttatagatcatttaaaa

SEQ ID NO: 90223 - DNA, 80 bp, synthetic construct
  misc_feature 1..80: note = Artificially Synthesized Probe
  source 1..80: mol_type = other DNA
agtttcccttttttggccggaaaggggcatacctggatattaaggtgattctaagttattattcatgagaagaacaggtc

SEQ ID NO: 90224 - DNA, 80 bp, synthetic construct
  misc_feature 1..80: note = Artificially Synthesized Probe
  source 1..80: mol_type = other DNA
gctaattttttgtatttttagtagagatggggtttcactgcgttagccaggatgttctcaatctcctgacctcgtgatct

SEQ ID NO: 90225 - DNA, 80 bp, synthetic construct; identical to SEQ ID NO: 32853
  misc_feature 1..80: note = Artificially Synthesized Probe
  source 1..80: mol_type = other DNA

SEQ ID NO: 90226 - DNA, 80 bp, synthetic construct
  misc_feature 1..80: note = Artificially Synthesized Probe
  source 1..80: mol_type = other DNA
cagctaatttttgtatttttagtagagatggggttttaccatgttggccaggatggtctcaatctcttgacctcatgatc

SEQ ID NO: 90227 - DNA, 80 bp, synthetic construct
  misc_feature 1..80: note = Artificially Synthesized Probe
  source 1..80: mol_type = other DNA
gcctgtctcctttaatagaaaaacctcttacagtgctcgagagtgtcttaggaaatgatatccttgggaataagtgccat

SEQ ID NO: 90228 - DNA, 80 bp, synthetic construct
  misc_feature 1..80: note = Artificially Synthesized Probe
  source 1..80: mol_type = other DNA
gcctcccaggttcatgtcattctcctgcctcagcctccccagtaggtgggactacaggtgcccgccaccaagcccggcta

SEQ ID NO: 90229 - DNA, 80 bp, synthetic construct; identical to SEQ ID NO: 32854
  misc_feature 1..80: note = Artificially Synthesized Probe
  source 1..80: mol_type = other DNA

SEQ ID NO: 90230 - DNA, 80 bp, synthetic construct
  misc_feature 1..80: note = Artificially Synthesized Probe
  source 1..80: mol_type = other DNA
aagtttcaggataggtttaggaatcaaatactatctctaaatgtcagcagtgctatggcttcttgcttggcattgcttat

SEQ ID NO: 90231 - DNA, 80 bp, synthetic construct
  misc_feature 1..80: note = Artificially Synthesized Probe
  source 1..80: mol_type = other DNA
taaaaaaaaatctcatggtctcatatatagagttcagtaaaaatactgaaattaaagttaaaaaaaacaaaaaacaaaaa

SEQ ID NO: 90232 - DNA, 80 bp, synthetic construct
  misc_feature 1..80: note = Artificially Synthesized Probe
  source 1..80: mol_type = other DNA
caggtgcggtggctcacgcctgtaatcccaacactttgggaggccgaggcgggcagataacttgaggtcaggagtttgag

SEQ ID NO: 90233 - DNA, 80 bp, synthetic construct
  misc_feature 1..80: note = Artificially Synthesized Probe
  source 1..80: mol_type = other DNA
aaaaggctacatactgtatgattccaactatttgacattatggagacaataaaaatatcagtggttgccagcgagtgggg

SEQ ID NO: 90234 - DNA, 80 bp, synthetic construct
  misc_feature 1..80: note = Artificially Synthesized Probe
  source 1..80: mol_type = other DNA
tatataaacattattatatacaattataagaatatatttatattgtatattcccatatgccacataagcagtgggtaagg

SEQ ID NO: 90235 - DNA, 80 bp, synthetic construct; identical to SEQ ID NO: 32855
  misc_feature 1..80: note = Artificially Synthesized Probe
  source 1..80: mol_type = other DNA

SEQ ID NO: 90236 - DNA, 80 bp, synthetic construct; identical to SEQ ID NO: 32809
  misc_feature 1..80: note = Artificially Synthesized Probe
  source 1..80: mol_type = other DNA

SEQ ID NO: 90237 - DNA, 80 bp, synthetic construct
  misc_feature 1..80: note = Artificially Synthesized Probe
  source 1..80: mol_type = other DNA
agctacttgggaggctgaggcaggagaatcacttgaatccgggaggtgggtggaggttgcagtgagccgagattgcgcca

SEQ ID NO: 90238 - DNA, 80 bp, synthetic construct
  misc_feature 1..80: note = Artificially Synthesized Probe
  source 1..80: mol_type = other DNA
ggccaacatggtgaaaccccgcctctactaaaaatacaaaaattagctgggtatggtggctcatgcctgtactctcagct

SEQ ID NO: 90239 - DNA, 80 bp, synthetic construct
  misc_feature 1..80: note = Artificially Synthesized Probe
  source 1..80: mol_type = other DNA
aaaaagtaataggagaaaatattaacattataatgctaagtgaaaaaaatgtacatacggccgggcacggtggctcatgc

SEQ ID NO: 90240 - DNA, 80 bp, synthetic construct
  misc_feature 1..80: note = Artificially Synthesized Probe
  source 1..80: mol_type = other DNA
ggcaggagaatcagttgaaccaggaaggtggaggttgccgtgagccaagttcgcgccactgcactccagtctgggcaaca

SEQ ID NO: 90241 - DNA, 80 bp, synthetic construct; identical to SEQ ID NO: 32810
  misc_feature 1..80: note = Artificially Synthesized Probe
  source 1..80: mol_type = other DNA

SEQ ID NO: 90242 - DNA, 80 bp, synthetic construct
  misc_feature 1..80: note = Artificially Synthesized Probe
  source 1..80: mol_type = other DNA
tgcagcctcgacctcctgggctccagtgattctcccacctcaacctcccaagtagctgcgactacaggcaagcaccacca

SEQ ID NO: 90243 - DNA, 80 bp, synthetic construct
  misc_feature 1..80: note = Artificially Synthesized Probe
  source 1..80: mol_type = other DNA
aaaaaaaattattattattattttttgaaatggagttttgctcttgttgcccaggctggagtgcaatggtgcgatctcag

SEQ ID NO: 90244 - DNA, 80 bp, synthetic construct; identical to SEQ ID NO: 32811
  misc_feature 1..80: note = Artificially Synthesized Probe
  source 1..80: mol_type = other DNA

SEQ ID NO: 90245 - DNA, 80 bp, synthetic construct
  misc_feature 1..80: note = Artificially Synthesized Probe
  source 1..80: mol_type = other DNA
ctcccgagttcacaccattcttctgcctcagcctccccagcagctgggacaacaggcgcgtgctgccacgcccggctaat

SEQ ID NO: 90246 - DNA, 80 bp, synthetic construct
  misc_feature 1..80: note = Artificially Synthesized Probe
  source 1..80: mol_type = other DNA
tagcagtgtcagactccagggacgaggatcctagcctcccacccctcaaccttccttcagtctcctcgggggattccagg

SEQ ID NO: 90247 - DNA, 80 bp, synthetic construct
  misc_feature 1..80: note = Artificially Synthesized Probe
  source 1..80: mol_type = other DNA
cacgcccagtggaattttcctagttctttacactagccatgtatttacctataaaatcaggagaaatatgtatatatata

SEQ ID NO: 90248 - DNA, 80 bp, synthetic construct
  misc_feature 1..80: note = Artificially Synthesized Probe
  source 1..80: mol_type = other DNA
aatgttgtctgctatactttgtagttgcttctgttatcacacaatcagtctgcatatacaggcgttttatatatatattt

SEQ ID NO: 90249 - DNA, 80 bp, synthetic construct; identical to SEQ ID NO: 32812
  misc_feature 1..80: note = Artificially Synthesized Probe
  source 1..80: mol_type = other DNA

SEQ ID NO: 90250 - DNA, 80 bp, synthetic construct
  misc_feature 1..80: note = Artificially Synthesized Probe
  source 1..80: mol_type = other DNA
attccccgcggcgggggcctgtagtgggagctctgccccttccccgcctctgctgcaggccccgcccctcgcccggaacc

SEQ ID NO: 90251 - DNA, 80 bp, synthetic construct
  misc_feature 1..80: note = Artificially Synthesized Probe
  source 1..80: mol_type = other DNA
agagcggacacaggcacctggcaagctttccttgaccaaatcaaggttgtccttgtcctattaagcctcttccccttgcc

SEQ ID NO: 90252 - DNA, 80 bp, synthetic construct
  misc_feature 1..80: note = Artificially Synthesized Probe
  source 1..80: mol_type = other DNA
ccaggaggcagccaagatctaccataccaactatgtgcggaactcgcgagccgtgggcgtgatgtggggtaccctcacca

SEQ ID NO: 90253 - DNA, 80 bp, synthetic construct
  misc_feature 1..80: note = Artificially Synthesized Probe
  source 1..80: mol_type = other DNA
ctccatcccctctagagccttcaagactgccatgttctttgtggccttgggcatgttcctcatcattggctccatcatct

SEQ ID NO: 90254 - DNA, 80 bp, synthetic construct; identical to SEQ ID NO: 32813
  misc_feature 1..80: note = Artificially Synthesized Probe
  source 1..80: mol_type = other DNA

SEQ ID NO: 90255 - DNA, 80 bp, synthetic construct
  misc_feature 1..80: note = Artificially Synthesized Probe
  source 1..80: mol_type = other DNA
tcacatcagtttttgcagctgtgagagagagaaagaaggaagcttccattgttggccatgtgggaataggactcaaccct

SEQ ID NO: 90256 - DNA, 80 bp, synthetic construct
  misc_feature 1..80: note = Artificially Synthesized Probe
  source 1..80: mol_type = other DNA
ctgctctcagattctaaggtctcttgctgattttggagtgttactattatgcagggtatgaccttgcctatagaaacttt

SEQ ID NO: 90257 - DNA, 80 bp, synthetic construct
  misc_feature 1..80: note = Artificially Synthesized Probe
  source 1..80: mol_type = other DNA
ttttgttgttgttgttgtttgtttgttttttgagacagagtctcactctttggctcaggctggagtgcagtggcatgatc

SEQ ID NO: 90258 - DNA, 80 bp, synthetic construct; identical to SEQ ID NO: 32804
  misc_feature 1..80: note = Artificially Synthesized Probe
  source 1..80: mol_type = other DNA

SEQ ID NO: 90259 - DNA, 80 bp, synthetic construct; identical to SEQ ID NO: 32814
  misc_feature 1..80: note = Artificially Synthesized Probe
  source 1..80: mol_type = other DNA

SEQ ID NO: 90260 - DNA, 80 bp, synthetic construct
  misc_feature 1..80: note = Artificially Synthesized Probe
  source 1..80: mol_type = other DNA
tctagcttctaactgtcactgtaatcatctcttactcttcagcctgatgtcaaaagcaaaagttcagaagttcctcatca

SEQ ID NO: 90261 - DNA, 80 bp, synthetic construct
  misc_feature 1..80: note = Artificially Synthesized Probe
  source 1..80: mol_type = other DNA
atatgcgttgtttgtgttgctcttcctacataggtcagctataaggcaaataatgttcctgggttatctcagtttcacat

SEQ ID NO: 90262 - DNA, 80 bp, synthetic construct
  misc_feature 1..80: note = Artificially Synthesized Probe
  source 1..80: mol_type = other DNA
gacattatcatatcttttctgttcaatggttgcttctctttggctcactgttctctacttttcagcctgagagctggcta

SEQ ID NO: 90263 - DNA, 80 bp, synthetic construct; identical to SEQ ID NO: 32867
  misc_feature 1..80: note = Artificially Synthesized Probe
  source 1..80: mol_type = other DNA

SEQ ID NO: 90264 - DNA, 80 bp, synthetic construct
  misc_feature 1..80: note = Artificially Synthesized Probe
  source 1..80: mol_type = other DNA
aagatgattcttgaattttggttttttgctattgctatttgggcttgttgtccttgttgttgctattgagttgagctcct

SEQ ID NO: 90265 - DNA, 80 bp, synthetic construct
  misc_feature 1..80: note = Artificially Synthesized Probe
  source 1..80: mol_type = other DNA
aataagatactctggttgatatgtagcgaatttatgtccttatgggctggatccaacaagaaaaatatgaatcaggtatg

SEQ ID NO: 90266 - DNA, 80 bp, synthetic construct
  misc_feature 1..80: note = Artificially Synthesized Probe
  source 1..80: mol_type = other DNA
acatatttatgagacacatatattttgatataagcatacaatgtgtaatgaccaaatcagggtaattgggatatccatca

SEQ ID NO: 90267 - DNA, 80 bp, synthetic construct; identical to SEQ ID NO: 32868
  misc_feature 1..80: note = Artificially Synthesized Probe
  source 1..80: mol_type = other DNA

SEQ ID NO: 90268 - DNA, 80 bp, synthetic construct
  misc_feature 1..80: note = Artificially Synthesized Probe
  source 1..80: mol_type = other DNA
tatgtaccacattttatttatccactcatctgttgatggacacttaggctgatttcatatcttggtcattgtgaatagtg

SEQ ID NO: 90269 - DNA, 80 bp, synthetic construct
  misc_feature 1..80: note = Artificially Synthesized Probe
  source 1..80: mol_type = other DNA
ctgtactaatttacattcctaccaacagtctgtgcaagagttctcttttctccacattcttgtcagcatccattattgcc

SEQ ID NO: 90270 - DNA, 80 bp, synthetic construct
  misc_feature 1..80: note = Artificially Synthesized Probe
  source 1..80: mol_type = other DNA
tcattttaggaactggattataatcaagacaacttctacatgaaaaaatagattaatagtgctccaagttagttcactgt

SEQ ID NO: 90271 - DNA, 80 bp, synthetic construct
  misc_feature 1..80: note = Artificially Synthesized Probe
  source 1..80: mol_type = other DNA
agatcttttgtccatttttaaatcagattttttttttttgcaattgagttatatgacctctttatatattctggttacta

SEQ ID NO: 90272 - DNA, 80 bp, synthetic construct; identical to SEQ ID NO: 32869
  misc_feature 1..80: note = Artificially Synthesized Probe
  source 1..80: mol_type = other DNA

SEQ ID NO: 90273 - DNA, 80 bp, synthetic construct
  misc_feature 1..80: note = Artificially Synthesized Probe
  source 1..80: mol_type = other DNA
tgcctttgttgaaaattagttgactataaatgtgtgggtttatttgtgggttctttattctgttccattggtctatgtgt

SEQ ID NO: 90274 - DNA, 80 bp, synthetic construct
  misc_feature 1..80: note = Artificially Synthesized Probe
  source 1..80: mol_type = other DNA
actgataaacaaattcattaaatttgcaggatacaacatcaacatacaaaattcagcagcatttcaatatgccaagagca

SEQ ID NO: 90275 - DNA, 80 bp, synthetic construct
  misc_feature 1..80: note = Artificially Synthesized Probe
  source 1..80: mol_type = other DNA
gaaaatgacattaaaaaatggaaaggtattccatgttcatggattgcaagaatcaatattgttaaaatgtccatatgatc

SEQ ID NO: 90276 - DNA, 80 bp, synthetic construct
  misc_feature 1..80: note = Artificially Synthesized Probe
  source 1..80: mol_type = other DNA
ggaagtgaataggcagcttcactcttctattccctggtgaaatttaggagaatggatgttttataatgggtagcagtttc

SEQ ID NO: 90277 - DNA, 80 bp, synthetic construct; identical to SEQ ID NO: 32870
  misc_feature 1..80: note = Artificially Synthesized Probe
  source 1..80: mol_type = other DNA

SEQ ID NO: 90278 - DNA, 80 bp, synthetic construct
  misc_feature 1..80: note = Artificially Synthesized Probe
  source 1..80: mol_type = other DNA
gttctgtacccctattctctaagaagctaaattgtgttagactgaaacccataaggaaccattgttcaaagttggcttgc

SEQ ID NO: 90279 - DNA, 80 bp, synthetic construct
  misc_feature 1..80: note = Artificially Synthesized Probe
  source 1..80: mol_type = other DNA
tccccataaaagcctaggaaattggtactatgacttttagtatgttcatttaatagatgaaaacacagaaactcaaagat

SEQ ID NO: 90280 - DNA, 80 bp, synthetic construct
  misc_feature 1..80: note = Artificially Synthesized Probe
  source 1..80: mol_type = other DNA
tgatgtggctgcttttaacaacaacttgtttgatctgtggaactttaaatgctggtggattccttgatttggaaaatgaa

SEQ ID NO: 90281 - DNA, 80 bp, synthetic construct; identical to SEQ ID NO: 32871
  misc_feature 1..80: note = Artificially Synthesized Probe
  source 1..80: mol_type = other DNA

SEQ ID NO: 90282 - DNA, 80 bp, synthetic construct
  misc_feature 1..80: note = Artificially Synthesized Probe
  source 1..80: mol_type = other DNA
aaattttgttgggcaattgctgtaatatgagttttatctcctttagagtcgaatggatgtgtatatgtcacatgctccca

SEQ ID NO: 90283 - DNA, 80 bp, synthetic construct
  misc_feature 1..80: note = Artificially Synthesized Probe
  source 1..80: mol_type = other DNA
gtttgtccttgctgccttctgtatgccttgatttccctggaatttaagagaaaggatgttatggtacagaccaagtagat

SEQ ID NO: 90284 - DNA, 80 bp, synthetic construct
  misc_feature 1..80: note = Artificially Synthesized Probe
  source 1..80: mol_type = other DNA
atgaacttttcctttaaaccaaggggggtattgctcatctttctgttgagccccgtttgtcataattgtaaaatgggtgg

SEQ ID NO: 90285 - DNA, 80 bp, synthetic construct; identical to SEQ ID NO: 32872
  misc_feature 1..80: note = Artificially Synthesized Probe
  source 1..80: mol_type = other DNA

SEQ ID NO: 90286 - DNA, 80 bp, synthetic construct
  misc_feature 1..80: note = Artificially Synthesized Probe
  source 1..80: mol_type = other DNA
tacatcatgtgtaatccttccatccagagataactagatgtactaacattttggtgtatttattccaattttctcagtat

SEQ ID NO: 90287 - DNA, 80 bp, synthetic construct
  misc_feature 1..80: note = Artificially Synthesized Probe
  source 1..80: mol_type = other DNA
taccaacagaaaaattagaattccatatgaaagttgaataagtattacccaacattgaagacttgggtcgtaaggcatct

SEQ ID NO: 90288 - DNA, 80 bp, synthetic construct
  misc_feature 1..80: note = Artificially Synthesized Probe
  source 1..80: mol_type = other DNA
ttcccaggctatcatattttaagctatttactggtgcaactatagattattaataagttgtttctgaggatcaaaacaat

SEQ ID NO: 90289 - DNA, 80 bp, synthetic construct
  misc_feature 1..80: note = Artificially Synthesized Probe
  source 1..80: mol_type = other DNA
tttgtgtgtcccatttaataagttttgacaaatatatttatttgtgtaaccacaccacaatctaaatataggacgtttat

SEQ ID NO: 90290 - DNA, 80 bp, synthetic construct; identical to SEQ ID NO: 32873
  misc_feature 1..80: note = Artificially Synthesized Probe
  source 1..80: mol_type = other DNA

SEQ ID NO: 90291 - DNA, 80 bp, synthetic construct
  misc_feature 1..80: note = Artificially Synthesized Probe
  source 1..80: mol_type = other DNA
cctctgcaagagtcaagctagttagatctttgtctgaaaaacaaatactgtccggtaatgaaaaccaaattgtgctattg

SEQ ID NO: 90292 - DNA, 80 bp, synthetic construct
  misc_feature 1..80: note = Artificially Synthesized Probe
  source 1..80: mol_type = other DNA
tttgatgccaatttttattacattctctccaaaaaactagtctcaacagtttgctctctcctcaagttcacagcattatc

SEQ ID NO: 90293 - DNA, 80 bp, synthetic construct
  misc_feature 1..80: note = Artificially Synthesized Probe
  source 1..80: mol_type = other DNA
tcttaactttaatctacctcaaaatgtctctatcttcttgattctctccttcctttctctatcagaaaatgatggtcctc

SEQ ID NO: 90294 - DNA, 80 bp, synthetic construct
  misc_feature 1..80: note = Artificially Synthesized Probe
  source 1..80: mol_type = other DNA
gtattgaagagggcttcttctacttactccttaaccttgtacaatgtagtttaggtcttcatctttttatcatagctacc

SEQ ID NO: 90295 - DNA, 80 bp, synthetic construct; identical to SEQ ID NO: 32874
  misc_feature 1..80: note = Artificially Synthesized Probe
  source 1..80: mol_type = other DNA

SEQ ID NO: 90296 - DNA, 80 bp, synthetic construct
  misc_feature 1..80: note = Artificially Synthesized Probe
  source 1..80: mol_type = other DNA
agaaatgacccttgtctccaaaacttccgcaatatgtccaaatttcctagcctgacattcagactttgattatctgcctc

SEQ ID NO: 90297 - DNA, 80 bp, synthetic construct
  misc_feature 1..80: note = Artificially Synthesized Probe
  source 1..80: mol_type = other DNA
ttcacaggacccctctttctatgaagccctcaggtggaaataattttttgcctttttttccattttatttttggagtgtt

SEQ ID NO: 90298 - DNA, 80 bp, synthetic construct
  misc_feature 1..80: note = Artificially Synthesized Probe
  source 1..80: mol_type = other DNA
cctttgtagttattgctttgaggagcttcctctcatgaatgcccttgctttctctcccacagagtcatccccctatatat

SEQ ID NO: 90299 - DNA, 80 bp, synthetic construct; identical to SEQ ID NO: 32875
  misc_feature 1..80: note = Artificially Synthesized Probe
  source 1..80: mol_type = other DNA

SEQ ID NO: 90300 - DNA, 80 bp, synthetic construct
  misc_feature 1..80: note = Artificially Synthesized Probe
  source 1..80: mol_type = other DNA
atctttgcatgggaccatctacaggtccttataaacaatgaggtagattaggcaaaaagataaacaagttgctactctat

SEQ ID NO: 90301 - DNA, 80 bp, synthetic construct
  misc_feature 1..80: note = Artificially Synthesized Probe
  source 1..80: mol_type = other DNA
gacagagtgtgggattaggaggagggcctgtaacttctttataaaagtttcttagctatcctgaagatgtatagacattt

SEQ ID NO: 90302 - DNA, 80 bp, synthetic construct
  misc_feature 1..80: note = Artificially Synthesized Probe
  source 1..80: mol_type = other DNA
gaaataaattgtacagcatcaatatcattttataatcatagggaggcttctttgtttagcatgtaatgccccctttacag

SEQ ID NO: 90303 - DNA, 80 bp, synthetic construct
  misc_feature 1..80: note = Artificially Synthesized Probe
  source 1..80: mol_type = other DNA
ttgatctatagttctattacttttaaagcaagaggggtctcaaaagacaattgacttgataatatagctttgtcagaaag

SEQ ID NO: 90304 - DNA, 80 bp, synthetic construct; identical to SEQ ID NO: 32876
  misc_feature 1..80: note = Artificially Synthesized Probe
  source 1..80: mol_type = other DNA

SEQ ID NO: 90305 - DNA, 80 bp, synthetic construct
  misc_feature 1..80: note = Artificially Synthesized Probe
  source 1..80: mol_type = other DNA
caaatccacaagctgctggcccctggagccattcttctctcaaaactagcattcatcaatttaatgtatacgtattgatg

SEQ ID NO: 90306 - DNA, 80 bp, synthetic construct
  misc_feature 1..80: note = Artificially Synthesized Probe
  source 1..80: mol_type = other DNA
ttaaaacaattatatgactttataaaatatttgtatataatgaaaactgaagcaatataaaaaataaaattagttgtgtc

SEQ ID NO: 90307 - DNA, 80 bp, synthetic construct; identical to SEQ ID NO: 32858
  misc_feature 1..80: note = Artificially Synthesized Probe
  source 1..80: mol_type = other DNA

SEQ ID NO: 90308 - DNA, 80 bp, synthetic construct
  misc_feature 1..80: note = Artificially Synthesized Probe
  source 1..80: mol_type = other DNA
tctcacctcttggctctgtgaccttgagcaggtcttaaatctctctaagcctttgtttttttaattgataaaatgaggat

SEQ ID NO: 90309 - DNA, 80 bp, synthetic construct
  misc_feature 1..80: note = Artificially Synthesized Probe
  source 1..80: mol_type = other DNA
tgcattgacctcctgcttctcaggaggaatttaatgctagatatgcatcaacagagtttatcaaaattggtttgaattat

SEQ ID NO: 90310 - DNA, 80 bp, synthetic construct
  misc_feature 1..80: note = Artificially Synthesized Probe
  source 1..80: mol_type = other DNA
gtcacctcattactgatttatcatgtggaaaattgctttgtcccaggaaaatggatcctctcattgtcagaaggagattt

SEQ ID NO: 90311 - DNA, 80 bp, synthetic construct
  misc_feature 1..80: note = Artificially Synthesized Probe
  source 1..80: mol_type = other DNA
actttgatctaagggacagacggttcatagaatgaaagagtatggtgtcaataaggcttgaattctagaatgaggagcca

SEQ ID NO: 90312 - DNA, 80 bp, synthetic construct; identical to SEQ ID NO: 32859
  misc_feature 1..80: note = Artificially Synthesized Probe
  source 1..80: mol_type = other DNA

SEQ ID NO: 90313 - DNA, 80 bp, synthetic construct
  misc_feature 1..80: note = Artificially Synthesized Probe
  source 1..80: mol_type = other DNA
catcctggaactttttgcttacttttgtttttattttttgctaaatctggcaatcccaggcacatgtgtgaaggagctgt

SEQ ID NO: 90314 - DNA, 80 bp, synthetic construct
  misc_feature 1..80: note = Artificially Synthesized Probe
  source 1..80: mol_type = other DNA
tcaccatttcacaaatgatgaaattaaggcacaaccggttatgttaagaggcctaaagtccacaaatagcaagctgacag

SEQ ID NO: 90315 - DNA, 80 bp, synthetic construct
  misc_feature 1..80: note = Artificially Synthesized Probe
  source 1..80: mol_type = other DNA
gagctgagcatattattgtagtttttaaatgctctccactggacagaggatggggatttgaatagaaatttggtgaggaa

SEQ ID NO: 90316 - DNA, 80 bp, synthetic construct; identical to SEQ ID NO: 32860
  misc_feature 1..80: note = Artificially Synthesized Probe
  source 1..80: mol_type = other DNA

SEQ ID NO: 90317 - DNA, 80 bp, synthetic construct
  misc_feature 1..80: note = Artificially Synthesized Probe
  source 1..80: mol_type = other DNA
cctgattataatgctctatactattgacaagggaaaagtgaaaacagtttttgttttaccatgtgtgtatgtgtgtgtgt

SEQ ID NO: 90318 - DNA, 80 bp, synthetic construct
  misc_feature 1..80: note = Artificially Synthesized Probe
  source 1..80: mol_type = other DNA
ttgagaattatgctaatggaagccttggattccttctagcagatgcaggttatgatgtatggatgggaaacagtcgggga

SEQ ID NO: 90319 - DNA, 80 bp, synthetic construct
  misc_feature 1..80: note = Artificially Synthesized Probe
  source 1..80: mol_type = other DNA
cttcaaccagatagctaatgtatgcaaagctatttagcttcagaagtaaactctgcatttctagaagttaaatattactt

SEQ ID NO: 90320 - DNA, 80 bp, synthetic construct
  misc_feature 1..80: note = Artificially Synthesized Probe
  source 1..80: mol_type = other DNA
atagctccttgtagtttctgttaagatctcaaaggagggtaacagcaagaagctctgatttttcactgattctcccacag

SEQ ID NO: 90321 - DNA, 80 bp, synthetic construct; identical to SEQ ID NO: 32861
  misc_feature 1..80: note = Artificially Synthesized Probe
  source 1..80: mol_type = other DNA

SEQ ID NO: 90322 - DNA, 80 bp, synthetic construct
  misc_feature 1..80: note = Artificially Synthesized Probe
  source 1..80: mol_type = other DNA
atgaagaagaatcttttttgatatcttgtttcttttaatggaagagttttctgctgtcaccagaggacaggctgatgcct

SEQ ID NO: 90323 - DNA, 80 bp, synthetic construct
  misc_feature 1..80: note = Artificially Synthesized Probe
  source 1..80: mol_type = other DNA
tctgagttcttgggcaggggcaagcatcaggaaatattgaatcattagtctttaggaggtgtcacaacaattctcctatt

SEQ ID NO: 90324 - DNA, 80 bp, synthetic construct
  misc_feature 1..80: note = Artificially Synthesized Probe
  source 1..80: mol_type = other DNA
tatattaaatatatatctatatatccatgtggacaggaatactactactaacaacatcttactgagcacccactggcagc

SEQ ID NO: 90325 - DNA, 80 bp, synthetic construct; identical to SEQ ID NO: 32862
  misc_feature 1..80: note = Artificially Synthesized Probe
  source 1..80: mol_type = other DNA

SEQ ID NO: 90326 - DNA, 80 bp, synthetic construct
  misc_feature 1..80: note = Artificially Synthesized Probe
  source 1..80: mol_type = other DNA
aaaaagctacaatagcctacatataattggataaataatgaaatacacattgaatctaagtaaacagcatagaatctggg

SEQ ID NO: 90327 - DNA, 80 bp, synthetic construct
  misc_feature 1..80: note = Artificially Synthesized Probe
  source 1..80: mol_type = other DNA
tttcattggacattcacttggcactacaataggtatgtttatgagggtcactgttaggtgtgtttttgagggtcagtttt

SEQ ID NO: 90328 - DNA, 80 bp, synthetic construct
  misc_feature 1..80: note = Artificially Synthesized Probe
  source 1..80: mol_type = other DNA
tcctgggtctctggtcacagcagcatattgactacggtgatgcaacttcccaggaataacatgtgttccaaattcaaaga

SEQ ID NO: 90329 - DNA, 80 bp, synthetic construct; identical to SEQ ID NO: 32863
  misc_feature 1..80: note = Artificially Synthesized Probe
  source 1..80: mol_type = other DNA

SEQ ID NO: 90330 - DNA, 80 bp, synthetic construct
  misc_feature 1..80: note = Artificially Synthesized Probe
  source 1..80: mol_type = other DNA
ccaggtattttggaaagaaatcaataatctagttccaagtaaaagttgaaaggaacccacactaataaaagctttgaatt

SEQ ID NO: 90331 - DNA, 80 bp, synthetic construct; identical to SEQ ID NO: 32856
  misc_feature 1..80: note = Artificially Synthesized Probe
  source 1..80: mol_type = other DNA

SEQ ID NO: 90332 - DNA, 80 bp, synthetic construct
  misc_feature 1..80: note = Artificially Synthesized Probe
  source 1..80: mol_type = other DNA
caagctcagaacaggcagttagcatcagtcagcatatactaaaaaagtatcaaagaactcataggagatcaaaaatgcca

SEQ ID NO: 90333 - DNA, 80 bp, synthetic construct
  misc_feature 1..80: note = Artificially Synthesized Probe
  source 1..80: mol_type = other DNA
gttcagaacacagattcaaaccagatgtatctgatttcaccaatagggtgtgtaaggattccggagaaatggtgtagaga

SEQ ID NO: 90334 - DNA, 80 bp, synthetic construct; identical to SEQ ID NO: 32864
  misc_feature 1..80: note = Artificially Synthesized Probe
  source 1..80: mol_type = other DNA

SEQ ID NO: 90335 - DNA, 80 bp, synthetic construct
  misc_feature 1..80: note = Artificially Synthesized Probe
  source 1..80: mol_type = other DNA
gggaagtactattcctgattcagagtctttttatcaattgttcagtcaattatttcagttcttctttttctggccaagac

SEQ ID NO: 90336 - DNA, 80 bp, synthetic construct
  misc_feature 1..80: note = Artificially Synthesized Probe
  source 1..80: mol_type = other DNA
tgctaatctccatcctcacagatatacaaaggggtgcaatgctactgctgaaagagcaaagcaaatggagatgcctggtc

SEQ ID NO: 90337 - DNA, 80 bp, synthetic construct
  misc_feature 1..80: note = Artificially Synthesized Probe
  source 1..80: mol_type = other DNA
atgctgcagaaagaaatcaattcacctcctgtgactgattatttgcttctggaaactctgtgattcattctggcatctca

SEQ ID NO: 90338 - DNA, 80 bp, synthetic construct; identical to SEQ ID NO: 32865
  misc_feature 1..80: note = Artificially Synthesized Probe
  source 1..80: mol_type = other DNA

SEQ ID NO: 90339 - DNA, 80 bp, synthetic construct
  misc_feature 1..80: note = Artificially Synthesized Probe
  source 1..80: mol_type = other DNA
aaatgaattttgccttgggtcctacgatctcattcaaatatcccacgggcatttttaccaggttttttctacttccaaat

SEQ ID NO: 90340 - DNA, 80 bp, synthetic construct
  misc_feature 1..80: note = Artificially Synthesized Probe
  source 1..80: mol_type = other DNA
tgtatgtgtgtccctgcgtgtgcgcatgtctgtgccatagtatctgcaggttctgtaatacaatttactatacaaggtca

SEQ ID NO: 90341 - DNA, 80 bp, synthetic construct
  misc_feature 1..80: note = Artificially Synthesized Probe
  source 1..80: mol_type = other DNA
cccataatcactgatgtgtccaattttgacattagaaaaacctgattaatatattccttccaatatggaaacttgcccta

SEQ ID NO: 90342 - DNA, 80 bp, synthetic construct; identical to SEQ ID NO: 32866
  misc_feature 1..80: note = Artificially Synthesized Probe
  source 1..80: mol_type = other DNA

SEQ ID NO: 90343 - DNA, 80 bp, synthetic construct; identical to SEQ ID NO: 32857
  misc_feature 1..80: note = Artificially Synthesized Probe
  source 1..80: mol_type = other DNA

SEQ ID NO: 90344 - DNA, 80 bp, synthetic construct
  misc_feature 1..80: note = Artificially Synthesized Probe
  source 1..80: mol_type = other DNA
atagggcctaataatagttaggtctgataatactatggtctgataatagttttattgtattgtttactgagagcacaaat

SEQ ID NO: 90345 - DNA, 80 bp, synthetic construct
  misc_feature 1..80: note = Artificially Synthesized Probe
  source 1..80: mol_type = other DNA
aacattagaggtacgactttattaaatctgtactttctgacccatttatccaagtttagtgacagtttgctctaaactgc

SEQ ID NO: 90346 - DNA, 80 bp, synthetic construct
  misc_feature 1..80: note = Artificially Synthesized Probe
  source 1..80: mol_type = other DNA
ttgcattaggcttcagaataaatatattaaccagcttcagtcaaagtctgcctagaatctgaccctgacaagacccagtg

SEQ ID NO: 90347 - DNA, 80 bp, synthetic construct
  misc_feature 1..80: note = Artificially Synthesized Probe
  source 1..80: mol_type = other DNA
gccccgaaagcccgagggcagtctggagacaccagcttgtttttatatggtagagtcatccatagctagatacaaacaca

SEQ ID NO: 90348 - DNA, 80 bp, synthetic construct
  misc_feature 1..80: note = Artificially Synthesized Probe
  source 1..80: mol_type = other DNA
gaaaagggatgcgctccataggccctcctcctgggttgccagtatccctactagggaagggagtttggattttccctgcc

SEQ ID NO: 90349 - DNA, 80 bp, synthetic construct; identical to SEQ ID NO: 32888
  misc_feature 1..80: note = Artificially Synthesized Probe
  source 1..80: mol_type = other DNA

SEQ ID NO: 90350 - DNA, 80 bp, synthetic construct; identical to SEQ ID NO: 32878
  misc_feature 1..80: note = Artificially Synthesized Probe
  source 1..80: mol_type = other DNA

SEQ ID NO: 90351 - DNA, 80 bp, synthetic construct
  misc_feature 1..80: note = Artificially Synthesized Probe
  source 1..80: mol_type = other DNA
taataaaagaactacaatattatttggagggggaacaggaattaaatgaaattcctgcttaggggaagcattatgccaga

SEQ ID NO: 90352 - DNA, 80 bp, synthetic construct
  misc_feature 1..80: note = Artificially Synthesized Probe
  source 1..80: mol_type = other DNA
aagtttatattctttctcttgaaaaaatacctctttttaaaagtattattcctctgtttagttttagattgttatgaaaa

SEQ ID NO: 90353 - DNA, 80 bp, synthetic construct
  misc_feature 1..80: note = Artificially Synthesized Probe
  source 1..80: mol_type = other DNA
aatagttgttcatcttcactgagcattcattataccccatgcactcttctggactctacgcatatcatcccatttaatcc

SEQ ID NO: 90354 - DNA, 80 bp, synthetic construct; identical to SEQ ID NO: 32889
  misc_feature 1..80: note = Artificially Synthesized Probe
  source 1..80: mol_type = other DNA

SEQ ID NO: 90355 - DNA, 80 bp, synthetic construct
  misc_feature 1..80: note = Artificially Synthesized Probe
  source 1..80: mol_type = other DNA
gtgggcgcctgtagtcccagctactcaggaggctgaggcaggagaatggcttgaacctgggaggcagagcttgcagtgag

SEQ ID NO: 90356 - DNA, 80 bp, synthetic construct
  misc_feature 1..80: note = Artificially Synthesized Probe
  source 1..80: mol_type = other DNA
taataatgtgcatggggacatttccatctgagaagtggctgtgccattggggtcaggaaaggagtttgaaaggtaccaaa

SEQ ID NO: 90357 - DNA, 80 bp, synthetic construct; identical to SEQ ID NO: 32890
  misc_feature 1..80: note = Artificially Synthesized Probe
  source 1..80: mol_type = other DNA

SEQ ID NO: 90358 - DNA, 80 bp, synthetic construct
  misc_feature 1..80: note = Artificially Synthesized Probe
  source 1..80: mol_type = other DNA
acactatttgttaaatgctaagcacgggccaaagtaagcatccataaatgtcagctgttattactgctgttgttactaat

SEQ ID NO: 90359 - DNA, 80 bp, synthetic construct
  misc_feature 1..80: note = Artificially Synthesized Probe
  source 1..80: mol_type = other DNA
ttaacgtgcactgcaggaactttcagaagtcataggacttctgaaaattaagaagcaaatggtaacaaccaacatgtcaa

SEQ ID NO: 90360 - DNA, 80 bp, synthetic construct
  misc_feature 1..80: note = Artificially Synthesized Probe
  source 1..80: mol_type = other DNA
ggctaccatgctggattccaggagggttagattaaaatgaccaaaaacacttaagaccaaaagattattgggtcgggaga

SEQ ID NO: 90361 - DNA, 80 bp, synthetic construct
  misc_feature 1..80: note = Artificially Synthesized Probe
  source 1..80: mol_type = other DNA
tggatttaaggagtgatggttacctttgtacatacttattagatatgaggttaaaatatcatattttataaactttaatg

SEQ ID NO: 90362 - DNA, 80 bp, synthetic construct
  misc_feature 1..80: note = Artificially Synthesized Probe
  source 1..80: mol_type = other DNA
tcatctaaggtgcccttgggaaagaaagcagaaaaagaaaaattactgatttttcctcctcttctttgaatggtcacaaa

SEQ ID NO: 90363 - DNA, 80 bp, synthetic construct; identical to SEQ ID NO: 32891
  misc_feature 1..80: note = Artificially Synthesized Probe
  source 1..80: mol_type = other DNA

SEQ ID NO: 90364 - DNA, 80 bp, synthetic construct
  misc_feature 1..80: note = Artificially Synthesized Probe
  source 1..80: mol_type = other DNA
cgtgattcttaataggaacttttcgtaatatgctggtgtttagcctggagacatggatcatggtttatattttttcagtc

SEQ ID NO: 90365 - DNA, 80 bp, synthetic construct
  misc_feature 1..80: note = Artificially Synthesized Probe
  source 1..80: mol_type = other DNA
aggtgggcaatggtgactttgtgagatggaacaaacaagtgccagcacagatagcagcaaatttatagcttttgaatgca

SEQ ID NO: 90366 - DNA, 80 bp, synthetic construct
  misc_feature 1..80: note = Artificially Synthesized Probe
  source 1..80: mol_type = other DNA
atgataaattacttttacactgagggcccttccctgctcctgagtaaatttcacacttatataaatcaggcataattttc

SEQ ID NO: 90367 - DNA, 80 bp, synthetic construct; identical to SEQ ID NO: 32892
  misc_feature 1..80: note = Artificially Synthesized Probe
  source 1..80: mol_type = other DNA

SEQ ID NO: 90368 - DNA, 80 bp, synthetic construct
  misc_feature 1..80: note = Artificially Synthesized Probe
  source 1..80: mol_type = other DNA
tcttggcttatagtttggaagcaatgggagttgggagctccaaatcattcatgggacaaatatcctgtcttatattgctt

SEQ ID NO: 90369 - DNA, 80 bp, synthetic construct
  misc_feature 1..80: note = Artificially Synthesized Probe
  source 1..80: mol_type = other DNA
ggtaattctaatagctaacacatattgggcatacggtttttcacatgtctaaacagtccatgtttccttaaaaatgcaga

SEQ ID NO: 90370 - DNA, 80 bp, synthetic construct; identical to SEQ ID NO: 32893
  misc_feature 1..80: note = Artificially Synthesized Probe
  source 1..80: mol_type = other DNA

SEQ ID NO: 90371 - DNA, 80 bp, synthetic construct
  misc_feature 1..80: note = Artificially Synthesized Probe
  source 1..80: mol_type = other DNA
gaatttgctcatgttaacatctctcaagattcaaatgcttcagaattctcagtgcagccatctcctgccctccatggtgg

SEQ ID NO: 90372 - DNA, 80 bp, synthetic construct
  misc_feature 1..80: note = Artificially Synthesized Probe
  source 1..80: mol_type = other DNA
gcatttaaaattgacattgctgacattcttaaatttgagtgaccaggaactatctaaaaattagtttaggccaggcatgg

SEQ ID NO: 90373 - DNA, 80 bp, synthetic construct
  misc_feature 1..80: note = Artificially Synthesized Probe
  source 1..80: mol_type = other DNA
agggagaaaaggagtcatttgagaatttagcatttcaccattccactcctgcatcaatgggtctctggacatttctattt

SEQ ID NO: 90374 - DNA, 80 bp, synthetic construct
  misc_feature 1..80: note = Artificially Synthesized Probe
  source 1..80: mol_type = other DNA
ctaatttccctgaaggtcacgcagattttccttcagctctagagttcgtgcaaatgtcttggttgatcttcaattactta

SEQ ID NO: 90375 - DNA, 80 bp, synthetic construct
  misc_feature 1..80: note = Artificially Synthesized Probe
  source 1..80: mol_type = other DNA
aaggaaaggagaaaagcaaggaatctggaaatacttgtaacaataattaagaacacaaattctagagtcagactgctttc

SEQ ID NO: 90376 - DNA, 80 bp, synthetic construct; identical to SEQ ID NO: 32894
  misc_feature 1..80: note = Artificially Synthesized Probe
  source 1..80: mol_type = other DNA

SEQ ID NO: 90377 - DNA, 80 bp, synthetic construct
  misc_feature 1..80: note = Artificially Synthesized Probe
  source 1..80: mol_type = other DNA
taaaaaaaattcactcctctcaaatataatattgtgctccatcctgctagactggctttctgtggctcatatggatctgg

SEQ ID NO: 90378 - DNA, 80 bp, synthetic construct
  misc_feature 1..80: note = Artificially Synthesized Probe
  source 1..80: mol_type = other DNA
ggagttgatggcctctctcctacaggctcctgtgaacccagggataagtgtctaggatcttggactcctagggggaaaca

SEQ ID NO: 90379 - DNA, 80 bp, synthetic construct; identical to SEQ ID NO: 32895
  misc_feature 1..80: note = Artificially Synthesized Probe
  source 1..80: mol_type = other DNA

SEQ ID NO: 90380 - DNA, 80 bp, synthetic construct
  misc_feature 1..80: note = Artificially Synthesized Probe
  source 1..80: mol_type = other DNA
ctgtctctcctccccatctccacaaacctagttggagtgccctgaagccagtttccaagtcctctgtgattttccctcaa

SEQ ID NO: 90381 - DNA, 80 bp, synthetic construct
  misc_feature 1..80: note = Artificially Synthesized Probe
  source 1..80: mol_type = other DNA
ttaaagactgattctcctgtcacccaggctggagtgcagtggtgcaatcttagctcactgcaacctccacttcttgggcc

SEQ ID NO: 90382 - DNA, 80 bp, synthetic construct
  misc_feature 1..80: note = Artificially Synthesized Probe
  source 1..80: mol_type = other DNA
ccaaagtgctgggattacaggtgtgagccactggccccctcatatatttatttctttttttattttattttttatttcaa

SEQ ID NO: 90383 - DNA, 80 bp, synthetic construct
  misc_feature 1..80: note = Artificially Synthesized Probe
  source 1..80: mol_type = other DNA
tctcccccaagtgcccaaagtccattatattattcttatgcctttgcatcctcatagcttagctcccacttatatgtgaa

SEQ ID NO: 90384 - DNA, 80 bp, synthetic construct
  misc_feature 1..80: note = Artificially Synthesized Probe
  source 1..80: mol_type = other DNA
tgattgacccatatggatgagttaaatagagatggcaatgtcttatccttcctttaaagaagattccagtgacttaaact

SEQ ID NO: 90385 - DNA, 80 bp, synthetic construct; identical to SEQ ID NO: 32896
  misc_feature 1..80: note = Artificially Synthesized Probe
  source 1..80: mol_type = other DNA

SEQ ID NO: 90386 - DNA, 80 bp, synthetic construct
  misc_feature 1..80: note = Artificially Synthesized Probe
  source 1..80: mol_type = other DNA
ggtgagtgtgttgatgaaataattacaagacttttgaaatggcaagaacatgacactgaggagaattaaaacaaacacaa

SEQ ID NO: 90387 - DNA, 80 bp, synthetic construct
  misc_feature 1..80: note = Artificially Synthesized Probe
  source 1..80: mol_type = other DNA
cttgttgcccaggctggagtgcaatggcgtgatcttggctacctacgcctgcaacctacgcctcctgggttcaagcaagt

SEQ ID NO: 90388 - DNA, 80 bp, synthetic construct; identical to SEQ ID NO: 32897
  misc_feature 1..80: note = Artificially Synthesized Probe
  source 1..80: mol_type = other DNA

SEQ ID NO: 90389 - DNA, 80 bp, synthetic construct
  misc_feature 1..80: note = Artificially Synthesized Probe
  source 1..80: mol_type = other DNA
agattggctttgtgttatgggcttggctgaaaatttataggacattgagtcaccaatctttcactgaagcttgagtgcca

SEQ ID NO: 90390 - DNA, 80 bp, synthetic construct
  misc_feature 1..80: note = Artificially Synthesized Probe
  source 1..80: mol_type = other DNA
tgtctcccgcctcctgtgacctagtttgctgaataagcaacaatacagcctaggaaactaaaaaacaagtcactgaagca

SEQ ID NO: 90391 - DNA, 80 bp, synthetic construct
  misc_feature 1..80: note = Artificially Synthesized Probe
  source 1..80: mol_type = other DNA
cagtcagacactttgagatgaccatttttgcctgagcgtagggtatgtttattattctttggaaaatcagttccccatta

SEQ ID NO: 90392 - DNA, 80 bp, synthetic construct; identical to SEQ ID NO: 32898
  misc_feature 1..80: note = Artificially Synthesized Probe
  source 1..80: mol_type = other DNA

SEQ ID NO: 90393 - DNA, 80 bp, synthetic construct
  misc_feature 1..80: note = Artificially Synthesized Probe
  source 1..80: mol_type = other DNA
catgaaaaaggactacagagacctaaccaataccaagattttaaagcagacacatgtctatgctcattttattatttcaa

SEQ ID NO: 90394 - DNA, 80 bp, synthetic construct
  misc_feature 1..80: note = Artificially Synthesized Probe
  source 1..80: mol_type = other DNA
tcttctaaattctagaactacaaatctcagccagtaagggctgcatatttttctctagggatcttttaatgggacctctc

SEQ ID NO: 90395 - DNA, 80 bp, synthetic construct
  misc_feature 1..80: note = Artificially Synthesized Probe
  source 1..80: mol_type = other DNA
ttaatttttctctctgtagatatatgtttgcagtggcaaaaaataagaacaaattagttcaggttatcgatttgcaaatt

SEQ ID NO: 90396 - DNA, 80 bp, synthetic construct
  misc_feature 1..80: note = Artificially Synthesized Probe
  source 1..80: mol_type = other DNA
caggacattttatggatgtgtccaaaccagtcgtcaaagacatcggttggggagcgagtgaagtatgatgttatttcaaa

SEQ ID NO: 90397 - DNA, 80 bp, synthetic construct; identical to SEQ ID NO: 32899
  misc_feature 1..80: note = Artificially Synthesized Probe
  source 1..80: mol_type = other DNA

SEQ ID NO: 90398 - DNA, 80 bp, synthetic construct
  misc_feature 1..80: note = Artificially Synthesized Probe
  source 1..80: mol_type = other DNA
attgctcaggaaagctattcaaaggcagtggtagccagtttgtaagattccccagtgacccctgccccgtggcattcaca

SEQ ID NO: 90399 - DNA, 80 bp, synthetic construct
  misc_feature 1..80: note = Artificially Synthesized Probe
  source 1..80: mol_type = other DNA
gaaccaagaggaaaagtcactgccttggggaaagtcactgccatgttatgagcagtcccaaggaaaggcatacatggcag

SEQ ID NO: 90400 - DNA, 80 bp, synthetic construct
  misc_feature 1..80: note = Artificially Synthesized Probe
  source 1..80: mol_type = other DNA
cagatccctgatcctcggaaactgtgcgagacaataaatgtttgtaagttttcaggctatttcttatgcagcaataggta

SEQ ID NO: 90401 - DNA, 80 bp, synthetic construct; identical to SEQ ID NO: 32900
  misc_feature 1..80: note = Artificially Synthesized Probe
  source 1..80: mol_type = other DNA

SEQ ID NO: 90402 - DNA, 80 bp, synthetic construct
  misc_feature 1..80: note = Artificially Synthesized Probe
  source 1..80: mol_type = other DNA
ccacccactttggaataaagaggacatataatttgcctaaggtcacatagcactctctaaatcagtacagtattttagac

SEQ ID NO: 90403 - DNA, 80 bp, synthetic construct
  misc_feature 1..80: note = Artificially Synthesized Probe
  source 1..80: mol_type = other DNA
ggataaatggtactcactgaggacaggaatatgctgacattatctcaatttcctcctccctcctgttgttctcctttgga

SEQ ID NO: 90404 - DNA, 80 bp, synthetic construct
  misc_feature 1..80: note = Artificially Synthesized Probe
  source 1..80: mol_type = other DNA
gctcagcattccaagaagtattgataactcttcaagagcaaaagtcatttaaattaaacttctctggccgggcatggtag

SEQ ID NO: 90405 - DNA, 80 bp, synthetic construct
  misc_feature 1..80: note = Artificially Synthesized Probe
  source 1..80: mol_type = other DNA
ataaaaaatttcccccaagactaactcattttggccctgtattttatcatagattaagatgaccaacaagtcaccaggac

SEQ ID NO: 90406 - DNA, 80 bp, synthetic construct; identical to SEQ ID NO: 32901
  misc_feature 1..80: note = Artificially Synthesized Probe
  source 1..80: mol_type = other DNA

SEQ ID NO: 90407 - DNA, 80 bp, synthetic construct; identical to SEQ ID NO: 32879
  misc_feature 1..80: note = Artificially Synthesized Probe
  source 1..80: mol_type = other DNA

SEQ ID NO: 90408 - DNA, 80 bp, synthetic construct
  misc_feature 1..80: note = Artificially Synthesized Probe
  source 1..80: mol_type = other DNA
tgcagaagcttcattgtcttcattgtaaagccacttctgctaacatcagaaatgctgatttctcattagagaaactgctt

SEQ ID NO: 90409 - DNA, 80 bp, synthetic construct
  misc_feature 1..80: note = Artificially Synthesized Probe
  source 1..80: mol_type = other DNA
tattttccagggtgtcacactatgtaatgttgagatttaaccaagattaatttgttgaccagtaggctgtcctgaaataa

SEQ ID NO: 90410 - DNA, 80 bp, synthetic construct; identical to SEQ ID NO: 32902
  misc_feature 1..80: note = Artificially Synthesized Probe
  source 1..80: mol_type = other DNA

SEQ ID NO: 90411 - DNA, 80 bp, synthetic construct
  misc_feature 1..80: note = Artificially Synthesized Probe
  source 1..80: mol_type = other DNA
ttaaacaacagactttctacagttattcacacatgtgttttaaagacatcaggagaaaaatggtctccagatctaaaatg

SEQ ID NO: 90412 - DNA, 80 bp, synthetic construct
  misc_feature 1..80: note = Artificially Synthesized Probe
  source 1..80: mol_type = other DNA
atgtgacagattgtatctatttgcagattcaaagctgaagatgccatcttctctggggtcaagggcaggtcagtgttatt

SEQ ID NO: 90413 - DNA, 80 bp, synthetic construct
  misc_feature 1..80: note = Artificially Synthesized Probe
  source 1..80: mol_type = other DNA
gacagtgtatgttgtgttcaaaatcaacagttctaaacaagaatctaaagatcccctagggcaatctctggactttgggg

SEQ ID NO: 90414 - DNA, 80 bp, synthetic construct
  misc_feature 1..80: note = Artificially Synthesized Probe
  source 1..80: mol_type = other DNA
tgcttttgtgacttggagtccgacttttagcaagtgacttgcggagtttgtgcgtactgcctgacagctctggtcagtgt

SEQ ID NO: 90415 - DNA, 80 bp, synthetic construct
  misc_feature 1..80: note = Artificially Synthesized Probe
  source 1..80: mol_type = other DNA
attaacattttttctccttccagatggtgatgtgaaaaagggcaaccgttggaactcagtcacccaagttaatatcgtgt

SEQ ID NO: 90416 - DNA, 80 bp, synthetic construct; identical to SEQ ID NO: 32903
  misc_feature 1..80: note = Artificially Synthesized Probe
  source 1..80: mol_type = other DNA

SEQ ID NO: 90417 - DNA, 80 bp, synthetic construct
  misc_feature 1..80: note = Artificially Synthesized Probe
  source 1..80: mol_type = other DNA
aagttaaggtgtagacaagacgaattgatcagggctcaagatttgggtttatttttatagttgctttgatgtgaaaggag

SEQ ID NO: 90418 - DNA, 80 bp, synthetic construct
  misc_feature 1..80: note = Artificially Synthesized Probe
  source 1..80: mol_type = other DNA
tagtctgaagtctttatttaccatggggcctttcctaatcatttctttcactacattctatatttggaggtcaagaattt

SEQ ID NO: 90419 - DNA, 80 bp, synthetic construct
  misc_feature 1..80: note = Artificially Synthesized Probe
  source 1..80: mol_type = other DNA
gggaatgctatattggactattcttgaaacaatatatataaaatcaagcaaggcacgtgacagtcaggctttaggttgga

SEQ ID NO: 90420 - DNA, 80 bp, synthetic construct
  misc_feature 1..80: note = Artificially Synthesized Probe
  source 1..80: mol_type = other DNA
ctaaccttcccgtctttgagtctcattagttataaaacaggatgctttcctgtggagatttccaccaggaaatacctcct

SEQ ID NO: 90421 - DNA, 80 bp, synthetic construct; identical to SEQ ID NO: 32904
  misc_feature 1..80: note = Artificially Synthesized Probe
  source 1..80: mol_type = other DNA

SEQ ID NO: 90422 - DNA, 80 bp, synthetic construct
  misc_feature 1..80: note = Artificially Synthesized Probe
  source 1..80: mol_type = other DNA
tgcagattaagtttgcttactgccttaagtaactaaaataaaacaaaattaaaatactcctcaccttgtttaaggctgta

SEQ ID NO: 90423 - DNA, 80 bp, synthetic construct
  misc_feature 1..80: note = Artificially Synthesized Probe
  source 1..80: mol_type = other DNA
tcactactctgcagccctgttttgcaacaccaaacattggttacaaatggaaaaaaaaaaaaaaaggtcaatcaacagtt

SEQ ID NO: 90424 - DNA, 80 bp, synthetic construct
  misc_feature 1..80: note = Artificially Synthesized Probe
  source 1..80: mol_type = other DNA
caaaatacttatgtgaaaaagatataatgccccgatgagtgagtgtctcacattccaaatagatcgagctatcacattaa

SEQ ID NO: 90425 - DNA, 80 bp, synthetic construct; identical to SEQ ID NO: 32905
  misc_feature 1..80: note = Artificially Synthesized Probe
  source 1..80: mol_type = other DNA

SEQ ID NO: 90426 - DNA, 80 bp, synthetic construct
  misc_feature 1..80: note = Artificially Synthesized Probe
  source 1..80: mol_type = other DNA
aattactgcaagttttcatggtcatgatatgtggctagggaaggattaactgcctagacaaaagtggcatgaagaaaata

SEQ ID NO: 90427 - DNA, 80 bp, synthetic construct
  misc_feature 1..80: note = Artificially Synthesized Probe
  source 1..80: mol_type = other DNA
ttatattttcacttctctttttctatcctgtagtaacttatgaaggcctggtctaaaggcagggctatggctgctttctc

SEQ ID NO: 90428 - DNA, 80 bp, synthetic construct
  misc_feature 1..80: note = Artificially Synthesized Probe
  source 1..80: mol_type = other DNA
gcttctctgcataaaaaccagtggtttgtatccatcagagtctttgactggactgctttcctttgattaatcagaaaact

SEQ ID NO: 90429 - DNA, 80 bp, synthetic construct; identical to SEQ ID NO: 32906
  misc_feature 1..80: note = Artificially Synthesized Probe
  source 1..80: mol_type = other DNA

SEQ ID NO: 90430 - DNA, 80 bp, synthetic construct
  misc_feature 1..80: note = Artificially Synthesized Probe
  source 1..80: mol_type = other DNA
gtaagcacattgctttaggagaaatgttctttcatttttccccctggttttccttctcaagtcatattttggagggccaa

SEQ ID NO: 90431 - DNA, 80 bp, synthetic construct
  misc_feature 1..80: note = Artificially Synthesized Probe
  source 1..80: mol_type = other DNA
taggagagccttcaggtagtactagagatgctggagcctctgaggacctctgcactgagattcctaatgttaatctggcc

SEQ ID NO: 90432 - DNA, 80 bp, synthetic construct
  misc_feature 1..80: note = Artificially Synthesized Probe
  source 1..80: mol_type = other DNA
tgatcagagaaatcagcaagaggcctccctgctgaagttttcagtttttcattttgtttcctatttcttttctttttttt

SEQ ID NO: 90433 - DNA, 80 bp, synthetic construct
  misc_feature 1..80: note = Artificially Synthesized Probe
  source 1..80: mol_type = other DNA
cattcaccaatctgtcaaatgcattatattctagatagagtataatgaatgtatgaacaaatataatgcatgcctgggtg

SEQ ID NO: 90434 - DNA, 80 bp, synthetic construct; identical to SEQ ID NO: 32907
  misc_feature 1..80: note = Artificially Synthesized Probe
  source 1..80: mol_type = other DNA

SEQ ID NO: 90435 - DNA, 80 bp, synthetic construct
  misc_feature 1..80: note = Artificially Synthesized Probe
  source 1..80: mol_type = other DNA
catccctggaacttacatttcagtaaagggaaagaacatgcacatagacaactggagcatacggtagaaaacattaagcc

SEQ ID NO: 90436 - DNA, 80 bp, synthetic construct
  misc_feature 1..80: note = Artificially Synthesized Probe
  source 1..80: mol_type = other DNA
gtatgggaatggttagaagaggtcaagacatgcatgaggaacagttaggtagaagcattaagtgtcagaagaggaaatcg

SEQ ID NO: 90437 - DNA, 80 bp, synthetic construct
  misc_feature 1..80: note = Artificially Synthesized Probe
  source 1..80: mol_type = other DNA
attgtaaagagttcccagaaagtagtccatatcatctaagttttcatgtttcaatgaataatgatttatatagtattctt

SEQ ID NO: 90438 - DNA, 80 bp, synthetic construct; identical to SEQ ID NO: 32908
  misc_feature 1..80: note = Artificially Synthesized Probe
  source 1..80: mol_type = other DNA

SEQ ID NO: 90439 - DNA, 80 bp, synthetic construct
  misc_feature 1..80: note = Artificially Synthesized Probe
  source 1..80: mol_type = other DNA
ctctgttatttatttcctcccctctatttcctttgtctctttctagagctcttactaaattgatgtttacctccaaaatt

SEQ ID NO: 90440 - DNA, 80 bp, synthetic construct
  misc_feature 1..80: note = Artificially Synthesized Probe
  source 1..80: mol_type = other DNA
ttcattttcttgctccctgcttgctccattttaatagctgttttagagagaaatatcctttcaaaattttctgaggatat

SEQ ID NO: 90441 - DNA, 80 bp, synthetic construct
  misc_feature 1..80: note = Artificially Synthesized Probe
  source 1..80: mol_type = other DNA
aaaccttcctctatgcttgagaatgtctgtttccctagaggggctcccctgaatgagaggacagctgggtgcttcgtatt

SEQ ID NO: 90442 - DNA, 80 bp, synthetic construct
  misc_feature 1..80: note = Artificially Synthesized Probe
  source 1..80: mol_type = other DNA
agttcttgtcctgctttcctggcttcctccaactgcctcagggccattcgtagctcttgagagacaattcctggtgagtc

SEQ ID NO: 90443 - DNA, 80 bp, synthetic construct; identical to SEQ ID NO: 32909
  misc_feature 1..80: note = Artificially Synthesized Probe
  source 1..80: mol_type = other DNA

SEQ ID NO: 90444 - DNA, 80 bp, synthetic construct
  misc_feature 1..80: note = Artificially Synthesized Probe
  source 1..80: mol_type = other DNA
acagtacgtttctcctatatatatttagactgtggcatctttgcccctaataatttgattctactctcgtctcccggaat

SEQ ID NO: 90445 - DNA, 80 bp, synthetic construct
  misc_feature 1..80: note = Artificially Synthesized Probe
  source 1..80: mol_type = other DNA
gacttttttaatttttattttatattctaagagttcatcttgttgattctggcccatctttgcaggctatttgagaactg

SEQ ID NO: 90446 - DNA, 80 bp, synthetic construct
  misc_feature 1..80: note = Artificially Synthesized Probe
  source 1..80: mol_type = other DNA
caccagagtaggaaggagccctctaaatccttactgaaggacactatctctacttctaaacccctattttactctaacaa

SEQ ID NO: 90447 - DNA, 80 bp, synthetic construct; identical to SEQ ID NO: 32910
  misc_feature 1..80: note = Artificially Synthesized Probe
  source 1..80: mol_type = other DNA

SEQ ID NO: 90448 - DNA, 80 bp, synthetic construct
  misc_feature 1..80: note = Artificially Synthesized Probe
  source 1..80: mol_type = other DNA
agttcaacccatatctcttccttgagcttcagatcttactttttttttggataggggagggcgattgctgttctctgttt

SEQ ID NO: 90449 - DNA, 80 bp, synthetic construct
  misc_feature 1..80: note = Artificially Synthesized Probe
  source 1..80: mol_type = other DNA
gagacttcattaggcatgaaagtatcttcccaactttcattcctagtgaagtcccttcacctttagctcctgaacatact

SEQ ID NO: 90450 - DNA, 80 bp, synthetic construct
  misc_feature 1..80: note = Artificially Synthesized Probe
  source 1..80: mol_type = other DNA
ttatatagaataaaacctgtactgctttgcaaagtatgaagatctcttatggtttgatgtgagtgcctacctgtcctctc

SEQ ID NO: 90451 - DNA, 80 bp, synthetic construct; identical to SEQ ID NO: 32911
  misc_feature 1..80: note = Artificially Synthesized Probe
  source 1..80: mol_type = other DNA

SEQ ID NO: 90452 - DNA, 80 bp, synthetic construct
  misc_feature 1..80: note = Artificially Synthesized Probe
  source 1..80: mol_type = other DNA
ctgaaaatttgccttgggctttttagttgacaaactaagaaacttgattgcttatgagtttcacggtatccataagcaag

SEQ ID NO: 90453 - DNA, 80 bp, synthetic construct; identical to SEQ ID NO: 32880
  misc_feature 1..80: note = Artificially Synthesized Probe
  source 1..80: mol_type = other DNA

SEQ ID NO: 90454 - DNA, 80 bp, synthetic construct
  misc_feature 1..80: note = Artificially Synthesized Probe
  source 1..80: mol_type = other DNA
taccagtttacaaaaaggtttactttattttagcccaatgaactttcactgacaaattaatggctacttcttacctgaaa

SEQ ID NO: 90455 - DNA, 80 bp, synthetic construct; identical to SEQ ID NO: 32912
  misc_feature 1..80: note = Artificially Synthesized Probe
  source 1..80: mol_type = other DNA

SEQ ID NO: 90456 - DNA, 80 bp, synthetic construct
  misc_feature 1..80: note = Artificially Synthesized Probe
  source 1..80: mol_type = other DNA
aaattgaacctgttatttacaaatgcaaatgtgtatatttcttaatgagtaaggctcaagaagtggttttggtaccctaa

SEQ ID NO: 90457 - DNA, 80 bp, synthetic construct
  misc_feature 1..80: note = Artificially Synthesized Probe
  source 1..80: mol_type = other DNA
gcaaagatttaagaagagaaagtcagaaagaagggaactctttcatgctccttccaccccagtctaaacgagaatgaaag

SEQ ID NO: 90458 - DNA, 80 bp, synthetic construct
  misc_feature 1..80: note = Artificially Synthesized Probe
  source 1..80: mol_type = other DNA
ccagatcaaattagattggtttgtttatcctgtactgcaaattaaattgtagaaattaacaaggataatagaattgtaga

SEQ ID NO: 90459 - DNA, 80 bp, synthetic construct
  misc_feature 1..80: note = Artificially Synthesized Probe
  source 1..80: mol_type = other DNA
ctgtgaaaaggtccttgtaggagtgaactgaaatctgctttcctgtaaggttcatgcagagggtctacttctcatttctg

SEQ ID NO: 90460 - DNA, 80 bp, synthetic construct; identical to SEQ ID NO: 32913
  misc_feature 1..80: note = Artificially Synthesized Probe
  source 1..80: mol_type = other DNA

SEQ ID NO: 90461 - DNA, 80 bp, synthetic construct
  misc_feature 1..80: note = Artificially Synthesized Probe
  source 1..80: mol_type = other DNA
tccttgattggacttgaagttatctaaccaacccacctgctttttccttaagccattttcaggtggcatctctcacatgc

SEQ ID NO: 90462 - DNA, 80 bp, synthetic construct
  misc_feature 1..80: note = Artificially Synthesized Probe
  source 1..80: mol_type = other DNA
atttttcagtgagtctggagtatctcagagtgtgatctggaggcaaaatcattgtatagccactttctaaatgtttacta

SEQ ID NO: 90463 - DNA, 80 bp, synthetic construct; identical to SEQ ID NO: 32914
  misc_feature 1..80: note = Artificially Synthesized Probe
  source 1..80: mol_type = other DNA

SEQ ID NO: 90464 - DNA, 80 bp, synthetic construct
  misc_feature 1..80: note = Artificially Synthesized Probe
  source 1..80: mol_type = other DNA
gtgtgaatatgacctcatttattcattgaaccctgttgcccagcattatttcctttggaaagataaagagagggaagtag

SEQ ID NO: 90465 - DNA, 80 bp, synthetic construct
  misc_feature 1..80: note = Artificially Synthesized Probe
  source 1..80: mol_type = other DNA
gcctcagcctcctgagtagctgggactacaggtgcccaccactacgcccagctaatttttttgtattttcagtagagaca

SEQ ID NO: 90466 - DNA, 80 bp, synthetic construct
  misc_feature 1..80: note = Artificially Synthesized Probe
  source 1..80: mol_type = other DNA
ttttctaaactattatttctgtcccctactctcctcctttccctcccacccctgaggaaacaaatatctatgagctagct

SEQ ID NO: 90467 - DNA, 80 bp, synthetic construct
  misc_feature 1..80: note = Artificially Synthesized Probe
  source 1..80: mol_type = other DNA
gtggaggaggaagttgaggacccatgatagtctaggtaaaatgcatgataatctagggaaaatgaacacaagaattttgg

SEQ ID NO: 90468 - DNA, 80 bp, synthetic construct; identical to SEQ ID NO: 32915
  misc_feature 1..80: note = Artificially Synthesized Probe
  source 1..80: mol_type = other DNA

SEQ ID NO: 90469 - DNA, 80 bp, synthetic construct
  misc_feature 1..80: note = Artificially Synthesized Probe
  source 1..80: mol_type = other DNA
aaaatatgagcagaggttcaagagctgctgaagaaaatcacccaagtttgagagtaggcgtcaatcaatacatagttgat

SEQ ID NO: 90470 - DNA, 80 bp, synthetic construct
  misc_feature 1..80: note = Artificially Synthesized Probe
  source 1..80: mol_type = other DNA
atgctcagctccaccttatttcctacagtctcaaaagaatttgtgctgcttttcctggaattgttctcttagtcactccc

SEQ ID NO: 90471 - DNA, 80 bp, synthetic construct
  misc_feature 1..80: note = Artificially Synthesized Probe
  source 1..80: mol_type = other DNA
tcttggagctatgtctggctactagttattaaaatgctcccaatatagccaaactgctagaaagaatattccacattgac

SEQ ID NO: 90472 - DNA, 80 bp, synthetic construct; identical to SEQ ID NO: 32916
  misc_feature 1..80: note = Artificially Synthesized Probe
  source 1..80: mol_type = other DNA

SEQ ID NO: 90473 - DNA, 80 bp, synthetic construct
  misc_feature 1..80: note = Artificially Synthesized Probe
  source 1..80: mol_type = other DNA
tagctcccaaactattctcctgcatctccaattttgttatcagacactgccatttggatgttgcaaaaactcaacatatt

SEQ ID NO: 90474 - DNA, 80 bp, synthetic construct
  misc_feature 1..80: note = Artificially Synthesized Probe
  source 1..80: mol_type = other DNA
taataaatgcccaagttttgtcagtttcatatcctgatgtctcccatcagcatcagtttctttcagtctatactgccatt

SEQ ID NO: 90475 - DNA, 80 bp, synthetic construct
  misc_feature 1..80: note = Artificially Synthesized Probe
  source 1..80: mol_type = other DNA
gtccctaattaactatggaatgaataactccttggcaaggcatagaagaccctatgtctcactattctctcttgtcctaa

SEQ ID NO: 90476 - DNA, 80 bp, synthetic construct
  misc_feature 1..80: note = Artificially Synthesized Probe
  source 1..80: mol_type = other DNA
gaagggagtttagatgtataatggaaggtagacatctccattattgatatcataatgattccttcatggtacattgtctt

SEQ ID NO: 90477 - DNA, 80 bp, synthetic construct
  misc_feature 1..80: note = Artificially Synthesized Probe
  source 1..80: mol_type = other DNA
tcagtttctcaaaaacaaaaacaaaataatctcaaagcccttgctaaagaaagtgcacgccctacccgcaagaaacatca

SEQ ID NO: 90478 - DNA, 80 bp, synthetic construct; identical to SEQ ID NO: 32917
  misc_feature 1..80: note = Artificially Synthesized Probe
  source 1..80: mol_type = other DNA

SEQ ID NO: 90479 - DNA, 80 bp, synthetic construct
  misc_feature 1..80: note = Artificially Synthesized Probe
  source 1..80: mol_type = other DNA
ctatagtccatgttcttggtttatcctgagatactccgtaatataatagaacttaagttattttcatgctgtctatctgt

SEQ ID NO: 90480 - DNA, 80 bp, synthetic construct
  misc_feature 1..80: note = Artificially Synthesized Probe
  source 1..80: mol_type = other DNA
cttccccaagaattgcttcatttacctttttccgtgggccatttttccgacatttgttcttgacaaagtcaaatgaaaga

SEQ ID NO: 90481 - DNA, 80 bp, synthetic construct
  misc_feature 1..80: note = Artificially Synthesized Probe
  source 1..80: mol_type = other DNA
tggctcaggaggggctgtgactgagcctctcattccagccctttctttcaaagaacaaaggagggacctcaagagaaata

SEQ ID NO: 90482 - DNA, 80 bp, synthetic construct; identical to SEQ ID NO: 32918
  misc_feature 1..80: note = Artificially Synthesized Probe
  source 1..80: mol_type = other DNA

SEQ ID NO: 90483 - DNA, 80 bp, synthetic construct
  misc_feature 1..80: note = Artificially Synthesized Probe
  source 1..80: mol_type = other DNA
gctgagcaacacttctggttctgcctttaactttcacaaatcatcttttgggtttgcttttgtcaaggtaactgatgttt

SEQ ID NO: 90484 - DNA, 80 bp, synthetic construct
  misc_feature 1..80: note = Artificially Synthesized Probe
  source 1..80: mol_type = other DNA
aagaaagcagcgtacctctgaaatgactttgcagatcgagcttcttaattcattctactacccctaattgctttctctaa

SEQ ID NO: 90485 - DNA, 80 bp, synthetic construct; identical to SEQ ID NO: 32919
  misc_feature 1..80: note = Artificially Synthesized Probe
  source 1..80: mol_type = other DNA

SEQ ID NO: 90486 - DNA, 80 bp, synthetic construct
  misc_feature 1..80: note = Artificially Synthesized Probe
  source 1..80: mol_type = other DNA
ttctccctcctattttgagtgttgtgtcctttccctcccttccttctatccagcttactcccacacttcaggggaaatga

SEQ ID NO: 90487 - DNA, 80 bp, synthetic construct
  misc_feature 1..80: note = Artificially Synthesized Probe
  source 1..80: mol_type = other DNA
aaattaaaaacaatcatggaaaagtgtttataacccaaccagcatatttcaaaggccttttgtaaaatcaaaggaaaagg

SEQ ID NO: 90488 - DNA, 80 bp, synthetic construct
  misc_feature 1..80: note = Artificially Synthesized Probe
  source 1..80: mol_type = other DNA
ttggctgtacttccttctggccagaggaatgaaatgccttgtggtaacaattcatcttacagaatacagttttctgttat

SEQ ID NO: 90489 - DNA, 80 bp, synthetic construct
  misc_feature 1..80: note = Artificially Synthesized Probe
  source 1..80: mol_type = other DNA
caattgaatgaacatgtagaaagtaagtgaagtcactgtgatccacagcgtggtcaggacttaattctggaataggaggt

SEQ ID NO: 90490 - DNA, 80 bp, synthetic construct; identical to SEQ ID NO: 32920
  misc_feature 1..80: note = Artificially Synthesized Probe
  source 1..80: mol_type = other DNA

SEQ ID NO: 90491 - DNA, 80 bp, synthetic construct
  misc_feature 1..80: note = Artificially Synthesized Probe
  source 1..80: mol_type = other DNA
atgaagtaatagaaaaatccaagacgggtctctgcccacggagatttacaatccgactggggaaataatatattcatcat

SEQ ID NO: 90492 - DNA, 80 bp, synthetic construct
  misc_feature 1..80: note = Artificially Synthesized Probe
  source 1..80: mol_type = other DNA
aatgtgggctgaaaaggtcaggaaaaatttgtgtaggaaaaaggcctaagctgagcccttctcagaggaatgaggttgag

SEQ ID NO: 90493 - DNA, 80 bp, synthetic construct
  misc_feature 1..80: note = Artificially Synthesized Probe
  source 1..80: mol_type = other DNA
atgtcccagctttacccaagcaggagagaagggtaggaacagagtcccttgtcctttgcccttgccaaaggtgctgtgct

SEQ ID NO: 90494 - DNA, 80 bp, synthetic construct; identical to SEQ ID NO: 32921
  misc_feature 1..80: note = Artificially Synthesized Probe
  source 1..80: mol_type = other DNA

SEQ ID NO: 90495 - DNA, 80 bp, synthetic construct
  misc_feature 1..80: note = Artificially Synthesized Probe
  source 1..80: mol_type = other DNA
ttatggattacagggtttgttatagaagagtcctcaaatacaggcatgagttcattacacaataaaatatgcactgaatc

SEQ ID NO: 90496 - DNA, 80 bp, synthetic construct
  misc_feature 1..80: note = Artificially Synthesized Probe
  source 1..80: mol_type = other DNA
tcacaggggtgctgtaaggcttaaaatggaaaatgctcagaaaagaacttcacacattgtaagtactagagtgttagcta

SEQ ID NO: 90497 - DNA, 80 bp, synthetic construct
  misc_feature 1..80: note = Artificially Synthesized Probe
  source 1..80: mol_type = other DNA
tagtctacaacctgaagattctctaactgaacacattgtgctatttatttccaagataggtgcagagttcagggatagaa

SEQ ID NO: 90498 - DNA, 80 bp, synthetic construct
  misc_feature 1..80: note = Artificially Synthesized Probe
  source 1..80: mol_type = other DNA
tcctagcaaaaactaccatgaggagctaattttattttaaattaattttcataacagtgtattcttcaggaaagtagaaa

SEQ ID NO: 90499 - DNA, 80 bp, synthetic construct; identical to SEQ ID NO: 32881
  misc_feature 1..80: note = Artificially Synthesized Probe
  source 1..80: mol_type = other DNA

SEQ ID NO: 90500 - DNA, 80 bp, synthetic construct; identical to SEQ ID NO: 32922
  misc_feature 1..80: note = Artificially Synthesized Probe
  source 1..80: mol_type = other DNA

SEQ ID NO: 90501 - DNA, 80 bp, synthetic construct
  misc_feature 1..80: note = Artificially Synthesized Probe
  source 1..80: mol_type = other DNA
accacgcccagctaatttttgtatttttagtagaggtggtgttttaccatgttggtcaggctggtcttgaactcctgacc

SEQ ID NO: 90502 - DNA, 80 bp, synthetic construct
  misc_feature 1..80: note = Artificially Synthesized Probe
  source 1..80: mol_type = other DNA
ggtgatatttttaaataaagttaattagtattttagcaattcaatcatgtacaacttgtttttaccaatgttatttccta

SEQ ID NO: 90503 - DNA, 80 bp, synthetic construct; identical to SEQ ID NO: 32923
  misc_feature 1..80: note = Artificially Synthesized Probe
  source 1..80: mol_type = other DNA

SEQ ID NO: 90504 - DNA, 80 bp, synthetic construct
  misc_feature 1..80: note = Artificially Synthesized Probe
  source 1..80: mol_type = other DNA
aactggaaagctggttgtgtttcttcttttgtttgctttttttcttcttctttcattcccactccttaccccaaacatat

SEQ ID NO: 90505 - DNA, 80 bp, synthetic construct
  misc_feature 1..80: note = Artificially Synthesized Probe
  source 1..80: mol_type = other DNA
cacttattttatgtatatttggaagcacagggtaattttttaaggaagaaggggaaaaattaatgaaggtgtaagaggga

SEQ ID NO: 90506 - DNA, 80 bp, synthetic construct
  misc_feature 1..80: note = Artificially Synthesized Probe
  source 1..80: mol_type = other DNA
aaagtacatatctttctcacattctattgggtaatgacattgcactgtatttaaaagagactttaggccaggcgcagtgg

SEQ ID NO: 90507 - DNA, 80 bp, synthetic construct
  misc_feature 1..80: note = Artificially Synthesized Probe
  source 1..80: mol_type = other DNA
ggtaggctgagacaggagaatcccttgaacccaggaggcagaggttacaatgagctgagatcatgccactacactccagc

SEQ ID NO: 90508 - DNA, 80 bp, synthetic construct
  misc_feature 1..80: note = Artificially Synthesized Probe
  source 1..80: mol_type = other DNA
cagagcttcatgtgtttaaatagggaatcttccactctagtcccctttatcacagtgtgttgttcagaacaagatataga

SEQ ID NO: 90509 - DNA, 80 bp, synthetic construct; identical to SEQ ID NO: 32924
  misc_feature 1..80: note = Artificially Synthesized Probe
  source 1..80: mol_type = other DNA

SEQ ID NO: 90510 - DNA, 80 bp, synthetic construct
  misc_feature 1..80: note = Artificially Synthesized Probe
  source 1..80: mol_type = other DNA
agagagtgtgatagggccaacccaaggcagagctctagccgagagggtgtgtttgtctttagagccccgactttcttgat

SEQ ID NO: 90511 - DNA, 80 bp, synthetic construct
  misc_feature 1..80: note = Artificially Synthesized Probe
  source 1..80: mol_type = other DNA
gggagtgattaaatgccggcttgtcagactttataatcatttctgttgtttattggggacttttggcaggaatgggaaat

SEQ ID NO: 90512 - DNA, 80 bp, synthetic construct
  misc_feature 1..80: note = Artificially Synthesized Probe
  source 1..80: mol_type = other DNA
ggaagaaaaatcaaccattggcaatccaaaaatgtctgattgtgcactgctaggtgtgtgttcctgtgggagttacctgg

SEQ ID NO: 90513 - DNA, 80 bp, synthetic construct; identical to SEQ ID NO: 32925
  misc_feature 1..80: note = Artificially Synthesized Probe
  source 1..80: mol_type = other DNA

SEQ ID NO: 90514 - DNA, 80 bp, synthetic construct
  misc_feature 1..80: note = Artificially Synthesized Probe
  source 1..80: mol_type = other DNA
catgggcatttgaacatggaggaaaagaagtaagagtgtttggggttaaaacatcaatatgaaatgtattacaaaaagaa

SEQ ID NO: 90515 - DNA, 80 bp, synthetic construct
  misc_feature 1..80: note = Artificially Synthesized Probe
  source 1..80: mol_type = other DNA
tcagaagttgttaaaattgagttcagactaacaaatcttaactgttaaaaacaacagcaaccaccaccaaagacctctgg

SEQ ID NO: 90516 - DNA, 80 bp, synthetic construct
  misc_feature 1..80: note = Artificially Synthesized Probe
  source 1..80: mol_type = other DNA
gataaagccataaagtgatcaagaagctacctattttttccagtttgaaaacctgtcttctagggttgagacttttatac

SEQ ID NO: 90517 - DNA, 80 bp, synthetic construct; identical to SEQ ID NO: 32926
  misc_feature 1..80: note = Artificially Synthesized Probe
  source 1..80: mol_type = other DNA

SEQ ID NO: 90518 - DNA, 80 bp, synthetic construct
  misc_feature 1..80: note = Artificially Synthesized Probe
  source 1..80: mol_type = other DNA
ctttctgtgaaatgtgaaaactataaatttattgatttcacataactgtactaaaaagcatggggtggataaagtacttg

SEQ ID NO: 90519 - DNA, 80 bp, synthetic construct
  misc_feature 1..80: note = Artificially Synthesized Probe
  source 1..80: mol_type = other DNA
tgcagaaaaatgttctcccaaatggaagagttaatgcacctcaaatatgtgagaaatttgcttccaatttttcaacgctt

SEQ ID NO: 90520 - DNA, 80 bp, synthetic construct
  misc_feature 1..80: note = Artificially Synthesized Probe
  source 1..80: mol_type = other DNA
ctgattttggccttcagtcagtgaaagtggtttctcctcataggcatgtttgacatttacaaatcttgcatcttgtctga

SEQ ID NO: 90521 - DNA, 80 bp, synthetic construct
  misc_feature 1..80: note = Artificially Synthesized Probe
  source 1..80: mol_type = other DNA
caatataaacttttccgcaacgcaacataaggccataaacttccagaactaatttactgttaactccaatggctccctat

SEQ ID NO: 90522 - DNA, 80 bp, synthetic construct
  misc_feature 1..80: note = Artificially Synthesized Probe
  source 1..80: mol_type = other DNA
tttatgatcctttcggtttgcattcggtacaggtatctaaatcagtcctgtgcccacgttctttttagtgtgtatatttg

SEQ ID NO: 90523 - DNA, 80 bp, synthetic construct; identical to SEQ ID NO: 32927
  misc_feature 1..80: note = Artificially Synthesized Probe
  source 1..80: mol_type = other DNA

SEQ ID NO: 90524 - DNA, 80 bp, synthetic construct
  misc_feature 1..80: note = Artificially Synthesized Probe
  source 1..80: mol_type = other DNA
aaaaataatctgaaatctacaacacttctggtcccaagcatttcagataaggcatactcaacctgtactgctattacaac

SEQ ID NO: 90525 - DNA, 80 bp, synthetic construct
  misc_feature 1..80: note = Artificially Synthesized Probe
  source 1..80: mol_type = other DNA
tcctcacctctaacaacaattgtacctacattactagcttactgtgaagaataaatgtttctagtacagtgcctatcaca

SEQ ID NO: 90526 - DNA, 80 bp, synthetic construct; identical to SEQ ID NO: 32928
  misc_feature 1..80: note = Artificially Synthesized Probe
  source 1..80: mol_type = other DNA

SEQ ID NO: 90527 - DNA, 80 bp, synthetic construct
  misc_feature 1..80: note = Artificially Synthesized Probe
  source 1..80: mol_type = other DNA
gacatttatgcaggggagaacagtccagtgtcagcttagatgaacaaatttcaaattgggagtccatcttatttaaaacc

SEQ ID NO: 90528 - DNA, 80 bp, synthetic construct
  misc_feature 1..80: note = Artificially Synthesized Probe
  source 1..80: mol_type = other DNA
acgccttgtataaaataaaatgacaggtttaatgtattgcaaaataccatttgaagagcttcctcatctgagaaagcatt

SEQ ID NO: 90529 - DNA, 80 bp, synthetic construct
  misc_feature 1..80: note = Artificially Synthesized Probe
  source 1..80: mol_type = other DNA
tgcatgatcatttacactccctggattatgtataaccaaagagtgaagagagaaaaactgtgtttgcattcatggaagat

SEQ ID NO: 90530 - DNA, 80 bp, synthetic construct; identical to SEQ ID NO: 32929
  misc_feature 1..80: note = Artificially Synthesized Probe
  source 1..80: mol_type = other DNA

SEQ ID NO: 90531 - DNA, 80 bp, synthetic construct
  misc_feature 1..80: note = Artificially Synthesized Probe
  source 1..80: mol_type = other DNA
ccatatgccaaactctggcgtgtgcagcacctacagcttgccagggcaatggcataggctccagacagacttttaatgtc

SEQ ID NO: 90532 - DNA, 80 bp, synthetic construct
  misc_feature 1..80: note = Artificially Synthesized Probe
  source 1..80: mol_type = other DNA
tttaatattcacgtctattaagccatgcaagcagttgccgagtagcagtccattctagggtaaacaggcaatgctctctg

SEQ ID NO: 90533 - DNA, 80 bp, synthetic construct
  misc_feature 1..80: note = Artificially Synthesized Probe
  source 1..80: mol_type = other DNA
aatcgcagcaatttagttcagctaaaaaatgagctatacagtttcacatttgaacttattaagttttcaatgggccagtg

SEQ ID NO: 90534 - DNA, 80 bp, synthetic construct; identical to SEQ ID NO: 32882
  misc_feature 1..80: note = Artificially Synthesized Probe
  source 1..80: mol_type = other DNA

SEQ ID NO: 90535 - DNA, 80 bp, synthetic construct; identical to SEQ ID NO: 32930
  misc_feature 1..80: note = Artificially Synthesized Probe
  source 1..80: mol_type = other DNA

SEQ ID NO: 90536 - DNA, 80 bp, synthetic construct
  misc_feature 1..80: note = Artificially Synthesized Probe
  source 1..80: mol_type = other DNA
acatacatatgagaaatctaagctaagaggacatctggaatggaacgttattcagcaatcagaaagcaaaaattcaaacc

SEQ ID NO: 90537 - DNA, 80 bp, synthetic construct
  misc_feature 1..80: note = Artificially Synthesized Probe
  source 1..80: mol_type = other DNA
tttgtaatatgaaacccactgtagataagatacaacatgaagatagtctgttttgcagcagcaggaaatcaaattggttc

SEQ ID NO: 90538 - DNA, 80 bp, synthetic construct
  misc_feature 1..80: note = Artificially Synthesized Probe
  source 1..80: mol_type = other DNA
aggttaggaggcatctcattttattggccttttaactaaagcattataatctgttatcaaaatttaaaagttcagtggtg

SEQ ID NO: 90539 - DNA, 80 bp, synthetic construct; identical to SEQ ID NO: 32931
  misc_feature 1..80: note = Artificially Synthesized Probe
  source 1..80: mol_type = other DNA

SEQ ID NO: 90540 - DNA, 80 bp, synthetic construct
  misc_feature 1..80: note = Artificially Synthesized Probe
  source 1..80: mol_type = other DNA
gtgacttgacgtttaggactattttctaaaaagtcaaaaaacttttcccccttcagtacttacagtctttgaagactaga

SEQ ID NO: 90541 - DNA, 80 bp, synthetic construct
  misc_feature 1..80: note = Artificially Synthesized Probe
  source 1..80: mol_type = other DNA
gcagtcctgggctgaatttctgcagctcattgatgcactggattaccaaggaatcccttttaacatctgccaatcagaca

SEQ ID NO: 90542 - DNA, 80 bp, synthetic construct
  misc_feature 1..80: note = Artificially Synthesized Probe
  source 1..80: mol_type = other DNA
agggtcccagggcttctggaacattcttctcttcctcctttgctatatccatagcattacattacattacttgtgtaatg

SEQ ID NO: 90543 - DNA, 80 bp, synthetic construct
  misc_feature 1..80: note = Artificially Synthesized Probe
  source 1..80: mol_type = other DNA
ttacattgtatcattttttaaaattgctcgagactgacagcatcttaaatggtcacttttagaggaatggctaaagtatg

SEQ ID NO: 90544 - DNA, 80 bp, synthetic construct
  misc_feature 1..80: note = Artificially Synthesized Probe
  source 1..80: mol_type = other DNA
tttgcttgtaaatgcctagaagagttctagtaagatacaaaaggatctggtaactttagctgtctctggaatgccagagg

SEQ ID NO: 90545 - DNA, 80 bp, synthetic construct
  misc_feature 1..80: note = Artificially Synthesized Probe
  source 1..80: mol_type = other DNA
aatgcctgggggacaggagtaggagggagaccttcttgtgacattattttgcaaaacttactgagttttgaatcatgtga

SEQ ID NO: 90546 - DNA, 80 bp, synthetic construct; identical to SEQ ID NO: 32883
  misc_feature 1..80: note = Artificially Synthesized Probe
  source 1..80: mol_type = other DNA

SEQ ID NO: 90547 - DNA, 80 bp, synthetic construct
  misc_feature 1..80: note = Artificially Synthesized Probe
  source 1..80: mol_type = other DNA
gaacgctcattctgttttacggaaggaggtgttatgcaattctaaaattgcaagtaaaagtcagctagatcgttaaacta

SEQ ID NO: 90548 - DNA, 80 bp, synthetic construct
  misc_feature 1..80: note = Artificially Synthesized Probe
  source 1..80: mol_type = other DNA
tccaagagccagggctgagcacagcattcagactatcagcaccatcatttccttgccttttgtggtatcaaaggcaagct

SEQ ID NO: 90549 - DNA, 80 bp, synthetic construct
  misc_feature 1..80: note = Artificially Synthesized Probe
  source 1..80: mol_type = other DNA
cagcattaaagggaccagcaaagattctgacttttatttattttgctgaagctttcataccattccaggaagaatgggca

SEQ ID NO: 90550 - DNA, 80 bp, synthetic construct
  misc_feature 1..80: note = Artificially Synthesized Probe
  source 1..80: mol_type = other DNA
tctatatgatcaaggaactttcatgtcttaaaaaatagttatgaaaacttaacatagacagatgtcctactgtccattca

SEQ ID NO: 90551 - DNA, 80 bp, synthetic construct
  misc_feature 1..80: note = Artificially Synthesized Probe
  source 1..80: mol_type = other DNA
tctttacatctgcttgcttgggaagaggttctcttatgaaaatcaggagactcatagtcaggttttaggcatcttaaaat

SEQ ID NO: 90552 - DNA, 80 bp, synthetic construct; identical to SEQ ID NO: 32884
  misc_feature 1..80: note = Artificially Synthesized Probe
  source 1..80: mol_type = other DNA

SEQ ID NO: 90553 - DNA, 80 bp, synthetic construct
  misc_feature 1..80: note = Artificially Synthesized Probe
  source 1..80: mol_type = other DNA
tcatcacgtcagtatgctaatttgaaaaagtgggagtgctttgttcgagaaaccaaatctcgtccaatctggctgtcact

SEQ ID NO: 90554 - DNA, 80 bp, synthetic construct
  misc_feature 1..80: note = Artificially Synthesized Probe
  source 1..80: mol_type = other DNA
atgggaagattgttttaatatttgggaaccagtctctatgatgtaacaggagggccaatatttgtaaataagaaaaattt

SEQ ID NO: 90555 - DNA, 80 bp, synthetic construct
  misc_feature 1..80: note = Artificially Synthesized Probe
  source 1..80: mol_type = other DNA
atggagaccagcctgggcaaaatggtgaaaacctgtttctactaaaaataaaaaaattagccaggtgtggtggtgggtac

SEQ ID NO: 90556 - DNA, 80 bp, synthetic construct; identical to SEQ ID NO: 32885
  misc_feature 1..80: note = Artificially Synthesized Probe
  source 1..80: mol_type = other DNA

SEQ ID NO: 90557 - DNA, 80 bp, synthetic construct
  misc_feature 1..80: note = Artificially Synthesized Probe
  source 1..80: mol_type = other DNA
ctgctctccccgccccataagggactatcattccaccctgaaaatctcctaagactttagaattcacaactcttctgtga

SEQ ID NO: 90558 - DNA, 80 bp, synthetic construct
  misc_feature 1..80: note = Artificially Synthesized Probe
  source 1..80: mol_type = other DNA
tgtctaaatttctatcccatcacgaagcagctttttttttctctccagtaacacaactgccacttcctcagtgttgcttt

SEQ ID NO: 90559 - DNA, 80 bp, synthetic construct; identical to SEQ ID NO: 32886
  misc_feature 1..80: note = Artificially Synthesized Probe
  source 1..80: mol_type = other DNA

SEQ ID NO: 90560 - DNA, 80 bp, synthetic construct; identical to SEQ ID NO: 32877
  misc_feature 1..80: note = Artificially Synthesized Probe
  source 1..80: mol_type = other DNA

SEQ ID NO: 90561 - DNA, 80 bp, synthetic construct
  misc_feature 1..80: note = Artificially Synthesized Probe
  source 1..80: mol_type = other DNA
ttctacctggagaagctctgttactctaaaggaagttagtgtagtcaggtgctgtggaatgtcccagctacttgggaggc

SEQ ID NO: 90562 - DNA, 80 bp, synthetic construct
  misc_feature 1..80: note = Artificially Synthesized Probe
  source 1..80: mol_type = other DNA
cttttggggtgtggtgttttgtttgtggggtaatctggaagcctgaggggcccagctgcaccaacagaaaaacaagttag

SEQ ID NO: 90563 - DNA, 80 bp, synthetic construct
  misc_feature 1..80: note = Artificially Synthesized Probe
  source 1..80: mol_type = other DNA
taatattatttatcttgattatgaagtttttaagcatccctttcaattttgtacccaagagaaatgtgtcacttgcctag

SEQ ID NO: 90564 - DNA, 80 bp, synthetic construct; identical to SEQ ID NO: 32887
  misc_feature 1..80: note = Artificially Synthesized Probe
  source 1..80: mol_type = other DNA

SEQ ID NO: 90565 - DNA, 80 bp, synthetic construct
  misc_feature 1..80: note = Artificially Synthesized Probe
  source 1..80: mol_type = other DNA
cttgtggagagaaaatgctcactgcttctctttggaactctttctaggagacgggtttggctctgtgattcatcagaaat

SEQ ID NO: 90566 - DNA, 80 bp, synthetic construct; identical to SEQ ID NO: 32932
  misc_feature 1..80: note = Artificially Synthesized Probe
  source 1..80: mol_type = other DNA

SEQ ID NO: 90567 - DNA, 80 bp, synthetic construct
  misc_feature 1..80: note = Artificially Synthesized Probe
  source 1..80: mol_type = other DNA
acagacacccaccccaaaccagcctcctacatgtccacacagacacccaccccaaaccagcctcctacatgtccacacag

SEQ ID NO: 90568 - DNA, 80 bp, synthetic construct
  misc_feature 1..80: note = Artificially Synthesized Probe
  source 1..80: mol_type = other DNA
aaccagcctcctacatgtccacacagacaccccaaaccagcctcctacacgtccacacagacacccaccccaaaccagcc

SEQ ID NO: 90569 - DNA, 80 bp, synthetic construct; identical to SEQ ID NO: 33038
  misc_feature 1..80: note = Artificially Synthesized Probe
  source 1..80: mol_type = other DNA

SEQ ID NO: 90570 - DNA, 80 bp, synthetic construct
  misc_feature 1..80: note = Artificially Synthesized Probe
  source 1..80: mol_type = other DNA
gtacgaaagacgagatgcccagtccgagaagagccagcaagtccaggttggagttcatgtctgaccagtccatcagccag

SEQ ID NO: 90571 - DNA, 80 bp, synthetic construct
  misc_feature 1..80: note = Artificially Synthesized Probe
  source 1..80: mol_type = other DNA
tgatggaaagccaccaggaatgccacgactggaagaaaaagaagacaaaacaagcatgactaggaacaaaccacatgtgg

SEQ ID NO: 90572 - DNA, 80 bp, synthetic construct; identical to SEQ ID NO: 33039
  misc_feature 1..80: note = Artificially Synthesized Probe
  source 1..80: mol_type = other DNA

SEQ ID NO: 90573 - DNA, 80 bp, synthetic construct
  misc_feature 1..80: note = Artificially Synthesized Probe
  source 1..80: mol_type = other DNA
tctaagtaaactagacaagttacataaaatgcgtgcctgcagcagacgcagtgtgtgcatacacacacacacatctaagt

SEQ ID NO: 90574 - DNA, 80 bp, synthetic construct
  misc_feature 1..80: note = Artificially Synthesized Probe
  source 1..80: mol_type = other DNA
acataaaatgcgtgcccgcagcagacgcggtgtgtgcatacacgcacacacatgtaagtgaaccagacacgttacataaa

SEQ ID NO: 90575 - DNA, 80 bp, synthetic construct
  misc_feature 1..80: note = Artificially Synthesized Probe
  source 1..80: mol_type = other DNA
agcagacgcagtgtgtgcatccacgcatacgcatagaagcaaactagatgcttgtatataaattccgtgtctgcagcaga

SEQ ID NO: 90576 - DNA, 80 bp, synthetic construct; identical to SEQ ID NO: 32942
  misc_feature 1..80: note = Artificially Synthesized Probe
  source 1..80: mol_type = other DNA

SEQ ID NO: 90577 - DNA, 80 bp, synthetic construct; identical to SEQ ID NO: 33040
  misc_feature 1..80: note = Artificially Synthesized Probe
  source 1..80: mol_type = other DNA

SEQ ID NO: 90578 - DNA, 80 bp, synthetic construct
  misc_feature 1..80: note = Artificially Synthesized Probe
  source 1..80: mol_type = other DNA
tccacaggtctccgagttcatgtctcacggcgcccaccccacaatggcactgtcacatccacaggtctccgagttcatgt

SEQ ID NO: 90579 - DNA, 80 bp, synthetic construct
  misc_feature 1..80: note = Artificially Synthesized Probe
  source 1..80: mol_type = other DNA
agtatttgtagaacactgaatgcttacccagagatgctgacaggtgagagaagcacattcccatgtgtaaacgtgaagaa

SEQ ID NO: 90580 - DNA, 80 bp, synthetic construct
  misc_feature 1..80: note = Artificially Synthesized Probe
  source 1..80: mol_type = other DNA
caggtgagagaagcacattcccatgtgtaaacgtgaagaatgaaaaagcagttgaaagtaaaaaagatacaccattcaaa

SEQ ID NO: 90581 - DNA, 80 bp, synthetic construct
  misc_feature 1..80: note = Artificially Synthesized Probe
  source 1..80: mol_type = other DNA
tttgggaggccaaggcaggcggatcacctgagatcaggagtttgagaccagcctgggcaacatggaaaaaccctgtctct

SEQ ID NO: 90582 - DNA, 80 bp, synthetic construct; identical to SEQ ID NO: 33041
  misc_feature 1..80: note = Artificially Synthesized Probe
  source 1..80: mol_type = other DNA

SEQ ID NO: 90583 - DNA, 80 bp, synthetic construct
  misc_feature 1..80: note = Artificially Synthesized Probe
  source 1..80: mol_type = other DNA
cccgggaggctgcagtgagccgagatggcaccattgcactccagcctgggcaacagagactccatctcaaaaggaaaaaa

SEQ ID NO: 90584 - DNA, 80 bp, synthetic construct
  misc_feature 1..80: note = Artificially Synthesized Probe
  source 1..80: mol_type = other DNA
gagtgtctgtgtagacatgtaggaagctagtacatgtacttttccccatgcatttataaatctaaaaacatataaacgga

SEQ ID NO: 90585 - DNA, 80 bp, synthetic construct
  misc_feature 1..80: note = Artificially Synthesized Probe
  source 1..80: mol_type = other DNA
gcttccgccgaggctgacaagctgattctagaatatacatgggagagcaaagggattaaaaagccaaaatcatctggaaa

SEQ ID NO: 90586 - DNA, 80 bp, synthetic construct
  misc_feature 1..80: note = Artificially Synthesized Probe
  source 1..80: mol_type = other DNA
aagggtgttgaaacatccagccgtaattgttgatttgtcgagctctcctttcagttctttttcttcacatgttttgcaga

SEQ ID NO: 90587 - DNA, 80 bp, synthetic construct
  misc_feature 1..80: note = Artificially Synthesized Probe
  source 1..80: mol_type = other DNA
cacagagtgaacaaattctgacaaaggttcaaaggcaactacacagacaaagagcagccttgggccgggcgtggtggctc

SEQ ID NO: 90588 - DNA, 80 bp, synthetic construct; identical to SEQ ID NO: 33042
  misc_feature 1..80: note = Artificially Synthesized Probe
  source 1..80: mol_type = other DNA

SEQ ID NO: 90589 - DNA, 80 bp, synthetic construct
  misc_feature 1..80: note = Artificially Synthesized Probe
  source 1..80: mol_type = other DNA
aattgaactttatcaaactgaaaaacttttgatctgcaaaagctacttttaacagaatgaaaacacaagccgcagattgg

SEQ ID NO: 90590 - DNA, 80 bp, synthetic construct
  misc_feature 1..80: note = Artificially Synthesized Probe
  source 1..80: mol_type = other DNA
gaaaacaaacaacccaatgttaaaggtgggaagaaaaaaccaggccacaaggtctgaacagacataggaaggtgtacgga

SEQ ID NO: 90591 - DNA, 80 bp, synthetic construct
  misc_feature 1..80: note = Artificially Synthesized Probe
  source 1..80: mol_type = other DNA
cgctttgggaggccgaggtgggcagatcacctgaggtcaggagttcaagaccagcctggccaatgtggtgaaaccccgtc

SEQ ID NO: 90592 - DNA, 80 bp, synthetic construct; identical to SEQ ID NO: 33043
  misc_feature 1..80: note = Artificially Synthesized Probe
  source 1..80: mol_type = other DNA

SEQ ID NO: 90593 - DNA, 80 bp, synthetic construct
  misc_feature 1..80: note = Artificially Synthesized Probe
  source 1..80: mol_type = other DNA
gatgctcatagcagctctgttcatagccactaaaaactagaaacaaggaagacatccttcacggtggaagtggataaata

SEQ ID NO: 90594 - DNA, 80 bp, synthetic construct
  misc_feature 1..80: note = Artificially Synthesized Probe
  source 1..80: mol_type = other DNA
cttaagtgcattttgctaagcaaaagaatctagacccaacaggctatatactgcgtgatttcattcgtatgtcacactgg

SEQ ID NO: 90595 - DNA, 80 bp, synthetic construct; identical to SEQ ID NO: 33044
  misc_feature 1..80: note = Artificially Synthesized Probe
  source 1..80: mol_type = other DNA

SEQ ID NO: 90596 - DNA, 80 bp, synthetic construct
  misc_feature 1..80: note = Artificially Synthesized Probe
  source 1..80: mol_type = other DNA
ggcctgggtggacaattctcgcacgtgcaccagggctgagcagatgctagaggagtcaggggagccaggttcccactagc

SEQ ID NO: 90597 - DNA, 80 bp, synthetic construct
  misc_feature 1..80: note = Artificially Synthesized Probe
  source 1..80: mol_type = other DNA
acttacagatggataggtggatacgacagagaagcaatcaaatgtgtgaaatgagatagtgacacacagagcctagctct

SEQ ID NO: 90598 - DNA, 80 bp, synthetic construct
  misc_feature 1..80: note = Artificially Synthesized Probe
  source 1..80: mol_type = other DNA
atccttttactttcaacctgcctatacagagggtccctaacttatgagagttccactgacagtttttcagctttacaatg

SEQ ID NO: 90599 - DNA, 80 bp, synthetic construct
  misc_feature 1..80: note = Artificially Synthesized Probe
  source 1..80: mol_type = other DNA
tgcggggaaggaggggaaacccaccagtggtcaaagctggaggagctgagcagcaaactcacagtgacagcactggatca

SEQ ID NO: 90600 - DNA, 80 bp, synthetic construct; identical to SEQ ID NO: 33045
  misc_feature 1..80: note = Artificially Synthesized Probe
  source 1..80: mol_type = other DNA

SEQ ID NO: 90601 - DNA, 80 bp, synthetic construct
  misc_feature 1..80: note = Artificially Synthesized Probe
  source 1..80: mol_type = other DNA
tgacagcacgggatcacgacccagacacagactcacggtgacagcacgggatcacgacccagacagactcacggtgacag

SEQ ID NO: 90602 - DNA, 80 bp, synthetic construct
  misc_feature 1..80: note = Artificially Synthesized Probe
  source 1..80: mol_type = other DNA
cgacccagacacagactcacggtgacagcacgggatcacgacccagacacagactcacggtgacagcacgggatcacgac

SEQ ID NO: 90603 - DNA, 80 bp, synthetic construct
  misc_feature 1..80: note = Artificially Synthesized Probe
  source 1..80: mol_type = other DNA
acggtgacagcacgggatcacgacccagacacagactcacggtgacagcacgggatcacgacccagacacagactcacgg

SEQ ID NO: 90604 - DNA, 80 bp, synthetic construct
  misc_feature 1..80: note = Artificially Synthesized Probe
  source 1..80: mol_type = other DNA
ggatcacgacccagacacagactcacggtgacagcacgggatcacgacccagacacagactcacggtgacagcacgggat

SEQ ID NO: 90605 - DNA, 80 bp, synthetic construct; identical to SEQ ID NO: 33046
  misc_feature 1..80: note = Artificially Synthesized Probe
  source 1..80: mol_type = other DNA

SEQ ID NO: 90606 - DNA, 80 bp, synthetic construct
  misc_feature 1..80: note = Artificially Synthesized Probe
  source 1..80: mol_type = other DNA
tgacagcacgggatcacgacccagacacagactcacggtgacagcacgggatcacgacccagacacagactcacggtgac

SEQ ID NO: 90607 - DNA, 80 bp, synthetic construct
  misc_feature 1..80: note = Artificially Synthesized Probe
  source 1..80: mol_type = other DNA
atcacgacccagacacagactcacggtgacagcacgggatcacgacccagacacagactcacggtgacagcacgggatca

SEQ ID NO: 90608 - DNA, 80 bp, synthetic construct; identical to SEQ ID NO: 33047
  misc_feature 1..80: note = Artificially Synthesized Probe
  source 1..80: mol_type = other DNA

SEQ ID NO: 90609 - DNA, 80 bp, synthetic construct
  misc_feature 1..80: note = Artificially Synthesized Probe
  source 1..80: mol_type = other DNA
tctgagcacgtttaaggtagtaggctaggctgagctacgacggatgtttggtaggtgtattaaactcatttttgacttac

SEQ ID NO: 90610 - DNA, 80 bp, synthetic construct
  misc_feature 1..80: note = Artificially Synthesized Probe
  source 1..80: mol_type = other DNA
gtcaggaccctgatacggtgtgacgggaagggccccgcacctctgtgggcgtcttcccaaaacccatcacccagtctaat

SEQ ID NO: 90611 - DNA, 80 bp, synthetic construct
  misc_feature 1..80: note = Artificially Synthesized Probe
  source 1..80: mol_type = other DNA
aacggaacaggcacgggtggaaaagccatagagtctgcagtttcagttaatagttttatttttaataaaaaaattttaaa

SEQ ID NO: 90612 - DNA, 80 bp, synthetic construct
  misc_feature 1..80: note = Artificially Synthesized Probe
  source 1..80: mol_type = other DNA
ggcaggtgggtgggggcagctccaagtgaggaggaagagggtggacacaggcgggcacgggatggacacagggtaaacaa

SEQ ID NO: 90613 - DNA, 80 bp, synthetic construct
  misc_feature 1..80: note = Artificially Synthesized Probe
  source 1..80: mol_type = other DNA
gacctgagctgtgagcgctgacctcctagcaacatagaggacacctcgcggtaggccctcagccccggcggccacacgtg

SEQ ID NO: 90614 - DNA, 80 bp, synthetic construct; identical to SEQ ID NO: 33048
  misc_feature 1..80: note = Artificially Synthesized Probe
  source 1..80: mol_type = other DNA

SEQ ID NO: 90615 - DNA, 80 bp, synthetic construct
  misc_feature 1..80: note = Artificially Synthesized Probe
  source 1..80: mol_type = other DNA
gaccacagaggaaaacaagatgtggcctcaccaaagcaatagcctaaatcagtaattctaaggcaagaagcataggatgc

SEQ ID NO: 90616 - DNA, 80 bp, synthetic construct
  misc_feature 1..80: note = Artificially Synthesized Probe
  source 1..80: mol_type = other DNA
tataaaaatagctacataaaaagatgcagtaaaaatcttgaaacatcacaggctctcaaaacaaaactaaccaagcagtc

SEQ ID NO: 90617 - DNA, 80 bp, synthetic construct
  misc_feature 1..80: note = Artificially Synthesized Probe
  source 1..80: mol_type = other DNA
aaatactttgtttcagaatcagaaagaaatagctgggcgtggcagcctgtgcccgtagccccagctactcgggaggctga

SEQ ID NO: 90618 - DNA, 80 bp, synthetic construct; identical to SEQ ID NO: 33049
  misc_feature 1..80: note = Artificially Synthesized Probe
  source 1..80: mol_type = other DNA

SEQ ID NO: 90619 - DNA, 80 bp, synthetic construct
  misc_feature 1..80: note = Artificially Synthesized Probe
  source 1..80: mol_type = other DNA
aagaaaaagaactcatttcccatgagctcttagagccactgaaagctcagaacaaaaccaactgagcagggtttcaagta

SEQ ID NO: 90620 - DNA, 80 bp, synthetic construct
  misc_feature 1..80: note = Artificially Synthesized Probe
  source 1..80: mol_type = other DNA
tgccaagctacaagggctgcggtgagactcagagacacgctaccaatggcaccgcggccccacctcgccgaagcagctgc

SEQ ID NO: 90621 - DNA, 80 bp, synthetic construct
  misc_feature 1..80: note = Artificially Synthesized Probe
  source 1..80: mol_type = other DNA
ggattacaggcatgcaccaccatgcctggctaattgttgtatttttagtaaagagggttttgccatgatggccaggctga

SEQ ID NO: 90622 - DNA, 80 bp, synthetic construct; identical to SEQ ID NO: 33050
  misc_feature 1..80: note = Artificially Synthesized Probe
  source 1..80: mol_type = other DNA

SEQ ID NO: 90623 - DNA, 80 bp, synthetic construct
  misc_feature 1..80: note = Artificially Synthesized Probe
  source 1..80: mol_type = other DNA
cctcgcggaagccatgttcttctccattcagcttcatggagagactttcccaggtttcagcccacgctacgaagctagac

SEQ ID NO: 90624 - DNA, 80 bp, synthetic construct
  misc_feature 1..80: note = Artificially Synthesized Probe
  source 1..80: mol_type = other DNA
ggctgaagagctcaccaaggccactacaagagagcaaaaaaaagagcctcagagactcctcgataaataaccagaacaga

SEQ ID NO: 90625 - DNA, 80 bp, synthetic construct
  misc_feature 1..80: note = Artificially Synthesized Probe
  source 1..80: mol_type = other DNA
tgatggagaattagagatccgggcaagttggtcctttctggaaaagctgcttggggatacactccagcaaaaagagaatc

SEQ ID NO: 90626 - DNA, 80 bp, synthetic construct; identical to SEQ ID NO: 33051
  misc_feature 1..80: note = Artificially Synthesized Probe
  source 1..80: mol_type = other DNA

SEQ ID NO: 90627 - DNA, 80 bp, synthetic construct
  misc_feature 1..80: note = Artificially Synthesized Probe
  source 1..80: mol_type = other DNA
tgaaggccagaagggtgtcggcagccacggagagaacaagtacagttaaccctgggaaggcagaggccaggtggtctcag

SEQ ID NO: 90628 - DNA, 80 bp, synthetic construct
  misc_feature 1..80: note = Artificially Synthesized Probe
  source 1..80: mol_type = other DNA
ccagaggcagcagggagcgtgtgtcccaaagcccccagcactcatgccctgtgcaggcgccgagcagccggccctggccg

SEQ ID NO: 90629 - DNA, 80 bp, synthetic construct
  misc_feature 1..80: note = Artificially Synthesized Probe
  source 1..80: mol_type = other DNA
taaagtcagtctgcaaatgccaacgttacccagtcttcatgtcacatttcacctacagatcccttccgaattgtaacaat

SEQ ID NO: 90630 - DNA, 80 bp, synthetic construct
  misc_feature 1..80: note = Artificially Synthesized Probe
  source 1..80: mol_type = other DNA
ccagcggtcactctcacctcatcagtgacaggaaggtcttgatgagcaacttggccaaggccacacagctaaggtgtggc

SEQ ID NO: 90631 - DNA, 80 bp, synthetic construct; identical to SEQ ID NO: 32943
  misc_feature 1..80: note = Artificially Synthesized Probe
  source 1..80: mol_type = other DNA

SEQ ID NO: 90632 - DNA, 80 bp, synthetic construct; identical to SEQ ID NO: 33052
  misc_feature 1..80: note = Artificially Synthesized Probe
  source 1..80: mol_type = other DNA

SEQ ID NO: 90633 - DNA, 80 bp, synthetic construct
  misc_feature 1..80: note = Artificially Synthesized Probe
  source 1..80: mol_type = other DNA
ggccgcccatggacggacctggccaggccccctgggagggggatttcaaagcatcaaggagccggcctggctgacgaggc

SEQ ID NO: 90634 - DNA, 80 bp, synthetic construct
  misc_feature 1..80: note = Artificially Synthesized Probe
  source 1..80: mol_type = other DNA
taaaacagtgagggattctggccaggctgctctgccctctgttccggtgagcctgggcatggtgcccactcttgggttcg

SEQ ID NO: 90635 - DNA, 80 bp, synthetic construct; identical to SEQ ID NO: 33053
  misc_feature 1..80: note = Artificially Synthesized Probe
  source 1..80: mol_type = other DNA

SEQ ID NO: 90636 - DNA, 80 bp, synthetic construct
  misc_feature 1..80: note = Artificially Synthesized Probe
  source 1..80: mol_type = other DNA
acggacaatcgctgcacagccgggccagtggctgaccctgcttcctcgctgtccactgggggtagtggcgttgtcaccag

SEQ ID NO: 90637 - DNA, 80 bp, synthetic construct
  misc_feature 1..80: note = Artificially Synthesized Probe
  source 1..80: mol_type = other DNA
gggcatgcccgacaccccaggacgcccgcggtatgcacgtctgtgtgcagtgagcacacccctagcacctacacacctcg

SEQ ID NO: 90638 - DNA, 80 bp, synthetic construct
  misc_feature 1..80: note = Artificially Synthesized Probe
  source 1..80: mol_type = other DNA
atctgtacatctttactacatgtctgctgagacaatctgcctaagggtaagcctccctcagttcaatgtcttttaacaag

SEQ ID NO: 90639 - DNA, 80 bp, synthetic construct
  misc_feature 1..80: note = Artificially Synthesized Probe
  source 1..80: mol_type = other DNA
aaccctgggattctgaggaacagggagtagcgcacagtcccagtaaaatccagaactttctagaaggagataaatgcagg

SEQ ID NO: 90640 - DNA, 80 bp, synthetic construct; identical to SEQ ID NO: 33054
  misc_feature 1..80: note = Artificially Synthesized Probe
  source 1..80: mol_type = other DNA

SEQ ID NO: 90641 - DNA, 80 bp, synthetic construct
  misc_feature 1..80: note = Artificially Synthesized Probe
  source 1..80: mol_type = other DNA
gcctcacagcttcactttatctctacttcatcgtttgctaagtgacagcaccaacatttaaaatgactgtttaatactgt

SEQ ID NO: 90642 - DNA, 80 bp, synthetic construct
  misc_feature 1..80: note = Artificially Synthesized Probe
  source 1..80: mol_type = other DNA
ttaaaaattagtcaggcatggtggtgcgtgcctataatcccagctactcggaaggctgaggcaggagaatcgcttgaacc

SEQ ID NO: 90643 - DNA, 80 bp, synthetic construct
  misc_feature 1..80: note = Artificially Synthesized Probe
  source 1..80: mol_type = other DNA
ctctatgtccatttgccctcatccatttatagttatcttaactacttcctctacataaactttgaactacttcagacagt

SEQ ID NO: 90644 - DNA, 80 bp, synthetic construct; identical to SEQ ID NO: 33055
  misc_feature 1..80: note = Artificially Synthesized Probe
  source 1..80: mol_type = other DNA

SEQ ID NO: 90645 - DNA, 80 bp, synthetic construct
  misc_feature 1..80: note = Artificially Synthesized Probe
  source 1..80: mol_type = other DNA
ccacggcctacaaccaacgcgtgggcaacgcccggggccagcagctccggagccctctgggacggtgactgcccacgcgc

SEQ ID NO: 90646 - DNA, 80 bp, synthetic construct
  misc_feature 1..80: note = Artificially Synthesized Probe
  source 1..80: mol_type = other DNA
tctgggttgtagggactggggagagagggagttggaatcgccagctgcccctggccaggggatccagaggttttgagcgt

SEQ ID NO: 90647 - DNA, 80 bp, synthetic construct
  misc_feature 1..80: note = Artificially Synthesized Probe
  source 1..80: mol_type = other DNA
gctgggaatcttcccgaacgcagactgagctagtcgagaacactaaaggagaaactccagtctggccaccagccagtcac

SEQ ID NO: 90648 - DNA, 80 bp, synthetic construct
  misc_feature 1..80: note = Artificially Synthesized Probe
  source 1..80: mol_type = other DNA
gcctctccaggccgccccccgccccgcagccaggacgcagacccccgacctgcgcacggacgggtgaccctccacctgcc

SEQ ID NO: 90649 - DNA, 80 bp, synthetic construct
  misc_feature 1..80: note = Artificially Synthesized Probe
  source 1..80: mol_type = other DNA
ccgggtgcgctgtcgccagcaagccttgtcctgccctgcccgccccgccttgcccgggccccagcaggaaggagggctgc

SEQ ID NO: 90650 - DNA, 80 bp, synthetic construct
  misc_feature 1..80: note = Artificially Synthesized Probe
  source 1..80: mol_type = other DNA
tgcccgtgtggagatgggccggagagcctgcggggccacgccccggcgcgggcggcgactcaggctccggatccgagtac

SEQ ID NO: 90651 - DNA, 80 bp, synthetic construct
  misc_feature 1..80: note = Artificially Synthesized Probe
  source 1..80: mol_type = other DNA
gaaggccccacccacaccccgggaggccccgctcacagtcccggaggcaccgccccctccagccggccccgcccacgcgc

SEQ ID NO: 90652 - DNA, 80 bp, synthetic construct
  misc_feature 1..80: note = Artificially Synthesized Probe
  source 1..80: mol_type = other DNA
ggagggcaacggtgtgatctcggctcactgcaacctctgcctcccaggttcaagcaattctcctgctcagcttcctgagt

SEQ ID NO: 90653 - DNA, 80 bp, synthetic construct
  misc_feature 1..80: note = Artificially Synthesized Probe
  source 1..80: mol_type = other DNA
gtgccctcccccagccaggcgccttcccagctgtggtcctggggaaggtgggctgcacaggccctggcggtgctaccact

SEQ ID NO: 90654 - DNA, 80 bp, synthetic construct; identical to SEQ ID NO: 33056
  misc_feature 1..80: note = Artificially Synthesized Probe
  source 1..80: mol_type = other DNA

SEQ ID NO: 90655 - DNA, 80 bp, synthetic construct
  misc_feature 1..80: note = Artificially Synthesized Probe
  source 1..80: mol_type = other DNA
ttggagacctaggggttagtgaataaactgtggggcacttaggtggaagtgcagatttctccttattcatttgtcagcac

SEQ ID NO: 90656 - DNA, 80 bp, synthetic construct
  misc_feature 1..80: note = Artificially Synthesized Probe
  source 1..80: mol_type = other DNA
atcaattatcgccactgggttggtcaaatgacccgtctttattgcttgtttaattacctgtttaattatatcttcaccac

SEQ ID NO: 90657 - DNA, 80 bp, synthetic construct; identical to SEQ ID NO: 33057
  misc_feature 1..80: note = Artificially Synthesized Probe
  source 1..80: mol_type = other DNA

SEQ ID NO: 90658 - DNA, 80 bp, synthetic construct
  misc_feature 1..80: note = Artificially Synthesized Probe
  source 1..80: mol_type = other DNA
tccctccacagagcccacgacccgtacctctcctcgtgacctgggggccagcttaggaagggccggcacagcccacactg

SEQ ID NO: 90659 - DNA, 80 bp, synthetic construct
  misc_feature 1..80: note = Artificially Synthesized Probe
  source 1..80: mol_type = other DNA
aggaggctttgtgcacagcttcccctcgctgggccgagctgctctccccgcgaagggcacaatggggcattgtgcagagc

SEQ ID NO: 90660 - DNA, 80 bp, synthetic construct
  misc_feature 1..80: note = Artificially Synthesized Probe
  source 1..80: mol_type = other DNA
cccatccactgcccagaatggctccagagcaggtcaccgggggcagggcttgggccggggagaggtggaccagcagctct

SEQ ID NO: 90661 - DNA, 80 bp, synthetic construct
  misc_feature 1..80: note = Artificially Synthesized Probe
  source 1..80: mol_type = other DNA
atggtgaaaccccgcctctactaaaaatacaaaaaaattagccaggtgtggtggcgggcacctgtaatcccagctactcg

SEQ ID NO: 90662 - DNA, 80 bp, synthetic construct
  misc_feature 1..80: note = Artificially Synthesized Probe
  source 1..80: mol_type = other DNA
tttgatgtgtttaggtttgaatttctttgggtttttcctatttagggtttgctcagtttattgactcggtaggtttgtcc

SEQ ID NO: 90663 - DNA, 80 bp, synthetic construct; identical to SEQ ID NO: 33058
  misc_feature 1..80: note = Artificially Synthesized Probe
  source 1..80: mol_type = other DNA

SEQ ID NO: 90664 - DNA, 80 bp, synthetic construct
  misc_feature 1..80: note = Artificially Synthesized Probe
  source 1..80: mol_type = other DNA
taaacaccgagtcgttcactggcaaatggcttatttcatgctatgtgaatttcgcctcgaattttagaaaagtaaaatga

SEQ ID NO: 90665 - DNA, 80 bp, synthetic construct; identical to SEQ ID NO: 32933
  misc_feature 1..80: note = Artificially Synthesized Probe
  source 1..80: mol_type = other DNA

SEQ ID NO: 90666 - DNA, 80 bp, synthetic construct
  misc_feature 1..80: note = Artificially Synthesized Probe
  source 1..80: mol_type = other DNA
gggcgcctgtagtcccagctactcgggaggctgaggcaggagaatgacgtgaacgcgggggctggagcttgcagtgagcc

SEQ ID NO: 90667 - DNA, 80 bp, synthetic construct; identical to SEQ ID NO: 33059
  misc_feature 1..80: note = Artificially Synthesized Probe
  source 1..80: mol_type = other DNA

SEQ ID NO: 90668 - DNA, 80 bp, synthetic construct
  misc_feature 1..80: note = Artificially Synthesized Probe
  source 1..80: mol_type = other DNA
cgaggcgggaggaggaggagggcgtcctgagagtgccctgtcaagcaaaaactctaagagaaaaagccaggctgacccag

SEQ ID NO: 90669 - DNA, 80 bp, synthetic construct
  misc_feature 1..80: note = Artificially Synthesized Probe
  source 1..80: mol_type = other DNA
cagcctgccctaggtgggaccctgtccccgccgtcccggcctgcgccagcacagcccccaggacccaggcacacacaagc

SEQ ID NO: 90670 - DNA, 80 bp, synthetic construct
  misc_feature 1..80: note = Artificially Synthesized Probe
  source 1..80: mol_type = other DNA
gcaggaagccagtgtgggcccgaagataatcgtgcacccttcatttaccccaatttttcatgtcctgaagtctgggtatg

SEQ ID NO: 90671 - DNA, 80 bp, synthetic construct
  misc_feature 1..80: note = Artificially Synthesized Probe
  source 1..80: mol_type = other DNA
ccatttgctggttgtcctgggacgatgactcacagacggctgttctgcttggctcaccctgtcctctccctgcaccctcg

SEQ ID NO: 90672 - DNA, 80 bp, synthetic construct; identical to SEQ ID NO: 33060
  misc_feature 1..80: note = Artificially Synthesized Probe
  source 1..80: mol_type = other DNA

SEQ ID NO: 90673 - DNA, 80 bp, synthetic construct
  misc_feature 1..80: note = Artificially Synthesized Probe
  source 1..80: mol_type = other DNA
gcgtaacaaacagcctcagagcccaccgttgtgtgtcgccaggcggtgctgtccatgcccaggccccaagaaaggcaggg

SEQ ID NO: 90674 - DNA, 80 bp, synthetic construct; identical to SEQ ID NO: 32944
  misc_feature 1..80: note = Artificially Synthesized Probe
  source 1..80: mol_type = other DNA

SEQ ID NO: 90675 - DNA, 80 bp, synthetic construct
  misc_feature 1..80: note = Artificially Synthesized Probe
  source 1..80: mol_type = other DNA
cttccccacgctcagaaaaataaatacttgggagacagcagagacattttcacagggtgtgttttcatttgcctttggca

SEQ ID NO: 90676 - DNA, 80 bp, synthetic construct; identical to SEQ ID NO: 33061
  misc_feature 1..80: note = Artificially Synthesized Probe
  source 1..80: mol_type = other DNA

SEQ ID NO: 90677 - DNA, 80 bp, synthetic construct
  misc_feature 1..80: note = Artificially Synthesized Probe
  source 1..80: mol_type = other DNA
tgatgggctgagagagccccccaggccctgtgtcccttctcagaggacctcagccccccagtgcctgggccacggatggg

SEQ ID NO: 90678 - DNA, 80 bp, synthetic construct
  misc_feature 1..80: note = Artificially Synthesized Probe
  source 1..80: mol_type = other DNA
tctggcgtcagacagcaccctcctgtacacggcacagctgtactgcagggttagggacaggatttactgccaccaacgga

SEQ ID NO: 90679 - DNA, 80 bp, synthetic construct
  misc_feature 1..80: note = Artificially Synthesized Probe
  source 1..80: mol_type = other DNA
ttatcagacgagaagtgcagagagcaaatgcgtgctgttggcgccccccacccccacactgagagtggagacggataggc

SEQ ID NO: 90680 - DNA, 80 bp, synthetic construct
  misc_feature 1..80: note = Artificially Synthesized Probe
  source 1..80: mol_type = other DNA
cctttccacatgcgaacagcctgggcaggggtccccagcggtcagtagctactcccgccagcgcgggttcacggatcagg

SEQ ID NO: 90681 - DNA, 80 bp, synthetic construct; identical to SEQ ID NO: 33062
  misc_feature 1..80: note = Artificially Synthesized Probe
  source 1..80: mol_type = other DNA

SEQ ID NO: 90682 - DNA, 80 bp, synthetic construct
  misc_feature 1..80: note = Artificially Synthesized Probe
  source 1..80: mol_type = other DNA
gaagctgactcccgaagggggtcttgagaggggtcctgcgaacccctcctctcccctggagacccgtccgggggcggggc

SEQ ID NO: 90683 - DNA, 80 bp, synthetic construct
  misc_feature 1..80: note = Artificially Synthesized Probe
  source 1..80: mol_type = other DNA
ggccaaggctgtgcacacaccggctgccagcgggttcacgcccgccgggccctccctgtgcttctcagaggccgcacaaa

SEQ ID NO: 90684 - DNA, 80 bp, synthetic construct
  misc_feature 1..80: note = Artificially Synthesized Probe
  source 1..80: mol_type = other DNA
cgtgccctgggcccaacacacaccacacacacacacacaccatacacatgcacaccacacatcacaaacacacccacacc

SEQ ID NO: 90685 - DNA, 80 bp, synthetic construct; identical to SEQ ID NO: 33063
  misc_feature 1..80: note = Artificially Synthesized Probe
  source 1..80: mol_type = other DNA

SEQ ID NO: 90686 - DNA, 80 bp, synthetic construct
  misc_feature 1..80: note = Artificially Synthesized Probe
  source 1..80: mol_type = other DNA
actctaatacctccctcatcttggtgctatcatctgtcgactgtcctttttcaccaatgtcttcctgtttcctgctgtga

SEQ ID NO: 90687 - DNA, 80 bp, synthetic construct
  misc_feature 1..80: note = Artificially Synthesized Probe
  source 1..80: mol_type = other DNA
cacacacaccataaacacaccccatacatacatcccatacacatatcacacattacataccatacaaacacacaccacac

SEQ ID NO: 90688 - DNA, 80 bp, synthetic construct
  misc_feature 1..80: note = Artificially Synthesized Probe
  source 1..80: mol_type = other DNA
gcctgtccacccacattcttctctgcggctgtccttggcgcccaggccagggcatgtggagctacaaatgtcatctacac

SEQ ID NO: 90689 - DNA, 80 bp, synthetic construct
  misc_feature 1..80: note = Artificially Synthesized Probe
  source 1..80: mol_type = other DNA
cccagctgaaggggtggggcagggatgggagacaggggaggagggtgtgtgtgcagctcccccctggatgaagacatggg

SEQ ID NO: 90690 - DNA, 80 bp, synthetic construct; identical to SEQ ID NO: 33064
  misc_feature 1..80: note = Artificially Synthesized Probe
  source 1..80: mol_type = other DNA

SEQ ID NO: 90691 - DNA, 80 bp, synthetic construct
  misc_feature 1..80: note = Artificially Synthesized Probe
  source 1..80: mol_type = other DNA
cagcaagtgcttaattaatacctggtgaccctcaagccatcccgacacctccctctctgaaagctccgtcccggcgtcct

SEQ ID NO: 90692 - DNA, 80 bp, synthetic construct
  misc_feature 1..80: note = Artificially Synthesized Probe
  source 1..80: mol_type = other DNA
ccacataccgccctcccgggagtgcaccaacacgtcctcagctgactggcctaggcccccaccaccccgccacagagact

SEQ ID NO: 90693 - DNA, 80 bp, synthetic construct; identical to SEQ ID NO: 33065
  misc_feature 1..80: note = Artificially Synthesized Probe
  source 1..80: mol_type = other DNA

SEQ ID NO: 90694 - DNA, 80 bp, synthetic construct
  misc_feature 1..80: note = Artificially Synthesized Probe
  source 1..80: mol_type = other DNA
ggaccggacccccaccctcactgcttccacttaaacccccacttctgcctgcctgcatcccaggcctaacagatgagttc

SEQ ID NO: 90695 - DNA, 80 bp, synthetic construct
  misc_feature 1..80: note = Artificially Synthesized Probe
  source 1..80: mol_type = other DNA
aggccaggctggcagccagctctccacctacgatgcgtggagcctcccaactcgcgcactccgtctccccaccgctgctt

SEQ ID NO: 90696 - DNA, 80 bp, synthetic construct
  misc_feature 1..80: note = Artificially Synthesized Probe
  source 1..80: mol_type = other DNA
cttgctcctgccaggttggggtagaactccagtggacgcattgggagtattccttgttgtttctgggtagggtgggagtc

SEQ ID NO: 90697 - DNA, 80 bp, synthetic construct
  misc_feature 1..80: note = Artificially Synthesized Probe
  source 1..80: mol_type = other DNA
tgcggacgggggcgggcggccgctgggggcaccagctctcggccgggccagaacagggggtaggaggcgcgtcctgtgcg

SEQ ID NO: 90698 - DNA, 80 bp, synthetic construct; identical to SEQ ID NO: 33066
  misc_feature 1..80: note = Artificially Synthesized Probe
  source 1..80: mol_type = other DNA

SEQ ID NO: 90699 - DNA, 80 bp, synthetic construct
  misc_feature 1..80: note = Artificially Synthesized Probe
  source 1..80: mol_type = other DNA
ccggacccgcggttggacgttcgcctcggggggggcaatgtcccctctccgaccccgcggtccccaccagggcggcacac

SEQ ID NO: 90700 - DNA, 80 bp, synthetic construct
  misc_feature 1..80: note = Artificially Synthesized Probe
  source 1..80: mol_type = other DNA
atccgcccggcggccccagggactcagcgccggggtcagcgcaggccccgcccagcgctcccgccccctccagctggccg

SEQ ID NO: 90701 - DNA, 80 bp, synthetic construct
  misc_feature 1..80: note = Artificially Synthesized Probe
  source 1..80: mol_type = other DNA
cggaaccgaccctgtcctggaccgcaggcagcagctgaccccgcgccaccggcctgcgggcgagacctcaggcgcgagac

SEQ ID NO: 90702 - DNA, 80 bp, synthetic construct
  misc_feature 1..80: note = Artificially Synthesized Probe
  source 1..80: mol_type = other DNA
cctcgtgtggtctccactgataccacagaagcgggggatccttcctgcccacttggatgaaaatctcagcttcctatttg

SEQ ID NO: 90703 - DNA, 80 bp, synthetic construct; identical to SEQ ID NO: 32945
  misc_feature 1..80: note = Artificially Synthesized Probe
  source 1..80: mol_type = other DNA

SEQ ID NO: 90704 - DNA, 80 bp, synthetic construct
  misc_feature 1..80: note = Artificially Synthesized Probe
  source 1..80: mol_type = other DNA
ctgttttatgtataacgtccagggatcttggttgcacttagtgggaggaacaggggtaagtgtctgttccatcttccagt

SEQ ID NO: 90705 - DNA, 80 bp, synthetic construct
  misc_feature 1..80: note = Artificially Synthesized Probe
  source 1..80: mol_type = other DNA
ttcacataaaatagttactgcttttcacacttggttttcacagtatccatcctttcaggtagactttgggactcatggat

SEQ ID NO: 90706 - DNA, 80 bp, synthetic construct
  misc_feature 1..80: note = Artificially Synthesized Probe
  source 1..80: mol_type = other DNA
tgcgatctggggtgggggctggggggctctgaaggctgctgagacggggcagtaacagagaagacccgtattgagcctcg

SEQ ID NO: 90707 - DNA, 80 bp, synthetic construct
  misc_feature 1..80: note = Artificially Synthesized Probe
  source 1..80: mol_type = other DNA
taggagggcggccaccccaccgggggctctgggatggagcctcccctggactgcctgaggccgggcccatgaggagggac

SEQ ID NO: 90708 - DNA, 80 bp, synthetic construct; identical to SEQ ID NO: 32946
  misc_feature 1..80: note = Artificially Synthesized Probe
  source 1..80: mol_type = other DNA

SEQ ID NO: 90709 - DNA, 80 bp, synthetic construct
  misc_feature 1..80: note = Artificially Synthesized Probe
  source 1..80: mol_type = other DNA
gcctgggaaggtggggagaggaacctactgctcatggtgtggcgtctccaccatcaggccagtcctggcgcaaggtgcct

SEQ ID NO: 90710 - DNA, 80 bp, synthetic construct
  misc_feature 1..80: note = Artificially Synthesized Probe
  source 1..80: mol_type = other DNA
gtctggtcacgtggacgtctccaatcctccatgctctgccccaccctgggccccaccccacactgtcctcagatcccctc

SEQ ID NO: 90711 - DNA, 80 bp, synthetic construct
  misc_feature 1..80: note = Artificially Synthesized Probe
  source 1..80: mol_type = other DNA
gagaggagggtgacttcccccatggctaccacctctggctcctgagaatctgaccctgcggggctccctccttggaatgt

SEQ ID NO: 90712 - DNA, 80 bp, synthetic construct; identical to SEQ ID NO: 32947
  misc_feature 1..80: note = Artificially Synthesized Probe
  source 1..80: mol_type = other DNA

SEQ ID NO: 90713 - DNA, 80 bp, synthetic construct
  misc_feature 1..80: note = Artificially Synthesized Probe
  source 1..80: mol_type = other DNA
tgggatcccagcagacacctggatttgggggagacccctgagcagcggcagggagggcatcctacctgggcgggggcctg

SEQ ID NO: 90714 - DNA, 80 bp, synthetic construct
  misc_feature 1..80: note = Artificially Synthesized Probe
  source 1..80: mol_type = other DNA
gacgctcggctgtgccctccactccctcctgaggctttcctggaggtgggttccctgggcagccgcactccagctctttg

SEQ ID NO: 90715 - DNA, 80 bp, synthetic construct
  misc_feature 1..80: note = Artificially Synthesized Probe
  source 1..80: mol_type = other DNA
tgagacgggaccgggaggacagaaacagcagctctgtccatgggtgcctctgctacccccagccctggggattccttctt

SEQ ID NO: 90716 - DNA, 80 bp, synthetic construct; identical to SEQ ID NO: 32948
  misc_feature 1..80: note = Artificially Synthesized Probe
  source 1..80: mol_type = other DNA

SEQ ID NO: 90717 - DNA, 80 bp, synthetic construct
  misc_feature 1..80: note = Artificially Synthesized Probe
  source 1..80: mol_type = other DNA
ggggtacaggcaggtccatgcgcccgccagggaccgtcccccacctggaaggccgcgaaccacatcagccagtccaggcg

SEQ ID NO: 90718 - DNA, 80 bp, synthetic construct
  misc_feature 1..80: note = Artificially Synthesized Probe
  source 1..80: mol_type = other DNA
cgaggcaggccaggcccacgtcacacaccggctgggccgagtggggtgcatgggtggggggggttccccgactgtccatc

SEQ ID NO: 90719 - DNA, 80 bp, synthetic construct
  misc_feature 1..80: note = Artificially Synthesized Probe
  source 1..80: mol_type = other DNA
ccatgcccctcggcagctcagggtggacatgagggggacagaggccaaggggctggccccaggacagggagggtgcctgt

SEQ ID NO: 90720 - DNA, 80 bp, synthetic construct
  misc_feature 1..80: note = Artificially Synthesized Probe
  source 1..80: mol_type = other DNA
gaaggcccccacccccatctcccctggagcagggtagcgggcaggtctctctgctgagccctgtataaggtcccgcctga

SEQ ID NO: 90721 - DNA, 80 bp, synthetic construct
  misc_feature 1..80: note = Artificially Synthesized Probe
  source 1..80: mol_type = other DNA
ccaggcccggtagtggggacagcacggcctgtgcctgggtcaggctggggtggggcaggggacacttggggtcatggggg

SEQ ID NO: 90722 - DNA, 80 bp, synthetic construct; identical to SEQ ID NO: 32949
  misc_feature 1..80: note = Artificially Synthesized Probe
  source 1..80: mol_type = other DNA

SEQ ID NO: 90723 - DNA, 80 bp, synthetic construct
  misc_feature 1..80: note = Artificially Synthesized Probe
  source 1..80: mol_type = other DNA
ctgcggacggcgctgactctcctcctaccctggcgtccccaacccacacgggcaggctgtggggctggcaccacccgact

SEQ ID NO: 90724 - DNA, 80 bp, synthetic construct
  misc_feature 1..80: note = Artificially Synthesized Probe
  source 1..80: mol_type = other DNA
caggctgggcaccatagtcagccagttcaggaagctgaggttcccgctgacgatgaggacggcctgtggagacgccgcag

SEQ ID NO: 90725 - DNA, 80 bp, synthetic construct; identical to SEQ ID NO: 32950
  misc_feature 1..80: note = Artificially Synthesized Probe
  source 1..80: mol_type = other DNA

SEQ ID NO: 90726 - DNA, 80 bp, synthetic construct
  misc_feature 1..80: note = Artificially Synthesized Probe
  source 1..80: mol_type = other DNA
acgcccctcagccgatgggtgacacagacaacaggggccgtgggggggccaccagtaacgcccccactccaaaatacgaa

SEQ ID NO: 90727 - DNA, 80 bp, synthetic construct
  misc_feature 1..80: note = Artificially Synthesized Probe
  source 1..80: mol_type = other DNA
agagggacccgcttctggacatccccgcaggccagcgatcgttaggtgacgaaactggagatggagccgctgtccctgca

SEQ ID NO: 90728 - DNA, 80 bp, synthetic construct
  misc_feature 1..80: note = Artificially Synthesized Probe
  source 1..80: mol_type = other DNA
gcttcctcagacagctccgtcagccagatttgatgcatcaaagcccagcctttatccccgtaactcaggaggaaggttga

SEQ ID NO: 90729 - DNA, 80 bp, synthetic construct; identical to SEQ ID NO: 32951
  misc_feature 1..80: note = Artificially Synthesized Probe
  source 1..80: mol_type = other DNA

SEQ ID NO: 90730 - DNA, 80 bp, synthetic construct
  misc_feature 1..80: note = Artificially Synthesized Probe
  source 1..80: mol_type = other DNA
taggcactgaggtctgacctttgggcccactcttggggatgctctggaggagatgccacaggtgacactggaatgtcctg

SEQ ID NO: 90731 - DNA, 80 bp, synthetic construct
  misc_feature 1..80: note = Artificially Synthesized Probe
  source 1..80: mol_type = other DNA
aggaattgtcaccgtcacaagctcccggccctccaggccccttcgcagttgtgcagcaggagcggaagcttctcagccca

SEQ ID NO: 90732 - DNA, 80 bp, synthetic construct
  misc_feature 1..80: note = Artificially Synthesized Probe
  source 1..80: mol_type = other DNA
gcctgcctgggtcagggtgggccctgcctgagtgtatttccaaagcccccttgggtcatcctgctgtgggctcagtgggg

SEQ ID NO: 90733 - DNA, 80 bp, synthetic construct
  misc_feature 1..80: note = Artificially Synthesized Probe
  source 1..80: mol_type = other DNA
cggctgttttgttatgaaaacgcagttccgcgtagagtgcacggcctgagcgctcctgggggacctcgccttccttgttt

SEQ ID NO: 90734 - DNA, 80 bp, synthetic construct
  misc_feature 1..80: note = Artificially Synthesized Probe
  source 1..80: mol_type = other DNA
gccggcacaggaagaggagcttgaggtgatggaatcctgggcccaagagacggagcagcaggtgttccgaggccaacggc

SEQ ID NO: 90735 - DNA, 80 bp, synthetic construct; identical to SEQ ID NO: 32952
  misc_feature 1..80: note = Artificially Synthesized Probe
  source 1..80: mol_type = other DNA

SEQ ID NO: 90736 - DNA, 80 bp, synthetic construct
  misc_feature 1..80: note = Artificially Synthesized Probe
  source 1..80: mol_type = other DNA
gaatcggagttcagcacgtgccccgaaagggacagacccagggtcatggtgctcagggagggaggctggacggaggccgc

SEQ ID NO: 90737 - DNA, 80 bp, synthetic construct
  misc_feature 1..80: note = Artificially Synthesized Probe
  source 1..80: mol_type = other DNA
cacgctgtgaacgtgctggaggcccccgagttcacttcaaaagcatgaacttactttgcgttatctgtgttgtttcatca

SEQ ID NO: 90738 - DNA, 80 bp, synthetic construct
  misc_feature 1..80: note = Artificially Synthesized Probe
  source 1..80: mol_type = other DNA
tggggtggggccggacagcccgctgtgggcaggcgcctcagaggttccagacctgagctcaccccctgcccctcccgccc

SEQ ID NO: 90739 - DNA, 80 bp, synthetic construct; identical to SEQ ID NO: 32953
  misc_feature 1..80: note = Artificially Synthesized Probe
  source 1..80: mol_type = other DNA

SEQ ID NO: 90740 - DNA, 80 bp, synthetic construct
  misc_feature 1..80: note = Artificially Synthesized Probe
  source 1..80: mol_type = other DNA
ccccagccaggacactacaatgttagagggcgcgggtcactctcagccccacaccatatcatcccccagacaccctctgc

SEQ ID NO: 90741 - DNA, 80 bp, synthetic construct
  misc_feature 1..80: note = Artificially Synthesized Probe
  source 1..80: mol_type = other DNA
gccacgccgcagagcacagccacgaccctggtgcttccacctcgtcctggacacagtgtggggctggagaggatgacgca

SEQ ID NO: 90742 - DNA, 80 bp, synthetic construct
  misc_feature 1..80: note = Artificially Synthesized Probe
  source 1..80: mol_type = other DNA
tccaccgccactcaccccaccaggcagcggactccaaaacggggccagcaccggcactaagggaacccgcagcctggccg

SEQ ID NO: 90743 - DNA, 80 bp, synthetic construct; identical to SEQ ID NO: 32934
  misc_feature 1..80: note = Artificially Synthesized Probe
  source 1..80: mol_type = other DNA

SEQ ID NO: 90744 - DNA, 80 bp, synthetic construct; identical to SEQ ID NO: 32954
  misc_feature 1..80: note = Artificially Synthesized Probe
  source 1..80: mol_type = other DNA

SEQ ID NO: 90745 - DNA, 80 bp, synthetic construct
  misc_feature 1..80: note = Artificially Synthesized Probe
  source 1..80: mol_type = other DNA
ccacggagccaagcagaccaacacccctgcctgggctgtgtgtccaggggtgcccttggaccggcctcggaaccagaccc

SEQ ID NO: 90746 - DNA, 80 bp, synthetic construct
  misc_feature 1..80: note = Artificially Synthesized Probe
  source 1..80: mol_type = other DNA
gacggctcaggagtcacccgtgtgtgtggccccacccaggtcaggaatcctggaacacacccctccattcaggctggaca

SEQ ID NO: 90747 - DNA, 80 bp, synthetic construct
  misc_feature 1..80: note = Artificially Synthesized Probe
  source 1..80: mol_type = other DNA
cgtgcggaccacgggcgtctcggaaccgaagagaaacaagcagtggagcctgcaggaggtgcaggagcccacgcgcggcc

SEQ ID NO: 90748 - DNA, 80 bp, synthetic construct; identical to SEQ ID NO: 32955
  misc_feature 1..80: note = Artificially Synthesized Probe
  source 1..80: mol_type = other DNA

SEQ ID NO: 90749 - DNA, 80 bp, synthetic construct
  misc_feature 1..80: note = Artificially Synthesized Probe
  source 1..80: mol_type = other DNA
aaagtgttctaaaataagtcaattaataaaacgaaacagagctgaaacactggagcaaaggacgcaagtggcttggggcg

SEQ ID NO: 90750 - DNA, 80 bp, synthetic construct
  misc_feature 1..80: note = Artificially Synthesized Probe
  source 1..80: mol_type = other DNA
tggctgattgattgataaccactgaggaaacagaggatcttccttatccattagaggagggaaaataacagaaaaaaacg

SEQ ID NO: 90751 - DNA, 80 bp, synthetic construct
  misc_feature 1..80: note = Artificially Synthesized Probe
  source 1..80: mol_type = other DNA
gcatgaccttgctccccgctgtctcaggagatgcgtgtcggtgaggacacaggccttgaggccgggcgcacacctgcagt

SEQ ID NO: 90752 - DNA, 80 bp, synthetic construct; identical to SEQ ID NO: 32956
  misc_feature 1..80: note = Artificially Synthesized Probe
  source 1..80: mol_type = other DNA

SEQ ID NO: 90753 - DNA, 80 bp, synthetic construct
  misc_feature 1..80: note = Artificially Synthesized Probe
  source 1..80: mol_type = other DNA
tgttctgggaatgtgaacttgcttcagcatccacagcattaatgtaactcgccacgttacagacgaaacaacaagtcatc

SEQ ID NO: 90754 - DNA, 80 bp, synthetic construct
  misc_feature 1..80: note = Artificially Synthesized Probe
  source 1..80: mol_type = other DNA
gagggtccctgaggcgcctgatgggagagagggatcagcagctccaagaggagtggggtcgggcctttggaaaacctccc

SEQ ID NO: 90755 - DNA, 80 bp, synthetic construct
  misc_feature 1..80: note = Artificially Synthesized Probe
  source 1..80: mol_type = other DNA
ggggggatgaaaccgggccaagaacacatgtgtgcacaggctgtgtgtgcctgcatgtgtgggatgcgtgtaggctgtgg

SEQ ID NO: 90756 - DNA, 80 bp, synthetic construct
  misc_feature 1..80: note = Artificially Synthesized Probe
  source 1..80: mol_type = other DNA
gcggggtggcgggccctccctgctgtgggaccccagacccaggacagcactcgagcccgcccagcaggggagaaagggat

SEQ ID NO: 90757 - DNA, 80 bp, synthetic construct; identical to SEQ ID NO: 32957
  misc_feature 1..80: note = Artificially Synthesized Probe
  source 1..80: mol_type = other DNA

SEQ ID NO: 90758 - DNA, 80 bp, synthetic construct
  misc_feature 1..80: note = Artificially Synthesized Probe
  source 1..80: mol_type = other DNA
agctattccaggagcccccaaacacgcgtggggtccggctacatggaaccgactgaagctattccaggagccctgagcag

SEQ ID NO: 90759 - DNA, 80 bp, synthetic construct
  misc_feature 1..80: note = Artificially Synthesized Probe
  source 1..80: mol_type = other DNA
ggagctgctcagggccccggcggccagagtgagggtccttgctggggggaggggtcaagaacagcacagccaccctggac

SEQ ID NO: 90760 - DNA, 80 bp, synthetic construct
  misc_feature 1..80: note = Artificially Synthesized Probe
  source 1..80: mol_type = other DNA
caggcacgcaccgtgaaacaggacccggccaacaaccatgggcgcccccacgtgcaccaacgtggcgtggcacccgtgcc

SEQ ID NO: 90761 - DNA, 80 bp, synthetic construct; identical to SEQ ID NO: 32958
  misc_feature 1..80: note = Artificially Synthesized Probe
  source 1..80: mol_type = other DNA

SEQ ID NO: 90762 - DNA, 80 bp, synthetic construct
  misc_feature 1..80: note = Artificially Synthesized Probe
  source 1..80: mol_type = other DNA
cgttagggggtacccggggttccgggggctgggggaggcagcccctcacccacatggaggcaaatgaccctggcctctct

SEQ ID NO: 90763 - DNA, 80 bp, synthetic construct
  misc_feature 1..80: note = Artificially Synthesized Probe
  source 1..80: mol_type = other DNA
gcagctgcaggaaacgctcttgggaggagccagtccttggaggaagcctgggaaggagaccctcagcctgcagcccggga

SEQ ID NO: 90764 - DNA, 80 bp, synthetic construct
  misc_feature 1..80: note = Artificially Synthesized Probe
  source 1..80: mol_type = other DNA
cgcgggctcacctggaacaggatctgcagcaccccgtggatgatgcacgcccgccggccgaggaagaggaagaagggcac

SEQ ID NO: 90765 - DNA, 80 bp, synthetic construct
  misc_feature 1..80: note = Artificially Synthesized Probe
  source 1..80: mol_type = other DNA
tgaggtgcctggccgatctcggggggcggggctagggagaggcttgtgggtccctggccccctgaccccggctcctactg

SEQ ID NO: 90766 - DNA, 80 bp, synthetic construct; identical to SEQ ID NO: 32959
  misc_feature 1..80: note = Artificially Synthesized Probe
  source 1..80: mol_type = other DNA

SEQ ID NO: 90767 - DNA, 80 bp, synthetic construct
  misc_feature 1..80: note = Artificially Synthesized Probe
  source 1..80: mol_type = other DNA
ggactgaggccaggtggtgccaggcagagaagtcacactggaccccgaggtcgacctctgagcagctcagcagcagactg

SEQ ID NO: 90768 - DNA, 80 bp, synthetic construct
  misc_feature 1..80: note = Artificially Synthesized Probe
  source 1..80: mol_type = other DNA
ttggggaccagcaggaatggggcccgggtcccgagcccagctcaaggctctaagcgcaagacctggctgtggggacctgg

SEQ ID NO: 90769 - DNA, 80 bp, synthetic construct
  misc_feature 1..80: note = Artificially Synthesized Probe
  source 1..80: mol_type = other DNA
aggcaggcagatcacttgagcccaggagtttgaagccagcctggacaacttatcaagaccccatttctataaaaataaaa

SEQ ID NO: 90770 - DNA, 80 bp, synthetic construct; identical to SEQ ID NO: 32960
  misc_feature 1..80: note = Artificially Synthesized Probe
  source 1..80: mol_type = other DNA

SEQ ID NO: 90771 - DNA, 80 bp, synthetic construct
  misc_feature 1..80: note = Artificially Synthesized Probe
  source 1..80: mol_type = other DNA
ctgcttgcctttgtggaggggcctgcccgcatgctgctcagggctgaaggccttgctagcacagcccgcgggagccattg

SEQ ID NO: 90772 - DNA, 80 bp, synthetic construct
  misc_feature 1..80: note = Artificially Synthesized Probe
  source 1..80: mol_type = other DNA
gaggctacgtggaagtcggggcccccaggtggcagaaagcgcacataggggctgtgctgggcagcgcttgctccggggtg

SEQ ID NO: 90773 - DNA, 80 bp, synthetic construct
  misc_feature 1..80: note = Artificially Synthesized Probe
  source 1..80: mol_type = other DNA
gcttagagggcaaagagttatttttgtttacactgaggctaggagaaaacatcatgacctgaaacttggctgtgagccgt

SEQ ID NO: 90774 - DNA, 80 bp, synthetic construct; identical to SEQ ID NO: 32961
  misc_feature 1..80: note = Artificially Synthesized Probe
  source 1..80: mol_type = other DNA

SEQ ID NO: 90775 - DNA, 80 bp, synthetic construct
  misc_feature 1..80: note = Artificially Synthesized Probe
  source 1..80: mol_type = other DNA
accggaatgcctggtctgccacttcccttttaggctgcttgttgtgtgtttggggttgcggcgagacccatgcaggaggc

SEQ ID NO: 90776 - DNA, 80 bp, synthetic construct
  misc_feature 1..80: note = Artificially Synthesized Probe
  source 1..80: mol_type = other DNA
gggagcgggggctgcttatgcttatcaggtgagggtcttgggatgaagaaggaggtcccatgtgttccaggaacaagcca

SEQ ID NO: 90777 - DNA, 80 bp, synthetic construct
  misc_feature 1..80: note = Artificially Synthesized Probe
  source 1..80: mol_type = other DNA
gatggagaaaaatgacactgagtgataaagacggtgacaaatgtaacagacatggggctgacatgacccaatgctgtgtt

SEQ ID NO: 90778 - DNA, 80 bp, synthetic construct; identical to SEQ ID NO: 32962
  misc_feature 1..80: note = Artificially Synthesized Probe
  source 1..80: mol_type = other DNA

SEQ ID NO: 90779 - DNA, 80 bp, synthetic construct
  misc_feature 1..80: note = Artificially Synthesized Probe
  source 1..80: mol_type = other DNA
aaggcctcctgcagtgggattgcccatctttcccaaattcctgctcttgctttctgctccttcccaggacagggtcaagg

SEQ ID NO: 90780 - DNA, 80 bp, synthetic construct
  misc_feature 1..80: note = Artificially Synthesized Probe
  source 1..80: mol_type = other DNA
cataacaggaccaggagaaagttgctactgctcaggagaagagctgcccagcagaggccatcacaggaccaggagaaaga

SEQ ID NO: 90781 - DNA, 80 bp, synthetic construct
  misc_feature 1..80: note = Artificially Synthesized Probe
  source 1..80: mol_type = other DNA
gagaagccgcccagcggagcccatcgcaggaccaggagaaagaggagccacccagcggagcccatcgcaggaccaggaga

SEQ ID NO: 90782 - DNA, 80 bp, synthetic construct
  misc_feature 1..80: note = Artificially Synthesized Probe
  source 1..80: mol_type = other DNA
cccattgcaggaccaggagaaagaggagccacccagcggagcccattgcaggaccaggagaaagaggagctgctcagcag

SEQ ID NO: 90783 - DNA, 80 bp, synthetic construct
  misc_feature 1..80: note = Artificially Synthesized Probe
  source 1..80: mol_type = other DNA
aaagagaagccgcccagcgaagcccatcacaggaccaggagaaagaggagctgcccagcagaacctgtcacaggaccagg

SEQ ID NO: 90784 - DNA, 80 bp, synthetic construct; identical to SEQ ID NO: 32963
  misc_feature 1..80: note = Artificially Synthesized Probe
  source 1..80: mol_type = other DNA

SEQ ID NO: 90785 - DNA, 80 bp, synthetic construct
  misc_feature 1..80: note = Artificially Synthesized Probe
  source 1..80: mol_type = other DNA
tatagattcaagcaactcagcgaactccaagcacaaaaaatatgaggaaaacaacaccagataaccaaatggtcacattt

SEQ ID NO: 90786 - DNA, 80 bp, synthetic construct
  misc_feature 1..80: note = Artificially Synthesized Probe
  source 1..80: mol_type = other DNA
gctcttttacatccttccttattttctatctacctgctttatctattattgaaatctccaactttatggatttgtctatg

SEQ ID NO: 90787 - DNA, 80 bp, synthetic construct; identical to SEQ ID NO: 32964
  misc_feature 1..80: note = Artificially Synthesized Probe
  source 1..80: mol_type = other DNA

SEQ ID NO: 90788 - DNA, 80 bp, synthetic construct
  misc_feature 1..80: note = Artificially Synthesized Probe
  source 1..80: mol_type = other DNA
taaggagttgtcacaggaaataatgcaaatgagacgagagtagagtacaatctttaaagtactaaacctgtcaacctaga

SEQ ID NO: 90789 - DNA, 80 bp, synthetic construct
  misc_feature 1..80: note = Artificially Synthesized Probe
  source 1..80: mol_type = other DNA
ttaggtggagggagaatgatcacagatggaaacctggatctccacgcaggagtgaagagctctggaagtggtgatgttag

SEQ ID NO: 90790 - DNA, 80 bp, synthetic construct
  misc_feature 1..80: note = Artificially Synthesized Probe
  source 1..80: mol_type = other DNA
agaatgatcacggatggaagcctggatctccacgtaggagtgaagagctctggaaatggtgatattaggtagagggagaa

SEQ ID NO: 90791 - DNA, 80 bp, synthetic construct
  misc_feature 1..80: note = Artificially Synthesized Probe
  source 1..80: mol_type = other DNA
aagtacccgagaaggccatggcaccgccccggagggcttgagagtgttgaaaataggggatctcccagcccttttgaaat

SEQ ID NO: 90792 - DNA, 80 bp, synthetic construct; identical to SEQ ID NO: 32965
  misc_feature 1..80: note = Artificially Synthesized Probe
  source 1..80: mol_type = other DNA

SEQ ID NO: 90793 - DNA, 80 bp, synthetic construct
  misc_feature 1..80: note = Artificially Synthesized Probe
  source 1..80: mol_type = other DNA
aatattcaattaatccagaggaaggtgtaaaataacagcaacaaaaaggaacagagaacacatgggaggatcagaaaaca

SEQ ID NO: 90794 - DNA, 80 bp, synthetic construct
  misc_feature 1..80: note = Artificially Synthesized Probe
  source 1..80: mol_type = other DNA
aggacttgtcagactggatttaaacataagacccaagcatacgccagctctaagagatccgcttcaaacacaaagacaca

SEQ ID NO: 90795 - DNA, 80 bp, synthetic construct
  misc_feature 1..80: note = Artificially Synthesized Probe
  source 1..80: mol_type = other DNA
tcaggaggccatttcacaatgttcatcaggaggtcagaagactctcaaacacgtatgtgcctgataatagagcttcaaaa

SEQ ID NO: 90796 - DNA, 80 bp, synthetic construct
  misc_feature 1..80: note = Artificially Synthesized Probe
  source 1..80: mol_type = other DNA
agaagagttgaaaaacactattggccaatttgatctaatgaatcctgacagaacactgtctgttcatttttggctcaaac

SEQ ID NO: 90797 - DNA, 80 bp, synthetic construct; identical to SEQ ID NO: 32966
  misc_feature 1..80: note = Artificially Synthesized Probe
  source 1..80: mol_type = other DNA

SEQ ID NO: 90798 - DNA, 80 bp, synthetic construct
  misc_feature 1..80: note = Artificially Synthesized Probe
  source 1..80: mol_type = other DNA
cagggctcagatgcaggcgctgctgtccttggctgcgtgggtagaacagccgtgagcactgctgaccttgaggcgccacc

SEQ ID NO: 90799 - DNA, 80 bp, synthetic construct
  misc_feature 1..80: note = Artificially Synthesized Probe
  source 1..80: mol_type = other DNA
gagtgatgccagggcacgggcctggggctttgaaccgcgcccggccaaaaccaccctgcagcgggccacctgccaggcca

SEQ ID NO: 90800 - DNA, 80 bp, synthetic construct
  misc_feature 1..80: note = Artificially Synthesized Probe
  source 1..80: mol_type = other DNA
gcgttccccaggcccctcccaccctaggcccccggcgttccccaggcccctcccaccctaggcccccggcgttccccagg

SEQ ID NO: 90801 - DNA, 80 bp, synthetic construct; identical to SEQ ID NO: 32935
  misc_feature 1..80: note = Artificially Synthesized Probe
  source 1..80: mol_type = other DNA

SEQ ID NO: 90802 - DNA, 80 bp, synthetic construct; identical to SEQ ID NO: 32967
  misc_feature 1..80: note = Artificially Synthesized Probe
  source 1..80: mol_type = other DNA

SEQ ID NO: 90803 - DNA, 80 bp, synthetic construct
  misc_feature 1..80: note = Artificially Synthesized Probe
  source 1..80: mol_type = other DNA
tcctggtcgcagttaaaggcattacaggatctcctggcccaaatccttgctgggtgggtcctgggacaccaggaggatag

SEQ ID NO: 90804 - DNA, 80 bp, synthetic construct
  misc_feature 1..80: note = Artificially Synthesized Probe
  source 1..80: mol_type = other DNA
gccacaagatacactgcgtggaagctggccgggccaggctgagcacttcaacacggattcctgcagctcctgctgggagt

SEQ ID NO: 90805 - DNA, 80 bp, synthetic construct
  misc_feature 1..80: note = Artificially Synthesized Probe
  source 1..80: mol_type = other DNA
ggaggccccgcagaactctgggagcccagcccagagagggctgctctgtgtggtccgccccacgcagagtgcgcgctcct

SEQ ID NO: 90806 - DNA, 80 bp, synthetic construct
  misc_feature 1..80: note = Artificially Synthesized Probe
  source 1..80: mol_type = other DNA
aaaactccccctgcaggtgtgggagcccagagacgcacccccaagttgcaggctgccggccacaggctgggacacccttg

SEQ ID NO: 90807 - DNA, 80 bp, synthetic construct; identical to SEQ ID NO: 32968
  misc_feature 1..80: note = Artificially Synthesized Probe
  source 1..80: mol_type = other DNA

SEQ ID NO: 90808 - DNA, 80 bp, synthetic construct
  misc_feature 1..80: note = Artificially Synthesized Probe
  source 1..80: mol_type = other DNA
ggatttcccgcagctttctagcaacagagttatgttcaactcccctaaaaagcaatggagaattgtttgcaacgttcagg

SEQ ID NO: 90809 - DNA, 80 bp, synthetic construct
  misc_feature 1..80: note = Artificially Synthesized Probe
  source 1..80: mol_type = other DNA
taaaagcagctgcgtgacccccacattcacaacctgctgttgcatccgcgtcgtcaggcaaccgctccgatgtggggacc

SEQ ID NO: 90810 - DNA, 80 bp, synthetic construct
  misc_feature 1..80: note = Artificially Synthesized Probe
  source 1..80: mol_type = other DNA
gggttttagggacagctacatggggaccccgggagagggatgcacaggtgggcagcagggccagccagtgtcaggcagca

SEQ ID NO: 90811 - DNA, 80 bp, synthetic construct
  misc_feature 1..80: note = Artificially Synthesized Probe
  source 1..80: mol_type = other DNA
gctctcttgtggaaggacagctgagctctttgcagtttttgtctgtgacggctgccgtaaacctctgcacgggtttctgc

SEQ ID NO: 90812 - DNA, 80 bp, synthetic construct; identical to SEQ ID NO: 32969
  misc_feature 1..80: note = Artificially Synthesized Probe
  source 1..80: mol_type = other DNA

SEQ ID NO: 90813 - DNA, 80 bp, synthetic construct
  misc_feature 1..80: note = Artificially Synthesized Probe
  source 1..80: mol_type = other DNA
ttaaccgactgaatttgccggcaactgcctttcgttaccagcagatgaaaaaagcggtgagtgtggggtgtgaggctgcg

SEQ ID NO: 90814 - DNA, 80 bp, synthetic construct
  misc_feature 1..80: note = Artificially Synthesized Probe
  source 1..80: mol_type = other DNA
ttgctctgtgctgctgaaacttccggaggttttcaggctcctgaagaggctcagcgtcccctacagcataggggcaactt

SEQ ID NO: 90815 - DNA, 80 bp, synthetic construct; identical to SEQ ID NO: 32970
  misc_feature 1..80: note = Artificially Synthesized Probe
  source 1..80: mol_type = other DNA

SEQ ID NO: 90816 - DNA, 80 bp, synthetic construct
  misc_feature 1..80: note = Artificially Synthesized Probe
  source 1..80: mol_type = other DNA
gtagctgtccctaaaaccccaccccagatgtggtgtcctcgctctccccacacactgccccctgtacctaggacccccca

SEQ ID NO: 90817 - DNA, 80 bp, synthetic construct
  misc_feature 1..80: note = Artificially Synthesized Probe
  source 1..80: mol_type = other DNA
gctctgaacgctcgctactccaggtactcgctcctggagccccaaggggcccccgggaagcaagaaaaggggctcctggg

SEQ ID NO: 90818 - DNA, 80 bp, synthetic construct
  misc_feature 1..80: note = Artificially Synthesized Probe
  source 1..80: mol_type = other DNA
accccgtgtgaccatcaggacatcaggctcatggctctctgtgagccaaggctcagcctgtcctgggatgtggatgataa

SEQ ID NO: 90819 - DNA, 80 bp, synthetic construct
  misc_feature 1..80: note = Artificially Synthesized Probe
  source 1..80: mol_type = other DNA
gttggatttggggctcagcagtccactctgacttcatcttaactaatcacaaggaggtcccagataaagccacgctccaa

SEQ ID NO: 90820 - DNA, 80 bp, synthetic construct
  misc_feature 1..80: note = Artificially Synthesized Probe
  source 1..80: mol_type = other DNA
cgatttcttggtatctttgccagcatgtggggttgttgctacttttattccagccgttttgatgggtgtgcagtggtgtc

SEQ ID NO: 90821 - DNA, 80 bp, synthetic construct; identical to SEQ ID NO: 32971
  misc_feature 1..80: note = Artificially Synthesized Probe
  source 1..80: mol_type = other DNA

SEQ ID NO: 90822 - DNA, 80 bp, synthetic construct
  misc_feature 1..80: note = Artificially Synthesized Probe
  source 1..80: mol_type = other DNA
tgcgtcctcgccggagtgcagctgtggcatgacccgtcccccagaaacaccacaccctggtggtcctggccaggtgagtc

SEQ ID NO: 90823 - DNA, 80 bp, synthetic construct
  misc_feature 1..80: note = Artificially Synthesized Probe
  source 1..80: mol_type = other DNA
tgtttgtggggacatggtgggcgcctcagcatctcttgccaatggaaagctgtgcgggacggtcctcaccagcacgcagc

SEQ ID NO: 90824 - DNA, 80 bp, synthetic construct
  misc_feature 1..80: note = Artificially Synthesized Probe
  source 1..80: mol_type = other DNA
actttcctgacccgtcctgagggtgatgggggagacacaggcccccctgcccacttttctgacctgtcctgagggcatct

SEQ ID NO: 90825 - DNA, 80 bp, synthetic construct; identical to SEQ ID NO: 32972
  misc_feature 1..80: note = Artificially Synthesized Probe
  source 1..80: mol_type = other DNA

SEQ ID NO: 90826 - DNA, 80 bp, synthetic construct
  misc_feature 1..80: note = Artificially Synthesized Probe
  source 1..80: mol_type = other DNA
gcgtgaggacggtgccagctccacgcttggaggcggtgagtgccagagcaaccctggcagaaaacgcaaaggcagtgaga

SEQ ID NO: 90827 - DNA, 80 bp, synthetic construct
  misc_feature 1..80: note = Artificially Synthesized Probe
  source 1..80: mol_type = other DNA
ggctcccacatggactgagaacaaatgactatccaagctccaggccccagaccacccccagcccccacgtgaacacgtga

SEQ ID NO: 90828 - DNA, 80 bp, synthetic construct
  misc_feature 1..80: note = Artificially Synthesized Probe
  source 1..80: mol_type = other DNA
gtaacgatggagccacagttccgtgtggcaggggctgggcacgcagccaggaagcccccaacaggcacctgtcaggggac

SEQ ID NO: 90829 - DNA, 80 bp, synthetic construct; identical to SEQ ID NO: 32973
  misc_feature 1..80: note = Artificially Synthesized Probe
  source 1..80: mol_type = other DNA

SEQ ID NO: 90830 - DNA, 80 bp, synthetic construct
  misc_feature 1..80: note = Artificially Synthesized Probe
  source 1..80: mol_type = other DNA
ggaagagagcagagggagagtcagtcacaggggctggggatgcggcggccccgacagaaacagcttcccaggaagacgaa

SEQ ID NO: 90831 - DNA, 80 bp, synthetic construct
  misc_feature 1..80: note = Artificially Synthesized Probe
  source 1..80: mol_type = other DNA
cacgggacgggtgtgagtgatgtcacgggacgggtgtgagtggtgtcacgggacgggtgtgagtggtgtcacgggacggg

SEQ ID NO: 90832 - DNA, 80 bp, synthetic construct
  misc_feature 1..80: note = Artificially Synthesized Probe
  source 1..80: mol_type = other DNA
ttgcgccttccccaacactcattctcagagctccacgcatcatcacgctacagaagttgcgtgtctttaaagaggacaaa

SEQ ID NO: 90833 - DNA, 80 bp, synthetic construct
  misc_feature 1..80: note = Artificially Synthesized Probe
  source 1..80: mol_type = other DNA
cacacactgcagctcgcctgctgtgaggactcctggggcacgggacaggcttccaggggcctgcagagggagccgccagc

SEQ ID NO: 90834 - DNA, 80 bp, synthetic construct; identical to SEQ ID NO: 32974
  misc_feature 1..80: note = Artificially Synthesized Probe
  source 1..80: mol_type = other DNA

SEQ ID NO: 90835 - DNA, 80 bp, synthetic construct
  misc_feature 1..80: note = Artificially Synthesized Probe
  source 1..80: mol_type = other DNA
actcgtcccctgtccaccagaccatccgcccacccgtccccctgtccaccgggccgtccgcccacccatgcccctgtcca

SEQ ID NO: 90836 - DNA, 80 bp, synthetic construct
  misc_feature 1..80: note = Artificially Synthesized Probe
  source 1..80: mol_type = other DNA
ctggcagtgcgcccacccatcccctgtccaccggatcgtccacccacccgtccccctgtccaccggaccgtccgcccacc

SEQ ID NO: 90837 - DNA, 80 bp, synthetic construct
  misc_feature 1..80: note = Artificially Synthesized Probe
  source 1..80: mol_type = other DNA
tgctccaccccatagaggccgcatgctgcaggcgcaggtgcgacaaggcgcagagaggaaggacggccaccagtcgtggc

SEQ ID NO: 90838 - DNA, 80 bp, synthetic construct; identical to SEQ ID NO: 32975
  misc_feature 1..80: note = Artificially Synthesized Probe
  source 1..80: mol_type = other DNA

SEQ ID NO: 90839 - DNA, 80 bp, synthetic construct
  misc_feature 1..80: note = Artificially Synthesized Probe
  source 1..80: mol_type = other DNA
ggtgagggcgcccccctcaggcagaagcgtggggtacagcagggctgaggaggccgcggggggaggcccaggagcccctg

SEQ ID NO: 90840 - DNA, 80 bp, synthetic construct
  misc_feature 1..80: note = Artificially Synthesized Probe
  source 1..80: mol_type = other DNA
agccccagctccagcctcggtctcctgcctggtcgggtcagcctcgggctcccagtagaatcctcctccccaggtcagcc

SEQ ID NO: 90841 - DNA, 80 bp, synthetic construct
  misc_feature 1..80: note = Artificially Synthesized Probe
  source 1..80: mol_type = other DNA
caggcaggacgggagccgccgggttctctggctacatgtgaccgagaaggcagcaggctctgctgctgtctgtgcaggac

SEQ ID NO: 90842 - DNA, 80 bp, synthetic construct
  misc_feature 1..80: note = Artificially Synthesized Probe
  source 1..80: mol_type = other DNA
ggtgtgagtggtgtctcgggatgggtgtgcgtggtgtcacgggatgggtgtgcagtggtgtctcgggatgggtgtgcgtg

SEQ ID NO: 90843 - DNA, 80 bp, synthetic construct; identical to SEQ ID NO: 32976
  misc_feature 1..80: note = Artificially Synthesized Probe
  source 1..80: mol_type = other DNA

SEQ ID NO: 90844 - DNA, 80 bp, synthetic construct
  misc_feature 1..80: note = Artificially Synthesized Probe
  source 1..80: mol_type = other DNA
agacacgcctcggaggggttgtgaggctcagccacccacacgcaggctgcacggtccacagacacgcctcggaggggttg

SEQ ID NO: 90845 - DNA, 80 bp, synthetic construct
  misc_feature 1..80: note = Artificially Synthesized Probe
  source 1..80: mol_type = other DNA
acgccttggaggggttgtgaggctcagccacccacacgcaggctgcacggtccacacacacgcctcggaggggttgtgag

SEQ ID NO: 90846 - DNA, 80 bp, synthetic construct
  misc_feature 1..80: note = Artificially Synthesized Probe
  source 1..80: mol_type = other DNA
gacctgaagggtgaactgttttaaaaactgagagtcaggtcttctggaggctgggtttgctcagatcacaaaagcaccgg

SEQ ID NO: 90847 - DNA, 80 bp, synthetic construct
  misc_feature 1..80: note = Artificially Synthesized Probe
  source 1..80: mol_type = other DNA
caaccaccgccactgctccccccgcatgagcaccagctctgctccctgcagaatccgagagtggaactctatggagattc

SEQ ID NO: 90848 - DNA, 80 bp, synthetic construct; identical to SEQ ID NO: 32977
  misc_feature 1..80: note = Artificially Synthesized Probe
  source 1..80: mol_type = other DNA

SEQ ID NO: 90849 - DNA, 80 bp, synthetic construct
  misc_feature 1..80: note = Artificially Synthesized Probe
  source 1..80: mol_type = other DNA
tctcctgatgcctgtgtgtcctgggacacacttccccaaatctgccatctggaaactcgaagtgtcttgacggtcgtatg

SEQ ID NO: 90850 - DNA, 80 bp, synthetic construct
  misc_feature 1..80: note = Artificially Synthesized Probe
  source 1..80: mol_type = other DNA
gcccctacagtccccgaaagcaccggctaacgtggtgtttgaggagggggcgccgccaggcctccctccgagccacaacc

SEQ ID NO: 90851 - DNA, 80 bp, synthetic construct
  misc_feature 1..80: note = Artificially Synthesized Probe
  source 1..80: mol_type = other DNA
gagctttgtcctggagtcaggtcacagcccagtgcccctgtgagcagctgcaggggtctcagacttgttgcaacagccac

SEQ ID NO: 90852 - DNA, 80 bp, synthetic construct; identical to SEQ ID NO: 32978
  misc_feature 1..80: note = Artificially Synthesized Probe
  source 1..80: mol_type = other DNA

SEQ ID NO: 90853 - DNA, 80 bp, synthetic construct
  misc_feature 1..80: note = Artificially Synthesized Probe
  source 1..80: mol_type = other DNA
acttcatgcctcagaacagtgggctgagcatcaaagtgaggtgggccagggtctccatggctcctgatgaaggggaccca

SEQ ID NO: 90854 - DNA, 80 bp, synthetic construct
  misc_feature 1..80: note = Artificially Synthesized Probe
  source 1..80: mol_type = other DNA
tggtgtctcgggatgggtgtgagtggtgtctcgggatgggtgtgagtggtgtcacgggatgggtgtgagtggtgtctcgg

SEQ ID NO: 90855 - DNA, 80 bp, synthetic construct
  misc_feature 1..80: note = Artificially Synthesized Probe
  source 1..80: mol_type = other DNA
tgagggcagctgtttcctccccaagcacctggaaaaggctgtcccaagctgacagtcgggccgccgcagagcctagggga

SEQ ID NO: 90856 - DNA, 80 bp, synthetic construct
  misc_feature 1..80: note = Artificially Synthesized Probe
  source 1..80: mol_type = other DNA
gcctggagcagcccaggtgggggcagagccaaggggtggcagccaggccgtgtaggggccaggatttggggcacatgctg

SEQ ID NO: 90857 - DNA, 80 bp, synthetic construct; identical to SEQ ID NO: 32979
  misc_feature 1..80: note = Artificially Synthesized Probe
  source 1..80: mol_type = other DNA

SEQ ID NO: 90858 - DNA, 80 bp, synthetic construct
  misc_feature 1..80: note = Artificially Synthesized Probe
  source 1..80: mol_type = other DNA
attactaatgctctttgtagcagagttttattttgcacccccacaacccaggagatcctttgaagatcacaggagagcac

SEQ ID NO: 90859 - DNA, 80 bp, synthetic construct
  misc_feature 1..80: note = Artificially Synthesized Probe
  source 1..80: mol_type = other DNA
ccaaaaacgccggaggtcggaggcacaaagcgctttcagggactccggtctgggcctcggcctcacagggggctgcagct

SEQ ID NO: 90860 - DNA, 80 bp, synthetic construct; identical to SEQ ID NO: 32980
  misc_feature 1..80: note = Artificially Synthesized Probe
  source 1..80: mol_type = other DNA

SEQ ID NO: 90861 - DNA, 80 bp, synthetic construct
  misc_feature 1..80: note = Artificially Synthesized Probe
  source 1..80: mol_type = other DNA
tcaaagtcaggtcttgatgtcggcagcaccgctccacgtctgcctttcagcgccgcccatgacccacacctcccatgggc

SEQ ID NO: 90862 - DNA, 80 bp, synthetic construct
  misc_feature 1..80: note = Artificially Synthesized Probe
  source 1..80: mol_type = other DNA
acgtgggaggcacacgccctggacgccggatgtgccgtgcccgtgagggtcggaggctccactgcacgatgccgcacact

SEQ ID NO: 90863 - DNA, 80 bp, synthetic construct
  misc_feature 1..80: note = Artificially Synthesized Probe
  source 1..80: mol_type = other DNA
aagttgtcacactgactggcctaaggcttctgtaacatcccaggcagctcttcatggtgccatcttagttactggagttt

SEQ ID NO: 90864 - DNA, 80 bp, synthetic construct; identical to SEQ ID NO: 32981
  misc_feature 1..80: note = Artificially Synthesized Probe
  source 1..80: mol_type = other DNA

SEQ ID NO: 90865 - DNA, 80 bp, synthetic construct
  misc_feature 1..80: note = Artificially Synthesized Probe
  source 1..80: mol_type = other DNA
tcgggatgggtgtgagtggtgtctcgggacgggtgtgcagtggtgtctcgggacgggtgtgagtggtgtctcgggacggg

SEQ ID NO: 90866 - DNA, 80 bp, synthetic construct
  misc_feature 1..80: note = Artificially Synthesized Probe
  source 1..80: mol_type = other DNA
tcccaggttcaagcaattctcctgcctcagcctcctgaataactggaattacaggcgcccgccagcatacctgctaattt

SEQ ID NO: 90867 - DNA, 80 bp, synthetic construct
  misc_feature 1..80: note = Artificially Synthesized Probe
  source 1..80: mol_type = other DNA
agccactgcacccggccagacatcacgttttaactttgccagcttttggaattatgagttctctggcttctctttatcct

SEQ ID NO: 90868 - DNA, 80 bp, synthetic construct
  misc_feature 1..80: note = Artificially Synthesized Probe
  source 1..80: mol_type = other DNA
gagggttgggagggggaaggtacagaaaacagatttccagcttttcaattctccaggggtcaaactaaaaatcaagtggt

SEQ ID NO: 90869 - DNA, 80 bp, synthetic construct
  misc_feature 1..80: note = Artificially Synthesized Probe
  source 1..80: mol_type = other DNA
acccaccctctgcccctgtgcaggtggcacagaggtgccgggacacagagctgtggggctccacctacagggatctgctg

SEQ ID NO: 90870 - DNA, 80 bp, synthetic construct; identical to SEQ ID NO: 32982
  misc_feature 1..80: note = Artificially Synthesized Probe
  source 1..80: mol_type = other DNA

SEQ ID NO: 90871 - DNA, 80 bp, synthetic construct
  misc_feature 1..80: note = Artificially Synthesized Probe
  source 1..80: mol_type = other DNA
gggaacagaaaccaggccctgggacgctagagaccccaagagctacctggctgggtctatggtcagggctgtagtggagg

SEQ ID NO: 90872 - DNA, 80 bp, synthetic construct
  misc_feature 1..80: note = Artificially Synthesized Probe
  source 1..80: mol_type = other DNA
gagaggcgccgcctgccccgcctgtgtctgcaaggaaccgtgctgactccatgatggctctggcccagccccaggaagcc

SEQ ID NO: 90873 - DNA, 80 bp, synthetic construct
  misc_feature 1..80: note = Artificially Synthesized Probe
  source 1..80: mol_type = other DNA
tgtctgttgccccaacccgctgacaccctgtggcagcggcaagctcagctatcctgtgcatggcacggacatgggttggg

SEQ ID NO: 90874 - DNA, 80 bp, synthetic construct
  misc_feature 1..80: note = Artificially Synthesized Probe
  source 1..80: mol_type = other DNA
ggccgatgcgtctggcctggcattctccctgacttgtcagcttcccagctcagagccctcacctcacctcacactcctgg

SEQ ID NO: 90875 - DNA, 80 bp, synthetic construct; identical to SEQ ID NO: 32983
  misc_feature 1..80: note = Artificially Synthesized Probe
  source 1..80: mol_type = other DNA

SEQ ID NO: 90876 - DNA, 80 bp, synthetic construct
  misc_feature 1..80: note = Artificially Synthesized Probe
  source 1..80: mol_type = other DNA
gtgacctctgcactgcccacaggactcctgtctctgctgtgtggtggtgacctctgcactgcctgtggggacgcccgtct

SEQ ID NO: 90877 - DNA, 80 bp, synthetic construct
  misc_feature 1..80: note = Artificially Synthesized Probe
  source 1..80: mol_type = other DNA
cgggtgtgagtggtgtctcgggacgggtgtgagtggtgtctcgggacgggtgtgcagtggtgtctcgggacgggtgtgca

SEQ ID NO: 90878 - DNA, 80 bp, synthetic construct
  misc_feature 1..80: note = Artificially Synthesized Probe
  source 1..80: mol_type = other DNA
tgcactgcctgtggggacgcctgtctctgctgtgtggtggtgacctctgcactgcctgtggggacgcccgtctctgctgc

SEQ ID NO: 90879 - DNA, 80 bp, synthetic construct
  misc_feature 1..80: note = Artificially Synthesized Probe
  source 1..80: mol_type = other DNA
cccacaggacgcctgtctctgctgcgtggtggtgacctctgcactgcccacaggactcctgtctctgctgtgtggtggtg

SEQ ID NO: 90880 - DNA, 80 bp, synthetic construct
  misc_feature 1..80: note = Artificially Synthesized Probe
  source 1..80: mol_type = other DNA
acgcctgtctctgctgcgtggtggtgacctctgcactgcccgtggggacgcctgtctctgctgtgtggtggtgacctctg

SEQ ID NO: 90881 - DNA, 80 bp, synthetic construct
  misc_feature 1..80: note = Artificially Synthesized Probe
  source 1..80: mol_type = other DNA
ctctgctgtgtggtggtgacctttgcactgcccgtggggacgcctgtctctgctgcgtggtggtgacctctgcactgcct

SEQ ID NO: 90882 - DNA, 80 bp, synthetic construct; identical to SEQ ID NO: 32984
  misc_feature 1..80: note = Artificially Synthesized Probe
  source 1..80: mol_type = other DNA

SEQ ID NO: 90883 - DNA, 80 bp, synthetic construct
  misc_feature 1..80: note = Artificially Synthesized Probe
  source 1..80: mol_type = other DNA
tgacctctgcatcgcccacaggacgcctgtctctgctgcgtcgtggtgacctctgcatcgcccacaggacgcctgtctct

SEQ ID NO: 90884 - DNA, 80 bp, synthetic construct
  misc_feature 1..80: note = Artificially Synthesized Probe
  source 1..80: mol_type = other DNA
actgcctgtggggacgcccgtctctgctgcgtggtggtgacctctgcaccgcccacaggacgcctgtctctgctgcgtgg

SEQ ID NO: 90885 - DNA, 80 bp, synthetic construct
  misc_feature 1..80: note = Artificially Synthesized Probe
  source 1..80: mol_type = other DNA
acaggacgcctgtctctgctgcgtggggtgacctctgcatcgcccacaggacgcctgtctctgctgcgtggtggtgacct

SEQ ID NO: 90886 - DNA, 80 bp, synthetic construct
  misc_feature 1..80: note = Artificially Synthesized Probe
  source 1..80: mol_type = other DNA
ctgtctctgctgcgtggggtgacctctgcatcgcccacaggacgcctgtctctgctgcgtggtggtgacctctgcaccgc

SEQ ID NO: 90887 - DNA, 80 bp, synthetic construct
  misc_feature 1..80: note = Artificially Synthesized Probe
  source 1..80: mol_type = other DNA
ctgcgtggtggtgacctctgcaccgcccacaggacacctgtctctgctgcgtggtggtgacctctgcaccgcccacagga

SEQ ID NO: 90888 - DNA, 80 bp, synthetic construct
  misc_feature 1..80: note = Artificially Synthesized Probe
  source 1..80: mol_type = other DNA
gagtggtgtctcgggacgggtgtgagtggtgtcacgggacgggtgtgagtggtgtcacgggacgggtgtgagtggtgtct

SEQ ID NO: 90889 - DNA, 80 bp, synthetic construct
  misc_feature 1..80: note = Artificially Synthesized Probe
  source 1..80: mol_type = other DNA
ggtgacttctgcactgccgttcttgtgaggaggaagtatctcagtttaatttcagctgttcttggggggaggaattgtct

SEQ ID NO: 90890 - DNA, 80 bp, synthetic construct; identical to SEQ ID NO: 32986
  misc_feature 1..80: note = Artificially Synthesized Probe
  source 1..80: mol_type = other DNA

SEQ ID NO: 90891 - DNA, 80 bp, synthetic construct
  misc_feature 1..80: note = Artificially Synthesized Probe
  source 1..80: mol_type = other DNA
tgttaaaggtgtgagccactgcacccagccattttcttcttttatggttaatttttttgtgtgtcctaagagacttttgc

SEQ ID NO: 90892 - DNA, 80 bp, synthetic construct
  misc_feature 1..80: note = Artificially Synthesized Probe
  source 1..80: mol_type = other DNA
aaaggcttctttctctcagttgaattgacttggtggcttgtccaggaatcatttgatcctgactttggtgtgggactatt

SEQ ID NO: 90893 - DNA, 80 bp, synthetic construct
  misc_feature 1..80: note = Artificially Synthesized Probe
  source 1..80: mol_type = other DNA
gggaaggcggacccaagcttaatctggtgggcaccatctcatcagccgccagagaatataaagcaggcagaaaaaggaga

SEQ ID NO: 90894 - DNA, 80 bp, synthetic construct; identical to SEQ ID NO: 32987
  misc_feature 1..80: note = Artificially Synthesized Probe
  source 1..80: mol_type = other DNA

SEQ ID NO: 90895 - DNA, 80 bp, synthetic construct
  misc_feature 1..80: note = Artificially Synthesized Probe
  source 1..80: mol_type = other DNA
ccatatacatctaagagtcagtttatctgtttctggaaaaaacaatccttctgggattgcttgggatgtcatggaatcta

SEQ ID NO: 90896 - DNA, 80 bp, synthetic construct
  misc_feature 1..80: note = Artificially Synthesized Probe
  source 1..80: mol_type = other DNA
ggttctgaatgttattataaatgctatacttaacattttcattttgacattttctcccagcatatagaaatataactgat

SEQ ID NO: 90897 - DNA, 80 bp, synthetic construct
  misc_feature 1..80: note = Artificially Synthesized Probe
  source 1..80: mol_type = other DNA
tagtcccagctactcgggaggctgaggcaggagaatggcgtgaacccaggaggcagagcttgcagtgagccgagatcgtg

SEQ ID NO: 90898 - DNA, 80 bp, synthetic construct; identical to SEQ ID NO: 32988
  misc_feature 1..80: note = Artificially Synthesized Probe
  source 1..80: mol_type = other DNA

SEQ ID NO: 90899 - DNA, 80 bp, synthetic construct; identical to SEQ ID NO: 32936
  misc_feature 1..80: note = Artificially Synthesized Probe
  source 1..80: mol_type = other DNA

SEQ ID NO: 90900 - DNA, 80 bp, synthetic construct
  misc_feature 1..80: note = Artificially Synthesized Probe
  source 1..80: mol_type = other DNA
cactttcttatcaactcaccctctgctttccaccaaaggaacattaatcacacccaacacaggagtctatcaagtaatta

SEQ ID NO: 90901 - DNA, 80 bp, synthetic construct
  misc_feature 1..80: note = Artificially Synthesized Probe
  source 1..80: mol_type = other DNA
ggcggctcctctgcggggccggctcctctccctggagctctgcttctctcccagggcttcggcctgacagcgcttccccc

SEQ ID NO: 90902 - DNA, 80 bp, synthetic construct; identical to SEQ ID NO: 32989
  misc_feature 1..80: note = Artificially Synthesized Probe
  source 1..80: mol_type = other DNA

SEQ ID NO: 90903 - DNA, 80 bp, synthetic construct
  misc_feature 1..80: note = Artificially Synthesized Probe
  source 1..80: mol_type = other DNA
gtgccatggccccgagcacacccgaccaggcaaggaggcagagatgggaaggccctggcccttgacaagccctgggggcc

SEQ ID NO: 90904 - DNA, 80 bp, synthetic construct
  misc_feature 1..80: note = Artificially Synthesized Probe
  source 1..80: mol_type = other DNA
agcccgcagggttcacacagtaaaaacagtgaggacctagagtaagcacccaagactccccacagccccagaaaaccaac

SEQ ID NO: 90905 - DNA, 80 bp, synthetic construct
  misc_feature 1..80: note = Artificially Synthesized Probe
  source 1..80: mol_type = other DNA
ctctggacaccttgtcctggggggtgagaggggccctggtgttgaggtccctctctgtgggtctcctgctagtgcagctg

SEQ ID NO: 90906 - DNA, 80 bp, synthetic construct
  misc_feature 1..80: note = Artificially Synthesized Probe
  source 1..80: mol_type = other DNA
ctggctaagggctggcgcaaggtgagacgcagggatgtgagtgagggggagggaaaaggagggcgctggggaagatggga

SEQ ID NO: 90907 - DNA, 80 bp, synthetic construct; identical to SEQ ID NO: 32990
  misc_feature 1..80: note = Artificially Synthesized Probe
  source 1..80: mol_type = other DNA

SEQ ID NO: 90908 - DNA, 80 bp, synthetic construct
  misc_feature 1..80: note = Artificially Synthesized Probe
  source 1..80: mol_type = other DNA
gccagtgctgtcttaggactgggtgtcccaagtgtccgcagctgccccggggggacagggtgggaggagccgcccagcac

SEQ ID NO: 90909 - DNA, 80 bp, synthetic construct
  misc_feature 1..80: note = Artificially Synthesized Probe
  source 1..80: mol_type = other DNA
ggcacaagttccttggggcagtgcccaactcttcgtacgtcttcagcgaatcctccacgaaacacttaagcaaacagatg

SEQ ID NO: 90910 - DNA, 80 bp, synthetic construct
  misc_feature 1..80: note = Artificially Synthesized Probe
  source 1..80: mol_type = other DNA
ctcgggacgggtgtgagtggtgtctcgggacgggtgtgcagtgttgtcacgggacgggtgtgcagtggtgtctcgggacg

SEQ ID NO: 90911 - DNA, 80 bp, synthetic construct; identical to SEQ ID NO: 32991
  misc_feature 1..80: note = Artificially Synthesized Probe
  source 1..80: mol_type = other DNA

SEQ ID NO: 90912 - DNA, 80 bp, synthetic construct
  misc_feature 1..80: note = Artificially Synthesized Probe
  source 1..80: mol_type = other DNA
gtcaaagccaagcaggcaaagcacccgggaggaaggacgcagccaagagaccatgaggaggccgcgctttccctgagcgt

SEQ ID NO: 90913 - DNA, 80 bp, synthetic construct
  misc_feature 1..80: note = Artificially Synthesized Probe
  source 1..80: mol_type = other DNA
gaagcagggcgtccagtgctcctctctgagtctcctcctgaaacagactcagaggtgtggttctgtcccagaaacaggga

SEQ ID NO: 90914 - DNA, 80 bp, synthetic construct
  misc_feature 1..80: note = Artificially Synthesized Probe
  source 1..80: mol_type = other DNA
ttagaagagccaccgttattccccaaacaccacgcagaagagctccacttactgctccaagcatgatcctgaagatcagc

SEQ ID NO: 90915 - DNA, 80 bp, synthetic construct; identical to SEQ ID NO: 32992
  misc_feature 1..80: note = Artificially Synthesized Probe
  source 1..80: mol_type = other DNA

SEQ ID NO: 90916 - DNA, 80 bp, synthetic construct
  misc_feature 1..80: note = Artificially Synthesized Probe
  source 1..80: mol_type = other DNA
ctgccaccctgcaggacgctgcacggacctgacatctgagaatgcgccctgcacacatgctgccggcagactttggggga

SEQ ID NO: 90917 - DNA, 80 bp, synthetic construct
  misc_feature 1..80: note = Artificially Synthesized Probe
  source 1..80: mol_type = other DNA
cagcactgggggggcagcacttgggggggcagcactggggaggcagcaatgggggggcagcactgggggggcagcactgg

SEQ ID NO: 90918 - DNA, 80 bp, synthetic construct
  misc_feature 1..80: note = Artificially Synthesized Probe
  source 1..80: mol_type = other DNA
caccggtcagcccctcgcagtcccaggataaggcagcagctccgccactggatgcgggggacacgtgggggcccaacgga

SEQ ID NO: 90919 - DNA, 80 bp, synthetic construct
  misc_feature 1..80: note = Artificially Synthesized Probe
  source 1..80: mol_type = other DNA
ccgggctccctcctgggctctgaggatgctggatgggacagaggccacccgctgcccagcatgacaacgatcacatgact

SEQ ID NO: 90920 - DNA, 80 bp, synthetic construct; identical to SEQ ID NO: 32993
  misc_feature 1..80: note = Artificially Synthesized Probe
  source 1..80: mol_type = other DNA

SEQ ID NO: 90921 - DNA, 80 bp, synthetic construct
  misc_feature 1..80: note = Artificially Synthesized Probe
  source 1..80: mol_type = other DNA
ggacgggtgtgagtggtgtctcgggacgggtgtgcagtgatgtcacgggacgggtgtgcagtggtgtctcgggacgggtg

SEQ ID NO: 90922 - DNA, 80 bp, synthetic construct
  misc_feature 1..80: note = Artificially Synthesized Probe
  source 1..80: mol_type = other DNA
ctctgaatggacagacggtcagtccttatgctgccccggcttatggagggcacaggctgccaagctgacgcctgctggtc

SEQ ID NO: 90923 - DNA, 80 bp, synthetic construct
  misc_feature 1..80: note = Artificially Synthesized Probe
  source 1..80: mol_type = other DNA
gccctgggcccacctgcttctgttttctttgcttgggtcttgaggaattccagcagctgcgcggcgtgcacaagggctgc

SEQ ID NO: 90924 - DNA, 80 bp, synthetic construct
  misc_feature 1..80: note = Artificially Synthesized Probe
  source 1..80: mol_type = other DNA
gaacgaggcggcaacacgcagggccacagcacacgctgccactgccggggagaggagccgtcctcgcccccgcctcagtg

SEQ ID NO: 90925 - DNA, 80 bp, synthetic construct; identical to SEQ ID NO: 32994
  misc_feature 1..80: note = Artificially Synthesized Probe
  source 1..80: mol_type = other DNA

SEQ ID NO: 90926 - DNA, 80 bp, synthetic construct
  misc_feature 1..80: note = Artificially Synthesized Probe
  source 1..80: mol_type = other DNA
ggtgcacccatgttaatggctcattgccggctggatgccccgatgctggtgcggaggaaatgcaggtgccccagcaccca

SEQ ID NO: 90927 - DNA, 80 bp, synthetic construct
  misc_feature 1..80: note = Artificially Synthesized Probe
  source 1..80: mol_type = other DNA
aaaaggcagaaacaaggacgcagcctcataactgccttgctggagacagtttagggtttgaaggctctggatgtcaggtc

SEQ ID NO: 90928 - DNA, 80 bp, synthetic construct; identical to SEQ ID NO: 32995
  misc_feature 1..80: note = Artificially Synthesized Probe
  source 1..80: mol_type = other DNA

SEQ ID NO: 90929 - DNA, 80 bp, synthetic construct
  misc_feature 1..80: note = Artificially Synthesized Probe
  source 1..80: mol_type = other DNA
caccccgacccctcctaggaggggagataacatctccaccactgcaacctgggcagtccctgacccctcctgggagggga

SEQ ID NO: 90930 - DNA, 80 bp, synthetic construct
  misc_feature 1..80: note = Artificially Synthesized Probe
  source 1..80: mol_type = other DNA
cggatgctcactcgtagggtccacgagagaacgcacaccgctgtgggccctgagccccgtgatcgctccagctctccaag

SEQ ID NO: 90931 - DNA, 80 bp, synthetic construct
  misc_feature 1..80: note = Artificially Synthesized Probe
  source 1..80: mol_type = other DNA
ccctccctcctcatgaccattggtgacacactccctccctcccatgaccattggtgacacactccctcccacgaccattg

SEQ ID NO: 90932 - DNA, 80 bp, synthetic construct
  misc_feature 1..80: note = Artificially Synthesized Probe
  source 1..80: mol_type = other DNA
tgaccattggtgacaaaattttactgccttggaatcagatggaaacgtggtttctctgaactaaatatccgagtgctaat

SEQ ID NO: 90933 - DNA, 80 bp, synthetic construct
  misc_feature 1..80: note = Artificially Synthesized Probe
  source 1..80: mol_type = other DNA
atgggtgtgagtggtgtctcgggatgggtgtgcagtgatgtcacgagatgggtgtgagtggtgtctcgggatgggtgtga

SEQ ID NO: 90934 - DNA, 80 bp, synthetic construct; identical to SEQ ID NO: 32996
  misc_feature 1..80: note = Artificially Synthesized Probe
  source 1..80: mol_type = other DNA

SEQ ID NO: 90935 - DNA, 80 bp, synthetic construct
  misc_feature 1..80: note = Artificially Synthesized Probe
  source 1..80: mol_type = other DNA
gtggtgcggagagccctcttcatcctcacaacggccggggtccctcactccgcagccaagctcctaggcacctgctcccc

SEQ ID NO: 90936 - DNA, 80 bp, synthetic construct
  misc_feature 1..80: note = Artificially Synthesized Probe
  source 1..80: mol_type = other DNA
cacctggcggctgctctgggctgggctgggcagccggcagcacactcatgcaccaccagccttggcgaccccagtcagag

SEQ ID NO: 90937 - DNA, 80 bp, synthetic construct
  misc_feature 1..80: note = Artificially Synthesized Probe
  source 1..80: mol_type = other DNA
gggtgagatgagcaccatcaccgggggccggagcaggtgagatgcaggggccggagcacgtgggacgcgggggccggagc

SEQ ID NO: 90938 - DNA, 80 bp, synthetic construct; identical to SEQ ID NO: 32997
  misc_feature 1..80: note = Artificially Synthesized Probe
  source 1..80: mol_type = other DNA

SEQ ID NO: 90939 - DNA, 80 bp, synthetic construct
  misc_feature 1..80: note = Artificially Synthesized Probe
  source 1..80: mol_type = other DNA
tggatccttcaaaaatgacagccaccatccacgttagaaacaggaaatccattaagttcgctgttaaaatcggggacgag

SEQ ID NO: 90940 - DNA, 80 bp, synthetic construct
  misc_feature 1..80: note = Artificially Synthesized Probe
  source 1..80: mol_type = other DNA
tcatttttacaggttatattttaagctgaaaagttatgaaatagcactgcaaatcttactttgcactatcacggaacagg

SEQ ID NO: 90941 - DNA, 80 bp, synthetic construct; identical to SEQ ID NO: 32998
  misc_feature 1..80: note = Artificially Synthesized Probe
  source 1..80: mol_type = other DNA

SEQ ID NO: 90942 - DNA, 80 bp, synthetic construct
  misc_feature 1..80: note = Artificially Synthesized Probe
  source 1..80: mol_type = other DNA
tgctctgcacagccagctctgggatcccctgaatattgagctccgggtctgttacggctatttctctgcgcagcgagctc

SEQ ID NO: 90943 - DNA, 80 bp, synthetic construct
  misc_feature 1..80: note = Artificially Synthesized Probe
  source 1..80: mol_type = other DNA
ctcatgccggtaccatgggggacgggtcaccaccatctcacctcccccaagcacatgggcaacacacagccatggtgtgg

SEQ ID NO: 90944 - DNA, 80 bp, synthetic construct; identical to SEQ ID NO: 32938
  misc_feature 1..80: note = Artificially Synthesized Probe
  source 1..80: mol_type = other DNA

SEQ ID NO: 90945 - DNA, 80 bp, synthetic construct
  misc_feature 1..80: note = Artificially Synthesized Probe
  source 1..80: mol_type = other DNA
aggcccacgtgaagaaatgccacacgtgtgcgctgcgggcgggcgcaggcccacgtgaagaaatgccacacgtgtgcgct

SEQ ID NO: 90946 - DNA, 80 bp, synthetic construct
  misc_feature 1..80: note = Artificially Synthesized Probe
  source 1..80: mol_type = other DNA
gcagggctgccctcccctaagagacatgcctgcccccgtaccggggctgtttgcaggggtgctgggaggtcctgatgtca

SEQ ID NO: 90947 - DNA, 80 bp, synthetic construct; identical to SEQ ID NO: 32999
  misc_feature 1..80: note = Artificially Synthesized Probe
  source 1..80: mol_type = other DNA

SEQ ID NO: 90948 - DNA, 80 bp, synthetic construct
  misc_feature 1..80: note = Artificially Synthesized Probe
  source 1..80: mol_type = other DNA
ggttaagggctttcgtgctttagataaaattacgttaactgcacgctctcagttatgaggaatttcgtggactgttacat

SEQ ID NO: 90949 - DNA, 80 bp, synthetic construct
  misc_feature 1..80: note = Artificially Synthesized Probe
  source 1..80: mol_type = other DNA
tgggaaacaaatccgcagtaatgaccttagctatctttattggttttggataaatacgaaaatgcttcccgtccacggaa

SEQ ID NO: 90950 - DNA, 80 bp, synthetic construct
  misc_feature 1..80: note = Artificially Synthesized Probe
  source 1..80: mol_type = other DNA
ccaagtatttcacctaagtcaggctggtgggcaccacacctgaccatttctttgtcttttgtgtcccgggcatgaaaaat

SEQ ID NO: 90951 - DNA, 80 bp, synthetic construct; identical to SEQ ID NO: 33000
  misc_feature 1..80: note = Artificially Synthesized Probe
  source 1..80: mol_type = other DNA

SEQ ID NO: 90952 - DNA, 80 bp, synthetic construct
  misc_feature 1..80: note = Artificially Synthesized Probe
  source 1..80: mol_type = other DNA
tagcggtgggacgagctctcggcacctgctcctcccacggggcctcctgggctggagcccgcacagcacagtagcatcca

SEQ ID NO: 90953 - DNA, 80 bp, synthetic construct
  misc_feature 1..80: note = Artificially Synthesized Probe
  source 1..80: mol_type = other DNA
ggtgtgctcagtgtggccaacaggcacgatccaccccacgtggagggtggtgtgtccaggggctatgtgagctcacacac

SEQ ID NO: 90954 - DNA, 80 bp, synthetic construct
  misc_feature 1..80: note = Artificially Synthesized Probe
  source 1..80: mol_type = other DNA
agcccccctgggaaagctcatatctccagcgctcgcgtgaggacagcagtgccggcagcaccagggcacaggccccacag

SEQ ID NO: 90955 - DNA, 80 bp, synthetic construct
  misc_feature 1..80: note = Artificially Synthesized Probe
  source 1..80: mol_type = other DNA
attttaatgaatttcaattaatttttcctttcacagatcatctttaagtataatgactctgcctggccctagatcccaaa

SEQ ID NO: 90956 - DNA, 80 bp, synthetic construct; identical to SEQ ID NO: 33001
  misc_feature 1..80: note = Artificially Synthesized Probe
  source 1..80: mol_type = other DNA

SEQ ID NO: 90957 - DNA, 80 bp, synthetic construct
  misc_feature 1..80: note = Artificially Synthesized Probe
  source 1..80: mol_type = other DNA
ggcaccatccttccggcctcggtcaagactgcccggacaccacctccagggccttgctggacaggacatccacactggcc

SEQ ID NO: 90958 - DNA, 80 bp, synthetic construct
  misc_feature 1..80: note = Artificially Synthesized Probe
  source 1..80: mol_type = other DNA
ccctagtccgtcgtcccccaacatgacatccacactggccctggcccgttggctcggcccccgacacgacatccacaccg

SEQ ID NO: 90959 - DNA, 80 bp, synthetic construct
  misc_feature 1..80: note = Artificially Synthesized Probe
  source 1..80: mol_type = other DNA
gagacacagagcctcggaggaaggccaggcccactccagagcaagaactaaaatctccagagcacaaatgcccctggctg

SEQ ID NO: 90960 - DNA, 80 bp, synthetic construct; identical to SEQ ID NO: 33002
  misc_feature 1..80: note = Artificially Synthesized Probe
  source 1..80: mol_type = other DNA

SEQ ID NO: 90961 - DNA, 80 bp, synthetic construct
  misc_feature 1..80: note = Artificially Synthesized Probe
  source 1..80: mol_type = other DNA
aggggcccctgcatgcccagagcaagcatctgcaggcatctccagcagcaaaggacaccgctgttctccccggggagctt

SEQ ID NO: 90962 - DNA, 80 bp, synthetic construct
  misc_feature 1..80: note = Artificially Synthesized Probe
  source 1..80: mol_type = other DNA
ggaactcagtaaaacaaagaccattttcttctggaggcaactcaaggaggtaagactgtgagtcaagcgccttggaggat

SEQ ID NO: 90963 - DNA, 80 bp, synthetic construct
  misc_feature 1..80: note = Artificially Synthesized Probe
  source 1..80: mol_type = other DNA
tcctgggtgggcacacggacctgcgctccctgcagagacgtggacaaggcaggccctgtggaaagttcacccgccagcca

SEQ ID NO: 90964 - DNA, 80 bp, synthetic construct; identical to SEQ ID NO: 33003
  misc_feature 1..80: note = Artificially Synthesized Probe
  source 1..80: mol_type = other DNA

SEQ ID NO: 90965 - DNA, 80 bp, synthetic construct
  misc_feature 1..80: note = Artificially Synthesized Probe
  source 1..80: mol_type = other DNA
ctacggcatccaggcggtccccgtgcgggttttactatacaattcttaggagaaaaacaaaggttaaaaggtttgaaatg

SEQ ID NO: 90966 - DNA, 80 bp, synthetic construct
  misc_feature 1..80: note = Artificially Synthesized Probe
  source 1..80: mol_type = other DNA
aaggggagagaagcagctgtttatcccagatgaggtccagagagacgcattccaagcagccaacacgggacagaggcgat

SEQ ID NO: 90967 - DNA, 80 bp, synthetic construct
  misc_feature 1..80: note = Artificially Synthesized Probe
  source 1..80: mol_type = other DNA
acaggcatgtgccaccaggccctgctaattttttgtgtttttagtagagacggggttttgccacgttgctcaggctggtc

SEQ ID NO: 90968 - DNA, 80 bp, synthetic construct
  misc_feature 1..80: note = Artificially Synthesized Probe
  source 1..80: mol_type = other DNA
ctctggtccctgcacaatctcgcctccgatgcaaggtgggagaaggcagccacctcccgaggggggccacagagggggtt

SEQ ID NO: 90969 - DNA, 80 bp, synthetic construct; identical to SEQ ID NO: 33004
  misc_feature 1..80: note = Artificially Synthesized Probe
  source 1..80: mol_type = other DNA

SEQ ID NO: 90970 - DNA, 80 bp, synthetic construct
  misc_feature 1..80: note = Artificially Synthesized Probe
  source 1..80: mol_type = other DNA
ttggtgtcgtgttgttgcgaaggccctgtgtgaaagtcgcctgggttttcgggtgtgatgtggtgttggcgtcgtgttgt

SEQ ID NO: 90971 - DNA, 80 bp, synthetic construct
  misc_feature 1..80: note = Artificially Synthesized Probe
  source 1..80: mol_type = other DNA
ttttcgggtgtgatgtggtgttggtgtcgtgttgttgcgaaggccctgtgtgaaggtcgcctgggttttcgggtgtgatg

SEQ ID NO: 90972 - DNA, 80 bp, synthetic construct; identical to SEQ ID NO: 33005
  misc_feature 1..80: note = Artificially Synthesized Probe
  source 1..80: mol_type = other DNA

SEQ ID NO: 90973 - DNA, 80 bp, synthetic construct
  misc_feature 1..80: note = Artificially Synthesized Probe
  source 1..80: mol_type = other DNA
gcaccccagtagtaacgggcaccccagcacccacgtcttggtctctaaacaccttccccactaaagcatcaggcttctca

SEQ ID NO: 90974 - DNA, 80 bp, synthetic construct
  misc_feature 1..80: note = Artificially Synthesized Probe
  source 1..80: mol_type = other DNA
ggactctgagccttaccctcaatacaatgaggtcacctgctcctgggaaccatcttaggatccctggaatgggcagaggg

SEQ ID NO: 90975 - DNA, 80 bp, synthetic construct
  misc_feature 1..80: note = Artificially Synthesized Probe
  source 1..80: mol_type = other DNA
tgattctgtaaaaacaacagtattggaaagggttgaccagttgtgctggtaaagttggaacaaatgagtgagatatgatc

SEQ ID NO: 90976 - DNA, 80 bp, synthetic construct; identical to SEQ ID NO: 33006
  misc_feature 1..80: note = Artificially Synthesized Probe
  source 1..80: mol_type = other DNA

SEQ ID NO: 90977 - DNA, 80 bp, synthetic construct
  misc_feature 1..80: note = Artificially Synthesized Probe
  source 1..80: mol_type = other DNA
aggacatgtatacacagtgtctaaccgtggtatgcgaagaataacccatataaacctatcagtcagaaagacagacaaat

SEQ ID NO: 90978 - DNA, 80 bp, synthetic construct
  misc_feature 1..80: note = Artificially Synthesized Probe
  source 1..80: mol_type = other DNA
ttcaggccacactggccacagtgtaataaaatcaaagttgagaaacaaaaggccacctgtaaaaccctgagcatgtggca

SEQ ID NO: 90979 - DNA, 80 bp, synthetic construct; identical to SEQ ID NO: 32939
  misc_feature 1..80: note = Artificially Synthesized Probe
  source 1..80: mol_type = other DNA

SEQ ID NO: 90980 - DNA, 80 bp, synthetic construct
  misc_feature 1..80: note = Artificially Synthesized Probe
  source 1..80: mol_type = other DNA
tcattagcagagaagaagagacagaaaatagctgaaccaactccaggcactggaaatgataaaccactttctcccagaaa

SEQ ID NO: 90981 - DNA, 80 bp, synthetic construct
  misc_feature 1..80: note = Artificially Synthesized Probe
  source 1..80: mol_type = other DNA
gcgggagaacggatgcagacctgctagggggtggcaaggccaccgcacagactgtgccctccagccggcagcggggggtg

SEQ ID NO: 90982 - DNA, 80 bp, synthetic construct; identical to SEQ ID NO: 33007
  misc_feature 1..80: note = Artificially Synthesized Probe
  source 1..80: mol_type = other DNA

SEQ ID NO: 90983 - DNA, 80 bp, synthetic construct
  misc_feature 1..80: note = Artificially Synthesized Probe
  source 1..80: mol_type = other DNA
aacaacgtgatgggagaaattcaaaaccaacaaaatgttaatgatcgtgtgaatgagacaaaatggcctttaaaatctat

SEQ ID NO: 90984 - DNA, 80 bp, synthetic construct
  misc_feature 1..80: note = Artificially Synthesized Probe
  source 1..80: mol_type = other DNA
gtcactataaaaaagaaaataaaaaaattaatcgggtgtggtggttcatgcctgtggtcctagctacttgggaggctgag

SEQ ID NO: 90985 - DNA, 80 bp, synthetic construct
  misc_feature 1..80: note = Artificially Synthesized Probe
  source 1..80: mol_type = other DNA
ccacagtatgtgacaacagaccccaccctggacccccgtgctgggggctgggtcccaccgctctcctctccacgtctctc

SEQ ID NO: 90986 - DNA, 80 bp, synthetic construct
  misc_feature 1..80: note = Artificially Synthesized Probe
  source 1..80: mol_type = other DNA
tagtaagtgaaaaaaagggaatgaaagaaatgtatctaatatggccctgtttgagtaaagcaaacatttacccctaaatc

SEQ ID NO: 90987 - DNA, 80 bp, synthetic construct; identical to SEQ ID NO: 33008
  misc_feature 1..80: note = Artificially Synthesized Probe
  source 1..80: mol_type = other DNA

SEQ ID NO: 90988 - DNA, 80 bp, synthetic construct
  misc_feature 1..80: note = Artificially Synthesized Probe
  source 1..80: mol_type = other DNA
catatgatctgcatacgtgtctgtgtgcatgtatgtgcgtgtttgcataagatctgcaggtctgtgcgcatgtgtgcacg

SEQ ID NO: 90989 - DNA, 80 bp, synthetic construct
  misc_feature 1..80: note = Artificially Synthesized Probe
  source 1..80: mol_type = other DNA
tacaaatctgagttggcatgaagataagaatggacggaaccgggaggttaacacggggtggatgtaaattagatgaaaaa

SEQ ID NO: 90990 - DNA, 80 bp, synthetic construct; identical to SEQ ID NO: 33009
  misc_feature 1..80: note = Artificially Synthesized Probe
  source 1..80: mol_type = other DNA

SEQ ID NO: 90991 - DNA, 80 bp, synthetic construct
  misc_feature 1..80: note = Artificially Synthesized Probe
  source 1..80: mol_type = other DNA
acatttccatagaaaacttgggatgacttgtccttacctattaacacatcttgctgggttttttttttaataggaattgc

SEQ ID NO: 90992 - DNA, 80 bp, synthetic construct
  misc_feature 1..80: note = Artificially Synthesized Probe
  source 1..80: mol_type = other DNA
ccgagaccccagtggagagcactggagggtccagaagggccactgcacccaggcggagactcaggcccagaggcctccag

SEQ ID NO: 90993 - DNA, 80 bp, synthetic construct
  misc_feature 1..80: note = Artificially Synthesized Probe
  source 1..80: mol_type = other DNA
aaagtcacccaagtgggcttccctgtccttcctatgaagaacacgaccagacactgagaccagagacacgcaggaccaca

SEQ ID NO: 90994 - DNA, 80 bp, synthetic construct
  misc_feature 1..80: note = Artificially Synthesized Probe
  source 1..80: mol_type = other DNA
ctaccggttgcagcccggcagctgagcgagctcacggcagaggccgtggaggctgcctctgattagggaataatttaatt

SEQ ID NO: 90995 - DNA, 80 bp, synthetic construct; identical to SEQ ID NO: 33010
  misc_feature 1..80: note = Artificially Synthesized Probe
  source 1..80: mol_type = other DNA

SEQ ID NO: 90996 - DNA, 80 bp, synthetic construct
  misc_feature 1..80: note = Artificially Synthesized Probe
  source 1..80: mol_type = other DNA
tggggaagtttcccgcttggcaagagcacagcagcaaaacccaggaggggcctggtacgcttggaaagcctccgaatgta

SEQ ID NO: 90997 - DNA, 80 bp, synthetic construct
  misc_feature 1..80: note = Artificially Synthesized Probe
  source 1..80: mol_type = other DNA
ttgctgctgagattcattcctcgcacccgctacgtggatgggcccccccagcctccacgtgttttcagcataaccacagt

SEQ ID NO: 90998 - DNA, 80 bp, synthetic construct
  misc_feature 1..80: note = Artificially Synthesized Probe
  source 1..80: mol_type = other DNA
tcagtggaagataaggataaaccaaccattcatcaaccaagtttcttactccaaggaccccaaattccctcaggccctgg

SEQ ID NO: 90999 - DNA, 80 bp, synthetic construct
  misc_feature 1..80: note = Artificially Synthesized Probe
  source 1..80: mol_type = other DNA
gagggagcaggggggcaaaggcctccagcccctccccacaggcagtcaccatcaacagcccggttccctgcacgagccca

SEQ ID NO: 91000 - DNA, 80 bp, synthetic construct; identical to SEQ ID NO: 33011
  misc_feature 1..80: note = Artificially Synthesized Probe
  source 1..80: mol_type = other DNA

SEQ ID NO: 91001 - DNA, 80 bp, synthetic construct
  misc_feature 1..80: note = Artificially Synthesized Probe
  source 1..80: mol_type = other DNA
tgcccctggttccagaacccctcaccacgagtgtctccttcccctggtcacatctcagcggccagtggggtcacaatgct

SEQ ID NO: 91002 - DNA, 80 bp, synthetic construct
  misc_feature 1..80: note = Artificially Synthesized Probe
  source 1..80: mol_type = other DNA
ctgtggcctttgctgtttcaacctcaccaaactctgcagacgggagccccttcccagagcccgctctccatacagaacca

SEQ ID NO: 91003 - DNA, 80 bp, synthetic construct
  misc_feature 1..80: note = Artificially Synthesized Probe
  source 1..80: mol_type = other DNA
cctaagtatttcgctttttggagtggttttaagtggttctgcgtatttaatttaggtgtctgtgtgttcattgctagcgt

SEQ ID NO: 91004 - DNA, 80 bp, synthetic construct
  misc_feature 1..80: note = Artificially Synthesized Probe
  source 1..80: mol_type = other DNA
gcagccccacggagccctgccacccgctgctgcgggtcctctcgggttcccgcatcctttccaatgcgcaagggcggctg

SEQ ID NO: 91005 - DNA, 80 bp, synthetic construct; identical to SEQ ID NO: 33012
  misc_feature 1..80: note = Artificially Synthesized Probe
  source 1..80: mol_type = other DNA

SEQ ID NO: 91006 - DNA, 80 bp, synthetic construct
  misc_feature 1..80: note = Artificially Synthesized Probe
  source 1..80: mol_type = other DNA
cctctgtctgaacgggggcgcaggaccctgggacacagagcccaggacagcagtggtcgcgtccgtgtgaacgggggcac

SEQ ID NO: 91007 - DNA, 80 bp, synthetic construct
  misc_feature 1..80: note = Artificially Synthesized Probe
  source 1..80: mol_type = other DNA
tctgaacaggggtgcagggccctgggacacagagcccaggacagcagcagtcgcgtccgtctgaacaggggcgcaggacc

SEQ ID NO: 91008 - DNA, 80 bp, synthetic construct; identical to SEQ ID NO: 33013
  misc_feature 1..80: note = Artificially Synthesized Probe
  source 1..80: mol_type = other DNA

SEQ ID NO: 91009 - DNA, 80 bp, synthetic construct
  misc_feature 1..80: note = Artificially Synthesized Probe
  source 1..80: mol_type = other DNA
ttttcaggcgggtcccgctcacacccacagcattgtgagagcatgtcccggggagcccacgccgagccacgagccctcag

SEQ ID NO: 91010 - DNA, 80 bp, synthetic construct
  misc_feature 1..80: note = Artificially Synthesized Probe
  source 1..80: mol_type = other DNA
gagaccaggctggccaacactgtgaaatcccatctctactaaaaatacaaaaattagccgggcgtggtggcgggcgcctg

SEQ ID NO: 91011 - DNA, 80 bp, synthetic construct
  misc_feature 1..80: note = Artificially Synthesized Probe
  source 1..80: mol_type = other DNA
cacagctacatgcggccacggagcacatgaggtgcagccaacgcaaccaaggactggagctttttatttcatttagtttt

SEQ ID NO: 91012 - DNA, 80 bp, synthetic construct; identical to SEQ ID NO: 33014
  misc_feature 1..80: note = Artificially Synthesized Probe
  source 1..80: mol_type = other DNA

SEQ ID NO: 91013 - DNA, 80 bp, synthetic construct
  misc_feature 1..80: note = Artificially Synthesized Probe
  source 1..80: mol_type = other DNA
tacctcagtaactggcagctctatgttctccaagatcagggaagggaagacagttcaaagacgcatggctgctcggaagg

SEQ ID NO: 91014 - DNA, 80 bp, synthetic construct
  misc_feature 1..80: note = Artificially Synthesized Probe
  source 1..80: mol_type = other DNA
cctctgcctccccggtacaagcaattctcctacctcagcctcctgagtagctgggattacaggcatgcgtcaccacacct

SEQ ID NO: 91015 - DNA, 80 bp, synthetic construct
  misc_feature 1..80: note = Artificially Synthesized Probe
  source 1..80: mol_type = other DNA
caggcggaaaacattaacattaatgagtcaacaattcgcttctgagtccctacaattaccacctgctaccgaagaatcag

SEQ ID NO: 91016 - DNA, 80 bp, synthetic construct
  misc_feature 1..80: note = Artificially Synthesized Probe
  source 1..80: mol_type = other DNA
cccccatgcagaccccgttgcttttgcttcagcaagtggttggggacgcgggaggctggctccagagtcacccggctcct

SEQ ID NO: 91017 - DNA, 80 bp, synthetic construct
  misc_feature 1..80: note = Artificially Synthesized Probe
  source 1..80: mol_type = other DNA
tgtggccctggtgctgagacacggcagcaccgtggcctcgcaggcccatctctcacagggaacacacaagcctcagccgc

SEQ ID NO: 91018 - DNA, 80 bp, synthetic construct; identical to SEQ ID NO: 33015
  misc_feature 1..80: note = Artificially Synthesized Probe
  source 1..80: mol_type = other DNA

SEQ ID NO: 91019 - DNA, 80 bp, synthetic construct
  misc_feature 1..80: note = Artificially Synthesized Probe
  source 1..80: mol_type = other DNA
tttgtttatctaaatgttgaagaatgtagttttctctgtgggcattttgatactgaatgtatcctggcgcactgcggggg

SEQ ID NO: 91020 - DNA, 80 bp, synthetic construct
  misc_feature 1..80: note = Artificially Synthesized Probe
  source 1..80: mol_type = other DNA
acaggactggcaggcaaaaaaccagctggttccaaccaggttgtgtcagatttgcaaacagaaaaggaattcctgaaata

SEQ ID NO: 91021 - DNA, 80 bp, synthetic construct; identical to SEQ ID NO: 33016
  misc_feature 1..80: note = Artificially Synthesized Probe
  source 1..80: mol_type = other DNA

SEQ ID NO: 91022 - DNA, 80 bp, synthetic construct
  misc_feature 1..80: note = Artificially Synthesized Probe
  source 1..80: mol_type = other DNA
acaggccacccctgctctcctgggaaaggggccgagagccagagagttcggggcagagagagcctgagtgcgaggcccag

SEQ ID NO: 91023 - DNA, 80 bp, synthetic construct
  misc_feature 1..80: note = Artificially Synthesized Probe
  source 1..80: mol_type = other DNA
aatggaggtcacatccaccgtcctcccggccctgtcctgtccactgggtggctgccctcttcccaccctccagtattgac

SEQ ID NO: 91024 - DNA, 80 bp, synthetic construct
  misc_feature 1..80: note = Artificially Synthesized Probe
  source 1..80: mol_type = other DNA
cctctgccccagggaagcggtggtaatcacacctgtgagatgccgacaatcatgcgtgcgaccatccgtctctaggtgcc

SEQ ID NO: 91025 - DNA, 80 bp, synthetic construct; identical to SEQ ID NO: 32940
  misc_feature 1..80: note = Artificially Synthesized Probe
  source 1..80: mol_type = other DNA

SEQ ID NO: 91026 - DNA, 80 bp, synthetic construct; identical to SEQ ID NO: 33017
  misc_feature 1..80: note = Artificially Synthesized Probe
  source 1..80: mol_type = other DNA

SEQ ID NO: 91027 - DNA, 80 bp, synthetic construct
  misc_feature 1..80: note = Artificially Synthesized Probe
  source 1..80: mol_type = other DNA
aggcaggcccagaacaggcaaccaaaacatattccaagatacacctactaagtacccatagaaataaaaaaatatgtatt

SEQ ID NO: 91028 - DNA, 80 bp, synthetic construct
  misc_feature 1..80: note = Artificially Synthesized Probe
  source 1..80: mol_type = other DNA
aaaagggatcttaaatgaaaggaattggtgggaaaggctgggcaaggcctgtgtctttactattgaatcccaaccaaaag

SEQ ID NO: 91029 - DNA, 80 bp, synthetic construct
  misc_feature 1..80: note = Artificially Synthesized Probe
  source 1..80: mol_type = other DNA
caagacctacccttgggctctagaagaaaccccctctgccacctatggtcccgcaagaggcgggcaggatgcaccaatgc

SEQ ID NO: 91030 - DNA, 80 bp, synthetic construct
  misc_feature 1..80: note = Artificially Synthesized Probe
  source 1..80: mol_type = other DNA
ttgagacacggtctcattctatcacccaggttggagtgcagcggtgcataacctcactacaacctcaagctcctgggctg

SEQ ID NO: 91031 - DNA, 80 bp, synthetic construct; identical to SEQ ID NO: 33018
  misc_feature 1..80: note = Artificially Synthesized Probe
  source 1..80: mol_type = other DNA

SEQ ID NO: 91032 - DNA, 80 bp, synthetic construct
  misc_feature 1..80: note = Artificially Synthesized Probe
  source 1..80: mol_type = other DNA
agaaagtttatgaatttgtgttgggtctcattcaaagccatcctgagccgcgtgtggacaagcttgctttaaatgcagtt

SEQ ID NO: 91033 - DNA, 80 bp, synthetic construct
  misc_feature 1..80: note = Artificially Synthesized Probe
  source 1..80: mol_type = other DNA
ggctccctacatcgtccgacctttgaatatgtctgtgattttccaccttgacattacgataaaagcacagcaaaggccat

SEQ ID NO: 91034 - DNA, 80 bp, synthetic construct; identical to SEQ ID NO: 33019
  misc_feature 1..80: note = Artificially Synthesized Probe
  source 1..80: mol_type = other DNA

SEQ ID NO: 91035 - DNA, 80 bp, synthetic construct
  misc_feature 1..80: note = Artificially Synthesized Probe
  source 1..80: mol_type = other DNA
gctgggagggagagagggcaccccgtgggctgaggaaggaggctgggagggagagagggcaccccgtgggctgaggaagg

SEQ ID NO: 91036 - DNA, 80 bp, synthetic construct
  misc_feature 1..80: note = Artificially Synthesized Probe
  source 1..80: mol_type = other DNA
acagatgctctttatccagcggaggaagttcctctccttctctgtttttccaagtttaaatcatgaatagatgttaaact

SEQ ID NO: 91037 - DNA, 80 bp, synthetic construct
  misc_feature 1..80: note = Artificially Synthesized Probe
  source 1..80: mol_type = other DNA
ggtggctgggagagagaggaggcaccctgtgggctcaggaaggaggctgggagagagggggtaccccgtgggctgaggaa

SEQ ID NO: 91038 - DNA, 80 bp, synthetic construct
  misc_feature 1..80: note = Artificially Synthesized Probe
  source 1..80: mol_type = other DNA
ttacccccaaaatgttcccaatatataaccttagttgaacggagaaaggaaaaggagctgatttttcaaatccatagaga

SEQ ID NO: 91039 - DNA, 80 bp, synthetic construct
  misc_feature 1..80: note = Artificially Synthesized Probe
  source 1..80: mol_type = other DNA
gagatcctagctaaaaagacgcagcctcacgcttttatcagaagggaccaaggcctggaagagtttcagtgactcagggc

SEQ ID NO: 91040 - DNA, 80 bp, synthetic construct; identical to SEQ ID NO: 33020
  misc_feature 1..80: note = Artificially Synthesized Probe
  source 1..80: mol_type = other DNA

SEQ ID NO: 91041 - DNA, 80 bp, synthetic construct
  misc_feature 1..80: note = Artificially Synthesized Probe
  source 1..80: mol_type = other DNA
tctgctgttttgttctttaaagaaactcaagtcctttcctggacagtgggacgtagattttgcttttggatggtcggggt

SEQ ID NO: 91042 - DNA, 80 bp, synthetic construct
  misc_feature 1..80: note = Artificially Synthesized Probe
  source 1..80: mol_type = other DNA
ccgacaggctgctggggtctctgttgactgacaggtcgttggggtctctgtgctagggaggcagcaagacccccgatgcc

SEQ ID NO: 91043 - DNA, 80 bp, synthetic construct
  misc_feature 1..80: note = Artificially Synthesized Probe
  source 1..80: mol_type = other DNA
ccccattttggggcaggctagttgtaaatttgtaagaaatcttccagtttctggcctagtgcaaagaactttgctggagg

SEQ ID NO: 91044 - DNA, 80 bp, synthetic construct; identical to SEQ ID NO: 33021
  misc_feature 1..80: note = Artificially Synthesized Probe
  source 1..80: mol_type = other DNA

SEQ ID NO: 91045 - DNA, 80 bp, synthetic construct
  misc_feature 1..80: note = Artificially Synthesized Probe
  source 1..80: mol_type = other DNA
cacagggaagcgctagactgaacagtggcttgtggggacggcagggatggggctggacagtggcttgcagggacagggct

SEQ ID NO: 91046 - DNA, 80 bp, synthetic construct
  misc_feature 1..80: note = Artificially Synthesized Probe
  source 1..80: mol_type = other DNA
gcagtgccagtgaggcaactggttcactgaagacatgactgctgccaccctaatgtttaagttcatacaacagagaaaat

SEQ ID NO: 91047 - DNA, 80 bp, synthetic construct
  misc_feature 1..80: note = Artificially Synthesized Probe
  source 1..80: mol_type = other DNA
gctgccaccctaatgtttaagttcatacaacagagaaaataaaatggtaataacaagaggtgtctttgcaaacatctgtc

SEQ ID NO: 91048 - DNA, 80 bp, synthetic construct; identical to SEQ ID NO: 33022
  misc_feature 1..80: note = Artificially Synthesized Probe
  source 1..80: mol_type = other DNA

SEQ ID NO: 91049 - DNA, 80 bp, synthetic construct
  misc_feature 1..80: note = Artificially Synthesized Probe
  source 1..80: mol_type = other DNA
atatgtaaatagcccttaaaagtgtaaggaaaaagtgctggaggccgtttcgacaaagcacctaaggcagcaatgaaaat

SEQ ID NO: 91050 - DNA, 80 bp, synthetic construct
  misc_feature 1..80: note = Artificially Synthesized Probe
  source 1..80: mol_type = other DNA
ggcaaattctatttagtaattttttttttttttttgaggcagagtctcactctgttgccgaggctggagtgcagtggcac

SEQ ID NO: 91051 - DNA, 80 bp, synthetic construct
  misc_feature 1..80: note = Artificially Synthesized Probe
  source 1..80: mol_type = other DNA
caaaggggaacggcaaaggcaaaacacaaatccccagagaaacaacaagagcaaaaccaagaaaaataacttggcagaga

SEQ ID NO: 91052 - DNA, 80 bp, synthetic construct
  misc_feature 1..80: note = Artificially Synthesized Probe
  source 1..80: mol_type = other DNA
cccagcagcccacctcaggagctagttcacacagtaagtcacagccctgcaaaatatccctgcgccacaaagctggccac

SEQ ID NO: 91053 - DNA, 80 bp, synthetic construct
  misc_feature 1..80: note = Artificially Synthesized Probe
  source 1..80: mol_type = other DNA
gcggaggtccagacgggcgcgtggcatctggggcaatgaccagtgcgtcgctgagactgccggcgccaggcctcgaccct

SEQ ID NO: 91054 - DNA, 80 bp, synthetic construct; identical to SEQ ID NO: 33023
  misc_feature 1..80: note = Artificially Synthesized Probe
  source 1..80: mol_type = other DNA

SEQ ID NO: 91055 - DNA, 80 bp, synthetic construct
  misc_feature 1..80: note = Artificially Synthesized Probe
  source 1..80: mol_type = other DNA
acagacgtcctcatcagagagacgtaccaggaaccctgagacagaccaaaggggaggaggcaaagcggcagggacccgag

SEQ ID NO: 91056 - DNA, 80 bp, synthetic construct
  misc_feature 1..80: note = Artificially Synthesized Probe
  source 1..80: mol_type = other DNA
caagaactgtggaagagtaagtgtttcttgtttgaagcctccccacgtggtcacggtcatggctgcagaatgccgccatg

SEQ ID NO: 91057 - DNA, 80 bp, synthetic construct
  misc_feature 1..80: note = Artificially Synthesized Probe
  source 1..80: mol_type = other DNA
gaccacaggaaacagctgggaaaccccaaagaggaacaccatttatttaaaggaatgcataactttaaaatatcagtgtc

SEQ ID NO: 91058 - DNA, 80 bp, synthetic construct; identical to SEQ ID NO: 33024
  misc_feature 1..80: note = Artificially Synthesized Probe
  source 1..80: mol_type = other DNA

SEQ ID NO: 91059 - DNA, 80 bp, synthetic construct
  misc_feature 1..80: note = Artificially Synthesized Probe
  source 1..80: mol_type = other DNA
tgaatttgtgtatttcttcctggagttctgcaatttttgcttcatatattgtgaggttcagtatgtggtgcctttatgtc

SEQ ID NO: 91060 - DNA, 80 bp, synthetic construct
  misc_feature 1..80: note = Artificially Synthesized Probe
  source 1..80: mol_type = other DNA
ttatgtagtctatccttctttatctttatccttcctctttcaactcatttgtacctttatatttaaagcatagctcttga

SEQ ID NO: 91061 - DNA, 80 bp, synthetic construct
  misc_feature 1..80: note = Artificially Synthesized Probe
  source 1..80: mol_type = other DNA
ctcccaaagtgttgggattacaagtgtgagccattgtgcccagtctatttagtaatattttgttaaaaaattttgtgtct

SEQ ID NO: 91062 - DNA, 80 bp, synthetic construct
  misc_feature 1..80: note = Artificially Synthesized Probe
  source 1..80: mol_type = other DNA
acaggcacgtgcaactatgcccgggtaatttttgtatttttagtaaagatgaggcttcaccatgttggccaggctggtct

SEQ ID NO: 91063 - DNA, 80 bp, synthetic construct; identical to SEQ ID NO: 33025
  misc_feature 1..80: note = Artificially Synthesized Probe
  source 1..80: mol_type = other DNA

SEQ ID NO: 91064 - DNA, 80 bp, synthetic construct
  misc_feature 1..80: note = Artificially Synthesized Probe
  source 1..80: mol_type = other DNA
tacagattcaggaaggatcccctccctcctttgtgctaatgttgtgtatattacagtattacagtttttgccttagttgt

SEQ ID NO: 91065 - DNA, 80 bp, synthetic construct
  misc_feature 1..80: note = Artificially Synthesized Probe
  source 1..80: mol_type = other DNA
gccaagcaataattccttcagcctgaagatattcctttaacatttctatagtgtgtctgctggcaaagccttctctcagt

SEQ ID NO: 91066 - DNA, 80 bp, synthetic construct
  misc_feature 1..80: note = Artificially Synthesized Probe
  source 1..80: mol_type = other DNA
tctggcctccagtggttataagaagccagacatatttgaatctttattctttgagtgtaacgtctttttccttccaggtg

SEQ ID NO: 91067 - DNA, 80 bp, synthetic construct
  misc_feature 1..80: note = Artificially Synthesized Probe
  source 1..80: mol_type = other DNA
attatttctttaaatactttttatgccccattttctgtgtcctctctctgtggggctccaatcacaagtatgttagacca

SEQ ID NO: 91068 - DNA, 80 bp, synthetic construct; identical to SEQ ID NO: 33026
  misc_feature 1..80: note = Artificially Synthesized Probe
  source 1..80: mol_type = other DNA

SEQ ID NO: 91069 - DNA, 80 bp, synthetic construct
  misc_feature 1..80: note = Artificially Synthesized Probe
  source 1..80: mol_type = other DNA
ctccaatcacaggtatgttagaccacctggtgctatcccacatgtcactgaagctctgctcgtttcaatcttttttctgt

SEQ ID NO: 91070 - DNA, 80 bp, synthetic construct
  misc_feature 1..80: note = Artificially Synthesized Probe
  source 1..80: mol_type = other DNA
ttcagagtctcggccgggcacggtggctcacgcctgtaatcccagcactttgggaggccgaggcgggtggatcacaaggt

SEQ ID NO: 91071 - DNA, 80 bp, synthetic construct
  misc_feature 1..80: note = Artificially Synthesized Probe
  source 1..80: mol_type = other DNA
cgagatcgcgccactgcactccagcctgggcgacagagcgagactccatctcaaaaaaaaaaaaaaaaaaagattcagag

SEQ ID NO: 91072 - DNA, 80 bp, synthetic construct
  misc_feature 1..80: note = Artificially Synthesized Probe
  source 1..80: mol_type = other DNA
tctattaaaaatacaaaaattagctgggtgtggtggtgcacacctataatcccagctacttgggaggctgaagcaggaaa

SEQ ID NO: 91073 - DNA, 80 bp, synthetic construct; identical to SEQ ID NO: 32941
  misc_feature 1..80: note = Artificially Synthesized Probe
  source 1..80: mol_type = other DNA

SEQ ID NO: 91074 - DNA, 80 bp, synthetic construct
  misc_feature 1..80: note = Artificially Synthesized Probe
  source 1..80: mol_type = other DNA
aaatcctcttttctacgtgtgctatcttggctatcatggtcagtttcttgtgacccttttttgtttcctgtatagggatc

SEQ ID NO: 91075 - DNA, 80 bp, synthetic construct
  misc_feature 1..80: note = Artificially Synthesized Probe
  source 1..80: mol_type = other DNA
taattttgtctgcttcctttggagagtgaatgagtctgtctggtaagcagctgagctactggaggatgaacttggtcttt

SEQ ID NO: 91076 - DNA, 80 bp, synthetic construct
  misc_feature 1..80: note = Artificially Synthesized Probe
  source 1..80: mol_type = other DNA
actgtgggaccctcagactcaccactaaggtcaccactccctacctgccactttccaccaaccctcaaagactctacccg

SEQ ID NO: 91077 - DNA, 80 bp, synthetic construct; identical to SEQ ID NO: 33028
  misc_feature 1..80: note = Artificially Synthesized Probe
  source 1..80: mol_type = other DNA

SEQ ID NO: 91078 - DNA, 80 bp, synthetic construct
  misc_feature 1..80: note = Artificially Synthesized Probe
  source 1..80: mol_type = other DNA
ctgccactctgccatggacgggcatggagtccatgaagacaaatctcttattttaaagtattgtttcaatgtgagacgtc

SEQ ID NO: 91079 - DNA, 80 bp, synthetic construct
  misc_feature 1..80: note = Artificially Synthesized Probe
  source 1..80: mol_type = other DNA
atccctgcccctttggtgcaccttgatgattatgggatgtactcttcggagtcaaagaaatacatatctcttgttaggtt

SEQ ID NO: 91080 - DNA, 80 bp, synthetic construct
  misc_feature 1..80: note = Artificially Synthesized Probe
  source 1..80: mol_type = other DNA
cagatgcctataatcccagctacttgggaggctaaggtgggagaatcgcttcaacccaggaagtggaggctgcaatggac

SEQ ID NO: 91081 - DNA, 80 bp, synthetic construct; identical to SEQ ID NO: 33029
  misc_feature 1..80: note = Artificially Synthesized Probe
  source 1..80: mol_type = other DNA

SEQ ID NO: 91082 - DNA, 80 bp, synthetic construct
  misc_feature 1..80: note = Artificially Synthesized Probe
  source 1..80: mol_type = other DNA
gtcagagttaaaaaatttaaaaaagaaaaaatatctgtttaaaatgtgaaagagatttaggttaagaacggaaagggtca

SEQ ID NO: 91083 - DNA, 80 bp, synthetic construct
  misc_feature 1..80: note = Artificially Synthesized Probe
  source 1..80: mol_type = other DNA
actcacctctaggaaatgaagtaagtcacggttcatacaccacagctactgtggaagaaagctctggacgcaggagactg

SEQ ID NO: 91084 - DNA, 80 bp, synthetic construct
  misc_feature 1..80: note = Artificially Synthesized Probe
  source 1..80: mol_type = other DNA
atggtggacacagagttcaccccaaaacaagctaatggtggacacagagttcaccaagaagtcaatgcagagtctcggag

SEQ ID NO: 91085 - DNA, 80 bp, synthetic construct
  misc_feature 1..80: note = Artificially Synthesized Probe
  source 1..80: mol_type = other DNA
aaataaaacgtaaattgatgcttttccttctcttctattttctgggaaattaatcttagaattctccagtgaaaccatct

SEQ ID NO: 91086 - DNA, 80 bp, synthetic construct; identical to SEQ ID NO: 33030
  misc_feature 1..80: note = Artificially Synthesized Probe
  source 1..80: mol_type = other DNA

SEQ ID NO: 91087 - DNA, 80 bp, synthetic construct
  misc_feature 1..80: note = Artificially Synthesized Probe
  source 1..80: mol_type = other DNA
ccagaagaggccttttacagtgtgaggcccggacagtcctggtcttcctgctgaggctatggcagacttttagagcagac

SEQ ID NO: 91088 - DNA, 80 bp, synthetic construct
  misc_feature 1..80: note = Artificially Synthesized Probe
  source 1..80: mol_type = other DNA
tgcctctcaagggacctcacgtgccctggtgggcctgaccaagctgaagtcagggcaccccctcctcagtgtccacggtg

SEQ ID NO: 91089 - DNA, 80 bp, synthetic construct
  misc_feature 1..80: note = Artificially Synthesized Probe
  source 1..80: mol_type = other DNA
aggtcagctcacaggcaggactgagtgctaggcaggagtcagatatcacagacaaagacacccagcacacagcaacagga

SEQ ID NO: 91090 - DNA, 80 bp, synthetic construct; identical to SEQ ID NO: 33031
  misc_feature 1..80: note = Artificially Synthesized Probe
  source 1..80: mol_type = other DNA

SEQ ID NO: 91091 - DNA, 80 bp, synthetic construct
  misc_feature 1..80: note = Artificially Synthesized Probe
  source 1..80: mol_type = other DNA
cggcctcccagcgtcccctccagccctggcgctgctctcagtactctttgaagtggagccaccatccgtcctgcccagga

SEQ ID NO: 91092 - DNA, 80 bp, synthetic construct
  misc_feature 1..80: note = Artificially Synthesized Probe
  source 1..80: mol_type = other DNA
agggccactgccaaagccaagcgcggatgacagtcagagccaacgagagagtcagagccaacgacagagtcagccaatga

SEQ ID NO: 91093 - DNA, 80 bp, synthetic construct
  misc_feature 1..80: note = Artificially Synthesized Probe
  source 1..80: mol_type = other DNA
gccaacgacagagtcagccaatgacagagtcagagccaacgacagagtcagccaacgacagagtcagagacaacgacaga

SEQ ID NO: 91094 - DNA, 80 bp, synthetic construct
  misc_feature 1..80: note = Artificially Synthesized Probe
  source 1..80: mol_type = other DNA
cagagtcagccaatgacagagtcagagacaatgacagagttacagaaaatgacagagtcagccaacgacagagtcagcca

SEQ ID NO: 91095 - DNA, 80 bp, synthetic construct
  misc_feature 1..80: note = Artificially Synthesized Probe
  source 1..80: mol_type = other DNA
cagagtcagagacaacgacagagtcagagacaatgacagagtcagagccaatgacagagtcagccaacgacagagtcaga

SEQ ID NO: 91096 - DNA, 80 bp, synthetic construct
  misc_feature 1..80: note = Artificially Synthesized Probe
  source 1..80: mol_type = other DNA
ttgtcgtagtcgcttattatccttttcagattgcagggtctgtagtgatatctctttttcgtttcgagacagaatcttgt

SEQ ID NO: 91097 - DNA, 80 bp, synthetic construct
  misc_feature 1..80: note = Artificially Synthesized Probe
  source 1..80: mol_type = other DNA
gacagagtcagccaacgacagaatcagagacaacgacagagtcagccaatgacagagtcagagacgacagagtcagagcc

SEQ ID NO: 91098 - DNA, 80 bp, synthetic construct
  misc_feature 1..80: note = Artificially Synthesized Probe
  source 1..80: mol_type = other DNA
tcagccaacgacagagtcagagccaaggacagagtcagagccaacgacagagtcagtcaacgacagagtcagccaacgac

SEQ ID NO: 91099 - DNA, 80 bp, synthetic construct; identical to SEQ ID NO: 33032
  misc_feature 1..80: note = Artificially Synthesized Probe
  source 1..80: mol_type = other DNA

SEQ ID NO: 91100 - DNA, 80 bp, synthetic construct
  misc_feature 1..80: note = Artificially Synthesized Probe
  source 1..80: mol_type = other DNA
agagtcagccaacaacagtcagccaacgacagagtcaggccaacgacagagtcagccaatgacagagtcagagccaacga

SEQ ID NO: 91101 - DNA, 80 bp, synthetic construct
  misc_feature 1..80: note = Artificially Synthesized Probe
  source 1..80: mol_type = other DNA
cagccaatgacagagtcagagccaacgacagagtcagccaatgacagagtcagagacaacgacagagtcagagacaacga

SEQ ID NO: 91102 - DNA, 80 bp, synthetic construct
  misc_feature 1..80: note = Artificially Synthesized Probe
  source 1..80: mol_type = other DNA
ggagggaagtaggctccgatcctcttccgcacccaccacttgccctcggcggcgtgcctgcccccaggacggctgaactt

SEQ ID NO: 91103 - DNA, 80 bp, synthetic construct; identical to SEQ ID NO: 33034
  misc_feature 1..80: note = Artificially Synthesized Probe
  source 1..80: mol_type = other DNA

SEQ ID NO: 91104 - DNA, 80 bp, synthetic construct; identical to SEQ ID NO: 33035
  misc_feature 1..80: note = Artificially Synthesized Probe
  source 1..80: mol_type = other DNA

SEQ ID NO: 91105 - DNA, 80 bp, synthetic construct
  misc_feature 1..80: note = Artificially Synthesized Probe
  source 1..80: mol_type = other DNA
gagtcaggccaacgacagagtcagccaatgacagagtcagagccaacgacagagtcagagacaacgacagagttagagac

SEQ ID NO: 91106 - DNA, 80 bp, synthetic construct
  misc_feature 1..80: note = Artificially Synthesized Probe
  source 1..80: mol_type = other DNA
agagacaacgacagagttagagacaacgacagagtcagccaaggacagagtcagccaacgacagaatcagagacaatgac

SEQ ID NO: 91107 - DNA, 80 bp, synthetic construct
  misc_feature 1..80: note = Artificially Synthesized Probe
  source 1..80: mol_type = other DNA
tgacagagtcagagccaacgacagagtcagccaaggacggagtcagagccaacgacagagtcagagccaacgacagagtc

SEQ ID NO: 91108 - DNA, 80 bp, synthetic construct
  misc_feature 1..80: note = Artificially Synthesized Probe
  source 1..80: mol_type = other DNA
cttgaattcctgagttcaggtgatccacccgccttggcctcccaaagtgcggtgatttcaggcatgagccaccacaccca

SEQ ID NO: 91109 - DNA, 80 bp, synthetic construct
  misc_feature 1..80: note = Artificially Synthesized Probe
  source 1..80: mol_type = other DNA
gccaacgacagagtcagagccaatgacagagtcagccaatgacagagtcagccgacagagtcagccaacgacagagtcag

SEQ ID NO: 91110 - DNA, 80 bp, synthetic construct
  misc_feature 1..80: note = Artificially Synthesized Probe
  source 1..80: mol_type = other DNA
gagacaacgacaaagtcagagacaacgacagagtcagagccaacgatggagtcagagccaatgttctggaaaagctgaag

SEQ ID NO: 91111 - DNA, 80 bp, synthetic construct
  misc_feature 1..80: note = Artificially Synthesized Probe
  source 1..80: mol_type = other DNA
tcataaatgttgccaaacccccagatgtttaaatttctagaccaagaagacagacccccaaagtaccaaaacaaaaacgt

SEQ ID NO: 91112 - DNA, 80 bp, synthetic construct
  misc_feature 1..80: note = Artificially Synthesized Probe
  source 1..80: mol_type = other DNA
tgtggtgaagggagaaaaagccacttcaccgtccagacactcaacaagcacagcccccaccaggccaccgtcagcagaga

SEQ ID NO: 91113 - DNA, 80 bp, synthetic construct; identical to SEQ ID NO: 33036
  misc_feature 1..80: note = Artificially Synthesized Probe
  source 1..80: mol_type = other DNA

SEQ ID NO: 91114 - DNA, 80 bp, synthetic construct
  misc_feature 1..80: note = Artificially Synthesized Probe
  source 1..80: mol_type = other DNA
gcccactccagcacagccacaaagtggggacccccccccacaggtgccctgatgccagctgcagccctccctgcatgagc

SEQ ID NO: 91115 - DNA, 80 bp, synthetic construct
  misc_feature 1..80: note = Artificially Synthesized Probe
  source 1..80: mol_type = other DNA
caggatggaaaacacaggctccacagcccaaggctgcgccctgcccgcaccaactcaccaccacagccttccatcctggg

SEQ ID NO: 91116 - DNA, 80 bp, synthetic construct
  misc_feature 1..80: note = Artificially Synthesized Probe
  source 1..80: mol_type = other DNA
ctacacatccacacagacacccaccccaaaccagcctcctacatgtccacacagacacccaccccaaaccagcctcctac

SEQ ID NO: 91117 - DNA, 80 bp, synthetic construct
  misc_feature 1..80: note = Artificially Synthesized Probe
  source 1..80: mol_type = other DNA
acaccccaaaccagcctcctacatatccacacagacaccccaaaccagcctcctacacgtccacacagacacccactcca

SEQ ID NO: 91118 - DNA, 80 bp, synthetic construct
  misc_feature 1..80: note = Artificially Synthesized Probe
  source 1..80: mol_type = other DNA
gtccacacagacacccaccccaaaccagcctcctacacgtccacacagacaccccaaaccagcctcctacacgtccacac

SEQ ID NO: 91119 - DNA, 80 bp, synthetic construct
  misc_feature 1..80: note = Artificially Synthesized Probe
  source 1..80: mol_type = other DNA
ttcttactgctccttgctttaaattttttcctagttattcatgtgatcttgagctagattattattattttttaagcgat

SEQ ID NO: 91120 - DNA, 80 bp, synthetic construct; identical to SEQ ID NO: 33037
  misc_feature 1..80: note = Artificially Synthesized Probe
  source 1..80: mol_type = other DNA

SEQ ID NO: 91121 - DNA, 80 bp, synthetic construct
  misc_feature 1..80: note = Artificially Synthesized Probe
  source 1..80: mol_type = other DNA
acggaggactacaactcccacacgaccgcgcgcgcccgggccattcaaggtcgcgcggggggccctccgctcatgcggag

SEQ ID NO: 91122 - DNA, 80 bp, synthetic construct
  misc_feature 1..80: note = Artificially Synthesized Probe
  source 1..80: mol_type = other DNA
ccagctactcgggaggctgaggcaggagaattgcttgaacctgggaggcggaggttgcagtgagccaagatcgtgccacc

SEQ ID NO: 91123 - DNA, 80 bp, synthetic construct
  misc_feature 1..80: note = Artificially Synthesized Probe
  source 1..80: mol_type = other DNA
aagtgtccttgtaggatacacagagtatggacacaggggaggcagccgcgggaagacagaggcagacactggggagacgc

SEQ ID NO: 91124 - DNA, 80 bp, synthetic construct; identical to SEQ ID NO: 33078
  misc_feature 1..80: note = Artificially Synthesized Probe
  source 1..80: mol_type = other DNA

SEQ ID NO: 91125 - DNA, 80 bp, synthetic construct
  misc_feature 1..80: note = Artificially Synthesized Probe
  source 1..80: mol_type = other DNA
acgtcactctccaggccgcgcttgtcgctgagggcagctgccagctccacctcgctccggtggaacagggactccaggtc

SEQ ID NO: 91126 - DNA, 80 bp, synthetic construct
  misc_feature 1..80: note = Artificially Synthesized Probe
  source 1..80: mol_type = other DNA
ccccagaccttcccgtcctgcagacgacgcggccccacgcgcccaggcaaaggcacacgtgccctcatcatctgccctgc

SEQ ID NO: 91127 - DNA, 80 bp, synthetic construct
  misc_feature 1..80: note = Artificially Synthesized Probe
  source 1..80: mol_type = other DNA
gtcagccttgtttgtaaacttaagctgtctgaagcaggctcacctggttttccactaaaccaaattagctccaacattag

SEQ ID NO: 91128 - DNA, 80 bp, synthetic construct
  misc_feature 1..80: note = Artificially Synthesized Probe
  source 1..80: mol_type = other DNA
atcctcctgtctcagcctcccaaagtgctgggattacaggtgcgagccaccgcgtacggctgactcttaaatgtttttaa

SEQ ID NO: 91129 - DNA, 80 bp, synthetic construct
  misc_feature 1..80: note = Artificially Synthesized Probe
  source 1..80: mol_type = other DNA
ttccaaagactcaattctcaatgaacctccaattacccacaggctgcccagtccacgcttctccccacccccttcagcta

SEQ ID NO: 91130 - DNA, 80 bp, synthetic construct; identical to SEQ ID NO: 33079
  misc_feature 1..80: note = Artificially Synthesized Probe
  source 1..80: mol_type = other DNA

SEQ ID NO: 91131 - DNA, 80 bp, synthetic construct
  misc_feature 1..80: note = Artificially Synthesized Probe
  source 1..80: mol_type = other DNA
cagaatcaccccaggatggggacaactgggtgtatctggaataacacagccaaggctgctggctggacattcaaagaaca

SEQ ID NO: 91132 - DNA, 80 bp, synthetic construct
  misc_feature 1..80: note = Artificially Synthesized Probe
  source 1..80: mol_type = other DNA
ggctcactgcaacctccgcctcccgggttcaaacaattctcctgcctcagcctcctgtgtagctgggattacaggcatgc

SEQ ID NO: 91133 - DNA, 80 bp, synthetic construct; identical to SEQ ID NO: 33080
  misc_feature 1..80: note = Artificially Synthesized Probe
  source 1..80: mol_type = other DNA

SEQ ID NO: 91134 - DNA, 80 bp, synthetic construct
  misc_feature 1..80: note = Artificially Synthesized Probe
  source 1..80: mol_type = other DNA
cgggttcaagcgattctcctccctcagcctcccaagtagctgagattacaggcaagtgccagcacgcccagataattttg

SEQ ID NO: 91135 - DNA, 80 bp, synthetic construct
  misc_feature 1..80: note = Artificially Synthesized Probe
  source 1..80: mol_type = other DNA
cccagccttacagatagctatatctatctattgctctatctattactgtctatccatctacccatcatccatccatccat

SEQ ID NO: 91136 - DNA, 80 bp, synthetic construct
  misc_feature 1..80: note = Artificially Synthesized Probe
  source 1..80: mol_type = other DNA
tccatccatccatccatctatccactcatccatccatcatctatctatccattatctatccatcatccatccatctactc

SEQ ID NO: 91137 - DNA, 80 bp, synthetic construct; identical to SEQ ID NO: 33081
  misc_feature 1..80: note = Artificially Synthesized Probe
  source 1..80: mol_type = other DNA

SEQ ID NO: 91138 - DNA, 80 bp, synthetic construct
  misc_feature 1..80: note = Artificially Synthesized Probe
  source 1..80: mol_type = other DNA
gtccctggtcgggggtcagacaaccaggtctaaggccacctgccaggtaaaagcatccgtgccgggtaccctgaatcccg

SEQ ID NO: 91139 - DNA, 80 bp, synthetic construct
  misc_feature 1..80: note = Artificially Synthesized Probe
  source 1..80: mol_type = other DNA
tccgcagccctcagggacactaagctctacttccccacatggagcagatctccagcagggtctggggtgcagatcccgca

SEQ ID NO: 91140 - DNA, 80 bp, synthetic construct
  misc_feature 1..80: note = Artificially Synthesized Probe
  source 1..80: mol_type = other DNA
gcatctagaacccttgccttacactgcgggacgtccttgcggagggaggcatcagcgacacaggctgcctaccagacagg

SEQ ID NO: 91141 - DNA, 80 bp, synthetic construct; identical to SEQ ID NO: 33068
  misc_feature 1..80: note = Artificially Synthesized Probe
  source 1..80: mol_type = other DNA

SEQ ID NO: 91142 - DNA, 80 bp, synthetic construct
  misc_feature 1..80: note = Artificially Synthesized Probe
  source 1..80: mol_type = other DNA
gctgcagaccagctcagaggactggagcggagatcggggaatccgggaagctcctcagcaactcggtctaaaccacaggg

SEQ ID NO: 91143 - DNA, 80 bp, synthetic construct; identical to SEQ ID NO: 33082
  misc_feature 1..80: note = Artificially Synthesized Probe
  source 1..80: mol_type = other DNA

SEQ ID NO: 91144 - DNA, 80 bp, synthetic construct
  misc_feature 1..80: note = Artificially Synthesized Probe
  source 1..80: mol_type = other DNA
ggtttacatctgtaatcccagcactctgggaggccaaggcgggtggatcgcttaagtccaggagtttgagaccagcctgg

SEQ ID NO: 91145 - DNA, 80 bp, synthetic construct
  misc_feature 1..80: note = Artificially Synthesized Probe
  source 1..80: mol_type = other DNA
tgtctcaaaaggaaataaataaaaaataaaaaaaattagttgggtgtagtggtgcatgcctggggtcccagctactcggg

SEQ ID NO: 91146 - DNA, 80 bp, synthetic construct; identical to SEQ ID NO: 33083
  misc_feature 1..80: note = Artificially Synthesized Probe
  source 1..80: mol_type = other DNA

SEQ ID NO: 91147 - DNA, 80 bp, synthetic construct
  misc_feature 1..80: note = Artificially Synthesized Probe
  source 1..80: mol_type = other DNA
ccaagctctagtcatcccacagcctgcatggctccactgatgaacctgcttattaaacacggtgggtgctggaggtagac

SEQ ID NO: 91148 - DNA, 80 bp, synthetic construct
  misc_feature 1..80: note = Artificially Synthesized Probe
  source 1..80: mol_type = other DNA
gcaggcgggcggtggtccctgggctgacctggagggtctcctgttggggaagggaagtcagctctccacgggagcagcgc

SEQ ID NO: 91149 - DNA, 80 bp, synthetic construct
  misc_feature 1..80: note = Artificially Synthesized Probe
  source 1..80: mol_type = other DNA
ccaggtggccgaggtgccacccctcctgccagcagatccctccatgctgagccaggcctgcgtggctctgggagaatgag

SEQ ID NO: 91150 - DNA, 80 bp, synthetic construct
  misc_feature 1..80: note = Artificially Synthesized Probe
  source 1..80: mol_type = other DNA
gacacagtctgtcgccagcattcccacttccagcggctggcagagggtatccccggggcaggcaaagctccctaccagcc

SEQ ID NO: 91151 - DNA, 80 bp, synthetic construct; identical to SEQ ID NO: 33084
  misc_feature 1..80: note = Artificially Synthesized Probe
  source 1..80: mol_type = other DNA

SEQ ID NO: 91152 - DNA, 80 bp, synthetic construct
  misc_feature 1..80: note = Artificially Synthesized Probe
  source 1..80: mol_type = other DNA
cccaacagctgggacaaaaccccggcaccaagaacatccaaccacagggaaatgcctacgatggggcctgaggtcaaacg

SEQ ID NO: 91153 - DNA, 80 bp, synthetic construct
  misc_feature 1..80: note = Artificially Synthesized Probe
  source 1..80: mol_type = other DNA
attttacttgtgagcttaagctgccctgcgcttcctgctgtccgatgtgagcatctatcactttcctcagaacagaaaaa

SEQ ID NO: 91154 - DNA, 80 bp, synthetic construct
  misc_feature 1..80: note = Artificially Synthesized Probe
  source 1..80: mol_type = other DNA
cctcttgttgacctcgtccaactctgccctcagcttcccaatctctatctgcagccgggcacgctctcgagccgtctcat

SEQ ID NO: 91155 - DNA, 80 bp, synthetic construct; identical to SEQ ID NO: 33085
  misc_feature 1..80: note = Artificially Synthesized Probe
  source 1..80: mol_type = other DNA

SEQ ID NO: 91156 - DNA, 80 bp, synthetic construct
  misc_feature 1..80: note = Artificially Synthesized Probe
  source 1..80: mol_type = other DNA
agctcccagaacagcggcgcccagtgctggagaccaaaggccctgggcctggaccagcacagcagctggatggagcctgt

SEQ ID NO: 91157 - DNA, 80 bp, synthetic construct
  misc_feature 1..80: note = Artificially Synthesized Probe
  source 1..80: mol_type = other DNA
ggacactgggctgatcactctcggacaactggtgatgacagcaacccggggccctcccagaccccactgggcctgagagc

SEQ ID NO: 91158 - DNA, 80 bp, synthetic construct
  misc_feature 1..80: note = Artificially Synthesized Probe
  source 1..80: mol_type = other DNA
ctctgtgcccctacctcacacgcaggcacatggcccaggctcaggctgggctgttccctgggatggagggaggagcatct

SEQ ID NO: 91159 - DNA, 80 bp, synthetic construct
  misc_feature 1..80: note = Artificially Synthesized Probe
  source 1..80: mol_type = other DNA
ggatctgtagtcagagtccccaactccccaccccaccagcggcccccacctttcacccctcgatcacagggatctgcagt

SEQ ID NO: 91160 - DNA, 80 bp, synthetic construct; identical to SEQ ID NO: 33086
  misc_feature 1..80: note = Artificially Synthesized Probe
  source 1..80: mol_type = other DNA

SEQ ID NO: 91161 - DNA, 80 bp, synthetic construct
  misc_feature 1..80: note = Artificially Synthesized Probe
  source 1..80: mol_type = other DNA
agggatctgtagtcagagtccccaactccccaccccaccagccgcccccacctttcacccctcgatcacagggatctgta

SEQ ID NO: 91162 - DNA, 80 bp, synthetic construct
  misc_feature 1..80: note = Artificially Synthesized Probe
  source 1..80: mol_type = other DNA
cccggcctggggctggggccccccattccttcctgccacaggcaggtccccagggaggcgggatgcagtcacaggggagc

SEQ ID NO: 91163 - DNA, 80 bp, synthetic construct
  misc_feature 1..80: note = Artificially Synthesized Probe
  source 1..80: mol_type = other DNA
agccaggggtcaccagggcaggcagaagcgactggaacaccctctgggccgcccagctaaagaaagcccctccctaagcc

SEQ ID NO: 91164 - DNA, 80 bp, synthetic construct; identical to SEQ ID NO: 33087
  misc_feature 1..80: note = Artificially Synthesized Probe
  source 1..80: mol_type = other DNA

SEQ ID NO: 91165 - DNA, 80 bp, synthetic construct
  misc_feature 1..80: note = Artificially Synthesized Probe
  source 1..80: mol_type = other DNA
tcacagagccaccctgtgacccggtaactccactcctgggtgtggacccagaagacatgaaattcacatccatgcatgtt

SEQ ID NO: 91166 - DNA, 80 bp, synthetic construct
  misc_feature 1..80: note = Artificially Synthesized Probe
  source 1..80: mol_type = other DNA
gcgtggtggtgggcgcctgtggtcccagctacttgggaggctgaggcaggagaatggcatgaacccgggaggtggaactt

SEQ ID NO: 91167 - DNA, 80 bp, synthetic construct
  misc_feature 1..80: note = Artificially Synthesized Probe
  source 1..80: mol_type = other DNA
ctgtgtaacggagcaaggttctgacaccacagtgtggatgccccttgaggatgtcacactcatgagacgccagacacaaa

SEQ ID NO: 91168 - DNA, 80 bp, synthetic construct; identical to SEQ ID NO: 33088
  misc_feature 1..80: note = Artificially Synthesized Probe
  source 1..80: mol_type = other DNA

SEQ ID NO: 91169 - DNA, 80 bp, synthetic construct
  misc_feature 1..80: note = Artificially Synthesized Probe
  source 1..80: mol_type = other DNA
gtgtctatgcaaggtgggtacagggtcggcctgcatctggagggccacacccccatgttacaggcgaggctcctgtgcag

SEQ ID NO: 91170 - DNA, 80 bp, synthetic construct
  misc_feature 1..80: note = Artificially Synthesized Probe
  source 1..80: mol_type = other DNA
gcgggataagggttcccaacctgattttatgtatgggaaaactgaggcacgggtcagtaaaaagccgcctcctgaccacc

SEQ ID NO: 91171 - DNA, 80 bp, synthetic construct
  misc_feature 1..80: note = Artificially Synthesized Probe
  source 1..80: mol_type = other DNA
ctgggaacagacttctagaaaaacccaaatcaggaaaaagcggccagctccacgctgcaaacagctgggcaccaggtgca

SEQ ID NO: 91172 - DNA, 80 bp, synthetic construct; identical to SEQ ID NO: 33089
  misc_feature 1..80: note = Artificially Synthesized Probe
  source 1..80: mol_type = other DNA

SEQ ID NO: 91173 - DNA, 80 bp, synthetic construct
  misc_feature 1..80: note = Artificially Synthesized Probe
  source 1..80: mol_type = other DNA
gtcctcaaggccctggcgtgagctcctgacctgtgtactgaccaatgtaaaaaaataaatatccattaaaaaaataactt

SEQ ID NO: 91174 - DNA, 80 bp, synthetic construct
  misc_feature 1..80: note = Artificially Synthesized Probe
  source 1..80: mol_type = other DNA
caagaccatccttgttaacacggtgaaaccctgtctctactaaaaatacaaaaaaattagccgggcatggtggcgtgcac

SEQ ID NO: 91175 - DNA, 80 bp, synthetic construct
  misc_feature 1..80: note = Artificially Synthesized Probe
  source 1..80: mol_type = other DNA
actgcacctttcttgtgtttatttacttattttgagacagagccacacccagcctggagagcaatgccgcaatcacagct

SEQ ID NO: 91176 - DNA, 80 bp, synthetic construct
  misc_feature 1..80: note = Artificially Synthesized Probe
  source 1..80: mol_type = other DNA
ctggactcaagcaatctgcctgccccagcctcccaaagtactgggattataggcgggagccaccgcacccagccctttct

SEQ ID NO: 91177 - DNA, 80 bp, synthetic construct
  misc_feature 1..80: note = Artificially Synthesized Probe
  source 1..80: mol_type = other DNA
cacacaaggggcacgtctcctaacgacacgctttccacaaggtatccctgtcactaaacgacacctgacttgaattaata

SEQ ID NO: 91178 - DNA, 80 bp, synthetic construct; identical to SEQ ID NO: 33090
  misc_feature 1..80: note = Artificially Synthesized Probe
  source 1..80: mol_type = other DNA

SEQ ID NO: 91179 - DNA, 80 bp, synthetic construct
  misc_feature 1..80: note = Artificially Synthesized Probe
  source 1..80: mol_type = other DNA
ggtaggcgcctgtaatcccagctactcgggaggctgagacaggagaatcacttgaacccgggaggcagaggttgcagtga

SEQ ID NO: 91180 - DNA, 80 bp, synthetic construct
  misc_feature 1..80: note = Artificially Synthesized Probe
  source 1..80: mol_type = other DNA
ctgaccaacatggagaaaccctgtctctactaaaaatacagaattagccgggcatggtggtgtatgcctgtaatcccagc

SEQ ID NO: 91181 - DNA, 80 bp, synthetic construct
  misc_feature 1..80: note = Artificially Synthesized Probe
  source 1..80: mol_type = other DNA
tatatatatatattccattaaaacattactcatcccatcgccccagcgtgacgatgagcaaaacaacacacaaaccccca

SEQ ID NO: 91182 - DNA, 80 bp, synthetic construct; identical to SEQ ID NO: 33091
  misc_feature 1..80: note = Artificially Synthesized Probe
  source 1..80: mol_type = other DNA

SEQ ID NO: 91183 - DNA, 80 bp, synthetic construct; identical to SEQ ID NO: 33069
  misc_feature 1..80: note = Artificially Synthesized Probe
  source 1..80: mol_type = other DNA

SEQ ID NO: 91184 - DNA, 80 bp, synthetic construct
  misc_feature 1..80: note = Artificially Synthesized Probe
  source 1..80: mol_type = other DNA
aggtcaggaatttaagaccagtctggtcaacatggtgaaaccccatctctactaaaaacacaaaaattgcaccattgcat

SEQ ID NO: 91185 - DNA, 80 bp, synthetic construct
  misc_feature 1..80: note = Artificially Synthesized Probe
  source 1..80: mol_type = other DNA
tgtatttttagtagagacggggcttcaccatgttggccaggctggtttcaatctcctgacctcgtgatccgcccacctcg

SEQ ID NO: 91186 - DNA, 80 bp, synthetic construct
  misc_feature 1..80: note = Artificially Synthesized Probe
  source 1..80: mol_type = other DNA
ccagcctgaccagcatggtgaaaccccatctctgctaaaaatacaaaaattagctgggcgtggcagtgcaaacctgtgat

SEQ ID NO: 91187 - DNA, 80 bp, synthetic construct; identical to SEQ ID NO: 33092
  misc_feature 1..80: note = Artificially Synthesized Probe
  source 1..80: mol_type = other DNA

SEQ ID NO: 91188 - DNA, 80 bp, synthetic construct
  misc_feature 1..80: note = Artificially Synthesized Probe
  source 1..80: mol_type = other DNA
cttattcacctatgggctaaggcagctttcatcctatggcagagctgagtggttcagatgcagacagtctggcctttttt

SEQ ID NO: 91189 - DNA, 80 bp, synthetic construct
  misc_feature 1..80: note = Artificially Synthesized Probe
  source 1..80: mol_type = other DNA
aggctgggccttttctttcatctttcacggcatctagcaagtgctaggcttgagggaagtcaacaagtgtgtccacacat

SEQ ID NO: 91190 - DNA, 80 bp, synthetic construct
  misc_feature 1..80: note = Artificially Synthesized Probe
  source 1..80: mol_type = other DNA
gcgcatgcgcacgaggcacccggcgcgtctatacagcgtgttgccgccggggcggagcccggtcgcatcacgtgacgaag

SEQ ID NO: 91191 - DNA, 80 bp, synthetic construct
  misc_feature 1..80: note = Artificially Synthesized Probe
  source 1..80: mol_type = other DNA
acttccaaagtggactccatcctccacgctcgcctgggccgcctccgagaccccctccagcagccctgagcagccagggg

SEQ ID NO: 91192 - DNA, 80 bp, synthetic construct; identical to SEQ ID NO: 33093
  misc_feature 1..80: note = Artificially Synthesized Probe
  source 1..80: mol_type = other DNA

SEQ ID NO: 91193 - DNA, 80 bp, synthetic construct
  misc_feature 1..80: note = Artificially Synthesized Probe
  source 1..80: mol_type = other DNA
actcagaaggctgaggcacgagaagcccttgaacccaggaggtagaggttgcagtgagccaagatcacgccactgcacac

SEQ ID NO: 91194 - DNA, 80 bp, synthetic construct
  misc_feature 1..80: note = Artificially Synthesized Probe
  source 1..80: mol_type = other DNA
gatgtgtcccctccacatctcccctccctgcttattgttgtgacaggtcttacgacgggactgtcctcattcttccttcc

SEQ ID NO: 91195 - DNA, 80 bp, synthetic construct
  misc_feature 1..80: note = Artificially Synthesized Probe
  source 1..80: mol_type = other DNA
agagaccatcctggccaacatggtgaaatcccatctctactaaaaatacaaaaattagccgggtgtggtggtacacgcct

SEQ ID NO: 91196 - DNA, 80 bp, synthetic construct
  misc_feature 1..80: note = Artificially Synthesized Probe
  source 1..80: mol_type = other DNA
gggccgccacacaccaggatgctgtgagtcgtgttatgagcctgaaaaaatctgaactgagtccctcacgcctcccagca

SEQ ID NO: 91197 - DNA, 80 bp, synthetic construct
  misc_feature 1..80: note = Artificially Synthesized Probe
  source 1..80: mol_type = other DNA
ctaatgggggctgggtcatcctcgtgggggctgggtcatcctcgtgggggctgggtcatcctcatggggctgggtcatcc

SEQ ID NO: 91198 - DNA, 80 bp, synthetic construct; identical to SEQ ID NO: 33094
  misc_feature 1..80: note = Artificially Synthesized Probe
  source 1..80: mol_type = other DNA

SEQ ID NO: 91199 - DNA, 80 bp, synthetic construct
  misc_feature 1..80: note = Artificially Synthesized Probe
  source 1..80: mol_type = other DNA
cttccaactctgctccccactagccgggttcctggcccactagtcgcaggcggaactcccagctgtcccctgccacatgc

SEQ ID NO: 91200 - DNA, 80 bp, synthetic construct
  misc_feature 1..80: note = Artificially Synthesized Probe
  source 1..80: mol_type = other DNA
ctctagggcacagggccggtccaatggggcgtccagtggggctggggctggtacctccccagcactcaccaggccctgca

SEQ ID NO: 91201 - DNA, 80 bp, synthetic construct; identical to SEQ ID NO: 33095
  misc_feature 1..80: note = Artificially Synthesized Probe
  source 1..80: mol_type = other DNA

SEQ ID NO: 91202 - DNA, 80 bp, synthetic construct
  misc_feature 1..80: note = Artificially Synthesized Probe
  source 1..80: mol_type = other DNA
gaatcacttgaacccgggaggcagagggtgcggggagctaagatcgcgccactgcactccagcctggacgacggagcgag

SEQ ID NO: 91203 - DNA, 80 bp, synthetic construct
  misc_feature 1..80: note = Artificially Synthesized Probe
  source 1..80: mol_type = other DNA
aagttaacctgctgtggccccacacacaagtaagaggtgggtattataattacacccattccaaaggcgagggcactgag

SEQ ID NO: 91204 - DNA, 80 bp, synthetic construct
  misc_feature 1..80: note = Artificially Synthesized Probe
  source 1..80: mol_type = other DNA
cggcacccagctctcccaacaggacactggggcctagggaccccaggaccccaacccatggcaggaatcaagtgggtgct

SEQ ID NO: 91205 - DNA, 80 bp, synthetic construct
  misc_feature 1..80: note = Artificially Synthesized Probe
  source 1..80: mol_type = other DNA
ggccacgccatccccatgctggcccacacccgctgcgtggctgcctgaggagttcccgctgtccgaagctgggcagccag

SEQ ID NO: 91206 - DNA, 80 bp, synthetic construct
  misc_feature 1..80: note = Artificially Synthesized Probe
  source 1..80: mol_type = other DNA
tcttctccttcagtctgcactgaagcctcggggcccattcagaacctcaacactttccaccggacccaagatcccaactc

SEQ ID NO: 91207 - DNA, 80 bp, synthetic construct; identical to SEQ ID NO: 33096
  misc_feature 1..80: note = Artificially Synthesized Probe
  source 1..80: mol_type = other DNA

SEQ ID NO: 91208 - DNA, 80 bp, synthetic construct
  misc_feature 1..80: note = Artificially Synthesized Probe
  source 1..80: mol_type = other DNA
cctcagttggggggggtccgccaagtctccttggaatcctctgagggacgaggcatatggggggctgcagcccaatactc

SEQ ID NO: 91209 - DNA, 80 bp, synthetic construct
  misc_feature 1..80: note = Artificially Synthesized Probe
  source 1..80: mol_type = other DNA
cataggtggggcattcctggtctgcacttttcactcagtgccctagaaaccccctggaggtccccaagagaatgggccac

SEQ ID NO: 91210 - DNA, 80 bp, synthetic construct
  misc_feature 1..80: note = Artificially Synthesized Probe
  source 1..80: mol_type = other DNA
cggtgggctgggcctggccgagctgcacccctcactcagggaccccttgaaaccccctggagacccccaagccgggaccc

SEQ ID NO: 91211 - DNA, 80 bp, synthetic construct; identical to SEQ ID NO: 33097
  misc_feature 1..80: note = Artificially Synthesized Probe
  source 1..80: mol_type = other DNA

SEQ ID NO: 91212 - DNA, 80 bp, synthetic construct
  misc_feature 1..80: note = Artificially Synthesized Probe
  source 1..80: mol_type = other DNA
cggtgggcggggcctggccgaactgcaccgctcactcaggggcccctcgaaaccccctggagaccctcgagacccgggcc

SEQ ID NO: 91213 - DNA, 80 bp, synthetic construct
  misc_feature 1..80: note = Artificially Synthesized Probe
  source 1..80: mol_type = other DNA
gcgcgccccgcggtgggcggggcctgccggctgcacccccgcccggcccctaagccccggcgcccacctcgcgcgtggtc

SEQ ID NO: 91214 - DNA, 80 bp, synthetic construct
  misc_feature 1..80: note = Artificially Synthesized Probe
  source 1..80: mol_type = other DNA
cgcccgcgcggccgggcagcggcgtggccatggtggcggcggctcgcggcctgcgctgctcccgacggcggcccgggctc

SEQ ID NO: 91215 - DNA, 80 bp, synthetic construct
  misc_feature 1..80: note = Artificially Synthesized Probe
  source 1..80: mol_type = other DNA
cctcctccctccaagcccaagcatcttctaaacctccgggtcctggccctgggcttccaatttgaccaaatggtgagatg

SEQ ID NO: 91216 - DNA, 80 bp, synthetic construct; identical to SEQ ID NO: 33070
  misc_feature 1..80: note = Artificially Synthesized Probe
  source 1..80: mol_type = other DNA

SEQ ID NO: 91217 - DNA, 80 bp, synthetic construct
  misc_feature 1..80: note = Artificially Synthesized Probe
  source 1..80: mol_type = other DNA
ccattccacttccatgtccccatgagcccgcctgtgagctacacattctgttctgggttccaaaacagtcacaggaactt

SEQ ID NO: 91218 - DNA, 80 bp, synthetic construct
  misc_feature 1..80: note = Artificially Synthesized Probe
  source 1..80: mol_type = other DNA
ccctgaggtctgtgatgtcgcaaattcacacgatgggcacgacccaggaggcaagaacaggtctctgccgtgctggtaac

SEQ ID NO: 91219 - DNA, 80 bp, synthetic construct
  misc_feature 1..80: note = Artificially Synthesized Probe
  source 1..80: mol_type = other DNA
atcctcctcgccaaactcggcttcctcctcctcttcctccccattctcattctcacgcatcaccgaggacttcttcacag

SEQ ID NO: 91220 - DNA, 80 bp, synthetic construct
  misc_feature 1..80: note = Artificially Synthesized Probe
  source 1..80: mol_type = other DNA
cccaagccacacacacccacctcgccatccgcgttaaccaggacggtgcggaagctctcgcccgtgccccagctgctctg

SEQ ID NO: 91221 - DNA, 80 bp, synthetic construct; identical to SEQ ID NO: 33071
  misc_feature 1..80: note = Artificially Synthesized Probe
  source 1..80: mol_type = other DNA

SEQ ID NO: 91222 - DNA, 80 bp, synthetic construct
  misc_feature 1..80: note = Artificially Synthesized Probe
  source 1..80: mol_type = other DNA
cagtggggtgacaccagcacatggaggttctatgactgcggcagccgctctgagacggtgcctggtgccaccatcatccc

SEQ ID NO: 91223 - DNA, 80 bp, synthetic construct; identical to SEQ ID NO: 33067
  misc_feature 1..80: note = Artificially Synthesized Probe
  source 1..80: mol_type = other DNA

SEQ ID NO: 91224 - DNA, 80 bp, synthetic construct
  misc_feature 1..80: note = Artificially Synthesized Probe
  source 1..80: mol_type = other DNA
aagacctgcctcttgattctccagttccccagagactgatcctggaagacacggcacacacctgaccctcagccaccagg

SEQ ID NO: 91225 - DNA, 80 bp, synthetic construct; identical to SEQ ID NO: 33072
  misc_feature 1..80: note = Artificially Synthesized Probe
  source 1..80: mol_type = other DNA

SEQ ID NO: 91226 - DNA, 80 bp, synthetic construct
  misc_feature 1..80: note = Artificially Synthesized Probe
  source 1..80: mol_type = other DNA
catgccccggtctttccggtcaccttgtcccctgcctcgcattggccggcggccccgtcaccctgaccctgatcaccccc

SEQ ID NO: 91227 - DNA, 80 bp, synthetic construct
  misc_feature 1..80: note = Artificially Synthesized Probe
  source 1..80: mol_type = other DNA
cctgcctcgtattggccggcggccccgtcaccctgaccctgatcacccccatcagctgggtcaccccgttacccccatgc

SEQ ID NO: 91228 - DNA, 80 bp, synthetic construct
  misc_feature 1..80: note = Artificially Synthesized Probe
  source 1..80: mol_type = other DNA
ccctgaccctggtcacccccatcagctgggtcaccccgttacccccatgccccggtcattccggtcaccttgtcccctgc

SEQ ID NO: 91229 - DNA, 80 bp, synthetic construct
  misc_feature 1..80: note = Artificially Synthesized Probe
  source 1..80: mol_type = other DNA
tcaccccgttacccccatgccccggtcattccggtcaccttgtcccctgcctcgcattggccggcagccccgtcaccctg

SEQ ID NO: 91230 - DNA, 80 bp, synthetic construct; identical to SEQ ID NO: 33073
  misc_feature 1..80: note = Artificially Synthesized Probe
  source 1..80: mol_type = other DNA

SEQ ID NO: 91231 - DNA, 80 bp, synthetic construct
  misc_feature 1..80: note = Artificially Synthesized Probe
  source 1..80: mol_type = other DNA
acgcagagtggcggccacggcccggccccacctccacccctgcccagcactccccgcagccccgtcccgcctctcctcct

SEQ ID NO: 91232 - DNA, 80 bp, synthetic construct; identical to SEQ ID NO: 33074
  misc_feature 1..80: note = Artificially Synthesized Probe
  source 1..80: mol_type = other DNA

SEQ ID NO: 91233 - DNA, 80 bp, synthetic construct
  misc_feature 1..80: note = Artificially Synthesized Probe
  source 1..80: mol_type = other DNA
acgggaggggagggaaggggcatcgctgggcgccccgagggctgcatccgatgccaagaggccagagccccacgccccgc

SEQ ID NO: 91234 - DNA, 80 bp, synthetic construct
  misc_feature 1..80: note = Artificially Synthesized Probe
  source 1..80: mol_type = other DNA
cgcagggcttggaagaggctgcaggcggcgacgccccaggactgaggagtccctcagatctttaacaaagaactgccgcg

SEQ ID NO: 91235 - DNA, 80 bp, synthetic construct
  misc_feature 1..80: note = Artificially Synthesized Probe
  source 1..80: mol_type = other DNA
tctggtcagagctcagcttggcgctgtccagctgtggggagacgggcgggtgagtgcgggcgcggggcggggcggggttc

SEQ ID NO: 91236 - DNA, 80 bp, synthetic construct
  misc_feature 1..80: note = Artificially Synthesized Probe
  source 1..80: mol_type = other DNA
ccacctccaccaggcgccgctcgtgccgccgccgcgtctcccgcacctcctgcggaccaaggcttcgtgaccctctggtc

SEQ ID NO: 91237 - DNA, 80 bp, synthetic construct
  misc_feature 1..80: note = Artificially Synthesized Probe
  source 1..80: mol_type = other DNA
acgaaaaggagcgaggctctgacaccgccacagcatggatgcaccttgaggacgtcacactcaatgagagacgccagaca

SEQ ID NO: 91238 - DNA, 80 bp, synthetic construct; identical to SEQ ID NO: 33075
  misc_feature 1..80: note = Artificially Synthesized Probe
  source 1..80: mol_type = other DNA

SEQ ID NO: 91239 - DNA, 80 bp, synthetic construct
  misc_feature 1..80: note = Artificially Synthesized Probe
  source 1..80: mol_type = other DNA
tataaaagccattattgaagaaagcgggccaggcgtggtggctcatgcctgtaatcccagcactttgggaggctgaggca

SEQ ID NO: 91240 - DNA, 80 bp, synthetic construct
  misc_feature 1..80: note = Artificially Synthesized Probe
  source 1..80: mol_type = other DNA
gaccagcctgacaaacatggtgaaaaccccgtctgtactaaaaatacaaaaattagtcgggttggtggcacccgcctata

SEQ ID NO: 91241 - DNA, 80 bp, synthetic construct; identical to SEQ ID NO: 33076
  misc_feature 1..80: note = Artificially Synthesized Probe
  source 1..80: mol_type = other DNA

SEQ ID NO: 91242 - DNA, 80 bp, synthetic construct
  misc_feature 1..80: note = Artificially Synthesized Probe
  source 1..80: mol_type = other DNA
tcccgccttcacggctgcgcacccacctccacggccgctcacccacctgcactgccgccctcccacccccacagccgcgc

SEQ ID NO: 91243 - DNA, 80 bp, synthetic construct
  misc_feature 1..80: note = Artificially Synthesized Probe
  source 1..80: mol_type = other DNA
ttccgcccccacggccgccctctccaggactccgcaccctgtgggctgcacaggcctgcatcatcaagctccctaccgca

SEQ ID NO: 91244 - DNA, 80 bp, synthetic construct
  misc_feature 1..80: note = Artificially Synthesized Probe
  source 1..80: mol_type = other DNA
acctggcgctgtgcaccccagaacccgcgttggtccagcaggcgtgggcctccccccagggctgggtggcgtctgatgct

SEQ ID NO: 91245 - DNA, 80 bp, synthetic construct
  misc_feature 1..80: note = Artificially Synthesized Probe
  source 1..80: mol_type = other DNA
ctcgtgagtctcttcacgggctgtctcacaggtttccccacaggccccttcacaactgccctggcggcctcccctctggc

SEQ ID NO: 91246 - DNA, 80 bp, synthetic construct
  misc_feature 1..80: note = Artificially Synthesized Probe
  source 1..80: mol_type = other DNA
gttctaaaggacacaggctgacgcctttcctccccactcccctctccgagcccccggaggcagaggccccaggtgagggg

SEQ ID NO: 91247 - DNA, 80 bp, synthetic construct; identical to SEQ ID NO: 33077
  misc_feature 1..80: note = Artificially Synthesized Probe
  source 1..80: mol_type = other DNA

SEQ ID NO: 91248 - DNA, 80 bp, synthetic construct
  misc_feature 1..80: note = Artificially Synthesized Probe
  source 1..80: mol_type = other DNA
atcaaaataagtgcagagtttatttttaacaaatgtcatagctatgacaccttaatacagaatttgtcagtcagacctta

SEQ ID NO: 91249 - DNA, 80 bp, synthetic construct
  misc_feature 1..80: note = Artificially Synthesized Probe
  source 1..80: mol_type = other DNA
gccctggactctgacaaaagtgaccagcccaagaccttcccaaggtctctttcattttttatgacaagatctatgcaagg

SEQ ID NO: 91250 - DNA, 80 bp, synthetic construct
  misc_feature 1..80: note = Artificially Synthesized Probe
  source 1..80: mol_type = other DNA
ggcttccagtgtttctgaggtgaacacattggcaatttgtatcagtgtacttgtaggaagacacagctctttttcctcca

SEQ ID NO: 91251 - DNA, 80 bp, synthetic construct
  misc_feature 1..80: note = Artificially Synthesized Probe
  source 1..80: mol_type = other DNA
tgaaaagttatcagccatccttgattccggtatttgtttctattccaaactcccttgctctttactgtgacttgcttccc

SEQ ID NO: 91252 - DNA, 80 bp, synthetic construct
  misc_feature 1..80: note = Artificially Synthesized Probe
  source 1..80: mol_type = other DNA
tgtgtgtgtgtgtgtgtagctcattctgtaggttctctagaattgtgtgttgggtaatgttttcctctgaaacgtctaat

SEQ ID NO: 91253 - DNA, 80 bp, synthetic construct
  misc_feature 1..80: note = Artificially Synthesized Probe
  source 1..80: mol_type = other DNA
ctgatatgtcaaattttcacgcaattctaatcatttctctcattcctgagcctgtttgtattacccgatttatttcctgg

SEQ ID NO: 91254 - DNA, 80 bp, synthetic construct
  misc_feature 1..80: note = Artificially Synthesized Probe
  source 1..80: mol_type = other DNA
atgcttggacacttgctttccagctgtgcaaggggttgtctgcagctgactttattctagtaatatactaagtgtacctt

SEQ ID NO: 91255 - DNA, 80 bp, synthetic construct; identical to SEQ ID NO: 33194
  misc_feature 1..80: note = Artificially Synthesized Probe
  source 1..80: mol_type = other DNA

SEQ ID NO: 91256 - DNA, 80 bp, synthetic construct
  misc_feature 1..80: note = Artificially Synthesized Probe
  source 1..80: mol_type = other DNA
ggctacagtctgcttgggctccatctccttgctattcagtgcaggaagggtatccaggaagaaagccaaggcatctgcgg

SEQ ID NO: 91257 - DNA, 80 bp, synthetic construct
  misc_feature 1..80: note = Artificially Synthesized Probe
  source 1..80: mol_type = other DNA
tttacttttcagcatccctctctgtgctggctctcatctgccttccttccttggatcttctcttgctgggaacctgtatc

SEQ ID NO: 91258 - DNA, 80 bp, synthetic construct
  misc_feature 1..80: note = Artificially Synthesized Probe
  source 1..80: mol_type = other DNA
agccagaataacggaattccaactggaaagtctccattgacgtttagttggtgttgtggaagggtaatctaagtgtctgg

SEQ ID NO: 91259 - DNA, 80 bp, synthetic construct; identical to SEQ ID NO: 33109
  misc_feature 1..80: note = Artificially Synthesized Probe
  source 1..80: mol_type = other DNA

SEQ ID NO: 91260 - DNA, 80 bp, synthetic construct; identical to SEQ ID NO: 33195
  misc_feature 1..80: note = Artificially Synthesized Probe
  source 1..80: mol_type = other DNA

SEQ ID NO: 91261 - DNA, 80 bp, synthetic construct; identical to SEQ ID NO: 33206
  misc_feature 1..80: note = Artificially Synthesized Probe
  source 1..80: mol_type = other DNA

SEQ ID NO: 91262 - DNA, 80 bp, synthetic construct; identical to SEQ ID NO: 33185
  misc_feature 1..80: note = Artificially Synthesized Probe
  source 1..80: mol_type = other DNA

SEQ ID NO: 91263 - DNA, 80 bp, synthetic construct
  misc_feature 1..80: note = Artificially Synthesized Probe
  source 1..80: mol_type = other DNA
ccatggggcagaaaacgatcctatatatctgactgaaggcaaagacactttgcttctcaaggatgtgtgcacgccaaaac

SEQ ID NO: 91264 - DNA, 80 bp, synthetic construct; identical to SEQ ID NO: 33207
  misc_feature 1..80: note = Artificially Synthesized Probe
  source 1..80: mol_type = other DNA

SEQ ID NO: 91265 - DNA, 80 bp, synthetic construct
  misc_feature 1..80: note = Artificially Synthesized Probe
  source 1..80: mol_type = other DNA
tcacacacctgacagcacgttacaataaaaattttggctaagacactgagatagcccattttagaaggaggtgagttgtg

SEQ ID NO: 91266 - DNA, 80 bp, synthetic construct
  misc_feature 1..80: note = Artificially Synthesized Probe
  source 1..80: mol_type = other DNA
gctgcatcagtgggaatttccatggcttttcatcccagcatcgaagcgtgtagatgtctggccacagactccttaccttg

SEQ ID NO: 91267 - DNA, 80 bp, synthetic construct
  misc_feature 1..80: note = Artificially Synthesized Probe
  source 1..80: mol_type = other DNA
tagttcatgatcaagccactggaaattccaaaacgatacacgtcacaagaggtgggacaacatgcaggggcaccccacac

SEQ ID NO: 91268 - DNA, 80 bp, synthetic construct
  misc_feature 1..80: note = Artificially Synthesized Probe
  source 1..80: mol_type = other DNA
gtaaagaaaaatcaactcaacagcagagtgaaatgcgatgcgatcaggtttgtcgatggcatttcacaaacttacagaag

SEQ ID NO: 91269 - DNA, 80 bp, synthetic construct
  misc_feature 1..80: note = Artificially Synthesized Probe
  source 1..80: mol_type = other DNA
atctaaagtagcaaacgcttcttagaaacactgagataacacacacacgtggccgaaaaacgatcagagtattctccttc

SEQ ID NO: 91270 - DNA, 80 bp, synthetic construct; identical to SEQ ID NO: 33208
  misc_feature 1..80: note = Artificially Synthesized Probe
  source 1..80: mol_type = other DNA

SEQ ID NO: 91271 - DNA, 80 bp, synthetic construct
  misc_feature 1..80: note = Artificially Synthesized Probe
  source 1..80: mol_type = other DNA
ttctctcctgctctcagtctaccctctgctggccgcagctactccgggactgagggaaagggggatgagttgaaagaaca

SEQ ID NO: 91272 - DNA, 80 bp, synthetic construct
  misc_feature 1..80: note = Artificially Synthesized Probe
  source 1..80: mol_type = other DNA
agaacgttgctccaacctcccagtatcctcacattcatgacctctggctgcctgagaaaatgggaaatgtattatgggcc

SEQ ID NO: 91273 - DNA, 80 bp, synthetic construct
  misc_feature 1..80: note = Artificially Synthesized Probe
  source 1..80: mol_type = other DNA
gcatggactattcttattataccaaaaacctcagagttcaaacctttgtgattgctctaggatttgcaatatcccttcga

SEQ ID NO: 91274 - DNA, 80 bp, synthetic construct
  misc_feature 1..80: note = Artificially Synthesized Probe
  source 1..80: mol_type = other DNA
tcaagtagtcaactctcatttacaaagatatagaaatttgatcaagaaaatattttgcatttacatctatctacatttgc

SEQ ID NO: 91275 - DNA, 80 bp, synthetic construct
  misc_feature 1..80: note = Artificially Synthesized Probe
  source 1..80: mol_type = other DNA
catttatccgacatggatgatcttcaaggcattttattgctggattcagcattcccggttgatctctttttgttcctgat

SEQ ID NO: 91276 - DNA, 80 bp, synthetic construct
  misc_feature 1..80: note = Artificially Synthesized Probe
  source 1..80: mol_type = other DNA
actgtgatgtacaaaagtacatcatacaggttgggttttttttccgaaattccctatgtgatcccttgagtttcacgatt

SEQ ID NO: 91277 - DNA, 80 bp, synthetic construct; identical to SEQ ID NO: 33188
  misc_feature 1..80: note = Artificially Synthesized Probe
  source 1..80: mol_type = other DNA

SEQ ID NO: 91278 - DNA, 80 bp, synthetic construct
  misc_feature 1..80: note = Artificially Synthesized Probe
  source 1..80: mol_type = other DNA
actagctctttaatttaatttggctattctgtactgttaatttctcttgatatgatatctgctttcttgcatgttgtttt

SEQ ID NO: 91279 - DNA, 80 bp, synthetic construct
  misc_feature 1..80: note = Artificially Synthesized Probe
  source 1..80: mol_type = other DNA
gatacccaaaatgtccaggttctgtgggttcggactgattactcttcatttatggggatcacaacccataatttgttcat

SEQ ID NO: 91280 - DNA, 80 bp, synthetic construct
  misc_feature 1..80: note = Artificially Synthesized Probe
  source 1..80: mol_type = other DNA
ctcactctgcggataccgcatagctgaggcaatcgactttgttgtttacttctaaagagagttgagatttcctctcacag

SEQ ID NO: 91281 - DNA, 80 bp, synthetic construct
  misc_feature 1..80: note = Artificially Synthesized Probe
  source 1..80: mol_type = other DNA
actctctggtctagctgggaagaactccagtatcccagagtgctatgtgatctctctcttctttattgagcttcctgtgc

SEQ ID NO: 91282 - DNA, 80 bp, synthetic construct; identical to SEQ ID NO: 33189
  misc_feature 1..80: note = Artificially Synthesized Probe
  source 1..80: mol_type = other DNA

SEQ ID NO: 91283 - DNA, 80 bp, synthetic construct
  misc_feature 1..80: note = Artificially Synthesized Probe
  source 1..80: mol_type = other DNA
tgtcccacatgtagaaaccatttttccatgtctctggtagtcgcttgtggccaaaatattggccattgggtggtcagacc

SEQ ID NO: 91284 - DNA, 80 bp, synthetic construct
  misc_feature 1..80: note = Artificially Synthesized Probe
  source 1..80: mol_type = other DNA
cgtagatatagaaacagatcaattcacctgtccataaataagcacctattctttcctcttgaacccagagagaaaaggca

SEQ ID NO: 91285 - DNA, 80 bp, synthetic construct
  misc_feature 1..80: note = Artificially Synthesized Probe
  source 1..80: mol_type = other DNA
ccttctgctcaatagaactaggaggaaggagagggagcttaacatttcccttctctcagacccttagctccaaggcaatc

SEQ ID NO: 91286 - DNA, 80 bp, synthetic construct
  misc_feature 1..80: note = Artificially Synthesized Probe
  source 1..80: mol_type = other DNA
ctatgcgagtgtggtgtcatagatgaccaagcttggcaggttcttcctgtgacagtggtggagtatgtgcctcgataact

SEQ ID NO: 91287 - DNA, 80 bp, synthetic construct
  misc_feature 1..80: note = Artificially Synthesized Probe
  source 1..80: mol_type = other DNA
ctcttttccttatccataggcagatggatgtgagaaaaccgaccaacaaacaaacaccaaagcaacagattcctcccatt

SEQ ID NO: 91288 - DNA, 80 bp, synthetic construct
  misc_feature 1..80: note = Artificially Synthesized Probe
  source 1..80: mol_type = other DNA
caggtggtaattggctgtcgggggcagagtttgggacagacatggaaattttgcatgtttccctagaccgttgatcatga

SEQ ID NO: 91289 - DNA, 80 bp, synthetic construct
  misc_feature 1..80: note = Artificially Synthesized Probe
  source 1..80: mol_type = other DNA
taaagtaggagtctactactctttctctctagacccctcacaggtacaagtgtcatcagaaagaggtttaagaatactga

SEQ ID NO: 91290 - DNA, 80 bp, synthetic construct
  misc_feature 1..80: note = Artificially Synthesized Probe
  source 1..80: mol_type = other DNA
aagattgctctgaatgctggctacttgaagaaatccccggaaaagcttactggcttggaaagagtgacacacctgacagc

SEQ ID NO: 91291 - DNA, 80 bp, synthetic construct
  misc_feature 1..80: note = Artificially Synthesized Probe
  source 1..80: mol_type = other DNA
agtgagacaatggatatccatagaaaccctcagagcatcttcaatattttccaaaagtattggaacttggtgcaaatcac

SEQ ID NO: 91292 - DNA, 80 bp, synthetic construct
  misc_feature 1..80: note = Artificially Synthesized Probe
  source 1..80: mol_type = other DNA
ggaggcttcctcctacatggtagaactcaggcaacactcgagcatccgtttaccattgaaggcggctgcatcagtgggaa

SEQ ID NO: 91293 - DNA, 80 bp, synthetic construct
  misc_feature 1..80: note = Artificially Synthesized Probe
  source 1..80: mol_type = other DNA
ccacctgacaccgggatccctcgtataacaataaggagctgccacagcatctggattcctgcagtagttcatgatcaagc

SEQ ID NO: 91294 - DNA, 80 bp, synthetic construct
  misc_feature 1..80: note = Artificially Synthesized Probe
  source 1..80: mol_type = other DNA
tcactaatcctctctgcacatctctcatacttaatagattattactatttttttaaataaaaaatctaaagtagcaaacg

SEQ ID NO: 91295 - DNA, 80 bp, synthetic construct
  misc_feature 1..80: note = Artificially Synthesized Probe
  source 1..80: mol_type = other DNA
tctagtctccgtatctctctcggtaggacttcatattctaatgtgggagttgcaacgaacatgtagttcttcagaaaaca

SEQ ID NO: 91296 - DNA, 80 bp, synthetic construct
  misc_feature 1..80: note = Artificially Synthesized Probe
  source 1..80: mol_type = other DNA
gccctggaaaacttgctcccaggcaggatgcagtatctctagaaggggttcctaggcaggtccttctctcctgctctcag

SEQ ID NO: 91297 - DNA, 80 bp, synthetic construct
  misc_feature 1..80: note = Artificially Synthesized Probe
  source 1..80: mol_type = other DNA
aaagcaggcgagtagtttgggctgcggggatcttgaagcattcgctcttccttatgcctcccaagaacgttgctccaacc

SEQ ID NO: 91298 - DNA, 80 bp, synthetic construct
  misc_feature 1..80: note = Artificially Synthesized Probe
  source 1..80: mol_type = other DNA
gatgtataagagcctgagctcttgaaagacttctagttcttccttggcttccctcttttgaatgcatggactattcttat

SEQ ID NO: 91299 - DNA, 80 bp, synthetic construct
  misc_feature 1..80: note = Artificially Synthesized Probe
  source 1..80: mol_type = other DNA
gctaccatttcaaattcttacctctacatatgctgaagttaaatatcttgctatcattttgtttcaagtagtcaactctc

SEQ ID NO: 91300 - DNA, 80 bp, synthetic construct
  misc_feature 1..80: note = Artificially Synthesized Probe
  source 1..80: mol_type = other DNA
aagcctgctgatttccaattcttacagtttccggtttctttctttggggcagtgcacaatatgcatttatccgacatgga

SEQ ID NO: 91301 - DNA, 80 bp, synthetic construct
  misc_feature 1..80: note = Artificially Synthesized Probe
  source 1..80: mol_type = other DNA
ctttttcctccagtttctcgtgacaggtttcttcttattacatctttgccttgttaccttcgaactgtgatgtacaaaag

SEQ ID NO: 91302 - DNA, 80 bp, synthetic construct
  misc_feature 1..80: note = Artificially Synthesized Probe
  source 1..80: mol_type = other DNA
gtgggttctgtgtaaatgtagaagggttttgtggggcttacatggaaggacagtatagatggtttctgggcctgttctta

SEQ ID NO: 91303 - DNA, 80 bp, synthetic construct
  misc_feature 1..80: note = Artificially Synthesized Probe
  source 1..80: mol_type = other DNA
gacttgcttcccacatgcaggaaatcttttcatattttcctacatgtctgtgaggctcgcttaattttatatttcactgt

SEQ ID NO: 91304 - DNA, 80 bp, synthetic construct
  misc_feature 1..80: note = Artificially Synthesized Probe
  source 1..80: mol_type = other DNA
gaaacgtctaaattgatcagccggccatacagtaatttttttcaattaagacatactttttttatactacctctttaatt

SEQ ID NO: 91305 - DNA, 80 bp, synthetic construct
  misc_feature 1..80: note = Artificially Synthesized Probe
  source 1..80: mol_type = other DNA
tttatttcctggtcatgggtcacacgaaacgcttttctacatgtagtcagattttaaatttaggactcactctgcggata

SEQ ID NO: 91306 - DNA, 80 bp, synthetic construct
  misc_feature 1..80: note = Artificially Synthesized Probe
  source 1..80: mol_type = other DNA
taagtgtacctttaaattacggctgttctggggtctccactgaattggcaatgtgctccgtgaggactctctggtctagc

SEQ ID NO: 91307 - DNA, 80 bp, synthetic construct
  misc_feature 1..80: note = Artificially Synthesized Probe
  source 1..80: mol_type = other DNA
ggaggagacttctatgcgtatttgtagagctcttttcctccacacaaaccagttcttatttctagcagacctagaaaaat

SEQ ID NO: 91308 - DNA, 80 bp, synthetic construct
  misc_feature 1..80: note = Artificially Synthesized Probe
  source 1..80: mol_type = other DNA
caattctctaggtcctctaccatctgttgtcccacatgtagaaaccatttttccatgtctctggtagtcgcttgtggcca

SEQ ID NO: 91309 - DNA, 80 bp, synthetic construct
  misc_feature 1..80: note = Artificially Synthesized Probe
  source 1..80: mol_type = other DNA
tgggaacctgtatcccttcaggccactggtacttaggaacgagtgtttttctgacaatcggaatatacgtagatatagaa

SEQ ID NO: 91310 - DNA, 80 bp, synthetic construct
  misc_feature 1..80: note = Artificially Synthesized Probe
  source 1..80: mol_type = other DNA
atctaagtgtctggtcctttgtcattctgactttcttcataatgtgatctcctcacctccagatttcccttctgctcaat

SEQ ID NO: 91311 - DNA, 80 bp, synthetic construct
  misc_feature 1..80: note = Artificially Synthesized Probe
  source 1..80: mol_type = other DNA
ttggccctttcttctcttatggtaaagaacaaagacatacgcatttgggtagtattctggggtccgactatgcgagtgtg

SEQ ID NO: 91312 - DNA, 80 bp, synthetic construct
  misc_feature 1..80: note = Artificially Synthesized Probe
  source 1..80: mol_type = other DNA
gcatagagaaacatgtgaagccatttgtgacacaaccagaaaggagtctatgagaattacgaccgttctcttttccttat

SEQ ID NO: 91313 - DNA, 80 bp, synthetic construct; identical to SEQ ID NO: 33110
  misc_feature 1..80: note = Artificially Synthesized Probe
  source 1..80: mol_type = other DNA

SEQ ID NO: 91314 - DNA, 80 bp, synthetic construct
  misc_feature 1..80: note = Artificially Synthesized Probe
  source 1..80: mol_type = other DNA
tagcacctttctaggaaactctactgaatcttcatgcaaacggcaccgcatttggcaatgcgggctgcaggtggtaattg

SEQ ID NO: 91315 - DNA, 80 bp, synthetic construct
  misc_feature 1..80: note = Artificially Synthesized Probe
  source 1..80: mol_type = other DNA
cacgccaaaagcttcttcccttggaggagagagggaatcctctcatgccctgcatcctgaattgtagtaaagtaggagtc

SEQ ID NO: 91316 - DNA, 80 bp, synthetic construct
  misc_feature 1..80: note = Artificially Synthesized Probe
  source 1..80: mol_type = other DNA
gcagccctcttaggtttctcgagggtgacaggctccagagccacatttctcagaatctgcaatgctgaagattgctctga

SEQ ID NO: 91317 - DNA, 80 bp, synthetic construct
  misc_feature 1..80: note = Artificially Synthesized Probe
  source 1..80: mol_type = other DNA
atcctaaagacaaagcccaaccacgttgcaccagaaatcactccgctggctcccccagagagtgcacggaggcttcctcc

SEQ ID NO: 91318 - DNA, 80 bp, synthetic construct
  misc_feature 1..80: note = Artificially Synthesized Probe
  source 1..80: mol_type = other DNA
gggtaacagtcggaggcgcgacggcagtcccttctgcgtctgagcattgcgtcaggttgcagtactcccacctgacaccg

SEQ ID NO: 91319 - DNA, 80 bp, synthetic construct
  misc_feature 1..80: note = Artificially Synthesized Probe
  source 1..80: mol_type = other DNA
accggtgcctttctaatattcccattaaaagtaccatatgattgccaccagcaaaaatggctctcgatcactaatcctct

SEQ ID NO: 91320 - DNA, 80 bp, synthetic construct; identical to SEQ ID NO: 33197
  misc_feature 1..80: note = Artificially Synthesized Probe
  source 1..80: mol_type = other DNA

SEQ ID NO: 91321 - DNA, 80 bp, synthetic construct
  misc_feature 1..80: note = Artificially Synthesized Probe
  source 1..80: mol_type = other DNA
gcattgtgcaaatagtattactgtctgtcattcccatatcatgtcggtcaagtaggtttgtttctgcaagacttctcaaa

SEQ ID NO: 91322 - DNA, 80 bp, synthetic construct
  misc_feature 1..80: note = Artificially Synthesized Probe
  source 1..80: mol_type = other DNA
agatggcaggaagactaagagatctgaagaggtcggacagctatggaggagcaaaaaacaatgaattaggaggcaaagca

SEQ ID NO: 91323 - DNA, 80 bp, synthetic construct
  misc_feature 1..80: note = Artificially Synthesized Probe
  source 1..80: mol_type = other DNA
tagtggctctacacatgtggcctagtctcagtcccagaccctccattccaggaagctcattcaatgagcaactggatgta

SEQ ID NO: 91324 - DNA, 80 bp, synthetic construct
  misc_feature 1..80: note = Artificially Synthesized Probe
  source 1..80: mol_type = other DNA
gacatatgtgcatgtgtgtatgtgattttatgtagcaaggataactgtcctatgttgaaatgttgccttctctcagccag

SEQ ID NO: 91325 - DNA, 80 bp, synthetic construct
  misc_feature 1..80: note = Artificially Synthesized Probe
  source 1..80: mol_type = other DNA
tacctgtgtttaaaaagatgaaagaaatggttactgaggccaaagcttgttcacgaggaaattccagaagaacagagcag

SEQ ID NO: 91326 - DNA, 80 bp, synthetic construct
  misc_feature 1..80: note = Artificially Synthesized Probe
  source 1..80: mol_type = other DNA
agtattacatactatcgtgcatgaggtaagaaacttacagtggtacacttccaattaatccctacatgatttatgctaca

SEQ ID NO: 91327 - DNA, 80 bp, synthetic construct; identical to SEQ ID NO: 33220
  misc_feature 1..80: note = Artificially Synthesized Probe
  source 1..80: mol_type = other DNA

SEQ ID NO: 91328 - DNA, 80 bp, synthetic construct
  misc_feature 1..80: note = Artificially Synthesized Probe
  source 1..80: mol_type = other DNA
ccaggttgcagtgtttctgatgggaacacattagtcacttgtatcactgttcctctagcaagacacagctttttgttttt

SEQ ID NO: 91329 - DNA, 80 bp, synthetic construct
  misc_feature 1..80: note = Artificially Synthesized Probe
  source 1..80: mol_type = other DNA
aaattttcagccatccttgctttcagtatatatttctgttccaatctccttccccctttctgtgacttgcttcccacatg

SEQ ID NO: 91330 - DNA, 80 bp, synthetic construct
  misc_feature 1..80: note = Artificially Synthesized Probe
  source 1..80: mol_type = other DNA
tatgcaattatttttcatttggtattttcttctgaaatgtctaactagatggggaggccatctagtaattttttcattta

SEQ ID NO: 91331 - DNA, 80 bp, synthetic construct; identical to SEQ ID NO: 33221
  misc_feature 1..80: note = Artificially Synthesized Probe
  source 1..80: mol_type = other DNA

SEQ ID NO: 91332 - DNA, 80 bp, synthetic construct
  misc_feature 1..80: note = Artificially Synthesized Probe
  source 1..80: mol_type = other DNA
ggagctgcctttattctaagaatatactaattctactcctaaagtatggcttttcctgggtctctactgaatgcccaaga

SEQ ID NO: 91333 - DNA, 80 bp, synthetic construct
  misc_feature 1..80: note = Artificially Synthesized Probe
  source 1..80: mol_type = other DNA
atgcagcttcatgtttagccaatgactcgaggagatttctatgcatatttctagaactcctttcctccacaaatctgttc

SEQ ID NO: 91334 - DNA, 80 bp, synthetic construct; identical to SEQ ID NO: 33222
  misc_feature 1..80: note = Artificially Synthesized Probe
  source 1..80: mol_type = other DNA

SEQ ID NO: 91335 - DNA, 80 bp, synthetic construct
  misc_feature 1..80: note = Artificially Synthesized Probe
  source 1..80: mol_type = other DNA
ttcagaccactggtgctcaggacccagggtgtttctacccgttggaatagacatagatatagaaaaagatagattcgcct

SEQ ID NO: 91336 - DNA, 80 bp, synthetic construct
  misc_feature 1..80: note = Artificially Synthesized Probe
  source 1..80: mol_type = other DNA
ccacccatcaatgcctacaacagtgcaggggctacagagggtgttcaaaaatgcttctctgttgtctccagcccttcaag

SEQ ID NO: 91337 - DNA, 80 bp, synthetic construct
  misc_feature 1..80: note = Artificially Synthesized Probe
  source 1..80: mol_type = other DNA
ctgattttccattattgtggcctcaccaccgccagatattctcctgattttatcaaactctcaggaaagagagccagctt

SEQ ID NO: 91338 - DNA, 80 bp, synthetic construct
  misc_feature 1..80: note = Artificially Synthesized Probe
  source 1..80: mol_type = other DNA
taatgacatacgcatttgggtagttttctgtggtcctattatgttgatgtggtgtcatagatgaccaagcttggcaggtc

SEQ ID NO: 91339 - DNA, 80 bp, synthetic construct
  misc_feature 1..80: note = Artificially Synthesized Probe
  source 1..80: mol_type = other DNA
acacaaacaggaaaaagtctctgagaattacgaccattctcttctcttgattagcaggcagacagacgtgcaaaaaacca

SEQ ID NO: 91340 - DNA, 80 bp, synthetic construct; identical to SEQ ID NO: 33223
  misc_feature 1..80: note = Artificially Synthesized Probe
  source 1..80: mol_type = other DNA

SEQ ID NO: 91341 - DNA, 80 bp, synthetic construct
  misc_feature 1..80: note = Artificially Synthesized Probe
  source 1..80: mol_type = other DNA
gataggtagatgatcaaatcttatttccttggaggagagactggaaattttcttgtgcccagcatcctgcattgcaacat

SEQ ID NO: 91342 - DNA, 80 bp, synthetic construct
  misc_feature 1..80: note = Artificially Synthesized Probe
  source 1..80: mol_type = other DNA
aagtggctccaggagatacagcatttgtttatttccaccaaagattgagcattcattaagaagaaacagcagtttcaatg

SEQ ID NO: 91343 - DNA, 80 bp, synthetic construct; identical to SEQ ID NO: 33224
  misc_feature 1..80: note = Artificially Synthesized Probe
  source 1..80: mol_type = other DNA

SEQ ID NO: 91344 - DNA, 80 bp, synthetic construct
  misc_feature 1..80: note = Artificially Synthesized Probe
  source 1..80: mol_type = other DNA
ccaaaagctgaagagggaagataagtcactgttaaataataaagcaatcaagacagacagactcagaaaagacaccatct

SEQ ID NO: 91345 - DNA, 80 bp, synthetic construct
  misc_feature 1..80: note = Artificially Synthesized Probe
  source 1..80: mol_type = other DNA
cagagatgaagaattctctgaatgcactgaggagtcaattagacacaactaacaaaataatccataaacttgaacatagt

SEQ ID NO: 91346 - DNA, 80 bp, synthetic construct
  misc_feature 1..80: note = Artificially Synthesized Probe
  source 1..80: mol_type = other DNA
acagtccaaaaagaagaatacagagagagagaagtgaaaaaaaaaacaaaacagtagaatagataatggctatgaatttt

SEQ ID NO: 91347 - DNA, 80 bp, synthetic construct
  misc_feature 1..80: note = Artificially Synthesized Probe
  source 1..80: mol_type = other DNA
gaatatcttaaaggcagtcagagaaaaaggaactattgaatacaaagaaacaaagatcagatttctagtcagaaactatt

SEQ ID NO: 91348 - DNA, 80 bp, synthetic construct
  misc_feature 1..80: note = Artificially Synthesized Probe
  source 1..80: mol_type = other DNA
ttgagaatctatctatagaagtcttttgtaaaaaagaagcatggcatggaatgcaatcatcttttctagtgctgagctca

SEQ ID NO: 91349 - DNA, 80 bp, synthetic construct; identical to SEQ ID NO: 33225
  misc_feature 1..80: note = Artificially Synthesized Probe
  source 1..80: mol_type = other DNA

SEQ ID NO: 91350 - DNA, 80 bp, synthetic construct
  misc_feature 1..80: note = Artificially Synthesized Probe
  source 1..80: mol_type = other DNA
ataatagaagtaagcctctattacaaagagcaatagcacaacattttgagagggaggaaggagaagtgcaatgatgtaag

SEQ ID NO: 91351 - DNA, 80 bp, synthetic construct
  misc_feature 1..80: note = Artificially Synthesized Probe
  source 1..80: mol_type = other DNA
gtggagataaactcaatataaatgaaggcagaaaaatatgaaaaaaggaacaaagtttaaatgggacaaagagaaataac

SEQ ID NO: 91352 - DNA, 80 bp, synthetic construct; identical to SEQ ID NO: 33226
  misc_feature 1..80: note = Artificially Synthesized Probe
  source 1..80: mol_type = other DNA

SEQ ID NO: 91353 - DNA, 80 bp, synthetic construct
  misc_feature 1..80: note = Artificially Synthesized Probe
  source 1..80: mol_type = other DNA
gacacatcaccattaatcctcagtagtcaataaaaaaagagaaagacaagcagtaaggatacagaagaacaccagcaacc

SEQ ID NO: 91354 - DNA, 80 bp, synthetic construct
  misc_feature 1..80: note = Artificially Synthesized Probe
  source 1..80: mol_type = other DNA
atcagtaattaaaaacctacaccagaaaaacccctggaccagagagattcctagccaaagtataccagtcatataaagaa

SEQ ID NO: 91355 - DNA, 80 bp, synthetic construct
  misc_feature 1..80: note = Artificially Synthesized Probe
  source 1..80: mol_type = other DNA
cagcaattgaatccaagagtacatcaaaaagctaatccaccacaatcaagtaggttttattcctgggatataaggttggt

SEQ ID NO: 91356 - DNA, 80 bp, synthetic construct
  misc_feature 1..80: note = Artificially Synthesized Probe
  source 1..80: mol_type = other DNA
atatattatatataatatataatatatattatatataatatataatatattatatatattatatataatatatattatat

SEQ ID NO: 91357 - DNA, 80 bp, synthetic construct; identical to SEQ ID NO: 33227
  misc_feature 1..80: note = Artificially Synthesized Probe
  source 1..80: mol_type = other DNA

SEQ ID NO: 91358 - DNA, 80 bp, synthetic construct
  misc_feature 1..80: note = Artificially Synthesized Probe
  source 1..80: mol_type = other DNA
agttgacagtattaaccatcacaagtccaactccttgtcaacttgaacccatacacacatcctgaaatcatacataatct

SEQ ID NO: 91359 - DNA, 80 bp, synthetic construct; identical to SEQ ID NO: 33111
  misc_feature 1..80: note = Artificially Synthesized Probe
  source 1..80: mol_type = other DNA

SEQ ID NO: 91360 - DNA, 80 bp, synthetic construct
  misc_feature 1..80: note = Artificially Synthesized Probe
  source 1..80: mol_type = other DNA
gaagtccataaatctaaggtcacatgataaaggaaaaataaaggaaataaaataaagatattttcttagcacaagtgtac

SEQ ID NO: 91361 - DNA, 80 bp, synthetic construct
  misc_feature 1..80: note = Artificially Synthesized Probe
  source 1..80: mol_type = other DNA
ggaaggcagggtggcatgagtggagaacatgggcatttgagccacttccttatgtaacttacttgtgccttcaggacctg

SEQ ID NO: 91362 - DNA, 80 bp, synthetic construct; identical to SEQ ID NO: 33228
  misc_feature 1..80: note = Artificially Synthesized Probe
  source 1..80: mol_type = other DNA

SEQ ID NO: 91363 - DNA, 80 bp, synthetic construct
  misc_feature 1..80: note = Artificially Synthesized Probe
  source 1..80: mol_type = other DNA
ttcttttgttctagactgcacttaaatctggcagcctttcaggtcactcgataaatgggccagagtaacacacccaaacg

SEQ ID NO: 91364 - DNA, 80 bp, synthetic construct
  misc_feature 1..80: note = Artificially Synthesized Probe
  source 1..80: mol_type = other DNA
ctcatgccactggaaccctagaaattttaccgaggtagaaagtccctaaattttagctggatttatttcccatcctctgg

SEQ ID NO: 91365 - DNA, 80 bp, synthetic construct
  misc_feature 1..80: note = Artificially Synthesized Probe
  source 1..80: mol_type = other DNA
caaggtctctccaaataagattatgacacaaagctggagagttgatacacccctgaggtagggtggtaaaggtataatgc

SEQ ID NO: 91366 - DNA, 80 bp, synthetic construct
  misc_feature 1..80: note = Artificially Synthesized Probe
  source 1..80: mol_type = other DNA
tcaccacttggttaagcttaaaataatccaccatcattttccaagatccatctgtcctctgcacaggtcaaatgggagag

SEQ ID NO: 91367 - DNA, 80 bp, synthetic construct; identical to SEQ ID NO: 33229
  misc_feature 1..80: note = Artificially Synthesized Probe
  source 1..80: mol_type = other DNA

SEQ ID NO: 91368 - DNA, 80 bp, synthetic construct
  misc_feature 1..80: note = Artificially Synthesized Probe
  source 1..80: mol_type = other DNA
agctcagagccagtgtccagtactttctgaaatgtctcattacttccctttctccagtacacacagttaccctggtaaaa

SEQ ID NO: 91369 - DNA, 80 bp, synthetic construct
  misc_feature 1..80: note = Artificially Synthesized Probe
  source 1..80: mol_type = other DNA
ttctctgtttttataattcagattagtctttagtccattctacctggcagttttttgtttatataaatcaagtaggaata

SEQ ID NO: 91370 - DNA, 80 bp, synthetic construct
  misc_feature 1..80: note = Artificially Synthesized Probe
  source 1..80: mol_type = other DNA
gcccctgccacctcaggatccaattattcccattgtatttaaattttgtagttgagtgactgtggttcctactgttagat

SEQ ID NO: 91371 - DNA, 80 bp, synthetic construct
  misc_feature 1..80: note = Artificially Synthesized Probe
  source 1..80: mol_type = other DNA
ctctaagaacctgattctcatacatcctcaatgtgggtgaggacagcagaattgcacctgggaagctactgcacttccct

SEQ ID NO: 91372 - DNA, 80 bp, synthetic construct; identical to SEQ ID NO: 33230
  misc_feature 1..80: note = Artificially Synthesized Probe
  source 1..80: mol_type = other DNA

SEQ ID NO: 91373 - DNA, 80 bp, synthetic construct
  misc_feature 1..80: note = Artificially Synthesized Probe
  source 1..80: mol_type = other DNA
tagatgagattacagttacgcatcaccatgcccagctaatttttgtatttttagcagagatggggtttcaccattttagc

SEQ ID NO: 91374 - DNA, 80 bp, synthetic construct
  misc_feature 1..80: note = Artificially Synthesized Probe
  source 1..80: mol_type = other DNA
caataaattcagcttgatccaactctatgtcccttccaccattatcccttacccttaatatccattcccatgcctgttct

SEQ ID NO: 91375 - DNA, 80 bp, synthetic construct; identical to SEQ ID NO: 33231
  misc_feature 1..80: note = Artificially Synthesized Probe
  source 1..80: mol_type = other DNA

SEQ ID NO: 91376 - DNA, 80 bp, synthetic construct
  misc_feature 1..80: note = Artificially Synthesized Probe
  source 1..80: mol_type = other DNA
ccaagttccagggtcccatttttttccagtcaatgccctcactttaacagtaaacacctggcaaggctgtgcatgcacct

SEQ ID NO: 91377 - DNA, 80 bp, synthetic construct
  misc_feature 1..80: note = Artificially Synthesized Probe
  source 1..80: mol_type = other DNA
atcattttctttcatctctttctccagagaacttaggagcaatcaaccaacttcattatgttccttggttctccacatat

SEQ ID NO: 91378 - DNA, 80 bp, synthetic construct
  misc_feature 1..80: note = Artificially Synthesized Probe
  source 1..80: mol_type = other DNA
tggtctaatcatattaatcagccaacaccagaagtcccaaaaccaatgaaagaattccatccttaatattctgttcctca

SEQ ID NO: 91379 - DNA, 80 bp, synthetic construct; identical to SEQ ID NO: 33232
  misc_feature 1..80: note = Artificially Synthesized Probe
  source 1..80: mol_type = other DNA

SEQ ID NO: 91380 - DNA, 80 bp, synthetic construct
  misc_feature 1..80: note = Artificially Synthesized Probe
  source 1..80: mol_type = other DNA
gcttgggggcagcaggggcaggggcctcagggtgcttgcagggatgacacactggcctcttttccatagggtggctgggg

SEQ ID NO: 91381 - DNA, 80 bp, synthetic construct
  misc_feature 1..80: note = Artificially Synthesized Probe
  source 1..80: mol_type = other DNA
accccacaaaaacacagagtgcagccagtggaaatgttcaactgagttcgaggtgcctgcactgtgggcccaagccagga

SEQ ID NO: 91382 - DNA, 80 bp, synthetic construct
  misc_feature 1..80: note = Artificially Synthesized Probe
  source 1..80: mol_type = other DNA
gaactgaccccatcaagagactttgaggtagaggaaccaccaagatgcttctgcaatagcaccgacaaaatagaacaaaa

SEQ ID NO: 91383 - DNA, 80 bp, synthetic construct
  misc_feature 1..80: note = Artificially Synthesized Probe
  source 1..80: mol_type = other DNA
ggctgtgggttgtctcttggatttcctccccagagaagcacagagccaacactgactaaaatgttcaggcagggccaggg

SEQ ID NO: 91384 - DNA, 80 bp, synthetic construct
  misc_feature 1..80: note = Artificially Synthesized Probe
  source 1..80: mol_type = other DNA
gataaacagtggtaaggaagaaagtacaacgggtacggctaatgaaacccaggaagataagtcaatgcgtagaagtaatt

SEQ ID NO: 91385 - DNA, 80 bp, synthetic construct; identical to SEQ ID NO: 33233
  misc_feature 1..80: note = Artificially Synthesized Probe
  source 1..80: mol_type = other DNA

SEQ ID NO: 91386 - DNA, 80 bp, synthetic construct
  misc_feature 1..80: note = Artificially Synthesized Probe
  source 1..80: mol_type = other DNA
actcagatgtatactaactgcaaccgtgtatctcttaggaatttctcctttgccctcttccctccctatcagcatgtatc

SEQ ID NO: 91387 - DNA, 80 bp, synthetic construct
  misc_feature 1..80: note = Artificially Synthesized Probe
  source 1..80: mol_type = other DNA
gggcttccacctcctgctcatatctagctatctgcctagtctaaccataaaatcttaaataagaataaatcatgtttgct

SEQ ID NO: 91388 - DNA, 80 bp, synthetic construct
  misc_feature 1..80: note = Artificially Synthesized Probe
  source 1..80: mol_type = other DNA
cagttgataagcatcttctgaatggtccctcctttagttacaaaaatgttggtgcatggatgatgttgggaataaataaa

SEQ ID NO: 91389 - DNA, 80 bp, synthetic construct
  misc_feature 1..80: note = Artificially Synthesized Probe
  source 1..80: mol_type = other DNA
ggcatccagatttcagaggaaattgtaaaaaagcagaacctgggaccaatactgcccacgatttttctttgagatcaaat

SEQ ID NO: 91390 - DNA, 80 bp, synthetic construct; identical to SEQ ID NO: 33234
  misc_feature 1..80: note = Artificially Synthesized Probe
  source 1..80: mol_type = other DNA

SEQ ID NO: 91391 - DNA, 80 bp, synthetic construct
  misc_feature 1..80: note = Artificially Synthesized Probe
  source 1..80: mol_type = other DNA
agggaatacagggtcaggggaggttctgaaagatgacacactgcagagaacatgtgtttgtatgccgatgacaagtatcc

SEQ ID NO: 91392 - DNA, 80 bp, synthetic construct
  misc_feature 1..80: note = Artificially Synthesized Probe
  source 1..80: mol_type = other DNA
tgtccttcctcaatttaatatgctctatgctggaaaactggattattgaacaggcattggctgatgcattctgaacctaa

SEQ ID NO: 91393 - DNA, 80 bp, synthetic construct
  misc_feature 1..80: note = Artificially Synthesized Probe
  source 1..80: mol_type = other DNA
aacacacaataaattaataaggtgcttcctacagtgagttcagttaaacattttgaagagtgtttttgaaatgtagcaga

SEQ ID NO: 91394 - DNA, 80 bp, synthetic construct; identical to SEQ ID NO: 33112
  misc_feature 1..80: note = Artificially Synthesized Probe
  source 1..80: mol_type = other DNA

SEQ ID NO: 91395 - DNA, 80 bp, synthetic construct; identical to SEQ ID NO: 33235
  misc_feature 1..80: note = Artificially Synthesized Probe
  source 1..80: mol_type = other DNA

SEQ ID NO: 91396 - DNA, 80 bp, synthetic construct
  misc_feature 1..80: note = Artificially Synthesized Probe
  source 1..80: mol_type = other DNA
gtgtatgcatatttgcatgtgtaaaagacttagcaatttgtgaatagaagatgtttctccgcttctcactgagcatggct

SEQ ID NO: 91397 - DNA, 80 bp, synthetic construct
  misc_feature 1..80: note = Artificially Synthesized Probe
  source 1..80: mol_type = other DNA
tttgggtgtagcctgctgaataagttcacagtgatctacatcctagtttccatgggctgaaatagaatattcatatcccc

SEQ ID NO: 91398 - DNA, 80 bp, synthetic construct
  misc_feature 1..80: note = Artificially Synthesized Probe
  source 1..80: mol_type = other DNA
tttatagattaaattgcaagcatctacctccctttcatcagactctccctgcagggcaagttcatctaactatgtatgtg

SEQ ID NO: 91399 - DNA, 80 bp, synthetic construct; identical to SEQ ID NO: 33236
  misc_feature 1..80: note = Artificially Synthesized Probe
  source 1..80: mol_type = other DNA

SEQ ID NO: 91400 - DNA, 80 bp, synthetic construct
  misc_feature 1..80: note = Artificially Synthesized Probe
  source 1..80: mol_type = other DNA
tggaacaaagatgaaaaagtgagaagagccctagattttttcttggaaatctggcttaaatccaggtttctttatttcct

SEQ ID NO: 91401 - DNA, 80 bp, synthetic construct
  misc_feature 1..80: note = Artificially Synthesized Probe
  source 1..80: mol_type = other DNA
atgctaccctacctataccatgagctaaataagctagtatttgtaaaggacacacacttacattcacaatcacacacggt

SEQ ID NO: 91402 - DNA, 80 bp, synthetic construct
  misc_feature 1..80: note = Artificially Synthesized Probe
  source 1..80: mol_type = other DNA
tcaggccataacaaagagagaaatgctgagtcccactccatgaacaggtcaaggaaccaaacatattcaaagagttattt

SEQ ID NO: 91403 - DNA, 80 bp, synthetic construct; identical to SEQ ID NO: 33237
  misc_feature 1..80: note = Artificially Synthesized Probe
  source 1..80: mol_type = other DNA

SEQ ID NO: 91404 - DNA, 80 bp, synthetic construct
  misc_feature 1..80: note = Artificially Synthesized Probe
  source 1..80: mol_type = other DNA
tgatttcagaaataaaagaagtagaagaaccacttccttatgttccattttgggactggccagcagtgcccagaaagtgt

SEQ ID NO: 91405 - DNA, 80 bp, synthetic construct
  misc_feature 1..80: note = Artificially Synthesized Probe
  source 1..80: mol_type = other DNA
ctttttttcccccatggatttgttaccccaatcatttaagatctaatgtcaattccccttcccctgatccaagcctcata

SEQ ID NO: 91406 - DNA, 80 bp, synthetic construct
  misc_feature 1..80: note = Artificially Synthesized Probe
  source 1..80: mol_type = other DNA
tttacaatgtgcattacatgcttagctgtttcctgctgctcgtattttttttttcttctcagctgcagaagaggacagtt

SEQ ID NO: 91407 - DNA, 80 bp, synthetic construct
  misc_feature 1..80: note = Artificially Synthesized Probe
  source 1..80: mol_type = other DNA
tttattttatttatgtgtgtgtggtgggaggggcgggtgttttcctaacaaatggggccaatagtagggcaggttcaagg

SEQ ID NO: 91408 - DNA, 80 bp, synthetic construct
  misc_feature 1..80: note = Artificially Synthesized Probe
  source 1..80: mol_type = other DNA
agggatatcacagtagtcaaaaagttttcttggattcattgtgtagcaccagggaccattgatgtcaccatcagggttac

SEQ ID NO: 91409 - DNA, 80 bp, synthetic construct
  misc_feature 1..80: note = Artificially Synthesized Probe
  source 1..80: mol_type = other DNA
ggttgttgtttgtgtactttttgcttttcttttgaagctatcaaaatgatttttacaatgtaaagagagtctgagaaata

SEQ ID NO: 91410 - DNA, 80 bp, synthetic construct; identical to SEQ ID NO: 33113
  misc_feature 1..80: note = Artificially Synthesized Probe
  source 1..80: mol_type = other DNA

SEQ ID NO: 91411 - DNA, 80 bp, synthetic construct
  misc_feature 1..80: note = Artificially Synthesized Probe
  source 1..80: mol_type = other DNA
tcttctacctgataaagcctgtttgctgttgattcagaaatgcttacttccatgcattatgcaccatccacagccaagac

SEQ ID NO: 91412 - DNA, 80 bp, synthetic construct
  misc_feature 1..80: note = Artificially Synthesized Probe
  source 1..80: mol_type = other DNA
tgaagggagctgcaatgaagcaactcttggtgggttcctggatagccccaggggctggttgccaagggaaccaaccatgt

SEQ ID NO: 91413 - DNA, 80 bp, synthetic construct
  misc_feature 1..80: note = Artificially Synthesized Probe
  source 1..80: mol_type = other DNA
ggttgctgaacacttagggtactggggactggtgcactggagagggcatagaggctctgagccccttcccacgtgccttg

SEQ ID NO: 91414 - DNA, 80 bp, synthetic construct; identical to SEQ ID NO: 33114
  misc_feature 1..80: note = Artificially Synthesized Probe
  source 1..80: mol_type = other DNA

SEQ ID NO: 91415 - DNA, 80 bp, synthetic construct
  misc_feature 1..80: note = Artificially Synthesized Probe
  source 1..80: mol_type = other DNA
gaacacagacactttggtttttcctatatctcagtcttccctattcataggccccaaagtaaaccatcacagagaatgca

SEQ ID NO: 91416 - DNA, 80 bp, synthetic construct
  misc_feature 1..80: note = Artificially Synthesized Probe
  source 1..80: mol_type = other DNA
tttttctgtgcacctggggtgagggggcgatggttaaaggatgactcaagtaccttccatttatcgtgcactttatttca

SEQ ID NO: 91417 - DNA, 80 bp, synthetic construct; identical to SEQ ID NO: 33115
  misc_feature 1..80: note = Artificially Synthesized Probe
  source 1..80: mol_type = other DNA

SEQ ID NO: 91418 - DNA, 80 bp, synthetic construct
  misc_feature 1..80: note = Artificially Synthesized Probe
  source 1..80: mol_type = other DNA
tggggacccctggcttagaggacaagcactagaaacgagaaacagcacccaacaatggaaacagtaaagaaatgtcaaaa

SEQ ID NO: 91419 - DNA, 80 bp, synthetic construct
  misc_feature 1..80: note = Artificially Synthesized Probe
  source 1..80: mol_type = other DNA
cctcttctgtttgaaaagatttgtcagcaaagggaaaaagagtccaaatcaaagtggcttacatttttttccagacctgc

SEQ ID NO: 91420 - DNA, 80 bp, synthetic construct; identical to SEQ ID NO: 33099
  misc_feature 1..80: note = Artificially Synthesized Probe
  source 1..80: mol_type = other DNA

SEQ ID NO: 91421 - DNA, 80 bp, synthetic construct
  misc_feature 1..80: note = Artificially Synthesized Probe
  source 1..80: mol_type = other DNA
aaacatacagtctgtagaaaaaaataaaaataaaacagatgattacagacagccaggcagccacatagacccaggacgat

SEQ ID NO: 91422 - DNA, 80 bp, synthetic construct
  misc_feature 1..80: note = Artificially Synthesized Probe
  source 1..80: mol_type = other DNA
gaataggaatttgactgggacactgaaataacccattttagaataaggtgagtggttaagttgagcaccctggaggtttt

SEQ ID NO: 91423 - DNA, 80 bp, synthetic construct; identical to SEQ ID NO: 33116
  misc_feature 1..80: note = Artificially Synthesized Probe
  source 1..80: mol_type = other DNA

SEQ ID NO: 91424 - DNA, 80 bp, synthetic construct
  misc_feature 1..80: note = Artificially Synthesized Probe
  source 1..80: mol_type = other DNA
cattgtcaggccactggaaattccaaagcaatacaagttacaggaggcggaagaatattcagggacatccagcaccctct

SEQ ID NO: 91425 - DNA, 80 bp, synthetic construct
  misc_feature 1..80: note = Artificially Synthesized Probe
  source 1..80: mol_type = other DNA
cttgtattagcccgttctcacattgctatgaggaaatacccgagacagactgggtaagttacaaagaaaagagttttaat

SEQ ID NO: 91426 - DNA, 80 bp, synthetic construct
  misc_feature 1..80: note = Artificially Synthesized Probe
  source 1..80: mol_type = other DNA
tctcactgtcatgagaacagcctgggagaaactgcccccatgatccagttacctccacctggtcctgcccttgacacatg

SEQ ID NO: 91427 - DNA, 80 bp, synthetic construct; identical to SEQ ID NO: 33117
  misc_feature 1..80: note = Artificially Synthesized Probe
  source 1..80: mol_type = other DNA

SEQ ID NO: 91428 - DNA, 80 bp, synthetic construct
  misc_feature 1..80: note = Artificially Synthesized Probe
  source 1..80: mol_type = other DNA
tgaaaaacaaccatgaaaatagcattattgtcaataccacttcaggtgggtcaagtgagtttgagtctaaaagacttata

SEQ ID NO: 91429 - DNA, 80 bp, synthetic construct
  misc_feature 1..80: note = Artificially Synthesized Probe
  source 1..80: mol_type = other DNA
gcataaagtgagagggctggctagactatgggatctgaaaaggtccaccagctatggagggttcagaaaaacaattgagt

SEQ ID NO: 91430 - DNA, 80 bp, synthetic construct; identical to SEQ ID NO: 33118
  misc_feature 1..80: note = Artificially Synthesized Probe
  source 1..80: mol_type = other DNA

SEQ ID NO: 91431 - DNA, 80 bp, synthetic construct
  misc_feature 1..80: note = Artificially Synthesized Probe
  source 1..80: mol_type = other DNA
cacaacggtcctatgaaacaggcacttgtcattcctgttcttcagttgaggaaactgaggcgtaaggaggttgtatagct

SEQ ID NO: 91432 - DNA, 80 bp, synthetic construct
  misc_feature 1..80: note = Artificially Synthesized Probe
  source 1..80: mol_type = other DNA
tcctcacattcatgacatgtggctgtctgagaaaccttgaaatgtattatgtaccgtgggaatgcaacattgtctctgta

SEQ ID NO: 91433 - DNA, 80 bp, synthetic construct
  misc_feature 1..80: note = Artificially Synthesized Probe
  source 1..80: mol_type = other DNA
ttagatgtagtttgatgacttctgatgaacatgtacacttgtgtaactcacacttcaatcacaatacaggacatttacat

SEQ ID NO: 91434 - DNA, 80 bp, synthetic construct
  misc_feature 1..80: note = Artificially Synthesized Probe
  source 1..80: mol_type = other DNA
ggcatctttctttaatgtaatatttttgagcatcttccatactatttgagagtatcaaaaacatgctcccttttattgct

SEQ ID NO: 91435 - DNA, 80 bp, synthetic construct; identical to SEQ ID NO: 33119
  misc_feature 1..80: note = Artificially Synthesized Probe
  source 1..80: mol_type = other DNA

SEQ ID NO: 91436 - DNA, 80 bp, synthetic construct
  misc_feature 1..80: note = Artificially Synthesized Probe
  source 1..80: mol_type = other DNA
agagtttcacatccttgctctacatcagtgacatcagttactgtggtgtcttcttaataatatccatgtccattgggtgt

SEQ ID NO: 91437 - DNA, 80 bp, synthetic construct
  misc_feature 1..80: note = Artificially Synthesized Probe
  source 1..80: mol_type = other DNA
ctgttgcccattagttgtttgtcctctgtttagtgagtgggagaaatgttcctatattctggacacaagccatttgtcag

SEQ ID NO: 91438 - DNA, 80 bp, synthetic construct
  misc_feature 1..80: note = Artificially Synthesized Probe
  source 1..80: mol_type = other DNA
agtgagtgtttacagactcctgcctcaaaaaagtttgccttctccaaggttgtgaagattttatattttttcatggaact

SEQ ID NO: 91439 - DNA, 80 bp, synthetic construct; identical to SEQ ID NO: 33120
  misc_feature 1..80: note = Artificially Synthesized Probe
  source 1..80: mol_type = other DNA

SEQ ID NO: 91440 - DNA, 80 bp, synthetic construct
  misc_feature 1..80: note = Artificially Synthesized Probe
  source 1..80: mol_type = other DNA
aaactacatgtgcaagtcatcacatcgatctaattgtttattttttgtagagagagggtctcactctgttgctaaggctg

SEQ ID NO: 91441 - DNA, 80 bp, synthetic construct
  misc_feature 1..80: note = Artificially Synthesized Probe
  source 1..80: mol_type = other DNA
caaaaaaggactgttgcaatagtgcttgggtgtgggtttcatccaaagatcaatttcacgagaactgatatggagtcttt

SEQ ID NO: 91442 - DNA, 80 bp, synthetic construct
  misc_feature 1..80: note = Artificially Synthesized Probe
  source 1..80: mol_type = other DNA
tttccaaaggatcatagcatgtatacagaaaaagtttttgcacattgagcacgtatatacttttgtttcttcaatttgac

SEQ ID NO: 91443 - DNA, 80 bp, synthetic construct
  misc_feature 1..80: note = Artificially Synthesized Probe
  source 1..80: mol_type = other DNA
ttctatctcacagtaacattgccaaattattctctaaaagggtgtgacagtggaaaatgtcactggaaaacaattacttt

SEQ ID NO: 91444 - DNA, 80 bp, synthetic construct
  misc_feature 1..80: note = Artificially Synthesized Probe
  source 1..80: mol_type = other DNA
gctgtggtttttattcaatttacaatctctgccttttatttgtaatgcttaatccttttatatttaatatactcataagg

SEQ ID NO: 91445 - DNA, 80 bp, synthetic construct; identical to SEQ ID NO: 33121
  misc_feature 1..80: note = Artificially Synthesized Probe
  source 1..80: mol_type = other DNA

SEQ ID NO: 91446 - DNA, 80 bp, synthetic construct
  misc_feature 1..80: note = Artificially Synthesized Probe
  source 1..80: mol_type = other DNA
ttgacattgccatttgccatttccagggctcttcattacttagtatggattaaagttcccatctggtattatttttcttc

SEQ ID NO: 91447 - DNA, 80 bp, synthetic construct
  misc_feature 1..80: note = Artificially Synthesized Probe
  source 1..80: mol_type = other DNA
gtcgtcctaggttgatctgtttttatttctctttatcactttaaagatgttatgccattgtttccaaggagaaggcatcg

SEQ ID NO: 91448 - DNA, 80 bp, synthetic construct
  misc_feature 1..80: note = Artificially Synthesized Probe
  source 1..80: mol_type = other DNA
ttgactgtgagtttatcattttcttcatacgtgtaaagtcttcagccatcattgctttgagtatttttttctgtcccaat

SEQ ID NO: 91449 - DNA, 80 bp, synthetic construct; identical to SEQ ID NO: 33122
  misc_feature 1..80: note = Artificially Synthesized Probe
  source 1..80: mol_type = other DNA

SEQ ID NO: 91450 - DNA, 80 bp, synthetic construct
  misc_feature 1..80: note = Artificially Synthesized Probe
  source 1..80: mol_type = other DNA
atatatacagttttaatttctttgtcaattccatcgtttctactatttcttggtctatttgtattgactggtttttctcc

SEQ ID NO: 91451 - DNA, 80 bp, synthetic construct
  misc_feature 1..80: note = Artificially Synthesized Probe
  source 1..80: mol_type = other DNA
tgggtccttttagacttggtttttaagctttactagggtgtttctggggtagtctttattctaagaaggcataaatccta

SEQ ID NO: 91452 - DNA, 80 bp, synthetic construct; identical to SEQ ID NO: 33123
  misc_feature 1..80: note = Artificially Synthesized Probe
  source 1..80: mol_type = other DNA

SEQ ID NO: 91453 - DNA, 80 bp, synthetic construct
  misc_feature 1..80: note = Artificially Synthesized Probe
  source 1..80: mol_type = other DNA
attctcctcgttgtagttcttcttttgtgaaaaactgcttaatttccttcgccaaattgaaacagaacctctgctaaagt

SEQ ID NO: 91454 - DNA, 80 bp, synthetic construct
  misc_feature 1..80: note = Artificially Synthesized Probe
  source 1..80: mol_type = other DNA
gaagaaagtcataatagttacggagttgcgctcattcatttccttttctaaattatctcagtcctgtactgtctcttgtc

SEQ ID NO: 91455 - DNA, 80 bp, synthetic construct
  misc_feature 1..80: note = Artificially Synthesized Probe
  source 1..80: mol_type = other DNA
cctggcaacccatatcccttcagaaaactggagcttagaacccagtgtgttcacacaggtttatatatattaattatatt

SEQ ID NO: 91456 - DNA, 80 bp, synthetic construct
  misc_feature 1..80: note = Artificially Synthesized Probe
  source 1..80: mol_type = other DNA
tgtgcaggctatagggtatttggtcatcagtcagggacagacataaaaaccttgcatgtttccctagaacatatatatat

SEQ ID NO: 91457 - DNA, 80 bp, synthetic construct
  misc_feature 1..80: note = Artificially Synthesized Probe
  source 1..80: mol_type = other DNA
aattaattatttctcatcattccctcaatccaagtaacaaaccttgaaacacgagcatagacaccaggcttattggggcg

SEQ ID NO: 91458 - DNA, 80 bp, synthetic construct
  misc_feature 1..80: note = Artificially Synthesized Probe
  source 1..80: mol_type = other DNA
tcatatacatgtgaattatttacttgtgacccatgacaaaaatggcaaaaagccttcatttcagagaagggaggttagaa

SEQ ID NO: 91459 - DNA, 80 bp, synthetic construct; identical to SEQ ID NO: 33124
  misc_feature 1..80: note = Artificially Synthesized Probe
  source 1..80: mol_type = other DNA

SEQ ID NO: 91460 - DNA, 80 bp, synthetic construct
  misc_feature 1..80: note = Artificially Synthesized Probe
  source 1..80: mol_type = other DNA
ttctaggaggaacttaagttggctgttgctcctcttacaagtaacatcaaagacatactcatttgggtagttttctgggg

SEQ ID NO: 91461 - DNA, 80 bp, synthetic construct
  misc_feature 1..80: note = Artificially Synthesized Probe
  source 1..80: mol_type = other DNA
gggtttgctcagttggtgctgaaaatagacaaaatcaagctgagtaactactagtatgcagaaacatgtgaagcaattta

SEQ ID NO: 91462 - DNA, 80 bp, synthetic construct
  misc_feature 1..80: note = Artificially Synthesized Probe
  source 1..80: mol_type = other DNA
atcagtgctcttacaattggaacaaagactcatgtgcaagctctttcgtatggctctctactggttgttcatgaaaacaa

SEQ ID NO: 91463 - DNA, 80 bp, synthetic construct; identical to SEQ ID NO: 33125
  misc_feature 1..80: note = Artificially Synthesized Probe
  source 1..80: mol_type = other DNA

SEQ ID NO: 91464 - DNA, 80 bp, synthetic construct
  misc_feature 1..80: note = Artificially Synthesized Probe
  source 1..80: mol_type = other DNA
attcctgccttccaagcataggtgtgcagagcctacctaagactgaaataagccagagaaatagtgtattctgtggtatt

SEQ ID NO: 91465 - DNA, 80 bp, synthetic construct
  misc_feature 1..80: note = Artificially Synthesized Probe
  source 1..80: mol_type = other DNA
aaatttggcacaaatttggcctgatgttagaattggaattttgtctggaacaccgagataacccctttcataacaaagtg

SEQ ID NO: 91466 - DNA, 80 bp, synthetic construct; identical to SEQ ID NO: 33100
  misc_feature 1..80: note = Artificially Synthesized Probe
  source 1..80: mol_type = other DNA

SEQ ID NO: 91467 - DNA, 80 bp, synthetic construct
  misc_feature 1..80: note = Artificially Synthesized Probe
  source 1..80: mol_type = other DNA
gattttccatctcttttcatcccaatgttcaaatgtgtagatatctggccacagacttcttacctgcttcagaatgagcc

SEQ ID NO: 91468 - DNA, 80 bp, synthetic construct; identical to SEQ ID NO: 33126
  misc_feature 1..80: note = Artificially Synthesized Probe
  source 1..80: mol_type = other DNA

SEQ ID NO: 91469 - DNA, 80 bp, synthetic construct
  misc_feature 1..80: note = Artificially Synthesized Probe
  source 1..80: mol_type = other DNA
aaaaaaactgagatcatacataaatgtatacaagaaaaattcggaatatcttcctccttctgccaactgcattcctccag

SEQ ID NO: 91470 - DNA, 80 bp, synthetic construct
  misc_feature 1..80: note = Artificially Synthesized Probe
  source 1..80: mol_type = other DNA
cctcctgggttcaagccattctcctgcctcagtctcctgagtagctgggactacaggcgcccgccaccacgcctggctaa

SEQ ID NO: 91471 - DNA, 80 bp, synthetic construct; identical to SEQ ID NO: 33127
  misc_feature 1..80: note = Artificially Synthesized Probe
  source 1..80: mol_type = other DNA

SEQ ID NO: 91472 - DNA, 80 bp, synthetic construct
  misc_feature 1..80: note = Artificially Synthesized Probe
  source 1..80: mol_type = other DNA
aaataacataccaggtagatcaagtgtgtctggctttacaagacttataaaacctgccctaaaaaactagctcccagaca

SEQ ID NO: 91473 - DNA, 80 bp, synthetic construct
  misc_feature 1..80: note = Artificially Synthesized Probe
  source 1..80: mol_type = other DNA
ggatctgaagaggtcgagtggctacagaggagtcagaaaacaatggagtaagaggcacagaaagcaaggaccctggggtg

SEQ ID NO: 91474 - DNA, 80 bp, synthetic construct
  misc_feature 1..80: note = Artificially Synthesized Probe
  source 1..80: mol_type = other DNA
agcctagacccccatttgagtaagctggttctccaagcaactggatgtgctaaaaggctgagcgtttaaaagcaatttct

SEQ ID NO: 91475 - DNA, 80 bp, synthetic construct
  misc_feature 1..80: note = Artificially Synthesized Probe
  source 1..80: mol_type = other DNA
tattttgctgaaagttaagttaggtgtcactgctctcagatttgctctctgagcaaggcaaacatcctgataagagggaa

SEQ ID NO: 91476 - DNA, 80 bp, synthetic construct; identical to SEQ ID NO: 33128
  misc_feature 1..80: note = Artificially Synthesized Probe
  source 1..80: mol_type = other DNA

SEQ ID NO: 91477 - DNA, 80 bp, synthetic construct
  misc_feature 1..80: note = Artificially Synthesized Probe
  source 1..80: mol_type = other DNA
gagctccatccatgctatttaagatactcagtgctgaatagtattcaagtgtaccagtaggttgcaaattattttttcat

SEQ ID NO: 91478 - DNA, 80 bp, synthetic construct
  misc_feature 1..80: note = Artificially Synthesized Probe
  source 1..80: mol_type = other DNA
gatggaactttttaagaaaccatctgactgattttttaattcgttttatcattttgatcttccaccagcatatgataaga

SEQ ID NO: 91479 - DNA, 80 bp, synthetic construct
  misc_feature 1..80: note = Artificially Synthesized Probe
  source 1..80: mol_type = other DNA
atactttaagttctgagatacatgtgtagaatgtgtgggtttgttacataggtatacacgtgtcatggtggtttgctgca

SEQ ID NO: 91480 - DNA, 80 bp, synthetic construct; identical to SEQ ID NO: 33129
  misc_feature 1..80: note = Artificially Synthesized Probe
  source 1..80: mol_type = other DNA

SEQ ID NO: 91481 - DNA, 80 bp, synthetic construct
  misc_feature 1..80: note = Artificially Synthesized Probe
  source 1..80: mol_type = other DNA
tcctttgggtatatacccagtaatgggattgctgggtcaaatggtacttctggttctagatccttgaggaatcaccgcac

SEQ ID NO: 91482 - DNA, 80 bp, synthetic construct
  misc_feature 1..80: note = Artificially Synthesized Probe
  source 1..80: mol_type = other DNA
tttctctaattaacagtgatgatgagcttttttcatgtttgtcagccacataaaggtcttcctgtcagaagtgtctgttc

SEQ ID NO: 91483 - DNA, 80 bp, synthetic construct
  misc_feature 1..80: note = Artificially Synthesized Probe
  source 1..80: mol_type = other DNA
agaagctctttattttaattagatctgatttgtaaattttggcttttgttgccattggttttgctgttttagtcatgaag

SEQ ID NO: 91484 - DNA, 80 bp, synthetic construct
  misc_feature 1..80: note = Artificially Synthesized Probe
  source 1..80: mol_type = other DNA
tcatgccattctcctgcctcagcctcccaagtagctgggactacaggtgcccacgaccacacccagctaattttttgtat

SEQ ID NO: 91485 - DNA, 80 bp, synthetic construct; identical to SEQ ID NO: 33130
  misc_feature 1..80: note = Artificially Synthesized Probe
  source 1..80: mol_type = other DNA

SEQ ID NO: 91486 - DNA, 80 bp, synthetic construct
  misc_feature 1..80: note = Artificially Synthesized Probe
  source 1..80: mol_type = other DNA
ttttgaagtcagatagcatgatgcctccagctttgttctttttgcttaggttgtcttggatatacaggccctttttctat

SEQ ID NO: 91487 - DNA, 80 bp, synthetic construct
  misc_feature 1..80: note = Artificially Synthesized Probe
  source 1..80: mol_type = other DNA
agcccagtgattgcagatgagacttacatggatgagccccttggcctcaacaccactctgcacttggtacatccaaatcc

SEQ ID NO: 91488 - DNA, 80 bp, synthetic construct
  misc_feature 1..80: note = Artificially Synthesized Probe
  source 1..80: mol_type = other DNA
gtgtcctatcttatttccttgagcagtggtttgtagttctccttgaagaggtccttcacatcccttgtaagttggattcc

SEQ ID NO: 91489 - DNA, 80 bp, synthetic construct
  misc_feature 1..80: note = Artificially Synthesized Probe
  source 1..80: mol_type = other DNA
ggctgagatgatagagttttctaaatatacaatcatgtcatctgcaaagagaaataatttgactccctctcttcccactt

SEQ ID NO: 91490 - DNA, 80 bp, synthetic construct; identical to SEQ ID NO: 33131
  misc_feature 1..80: note = Artificially Synthesized Probe
  source 1..80: mol_type = other DNA

SEQ ID NO: 91491 - DNA, 80 bp, synthetic construct
  misc_feature 1..80: note = Artificially Synthesized Probe
  source 1..80: mol_type = other DNA
atgtgctgctggattcagtttgccagtattttattgaggattttcacattgatgttcatcagggatgttggcctgaaatt

SEQ ID NO: 91492 - DNA, 80 bp, synthetic construct
  misc_feature 1..80: note = Artificially Synthesized Probe
  source 1..80: mol_type = other DNA
ccctctggtctgggctttttttggttggtaagctattaattactgcctcgatttcagaacttgttattggtctattcagg

SEQ ID NO: 91493 - DNA, 80 bp, synthetic construct; identical to SEQ ID NO: 33132
  misc_feature 1..80: note = Artificially Synthesized Probe
  source 1..80: mol_type = other DNA

SEQ ID NO: 91494 - DNA, 80 bp, synthetic construct; identical to SEQ ID NO: 33101
  misc_feature 1..80: note = Artificially Synthesized Probe
  source 1..80: mol_type = other DNA

SEQ ID NO: 91495 - DNA, 80 bp, synthetic construct
  misc_feature 1..80: note = Artificially Synthesized Probe
  source 1..80: mol_type = other DNA
gattttagatctttcccgctttctcctgtgggcatttagtgctataaatttccctctaaacatggctttagctgtgtacc

SEQ ID NO: 91496 - DNA, 80 bp, synthetic construct
  misc_feature 1..80: note = Artificially Synthesized Probe
  source 1..80: mol_type = other DNA
tttgattgcactttggtctgagagactgtttgttatgatttccattctacggcatttgctgagaagtgttttacttccaa

SEQ ID NO: 91497 - DNA, 80 bp, synthetic construct
  misc_feature 1..80: note = Artificially Synthesized Probe
  source 1..80: mol_type = other DNA
aatattggctgtggggtgttaaagtctcccactatttttgtgtggaagtctaagtctctttgtaggtctctaagaacttg

SEQ ID NO: 91498 - DNA, 80 bp, synthetic construct
  misc_feature 1..80: note = Artificially Synthesized Probe
  source 1..80: mol_type = other DNA
gctgctttttttttctttccatttgcttggtaaatattccttcatttctttattttgagcccatgtatgtcttttcaccc

SEQ ID NO: 91499 - DNA, 80 bp, synthetic construct; identical to SEQ ID NO: 33133
  misc_feature 1..80: note = Artificially Synthesized Probe
  source 1..80: mol_type = other DNA

SEQ ID NO: 91500 - DNA, 80 bp, synthetic construct
  misc_feature 1..80: note = Artificially Synthesized Probe
  source 1..80: mol_type = other DNA
tctttaagaatgttgaatattctacatctttctttggcactggatgtttcctgcccttgaacatcagactccaatttctt

SEQ ID NO: 91501 - DNA, 80 bp, synthetic construct
  misc_feature 1..80: note = Artificially Synthesized Probe
  source 1..80: mol_type = other DNA
tgcatttccagctgaggtactgggttcatctcaccggggcttgtcagacagtgggtgcagcccacggagagtgagccgaa

SEQ ID NO: 91502 - DNA, 80 bp, synthetic construct; identical to SEQ ID NO: 33134
  misc_feature 1..80: note = Artificially Synthesized Probe
  source 1..80: mol_type = other DNA

SEQ ID NO: 91503 - DNA, 80 bp, synthetic construct
  misc_feature 1..80: note = Artificially Synthesized Probe
  source 1..80: mol_type = other DNA
cctctgggggcagggcatagctgaacaaaaggcagcagaaacttctgcagacttaaacatccctgtctgacagctttgaa

SEQ ID NO: 91504 - DNA, 80 bp, synthetic construct
  misc_feature 1..80: note = Artificially Synthesized Probe
  source 1..80: mol_type = other DNA
gtcaacacccagctacaccctggttatgtgatgtttatttatgatgatggtggtgatgattaaaccaatggtgatagtga

SEQ ID NO: 91505 - DNA, 80 bp, synthetic construct
  misc_feature 1..80: note = Artificially Synthesized Probe
  source 1..80: mol_type = other DNA
ccagaggaagaatcaggcagcaacatttgctgttctgtaatatttgctgttctgcagcctccactggtaatacccaggca

SEQ ID NO: 91506 - DNA, 80 bp, synthetic construct
  misc_feature 1..80: note = Artificially Synthesized Probe
  source 1..80: mol_type = other DNA
gggagaaaccagagcagaacagctgaaaattctaaaaatcagggtgcctcttctcctccgaaggaacgcagctcctcacg

SEQ ID NO: 91507 - DNA, 80 bp, synthetic construct; identical to SEQ ID NO: 33135
  misc_feature 1..80: note = Artificially Synthesized Probe
  source 1..80: mol_type = other DNA

SEQ ID NO: 91508 - DNA, 80 bp, synthetic construct
  misc_feature 1..80: note = Artificially Synthesized Probe
  source 1..80: mol_type = other DNA
acatctgcttggtgtacctgaaagtgacgaggagaatggaaccaagttggaaaacactcttcaggatattatccaggaga

SEQ ID NO: 91509 - DNA, 80 bp, synthetic construct
  misc_feature 1..80: note = Artificially Synthesized Probe
  source 1..80: mol_type = other DNA
gatctctcagcagaaactctacaagccagaagagagtggcagccaatattcaacattcttaaagaaaagaattttcaact

SEQ ID NO: 91510 - DNA, 80 bp, synthetic construct
  misc_feature 1..80: note = Artificially Synthesized Probe
  source 1..80: mol_type = other DNA
ctgcacaaacatgccaaattgtaaaaaccatcgatgctaggaagaaactgcatcaactaatgagcaaaataaccagcgaa

SEQ ID NO: 91511 - DNA, 80 bp, synthetic construct; identical to SEQ ID NO: 33136
  misc_feature 1..80: note = Artificially Synthesized Probe
  source 1..80: mol_type = other DNA

SEQ ID NO: 91512 - DNA, 80 bp, synthetic construct
  misc_feature 1..80: note = Artificially Synthesized Probe
  source 1..80: mol_type = other DNA
acctacaaagagacttagactcccacacaataataatgggagactttaacaccccactgtcaacattagacagatcaatg

SEQ ID NO: 91513 - DNA, 80 bp, synthetic construct
  misc_feature 1..80: note = Artificially Synthesized Probe
  source 1..80: mol_type = other DNA
ggtggtgggtagtaatgatggttacagtgatcattgtgatgatggtgatagtgatcatggtggtggtgatgatggttaca

SEQ ID NO: 91514 - DNA, 80 bp, synthetic construct
  misc_feature 1..80: note = Artificially Synthesized Probe
  source 1..80: mol_type = other DNA
aggcattcctcagcaaatgtaaaagaacagaaattataacaaactgtctctcagaccacagtgcaatcaaactaggactc

SEQ ID NO: 91515 - DNA, 80 bp, synthetic construct; identical to SEQ ID NO: 33137
  misc_feature 1..80: note = Artificially Synthesized Probe
  source 1..80: mol_type = other DNA

SEQ ID NO: 91516 - DNA, 80 bp, synthetic construct
  misc_feature 1..80: note = Artificially Synthesized Probe
  source 1..80: mol_type = other DNA
acaaaattgatagaccactagcaagactaataaagaagaaaagagagaagaatcaaatagatgcaataaaaaatgataaa

SEQ ID NO: 91517 - DNA, 80 bp, synthetic construct
  misc_feature 1..80: note = Artificially Synthesized Probe
  source 1..80: mol_type = other DNA
gaccaataacaggctctgaaattgaggcaataattaagagcctaccaaccaaaaaaagtccaggagagattcatagccga

SEQ ID NO: 91518 - DNA, 80 bp, synthetic construct
  misc_feature 1..80: note = Artificially Synthesized Probe
  source 1..80: mol_type = other DNA
atccatgatgaacattgatgcaaaaatcctcaataaaatactggcaaaccgaatccagcagcacatcaaaaagcttatcc

SEQ ID NO: 91519 - DNA, 80 bp, synthetic construct; identical to SEQ ID NO: 33138
  misc_feature 1..80: note = Artificially Synthesized Probe
  source 1..80: mol_type = other DNA

SEQ ID NO: 91520 - DNA, 80 bp, synthetic construct
  misc_feature 1..80: note = Artificially Synthesized Probe
  source 1..80: mol_type = other DNA
aagttaaattgtccctgtttgcagatgacatgattgtatatttagaaaaccccatcttctcagaccaaaatctccttaag

SEQ ID NO: 91521 - DNA, 80 bp, synthetic construct
  misc_feature 1..80: note = Artificially Synthesized Probe
  source 1..80: mol_type = other DNA
gatgggaaggacctcttcaaggagaactacaaaccactgcttaatgaaataaaagaggacacaaacaaatggaagaacat

SEQ ID NO: 91522 - DNA, 80 bp, synthetic construct
  misc_feature 1..80: note = Artificially Synthesized Probe
  source 1..80: mol_type = other DNA
ttgccaagacaatcctaagccaaaaaagcaaagctggaggcatcactctgcctgacttcaaactacattacaaggctaca

SEQ ID NO: 91523 - DNA, 80 bp, synthetic construct
  misc_feature 1..80: note = Artificially Synthesized Probe
  source 1..80: mol_type = other DNA
gctgggaaaactgcctagccatatgtagaaagctgaaactggatcccttccttacaccttatataaaaattaattcaaga

SEQ ID NO: 91524 - DNA, 80 bp, synthetic construct
  misc_feature 1..80: note = Artificially Synthesized Probe
  source 1..80: mol_type = other DNA
agtgatgatggtggtggtaatgttaatggtgatggcagtagaattgtggtgatggtgatgttggtagtagcggtggtaat

SEQ ID NO: 91525 - DNA, 80 bp, synthetic construct; identical to SEQ ID NO: 33139
  misc_feature 1..80: note = Artificially Synthesized Probe
  source 1..80: mol_type = other DNA

SEQ ID NO: 91526 - DNA, 80 bp, synthetic construct
  misc_feature 1..80: note = Artificially Synthesized Probe
  source 1..80: mol_type = other DNA
ctcaccatcactggccatcagagaaatgcaaatcaaaaccacaatgagataccatctcataccagttagaatggtgatca

SEQ ID NO: 91527 - DNA, 80 bp, synthetic construct
  misc_feature 1..80: note = Artificially Synthesized Probe
  source 1..80: mol_type = other DNA
attactggatatatatctaaaggattataaatcatgctgctataaagacacatgcacacatatgtttattgcggcactat

SEQ ID NO: 91528 - DNA, 80 bp, synthetic construct
  misc_feature 1..80: note = Artificially Synthesized Probe
  source 1..80: mol_type = other DNA
cagcaaactatcacaaggacagaaatccaaacaccgaatgttctcactcataggtgggaattgaacaatgagagtacatg

SEQ ID NO: 91529 - DNA, 80 bp, synthetic construct; identical to SEQ ID NO: 33140
  misc_feature 1..80: note = Artificially Synthesized Probe
  source 1..80: mol_type = other DNA

SEQ ID NO: 91530 - DNA, 80 bp, synthetic construct
  misc_feature 1..80: note = Artificially Synthesized Probe
  source 1..80: mol_type = other DNA
gtggtgttctctgtatttcctgaatttgaatgtggtattctctgtatttccttaatttgaatgttggcctgtcttgctag

SEQ ID NO: 91531 - DNA, 80 bp, synthetic construct
  misc_feature 1..80: note = Artificially Synthesized Probe
  source 1..80: mol_type = other DNA
tcttgttttcacgctttacttcattaagttgattttcaatctctgatatcctttcttccacttgatcgattttgctattg

SEQ ID NO: 91532 - DNA, 80 bp, synthetic construct
  misc_feature 1..80: note = Artificially Synthesized Probe
  source 1..80: mol_type = other DNA
agaggagtttcttattatcttctgaaaccaggacccacttgaggaggcagtctgtcccttatcagagctctagtgctgtg

SEQ ID NO: 91533 - DNA, 80 bp, synthetic construct; identical to SEQ ID NO: 33141
  misc_feature 1..80: note = Artificially Synthesized Probe
  source 1..80: mol_type = other DNA

SEQ ID NO: 91534 - DNA, 80 bp, synthetic construct
  misc_feature 1..80: note = Artificially Synthesized Probe
  source 1..80: mol_type = other DNA
gggctccatgggggtgggatccactgagaaagaccacttagctccctggcttcagccctttcttcacgggggtgaatggt

SEQ ID NO: 91535 - DNA, 80 bp, synthetic construct; identical to SEQ ID NO: 33102
  misc_feature 1..80: note = Artificially Synthesized Probe
  source 1..80: mol_type = other DNA

SEQ ID NO: 91536 - DNA, 80 bp, synthetic construct
  misc_feature 1..80: note = Artificially Synthesized Probe
  source 1..80: mol_type = other DNA
cgtgggaaaagcatagtatttgtgccagaatgcactggtcttcacggcacagtccctcacggcttcctttggctagggga

SEQ ID NO: 91537 - DNA, 80 bp, synthetic construct; identical to SEQ ID NO: 33142
  misc_feature 1..80: note = Artificially Synthesized Probe
  source 1..80: mol_type = other DNA

SEQ ID NO: 91538 - DNA, 80 bp, synthetic construct
  misc_feature 1..80: note = Artificially Synthesized Probe
  source 1..80: mol_type = other DNA
tctgttttcatgtgtttctaggatttgtttcaagatttagagctccttttagcagttcttctagtggtgacttggtaatg

SEQ ID NO: 91539 - DNA, 80 bp, synthetic construct
  misc_feature 1..80: note = Artificially Synthesized Probe
  source 1..80: mol_type = other DNA
aaaactggctgttaatctgatagggtttcctttatacattacctggtgcttctgtctcacagctcttaagattcttgcct

SEQ ID NO: 91540 - DNA, 80 bp, synthetic construct
  misc_feature 1..80: note = Artificially Synthesized Probe
  source 1..80: mol_type = other DNA
gttattcccccaaatatgttttccaagcttttagtattgtctttttcctcaggagccacgattattcttatatttggtca

SEQ ID NO: 91541 - DNA, 80 bp, synthetic construct; identical to SEQ ID NO: 33143
  misc_feature 1..80: note = Artificially Synthesized Probe
  source 1..80: mol_type = other DNA

SEQ ID NO: 91542 - DNA, 80 bp, synthetic construct
  misc_feature 1..80: note = Artificially Synthesized Probe
  source 1..80: mol_type = other DNA
agtgtgatgagccttgttttgtcatattaccagggttggttttctggttccttctcatttgggtagactgtgtcagaggg

SEQ ID NO: 91543 - DNA, 80 bp, synthetic construct
  misc_feature 1..80: note = Artificially Synthesized Probe
  source 1..80: mol_type = other DNA
ctctgggctggtactggggactgtctgtacagagtcctgtgatgtgaaccatctatgggtctctcagctgtggataccag

SEQ ID NO: 91544 - DNA, 80 bp, synthetic construct
  misc_feature 1..80: note = Artificially Synthesized Probe
  source 1..80: mol_type = other DNA
atatgctctttgtcttctgctaccagggtgggtagggaaggaccatcagttgggggtgggactaggcgtgtctgagctca

SEQ ID NO: 91545 - DNA, 80 bp, synthetic construct
  misc_feature 1..80: note = Artificially Synthesized Probe
  source 1..80: mol_type = other DNA
gcacccatgcaaactgaagggctggtcttactcccaccatgcccccaaccccgcaacagctccaagtctgtttccaggtg

SEQ ID NO: 91546 - DNA, 80 bp, synthetic construct
  misc_feature 1..80: note = Artificially Synthesized Probe
  source 1..80: mol_type = other DNA
ctcatatgtaagatgagaaagcggaggctaaaagagattaaataactgcccaatgtcacatggaagatgggagagccaga

SEQ ID NO: 91547 - DNA, 80 bp, synthetic construct; identical to SEQ ID NO: 33144
  misc_feature 1..80: note = Artificially Synthesized Probe
  source 1..80: mol_type = other DNA

SEQ ID NO: 91548 - DNA, 80 bp, synthetic construct
  misc_feature 1..80: note = Artificially Synthesized Probe
  source 1..80: mol_type = other DNA
tggggtgtgtttgagggagtaaggcctcccttttccacttctgcagttggggaactcacagtatttggggtgtctccctt

SEQ ID NO: 91549 - DNA, 80 bp, synthetic construct
  misc_feature 1..80: note = Artificially Synthesized Probe
  source 1..80: mol_type = other DNA
tccctcacctcttgggtttttcttctattactttaaagatgttactttattgtttctgactttcattgtttctgatgaga

SEQ ID NO: 91550 - DNA, 80 bp, synthetic construct
  misc_feature 1..80: note = Artificially Synthesized Probe
  source 1..80: mol_type = other DNA
aggcatcagtcatttgtgtaactgttcctttatataaacaatcttttttcctctggcttataaaattttcctagctttct

SEQ ID NO: 91551 - DNA, 80 bp, synthetic construct
  misc_feature 1..80: note = Artificially Synthesized Probe
  source 1..80: mol_type = other DNA
actcacacccagatccttatgattttagcttcatgctttcatcagttgaggtatcatagaggctctgtttgctttctggc

SEQ ID NO: 91552 - DNA, 80 bp, synthetic construct; identical to SEQ ID NO: 33145
  misc_feature 1..80: note = Artificially Synthesized Probe
  source 1..80: mol_type = other DNA

SEQ ID NO: 91553 - DNA, 80 bp, synthetic construct
  misc_feature 1..80: note = Artificially Synthesized Probe
  source 1..80: mol_type = other DNA
tggatgccagataactgagcaatttgattttattgtttacctatgaagaggttaagctttcttctgatgggcaactaatt

SEQ ID NO: 91554 - DNA, 80 bp, synthetic construct; identical to SEQ ID NO: 33098
  misc_feature 1..80: note = Artificially Synthesized Probe
  source 1..80: mol_type = other DNA

SEQ ID NO: 91555 - DNA, 80 bp, synthetic construct
  misc_feature 1..80: note = Artificially Synthesized Probe
  source 1..80: mol_type = other DNA
agctggtaagaactcaaatatcccccagtgctttgtgagctctgccatctccattgaactcattgttcccttgtagttat

SEQ ID NO: 91556 - DNA, 80 bp, synthetic construct; identical to SEQ ID NO: 33146
  misc_feature 1..80: note = Artificially Synthesized Probe
  source 1..80: mol_type = other DNA

SEQ ID NO: 91557 - DNA, 80 bp, synthetic construct
  misc_feature 1..80: note = Artificially Synthesized Probe
  source 1..80: mol_type = other DNA
tatagtcatttacttccaaaaggctgttatgcttatacctgctttttgtccatgtacttgtccattttacttttcagcgt

SEQ ID NO: 91558 - DNA, 80 bp, synthetic construct
  misc_feature 1..80: note = Artificially Synthesized Probe
  source 1..80: mol_type = other DNA
catatatatatatatatatatatgtatatatatatatatatatatatatgggtatatatatatatacacacatgcacaca

SEQ ID NO: 91559 - DNA, 80 bp, synthetic construct
  misc_feature 1..80: note = Artificially Synthesized Probe
  source 1..80: mol_type = other DNA
ttaaatataagttttatacacaagtatataaatattcagacatatatataaatattcagatgtttgtgtgtgtgtgtgtg

SEQ ID NO: 91560 - DNA, 80 bp, synthetic construct
  misc_feature 1..80: note = Artificially Synthesized Probe
  source 1..80: mol_type = other DNA
ggaatggtgctgtgtttaagctttggtcatttatcttctgagctttacattaatatgacttcgccacttccgtatattct

SEQ ID NO: 91561 - DNA, 80 bp, synthetic construct; identical to SEQ ID NO: 33147
  misc_feature 1..80: note = Artificially Synthesized Probe
  source 1..80: mol_type = other DNA

SEQ ID NO: 91562 - DNA, 80 bp, synthetic construct
  misc_feature 1..80: note = Artificially Synthesized Probe
  source 1..80: mol_type = other DNA
taattgcatgagcagagaaacatgggagacaatttatgtcacatactggacagtagcctctgaaaattattactattctt

SEQ ID NO: 91563 - DNA, 80 bp, synthetic construct
  misc_feature 1..80: note = Artificially Synthesized Probe
  source 1..80: mol_type = other DNA
cccaagtttgacttctcagagtgggcagactattgttcacataattgggagagtggcctttcttattctttcccggtaca

SEQ ID NO: 91564 - DNA, 80 bp, synthetic construct
  misc_feature 1..80: note = Artificially Synthesized Probe
  source 1..80: mol_type = other DNA
ggacattggaaattacattcatgtgcagctccatcatatgaatctctgctggttttcatgagaaccacagggcagaagac

SEQ ID NO: 91565 - DNA, 80 bp, synthetic construct
  misc_feature 1..80: note = Artificially Synthesized Probe
  source 1..80: mol_type = other DNA
tcttttgaaaatttgggcaggaaatcatcctacatttaggagtgcaggcaaagactcattgtttctcaaggagggttaga

SEQ ID NO: 91566 - DNA, 80 bp, synthetic construct; identical to SEQ ID NO: 33148
  misc_feature 1..80: note = Artificially Synthesized Probe
  source 1..80: mol_type = other DNA

SEQ ID NO: 91567 - DNA, 80 bp, synthetic construct
  misc_feature 1..80: note = Artificially Synthesized Probe
  source 1..80: mol_type = other DNA
aaatcactggaaaggcttattggcttggaaatcttcacatatttggcaggctgttagaatatccattttggctaggacac

SEQ ID NO: 91568 - DNA, 80 bp, synthetic construct
  misc_feature 1..80: note = Artificially Synthesized Probe
  source 1..80: mol_type = other DNA
atttggcaggctgttagaatatccattttggctaggacactgaaatgacccatttaataaccaggggagtggtaagtcca

SEQ ID NO: 91569 - DNA, 80 bp, synthetic construct
  misc_feature 1..80: note = Artificially Synthesized Probe
  source 1..80: mol_type = other DNA
tgaaggcttctgcatcagtaagattttccatggtttttcatcccagtatatagatgtctaaccacaaatttcttaccttg

SEQ ID NO: 91570 - DNA, 80 bp, synthetic construct
  misc_feature 1..80: note = Artificially Synthesized Probe
  source 1..80: mol_type = other DNA
tagttcctggtcaggccactgcaaatttcaaaacaacacaggtcaccagagatgggagaatattcaagggcacttagcgc

SEQ ID NO: 91571 - DNA, 80 bp, synthetic construct; identical to SEQ ID NO: 33149
  misc_feature 1..80: note = Artificially Synthesized Probe
  source 1..80: mol_type = other DNA

SEQ ID NO: 91572 - DNA, 80 bp, synthetic construct
  misc_feature 1..80: note = Artificially Synthesized Probe
  source 1..80: mol_type = other DNA
tagtaatatgtaagttggaactcaaatacatttccccaaggaagaagtggcatccaagattatataattcccatgccagc

SEQ ID NO: 91573 - DNA, 80 bp, synthetic construct
  misc_feature 1..80: note = Artificially Synthesized Probe
  source 1..80: mol_type = other DNA
aggacttataaaagcttccctggaaaactagctcccaggcaggatgctgcttctctaggatgggttcatgggcacgacct

SEQ ID NO: 91574 - DNA, 80 bp, synthetic construct
  misc_feature 1..80: note = Artificially Synthesized Probe
  source 1..80: mol_type = other DNA
acaatgcagtaagaggcacagcaggtgaagaccccaggctggaggaatcttggagaatgccttccccattatgcctccca

SEQ ID NO: 91575 - DNA, 80 bp, synthetic construct; identical to SEQ ID NO: 33150
  misc_feature 1..80: note = Artificially Synthesized Probe
  source 1..80: mol_type = other DNA

SEQ ID NO: 91576 - DNA, 80 bp, synthetic construct
  misc_feature 1..80: note = Artificially Synthesized Probe
  source 1..80: mol_type = other DNA
gagttggattttctgtcacttgcaagaaagaatcatgttagatataattctattctttattagtagtaggagctgccatg

SEQ ID NO: 91577 - DNA, 80 bp, synthetic construct
  misc_feature 1..80: note = Artificially Synthesized Probe
  source 1..80: mol_type = other DNA
tcttcccacggccagtgtcaaatgctattggtttctttcaccataaattgtgttttctataaactcacatgaatggactc

SEQ ID NO: 91578 - DNA, 80 bp, synthetic construct
  misc_feature 1..80: note = Artificially Synthesized Probe
  source 1..80: mol_type = other DNA
tatactggaaattcttttttcattttcttttgatgaaaccatttaaatagttttcattttcttttgatgaaaacattgaa

SEQ ID NO: 91579 - DNA, 80 bp, synthetic construct
  misc_feature 1..80: note = Artificially Synthesized Probe
  source 1..80: mol_type = other DNA
actgattttttaatttgttgtatgattttgaacttccaccagcatatgagagagtggcacattctagctccaaatcggtg

SEQ ID NO: 91580 - DNA, 80 bp, synthetic construct; identical to SEQ ID NO: 33151
  misc_feature 1..80: note = Artificially Synthesized Probe
  source 1..80: mol_type = other DNA

SEQ ID NO: 91581 - DNA, 80 bp, synthetic construct
  misc_feature 1..80: note = Artificially Synthesized Probe
  source 1..80: mol_type = other DNA
ttggtgagcataagtttttattcaatgaatgtccacattatcatttgttttcttttacagttagtgttttctggttcttc

SEQ ID NO: 91582 - DNA, 80 bp, synthetic construct
  misc_feature 1..80: note = Artificially Synthesized Probe
  source 1..80: mol_type = other DNA
aatttgagtcatacagtaggattcaagcgtcacatttgttatagtttttttctatggctatccagttgtttcagaccaat

SEQ ID NO: 91583 - DNA, 80 bp, synthetic construct
  misc_feature 1..80: note = Artificially Synthesized Probe
  source 1..80: mol_type = other DNA
ttttaatctgtctcccaggctaaagttcagtagcacaatcatggctcatttcagcctccacctcatgggctccagtgatc

SEQ ID NO: 91584 - DNA, 80 bp, synthetic construct; identical to SEQ ID NO: 33152
  misc_feature 1..80: note = Artificially Synthesized Probe
  source 1..80: mol_type = other DNA

SEQ ID NO: 91585 - DNA, 80 bp, synthetic construct
  misc_feature 1..80: note = Artificially Synthesized Probe
  source 1..80: mol_type = other DNA
gcttgggtgtgggttgaaactaaagatcagttttgtgaaaagtgacattggattttttaatctataagcatgatgtgtct

SEQ ID NO: 91586 - DNA, 80 bp, synthetic construct
  misc_feature 1..80: note = Artificially Synthesized Probe
  source 1..80: mol_type = other DNA
ttgatgccaattcccatatggtattatttttcttctacttacatagcattctttcacatcttttattacataatcctgct

SEQ ID NO: 91587 - DNA, 80 bp, synthetic construct; identical to SEQ ID NO: 33153
  misc_feature 1..80: note = Artificially Synthesized Probe
  source 1..80: mol_type = other DNA

SEQ ID NO: 91588 - DNA, 80 bp, synthetic construct; identical to SEQ ID NO: 33103
  misc_feature 1..80: note = Artificially Synthesized Probe
  source 1..80: mol_type = other DNA

SEQ ID NO: 91589 - DNA, 80 bp, synthetic construct
  misc_feature 1..80: note = Artificially Synthesized Probe
  source 1..80: mol_type = other DNA
ccactctgaaggcgttattctgttgttcctgatttgatctttttttctttcttacactctaaaggtgttattccattgtt

SEQ ID NO: 91590 - DNA, 80 bp, synthetic construct
  misc_feature 1..80: note = Artificially Synthesized Probe
  source 1..80: mol_type = other DNA
gtttctgatgagaaggcatcagtcatttgtgtcactgttactctatgtaaaggtatgttttttcccttgggcttcaaata

SEQ ID NO: 91591 - DNA, 80 bp, synthetic construct
  misc_feature 1..80: note = Artificially Synthesized Probe
  source 1..80: mol_type = other DNA
tatcattttttccatatttagaaagtcatcagccatcactgcttcaagtattttttctgttccaatatctctttcccttc

SEQ ID NO: 91592 - DNA, 80 bp, synthetic construct; identical to SEQ ID NO: 33154
  misc_feature 1..80: note = Artificially Synthesized Probe
  source 1..80: mol_type = other DNA

SEQ ID NO: 91593 - DNA, 80 bp, synthetic construct
  misc_feature 1..80: note = Artificially Synthesized Probe
  source 1..80: mol_type = other DNA
gggtcacactaaatgctttttgtatgtttagcaaatttttaaatgtatgccacacattgtgcatactatataattgagca

SEQ ID NO: 91594 - DNA, 80 bp, synthetic construct
  misc_feature 1..80: note = Artificially Synthesized Probe
  source 1..80: mol_type = other DNA
gtagactttattctaggaatgcattaattctactcctgaagtatggttttttggggtctttgctgaatgcccaagatgtt

SEQ ID NO: 91595 - DNA, 80 bp, synthetic construct
  misc_feature 1..80: note = Artificially Synthesized Probe
  source 1..80: mol_type = other DNA
tttgttctcctttctctctggaaactctttctgtgcatacacagctttctgttcagccagagacttgaagagacttctgt

SEQ ID NO: 91596 - DNA, 80 bp, synthetic construct; identical to SEQ ID NO: 33155
  misc_feature 1..80: note = Artificially Synthesized Probe
  source 1..80: mol_type = other DNA

SEQ ID NO: 91597 - DNA, 80 bp, synthetic construct
  misc_feature 1..80: note = Artificially Synthesized Probe
  source 1..80: mol_type = other DNA
atcccttcagaaaactggtgcttagaacccagtgtgttcatacaggctagtactcatatataaatatatgcactcatttc

SEQ ID NO: 91598 - DNA, 80 bp, synthetic construct
  misc_feature 1..80: note = Artificially Synthesized Probe
  source 1..80: mol_type = other DNA
gcagaaaaagggaacaaggagtcaaggaggtgaggttttaaaaataataggaaaatgacagaaaaagggaagcctacttt

SEQ ID NO: 91599 - DNA, 80 bp, synthetic construct
  misc_feature 1..80: note = Artificially Synthesized Probe
  source 1..80: mol_type = other DNA
tcttcttctttttttttttttttgagattgagtcttgctctgtcacccaggctggagtgcagtggcatgttctcggctca

SEQ ID NO: 91600 - DNA, 80 bp, synthetic construct
  misc_feature 1..80: note = Artificially Synthesized Probe
  source 1..80: mol_type = other DNA
ttgccatgttagccaggctggtcttgaactcctgacctctggtgatctgcccgtcttgtcctcccaaagtgttgggatca

SEQ ID NO: 91601 - DNA, 80 bp, synthetic construct; identical to SEQ ID NO: 33156
  misc_feature 1..80: note = Artificially Synthesized Probe
  source 1..80: mol_type = other DNA

SEQ ID NO: 91602 - DNA, 80 bp, synthetic construct
  misc_feature 1..80: note = Artificially Synthesized Probe
  source 1..80: mol_type = other DNA
tgactattgttccttttatggctaacatgatagacatacgcatttggatagtataatgggatcctccgatgccaatgtgg

SEQ ID NO: 91603 - DNA, 80 bp, synthetic construct
  misc_feature 1..80: note = Artificially Synthesized Probe
  source 1..80: mol_type = other DNA
tgaaattaaaagagaaaatcaagctcagtattgcctagaaaagggaaatgtgaaaaaaattatgacacacaaagtggaat

SEQ ID NO: 91604 - DNA, 80 bp, synthetic construct
  misc_feature 1..80: note = Artificially Synthesized Probe
  source 1..80: mol_type = other DNA
acagatcagagtgcctatacttcaaaattacactcatgtgaatggtcttttgcttacacctcttctgggtgttcatgaga

SEQ ID NO: 91605 - DNA, 80 bp, synthetic construct
  misc_feature 1..80: note = Artificially Synthesized Probe
  source 1..80: mol_type = other DNA
catctaggacttgtaggtaaagacacattgcctctcagggagaaggagtacaggccaaaattttatagcctaggagggga

SEQ ID NO: 91606 - DNA, 80 bp, synthetic construct; identical to SEQ ID NO: 33157
  misc_feature 1..80: note = Artificially Synthesized Probe
  source 1..80: mol_type = other DNA

SEQ ID NO: 91607 - DNA, 80 bp, synthetic construct
  misc_feature 1..80: note = Artificially Synthesized Probe
  source 1..80: mol_type = other DNA
gtatatcttcacaagtttggcaggatgttagaatatccatcttggctaggacactaatatgattcgtttgataacaggga

SEQ ID NO: 91608 - DNA, 80 bp, synthetic construct
  misc_feature 1..80: note = Artificially Synthesized Probe
  source 1..80: mol_type = other DNA
taagggattagagccaagtggtacaaagaggtaacgtgtctagttcaggtctatctggcaagtggcagagtcagaacagt

SEQ ID NO: 91609 - DNA, 80 bp, synthetic construct
  misc_feature 1..80: note = Artificially Synthesized Probe
  source 1..80: mol_type = other DNA
aagttttctgcatcacaaagattttgcaaatctttttatcccaatgtccgagggtatggttgtctgactgcaggcttctt

SEQ ID NO: 91610 - DNA, 80 bp, synthetic construct; identical to SEQ ID NO: 33158
  misc_feature 1..80: note = Artificially Synthesized Probe
  source 1..80: mol_type = other DNA

SEQ ID NO: 91611 - DNA, 80 bp, synthetic construct
  misc_feature 1..80: note = Artificially Synthesized Probe
  source 1..80: mol_type = other DNA
tatgctttataagaaaactgagagaaaacatcaatgtgtaccagaaaggatcagaataccctccttctaccttctgccaa

SEQ ID NO: 91612 - DNA, 80 bp, synthetic construct
  misc_feature 1..80: note = Artificially Synthesized Probe
  source 1..80: mol_type = other DNA
ccatccacatgatctacattcatgaatttatttacatacagttgatctcaatatctacttctcagctttcacacctggag

SEQ ID NO: 91613 - DNA, 80 bp, synthetic construct
  misc_feature 1..80: note = Artificially Synthesized Probe
  source 1..80: mol_type = other DNA
ttcttttccactgaatgtcattggtttggactatttccttccatcctctttccttgtgccttatttgcttttccttgcct

SEQ ID NO: 91614 - DNA, 80 bp, synthetic construct
  misc_feature 1..80: note = Artificially Synthesized Probe
  source 1..80: mol_type = other DNA
gcttcttgactatgagtttcttgttttctgtatatttggcgtgttgcgagccatcatcgcttcaagtataatgtctgtca

SEQ ID NO: 91615 - DNA, 80 bp, synthetic construct; identical to SEQ ID NO: 33159
  misc_feature 1..80: note = Artificially Synthesized Probe
  source 1..80: mol_type = other DNA

SEQ ID NO: 91616 - DNA, 80 bp, synthetic construct
  misc_feature 1..80: note = Artificially Synthesized Probe
  source 1..80: mol_type = other DNA
gttctcagaggtgcattttaaatgttctcaccaatgtcatcaattctataatttctgggcctgtttgtgttgagtgattt

SEQ ID NO: 91617 - DNA, 80 bp, synthetic construct
  misc_feature 1..80: note = Artificially Synthesized Probe
  source 1..80: mol_type = other DNA
tacttggagatcatttggatccttttagactggcttggaagaagggttgttggagtttttctggagtcaccttgattcta

SEQ ID NO: 91618 - DNA, 80 bp, synthetic construct
  misc_feature 1..80: note = Artificially Synthesized Probe
  source 1..80: mol_type = other DNA
tgttctttcccaagtagcttttctttgttgttctttctttatgaaaactctccctgtgcatacgcagctttgtatttagc

SEQ ID NO: 91619 - DNA, 80 bp, synthetic construct; identical to SEQ ID NO: 33104
  misc_feature 1..80: note = Artificially Synthesized Probe
  source 1..80: mol_type = other DNA

SEQ ID NO: 91620 - DNA, 80 bp, synthetic construct; identical to SEQ ID NO: 33160
  misc_feature 1..80: note = Artificially Synthesized Probe
  source 1..80: mol_type = other DNA

SEQ ID NO: 91621 - DNA, 80 bp, synthetic construct
  misc_feature 1..80: note = Artificially Synthesized Probe
  source 1..80: mol_type = other DNA
agacaggttaatgatgaagttgatctcctttgattccctttctcagttctctcaagcctaccatatctgttgtccaacct

SEQ ID NO: 91622 - DNA, 80 bp, synthetic construct
  misc_feature 1..80: note = Artificially Synthesized Probe
  source 1..80: mol_type = other DNA
caacacatagcttttcagacaccttgttctcagaacccaatgtgtttatacaggttagaggagaaagtgatcggaagatc

SEQ ID NO: 91623 - DNA, 80 bp, synthetic construct
  misc_feature 1..80: note = Artificially Synthesized Probe
  source 1..80: mol_type = other DNA
tttagtgggcattgtggaatggtgctatttctaagcacatggtcatatgttcttctgagctttctattcatgagacctca

SEQ ID NO: 91624 - DNA, 80 bp, synthetic construct
  misc_feature 1..80: note = Artificially Synthesized Probe
  source 1..80: mol_type = other DNA
catggctcttccaggagaaatttaagtgggtggctgtttctcttgggagaaaactcaaagacatacccatttgggtagta

SEQ ID NO: 91625 - DNA, 80 bp, synthetic construct; identical to SEQ ID NO: 33161
  misc_feature 1..80: note = Artificially Synthesized Probe
  source 1..80: mol_type = other DNA

SEQ ID NO: 91626 - DNA, 80 bp, synthetic construct
  misc_feature 1..80: note = Artificially Synthesized Probe
  source 1..80: mol_type = other DNA
tgggcaccaaaggacagatcagagtgcctatcagtcaaaattgcactcatgtgcctgttctttggcaaagatctcttttg

SEQ ID NO: 91627 - DNA, 80 bp, synthetic construct
  misc_feature 1..80: note = Artificially Synthesized Probe
  source 1..80: mol_type = other DNA
ggaagtggtcctccatctaggacttccaggcaaagacacattgtctctcagagaggggtactggccaaaattttattccc

SEQ ID NO: 91628 - DNA, 80 bp, synthetic construct
  misc_feature 1..80: note = Artificially Synthesized Probe
  source 1..80: mol_type = other DNA
cctgcctaagattaaggtagacagggagatagagcatttgctggctatgtactgttacctagacccaggaggatatggaa

SEQ ID NO: 91629 - DNA, 80 bp, synthetic construct; identical to SEQ ID NO: 33162
  misc_feature 1..80: note = Artificially Synthesized Probe
  source 1..80: mol_type = other DNA

SEQ ID NO: 91630 - DNA, 80 bp, synthetic construct
  misc_feature 1..80: note = Artificially Synthesized Probe
  source 1..80: mol_type = other DNA
gcaactctttttatcccaacgtccaagggtgtggttgtctggccagagacttcttaccttgttcagaaacagccgtggac

SEQ ID NO: 91631 - DNA, 80 bp, synthetic construct
  misc_feature 1..80: note = Artificially Synthesized Probe
  source 1..80: mol_type = other DNA
tctgtctaatttcacatgaaaaataatctaacacccttaacttgagggctgggtcaaaaccccacttacctggggaagca

SEQ ID NO: 91632 - DNA, 80 bp, synthetic construct
  misc_feature 1..80: note = Artificially Synthesized Probe
  source 1..80: mol_type = other DNA
caccagagatgggagaagatacaagggcaccagacatcctctacattttgttgtaacaaagtggtaaaaagtgactttga

SEQ ID NO: 91633 - DNA, 80 bp, synthetic construct
  misc_feature 1..80: note = Artificially Synthesized Probe
  source 1..80: mol_type = other DNA
gatcagaataccctccttccaccttctgccaaatatgttactttggattaactgagagattttgaagtgagtcttgtaga

SEQ ID NO: 91634 - DNA, 80 bp, synthetic construct; identical to SEQ ID NO: 33163
  misc_feature 1..80: note = Artificially Synthesized Probe
  source 1..80: mol_type = other DNA

SEQ ID NO: 91635 - DNA, 80 bp, synthetic construct
  misc_feature 1..80: note = Artificially Synthesized Probe
  source 1..80: mol_type = other DNA
cactgaatgtcattggtttggactatttccatccatcccctttccttgtgtcttatttgcttttccttgcctagatattt

SEQ ID NO: 91636 - DNA, 80 bp, synthetic construct
  misc_feature 1..80: note = Artificially Synthesized Probe
  source 1..80: mol_type = other DNA
gaatttctcattttctgtatgtttggaaatttgtcagccgtcatggcttcaagtataacttctgtcacattatctttttc

SEQ ID NO: 91637 - DNA, 80 bp, synthetic construct; identical to SEQ ID NO: 33164
  misc_feature 1..80: note = Artificially Synthesized Probe
  source 1..80: mol_type = other DNA

SEQ ID NO: 91638 - DNA, 80 bp, synthetic construct
  misc_feature 1..80: note = Artificially Synthesized Probe
  source 1..80: mol_type = other DNA
gggcctatttgtgttgagtgatttttctcccagttatggatcacagtgaaaacttcttttgtgtctagtaaatttttaaa

SEQ ID NO: 91639 - DNA, 80 bp, synthetic construct
  misc_feature 1..80: note = Artificially Synthesized Probe
  source 1..80: mol_type = other DNA
tctggagtcaccttatttctaggaatccgaagatcctactcccaaattatggctttctttgacctctactgaatgcccaa

SEQ ID NO: 91640 - DNA, 80 bp, synthetic construct
  misc_feature 1..80: note = Artificially Synthesized Probe
  source 1..80: mol_type = other DNA
gcatacgcagctttgtatttagccaaagccttgagaagacttcggtgtgtattcttggagctcctttcctccacaaatcc

SEQ ID NO: 91641 - DNA, 80 bp, synthetic construct; identical to SEQ ID NO: 33165
  misc_feature 1..80: note = Artificially Synthesized Probe
  source 1..80: mol_type = other DNA

SEQ ID NO: 91642 - DNA, 80 bp, synthetic construct
  misc_feature 1..80: note = Artificially Synthesized Probe
  source 1..80: mol_type = other DNA
tgttctcagaacccaggtacaggttagaggagaaagtgattggaagatctggatgtcaacatagatatcctttatttgtt

SEQ ID NO: 91643 - DNA, 80 bp, synthetic construct
  misc_feature 1..80: note = Artificially Synthesized Probe
  source 1..80: mol_type = other DNA
ccttgaagactgattatggagacatagacaggtgtccaggcaaagtcaggagtgggtagaccacattcatgggtaggaat

SEQ ID NO: 91644 - DNA, 80 bp, synthetic construct
  misc_feature 1..80: note = Artificially Synthesized Probe
  source 1..80: mol_type = other DNA
aactcaccaccttcaaatatcctcctgcttctgtcaactatgagaaaagagagctggcctgacatttctctcctttcaga

SEQ ID NO: 91645 - DNA, 80 bp, synthetic construct
  misc_feature 1..80: note = Artificially Synthesized Probe
  source 1..80: mol_type = other DNA
gtctgtctttgaagaaaactcaaggttgtacccatttggataatattctgttgtcctctgatgccagtgtggtgtcatag

SEQ ID NO: 91646 - DNA, 80 bp, synthetic construct
  misc_feature 1..80: note = Artificially Synthesized Probe
  source 1..80: mol_type = other DNA
aaagaggagaaatcaagctgagtaatttctagaacacagaagcatcagaagaaatctgtgactgaaacaggatcattgtc

SEQ ID NO: 91647 - DNA, 80 bp, synthetic construct; identical to SEQ ID NO: 33166
  misc_feature 1..80: note = Artificially Synthesized Probe
  source 1..80: mol_type = other DNA

SEQ ID NO: 91648 - DNA, 80 bp, synthetic construct
  misc_feature 1..80: note = Artificially Synthesized Probe
  source 1..80: mol_type = other DNA
aagacaaattgtctctcagagagggctactggccaaaattttattcccttggagggatggctggtatctttggcccagga

SEQ ID NO: 91649 - DNA, 80 bp, synthetic construct
  misc_feature 1..80: note = Artificially Synthesized Probe
  source 1..80: mol_type = other DNA
agcatttgttggctatgtactgctacctggacccagaagtatatggaactaagaaaagtcatattaggtttctcaaggat

SEQ ID NO: 91650 - DNA, 80 bp, synthetic construct; identical to SEQ ID NO: 33167
  misc_feature 1..80: note = Artificially Synthesized Probe
  source 1..80: mol_type = other DNA

SEQ ID NO: 91651 - DNA, 80 bp, synthetic construct
  misc_feature 1..80: note = Artificially Synthesized Probe
  source 1..80: mol_type = other DNA
ctaagattttgcaactcttttcatcccaacgtcctagggtgtggttgtctggccatagacttcctaccttcttcagaaga

SEQ ID NO: 91652 - DNA, 80 bp, synthetic construct
  misc_feature 1..80: note = Artificially Synthesized Probe
  source 1..80: mol_type = other DNA
gtcaggccactgcaaatttcaaaacaacacaggtcaccagagatgggagaagattcaagggcacttagcgccctctacat

SEQ ID NO: 91653 - DNA, 80 bp, synthetic construct
  misc_feature 1..80: note = Artificially Synthesized Probe
  source 1..80: mol_type = other DNA
aattgagagtaaacatcaatgtttactctgtacattgtgcaagttgcacttgtacttgtacaacttcaattgtacttgta

SEQ ID NO: 91654 - DNA, 80 bp, synthetic construct
  misc_feature 1..80: note = Artificially Synthesized Probe
  source 1..80: mol_type = other DNA
aagctggcattactttgtcagtgatgacggcaggcctgtaaggaaagtattagcagttatgtttcactgcccagctggaa

SEQ ID NO: 91655 - DNA, 80 bp, synthetic construct; identical to SEQ ID NO: 33168
  misc_feature 1..80: note = Artificially Synthesized Probe
  source 1..80: mol_type = other DNA

SEQ ID NO: 91656 - DNA, 80 bp, synthetic construct
  misc_feature 1..80: note = Artificially Synthesized Probe
  source 1..80: mol_type = other DNA
gtgatggttgtgcaccctcattggtctgtcatttgtttagccagactgtgttcaatcatatggatcttttcaaagaatca

SEQ ID NO: 91657 - DNA, 80 bp, synthetic construct
  misc_feature 1..80: note = Artificially Synthesized Probe
  source 1..80: mol_type = other DNA
cttgtgtagatatttaagctgtggtcttagatcaacaactgtcaaagtctttgttcataggggattccaaagagcttttc

SEQ ID NO: 91658 - DNA, 80 bp, synthetic construct
  misc_feature 1..80: note = Artificially Synthesized Probe
  source 1..80: mol_type = other DNA
aaatgaaagtaaaaagggccaatagcatcttacttttcacgtagcaaagtcctttaacctcatggactgtctctgaaggt

SEQ ID NO: 91659 - DNA, 80 bp, synthetic construct
  misc_feature 1..80: note = Artificially Synthesized Probe
  source 1..80: mol_type = other DNA
cttactcagttcaaaacttttctaaattccttagtgatgttttctttgtcccaaagagtattttgaaatgcaccgtatga

SEQ ID NO: 91660 - DNA, 80 bp, synthetic construct; identical to SEQ ID NO: 33169
  misc_feature 1..80: note = Artificially Synthesized Probe
  source 1..80: mol_type = other DNA

SEQ ID NO: 91661 - DNA, 80 bp, synthetic construct
  misc_feature 1..80: note = Artificially Synthesized Probe
  source 1..80: mol_type = other DNA
aaacacattgagcattgctacatattcctcaatgaacaatttttacttctctatgtttcaatgctcgtgtggctctagga

SEQ ID NO: 91662 - DNA, 80 bp, synthetic construct
  misc_feature 1..80: note = Artificially Synthesized Probe
  source 1..80: mol_type = other DNA
taccttttaatagtcctttaatttgatttgactcttttatccttttactttcccttgatatgatatctgttacgttccat

SEQ ID NO: 91663 - DNA, 80 bp, synthetic construct
  misc_feature 1..80: note = Artificially Synthesized Probe
  source 1..80: mol_type = other DNA
taaatttaggactcacactgtggatattgcatagctcagcaacttaactttgttgttcacctgtaaagagtgttgagttt

SEQ ID NO: 91664 - DNA, 80 bp, synthetic construct; identical to SEQ ID NO: 33170
  misc_feature 1..80: note = Artificially Synthesized Probe
  source 1..80: mol_type = other DNA

SEQ ID NO: 91665 - DNA, 80 bp, synthetic construct
  misc_feature 1..80: note = Artificially Synthesized Probe
  source 1..80: mol_type = other DNA
tctatgcctggagctcctatcctccacaagtccattcttactcttagcatggctagaaaatcctaactacctgagtaatc

SEQ ID NO: 91666 - DNA, 80 bp, synthetic construct
  misc_feature 1..80: note = Artificially Synthesized Probe
  source 1..80: mol_type = other DNA
gaaaggcatcagttgcatgcaagaaactgagggtggccttagcctttgaaagtagggatgacaaaggcacacttctcatg

SEQ ID NO: 91667 - DNA, 80 bp, synthetic construct
  misc_feature 1..80: note = Artificially Synthesized Probe
  source 1..80: mol_type = other DNA
tctcattttctccctcttgcaatactcttggtcctctagcatctgttgttcaacatgtggaaaccgttttgccgtgtctt

SEQ ID NO: 91668 - DNA, 80 bp, synthetic construct; identical to SEQ ID NO: 33171
  misc_feature 1..80: note = Artificially Synthesized Probe
  source 1..80: mol_type = other DNA

SEQ ID NO: 91669 - DNA, 80 bp, synthetic construct
  misc_feature 1..80: note = Artificially Synthesized Probe
  source 1..80: mol_type = other DNA
cggctgttttattaataagatcttctcaactccatatatccttctgcttccataaaactaggaggaaggagagccagctt

SEQ ID NO: 91670 - DNA, 80 bp, synthetic construct
  misc_feature 1..80: note = Artificially Synthesized Probe
  source 1..80: mol_type = other DNA
ccctgtctctactaaaaatacaaaaaattagccgggtgtggtggtgggtgcctgtagtcccagctgctagagaggctgaa

SEQ ID NO: 91671 - DNA, 80 bp, synthetic construct
  misc_feature 1..80: note = Artificially Synthesized Probe
  source 1..80: mol_type = other DNA
gttgagtcctgagcagtcaccttgaagcatgactcttctaacagaaacttccattggcccttccttcgcttatggtaaag

SEQ ID NO: 91672 - DNA, 80 bp, synthetic construct
  misc_feature 1..80: note = Artificially Synthesized Probe
  source 1..80: mol_type = other DNA
gcctggacatcattgttaagtgtgtgtaatttgtctcggtcctgtaccctctaccttcctctctactggaaaagccacca

SEQ ID NO: 91673 - DNA, 80 bp, synthetic construct
  misc_feature 1..80: note = Artificially Synthesized Probe
  source 1..80: mol_type = other DNA
tcctcagtcagtgctgaaattaaaacagaagacatcaagcttattatttcctagaacagaaaaatacaggaagccattta

SEQ ID NO: 91674 - DNA, 80 bp, synthetic construct; identical to SEQ ID NO: 33172
  misc_feature 1..80: note = Artificially Synthesized Probe
  source 1..80: mol_type = other DNA

SEQ ID NO: 91675 - DNA, 80 bp, synthetic construct
  misc_feature 1..80: note = Artificially Synthesized Probe
  source 1..80: mol_type = other DNA
catgtgtccctagatgattgctcaaaaaagaaagcattaaactcctggtgatggggcagacaacagtcctgcagctaaaa

SEQ ID NO: 91676 - DNA, 80 bp, synthetic construct
  misc_feature 1..80: note = Artificially Synthesized Probe
  source 1..80: mol_type = other DNA
cagaaagaggcaaaagcacacgaaaaaatcactcccttcaaagctaagaactgcacaacctgcctcggactgaaaaagac

SEQ ID NO: 91677 - DNA, 80 bp, synthetic construct
  misc_feature 1..80: note = Artificially Synthesized Probe
  source 1..80: mol_type = other DNA
gaaatccctggaaaagtttactggcttggaaagacacacacatctgacagcatattacaataagaattttgtctaggaca

SEQ ID NO: 91678 - DNA, 80 bp, synthetic construct; identical to SEQ ID NO: 33173
  misc_feature 1..80: note = Artificially Synthesized Probe
  source 1..80: mol_type = other DNA

SEQ ID NO: 91679 - DNA, 80 bp, synthetic construct; identical to SEQ ID NO: 33105
  misc_feature 1..80: note = Artificially Synthesized Probe
  source 1..80: mol_type = other DNA

SEQ ID NO: 91680 - DNA, 80 bp, synthetic construct
  misc_feature 1..80: note = Artificially Synthesized Probe
  source 1..80: mol_type = other DNA
cgtcagtgggggtatccatggcttttcatcccagcatccaagcaggtaaatgtctggcacaacttcttaccttgttcaaa

SEQ ID NO: 91681 - DNA, 80 bp, synthetic construct
  misc_feature 1..80: note = Artificially Synthesized Probe
  source 1..80: mol_type = other DNA
ttgatcaagccactggaaattccaaaagaatacacatcacaaaaaatgggtacatatgcaggaacactgtatattttgct

SEQ ID NO: 91682 - DNA, 80 bp, synthetic construct
  misc_feature 1..80: note = Artificially Synthesized Probe
  source 1..80: mol_type = other DNA
acttcctagaaacactgagattatacatacatgtggccaaaaagggatcagaatatcctccttctgccttctgcccaatc

SEQ ID NO: 91683 - DNA, 80 bp, synthetic construct; identical to SEQ ID NO: 33174
  misc_feature 1..80: note = Artificially Synthesized Probe
  source 1..80: mol_type = other DNA

SEQ ID NO: 91684 - DNA, 80 bp, synthetic construct
  misc_feature 1..80: note = Artificially Synthesized Probe
  source 1..80: mol_type = other DNA
gcaggatgcagtatctctaggatgggttcctggtcaggacttcctctcctgctctcagtccatcctctgctggccacagc

SEQ ID NO: 91685 - DNA, 80 bp, synthetic construct
  misc_feature 1..80: note = Artificially Synthesized Probe
  source 1..80: mol_type = other DNA
gctggggaaatctcagagcattcactcctccttatgcctcctaagaacattgctccaacctctcagaatcctcccattcg

SEQ ID NO: 91686 - DNA, 80 bp, synthetic construct
  misc_feature 1..80: note = Artificially Synthesized Probe
  source 1..80: mol_type = other DNA
gctggttcaatgagcaactggatgtgctcagagcttgagtacttgaaagacttctttttcttccttggcttccctctttt

SEQ ID NO: 91687 - DNA, 80 bp, synthetic construct
  misc_feature 1..80: note = Artificially Synthesized Probe
  source 1..80: mol_type = other DNA
atcgtggataaggtaagaaacttacaatggtacacttccaattattccccacatgatttagtctatatgttcaaattttt

SEQ ID NO: 91688 - DNA, 80 bp, synthetic construct; identical to SEQ ID NO: 33175
  misc_feature 1..80: note = Artificially Synthesized Probe
  source 1..80: mol_type = other DNA

SEQ ID NO: 91689 - DNA, 80 bp, synthetic construct
  misc_feature 1..80: note = Artificially Synthesized Probe
  source 1..80: mol_type = other DNA
taagttcaaggggataaaggaatggaaatgagaaatgccgtattctgaccaaaaatcatcattagcaccaactttgaagc

SEQ ID NO: 91690 - DNA, 80 bp, synthetic construct
  misc_feature 1..80: note = Artificially Synthesized Probe
  source 1..80: mol_type = other DNA
ttctgatgagaatgcattagcaatttgtatcactgttcttctagcaagacacagctctttttcctccagtttctcatgag

SEQ ID NO: 91691 - DNA, 80 bp, synthetic construct
  misc_feature 1..80: note = Artificially Synthesized Probe
  source 1..80: mol_type = other DNA
tagctatccttgcttccagtatttgttcctgtagcaatctctccttcctctccttctgtgacttcctacccacatgcagg

SEQ ID NO: 91692 - DNA, 80 bp, synthetic construct; identical to SEQ ID NO: 33176
  misc_feature 1..80: note = Artificially Synthesized Probe
  source 1..80: mol_type = other DNA

SEQ ID NO: 91693 - DNA, 80 bp, synthetic construct
  misc_feature 1..80: note = Artificially Synthesized Probe
  source 1..80: mol_type = other DNA
tttttgccattctaatcatttctgtcatttctaggtctatttgtattgactgatttttcacctggtcatggttcatacta

SEQ ID NO: 91694 - DNA, 80 bp, synthetic construct
  misc_feature 1..80: note = Artificially Synthesized Probe
  source 1..80: mol_type = other DNA
attgacttggaaatgattttaatgcttggagacttgcttttcagttttgccagggtttgtctagagctgcctttttttct

SEQ ID NO: 91695 - DNA, 80 bp, synthetic construct
  misc_feature 1..80: note = Artificially Synthesized Probe
  source 1..80: mol_type = other DNA
agggctctgtcctctttattgagctcactgttcaatcgcagttgctattcctcaggatatattcttttctctactttctt

SEQ ID NO: 91696 - DNA, 80 bp, synthetic construct
  misc_feature 1..80: note = Artificially Synthesized Probe
  source 1..80: mol_type = other DNA
ctttcatccacaaatccattctcattctcagcaggcctataaaatcctagctaccacagtagtcccaaattccaatctct

SEQ ID NO: 91697 - DNA, 80 bp, synthetic construct
  misc_feature 1..80: note = Artificially Synthesized Probe
  source 1..80: mol_type = other DNA
tgtcactattcttttggtccactactgtctgttgtccaacatgtagaaaccatttttccatgtctttggtgtcacttatg

SEQ ID NO: 91698 - DNA, 80 bp, synthetic construct; identical to SEQ ID NO: 33177
  misc_feature 1..80: note = Artificially Synthesized Probe
  source 1..80: mol_type = other DNA

SEQ ID NO: 91699 - DNA, 80 bp, synthetic construct
  misc_feature 1..80: note = Artificially Synthesized Probe
  source 1..80: mol_type = other DNA
tgggaactctaaactcaaaacgtatcagcctatcagagaatgcctccaaaaccccacatttcctaagtgacttgttcaag

SEQ ID NO: 91700 - DNA, 80 bp, synthetic construct
  misc_feature 1..80: note = Artificially Synthesized Probe
  source 1..80: mol_type = other DNA
aaaggctgcattgaaccttagtgggtgttgtggaagggtactctaagagtttcatcatttgtcatcttgacttgtttctt

SEQ ID NO: 91701 - DNA, 80 bp, synthetic construct; identical to SEQ ID NO: 33178
  misc_feature 1..80: note = Artificially Synthesized Probe
  source 1..80: mol_type = other DNA

SEQ ID NO: 91702 - DNA, 80 bp, synthetic construct
  misc_feature 1..80: note = Artificially Synthesized Probe
  source 1..80: mol_type = other DNA
tgaaatgaaaagaaaagaaatcaaactgagtgtttccaagaagagacaaacatgtgaagccacttatggcacaaaccaga

SEQ ID NO: 91703 - DNA, 80 bp, synthetic construct
  misc_feature 1..80: note = Artificially Synthesized Probe
  source 1..80: mol_type = other DNA
gaaatatttcacataaaagcttagaaaaaaaggacaaatgagagggcttctcaatggaaactgtgctcacgtgcaagcac

SEQ ID NO: 91704 - DNA, 80 bp, synthetic construct
  misc_feature 1..80: note = Artificially Synthesized Probe
  source 1..80: mol_type = other DNA
tcttcagcttctgggccatgggagagacaacagtccttcgtctaggactgcagacaaagacacttcagttatcagggatg

SEQ ID NO: 91705 - DNA, 80 bp, synthetic construct; identical to SEQ ID NO: 33179
  misc_feature 1..80: note = Artificially Synthesized Probe
  source 1..80: mol_type = other DNA

SEQ ID NO: 91706 - DNA, 80 bp, synthetic construct
  misc_feature 1..80: note = Artificially Synthesized Probe
  source 1..80: mol_type = other DNA
tctgacagcatgttacaataaaaattttggctaagacactgagatagcccatttttcaacgaggtgagttgtgaagtcga

SEQ ID NO: 91707 - DNA, 80 bp, synthetic construct; identical to SEQ ID NO: 33213
  misc_feature 1..80: note = Artificially Synthesized Probe
  source 1..80: mol_type = other DNA

SEQ ID NO: 91708 - DNA, 80 bp, synthetic construct
  misc_feature 1..80: note = Artificially Synthesized Probe
  source 1..80: mol_type = other DNA
atgatcaagccactggaaattccaaaacgatacacgtcacaagaggtgggacaatatgcaggggcaccccacaccctctc

SEQ ID NO: 91709 - DNA, 80 bp, synthetic construct
  misc_feature 1..80: note = Artificially Synthesized Probe
  source 1..80: mol_type = other DNA
ggctgagccagaaaggcccttctctccttcctagagtgtcagaggattccaggacatcacccctcagttcacagacccag

SEQ ID NO: 91710 - DNA, 80 bp, synthetic construct
  misc_feature 1..80: note = Artificially Synthesized Probe
  source 1..80: mol_type = other DNA
cgcttcttagaaacactgagataatacatacacgtgggcaaaaaacgatcagagtattctccttctgccttctgcccaat

SEQ ID NO: 91711 - DNA, 80 bp, synthetic construct; identical to SEQ ID NO: 33180
  misc_feature 1..80: note = Artificially Synthesized Probe
  source 1..80: mol_type = other DNA

SEQ ID NO: 91712 - DNA, 80 bp, synthetic construct
  misc_feature 1..80: note = Artificially Synthesized Probe
  source 1..80: mol_type = other DNA
gcagaatgcagcatctctagaatgggttcctgggcaggaccttctctcctgctctcagtctaccctctgctggccgcagc

SEQ ID NO: 91713 - DNA, 80 bp, synthetic construct
  misc_feature 1..80: note = Artificially Synthesized Probe
  source 1..80: mol_type = other DNA
cttgaagcatttgctcttccttatgcctcccaagaacgttgctccaacctctctctatcctcacattcatgacctgtggc

SEQ ID NO: 91714 - DNA, 80 bp, synthetic construct
  misc_feature 1..80: note = Artificially Synthesized Probe
  source 1..80: mol_type = other DNA
gagctacaggatgtactaagagcccaaactcgtgacaaatttctttcttccttggcttctctcttttgaatacatggaat

SEQ ID NO: 91715 - DNA, 80 bp, synthetic construct
  misc_feature 1..80: note = Artificially Synthesized Probe
  source 1..80: mol_type = other DNA
aagaaacttacaatggtacacttctaattattccctacatgatttacgctacttgttcaaattcttacctctacatatgc

SEQ ID NO: 91716 - DNA, 80 bp, synthetic construct
  misc_feature 1..80: note = Artificially Synthesized Probe
  source 1..80: mol_type = other DNA
tcttcttctacctaattcctttgggtcacctctcttgttacatcagcctgctgattccaaattcttacagtttccggttt

SEQ ID NO: 91717 - DNA, 80 bp, synthetic construct
  misc_feature 1..80: note = Artificially Synthesized Probe
  source 1..80: mol_type = other DNA
cattagcaatttgtatcactgttcttctagcaagaaacagcttgtttttccccagtttctcataagaagtttcttgttat

SEQ ID NO: 91718 - DNA, 80 bp, synthetic construct
  misc_feature 1..80: note = Artificially Synthesized Probe
  source 1..80: mol_type = other DNA
cggtatttgtttctgtttccaatctcccgttctcttttctgtgacttgcttcccatatgcaggaaatcttttcctatttt

SEQ ID NO: 91719 - DNA, 80 bp, synthetic construct
  misc_feature 1..80: note = Artificially Synthesized Probe
  source 1..80: mol_type = other DNA
ggttagtttcctattcagaaatgtctaaattgatcaggcagccatccagtaattttttcttttaagacatagctttttac

SEQ ID NO: 91720 - DNA, 80 bp, synthetic construct; identical to SEQ ID NO: 33106
  misc_feature 1..80: note = Artificially Synthesized Probe
  source 1..80: mol_type = other DNA

SEQ ID NO: 91721 - DNA, 80 bp, synthetic construct
  misc_feature 1..80: note = Artificially Synthesized Probe
  source 1..80: mol_type = other DNA
tttcgggtcacctctgttgctacataagcctgctgattccaaagtcttacactttccagtttctttgttttgggcagtgc

SEQ ID NO: 91722 - DNA, 80 bp, synthetic construct; identical to SEQ ID NO: 33182
  misc_feature 1..80: note = Artificially Synthesized Probe
  source 1..80: mol_type = other DNA

SEQ ID NO: 91723 - DNA, 80 bp, synthetic construct
  misc_feature 1..80: note = Artificially Synthesized Probe
  source 1..80: mol_type = other DNA
tcccttgctctttactgtgacttgcttcccacatgcaggaaatcttcttatattttcctgcatgtctctgagggtcggtt

SEQ ID NO: 91724 - DNA, 80 bp, synthetic construct
  misc_feature 1..80: note = Artificially Synthesized Probe
  source 1..80: mol_type = other DNA
tggctcattctgtaggttctgcagaattgtttttggttaattttttcttctgaaacatctaaatttttcaggcggacata

SEQ ID NO: 91725 - DNA, 80 bp, synthetic construct; identical to SEQ ID NO: 33183
  misc_feature 1..80: note = Artificially Synthesized Probe
  source 1..80: mol_type = other DNA

SEQ ID NO: 91726 - DNA, 80 bp, synthetic construct
  misc_feature 1..80: note = Artificially Synthesized Probe
  source 1..80: mol_type = other DNA
gctgtgcaaggggttgtctgcagctgcctttattctagtaatatactaattgtactttgaaattatggctgttctggggt

SEQ ID NO: 91727 - DNA, 80 bp, synthetic construct
  misc_feature 1..80: note = Artificially Synthesized Probe
  source 1..80: mol_type = other DNA
gaaccattttctgtgcacatgcagtgtcatgtgaggccaactactggaggagacttctatgcgtatttgtagagctcctt

SEQ ID NO: 91728 - DNA, 80 bp, synthetic construct
  misc_feature 1..80: note = Artificially Synthesized Probe
  source 1..80: mol_type = other DNA
catctatggagttgagctcatcattggccctctctcaattctctaggtcctctaccatctgttgtcccacatgtagaaac

SEQ ID NO: 91729 - DNA, 80 bp, synthetic construct; identical to SEQ ID NO: 33184
  misc_feature 1..80: note = Artificially Synthesized Probe
  source 1..80: mol_type = other DNA

SEQ ID NO: 91730 - DNA, 80 bp, synthetic construct
  misc_feature 1..80: note = Artificially Synthesized Probe
  source 1..80: mol_type = other DNA
cttcattgacgcttagtgggtgttgggcaagggtaatctaagtgtttggtggttcgtcattctgactttcttcataaggt

SEQ ID NO: 91731 - DNA, 80 bp, synthetic construct
  misc_feature 1..80: note = Artificially Synthesized Probe
  source 1..80: mol_type = other DNA
agcttgaagcatgtctcttgtcacagaaacttcagttggccctttattctcttatggtaaagaacaaagacatacgcatt

SEQ ID NO: 91732 - DNA, 80 bp, synthetic construct
  misc_feature 1..80: note = Artificially Synthesized Probe
  source 1..80: mol_type = other DNA
gttttgttttcttttcttttgttgagacagggtcttgatctgtcacccagcctggagtgcagtggcacaatcatagctgc

SEQ ID NO: 91733 - DNA, 80 bp, synthetic construct
  misc_feature 1..80: note = Artificially Synthesized Probe
  source 1..80: mol_type = other DNA
atgaaaacacaagaaataaactgagtatctctgagaataacgaaatatgtgaagccatttatgacacaaccagaaaggag

SEQ ID NO: 91734 - DNA, 80 bp, synthetic construct
  misc_feature 1..80: note = Artificially Synthesized Probe
  source 1..80: mol_type = other DNA
taggaaatatttcacctgaaatccttagaaaaacagaacagaacagactccttctcactgcaaagtgcgctcacgaagta

SEQ ID NO: 91735 - DNA, 80 bp, synthetic construct
  misc_feature 1..80: note = Artificially Synthesized Probe
  source 1..80: mol_type = other DNA
gcttccaggccatggggcagaaaacgatcctatatatctgactgaaggcaaagacactttgcttctcaaggatgtgtgca

SEQ ID NO: 91736 - DNA, 80 bp, synthetic construct
  misc_feature 1..80: note = Artificially Synthesized Probe
  source 1..80: mol_type = other DNA
aaagcctaggactgaagagccttagagcattgggagctcatatactgctccatagacccaggaccatatggaattaatgc

SEQ ID NO: 91737 - DNA, 80 bp, synthetic construct
  misc_feature 1..80: note = Artificially Synthesized Probe
  source 1..80: mol_type = other DNA
tggaaagagtgacacacctgacagcatgttacaataaaaattttggctgggacactgaggtagcccgttttacaacaagg

SEQ ID NO: 91738 - DNA, 80 bp, synthetic construct
  misc_feature 1..80: note = Artificially Synthesized Probe
  source 1..80: mol_type = other DNA
ttgaaggcggctgcatcagtgggaatttccatggcttttcatcccagcatcgaagcgtgtagatgtctggccacagactc

SEQ ID NO: 91739 - DNA, 80 bp, synthetic construct
  misc_feature 1..80: note = Artificially Synthesized Probe
  source 1..80: mol_type = other DNA
ttcctgcagtagttcatgatcaagccactggaaattccaaaacgatacacgtcacaagaggtgggacaacatgcaggggc

SEQ ID NO: 91740 - DNA, 80 bp, synthetic construct
  misc_feature 1..80: note = Artificially Synthesized Probe
  source 1..80: mol_type = other DNA
aaataaaaaatctaaagtagcaaacgcttcttagaaacactgagataacacacacacgtggccgaaaaacgatcagagta

SEQ ID NO: 91741 - DNA, 80 bp, synthetic construct
  misc_feature 1..80: note = Artificially Synthesized Probe
  source 1..80: mol_type = other DNA
ctctctcggtaggacttcatattctaatgtgggagttgcaacgaacatgtagttcttcagaaaacgcacgtcatccagga

SEQ ID NO: 91742 - DNA, 80 bp, synthetic construct
  misc_feature 1..80: note = Artificially Synthesized Probe
  source 1..80: mol_type = other DNA
gctcccaggcaggatgcagtatctctagaaggggttcctaggcaggtccttctctcctgctctcagtctaccctctgctg

SEQ ID NO: 91743 - DNA, 80 bp, synthetic construct
  misc_feature 1..80: note = Artificially Synthesized Probe
  source 1..80: mol_type = other DNA
gagaatagttagcctggaataacaacctttccctgatcatgaatgtggatgaactggtgaacattaagtaagttttacgg

SEQ ID NO: 91744 - DNA, 80 bp, synthetic construct
  misc_feature 1..80: note = Artificially Synthesized Probe
  source 1..80: mol_type = other DNA
gtttgggctgcggggatcttgaagcattcgctcttccttatgcctcccaagaacgttgctccaacctcccagtatcctca

SEQ ID NO: 91745 - DNA, 80 bp, synthetic construct
  misc_feature 1..80: note = Artificially Synthesized Probe
  source 1..80: mol_type = other DNA
tgagctcttgaaagacttctagttcttccttggcttccctcttttgaatgcatggactattcttattataccaaaaacct

SEQ ID NO: 91746 - DNA, 80 bp, synthetic construct
  misc_feature 1..80: note = Artificially Synthesized Probe
  source 1..80: mol_type = other DNA
ttcttacctctacatatgctgaagttaaatatcttgctatcattttgtttcaagtagtcaactctcatttacaaagatat

SEQ ID NO: 91747 - DNA, 80 bp, synthetic construct; identical to SEQ ID NO: 33107
  misc_feature 1..80: note = Artificially Synthesized Probe
  source 1..80: mol_type = other DNA

SEQ ID NO: 91748 - DNA, 80 bp, synthetic construct
  misc_feature 1..80: note = Artificially Synthesized Probe
  source 1..80: mol_type = other DNA
ccaattcttacagtttccggtttctttctttggggcagtgcacaatatgcatttatccgacatggatgaccttcaaggca

SEQ ID NO: 91749 - DNA, 80 bp, synthetic construct
  misc_feature 1..80: note = Artificially Synthesized Probe
  source 1..80: mol_type = other DNA
ttctcgtgacaggtttcttcttattacatctttgccttgttaccttcgaactgtgatgtacaaaagtacatcatacaggt

SEQ ID NO: 91750 - DNA, 80 bp, synthetic construct
  misc_feature 1..80: note = Artificially Synthesized Probe
  source 1..80: mol_type = other DNA
atgcaggaaatcttttcatattttcctacatgtctgtgaggctcgcttaattttatatttcactgtttcttcaggggtgc

SEQ ID NO: 91751 - DNA, 80 bp, synthetic construct
  misc_feature 1..80: note = Artificially Synthesized Probe
  source 1..80: mol_type = other DNA
atttgatcagccggccatacagtaatttttttcaattaagacatactttttttatactagctctttaatttaatttggct

SEQ ID NO: 91752 - DNA, 80 bp, synthetic construct
  misc_feature 1..80: note = Artificially Synthesized Probe
  source 1..80: mol_type = other DNA
ggtcatgggtcacacgaaacgcttttctacatgtagtcagattttaaatttaggactcactctgcggataccgcatagct

SEQ ID NO: 91753 - DNA, 80 bp, synthetic construct
  misc_feature 1..80: note = Artificially Synthesized Probe
  source 1..80: mol_type = other DNA
tttaaattacggctgttctggggtctccactgaattggcaatgtgctccgtgaggactctctggtctagctgggaagaac

SEQ ID NO: 91754 - DNA, 80 bp, synthetic construct
  misc_feature 1..80: note = Artificially Synthesized Probe
  source 1..80: mol_type = other DNA
tctatgcgtatttgtagagctcttttcctccacacaaaccagttcttatttctagcagacctagaaaaatttcagctacc

SEQ ID NO: 91755 - DNA, 80 bp, synthetic construct
  misc_feature 1..80: note = Artificially Synthesized Probe
  source 1..80: mol_type = other DNA
ggtcctctaccatctgttgtcccacatgtagaaaccatttttccatgtctctggtagtcgcttgtggccaaaatattggc

SEQ ID NO: 91756 - DNA, 80 bp, synthetic construct
  misc_feature 1..80: note = Artificially Synthesized Probe
  source 1..80: mol_type = other DNA
ctgacaatcggaatatacgtagatatagaaacagatcaattcacctgtccataaataagcacctattctttcctcttgaa

SEQ ID NO: 91757 - DNA, 80 bp, synthetic construct
  misc_feature 1..80: note = Artificially Synthesized Probe
  source 1..80: mol_type = other DNA
cctcacctccagatttcccttctgctcaatagaactaggaggaaggagagggagcttaacatttcccttctctcagaccc

SEQ ID NO: 91758 - DNA, 80 bp, synthetic construct
  misc_feature 1..80: note = Artificially Synthesized Probe
  source 1..80: mol_type = other DNA
ttagctttagcaaggcaatatctgcttgtgtgggctccaagaacagcctagacacttctatttcctgaacatgagattcg

SEQ ID NO: 91759 - DNA, 80 bp, synthetic construct
  misc_feature 1..80: note = Artificially Synthesized Probe
  source 1..80: mol_type = other DNA
agtattctggggtccgactatgcgagtgtggtgtcatagatgaccaagcttggcaggttcttcctgtgacagtggtggag

SEQ ID NO: 91760 - DNA, 80 bp, synthetic construct; identical to SEQ ID NO: 33190
  misc_feature 1..80: note = Artificially Synthesized Probe
  source 1..80: mol_type = other DNA

SEQ ID NO: 91761 - DNA, 80 bp, synthetic construct
  misc_feature 1..80: note = Artificially Synthesized Probe
  source 1..80: mol_type = other DNA
tttggcaatgcgggctgcaggtggtaattggctgtcgggggcagagtttgggacagacatggaaattttgcatgtttccc

SEQ ID NO: 91762 - DNA, 80 bp, synthetic construct; identical to SEQ ID NO: 33196
  misc_feature 1..80: note = Artificially Synthesized Probe
  source 1..80: mol_type = other DNA

SEQ ID NO: 91763 - DNA, 80 bp, synthetic construct
  misc_feature 1..80: note = Artificially Synthesized Probe
  source 1..80: mol_type = other DNA
cagaatctgcaatgctgaagattgctctgaatgctggctacttgaagaaatccccggaaaagcttactggcttggaaaga

SEQ ID NO: 91764 - DNA, 80 bp, synthetic construct; identical to SEQ ID NO: 33186
  misc_feature 1..80: note = Artificially Synthesized Probe
  source 1..80: mol_type = other DNA

SEQ ID NO: 91765 - DNA, 80 bp, synthetic construct
  misc_feature 1..80: note = Artificially Synthesized Probe
  source 1..80: mol_type = other DNA
gtcaggttgcagtactcccacctgacaccgggatccctcgtataacaataaggagctgccacagcatctggattcctgca

SEQ ID NO: 91766 - DNA, 80 bp, synthetic construct
  misc_feature 1..80: note = Artificially Synthesized Probe
  source 1..80: mol_type = other DNA
gcaaaaatggctctcgatcactaatcctctctgcacatctctcatacttaatagattattactattttttttaaataaaa

SEQ ID NO: 91767 - DNA, 80 bp, synthetic construct
  misc_feature 1..80: note = Artificially Synthesized Probe
  source 1..80: mol_type = other DNA
caaatgcatctgtatctgtctagtctccgtatctctctcggtaggacttcatattctaatgtgggagttgcaacgaacat

SEQ ID NO: 91768 - DNA, 80 bp, synthetic construct
  misc_feature 1..80: note = Artificially Synthesized Probe
  source 1..80: mol_type = other DNA
ccaagacttctcaaagctgccctggaaaacttgctcccaggcaggatgcagtatctctagaaggggttcctaggcaggtc

SEQ ID NO: 91769 - DNA, 80 bp, synthetic construct
  misc_feature 1..80: note = Artificially Synthesized Probe
  source 1..80: mol_type = other DNA
gaatcagtgacttatgagtggcaagaaacaaaattcacaatttgctggaaactgacagttaaggtctgttctcaatctgt

SEQ ID NO: 91770 - DNA, 80 bp, synthetic construct
  misc_feature 1..80: note = Artificially Synthesized Probe
  source 1..80: mol_type = other DNA
aaaaatgcattagggggcaaagcaggcgagtagtttgggctgcggggatcttgaagcattcgctcttccttatgcctccc

SEQ ID NO: 91771 - DNA, 80 bp, synthetic construct; identical to SEQ ID NO: 33187
  misc_feature 1..80: note = Artificially Synthesized Probe
  source 1..80: mol_type = other DNA

SEQ ID NO: 91772 - DNA, 80 bp, synthetic construct
  misc_feature 1..80: note = Artificially Synthesized Probe
  source 1..80: mol_type = other DNA
aatcccttcgtgatttatgctaccatttcaaattcttacctctacatatgctgaagttaaatatcttgctatcattttgt

SEQ ID NO: 91773 - DNA, 80 bp, synthetic construct
  misc_feature 1..80: note = Artificially Synthesized Probe
  source 1..80: mol_type = other DNA
tcacctctcttgttacataagcctgctgatttccaattcttacagtttccggtttctttctttggggcagtgcacaatat

SEQ ID NO: 91774 - DNA, 80 bp, synthetic construct
  misc_feature 1..80: note = Artificially Synthesized Probe
  source 1..80: mol_type = other DNA
ttgtaggaagacacagctctttttcctccagtttctcgtgacaggtttcttcttattatatctttgccttgttaccttcg

SEQ ID NO: 91775 - DNA, 80 bp, synthetic construct
  misc_feature 1..80: note = Artificially Synthesized Probe
  source 1..80: mol_type = other DNA
tcccttgctctttactgtgacttgcttcccacatgcaggaaatcttttcatattttcctacatgtctgtgaggctcgctt

SEQ ID NO: 91776 - DNA, 80 bp, synthetic construct
  misc_feature 1..80: note = Artificially Synthesized Probe
  source 1..80: mol_type = other DNA
ggtaatgttttcctctgaaacgtctaaattgatcagccggccatacagtaatttttttcaattaagacatacttttttta

SEQ ID NO: 91777 - DNA, 80 bp, synthetic construct
  misc_feature 1..80: note = Artificially Synthesized Probe
  source 1..80: mol_type = other DNA
tgtttgtattacccgatttatttcctggtcatgggtcacacgaaacgcttttctacatgtagtcagattttaaatttagg

SEQ ID NO: 91778 - DNA, 80 bp, synthetic construct
  misc_feature 1..80: note = Artificially Synthesized Probe
  source 1..80: mol_type = other DNA
tattctagtaatatactaagtgtacctttaaattacggctgttctggggtctccactgaattggcaatgtgctccgtgag

SEQ ID NO: 91779 - DNA, 80 bp, synthetic construct
  misc_feature 1..80: note = Artificially Synthesized Probe
  source 1..80: mol_type = other DNA
tgtcaggccaacgactggaggagacttctatgcgtatttgtagagctcttttcctccacacaaaccagttcttatttcta

SEQ ID NO: 91780 - DNA, 80 bp, synthetic construct
  misc_feature 1..80: note = Artificially Synthesized Probe
  source 1..80: mol_type = other DNA
agctctcactcttagttcttgcaaagtctggtcatttggtattgtgcagcacccccaccccatctctctctgtctcttgc

SEQ ID NO: 91781 - DNA, 80 bp, synthetic construct
  misc_feature 1..80: note = Artificially Synthesized Probe
  source 1..80: mol_type = other DNA
atcattgcccctctctcaattctctaggtcctctaccatctgttgtcccacatgtagaaaccatttttccatgtctctgg

SEQ ID NO: 91782 - DNA, 80 bp, synthetic construct
  misc_feature 1..80: note = Artificially Synthesized Probe
  source 1..80: mol_type = other DNA
actggtacttaggaacgagtgtttttctgacaatcggaatatacgtagatatagaaacagatcaattcacctgtccataa

SEQ ID NO: 91783 - DNA, 80 bp, synthetic construct
  misc_feature 1..80: note = Artificially Synthesized Probe
  source 1..80: mol_type = other DNA
ttctgactttcttcataatgtgatcttctcacctccagatttcccttctgctcaatagaactaggaggaaggagagggag

SEQ ID NO: 91784 - DNA, 80 bp, synthetic construct
  misc_feature 1..80: note = Artificially Synthesized Probe
  source 1..80: mol_type = other DNA
aagaacaaagacatacgcatttgggtagtattctggggtccgactatgcgagtgtggtgtcatagatgaccaagcttggc

SEQ ID NO: 91785 - DNA, 80 bp, synthetic construct
  misc_feature 1..80: note = Artificially Synthesized Probe
  source 1..80: mol_type = other DNA
ttgtgacacaaccagaaaggagtctatgagaattacgaccgttctcttttccttatccataggcagatggatgtgagaaa

SEQ ID NO: 91786 - DNA, 80 bp, synthetic construct
  misc_feature 1..80: note = Artificially Synthesized Probe
  source 1..80: mol_type = other DNA
tgaatcttcatgcaaacggcaccgcatttggcaatgcgggctgcaggtggtaattggctgtcgggggaagagtttgggac

SEQ ID NO: 91787 - DNA, 80 bp, synthetic construct
  misc_feature 1..80: note = Artificially Synthesized Probe
  source 1..80: mol_type = other DNA
aggagagagggaatcctctcatgccctgcatcctgaattgtagtaaagtaggagtctactactctttctctctagacccc

SEQ ID NO: 91788 - DNA, 80 bp, synthetic construct
  misc_feature 1..80: note = Artificially Synthesized Probe
  source 1..80: mol_type = other DNA
aacacttagactggggtcttccactgacaaaaccttcctgaatttgccactttgggactgacgtctaagggactgagact

SEQ ID NO: 91789 - DNA, 80 bp, synthetic construct
  misc_feature 1..80: note = Artificially Synthesized Probe
  source 1..80: mol_type = other DNA
gtgacaggctccagagccacatttctcagaatctgcaatgctgaagattgctctgaatgctggctacttgaagaaatccc

SEQ ID NO: 91790 - DNA, 80 bp, synthetic construct
  misc_feature 1..80: note = Artificially Synthesized Probe
  source 1..80: mol_type = other DNA
gttgcaccagaaatcactccgctggctcccccagagagtgcacggaggcttcctcctacatggtagaactcaggcaacac

SEQ ID NO: 91791 - DNA, 80 bp, synthetic construct
  misc_feature 1..80: note = Artificially Synthesized Probe
  source 1..80: mol_type = other DNA
cagtcccttctgcgtctgagcattgcgtcaggttgcagtactcccacctgacaccgggatccctcgtataacaataagga

SEQ ID NO: 91792 - DNA, 80 bp, synthetic construct; identical to SEQ ID NO: 33108
  misc_feature 1..80: note = Artificially Synthesized Probe
  source 1..80: mol_type = other DNA

SEQ ID NO: 91793 - DNA, 80 bp, synthetic construct
  misc_feature 1..80: note = Artificially Synthesized Probe
  source 1..80: mol_type = other DNA
ttaaaagtaccatatgattgccaccagcaaaaatggctctcgatcactaatcctctctgcacatctctcatacttaatag

SEQ ID NO: 91794 - DNA, 80 bp, synthetic construct
  misc_feature 1..80: note = Artificially Synthesized Probe
  source 1..80: mol_type = other DNA
gtattgtgggattgtgtattcacatgcaaatgcatctgtatctgtctagtctccgtatctctctcggtaggacttcatat

SEQ ID NO: 91795 - DNA, 80 bp, synthetic construct
  misc_feature 1..80: note = Artificially Synthesized Probe
  source 1..80: mol_type = other DNA
ctgtcaggtttagtaggtttgtttctccaagacttctcaaagctgccctggaaaacttgctcccaggcaggatgcagtat

SEQ ID NO: 91796 - DNA, 80 bp, synthetic construct
  misc_feature 1..80: note = Artificially Synthesized Probe
  source 1..80: mol_type = other DNA
ggtcggacagctacggagcagcagagaaaaatgcattagggggcaaagcaggcgagtagtttgggctgcggggatcttga

SEQ ID NO: 91797 - DNA, 80 bp, synthetic construct
  misc_feature 1..80: note = Artificially Synthesized Probe
  source 1..80: mol_type = other DNA
accccagaccctccattccaggaagctggttcaatgagcaactggatgtataagagcctgagctcttgaaagacttctag

SEQ ID NO: 91798 - DNA, 80 bp, synthetic construct
  misc_feature 1..80: note = Artificially Synthesized Probe
  source 1..80: mol_type = other DNA
aaacttacaacggtacacttcgaattaatcccttcgtgatttatgctaccatttcaaattcttacctctacatatgctga

SEQ ID NO: 91799 - DNA, 80 bp, synthetic construct; identical to SEQ ID NO: 33181
  misc_feature 1..80: note = Artificially Synthesized Probe
  source 1..80: mol_type = other DNA

SEQ ID NO: 91800 - DNA, 80 bp, synthetic construct; identical to SEQ ID NO: 33193
  misc_feature 1..80: note = Artificially Synthesized Probe
  source 1..80: mol_type = other DNA

SEQ ID NO: 91801 - DNA, 80 bp, synthetic construct
  misc_feature 1..80: note = Artificially Synthesized Probe
  source 1..80: mol_type = other DNA
ttctggtatttgtttctattccaaactcccttgctctttactgtgacttgcttcccacatgcaggaaatcttttcatatt

SEQ ID NO: 91802 - DNA, 80 bp, synthetic construct
  misc_feature 1..80: note = Artificially Synthesized Probe
  source 1..80: mol_type = other DNA
tgtaggttctctagaattgtgtgttgggtaatgttttcctctgaaacgtctaaattgatcagccggccatacagtaattt

SEQ ID NO: 91803 - DNA, 80 bp, synthetic construct
  misc_feature 1..80: note = Artificially Synthesized Probe
  source 1..80: mol_type = other DNA
ggaaggaaggggagggtgggaagaaagaagggatggaggaagagagggaggaaaaaagtcttgaagataagaccccatgt

SEQ ID NO: 91804 - DNA, 80 bp, synthetic construct
  misc_feature 1..80: note = Artificially Synthesized Probe
  source 1..80: mol_type = other DNA
ctaatcatttctctcattcctgagcctgtttgtattacccgatttatttcctggtcatgggtcacacgaaacgcttttct

SEQ ID NO: 91805 - DNA, 80 bp, synthetic construct
  misc_feature 1..80: note = Artificially Synthesized Probe
  source 1..80: mol_type = other DNA
tgcaaggggttgtctgcagctgactttattctagtaatatactaagtgtacctttaaattacggctgttctggggtctcc

SEQ ID NO: 91806 - DNA, 80 bp, synthetic construct
  misc_feature 1..80: note = Artificially Synthesized Probe
  source 1..80: mol_type = other DNA
ccatttcctgtgcacaggcagcgtcatgtcaggccaacgactggaggagacttctatgcgtatttgtagagctcttttcc

SEQ ID NO: 91807 - DNA, 80 bp, synthetic construct
  misc_feature 1..80: note = Artificially Synthesized Probe
  source 1..80: mol_type = other DNA
caaggcatctgcggagtggagcccatcattgcccctctctcaattctctaggtcctctaccatctgttgtcccacatgta

SEQ ID NO: 91808 - DNA, 80 bp, synthetic construct; identical to SEQ ID NO: 91309
  misc_feature 1..80: note = Artificially Synthesized Probe
  source 1..80: mol_type = other DNA

SEQ ID NO: 91809 - DNA, 80 bp, synthetic construct; identical to SEQ ID NO: 91310
  misc_feature 1..80: note = Artificially Synthesized Probe
  source 1..80: mol_type = other DNA

SEQ ID NO: 91810 - DNA, 80 bp, synthetic construct; identical to SEQ ID NO: 91311
  misc_feature 1..80: note = Artificially Synthesized Probe
  source 1..80: mol_type = other DNA

SEQ ID NO: 91811 - DNA, 80 bp, synthetic construct; identical to SEQ ID NO: 91312
  misc_feature 1..80: note = Artificially Synthesized Probe
  source 1..80: mol_type = other DNA

SEQ ID NO: 91812 - DNA, 80 bp, synthetic construct; identical to SEQ ID NO: 91314
  misc_feature 1..80: note = Artificially Synthesized Probe
  source 1..80: mol_type = other DNA

SEQ ID NO: 91813 - DNA, 80 bp, synthetic construct; identical to SEQ ID NO: 91315
  misc_feature 1..80: note = Artificially Synthesized Probe
  source 1..80: mol_type = other DNA

SEQ ID NO: 91814 - DNA, 80 bp, synthetic construct
  misc_feature 1..80: note = Artificially Synthesized Probe
  source 1..80: mol_type = other DNA
agccaggaagacaagttcactcagttttgatcatgttcatattcccaaagcaaaggactaccgcccaacgtcaggatagt

SEQ ID NO: 91815 - DNA, 80 bp, synthetic construct; identical to SEQ ID NO: 91316
  misc_feature 1..80: note = Artificially Synthesized Probe
  source 1..80: mol_type = other DNA

SEQ ID NO: 91816 - DNA, 80 bp, synthetic construct; identical to SEQ ID NO: 91317
  misc_feature 1..80: note = Artificially Synthesized Probe
  source 1..80: mol_type = other DNA

SEQ ID NO: 91817 - DNA, 80 bp, synthetic construct; identical to SEQ ID NO: 91318
  misc_feature 1..80: note = Artificially Synthesized Probe
  source 1..80: mol_type = other DNA

SEQ ID NO: 91818 - DNA, 80 bp, synthetic construct; identical to SEQ ID NO: 91319
  misc_feature 1..80: note = Artificially Synthesized Probe
  source 1..80: mol_type = other DNA

SEQ ID NO: 91819 - DNA, 80 bp, synthetic construct; identical to SEQ ID NO: 33197
  misc_feature 1..80: note = Artificially Synthesized Probe
  source 1..80: mol_type = other DNA

SEQ ID NO: 91820 - DNA, 80 bp, synthetic construct
  misc_feature 1..80: note = Artificially Synthesized Probe
  source 1..80: mol_type = other DNA
gcattgtgcaaatagtattactgtctgtcaggtttagtaggtttgtttctccaagacttctcaaagctgccctggaaaac

SEQ ID NO: 91821 - DNA, 80 bp, synthetic construct; identical to SEQ ID NO: 33192
  misc_feature 1..80: note = Artificially Synthesized Probe
  source 1..80: mol_type = other DNA

SEQ ID NO: 91822 - DNA, 80 bp, synthetic construct
  misc_feature 1..80: note = Artificially Synthesized Probe
  source 1..80: mol_type = other DNA
ctctagacttgtggcctagtctcaaccccagaccctccattccaggaagctggttcaatgagcaactggatgtataagag

SEQ ID NO: 91823 - DNA, 80 bp, synthetic construct
  misc_feature 1..80: note = Artificially Synthesized Probe
  source 1..80: mol_type = other DNA
cacaccatcgtgcatgaggtaaagaaacttacaacggtacacttcgaattaatcccttcgtgatttatgctaccatttca

SEQ ID NO: 91824 - DNA, 80 bp, synthetic construct; identical to SEQ ID NO: 33198
  misc_feature 1..80: note = Artificially Synthesized Probe
  source 1..80: mol_type = other DNA

SEQ ID NO: 91825 - DNA, 80 bp, synthetic construct
  misc_feature 1..80: note = Artificially Synthesized Probe
  source 1..80: mol_type = other DNA
agaggtgtccgtcaggccgtgtgtcccaggccgtcgaccccgctgtcgcgctgcgtctgctccttgcatgcctttagatg

SEQ ID NO: 91826 - DNA, 80 bp, synthetic construct; identical to SEQ ID NO: 33248
  misc_feature 1..80: note = Artificially Synthesized Probe
  source 1..80: mol_type = other DNA

SEQ ID NO: 91827 - DNA, 80 bp, synthetic construct
  misc_feature 1..80: note = Artificially Synthesized Probe
  source 1..80: mol_type = other DNA
ttacaggcacgtgccaccacacccggctaatttttgtatttttagtagggacggggtttctccatgttggccaggctggt

SEQ ID NO: 91828 - DNA, 80 bp, synthetic construct
  misc_feature 1..80: note = Artificially Synthesized Probe
  source 1..80: mol_type = other DNA
ggatttctggactggtaacgttctcagccccacctgtaccttagactgttgcttggagagcttttacaaaataccattgt

SEQ ID NO: 91829 - DNA, 80 bp, synthetic construct
  misc_feature 1..80: note = Artificially Synthesized Probe
  source 1..80: mol_type = other DNA
agcacaccaatgtggcacatctatacatatgtaacaaacctgcacgttgtgcacatgtaccctagaacttaaagtataat

SEQ ID NO: 91830 - DNA, 80 bp, synthetic construct
  misc_feature 1..80: note = Artificially Synthesized Probe
  source 1..80: mol_type = other DNA
tgcagaaccatttgatgctttgttttcagcgcatcttcttgtggcaaagaacccaaaaatcagttctgcttatttatgta

SEQ ID NO: 91831 - DNA, 80 bp, synthetic construct; identical to SEQ ID NO: 33249
  misc_feature 1..80: note = Artificially Synthesized Probe
  source 1..80: mol_type = other DNA

SEQ ID NO: 91832 - DNA, 80 bp, synthetic construct
  misc_feature 1..80: note = Artificially Synthesized Probe
  source 1..80: mol_type = other DNA
ccgccaccatgcccggctgattttttatatttttagtagagacggggtttcaccgtgttagccaagatggtctcgatctc

SEQ ID NO: 91833 - DNA, 80 bp, synthetic construct
  misc_feature 1..80: note = Artificially Synthesized Probe
  source 1..80: mol_type = other DNA
aaatgttttgcattttccaattaaaacaaaatcagcacatgagtaatcaaaggattacttgtatattaagataatcactt

SEQ ID NO: 91834 - DNA, 80 bp, synthetic construct
  misc_feature 1..80: note = Artificially Synthesized Probe
  source 1..80: mol_type = other DNA
agaaatactctgaaagcattcttatatttcctatgctagagaaaatgactcaacacatttattctgtattatttcagtca

SEQ ID NO: 91835 - DNA, 80 bp, synthetic construct; identical to SEQ ID NO: 33250
  misc_feature 1..80: note = Artificially Synthesized Probe
  source 1..80: mol_type = other DNA

SEQ ID NO: 91836 - DNA, 80 bp, synthetic construct
  misc_feature 1..80: note = Artificially Synthesized Probe
  source 1..80: mol_type = other DNA
gcccaggctggagtgcaatggtgggatctctgctcaccgcaacctccgcctcccgggttcaagtgattctcctgcttcgg

SEQ ID NO: 91837 - DNA, 80 bp, synthetic construct
  misc_feature 1..80: note = Artificially Synthesized Probe
  source 1..80: mol_type = other DNA
cgtgaaccactgtgcgcggtctatcctgaagatctttacctaatgtttatccaatatagctagccatttctagttcaacc

SEQ ID NO: 91838 - DNA, 80 bp, synthetic construct
  misc_feature 1..80: note = Artificially Synthesized Probe
  source 1..80: mol_type = other DNA
gaagactgaaagttccaagaagtgagagcttttagtgtaaagctgttagttgtagagggaaagccaacttacaagagcag

SEQ ID NO: 91839 - DNA, 80 bp, synthetic construct; identical to SEQ ID NO: 33251
  misc_feature 1..80: note = Artificially Synthesized Probe
  source 1..80: mol_type = other DNA

SEQ ID NO: 91840 - DNA, 80 bp, synthetic construct
  misc_feature 1..80: note = Artificially Synthesized Probe
  source 1..80: mol_type = other DNA
gatccacacgcctcggtctcccaaagtgctgtgattacaggcatgagccactgtgcccggccgagtattatttttaaaac

SEQ ID NO: 91841 - DNA, 80 bp, synthetic construct
  misc_feature 1..80: note = Artificially Synthesized Probe
  source 1..80: mol_type = other DNA
ggcttcttaaccactaacatacagttatttctcgtcactaactgagcagcacgtttattaactgacagatttctgatgga

SEQ ID NO: 91842 - DNA, 80 bp, synthetic construct
  misc_feature 1..80: note = Artificially Synthesized Probe
  source 1..80: mol_type = other DNA
tgatttaacttttacaaagggcctctttgtcagaagttgctgaagttcccggttcagcctattattgctgcatattcttg

SEQ ID NO: 91843 - DNA, 80 bp, synthetic construct
  misc_feature 1..80: note = Artificially Synthesized Probe
  source 1..80: mol_type = other DNA
atggtactaaacgactacattaatggcacctctggctccacatgatatcaaggacattaataattcatcatttattacag

SEQ ID NO: 91844 - DNA, 80 bp, synthetic construct; identical to SEQ ID NO: 33252
  misc_feature 1..80: note = Artificially Synthesized Probe
  source 1..80: mol_type = other DNA

SEQ ID NO: 91845 - DNA, 80 bp, synthetic construct
  misc_feature 1..80: note = Artificially Synthesized Probe
  source 1..80: mol_type = other DNA
gggatatttgaaagagagttctccatttcaggactcctgctttttaaaaaaaaattatgcaaaccacctggaattaatgg

SEQ ID NO: 91846 - DNA, 80 bp, synthetic construct
  misc_feature 1..80: note = Artificially Synthesized Probe
  source 1..80: mol_type = other DNA
cagtggcacgatcgcagctcactgcaacctccacctcctgggttcaagcgattctcctgcctcagcctcccgagtacctg

SEQ ID NO: 91847 - DNA, 80 bp, synthetic construct
  misc_feature 1..80: note = Artificially Synthesized Probe
  source 1..80: mol_type = other DNA
ctggccccgaagtcttcatattttagtcttctgtcttttgggaggtacttttaaaaaaagaaataggaaaggcatgctta

SEQ ID NO: 91848 - DNA, 80 bp, synthetic construct; identical to SEQ ID NO: 33253
  misc_feature 1..80: note = Artificially Synthesized Probe
  source 1..80: mol_type = other DNA

SEQ ID NO: 91849 - DNA, 80 bp, synthetic construct
  misc_feature 1..80: note = Artificially Synthesized Probe
  source 1..80: mol_type = other DNA
ttcacctttagtgttttttaatcttaataaatgtgggtttgttttagagggtccagagagcctcattatatggggctctg

SEQ ID NO: 91850 - DNA, 80 bp, synthetic construct
  misc_feature 1..80: note = Artificially Synthesized Probe
  source 1..80: mol_type = other DNA
ggagaaaattactctttcccaaaacagaggacactggacagttttcactaataccaaatactaagttatttataacgtat

SEQ ID NO: 91851 - DNA, 80 bp, synthetic construct
  misc_feature 1..80: note = Artificially Synthesized Probe
  source 1..80: mol_type = other DNA
atgaacactgttaggattaaaatgaaagcccttaatctggaaggggaaaactgctaagttatagtagtcaccagatacaa

SEQ ID NO: 91852 - DNA, 80 bp, synthetic construct
  misc_feature 1..80: note = Artificially Synthesized Probe
  source 1..80: mol_type = other DNA
ttcacttatatttttatacgagtgtatgtgtttattgtttagtagcaagagtgaattggatgaagtatctgaatatgaga

SEQ ID NO: 91853 - DNA, 80 bp, synthetic construct
  misc_feature 1..80: note = Artificially Synthesized Probe
  source 1..80: mol_type = other DNA
gctgggtgtggtggtgtgcgcctgtagtcccagctactcgggaggctgaggcaggagaatcgcttgaacccgggaggtgg

SEQ ID NO: 91854 - DNA, 80 bp, synthetic construct; identical to SEQ ID NO: 33254
  misc_feature 1..80: note = Artificially Synthesized Probe
  source 1..80: mol_type = other DNA

SEQ ID NO: 91855 - DNA, 80 bp, synthetic construct
  misc_feature 1..80: note = Artificially Synthesized Probe
  source 1..80: mol_type = other DNA
gcattccacctcagccttgtaaagatgccagaagcatcaaggtgaatttttaaagcctatttaactatttagacttgact

SEQ ID NO: 91856 - DNA, 80 bp, synthetic construct
  misc_feature 1..80: note = Artificially Synthesized Probe
  source 1..80: mol_type = other DNA
ctcataagattgttgtgtggatttagccagttaatatgtgtcaggtgcatagaagaatgcctgtctgcctttataaatgc

SEQ ID NO: 91857 - DNA, 80 bp, synthetic construct
  misc_feature 1..80: note = Artificially Synthesized Probe
  source 1..80: mol_type = other DNA
cctcactacaacctccgcctcaagggttcaagtgattctcctgcctcagcctcccgagtagctgggattacaggtgcgtg

SEQ ID NO: 91858 - DNA, 80 bp, synthetic construct; identical to SEQ ID NO: 33255
  misc_feature 1..80: note = Artificially Synthesized Probe
  source 1..80: mol_type = other DNA

SEQ ID NO: 91859 - DNA, 80 bp, synthetic construct
  misc_feature 1..80: note = Artificially Synthesized Probe
  source 1..80: mol_type = other DNA
tttgctgtacatgcataaaatatccagaagtctgcacaataaatggcatattttcatttgttgttactgggaaggggaat

SEQ ID NO: 91860 - DNA, 80 bp, synthetic construct
  misc_feature 1..80: note = Artificially Synthesized Probe
  source 1..80: mol_type = other DNA
tgggtggctggaaacaaaagtgggagactttttacactttttgataattggaccatgtgaatatattcccaaactcagaa

SEQ ID NO: 91861 - DNA, 80 bp, synthetic construct; identical to SEQ ID NO: 33256
  misc_feature 1..80: note = Artificially Synthesized Probe
  source 1..80: mol_type = other DNA

SEQ ID NO: 91862 - DNA, 80 bp, synthetic construct
  misc_feature 1..80: note = Artificially Synthesized Probe
  source 1..80: mol_type = other DNA
actccagcctgggcgacagagcgagactccgtctcaaaaagaaaacaaaaaaattttttttttttttgagacagaatctt

SEQ ID NO: 91863 - DNA, 80 bp, synthetic construct
  misc_feature 1..80: note = Artificially Synthesized Probe
  source 1..80: mol_type = other DNA
ggtttcaccaggtgattcttgaactcctgacctcaggtgatctgccacacctggcaaatatttgtatttttagtagagat

SEQ ID NO: 91864 - DNA, 80 bp, synthetic construct; identical to SEQ ID NO: 33239
  misc_feature 1..80: note = Artificially Synthesized Probe
  source 1..80: mol_type = other DNA

SEQ ID NO: 91865 - DNA, 80 bp, synthetic construct
  misc_feature 1..80: note = Artificially Synthesized Probe
  source 1..80: mol_type = other DNA
gactaaactaagaatgatattttgtcctctttcagggatttcagtcataatcggttgtctaactggaacatcagcttgga

SEQ ID NO: 91866 - DNA, 80 bp, synthetic construct; identical to SEQ ID NO: 33257
  misc_feature 1..80: note = Artificially Synthesized Probe
  source 1..80: mol_type = other DNA

SEQ ID NO: 91867 - DNA, 80 bp, synthetic construct
  misc_feature 1..80: note = Artificially Synthesized Probe
  source 1..80: mol_type = other DNA
gccagtgaaactctgttgtataacctttttaaatgtcttgacatgttatctaagattgggagcatcatgtctaaagtaga

SEQ ID NO: 91868 - DNA, 80 bp, synthetic construct
  misc_feature 1..80: note = Artificially Synthesized Probe
  source 1..80: mol_type = other DNA
acattcctagaggcacaaccgttaaggtatataggcctatttgcctctacaattaacaccatcagaaccctgagatttac

SEQ ID NO: 91869 - DNA, 80 bp, synthetic construct
  misc_feature 1..80: note = Artificially Synthesized Probe
  source 1..80: mol_type = other DNA
aaaatgcttcagtgggaagtgcatgagctttattgcatggactttgtaactttggttggtttcctgaaggtctttacttc

SEQ ID NO: 91870 - DNA, 80 bp, synthetic construct; identical to SEQ ID NO: 33258
  misc_feature 1..80: note = Artificially Synthesized Probe
  source 1..80: mol_type = other DNA

SEQ ID NO: 91871 - DNA, 80 bp, synthetic construct
  misc_feature 1..80: note = Artificially Synthesized Probe
  source 1..80: mol_type = other DNA
aaatacttcataacctttctgatattaatatcaatagtagatcaacactatgaaaatacatttcttggccaggcatggtg

SEQ ID NO: 91872 - DNA, 80 bp, synthetic construct
  misc_feature 1..80: note = Artificially Synthesized Probe
  source 1..80: mol_type = other DNA
ggagactgaggtaggagaatcacttgaacccaggaggcagaggttgcagtgagccaagattgcaccattgcactccagcc

SEQ ID NO: 91873 - DNA, 80 bp, synthetic construct
  misc_feature 1..80: note = Artificially Synthesized Probe
  source 1..80: mol_type = other DNA
gaatatgtgttagccagaaggtagaatccaagaggtaatatttccctcactaaacatttaaatctgtttttcctcttgcc

SEQ ID NO: 91874 - DNA, 80 bp, synthetic construct
  misc_feature 1..80: note = Artificially Synthesized Probe
  source 1..80: mol_type = other DNA
gaaaatggcgccggcgcccctaggcgtcccggaggagcagttgctggggtgtcgatctagagtgctttctcggttactct

SEQ ID NO: 91875 - DNA, 80 bp, synthetic construct; identical to SEQ ID NO: 33259
  misc_feature 1..80: note = Artificially Synthesized Probe
  source 1..80: mol_type = other DNA

SEQ ID NO: 91876 - DNA, 80 bp, synthetic construct
  misc_feature 1..80: note = Artificially Synthesized Probe
  source 1..80: mol_type = other DNA
catgtttatggggactgttgtggggtggggggagggggcagggatagcactgggagatatacctaatgctagatgacgag

SEQ ID NO: 91877 - DNA, 80 bp, synthetic construct
  misc_feature 1..80: note = Artificially Synthesized Probe
  source 1..80: mol_type = other DNA
aggttgaagtgcaattaaaatatgagaggctgcttggatttttattggaaatagaatacaaataagaggtgttgcggagt

SEQ ID NO: 91878 - DNA, 80 bp, synthetic construct
  misc_feature 1..80: note = Artificially Synthesized Probe
  source 1..80: mol_type = other DNA
tatttggttatttattgtgctttttatatgcatatgtgagacaaacctagagttggtgtgttgggtggttggctttgcca

SEQ ID NO: 91879 - DNA, 80 bp, synthetic construct
  misc_feature 1..80: note = Artificially Synthesized Probe
  source 1..80: mol_type = other DNA
gataattagcatgtgtgccagtgttttccagtttacaaagcatattcacacatgctgttttgtaacaacctaaatgaagt

SEQ ID NO: 91880 - DNA, 80 bp, synthetic construct
  misc_feature 1..80: note = Artificially Synthesized Probe
  source 1..80: mol_type = other DNA
taaatgatttataaagttgtggatgggcattaagtgatagagctgggggcttagacatagatttttggcagctttctagt

SEQ ID NO: 91881 - DNA, 80 bp, synthetic construct; identical to SEQ ID NO: 33260
  misc_feature 1..80: note = Artificially Synthesized Probe
  source 1..80: mol_type = other DNA

SEQ ID NO: 91882 - DNA, 80 bp, synthetic construct
  misc_feature 1..80: note = Artificially Synthesized Probe
  source 1..80: mol_type = other DNA
gaaggtcttacattccaagggcttgactccttaagatctttgaaaatgcagcggaatggaattagcaaacttaaggatgg

SEQ ID NO: 91883 - DNA, 80 bp, synthetic construct
  misc_feature 1..80: note = Artificially Synthesized Probe
  source 1..80: mol_type = other DNA
tatagagatacattcattcattccctggtcactgatgtgaagtaagcgtacataaaacctttaaagttttgttagctaac

SEQ ID NO: 91884 - DNA, 80 bp, synthetic construct
  misc_feature 1..80: note = Artificially Synthesized Probe
  source 1..80: mol_type = other DNA
ctgtctcagccttctgagtagctgggattacaggcgtgtgccaccaggcccggctgatttttgtatttttagtagagatg

SEQ ID NO: 91885 - DNA, 80 bp, synthetic construct; identical to SEQ ID NO: 33261
  misc_feature 1..80: note = Artificially Synthesized Probe
  source 1..80: mol_type = other DNA

SEQ ID NO: 91886 - DNA, 80 bp, synthetic construct
  misc_feature 1..80: note = Artificially Synthesized Probe
  source 1..80: mol_type = other DNA
cgtgcccagttaatttttgtatttttagtagagatggggttttaccatgttggtcagggtggtcttgatcttttgacctt

SEQ ID NO: 91887 - DNA, 80 bp, synthetic construct
  misc_feature 1..80: note = Artificially Synthesized Probe
  source 1..80: mol_type = other DNA
gttgggttgaacaaaggtatatgcttctctgggaaaaacttaagatttaaagctagttattgaactgccttgttttggaa

SEQ ID NO: 91888 - DNA, 80 bp, synthetic construct; identical to SEQ ID NO: 33262
  misc_feature 1..80: note = Artificially Synthesized Probe
  source 1..80: mol_type = other DNA

SEQ ID NO: 91889 - DNA, 80 bp, synthetic construct
  misc_feature 1..80: note = Artificially Synthesized Probe
  source 1..80: mol_type = other DNA
agtcacttctggttttattgacccaaatttaaaaactcctatcagtgtgcagtgtagtgtcagttaaacctagcacagcc

SEQ ID NO: 91890 - DNA, 80 bp, synthetic construct
  misc_feature 1..80: note = Artificially Synthesized Probe
  source 1..80: mol_type = other DNA
ccacatttcttgttttcagtgatttgtcctataaccagctgacccgcctggatgaatctgcctttgtgggtctgagctta

SEQ ID NO: 91891 - DNA, 80 bp, synthetic construct
  misc_feature 1..80: note = Artificially Synthesized Probe
  source 1..80: mol_type = other DNA
aatcagtctgcaaattctgtatgctaacattttgtggttcttctgtcctatgcctcagagcaaggcagtcttatttgtct

SEQ ID NO: 91892 - DNA, 80 bp, synthetic construct
  misc_feature 1..80: note = Artificially Synthesized Probe
  source 1..80: mol_type = other DNA
ttgctagtgtcaggagagcagtcattttcttgttcctttgactttgacaatacaccagagctactagttctcattcgaaa

SEQ ID NO: 91893 - DNA, 80 bp, synthetic construct
  misc_feature 1..80: note = Artificially Synthesized Probe
  source 1..80: mol_type = other DNA
ctgaggttcagagaaatttaaataattttctctaagtcacatagcttgtaaatgttgggccagaatcagatcccaggtct

SEQ ID NO: 91894 - DNA, 80 bp, synthetic construct; identical to SEQ ID NO: 33263
  misc_feature 1..80: note = Artificially Synthesized Probe
  source 1..80: mol_type = other DNA

SEQ ID NO: 91895 - DNA, 80 bp, synthetic construct
  misc_feature 1..80: note = Artificially Synthesized Probe
  source 1..80: mol_type = other DNA
agagtaattagtagaatttgtagattcttaagcttcctgaatagaggactttgtggtcattaggtttcgagttgaaatgg

SEQ ID NO: 91896 - DNA, 80 bp, synthetic construct
  misc_feature 1..80: note = Artificially Synthesized Probe
  source 1..80: mol_type = other DNA
ccttttcctatattatcagaagtgaaactggatcaatgcaatctcagaaacttagatgtagctgcagccttttggcagtt

SEQ ID NO: 91897 - DNA, 80 bp, synthetic construct; identical to SEQ ID NO: 33264
  misc_feature 1..80: note = Artificially Synthesized Probe
  source 1..80: mol_type = other DNA

SEQ ID NO: 91898 - DNA, 80 bp, synthetic construct
  misc_feature 1..80: note = Artificially Synthesized Probe
  source 1..80: mol_type = other DNA
agctaagtgaaaacagggatctcctctttactgctaatcacacaactctacatgtcccttataaagtagaaagctttgtg

SEQ ID NO: 91899 - DNA, 80 bp, synthetic construct; identical to SEQ ID NO: 33240
  misc_feature 1..80: note = Artificially Synthesized Probe
  source 1..80: mol_type = other DNA

SEQ ID NO: 91900 - DNA, 80 bp, synthetic construct
  misc_feature 1..80: note = Artificially Synthesized Probe
  source 1..80: mol_type = other DNA
gatgacacgctaacacatgggtttatcatttttgcttcccatggggcatctttaattgctcttgagcaatgaaactgtat

SEQ ID NO: 91901 - DNA, 80 bp, synthetic construct
  misc_feature 1..80: note = Artificially Synthesized Probe
  source 1..80: mol_type = other DNA
ctaacataatgaagggctctttgcttggaagagtaatacttttagcaggttgctttatttaccaaggccagcttaattgt

SEQ ID NO: 91902 - DNA, 80 bp, synthetic construct; identical to SEQ ID NO: 33265
  misc_feature 1..80: note = Artificially Synthesized Probe
  source 1..80: mol_type = other DNA

SEQ ID NO: 91903 - DNA, 80 bp, synthetic construct
  misc_feature 1..80: note = Artificially Synthesized Probe
  source 1..80: mol_type = other DNA
aaatatgattgaattatgtttatttcatatggctacaaagtctgagctttctgacactctgggagctctgtggggtttct

SEQ ID NO: 91904 - DNA, 80 bp, synthetic construct
  misc_feature 1..80: note = Artificially Synthesized Probe
  source 1..80: mol_type = other DNA
catgccaccatgcccagctaatttttgtatttttagtagagacagggtttcaccatcttggccaggctggtcttgaactc

SEQ ID NO: 91905 - DNA, 80 bp, synthetic construct
  misc_feature 1..80: note = Artificially Synthesized Probe
  source 1..80: mol_type = other DNA
aacctcctaggctcaagtgatctcccaccttggcctcctaaggagctaggactaaaggtgtgtatcaccatgcctagcta

SEQ ID NO: 91906 - DNA, 80 bp, synthetic construct
  misc_feature 1..80: note = Artificially Synthesized Probe
  source 1..80: mol_type = other DNA
ttgttgttgttgtcggggcactttttattgaaaaagcattcctgtggacacttaaagagaagttatttatggaagtagaa

SEQ ID NO: 91907 - DNA, 80 bp, synthetic construct; identical to SEQ ID NO: 33266
  misc_feature 1..80: note = Artificially Synthesized Probe
  source 1..80: mol_type = other DNA

SEQ ID NO: 91908 - DNA, 80 bp, synthetic construct
  misc_feature 1..80: note = Artificially Synthesized Probe
  source 1..80: mol_type = other DNA
tacacattaaatatgtgtagtttttagtatatcaattgtacctcagtaaagctgttaagtatataaaaaagtacgctacg

SEQ ID NO: 91909 - DNA, 80 bp, synthetic construct
  misc_feature 1..80: note = Artificially Synthesized Probe
  source 1..80: mol_type = other DNA
caaagaaagcattcattggtcttgaatcccttgagcatctgtaagtattttgcatacattttgcttactctataaataat

SEQ ID NO: 91910 - DNA, 80 bp, synthetic construct
  misc_feature 1..80: note = Artificially Synthesized Probe
  source 1..80: mol_type = other DNA
ctgatgtcaggtgatccacccacctcagcctcccaaagtgctggggttacaagcatgagccaccaagcccggcctggcct

SEQ ID NO: 91911 - DNA, 80 bp, synthetic construct; identical to SEQ ID NO: 33267
  misc_feature 1..80: note = Artificially Synthesized Probe
  source 1..80: mol_type = other DNA

SEQ ID NO: 91912 - DNA, 80 bp, synthetic construct
  misc_feature 1..80: note = Artificially Synthesized Probe
  source 1..80: mol_type = other DNA
ttataattaggagacctcagcactgctccttatgctttatgtataccctactgttcctttttggattatcagaaacatgt

SEQ ID NO: 91913 - DNA, 80 bp, synthetic construct
  misc_feature 1..80: note = Artificially Synthesized Probe
  source 1..80: mol_type = other DNA
tcattttataccctttttcattgatgagttttaaaaattgttcttactggtttcgagatttccctaggggattggaggtt

SEQ ID NO: 91914 - DNA, 80 bp, synthetic construct
  misc_feature 1..80: note = Artificially Synthesized Probe
  source 1..80: mol_type = other DNA
ggattacaggcgcctgccaccacacccggctaatgtttgtatttttagtagagacagggtttcgccatgttggccagctg

SEQ ID NO: 91915 - DNA, 80 bp, synthetic construct; identical to SEQ ID NO: 33268
  misc_feature 1..80: note = Artificially Synthesized Probe
  source 1..80: mol_type = other DNA

SEQ ID NO: 91916 - DNA, 80 bp, synthetic construct
  misc_feature 1..80: note = Artificially Synthesized Probe
  source 1..80: mol_type = other DNA
gagatgcactggaaatgtgtgagttttcaaactgcctaggttcaaatccttactccattccttacaactgtgtgataatg

SEQ ID NO: 91917 - DNA, 80 bp, synthetic construct
  misc_feature 1..80: note = Artificially Synthesized Probe
  source 1..80: mol_type = other DNA
atgtaggatactgttctggatgatgaaaacattagtgcacaagacagagtctctgtactcatagcatattacagtaaatc

SEQ ID NO: 91918 - DNA, 80 bp, synthetic construct
  misc_feature 1..80: note = Artificially Synthesized Probe
  source 1..80: mol_type = other DNA
caggaccttaatgaaatggcaaaccatgtgaacactgggtgaatggctttccaggcacaaggagtaggaagtaaaatgag

SEQ ID NO: 91919 - DNA, 80 bp, synthetic construct
  misc_feature 1..80: note = Artificially Synthesized Probe
  source 1..80: mol_type = other DNA
cagtggtgccatctcagctcactgcaacctctgcctcccgggttcaagtgattctcctgcctcagccccctgagtagctg

SEQ ID NO: 91920 - DNA, 80 bp, synthetic construct; identical to SEQ ID NO: 33269
  misc_feature 1..80: note = Artificially Synthesized Probe
  source 1..80: mol_type = other DNA

SEQ ID NO: 91921 - DNA, 80 bp, synthetic construct
  misc_feature 1..80: note = Artificially Synthesized Probe
  source 1..80: mol_type = other DNA
gtatgcattaggaaactggagggttttgagaaaatgctcagcacagagcttggcacagagtagaagctgagtaatgttaa

SEQ ID NO: 91922 - DNA, 80 bp, synthetic construct
  misc_feature 1..80: note = Artificially Synthesized Probe
  source 1..80: mol_type = other DNA
gcccacctaatttttgtattttcagtagagacggggtttcaccatgttggccaggctggtcttgaactcctgacctcagg

SEQ ID NO: 91923 - DNA, 80 bp, synthetic construct
  misc_feature 1..80: note = Artificially Synthesized Probe
  source 1..80: mol_type = other DNA
ttataagttgtgacttactacaaattagtatactccgcccccctcctttttttttgccagtgataacctgagagctggca

SEQ ID NO: 91924 - DNA, 80 bp, synthetic construct
  misc_feature 1..80: note = Artificially Synthesized Probe
  source 1..80: mol_type = other DNA
ttctttgcttgaccaacccgtaggcaagcccttaaaccttctcctaggcctagctgtgtaaaatccaattttagcacaaa

SEQ ID NO: 91925 - DNA, 80 bp, synthetic construct; identical to SEQ ID NO: 33270
  misc_feature 1..80: note = Artificially Synthesized Probe
  source 1..80: mol_type = other DNA

SEQ ID NO: 91926 - DNA, 80 bp, synthetic construct
  misc_feature 1..80: note = Artificially Synthesized Probe
  source 1..80: mol_type = other DNA
taacagttacggtgctgtgactccgataggatcagattcatcattggacccccagacctctcacccaggaccccaagtgt

SEQ ID NO: 91927 - DNA, 80 bp, synthetic construct
  misc_feature 1..80: note = Artificially Synthesized Probe
  source 1..80: mol_type = other DNA
ttctcaagattgtgaatatattctctggagttgggctagaggccagacttcttttgaaaggtacctcctgggcttgaagg

SEQ ID NO: 91928 - DNA, 80 bp, synthetic construct; identical to SEQ ID NO: 33271
  misc_feature 1..80: note = Artificially Synthesized Probe
  source 1..80: mol_type = other DNA

SEQ ID NO: 91929 - DNA, 80 bp, synthetic construct
  misc_feature 1..80: note = Artificially Synthesized Probe
  source 1..80: mol_type = other DNA
ttcttacatcctccatccatctgtccacccactgctagactttttccttctcattctggactctttgtcactgggactgt

SEQ ID NO: 91930 - DNA, 80 bp, synthetic construct
  misc_feature 1..80: note = Artificially Synthesized Probe
  source 1..80: mol_type = other DNA
tgggctttggagatatccagacagcccctagatgtctcttcagcctccatgagattacacatcatggcaaaataaaagtc

SEQ ID NO: 91931 - DNA, 80 bp, synthetic construct
  misc_feature 1..80: note = Artificially Synthesized Probe
  source 1..80: mol_type = other DNA
ttttgtatctttagaaaagaggagtgacctcatccaatttatgttttcttaggtataatataagctggactcaaaagacc

SEQ ID NO: 91932 - DNA, 80 bp, synthetic construct
  misc_feature 1..80: note = Artificially Synthesized Probe
  source 1..80: mol_type = other DNA
agatcacgaggtcatgagttcgagaccagcctggccaatatggtgaaaccctgtctctactaaaaatacaaaaattaacc

SEQ ID NO: 91933 - DNA, 80 bp, synthetic construct; identical to SEQ ID NO: 33272
  misc_feature 1..80: note = Artificially Synthesized Probe
  source 1..80: mol_type = other DNA

SEQ ID NO: 91934 - DNA, 80 bp, synthetic construct
  misc_feature 1..80: note = Artificially Synthesized Probe
  source 1..80: mol_type = other DNA
taatcaagaccaattgcctagagccaagtgacattcagaatttttaatgtcctataatgaaatgacattttcagttgaag

SEQ ID NO: 91935 - DNA, 80 bp, synthetic construct
  misc_feature 1..80: note = Artificially Synthesized Probe
  source 1..80: mol_type = other DNA
gagtagtgaggatttgaggagctttctctccctcttggtttagtggtactttctaattttctactataattatataactt

SEQ ID NO: 91936 - DNA, 80 bp, synthetic construct
  misc_feature 1..80: note = Artificially Synthesized Probe
  source 1..80: mol_type = other DNA
acaattctcagtaaaaaagttgcattagagccaggtgtggtggctcatgcctgtaatcccagatactcagaaagctcagg

SEQ ID NO: 91937 - DNA, 80 bp, synthetic construct; identical to SEQ ID NO: 33273
  misc_feature 1..80: note = Artificially Synthesized Probe
  source 1..80: mol_type = other DNA

SEQ ID NO: 91938 - DNA, 80 bp, synthetic construct
  misc_feature 1..80: note = Artificially Synthesized Probe
  source 1..80: mol_type = other DNA
ctgggcatggtggcacgcacctgtagtcccagctacttgggaggctgaggcaggagaatcgcttgaacccgggaggcgga

SEQ ID NO: 91939 - DNA, 80 bp, synthetic construct
  misc_feature 1..80: note = Artificially Synthesized Probe
  source 1..80: mol_type = other DNA
cataaagcaagttctcaaaatcatttactttccctgcttctaagtggatgggacatttaaggggtcattgagagaaaata

SEQ ID NO: 91940 - DNA, 80 bp, synthetic construct
  misc_feature 1..80: note = Artificially Synthesized Probe
  source 1..80: mol_type = other DNA
ggcgtgatctcggctcactgcaacttctgcctcccgggttcaagcagttctcctgcctcagcctaccaagtagctgggat

SEQ ID NO: 91941 - DNA, 80 bp, synthetic construct
  misc_feature 1..80: note = Artificially Synthesized Probe
  source 1..80: mol_type = other DNA
cctagtgctgaagtgtttttagtgttgatgaaataatttgacaataattatatgttgtctacaacaaagatctctcaatg

SEQ ID NO: 91942 - DNA, 80 bp, synthetic construct; identical to SEQ ID NO: 33274
  misc_feature 1..80: note = Artificially Synthesized Probe
  source 1..80: mol_type = other DNA

SEQ ID NO: 91943 - DNA, 80 bp, synthetic construct
  misc_feature 1..80: note = Artificially Synthesized Probe
  source 1..80: mol_type = other DNA
atcaccattaccacacccaaagaaattaacatcgataaggtaatattaactaatacagagtccatactcaaatttcccca

SEQ ID NO: 91944 - DNA, 80 bp, synthetic construct
  misc_feature 1..80: note = Artificially Synthesized Probe
  source 1..80: mol_type = other DNA
ttcttcagcagttgcctttagctataaaaccacccagtacatttgggtttctttatgtaattttgaatgttgaaatacat

SEQ ID NO: 91945 - DNA, 80 bp, synthetic construct
  misc_feature 1..80: note = Artificially Synthesized Probe
  source 1..80: mol_type = other DNA
tttggctgacagtctcaatttgttttctcatgatttatgttaaatgtttttggcaagaataatggataggtgtgtggtaa

SEQ ID NO: 91946 - DNA, 80 bp, synthetic construct; identical to SEQ ID NO: 33275
  misc_feature 1..80: note = Artificially Synthesized Probe
  source 1..80: mol_type = other DNA

SEQ ID NO: 91947 - DNA, 80 bp, synthetic construct
  misc_feature 1..80: note = Artificially Synthesized Probe
  source 1..80: mol_type = other DNA
aaatgatcacaggcattttaatgaatgaaggcttttctcttttagagggactgttaaccttaggttaggtatttggtagt

SEQ ID NO: 91948 - DNA, 80 bp, synthetic construct
  misc_feature 1..80: note = Artificially Synthesized Probe
  source 1..80: mol_type = other DNA
gtttcataacattaaagtggcagagttttgttttttccttgaggggagagagatagtcatagacaagttgtcctgattct

SEQ ID NO: 91949 - DNA, 80 bp, synthetic construct
  misc_feature 1..80: note = Artificially Synthesized Probe
  source 1..80: mol_type = other DNA
acaggcgtgtgccaccatacctggctaatttttgtatgtttagtagagacggggttttgccatgttggccaggctggtct

SEQ ID NO: 91950 - DNA, 80 bp, synthetic construct
  misc_feature 1..80: note = Artificially Synthesized Probe
  source 1..80: mol_type = other DNA
actgtggctcacacctgtaatcccagcactttgggaggctgaggcaggtgggtcatctggggtctggagttcgagaccgg

SEQ ID NO: 91951 - DNA, 80 bp, synthetic construct; identical to SEQ ID NO: 33276
  misc_feature 1..80: note = Artificially Synthesized Probe
  source 1..80: mol_type = other DNA

SEQ ID NO: 91952 - DNA, 80 bp, synthetic construct
  misc_feature 1..80: note = Artificially Synthesized Probe
  source 1..80: mol_type = other DNA
ccattgttttttacaaagtttaaagaagaaaacagaatctagtaaaggttaaattctgctgacattgccgcacattccct

SEQ ID NO: 91953 - DNA, 80 bp, synthetic construct
  misc_feature 1..80: note = Artificially Synthesized Probe
  source 1..80: mol_type = other DNA
catattttattagccagtcctaagccaatcttcagctggacatttgacctatttggattttttcactacttcaggtgaaa

SEQ ID NO: 91954 - DNA, 80 bp, synthetic construct
  misc_feature 1..80: note = Artificially Synthesized Probe
  source 1..80: mol_type = other DNA
gctggagtgaagtggcgtgatctcggctcactagccacctctaccccccgggttcaagtgattctccttcctcagcttct

SEQ ID NO: 91955 - DNA, 80 bp, synthetic construct; identical to SEQ ID NO: 33241
  misc_feature 1..80: note = Artificially Synthesized Probe
  source 1..80: mol_type = other DNA

SEQ ID NO: 91956 - DNA, 80 bp, synthetic construct; identical to SEQ ID NO: 33277
  misc_feature 1..80: note = Artificially Synthesized Probe
  source 1..80: mol_type = other DNA

SEQ ID NO: 91957 - DNA, 80 bp, synthetic construct
  misc_feature 1..80: note = Artificially Synthesized Probe
  source 1..80: mol_type = other DNA
tgagcaagtcatttgaattttctgggcctcatttcccccatctttaaacaagggaattggactgtagctctgtagtctct

SEQ ID NO: 91958 - DNA, 80 bp, synthetic construct
  misc_feature 1..80: note = Artificially Synthesized Probe
  source 1..80: mol_type = other DNA
ataattgctctaagaggcatgaatgtgactctgacgtgcactgcagtgagcagcagtgattcacccatgtccactgtgtg

SEQ ID NO: 91959 - DNA, 80 bp, synthetic construct
  misc_feature 1..80: note = Artificially Synthesized Probe
  source 1..80: mol_type = other DNA
ggttctaattattctcagaaagccaaactgactgtaaatggtaaggaattatgctccttgattttttttagtttagaagg

SEQ ID NO: 91960 - DNA, 80 bp, synthetic construct; identical to SEQ ID NO: 33278
  misc_feature 1..80: note = Artificially Synthesized Probe
  source 1..80: mol_type = other DNA

SEQ ID NO: 91961 - DNA, 80 bp, synthetic construct
  misc_feature 1..80: note = Artificially Synthesized Probe
  source 1..80: mol_type = other DNA
tgtgtgtgtatttttatttatttattttaatttctcttgttttttgttttgagatggagtctcgctctgtcgcccaggat

SEQ ID NO: 91962 - DNA, 80 bp, synthetic construct
  misc_feature 1..80: note = Artificially Synthesized Probe
  source 1..80: mol_type = other DNA
ccaggttggtctcagactcctgagcgcaagtgatccgcctgccttggcctcccaaagtattcggattacaggcatgaacc

SEQ ID NO: 91963 - DNA, 80 bp, synthetic construct
  misc_feature 1..80: note = Artificially Synthesized Probe
  source 1..80: mol_type = other DNA
ctccattctgaatctctaacgtccatgataccactctgtatgcctttgtgtactcatacttagctcccacttataagtga

SEQ ID NO: 91964 - DNA, 80 bp, synthetic construct; identical to SEQ ID NO: 33279
  misc_feature 1..80: note = Artificially Synthesized Probe
  source 1..80: mol_type = other DNA

SEQ ID NO: 91965 - DNA, 80 bp, synthetic construct
  misc_feature 1..80: note = Artificially Synthesized Probe
  source 1..80: mol_type = other DNA
agagtcatagtaaataccaggttctaaaatacgaagttcaaagaaggtttgtggccttctgctttccctagttccagctg

SEQ ID NO: 91966 - DNA, 80 bp, synthetic construct
  misc_feature 1..80: note = Artificially Synthesized Probe
  source 1..80: mol_type = other DNA
agctttatgaaataaaagtaaccttttccttactgttttatttcactgtagactgttaaattttttttcttttttttttt

SEQ ID NO: 91967 - DNA, 80 bp, synthetic construct
  misc_feature 1..80: note = Artificially Synthesized Probe
  source 1..80: mol_type = other DNA
ggatagcttgaggcctggaatttgaagctgcagtgagctatgattgcgccagtgtactcccgcctggacagcagagcaag

SEQ ID NO: 91968 - DNA, 80 bp, synthetic construct
  misc_feature 1..80: note = Artificially Synthesized Probe
  source 1..80: mol_type = other DNA
ttgcccactttttcttggtgatttttctggaaacagagatgccatcttttctgaaaacgccaatggatctgactattcgc

SEQ ID NO: 91969 - DNA, 80 bp, synthetic construct; identical to SEQ ID NO: 33280
  misc_feature 1..80: note = Artificially Synthesized Probe
  source 1..80: mol_type = other DNA

SEQ ID NO: 91970 - DNA, 80 bp, synthetic construct
  misc_feature 1..80: note = Artificially Synthesized Probe
  source 1..80: mol_type = other DNA
tcacaattttatgcaaggttatgtcagtctaggaattagtgggtcagataactgaaatgtgggaaaatacatagggcaaa

SEQ ID NO: 91971 - DNA, 80 bp, synthetic construct
  misc_feature 1..80: note = Artificially Synthesized Probe
  source 1..80: mol_type = other DNA
catttgatgctgcttcacttattgcttgataggaacctaagactatttaactgtttgctcctagttcattttcaaaaaaa

SEQ ID NO: 91972 - DNA, 80 bp, synthetic construct
  misc_feature 1..80: note = Artificially Synthesized Probe
  source 1..80: mol_type = other DNA
ggagggcgctgtcgggcttgctgccccccgacaccgctatcctgtgagtagagcggccaggcagagtgaccaaaaggagg

SEQ ID NO: 91973 - DNA, 80 bp, synthetic construct; identical to SEQ ID NO: 33281
  misc_feature 1..80: note = Artificially Synthesized Probe
  source 1..80: mol_type = other DNA

SEQ ID NO: 91974 - DNA, 80 bp, synthetic construct
  misc_feature 1..80: note = Artificially Synthesized Probe
  source 1..80: mol_type = other DNA
tatttatttatttattttgagacggagtctcattctgttgcccaggctggaatgcagtggcgcaatctcggctcagagca

SEQ ID NO: 91975 - DNA, 80 bp, synthetic construct
  misc_feature 1..80: note = Artificially Synthesized Probe
  source 1..80: mol_type = other DNA
cgcctgcctcagccttagaaaaataagtcatttattgttttaacatgttaagatatacagaaaattaggaaaaggggagg

SEQ ID NO: 91976 - DNA, 80 bp, synthetic construct
  misc_feature 1..80: note = Artificially Synthesized Probe
  source 1..80: mol_type = other DNA
tcatttttctgctagatttaaaaatgtttttctttattctttaaagttacacattttgtagtaaacatctttgcgtataa

SEQ ID NO: 91977 - DNA, 80 bp, synthetic construct
  misc_feature 1..80: note = Artificially Synthesized Probe
  source 1..80: mol_type = other DNA
gttctgaaacattaacttctaatcctcccatgagtatataaaattactcattttattatacccccattggtctaattcag

SEQ ID NO: 91978 - DNA, 80 bp, synthetic construct
  misc_feature 1..80: note = Artificially Synthesized Probe
  source 1..80: mol_type = other DNA
gtagagaaggggttttgccatgttggccaggctggtgtcgaactcctgacctcaggtgatccgcccaccttggcctccca

SEQ ID NO: 91979 - DNA, 80 bp, synthetic construct; identical to SEQ ID NO: 33282
  misc_feature 1..80: note = Artificially Synthesized Probe
  source 1..80: mol_type = other DNA

SEQ ID NO: 91980 - DNA, 80 bp, synthetic construct
  misc_feature 1..80: note = Artificially Synthesized Probe
  source 1..80: mol_type = other DNA
ttggcattgtcatcattgttgtggtctgctgtgttgttggcacttctttgatctgggtcattgttatttaccacatgaga

SEQ ID NO: 91981 - DNA, 80 bp, synthetic construct
  misc_feature 1..80: note = Artificially Synthesized Probe
  source 1..80: mol_type = other DNA
gctggtcatagtagcacatgcctgtactcccagctactcaggaggatgaggtgggaggactgcttgagcccaggagttca

SEQ ID NO: 91982 - DNA, 80 bp, synthetic construct; identical to SEQ ID NO: 33283
  misc_feature 1..80: note = Artificially Synthesized Probe
  source 1..80: mol_type = other DNA

SEQ ID NO: 91983 - DNA, 80 bp, synthetic construct
  misc_feature 1..80: note = Artificially Synthesized Probe
  source 1..80: mol_type = other DNA
tctagcaatttgtccaccttggcctctcaaagtgctgggattacaggcatgagccactgcgtctgaccaattttaagaat

SEQ ID NO: 91984 - DNA, 80 bp, synthetic construct
  misc_feature 1..80: note = Artificially Synthesized Probe
  source 1..80: mol_type = other DNA
atgcccagctaatttttgtatttttagttgagacggggtttcaccatgttgaacaggatggtctcaatcttttgacctcg

SEQ ID NO: 91985 - DNA, 80 bp, synthetic construct
  misc_feature 1..80: note = Artificially Synthesized Probe
  source 1..80: mol_type = other DNA
tgattgagatcagtctctttttttcccttgaatatcaaactggatcattgaggtcagtcttttacacctctcaccctgga

SEQ ID NO: 91986 - DNA, 80 bp, synthetic construct; identical to SEQ ID NO: 33284
  misc_feature 1..80: note = Artificially Synthesized Probe
  source 1..80: mol_type = other DNA

SEQ ID NO: 91987 - DNA, 80 bp, synthetic construct
  misc_feature 1..80: note = Artificially Synthesized Probe
  source 1..80: mol_type = other DNA
cctgccaatggatatatacacaaaggcactgacggtaatgactctgttgtttatggttacaatttcagcctattctattg

SEQ ID NO: 91988 - DNA, 80 bp, synthetic construct
  misc_feature 1..80: note = Artificially Synthesized Probe
  source 1..80: mol_type = other DNA
gatatgaaaatcatcttacagagtggagaaacacattaaacaagagatcagagtacacagcagaggctcccaaacttgtg

SEQ ID NO: 91989 - DNA, 80 bp, synthetic construct
  misc_feature 1..80: note = Artificially Synthesized Probe
  source 1..80: mol_type = other DNA
acattcagtaaagtttaaagggtagctaggagccaggcatggtggcatgcctgtagtcccatctacccacgaggctgaag

SEQ ID NO: 91990 - DNA, 80 bp, synthetic construct; identical to SEQ ID NO: 33242
  misc_feature 1..80: note = Artificially Synthesized Probe
  source 1..80: mol_type = other DNA

SEQ ID NO: 91991 - DNA, 80 bp, synthetic construct; identical to SEQ ID NO: 33285
  misc_feature 1..80: note = Artificially Synthesized Probe
  source 1..80: mol_type = other DNA

SEQ ID NO: 91992 - DNA, 80 bp, synthetic construct
  misc_feature 1..80: note = Artificially Synthesized Probe
  source 1..80: mol_type = other DNA
aataaagagacaataatttgtaaagcacttcccccaagattctcacagatcttttcagcaaatctgtgtggtacttcaaa

SEQ ID NO: 91993 - DNA, 80 bp, synthetic construct
  misc_feature 1..80: note = Artificially Synthesized Probe
  source 1..80: mol_type = other DNA
acccaggctggagtgcagtggcacgatctcagctcactgcaacctccacctcccaggttcaagcgattcctctgcctcag

SEQ ID NO: 91994 - DNA, 80 bp, synthetic construct
  misc_feature 1..80: note = Artificially Synthesized Probe
  source 1..80: mol_type = other DNA
gagccaccgcacctggctggcatttctgacttttaaaagaatacttaaaagtctgttctttgaagtatgtgggaaataac

SEQ ID NO: 91995 - DNA, 80 bp, synthetic construct
  misc_feature 1..80: note = Artificially Synthesized Probe
  source 1..80: mol_type = other DNA
aggctggagtgcaatggcaccatctcagctcactgtaacctttgcctccccggttcaagcgattctcctgcctcagcctc

SEQ ID NO: 91996 - DNA, 80 bp, synthetic construct; identical to SEQ ID NO: 33286
  misc_feature 1..80: note = Artificially Synthesized Probe
  source 1..80: mol_type = other DNA

SEQ ID NO: 91997 - DNA, 80 bp, synthetic construct
  misc_feature 1..80: note = Artificially Synthesized Probe
  source 1..80: mol_type = other DNA
gacttctcattgtcagaagctttccctagggatgcttgtagcaattggtgttacttaacctcttgactcattaaagtaac

SEQ ID NO: 91998 - DNA, 80 bp, synthetic construct
  misc_feature 1..80: note = Artificially Synthesized Probe
  source 1..80: mol_type = other DNA
ttcaagagcatgggctctggagccagaatggctgtttctgctcctcactctggcagtatgactttgtttttttttttttg

SEQ ID NO: 91999 - DNA, 80 bp, synthetic construct
  misc_feature 1..80: note = Artificially Synthesized Probe
  source 1..80: mol_type = other DNA
tttagtagagatggggtttcaccgtgttagccaggatggtctagatctccttaccttgtgatctgcccgcctcggcctcc

SEQ ID NO: 92000 - DNA, 80 bp, synthetic construct; identical to SEQ ID NO: 33287
  misc_feature 1..80: note = Artificially Synthesized Probe
  source 1..80: mol_type = other DNA

SEQ ID NO: 92001 - DNA, 80 bp, synthetic construct
  misc_feature 1..80: note = Artificially Synthesized Probe
  source 1..80: mol_type = other DNA
gtatacatgtgccatgttggtgtgctgcacccattaactcatcatttacattaggtatatctcctaatgctatccctccc

SEQ ID NO: 92002 - DNA, 80 bp, synthetic construct
  misc_feature 1..80: note = Artificially Synthesized Probe
  source 1..80: mol_type = other DNA
ttgctgaggaggacgttcttgatcagacactgtccagcctcatggtccaaatgcctaaagagacatatttagtacatcct

SEQ ID NO: 92003 - DNA, 80 bp, synthetic construct
  misc_feature 1..80: note = Artificially Synthesized Probe
  source 1..80: mol_type = other DNA
cgtctaattgactcttccttctatcatataggtagtgctctcatttgacaggaagcaagcagatgggtatataggagtaa

SEQ ID NO: 92004 - DNA, 80 bp, synthetic construct; identical to SEQ ID NO: 33288
  misc_feature 1..80: note = Artificially Synthesized Probe
  source 1..80: mol_type = other DNA

SEQ ID NO: 92005 - DNA, 80 bp, synthetic construct
  misc_feature 1..80: note = Artificially Synthesized Probe
  source 1..80: mol_type = other DNA
ccacacccagctaatttttgtatttttagtagaggtggggtttaaccatgttggccaggctggtcatgaactcctgacct

SEQ ID NO: 92006 - DNA, 80 bp, synthetic construct
  misc_feature 1..80: note = Artificially Synthesized Probe
  source 1..80: mol_type = other DNA
actttcggaggccaaagcaggtggatcatttgaggtcaggagtttgagaccagcctggccaacatagggaaaccctgtct

SEQ ID NO: 92007 - DNA, 80 bp, synthetic construct
  misc_feature 1..80: note = Artificially Synthesized Probe
  source 1..80: mol_type = other DNA
gtctccaaaaaatagtaataataaaatttgggcataatttggtgatggtttttactgagaagattttttttttttttttt

SEQ ID NO: 92008 - DNA, 80 bp, synthetic construct
  misc_feature 1..80: note = Artificially Synthesized Probe
  source 1..80: mol_type = other DNA
tatttttagtagagatggggtttctccatgttggtcaggctggtctcaaactcccgacctcaggtgagccacccaccttg

SEQ ID NO: 92009 - DNA, 80 bp, synthetic construct; identical to SEQ ID NO: 33289
  misc_feature 1..80: note = Artificially Synthesized Probe
  source 1..80: mol_type = other DNA

SEQ ID NO: 92010 - DNA, 80 bp, synthetic construct
  misc_feature 1..80: note = Artificially Synthesized Probe
  source 1..80: mol_type = other DNA
catttaatttcagcttcacttggcgggtgtttttttctatgaggtatgatcaaggtcataagtgagaacgcagttttggg

SEQ ID NO: 92011 - DNA, 80 bp, synthetic construct
  misc_feature 1..80: note = Artificially Synthesized Probe
  source 1..80: mol_type = other DNA
gcatttgaaacaaaactctttctaaatcatgaagagtaatgctgagcatgtgtgtcttcctgtccatccaagcttttcat

SEQ ID NO: 92012 - DNA, 80 bp, synthetic construct
  misc_feature 1..80: note = Artificially Synthesized Probe
  source 1..80: mol_type = other DNA
gaaaccccatctcttctaaaaaaattaaaaattagctgggcgtggtggtgggcgcctgtaatcccagctacttgggaggc

SEQ ID NO: 92013 - DNA, 80 bp, synthetic construct
  misc_feature 1..80: note = Artificially Synthesized Probe
  source 1..80: mol_type = other DNA
tgtcccttcaaaggatatgaactcacccttttttatggctgcatagtattccatggtatatatgtgccacattttcttaa

SEQ ID NO: 92014 - DNA, 80 bp, synthetic construct
  misc_feature 1..80: note = Artificially Synthesized Probe
  source 1..80: mol_type = other DNA
atactgtgatactcccggggatggttctggcaggagtgaataatctaatgtcccatgttagattatgtcccacaggttac

SEQ ID NO: 92015 - DNA, 80 bp, synthetic construct; identical to SEQ ID NO: 33290
  misc_feature 1..80: note = Artificially Synthesized Probe
  source 1..80: mol_type = other DNA

SEQ ID NO: 92016 - DNA, 80 bp, synthetic construct
  misc_feature 1..80: note = Artificially Synthesized Probe
  source 1..80: mol_type = other DNA
tggctaattttttgtattttttttagtggagacagggtttcaccatgttggccaggctggtctcaaactcctgacctcag

SEQ ID NO: 92017 - DNA, 80 bp, synthetic construct
  misc_feature 1..80: note = Artificially Synthesized Probe
  source 1..80: mol_type = other DNA
catgaaagaaatgcatcaacagtaaatccacttttactgttggatgtcttagaagagttaatacaaaaagggtttaagaa

SEQ ID NO: 92018 - DNA, 80 bp, synthetic construct; identical to SEQ ID NO: 33291
  misc_feature 1..80: note = Artificially Synthesized Probe
  source 1..80: mol_type = other DNA

SEQ ID NO: 92019 - DNA, 80 bp, synthetic construct
  misc_feature 1..80: note = Artificially Synthesized Probe
  source 1..80: mol_type = other DNA
tgtttggctagctttttctaaaatgtaccctatgaagttaatataactttcagtaaacagtctttgggaaaatagttcac

SEQ ID NO: 92020 - DNA, 80 bp, synthetic construct
  misc_feature 1..80: note = Artificially Synthesized Probe
  source 1..80: mol_type = other DNA
atttaaagatataatggctgcactgaatcaatgattattacctatcatgaaactttcattacaatatggataccattttg

SEQ ID NO: 92021 - DNA, 80 bp, synthetic construct
  misc_feature 1..80: note = Artificially Synthesized Probe
  source 1..80: mol_type = other DNA
tgtctctactaaatatacaaaattagctgggcatggtggcacatgcctgtaatcccagctacttgggaggctgacgcagt

SEQ ID NO: 92022 - DNA, 80 bp, synthetic construct
  misc_feature 1..80: note = Artificially Synthesized Probe
  source 1..80: mol_type = other DNA
acgatatatagtatgatctcagtaaataattggttaggtttgtgaagtagagggatttgaaagaccatgttctggtggtg

SEQ ID NO: 92023 - DNA, 80 bp, synthetic construct; identical to SEQ ID NO: 33292
  misc_feature 1..80: note = Artificially Synthesized Probe
  source 1..80: mol_type = other DNA

SEQ ID NO: 92024 - DNA, 80 bp, synthetic construct
  misc_feature 1..80: note = Artificially Synthesized Probe
  source 1..80: mol_type = other DNA
ggctggagtgtagtggtgggatcttggttcactgcaacccccgcctcctgggtttgagcgattctcctgccttagtctcc

SEQ ID NO: 92025 - DNA, 80 bp, synthetic construct
  misc_feature 1..80: note = Artificially Synthesized Probe
  source 1..80: mol_type = other DNA
atcatgcttttgattttagtaggactcggaacattcaagatggtagtgagggcacatgaaactcacttcaggatgaaatc

SEQ ID NO: 92026 - DNA, 80 bp, synthetic construct
  misc_feature 1..80: note = Artificially Synthesized Probe
  source 1..80: mol_type = other DNA
gctgacagaaatgggtacagctcatcaaaaatgtgcagcaccggcagagggaagatacggggcaaatgtgcttcctgatg

SEQ ID NO: 92027 - DNA, 80 bp, synthetic construct; identical to SEQ ID NO: 33293
  misc_feature 1..80: note = Artificially Synthesized Probe
  source 1..80: mol_type = other DNA

SEQ ID NO: 92028 - DNA, 80 bp, synthetic construct
  misc_feature 1..80: note = Artificially Synthesized Probe
  source 1..80: mol_type = other DNA
atatttttgatatgccaaaattatatgtaatatccagttataatattgacaagtagcttctcagatcacagattttaaat

SEQ ID NO: 92029 - DNA, 80 bp, synthetic construct
  misc_feature 1..80: note = Artificially Synthesized Probe
  source 1..80: mol_type = other DNA
aataaattaaaaaaataggtggacattgtggcatgctgctgtagtcctagctacttgggaggctgaggtgggagggtcac

SEQ ID NO: 92030 - DNA, 80 bp, synthetic construct
  misc_feature 1..80: note = Artificially Synthesized Probe
  source 1..80: mol_type = other DNA
ttgtatacacataaacacagtcttggtgtaattaaccgccttcttcatgcctagaggttcatacttctggtcatttgcca

SEQ ID NO: 92031 - DNA, 80 bp, synthetic construct
  misc_feature 1..80: note = Artificially Synthesized Probe
  source 1..80: mol_type = other DNA
gaaacagaaattgattgaggaaggttcagtcattccttcaggaaccaatgagttagatcgggttgttactttatgtataa

SEQ ID NO: 92032 - DNA, 80 bp, synthetic construct; identical to SEQ ID NO: 33294
  misc_feature 1..80: note = Artificially Synthesized Probe
  source 1..80: mol_type = other DNA

SEQ ID NO: 92033 - DNA, 80 bp, synthetic construct
  misc_feature 1..80: note = Artificially Synthesized Probe
  source 1..80: mol_type = other DNA
atgttaactgggttctattaggtgtgctatatcttggcaaatattccccatgatgaactcttcctactatcacaatcagg

SEQ ID NO: 92034 - DNA, 80 bp, synthetic construct
  misc_feature 1..80: note = Artificially Synthesized Probe
  source 1..80: mol_type = other DNA
ctgagttctagaaaatctctgtctcatttaccaggggtcattcaaaagtctgagatgtatattatcatgaaatatttgtg

SEQ ID NO: 92035 - DNA, 80 bp, synthetic construct; identical to SEQ ID NO: 33243
  misc_feature 1..80: note = Artificially Synthesized Probe
  source 1..80: mol_type = other DNA

SEQ ID NO: 92036 - DNA, 80 bp, synthetic construct; identical to SEQ ID NO: 33295
  misc_feature 1..80: note = Artificially Synthesized Probe
  source 1..80: mol_type = other DNA

SEQ ID NO: 92037 - DNA, 80 bp, synthetic construct
  misc_feature 1..80: note = Artificially Synthesized Probe
  source 1..80: mol_type = other DNA
aagccactttattacagacccattactagtgctagacgtcatccacctctgttttcacctgattcttgtggggaatcctc

SEQ ID NO: 92038 - DNA, 80 bp, synthetic construct
  misc_feature 1..80: note = Artificially Synthesized Probe
  source 1..80: mol_type = other DNA
tccatcttcttcattgtcagaatctgagttttctgtcttgaagaacagctggaaagttgtctggctgttatgacacagta

SEQ ID NO: 92039 - DNA, 80 bp, synthetic construct
  misc_feature 1..80: note = Artificially Synthesized Probe
  source 1..80: mol_type = other DNA
gtatatcttaagaagggaagagtgctcttgggagtagaagaacatgcaaacattcttttttctttattattatttgagat

SEQ ID NO: 92040 - DNA, 80 bp, synthetic construct
  misc_feature 1..80: note = Artificially Synthesized Probe
  source 1..80: mol_type = other DNA
gatatttttagtagagatggggtttcaccatgttggccaggctggtcttgaactcctgacctcaggtgatctgcttgcct

SEQ ID NO: 92041 - DNA, 80 bp, synthetic construct; identical to SEQ ID NO: 33296
  misc_feature 1..80: note = Artificially Synthesized Probe
  source 1..80: mol_type = other DNA

SEQ ID NO: 92042 - DNA, 80 bp, synthetic construct
  misc_feature 1..80: note = Artificially Synthesized Probe
  source 1..80: mol_type = other DNA
caagtgattaagccaaaaattttcttgaatttctgataccaaagagctttaggtaaataacttcacactctaatgcaatg

SEQ ID NO: 92043 - DNA, 80 bp, synthetic construct
  misc_feature 1..80: note = Artificially Synthesized Probe
  source 1..80: mol_type = other DNA
tgccagaaagttgagcatttattcatacttattttcaatcctaagtgttctcccatgggcagcagcacttcttgagctgt

SEQ ID NO: 92044 - DNA, 80 bp, synthetic construct; identical to SEQ ID NO: 33297
  misc_feature 1..80: note = Artificially Synthesized Probe
  source 1..80: mol_type = other DNA

SEQ ID NO: 92045 - DNA, 80 bp, synthetic construct
  misc_feature 1..80: note = Artificially Synthesized Probe
  source 1..80: mol_type = other DNA
gctgctcattctgacttgagccagatgtatttcctttatagcaggagtaatggtctaagaaatactcattaggagaaaaa

SEQ ID NO: 92046 - DNA, 80 bp, synthetic construct
  misc_feature 1..80: note = Artificially Synthesized Probe
  source 1..80: mol_type = other DNA
cccgagtagctgggattacaggcatgcaccaccacgcccagctaattttgtatttttagtagagatggggtttcttcatg

SEQ ID NO: 92047 - DNA, 80 bp, synthetic construct
  misc_feature 1..80: note = Artificially Synthesized Probe
  source 1..80: mol_type = other DNA
tgactcacctttctaatgtattcgaagttatccctataattatattactctcgctcaaattctgatagatttcctgaatg

SEQ ID NO: 92048 - DNA, 80 bp, synthetic construct
  misc_feature 1..80: note = Artificially Synthesized Probe
  source 1..80: mol_type = other DNA
ggccgaggtggatggatcaagagatcgagaccatcctggccaacatggtgaaattccacctctactaaaaatacaaaaat

SEQ ID NO: 92049 - DNA, 80 bp, synthetic construct
  misc_feature 1..80: note = Artificially Synthesized Probe
  source 1..80: mol_type = other DNA
aaaaaacccgtgtaggagtactgcctctctgctctagcagtggtccttctactgacagtgctgtcagagtctggtctcct

SEQ ID NO: 92050 - DNA, 80 bp, synthetic construct; identical to SEQ ID NO: 33298
  misc_feature 1..80: note = Artificially Synthesized Probe
  source 1..80: mol_type = other DNA

SEQ ID NO: 92051 - DNA, 80 bp, synthetic construct
  misc_feature 1..80: note = Artificially Synthesized Probe
  source 1..80: mol_type = other DNA
acctggaagaaaagacagtattccttgaactccatgacctactggtacaggatctacacttatgccattggctttctgtc

SEQ ID NO: 92052 - DNA, 80 bp, synthetic construct
  misc_feature 1..80: note = Artificially Synthesized Probe
  source 1..80: mol_type = other DNA
acccggctaatttttgtattttttgtagagatggagtttcaccttgttgcccaggctgatcacaaactcctgggctcaag

SEQ ID NO: 92053 - DNA, 80 bp, synthetic construct; identical to SEQ ID NO: 33299
  misc_feature 1..80: note = Artificially Synthesized Probe
  source 1..80: mol_type = other DNA

SEQ ID NO: 92054 - DNA, 80 bp, synthetic construct
  misc_feature 1..80: note = Artificially Synthesized Probe
  source 1..80: mol_type = other DNA
atctgataatggaataatcagcctttttggtggaaaggtacatacagaagctaaatcatcatctgttaatagtgtttaag

SEQ ID NO: 92055 - DNA, 80 bp, synthetic construct
  misc_feature 1..80: note = Artificially Synthesized Probe
  source 1..80: mol_type = other DNA
ggactttggttgacaaaagcggtctgacctgtgttcgtagctgggaacatgaaacacaaaattctgggtttaatcttctg

SEQ ID NO: 92056 - DNA, 80 bp, synthetic construct
  misc_feature 1..80: note = Artificially Synthesized Probe
  source 1..80: mol_type = other DNA
tcactgcaatctccgcctcccaggttcaagcgattctcctgcctcagcctcccaagtagctggaattaattacagacgcc

SEQ ID NO: 92057 - DNA, 80 bp, synthetic construct
  misc_feature 1..80: note = Artificially Synthesized Probe
  source 1..80: mol_type = other DNA
gaaagtaatctactttaatagctttaaaccacaagttggtaaattgaaaatgagccctgtgacctggtgcggtggctcac

SEQ ID NO: 92058 - DNA, 80 bp, synthetic construct; identical to SEQ ID NO: 33300
  misc_feature 1..80: note = Artificially Synthesized Probe
  source 1..80: mol_type = other DNA

SEQ ID NO: 92059 - DNA, 80 bp, synthetic construct
  misc_feature 1..80: note = Artificially Synthesized Probe
  source 1..80: mol_type = other DNA
acagttgaaccttagaagattgagctaagattctttttttggcaacctgcaagtaatgtttcatttttctattacgtgat

SEQ ID NO: 92060 - DNA, 80 bp, synthetic construct
  misc_feature 1..80: note = Artificially Synthesized Probe
  source 1..80: mol_type = other DNA
tgtctggttcattgacaaaagtaacaagtttggaactaagagatatgttacaagctgcacttaacaccacctgaaaaccc

SEQ ID NO: 92061 - DNA, 80 bp, synthetic construct
  misc_feature 1..80: note = Artificially Synthesized Probe
  source 1..80: mol_type = other DNA
ctgtaactatcttgaaagagaaattgatcatcagatggtcgagtactcttggaatgtctctttgctgtttactgtggcct

SEQ ID NO: 92062 - DNA, 80 bp, synthetic construct; identical to SEQ ID NO: 33301
  misc_feature 1..80: note = Artificially Synthesized Probe
  source 1..80: mol_type = other DNA

SEQ ID NO: 92063 - DNA, 80 bp, synthetic construct
  misc_feature 1..80: note = Artificially Synthesized Probe
  source 1..80: mol_type = other DNA
gtgggagcctaaaaaagccggtgttaaggtttctggagaattgtatgaagacgagggttaagattcttggggccaaggag

SEQ ID NO: 92064 - DNA, 80 bp, synthetic construct
  misc_feature 1..80: note = Artificially Synthesized Probe
  source 1..80: mol_type = other DNA
ggggctgaggtaggaggattgcttgagcctgggaggcagaggttgtaatgagccgaaatcatgccgctgtactccagcct

SEQ ID NO: 92065 - DNA, 80 bp, synthetic construct
  misc_feature 1..80: note = Artificially Synthesized Probe
  source 1..80: mol_type = other DNA
gatcagcctggctaagatggtgaaaccccatctctactaaaaatacaaaaattagccagccgtggtggcgggcgcctgta

SEQ ID NO: 92066 - DNA, 80 bp, synthetic construct; identical to SEQ ID NO: 33244
  misc_feature 1..80: note = Artificially Synthesized Probe
  source 1..80: mol_type = other DNA

SEQ ID NO: 92067 - DNA, 80 bp, synthetic construct
  misc_feature 1..80: note = Artificially Synthesized Probe
  source 1..80: mol_type = other DNA
cgtgatccgcctgcctcagtctcccaaagtgctgggagccactgcgcctggcccgaattttttttttttttttttttgag

SEQ ID NO: 92068 - DNA, 80 bp, synthetic construct
  misc_feature 1..80: note = Artificially Synthesized Probe
  source 1..80: mol_type = other DNA
tagagacggggtttcaccatgttggccaggctggtctccaactcctgacctcgtgattggcccactttggccttccaaag

SEQ ID NO: 92069 - DNA, 80 bp, synthetic construct
  misc_feature 1..80: note = Artificially Synthesized Probe
  source 1..80: mol_type = other DNA
aatctcggctcactgcaagctccgccttccaggttcacgccattctcctgcctcagcctctggagtagctgggactacag

SEQ ID NO: 92070 - DNA, 80 bp, synthetic construct; identical to SEQ ID NO: 33245
  misc_feature 1..80: note = Artificially Synthesized Probe
  source 1..80: mol_type = other DNA

SEQ ID NO: 92071 - DNA, 80 bp, synthetic construct
  misc_feature 1..80: note = Artificially Synthesized Probe
  source 1..80: mol_type = other DNA
aacctgtgcttcctgggttcaagggattctcctgcctcagcctcctgagtagctgggattacaggcatgcaccacacgcc

SEQ ID NO: 92072 - DNA, 80 bp, synthetic construct
  misc_feature 1..80: note = Artificially Synthesized Probe
  source 1..80: mol_type = other DNA
gttcccatctgactctgcatctgggatgtttcgtctaattgcctcaaaattcggaaaaacgtatccacaagtaatctttc

SEQ ID NO: 92073 - DNA, 80 bp, synthetic construct; identical to SEQ ID NO: 33246
  misc_feature 1..80: note = Artificially Synthesized Probe
  source 1..80: mol_type = other DNA

SEQ ID NO: 92074 - DNA, 80 bp, synthetic construct
  misc_feature 1..80: note = Artificially Synthesized Probe
  source 1..80: mol_type = other DNA
ttggctggaatgcagtggggtgatttcagctcagtgcagcctctgtctcctgggttcaagcaattctcctgcctcagcct

SEQ ID NO: 92075 - DNA, 80 bp, synthetic construct; identical to SEQ ID NO: 33238
  misc_feature 1..80: note = Artificially Synthesized Probe
  source 1..80: mol_type = other DNA

SEQ ID NO: 92076 - DNA, 80 bp, synthetic construct
  misc_feature 1..80: note = Artificially Synthesized Probe
  source 1..80: mol_type = other DNA
agccactgtgctcggcctccagccacccatttctaaagttgagatacttcaaaagtattatggatgtctctcacataatc

SEQ ID NO: 92077 - DNA, 80 bp, synthetic construct
  misc_feature 1..80: note = Artificially Synthesized Probe
  source 1..80: mol_type = other DNA
aagctgctatgtttccagaatccaatatactttgcccctggcttgcatgatactgttacaatgaactgtttcacttgcaa

SEQ ID NO: 92078 - DNA, 80 bp, synthetic construct; identical to SEQ ID NO: 33247
  misc_feature 1..80: note = Artificially Synthesized Probe
  source 1..80: mol_type = other DNA

SEQ ID NO: 92079 - DNA, 80 bp, synthetic construct
  misc_feature 1..80: note = Artificially Synthesized Probe
  source 1..80: mol_type = other DNA
agggagcttttactcgtggccaaaggcaaagcgggagcaggcaattcacatggcaaaagcaggagtgagagagagagttg

SEQ ID NO: 92080 - DNA, 80 bp, synthetic construct
  misc_feature 1..80: note = Artificially Synthesized Probe
  source 1..80: mol_type = other DNA
cctgcctcagcctcctgaatagctgggattacaggtgcttgccaccatgcctgactaatgattttatatttttagtagag

SEQ ID NO: 92081 - DNA, 80 bp, synthetic construct
  misc_feature 1..80: note = Artificially Synthesized Probe
  source 1..80: mol_type = other DNA
gggctttgaggatcctcccacctcagccttccaagtagctaggactacagatgtgtgccaccatgcctggctaattttgt

SEQ ID NO: 92082 - DNA, 80 bp, synthetic construct
  misc_feature 1..80: note = Artificially Synthesized Probe
  source 1..80: mol_type = other DNA
gaaatgagaaaatattttgaactgaatggcagtgaaaacactacacatcaaaacttagggaaatgtggttagtgtggtac

SEQ ID NO: 92083 - DNA, 80 bp, synthetic construct
  misc_feature 1..80: note = Artificially Synthesized Probe
  source 1..80: mol_type = other DNA
ggagagggacctccagctcctcacatcacaacagcccagagcatccccacagataccaccccagtggcagcaggtgctgc

SEQ ID NO: 92084 - DNA, 80 bp, synthetic construct
  misc_feature 1..80: note = Artificially Synthesized Probe
  source 1..80: mol_type = other DNA
tgcgggtgcctcaggcagtgccacacggctttcttaaccaacaccgagctttgccgtggtcaggtgaagctaggtgcacg

SEQ ID NO: 92085 - DNA, 80 bp, synthetic construct; identical to SEQ ID NO: 33313
  misc_feature 1..80: note = Artificially Synthesized Probe
  source 1..80: mol_type = other DNA

SEQ ID NO: 92086 - DNA, 80 bp, synthetic construct
  misc_feature 1..80: note = Artificially Synthesized Probe
  source 1..80: mol_type = other DNA
tcaaaggctggagagtgccctgactcatgggctggctgtgggtatccaggtcacgccccatcctggtcacaggaggacga

SEQ ID NO: 92087 - DNA, 80 bp, synthetic construct
  misc_feature 1..80: note = Artificially Synthesized Probe
  source 1..80: mol_type = other DNA
caccccatctacaggaagccctgagctgcatgtgggcggcctcatctttcctgcaggggaactgtggcctccccggtcct

SEQ ID NO: 92088 - DNA, 80 bp, synthetic construct; identical to SEQ ID NO: 33314
  misc_feature 1..80: note = Artificially Synthesized Probe
  source 1..80: mol_type = other DNA

SEQ ID NO: 92089 - DNA, 80 bp, synthetic construct
  misc_feature 1..80: note = Artificially Synthesized Probe
  source 1..80: mol_type = other DNA
ccgaccccttccctgtctctgcaaatggcacccccgccccccgaatctagggggcctccagctcgttcccagccagaccc

SEQ ID NO: 92090 - DNA, 80 bp, synthetic construct; identical to SEQ ID NO: 33303
  misc_feature 1..80: note = Artificially Synthesized Probe
  source 1..80: mol_type = other DNA

SEQ ID NO: 92091 - DNA, 80 bp, synthetic construct
  misc_feature 1..80: note = Artificially Synthesized Probe
  source 1..80: mol_type = other DNA
acctgccaagccccatgcacgtgcctgcggccagctaaggtgccccagccccagagggaagctcctgacccctttctggg

SEQ ID NO: 92092 - DNA, 80 bp, synthetic construct
  misc_feature 1..80: note = Artificially Synthesized Probe
  source 1..80: mol_type = other DNA
ctccccactcctcacagccctgctgggtgctcaccgagctgatgaattctccaccctcagaatgatctggcactccacac

SEQ ID NO: 92093 - DNA, 80 bp, synthetic construct; identical to SEQ ID NO: 33315
  misc_feature 1..80: note = Artificially Synthesized Probe
  source 1..80: mol_type = other DNA

SEQ ID NO: 92094 - DNA, 80 bp, synthetic construct
  misc_feature 1..80: note = Artificially Synthesized Probe
  source 1..80: mol_type = other DNA
gagggccgtgtttccttacccggaacgcctccagctccttgtccgtgaggttggcggactgcgccaggtcccacaggtca

SEQ ID NO: 92095 - DNA, 80 bp, synthetic construct
  misc_feature 1..80: note = Artificially Synthesized Probe
  source 1..80: mol_type = other DNA
gtgcactcaaagtcttatggggcacagagggcatctgctcagtagctcacatgacctcgctgaaatgtggcttctctgtc

SEQ ID NO: 92096 - DNA, 80 bp, synthetic construct
  misc_feature 1..80: note = Artificially Synthesized Probe
  source 1..80: mol_type = other DNA
gcaagttcagccaggtccagacgcaggcacaggccgtttcccttcggtcctgctcagggtctccagcaggatgttgtgct

SEQ ID NO: 92097 - DNA, 80 bp, synthetic construct
  misc_feature 1..80: note = Artificially Synthesized Probe
  source 1..80: mol_type = other DNA
aacagtggcccctgctccctcctctgctgaccccttcctgctcaggaccccgaggaccctgggctggtggggcttgctgg

SEQ ID NO: 92098 - DNA, 80 bp, synthetic construct; identical to SEQ ID NO: 33316
  misc_feature 1..80: note = Artificially Synthesized Probe
  source 1..80: mol_type = other DNA

SEQ ID NO: 92099 - DNA, 80 bp, synthetic construct
  misc_feature 1..80: note = Artificially Synthesized Probe
  source 1..80: mol_type = other DNA
aggcggtggctctgcctggcaccggggacagagaccagccctgctgtcttatcaccatgagggcacagatgccatctcct

SEQ ID NO: 92100 - DNA, 80 bp, synthetic construct
  misc_feature 1..80: note = Artificially Synthesized Probe
  source 1..80: mol_type = other DNA
gcagtggtgcagagcctggccactgagggcctgcagtggagggagatgagctgctgagacggagccacaagctctgtggc

SEQ ID NO: 92101 - DNA, 80 bp, synthetic construct
  misc_feature 1..80: note = Artificially Synthesized Probe
  source 1..80: mol_type = other DNA
acagaccattggagactttagggatggttagtgataccagaggctaaaataatcatgtgccctaccatgcacgcagccat

SEQ ID NO: 92102 - DNA, 80 bp, synthetic construct; identical to SEQ ID NO: 33317
  misc_feature 1..80: note = Artificially Synthesized Probe
  source 1..80: mol_type = other DNA

SEQ ID NO: 92103 - DNA, 80 bp, synthetic construct
  misc_feature 1..80: note = Artificially Synthesized Probe
  source 1..80: mol_type = other DNA
cccgggcgggcactcaccagcctcagtgctgtagccctggtggctgaccctgcgcaggcggtccaggccctggttgatgc

SEQ ID NO: 92104 - DNA, 80 bp, synthetic construct
  misc_feature 1..80: note = Artificially Synthesized Probe
  source 1..80: mol_type = other DNA
tctagaacgcccactgctggggagctcaaactcgctctcatttctgggctgaaaatgtcccccttccgcggtcctgcagc

SEQ ID NO: 92105 - DNA, 80 bp, synthetic construct
  misc_feature 1..80: note = Artificially Synthesized Probe
  source 1..80: mol_type = other DNA
tccattttactccagctttgtggggtgggaaagtcacacatttggggagggtcacgagtccagaatgaaggacccatcag

SEQ ID NO: 92106 - DNA, 80 bp, synthetic construct
  misc_feature 1..80: note = Artificially Synthesized Probe
  source 1..80: mol_type = other DNA
cgcctccctgcccctgctgtgttcctgaggggagctgaggctgcccactgagcacaacgagcctcaggtgcaggaggggt

SEQ ID NO: 92107 - DNA, 80 bp, synthetic construct; identical to SEQ ID NO: 33318
  misc_feature 1..80: note = Artificially Synthesized Probe
  source 1..80: mol_type = other DNA

SEQ ID NO: 92108 - DNA, 80 bp, synthetic construct
  misc_feature 1..80: note = Artificially Synthesized Probe
  source 1..80: mol_type = other DNA
accgagctggctggggtggggagcagaagatcccaaggagggggacagggcagcagcccggtgaccccgggcttgcctgg

SEQ ID NO: 92109 - DNA, 80 bp, synthetic construct
  misc_feature 1..80: note = Artificially Synthesized Probe
  source 1..80: mol_type = other DNA
ctaccgactccatctctcctggccaaggacattgagctgagactgggctagtacaagaagtctaactgttgaccccaaat

SEQ ID NO: 92110 - DNA, 80 bp, synthetic construct; identical to SEQ ID NO: 33319
  misc_feature 1..80: note = Artificially Synthesized Probe
  source 1..80: mol_type = other DNA

SEQ ID NO: 92111 - DNA, 80 bp, synthetic construct
  misc_feature 1..80: note = Artificially Synthesized Probe
  source 1..80: mol_type = other DNA
ggaagccaccgtcttcctgagactttcccaaaccccggctcccatgcagagcagagactgcccctcacagcccccgcctt

SEQ ID NO: 92112 - DNA, 80 bp, synthetic construct
  misc_feature 1..80: note = Artificially Synthesized Probe
  source 1..80: mol_type = other DNA
gtggcagtggtgggggagcaggcatggcacccggagcactggagcccaatgcagggtgaccccttccccccagctccaaa

SEQ ID NO: 92113 - DNA, 80 bp, synthetic construct
  misc_feature 1..80: note = Artificially Synthesized Probe
  source 1..80: mol_type = other DNA
atacttggccaagatgactaggagagaggggaggttctatttgatatggtttcctgtgaaaaacagtcaaaagccaacac

SEQ ID NO: 92114 - DNA, 80 bp, synthetic construct
  misc_feature 1..80: note = Artificially Synthesized Probe
  source 1..80: mol_type = other DNA
cacgggacacccccaggacctccctctttcctaccagggacacgccggctggagtcctccatcaagctgtgtccccctga

SEQ ID NO: 92115 - DNA, 80 bp, synthetic construct; identical to SEQ ID NO: 33320
  misc_feature 1..80: note = Artificially Synthesized Probe
  source 1..80: mol_type = other DNA

SEQ ID NO: 92116 - DNA, 80 bp, synthetic construct
  misc_feature 1..80: note = Artificially Synthesized Probe
  source 1..80: mol_type = other DNA
tgggctgtgtctgtcaccacacgctgccaccaacatgatatgaaagcaggcgctcgacgcgggccctggtgccaacagga

SEQ ID NO: 92117 - DNA, 80 bp, synthetic construct
  misc_feature 1..80: note = Artificially Synthesized Probe
  source 1..80: mol_type = other DNA
ccacacccgcctccttagcgggcggtgggcttgcctgcccgccctttcctgggggctgggggaattctcccagggccccg

SEQ ID NO: 92118 - DNA, 80 bp, synthetic construct
  misc_feature 1..80: note = Artificially Synthesized Probe
  source 1..80: mol_type = other DNA
ctgggccttcacccgtgaccctactggacagaactactcccagcggggcctccacatgctctgggctcagcaggccccac

SEQ ID NO: 92119 - DNA, 80 bp, synthetic construct
  misc_feature 1..80: note = Artificially Synthesized Probe
  source 1..80: mol_type = other DNA
ggtctcaaggccacacgcagcatgtgcttcttgtgttccagcctggaagcgcttgtgatcttcctaagcgtgaaaaacca

SEQ ID NO: 92120 - DNA, 80 bp, synthetic construct; identical to SEQ ID NO: 33321
  misc_feature 1..80: note = Artificially Synthesized Probe
  source 1..80: mol_type = other DNA

SEQ ID NO: 92121 - DNA, 80 bp, synthetic construct
  misc_feature 1..80: note = Artificially Synthesized Probe
  source 1..80: mol_type = other DNA
agaaaataaatgaaataaatacatacaaaaatacacaaactttttaaaaaagtggcctggatgcctcctggccttagaaa

SEQ ID NO: 92122 - DNA, 80 bp, synthetic construct
  misc_feature 1..80: note = Artificially Synthesized Probe
  source 1..80: mol_type = other DNA
ctagcctggctcaagccttcctagttggagccaaaagctctgagccagagcccaaagtggctggtcagaccccatcaaaa

SEQ ID NO: 92123 - DNA, 80 bp, synthetic construct
  misc_feature 1..80: note = Artificially Synthesized Probe
  source 1..80: mol_type = other DNA
ggcaggggcctcctgcggccggaacgtcccctgcatccccaaccacacctggcacaacaccatggctgaggtgcgcttcc

SEQ ID NO: 92124 - DNA, 80 bp, synthetic construct
  misc_feature 1..80: note = Artificially Synthesized Probe
  source 1..80: mol_type = other DNA
gccccacactccctgcctggggaggacggacgtcatcccacacgccctgcccggggaggacagacgccaccccacactcc

SEQ ID NO: 92125 - DNA, 80 bp, synthetic construct; identical to SEQ ID NO: 33322
  misc_feature 1..80: note = Artificially Synthesized Probe
  source 1..80: mol_type = other DNA

SEQ ID NO: 92126 - DNA, 80 bp, synthetic construct
  misc_feature 1..80: note = Artificially Synthesized Probe
  source 1..80: mol_type = other DNA
agatggcggggaactggccaggacgagcctctttcctgagtgtgggcagggtctgcttctgggacgccggctcctagagt

SEQ ID NO: 92127 - DNA, 80 bp, synthetic construct
  misc_feature 1..80: note = Artificially Synthesized Probe
  source 1..80: mol_type = other DNA
agcccacttctgtgccccctgcaagctactctgtctcctccaggccccgaatgctgccctgctgcatagccagtcccttc

SEQ ID NO: 92128 - DNA, 80 bp, synthetic construct
  misc_feature 1..80: note = Artificially Synthesized Probe
  source 1..80: mol_type = other DNA
tgaacatggtggcataaaccagcaaaaatgaagccggccctctgtctttaacccgggcgcagccacatgacatgtctgct

SEQ ID NO: 92129 - DNA, 80 bp, synthetic construct; identical to SEQ ID NO: 33323
  misc_feature 1..80: note = Artificially Synthesized Probe
  source 1..80: mol_type = other DNA

SEQ ID NO: 92130 - DNA, 80 bp, synthetic construct; identical to SEQ ID NO: 33302
  misc_feature 1..80: note = Artificially Synthesized Probe
  source 1..80: mol_type = other DNA

SEQ ID NO: 92131 - DNA, 80 bp, synthetic construct
  misc_feature 1..80: note = Artificially Synthesized Probe
  source 1..80: mol_type = other DNA
ccacagtggggagtatcccacttggttcacaccaccgtcctgtgagacaggaggaggaaacggaggtggggggcagggga

SEQ ID NO: 92132 - DNA, 80 bp, synthetic construct
  misc_feature 1..80: note = Artificially Synthesized Probe
  source 1..80: mol_type = other DNA
agcagccccaaccccagtcccacgggcccacctggtgtgcgtcctctgcccgccagtgccctgccgacgggcccgtggtg

SEQ ID NO: 92133 - DNA, 80 bp, synthetic construct; identical to SEQ ID NO: 33324
  misc_feature 1..80: note = Artificially Synthesized Probe
  source 1..80: mol_type = other DNA

SEQ ID NO: 92134 - DNA, 80 bp, synthetic construct
  misc_feature 1..80: note = Artificially Synthesized Probe
  source 1..80: mol_type = other DNA
tgtgcccaatgggccccttggccaaaagccaaggagtcagaggcgtagcccacagcactgaggcgagcagccaccatccc

SEQ ID NO: 92135 - DNA, 80 bp, synthetic construct
  misc_feature 1..80: note = Artificially Synthesized Probe
  source 1..80: mol_type = other DNA
aaaaacaaaatccgacatccaaaacactgccgctctcaagcatttaggaagagggatactcgacctgcattaggaaagaa

SEQ ID NO: 92136 - DNA, 80 bp, synthetic construct
  misc_feature 1..80: note = Artificially Synthesized Probe
  source 1..80: mol_type = other DNA
cagctaccccaagaccgtctataccaccaccctggattacaactcggcaagatgctggggaggtttctgttagggtggag

SEQ ID NO: 92137 - DNA, 80 bp, synthetic construct
  misc_feature 1..80: note = Artificially Synthesized Probe
  source 1..80: mol_type = other DNA
tctccccatcttcgtccaagccgtcaagctttagtttcttccaggcgagttcgtccctctcctgtatcttcagatcagcg

SEQ ID NO: 92138 - DNA, 80 bp, synthetic construct; identical to SEQ ID NO: 33325
  misc_feature 1..80: note = Artificially Synthesized Probe
  source 1..80: mol_type = other DNA

SEQ ID NO: 92139 - DNA, 80 bp, synthetic construct
  misc_feature 1..80: note = Artificially Synthesized Probe
  source 1..80: mol_type = other DNA
gatacatattgcaaggacacagacacctagaagttcttttttaaaaaaaatcactgtaatctcagatctgccccatcttc

SEQ ID NO: 92140 - DNA, 80 bp, synthetic construct
  misc_feature 1..80: note = Artificially Synthesized Probe
  source 1..80: mol_type = other DNA
gctgccgcactggggctgaggaacttccccgccccaccctcatccctctccgcagggcaggccacgcttcattcatccca

SEQ ID NO: 92141 - DNA, 80 bp, synthetic construct
  misc_feature 1..80: note = Artificially Synthesized Probe
  source 1..80: mol_type = other DNA
gaatgaaacccaccggccagctctcatcaactctggcctcggggctggcccggccgctaagaggcgtgcgctggggcagg

SEQ ID NO: 92142 - DNA, 80 bp, synthetic construct
  misc_feature 1..80: note = Artificially Synthesized Probe
  source 1..80: mol_type = other DNA
attaaagcctctgtggagtcctgcagcaaaggaagtgctcggcactgtgcagtgcagatccccaaatctctcggctctca

SEQ ID NO: 92143 - DNA, 80 bp, synthetic construct; identical to SEQ ID NO: 33326
  misc_feature 1..80: note = Artificially Synthesized Probe
  source 1..80: mol_type = other DNA

SEQ ID NO: 92144 - DNA, 80 bp, synthetic construct
  misc_feature 1..80: note = Artificially Synthesized Probe
  source 1..80: mol_type = other DNA
gctagtatccaaagtatgtgtgttatatttcaataaagtttacgtaaaacagtgaacatccccacgaagcgtcaagagcc

SEQ ID NO: 92145 - DNA, 80 bp, synthetic construct
  misc_feature 1..80: note = Artificially Synthesized Probe
  source 1..80: mol_type = other DNA
acactccggaacctcctcgcctcactctgcctgtatctagactgagcccatcctgctccctgcagctcagtctgtgttgg

SEQ ID NO: 92146 - DNA, 80 bp, synthetic construct; identical to SEQ ID NO: 33327
  misc_feature 1..80: note = Artificially Synthesized Probe
  source 1..80: mol_type = other DNA

SEQ ID NO: 92147 - DNA, 80 bp, synthetic construct
  misc_feature 1..80: note = Artificially Synthesized Probe
  source 1..80: mol_type = other DNA
ccttcgacacacccctacctgtgtgcctcttccccagccagccccatccacccagccagccccatccacccagccccttc

SEQ ID NO: 92148 - DNA, 80 bp, synthetic construct; identical to SEQ ID NO: 33304
  misc_feature 1..80: note = Artificially Synthesized Probe
  source 1..80: mol_type = other DNA

SEQ ID NO: 92149 - DNA, 80 bp, synthetic construct
  misc_feature 1..80: note = Artificially Synthesized Probe
  source 1..80: mol_type = other DNA
cggtgcctcaggaggagggggagcccacacctgcctatcttgtttgtgacccaaactcctggaggaacaggtctgcttcc

SEQ ID NO: 92150 - DNA, 80 bp, synthetic construct
  misc_feature 1..80: note = Artificially Synthesized Probe
  source 1..80: mol_type = other DNA
ccttgaggggccccgggtctgccctctttggctgcaggggagaggatgcaggtgtcccatgactgcccatgggctgcctg

SEQ ID NO: 92151 - DNA, 80 bp, synthetic construct
  misc_feature 1..80: note = Artificially Synthesized Probe
  source 1..80: mol_type = other DNA
aaaatctgcaacccacaggggaaagtcattttctccctctgattccccaactctcaggcaacagggggtctaaatttcac

SEQ ID NO: 92152 - DNA, 80 bp, synthetic construct; identical to SEQ ID NO: 33328
  misc_feature 1..80: note = Artificially Synthesized Probe
  source 1..80: mol_type = other DNA

SEQ ID NO: 92153 - DNA, 80 bp, synthetic construct
  misc_feature 1..80: note = Artificially Synthesized Probe
  source 1..80: mol_type = other DNA
ggacctcagcagtggcccttccccacacagcaccacccgcgtgccagcagagctttctggaactttccaataacctgctg

SEQ ID NO: 92154 - DNA, 80 bp, synthetic construct
  misc_feature 1..80: note = Artificially Synthesized Probe
  source 1..80: mol_type = other DNA
acctgagtgcccgcgccagactgcaaggcacccaccatgaggagcaggctgtggcggtgaccaaggcttcctggcacgct

SEQ ID NO: 92155 - DNA, 80 bp, synthetic construct; identical to SEQ ID NO: 33329
  misc_feature 1..80: note = Artificially Synthesized Probe
  source 1..80: mol_type = other DNA

SEQ ID NO: 92156 - DNA, 80 bp, synthetic construct
  misc_feature 1..80: note = Artificially Synthesized Probe
  source 1..80: mol_type = other DNA
aggatcacttgagcccaggagttcgagaccagcctggccaacatggtgaaaccccgtctctactaaaaatataaaaatta

SEQ ID NO: 92157 - DNA, 80 bp, synthetic construct
  misc_feature 1..80: note = Artificially Synthesized Probe
  source 1..80: mol_type = other DNA
aacaaaaaaccaaaaaaactaaggacctatggccaaggactccgagctcatggcaccgtgcagcccaggccaagaggtac

SEQ ID NO: 92158 - DNA, 80 bp, synthetic construct
  misc_feature 1..80: note = Artificially Synthesized Probe
  source 1..80: mol_type = other DNA
agcctctgctcaggagtcttgcaacacagtggagcccgcctgtgaaagaggaactgggagagtcacagaaagtcaagatt

SEQ ID NO: 92159 - DNA, 80 bp, synthetic construct
  misc_feature 1..80: note = Artificially Synthesized Probe
  source 1..80: mol_type = other DNA
caccactcctggttaatttttgtatttttagtagagatgggattttgtgatgttggccaggctggtctcaaactcctggc

SEQ ID NO: 92160 - DNA, 80 bp, synthetic construct; identical to SEQ ID NO: 33330
  misc_feature 1..80: note = Artificially Synthesized Probe
  source 1..80: mol_type = other DNA

SEQ ID NO: 92161 - DNA, 80 bp, synthetic construct
  misc_feature 1..80: note = Artificially Synthesized Probe
  source 1..80: mol_type = other DNA
cctagagcggcgagtcaggtggggtaagaagccgactggagtgactatttgcacgaacaattctctccccctacgtttga

SEQ ID NO: 92162 - DNA, 80 bp, synthetic construct
  misc_feature 1..80: note = Artificially Synthesized Probe
  source 1..80: mol_type = other DNA
ggacgggtctgacgcctgcacacttggctccaggatagaacaccctcacagcaccgccaccctccaagcttccgttatct

SEQ ID NO: 92163 - DNA, 80 bp, synthetic construct
  misc_feature 1..80: note = Artificially Synthesized Probe
  source 1..80: mol_type = other DNA
tctgttcagcaaaaaagacttgcccacacaactagaacttcaggacttaaagggaccagaaagatcatctagtccaaggc

SEQ ID NO: 92164 - DNA, 80 bp, synthetic construct; identical to SEQ ID NO: 33331
  misc_feature 1..80: note = Artificially Synthesized Probe
  source 1..80: mol_type = other DNA

SEQ ID NO: 92165 - DNA, 80 bp, synthetic construct
  misc_feature 1..80: note = Artificially Synthesized Probe
  source 1..80: mol_type = other DNA
ggggggactccacccactcaacagatgcccagtgcagtgggcacggggaggcagcactgcatcccggctgctcctggtca

SEQ ID NO: 92166 - DNA, 80 bp, synthetic construct
  misc_feature 1..80: note = Artificially Synthesized Probe
  source 1..80: mol_type = other DNA
actgctggtcccaggagcagttcaggaagggcctgtggagctgatgcccaggcgtcaatccccatccccacgcagtctta

SEQ ID NO: 92167 - DNA, 80 bp, synthetic construct
  misc_feature 1..80: note = Artificially Synthesized Probe
  source 1..80: mol_type = other DNA
gagatgagataatgaggcccagatggtcggcatagttcgaaaacacccatttcaggtgttttcaggaacacctaacaaat

SEQ ID NO: 92168 - DNA, 80 bp, synthetic construct; identical to SEQ ID NO: 33332
  misc_feature 1..80: note = Artificially Synthesized Probe
  source 1..80: mol_type = other DNA

SEQ ID NO: 92169 - DNA, 80 bp, synthetic construct
  misc_feature 1..80: note = Artificially Synthesized Probe
  source 1..80: mol_type = other DNA
agggaacaggcaaaggctcgggaggcaggagacctgtgatctagcctggttctgtccctacgctcgggtcagcaggccgc

SEQ ID NO: 92170 - DNA, 80 bp, synthetic construct
  misc_feature 1..80: note = Artificially Synthesized Probe
  source 1..80: mol_type = other DNA
ctgcctcccaggttcaagccattctcctgcctcagcctcccaagtagctgggattacaggtgcctgccaccatgcctggc

SEQ ID NO: 92171 - DNA, 80 bp, synthetic construct
  misc_feature 1..80: note = Artificially Synthesized Probe
  source 1..80: mol_type = other DNA
aggtgccccggctgcgcccccctccgcctccgacccctgggccccgctccaacgaccccaaccacggcccccgcccccag

SEQ ID NO: 92172 - DNA, 80 bp, synthetic construct
  misc_feature 1..80: note = Artificially Synthesized Probe
  source 1..80: mol_type = other DNA
agggcccgaggaagagcagcagcagtagcagcgccgggagcccgcgcagaaacgacctgaccctccgcggcgccatcttc

SEQ ID NO: 92173 - DNA, 80 bp, synthetic construct
  misc_feature 1..80: note = Artificially Synthesized Probe
  source 1..80: mol_type = other DNA
tatcctggtttgctgctgtgtagtttccccaaagtctcaatttgatgagaaaatagaaagaccactagaacggaaaaata

SEQ ID NO: 92174 - DNA, 80 bp, synthetic construct; identical to SEQ ID NO: 33305
  misc_feature 1..80: note = Artificially Synthesized Probe
  source 1..80: mol_type = other DNA

SEQ ID NO: 92175 - DNA, 80 bp, synthetic construct
  misc_feature 1..80: note = Artificially Synthesized Probe
  source 1..80: mol_type = other DNA
gcctgtagtcccagctactcagaagaccgaggtgggaggctcgcttgagcccaggagtttgaggttgcagtgagctatga

SEQ ID NO: 92176 - DNA, 80 bp, synthetic construct
  misc_feature 1..80: note = Artificially Synthesized Probe
  source 1..80: mol_type = other DNA
ctggcaccagggaagtgcaagttactacaaaacgaaaacaaaagaatcaaatggatttaattgtctttttgttactgatt

SEQ ID NO: 92177 - DNA, 80 bp, synthetic construct
  misc_feature 1..80: note = Artificially Synthesized Probe
  source 1..80: mol_type = other DNA
taatgggcataagtagaccaagtttttaactgtattatcccattctttcatattcttcatcaatgatctaagcctctatc

SEQ ID NO: 92178 - DNA, 80 bp, synthetic construct; identical to SEQ ID NO: 33306
  misc_feature 1..80: note = Artificially Synthesized Probe
  source 1..80: mol_type = other DNA

SEQ ID NO: 92179 - DNA, 80 bp, synthetic construct
  misc_feature 1..80: note = Artificially Synthesized Probe
  source 1..80: mol_type = other DNA
gcacctatctgcagcaagctgaagcccccaaatctaggccctgagggtgaatcggtaccaaccccctcgccctatcctga

SEQ ID NO: 92180 - DNA, 80 bp, synthetic construct
  misc_feature 1..80: note = Artificially Synthesized Probe
  source 1..80: mol_type = other DNA
gtgcagtggtgtgatctcagctcactgcaacctccacctcctgagttcaagtgattctcctgcctcagcctccagagtag

SEQ ID NO: 92181 - DNA, 80 bp, synthetic construct
  misc_feature 1..80: note = Artificially Synthesized Probe
  source 1..80: mol_type = other DNA
tgccaggcctcatgtctatttttaaaaatcaagttcttaatgaaaaacctaagcaaaaagaaaatggcaggcatagatgg

SEQ ID NO: 92182 - DNA, 80 bp, synthetic construct; identical to SEQ ID NO: 33307
  misc_feature 1..80: note = Artificially Synthesized Probe
  source 1..80: mol_type = other DNA

SEQ ID NO: 92183 - DNA, 80 bp, synthetic construct
  misc_feature 1..80: note = Artificially Synthesized Probe
  source 1..80: mol_type = other DNA
gtcagcgtaattcactacagtaatgcggtaaggaagtgacctcatgagcatctcactaggtgcaggaaaggcagctgacc

SEQ ID NO: 92184 - DNA, 80 bp, synthetic construct
  misc_feature 1..80: note = Artificially Synthesized Probe
  source 1..80: mol_type = other DNA
gtgagaagccgaggcacagactgacaaggggaagcaaagccactgtcagacagaggacacgcgtgtgcacacggaaaccc

SEQ ID NO: 92185 - DNA, 80 bp, synthetic construct
  misc_feature 1..80: note = Artificially Synthesized Probe
  source 1..80: mol_type = other DNA
agaaaactccagttcattgttgggagaagttgaagatgaactcaatacctggagtcatacatggcagtcaacgcatggac

SEQ ID NO: 92186 - DNA, 80 bp, synthetic construct; identical to SEQ ID NO: 33308
  misc_feature 1..80: note = Artificially Synthesized Probe
  source 1..80: mol_type = other DNA

SEQ ID NO: 92187 - DNA, 80 bp, synthetic construct
  misc_feature 1..80: note = Artificially Synthesized Probe
  source 1..80: mol_type = other DNA
gacgccgactggagtcacacacggcagtcaacgcgtggacaccggagactgctgagacgccgactggagtcacacacggc

SEQ ID NO: 92188 - DNA, 80 bp, synthetic construct
  misc_feature 1..80: note = Artificially Synthesized Probe
  source 1..80: mol_type = other DNA
acggcagtcaacgcgtggacactggagactgttaagacaccgattcttcccaacatgtattcaagacattcagaaaaggt

SEQ ID NO: 92189 - DNA, 80 bp, synthetic construct
  misc_feature 1..80: note = Artificially Synthesized Probe
  source 1..80: mol_type = other DNA
gaatctttaaaaagaagagttggaaaatgcacatcacctcgattcagggtttattataaacccaactgtagccaagacag

SEQ ID NO: 92190 - DNA, 80 bp, synthetic construct
  misc_feature 1..80: note = Artificially Synthesized Probe
  source 1..80: mol_type = other DNA
gccgggtgtggtgacacacgcctgtggtcgcagctactactcaggagactgaggcgaggggattgctggagtatgggagg

SEQ ID NO: 92191 - DNA, 80 bp, synthetic construct
  misc_feature 1..80: note = Artificially Synthesized Probe
  source 1..80: mol_type = other DNA
ccccaaataattcttcacaaacacttaacagttcaggccgggcacagaagctcatgcctgtaatcccagcactttgggca

SEQ ID NO: 92192 - DNA, 80 bp, synthetic construct; identical to SEQ ID NO: 33309
  misc_feature 1..80: note = Artificially Synthesized Probe
  source 1..80: mol_type = other DNA

SEQ ID NO: 92193 - DNA, 80 bp, synthetic construct
  misc_feature 1..80: note = Artificially Synthesized Probe
  source 1..80: mol_type = other DNA
acacagactgcccagagccatgcacgtggaacccatggcaggcgggaggtagggagctgcggtggtaggagtcagaatgg

SEQ ID NO: 92194 - DNA, 80 bp, synthetic construct
  misc_feature 1..80: note = Artificially Synthesized Probe
  source 1..80: mol_type = other DNA
ccattatacagtaagacacgctactccgcaattagacaccacaaaacgccagccaggctgtccataattaaaaataccga

SEQ ID NO: 92195 - DNA, 80 bp, synthetic construct; identical to SEQ ID NO: 33310
  misc_feature 1..80: note = Artificially Synthesized Probe
  source 1..80: mol_type = other DNA

SEQ ID NO: 92196 - DNA, 80 bp, synthetic construct
  misc_feature 1..80: note = Artificially Synthesized Probe
  source 1..80: mol_type = other DNA
tacagcaatgaaaaggaacacacttctgctagatgacagggctgagtctcaccaacacactgagtaccttaaggctctca

SEQ ID NO: 92197 - DNA, 80 bp, synthetic construct
  misc_feature 1..80: note = Artificially Synthesized Probe
  source 1..80: mol_type = other DNA
gaaatgatagcttagcggatgtttggcagatctcaacagtcaagccaagatccagctgcagtcaaaacacaatacgcctg

SEQ ID NO: 92198 - DNA, 80 bp, synthetic construct
  misc_feature 1..80: note = Artificially Synthesized Probe
  source 1..80: mol_type = other DNA
gcctcttccaggctcagacacgggaagggaaccacgctcggagccggacccgagcctcttccaggctcagacacgggaag

SEQ ID NO: 92199 - DNA, 80 bp, synthetic construct
  misc_feature 1..80: note = Artificially Synthesized Probe
  source 1..80: mol_type = other DNA
gaaccacgcctggagccagacccgagcctcttccaggctcagacacaggaacattctcggagccggacctgagcaaccgc

SEQ ID NO: 92200 - DNA, 80 bp, synthetic construct; identical to SEQ ID NO: 33311
  misc_feature 1..80: note = Artificially Synthesized Probe
  source 1..80: mol_type = other DNA

SEQ ID NO: 92201 - DNA, 80 bp, synthetic construct
  misc_feature 1..80: note = Artificially Synthesized Probe
  source 1..80: mol_type = other DNA
actgcactctattttttaaggactctgtgcatggtatttccggtggcagatgtgtaagattttttatgtaaatcgtgttg

SEQ ID NO: 92202 - DNA, 80 bp, synthetic construct
  misc_feature 1..80: note = Artificially Synthesized Probe
  source 1..80: mol_type = other DNA
cagacccaaatgctaccaccaccaagccctgtgtcgcgacggcagcggctgcagtcaccagaaacaatccttcctgcctc

SEQ ID NO: 92203 - DNA, 80 bp, synthetic construct
  misc_feature 1..80: note = Artificially Synthesized Probe
  source 1..80: mol_type = other DNA
gtcaggagttcgagaccagcctggccaacatggtgaaaccctgtctctactaaaaatacaaacattagcccactgtggtg

SEQ ID NO: 92204 - DNA, 80 bp, synthetic construct
  misc_feature 1..80: note = Artificially Synthesized Probe
  source 1..80: mol_type = other DNA
tcctgcagatgcttcttcacctgtggacagaaacgtctcatcagctggggacagcgcgcctcgaggccagctctgtgagc

SEQ ID NO: 92205 - DNA, 80 bp, synthetic construct; identical to SEQ ID NO: 33312
  misc_feature 1..80: note = Artificially Synthesized Probe
  source 1..80: mol_type = other DNA

SEQ ID NO: 92206 - DNA, 80 bp, synthetic construct
  misc_feature 1..80: note = Artificially Synthesized Probe
  source 1..80: mol_type = other DNA
accgccacgcccggctaattttttctacttttggtagagatggggttctaccatgttgcccaggctggtctcgaactcct

SEQ ID NO: 92207 - DNA, 80 bp, synthetic construct
  misc_feature 1..80: note = Artificially Synthesized Probe
  source 1..80: mol_type = other DNA
ctttgtctaacagtggttttttaatctgtaaaagttaaaggatgtattataggcaaaaaagagaggaagttatacttcat

SEQ ID NO: 92208 - DNA, 80 bp, synthetic construct
  misc_feature 1..80: note = Artificially Synthesized Probe
  source 1..80: mol_type = other DNA
ctgaaacagtgatttctacatgaaccttagactctgtgaaaaacaataatattgatgaagatctaggcaagtataataca

SEQ ID NO: 92209 - DNA, 80 bp, synthetic construct
  misc_feature 1..80: note = Artificially Synthesized Probe
  source 1..80: mol_type = other DNA
gcagtatttatccaacaatggagtatttacggtgtgcccgtgaagtggaatggtaagtggccactccaattaatgagaat

SEQ ID NO: 92210 - DNA, 80 bp, synthetic construct
  misc_feature 1..80: note = Artificially Synthesized Probe
  source 1..80: mol_type = other DNA
tgaatcttctgagtagagtatttatgagtgggattgagactgaacttagggatcatgtgtatgtgtaagccatcacagac

SEQ ID NO: 92211 - DNA, 80 bp, synthetic construct
  misc_feature 1..80: note = Artificially Synthesized Probe
  source 1..80: mol_type = other DNA
agaaacactaaaatgtgtttacatgtgaaagaatcatcacgttgatttacgtcaaagaacatcatatttgtttatcttaa

SEQ ID NO: 92212 - DNA, 80 bp, synthetic construct
  misc_feature 1..80: note = Artificially Synthesized Probe
  source 1..80: mol_type = other DNA
ctattaagatatggatttagaatgaccaaaaagttacctttttgtttgaagatgtaatctctgctttttcaaattctgca

SEQ ID NO: 92213 - DNA, 80 bp, synthetic construct; identical to SEQ ID NO: 33344
  misc_feature 1..80: note = Artificially Synthesized Probe
  source 1..80: mol_type = other DNA

SEQ ID NO: 92214 - DNA, 80 bp, synthetic construct
  misc_feature 1..80: note = Artificially Synthesized Probe
  source 1..80: mol_type = other DNA
gtagtctcagaaaaatgaaaatagtccatagtatctactgaaaaagagtaccacaaattcctaggaaagacagatagtgg

SEQ ID NO: 92215 - DNA, 80 bp, synthetic construct
  misc_feature 1..80: note = Artificially Synthesized Probe
  source 1..80: mol_type = other DNA
agtcatctactgacagtggcagaagttcaatgattttcctccccagctcataggttgtcctcagcgttgttcaacactct

SEQ ID NO: 92216 - DNA, 80 bp, synthetic construct
  misc_feature 1..80: note = Artificially Synthesized Probe
  source 1..80: mol_type = other DNA
cttttttgtatatttcctatttcaaagttaataaatgtatacttttaaattccattatttagaaaacttccaatgctact

SEQ ID NO: 92217 - DNA, 80 bp, synthetic construct
  misc_feature 1..80: note = Artificially Synthesized Probe
  source 1..80: mol_type = other DNA
taaatctcgatggcctttgtaatacctaggaacagtagaaacagagaacttttaaaagggtgcttagtggtacccaagag

SEQ ID NO: 92218 - DNA, 80 bp, synthetic construct; identical to SEQ ID NO: 33345
  misc_feature 1..80: note = Artificially Synthesized Probe
  source 1..80: mol_type = other DNA

SEQ ID NO: 92219 - DNA, 80 bp, synthetic construct
  misc_feature 1..80: note = Artificially Synthesized Probe
  source 1..80: mol_type = other DNA
atacagcaaaattaagaaacccacattcatgtaatctaagaaattcaaagattacagtgaaaatctctctgggaactatc

SEQ ID NO: 92220 - DNA, 80 bp, synthetic construct
  misc_feature 1..80: note = Artificially Synthesized Probe
  source 1..80: mol_type = other DNA
tcaaactccactgaaatcagtcttattacatttaataatttcaaaagtcacccggaaggcatagtctcatttctttctaa

SEQ ID NO: 92221 - DNA, 80 bp, synthetic construct; identical to SEQ ID NO: 33346
  misc_feature 1..80: note = Artificially Synthesized Probe
  source 1..80: mol_type = other DNA

SEQ ID NO: 92222 - DNA, 80 bp, synthetic construct
  misc_feature 1..80: note = Artificially Synthesized Probe
  source 1..80: mol_type = other DNA
tggcacgtgccttaatcttagctacttaggaggctgaggcaggagaatcgcttgtaaccagaaggtggaggttgcagtga

SEQ ID NO: 92223 - DNA, 80 bp, synthetic construct; identical to SEQ ID NO: 33334
  misc_feature 1..80: note = Artificially Synthesized Probe
  source 1..80: mol_type = other DNA

SEQ ID NO: 92224 - DNA, 80 bp, synthetic construct
  misc_feature 1..80: note = Artificially Synthesized Probe
  source 1..80: mol_type = other DNA
acaggtttgaagagtggagatgacttgcctatggttacattggtggtgactaaaccccacaatcatcttcagcaatgatt

SEQ ID NO: 92225 - DNA, 80 bp, synthetic construct
  misc_feature 1..80: note = Artificially Synthesized Probe
  source 1..80: mol_type = other DNA
ctaccgcaacctcagctttattttcttccctacttccaaaaagacatcatcaagcaagacccagttacactaaagcatta

SEQ ID NO: 92226 - DNA, 80 bp, synthetic construct; identical to SEQ ID NO: 33347
  misc_feature 1..80: note = Artificially Synthesized Probe
  source 1..80: mol_type = other DNA

SEQ ID NO: 92227 - DNA, 80 bp, synthetic construct
  misc_feature 1..80: note = Artificially Synthesized Probe
  source 1..80: mol_type = other DNA
ccaaccattatcatctcatgctagaaatcaactaacaattttggtactagtcagcattatgatttcctgctgttttcctc

SEQ ID NO: 92228 - DNA, 80 bp, synthetic construct
  misc_feature 1..80: note = Artificially Synthesized Probe
  source 1..80: mol_type = other DNA
gccaatcattaatccacaaacccttggcaacttccttctcaaactctgccatcctacaattatcctacaattatcacatg

SEQ ID NO: 92229 - DNA, 80 bp, synthetic construct
  misc_feature 1..80: note = Artificially Synthesized Probe
  source 1..80: mol_type = other DNA
agaatccatgttcctatttggtttgcttagagtcctcctctgatacctgctctccttgaggtcttggaagcaggaatcta

SEQ ID NO: 92230 - DNA, 80 bp, synthetic construct; identical to SEQ ID NO: 33348
  misc_feature 1..80: note = Artificially Synthesized Probe
  source 1..80: mol_type = other DNA

SEQ ID NO: 92231 - DNA, 80 bp, synthetic construct
  misc_feature 1..80: note = Artificially Synthesized Probe
  source 1..80: mol_type = other DNA
aaagacctggtcttaagatatggggtgtacctctgcccctccctgtttctctgaaacctggaagaggtggcgacttgact

SEQ ID NO: 92232 - DNA, 80 bp, synthetic construct
  misc_feature 1..80: note = Artificially Synthesized Probe
  source 1..80: mol_type = other DNA
aagccacttaaccttacagcaaaaaacagcaactctgttatagcagcttaacccttaccccattaaatacagctttaaca

SEQ ID NO: 92233 - DNA, 80 bp, synthetic construct
  misc_feature 1..80: note = Artificially Synthesized Probe
  source 1..80: mol_type = other DNA
ggatttgtaattaagctgctgatgagatttacaaagcagtttaggtggcataagtctttaaggtctggaggatagaatgg

SEQ ID NO: 92234 - DNA, 80 bp, synthetic construct
  misc_feature 1..80: note = Artificially Synthesized Probe
  source 1..80: mol_type = other DNA
gacaggtgaggagaaaatacatagtaaatgctggctcgttattgcattttattctctcccttctctcatccattcatctt

SEQ ID NO: 92235 - DNA, 80 bp, synthetic construct; identical to SEQ ID NO: 33349
  misc_feature 1..80: note = Artificially Synthesized Probe
  source 1..80: mol_type = other DNA

SEQ ID NO: 92236 - DNA, 80 bp, synthetic construct
  misc_feature 1..80: note = Artificially Synthesized Probe
  source 1..80: mol_type = other DNA
accacgcctgactcattacttgtatttttagtagagacggggtttcaccgtgtcagccaggatggtctcgatctcctgac

SEQ ID NO: 92237 - DNA, 80 bp, synthetic construct
  misc_feature 1..80: note = Artificially Synthesized Probe
  source 1..80: mol_type = other DNA
attctactaaatgaacactctactttagccacactagtctgctcatcagtcctgaaacatgacttaaaatttcctgcctt

SEQ ID NO: 92238 - DNA, 80 bp, synthetic construct
  misc_feature 1..80: note = Artificially Synthesized Probe
  source 1..80: mol_type = other DNA
atcatggctgatttcaagccaccaatataatgtcactgaatgaagaggtaagaagaaatgcatacaattggatctcacca

SEQ ID NO: 92239 - DNA, 80 bp, synthetic construct
  misc_feature 1..80: note = Artificially Synthesized Probe
  source 1..80: mol_type = other DNA
gtaccgtcacaggctgattactacctcgtattattgattatcttttttttcaggtcttgctcttccaagtagattgtaaa

SEQ ID NO: 92240 - DNA, 80 bp, synthetic construct; identical to SEQ ID NO: 33350
  misc_feature 1..80: note = Artificially Synthesized Probe
  source 1..80: mol_type = other DNA

SEQ ID NO: 92241 - DNA, 80 bp, synthetic construct
  misc_feature 1..80: note = Artificially Synthesized Probe
  source 1..80: mol_type = other DNA
aactatctaccttggtaacagtctgttaccaagtcacttaaccccaatgacattagttttactatctgctaaatgagagg

SEQ ID NO: 92242 - DNA, 80 bp, synthetic construct
  misc_feature 1..80: note = Artificially Synthesized Probe
  source 1..80: mol_type = other DNA
ctagtgtcttgaaattgtaccacaaattgtgtatgtgtgtttagggggaaggggatagaagagaaatgggtaaggtacca

SEQ ID NO: 92243 - DNA, 80 bp, synthetic construct
  misc_feature 1..80: note = Artificially Synthesized Probe
  source 1..80: mol_type = other DNA
atcttacttatcatattaacagtcttgtgtagttattatctgcaatttactaatgaagaacctgagcctgattccaaagc

SEQ ID NO: 92244 - DNA, 80 bp, synthetic construct; identical to SEQ ID NO: 33351
  misc_feature 1..80: note = Artificially Synthesized Probe
  source 1..80: mol_type = other DNA

SEQ ID NO: 92245 - DNA, 80 bp, synthetic construct
  misc_feature 1..80: note = Artificially Synthesized Probe
  source 1..80: mol_type = other DNA
taaactcgtttcttggaataaaatcttcatttgtggaaatggaatgatgtctcttagtagacagtgttcatttagggtgt

SEQ ID NO: 92246 - DNA, 80 bp, synthetic construct
  misc_feature 1..80: note = Artificially Synthesized Probe
  source 1..80: mol_type = other DNA
ggagggattaatgatattttttgagcaagccaaaacaaaggaaatgtcacccaaattcctcagctgtaatacggggtgct

SEQ ID NO: 92247 - DNA, 80 bp, synthetic construct
  misc_feature 1..80: note = Artificially Synthesized Probe
  source 1..80: mol_type = other DNA
tgtgtgtgtgcgtaaacttggagcttcttgaaatagagttaagaaccctgccgtgcaccttaggccggcagcagtttcct

SEQ ID NO: 92248 - DNA, 80 bp, synthetic construct
  misc_feature 1..80: note = Artificially Synthesized Probe
  source 1..80: mol_type = other DNA
ccggcgcagctccccttctcagggaggctgaggtgcggccagacccaacgaggccacgtaatcattccgggcccacccgc

SEQ ID NO: 92249 - DNA, 80 bp, synthetic construct; identical to SEQ ID NO: 33352
  misc_feature 1..80: note = Artificially Synthesized Probe
  source 1..80: mol_type = other DNA

SEQ ID NO: 92250 - DNA, 80 bp, synthetic construct
  misc_feature 1..80: note = Artificially Synthesized Probe
  source 1..80: mol_type = other DNA
ctggagttgcgtgtggccaccaacgcgcttcgcgcctcgtggcgtccgcttatggattgttgggaagttcttgtccagaa

SEQ ID NO: 92251 - DNA, 80 bp, synthetic construct
  misc_feature 1..80: note = Artificially Synthesized Probe
  source 1..80: mol_type = other DNA
tagagcttcaaacgacccctccccatgactccgcccattattattactgtgttgttattatcttctcttatatttccagc

SEQ ID NO: 92252 - DNA, 80 bp, synthetic construct; identical to SEQ ID NO: 33353
  misc_feature 1..80: note = Artificially Synthesized Probe
  source 1..80: mol_type = other DNA

SEQ ID NO: 92253 - DNA, 80 bp, synthetic construct
  misc_feature 1..80: note = Artificially Synthesized Probe
  source 1..80: mol_type = other DNA
ccttgggtcaagaacagtaaacaaggttctcctgtgtgtcacctggagcattccaatgcacggaatgatggcctgaaggc

SEQ ID NO: 92254 - DNA, 80 bp, synthetic construct
  misc_feature 1..80: note = Artificially Synthesized Probe
  source 1..80: mol_type = other DNA
taccatcccacctccccatttctgtttagtgagtgttgttgaatttggttgccattatttagtgcctactatgagctatt

SEQ ID NO: 92255 - DNA, 80 bp, synthetic construct; identical to SEQ ID NO: 33335
  misc_feature 1..80: note = Artificially Synthesized Probe
  source 1..80: mol_type = other DNA

SEQ ID NO: 92256 - DNA, 80 bp, synthetic construct
  misc_feature 1..80: note = Artificially Synthesized Probe
  source 1..80: mol_type = other DNA
caaaagcctccaaaccagttgtcaccaacccactcacctctattcaagacagaggtcattacctttaagtataatatttc

SEQ ID NO: 92257 - DNA, 80 bp, synthetic construct
  misc_feature 1..80: note = Artificially Synthesized Probe
  source 1..80: mol_type = other DNA
ggtcatcagcttgcactgctgaaaagctcgtttattttctcccaggccaaatcttgtgattgcgaagtgttatcaattca

SEQ ID NO: 92258 - DNA, 80 bp, synthetic construct
  misc_feature 1..80: note = Artificially Synthesized Probe
  source 1..80: mol_type = other DNA
aaatcttctataccaaggaggttaatcaccattagccaatctacccaacagagttgagtgttgttacataagctgtctaa

SEQ ID NO: 92259 - DNA, 80 bp, synthetic construct; identical to SEQ ID NO: 33354
  misc_feature 1..80: note = Artificially Synthesized Probe
  source 1..80: mol_type = other DNA

SEQ ID NO: 92260 - DNA, 80 bp, synthetic construct
  misc_feature 1..80: note = Artificially Synthesized Probe
  source 1..80: mol_type = other DNA
taagttcccagtcatcatactaagaccaccagtttcagggtgtttgcaacctagacttggcaaaaggaggaatggaaagc

SEQ ID NO: 92261 - DNA, 80 bp, synthetic construct
  misc_feature 1..80: note = Artificially Synthesized Probe
  source 1..80: mol_type = other DNA
gctgcccctgcactataaattttggggggatgcagggggactaaggtgaggctttacttaagtagaaagaggaaatgaag

SEQ ID NO: 92262 - DNA, 80 bp, synthetic construct
  misc_feature 1..80: note = Artificially Synthesized Probe
  source 1..80: mol_type = other DNA
attattttaggacattattcttaagaagacaggatctttgcagcatggcttcttgcatgaagttctaccatacaagttct

SEQ ID NO: 92263 - DNA, 80 bp, synthetic construct; identical to SEQ ID NO: 33355
  misc_feature 1..80: note = Artificially Synthesized Probe
  source 1..80: mol_type = other DNA

SEQ ID NO: 92264 - DNA, 80 bp, synthetic construct
  misc_feature 1..80: note = Artificially Synthesized Probe
  source 1..80: mol_type = other DNA
tttcactgataatctcaatgcattaacaacaccccaaagggaacaaacaccgaaaccatcaaaatgagaagtctacctca

SEQ ID NO: 92265 - DNA, 80 bp, synthetic construct
  misc_feature 1..80: note = Artificially Synthesized Probe
  source 1..80: mol_type = other DNA
aatggaaatctggatactcgcaagacacaatggggaagggaataatgaacaagatgggattggtctctttcaaaaatggc

SEQ ID NO: 92266 - DNA, 80 bp, synthetic construct; identical to SEQ ID NO: 33356
  misc_feature 1..80: note = Artificially Synthesized Probe
  source 1..80: mol_type = other DNA

SEQ ID NO: 92267 - DNA, 80 bp, synthetic construct
  misc_feature 1..80: note = Artificially Synthesized Probe
  source 1..80: mol_type = other DNA
ttcactaaatgtttccatggacttctggcaatgtaagggtgttcaccaattgcatttcatcatagaaaatgtaaacaaaa

SEQ ID NO: 92268 - DNA, 80 bp, synthetic construct
  misc_feature 1..80: note = Artificially Synthesized Probe
  source 1..80: mol_type = other DNA
attacatttattctgagtccagatactttctaaactgtagaagtgcaggatggatttgacttatccattagtaatacaga

SEQ ID NO: 92269 - DNA, 80 bp, synthetic construct
  misc_feature 1..80: note = Artificially Synthesized Probe
  source 1..80: mol_type = other DNA
atgtcatttttagccagcttatatgagtttgtcttcccaactactatgttgcaagctccttgaaggaagaaatatttatt

SEQ ID NO: 92270 - DNA, 80 bp, synthetic construct
  misc_feature 1..80: note = Artificially Synthesized Probe
  source 1..80: mol_type = other DNA
ttggaaagcatatcataaggcagcagacatattcagctatccctgtttcccatgttaaatgtaactttgaggtgatttat

SEQ ID NO: 92271 - DNA, 80 bp, synthetic construct; identical to SEQ ID NO: 33357
  misc_feature 1..80: note = Artificially Synthesized Probe
  source 1..80: mol_type = other DNA

SEQ ID NO: 92272 - DNA, 80 bp, synthetic construct
  misc_feature 1..80: note = Artificially Synthesized Probe
  source 1..80: mol_type = other DNA
agaaaatcataaggaagagaaaatatatttactattcattaagtggaagtggataatataaaagtcttcattttgaatag

SEQ ID NO: 92273 - DNA, 80 bp, synthetic construct
  misc_feature 1..80: note = Artificially Synthesized Probe
  source 1..80: mol_type = other DNA
ctaaaaatgtttctacgtggtaccagtccttcttccgccatttgcatgtttcagtgcctgcataatagaagggtccatgt

SEQ ID NO: 92274 - DNA, 80 bp, synthetic construct
  misc_feature 1..80: note = Artificially Synthesized Probe
  source 1..80: mol_type = other DNA
tgtggtgtctattagctcttgaatctttctccaagattcacaccttgaaaccctttgcccctgttcttattttgcatatc

SEQ ID NO: 92275 - DNA, 80 bp, synthetic construct
  misc_feature 1..80: note = Artificially Synthesized Probe
  source 1..80: mol_type = other DNA
tccgctggggttctcctccacagcattgacaatcctttccataaagaaccatgtgcaatgagccttaaaggtccttatga

SEQ ID NO: 92276 - DNA, 80 bp, synthetic construct; identical to SEQ ID NO: 33358
  misc_feature 1..80: note = Artificially Synthesized Probe
  source 1..80: mol_type = other DNA

SEQ ID NO: 92277 - DNA, 80 bp, synthetic construct
  misc_feature 1..80: note = Artificially Synthesized Probe
  source 1..80: mol_type = other DNA
tggtaaaaaggctacccataatagaattcacattttcaatgaatttatagtttatcatcaaatagagtaaatgaattaag

SEQ ID NO: 92278 - DNA, 80 bp, synthetic construct
  misc_feature 1..80: note = Artificially Synthesized Probe
  source 1..80: mol_type = other DNA
tttcctattacattttggtgctcatttctcttctttatgaataaatgtcctttgtggtatcttttttcccagaatggggc

SEQ ID NO: 92279 - DNA, 80 bp, synthetic construct
  misc_feature 1..80: note = Artificially Synthesized Probe
  source 1..80: mol_type = other DNA
tttgctggcactaaattctctggctttagatccttcatcttcctttttctttaagttttcatatatgacttcactttttc

SEQ ID NO: 92280 - DNA, 80 bp, synthetic construct; identical to SEQ ID NO: 33359
  misc_feature 1..80: note = Artificially Synthesized Probe
  source 1..80: mol_type = other DNA

SEQ ID NO: 92281 - DNA, 80 bp, synthetic construct
  misc_feature 1..80: note = Artificially Synthesized Probe
  source 1..80: mol_type = other DNA
ggagagatgaactgctcaggtggagataattagcctcatagctattttaagctgatacttgaaacacttgagctcattgc

SEQ ID NO: 92282 - DNA, 80 bp, synthetic construct
  misc_feature 1..80: note = Artificially Synthesized Probe
  source 1..80: mol_type = other DNA
tttgataaattttatatttttgtaatagatttgtgtatattttagggtagtgaattataaaatagaccaacctttacata

SEQ ID NO: 92283 - DNA, 80 bp, synthetic construct
  misc_feature 1..80: note = Artificially Synthesized Probe
  source 1..80: mol_type = other DNA
tatttctgatttcaaacatttttataggccatcggccctgtgtctaaagtgtctatcggttgttgggagaacaaagatga

SEQ ID NO: 92284 - DNA, 80 bp, synthetic construct; identical to SEQ ID NO: 33360
  misc_feature 1..80: note = Artificially Synthesized Probe
  source 1..80: mol_type = other DNA

SEQ ID NO: 92285 - DNA, 80 bp, synthetic construct
  misc_feature 1..80: note = Artificially Synthesized Probe
  source 1..80: mol_type = other DNA
taactgaacacactaaaacccagggtgatataaagaaaagttacatatctggtctagtgctaccattgaagctaagacac

SEQ ID NO: 92286 - DNA, 80 bp, synthetic construct
  misc_feature 1..80: note = Artificially Synthesized Probe
  source 1..80: mol_type = other DNA
gtggagaataactttgaacagctaacatacacagaactgatacttttcgtgtatagaattgaagataaatggttcccagt

SEQ ID NO: 92287 - DNA, 80 bp, synthetic construct
  misc_feature 1..80: note = Artificially Synthesized Probe
  source 1..80: mol_type = other DNA
agccgtgaaaaccatggagatagttgtttttactaggatcgctgtcgtgtccacataagaaggttctatttgtgtgttga

SEQ ID NO: 92288 - DNA, 80 bp, synthetic construct
  misc_feature 1..80: note = Artificially Synthesized Probe
  source 1..80: mol_type = other DNA
tatactaatgcagaaggataagcctcttcttcccactctaaaaatctcttctttgctgtaaagaattctcagtgcatgtg

SEQ ID NO: 92289 - DNA, 80 bp, synthetic construct; identical to SEQ ID NO: 33361
  misc_feature 1..80: note = Artificially Synthesized Probe
  source 1..80: mol_type = other DNA

SEQ ID NO: 92290 - DNA, 80 bp, synthetic construct
  misc_feature 1..80: note = Artificially Synthesized Probe
  source 1..80: mol_type = other DNA
accaccatggagaggcaccagtacaccttcactgggaagctccatgtggaccattccttccttttatccattctcggatg

SEQ ID NO: 92291 - DNA, 80 bp, synthetic construct
  misc_feature 1..80: note = Artificially Synthesized Probe
  source 1..80: mol_type = other DNA
aatatatttcttgatgtcctgagatcatcagctttttcctcaaacactccttaccaaagaggaagcttccttctctccac

SEQ ID NO: 92292 - DNA, 80 bp, synthetic construct
  misc_feature 1..80: note = Artificially Synthesized Probe
  source 1..80: mol_type = other DNA
tttcttgctctgctgctccctcttctccatcaacccttcagcatccagaacattcactcattcaagcatactcaatcagg

SEQ ID NO: 92293 - DNA, 80 bp, synthetic construct; identical to SEQ ID NO: 33362
  misc_feature 1..80: note = Artificially Synthesized Probe
  source 1..80: mol_type = other DNA

SEQ ID NO: 92294 - DNA, 80 bp, synthetic construct
  misc_feature 1..80: note = Artificially Synthesized Probe
  source 1..80: mol_type = other DNA
ggttcaagcgattctcctgcatcagcctcctgagtagctgggattacaggcacctgccaccacgcccagctcagttttgt

SEQ ID NO: 92295 - DNA, 80 bp, synthetic construct
  misc_feature 1..80: note = Artificially Synthesized Probe
  source 1..80: mol_type = other DNA
ggccagctgtgatcttcgaaacttctattttcttctagcccatcagtccttctctttgactcatttctctttggtctcaa

SEQ ID NO: 92296 - DNA, 80 bp, synthetic construct
  misc_feature 1..80: note = Artificially Synthesized Probe
  source 1..80: mol_type = other DNA
tggcttgagcctaggaagtgaaggctgaagtgagccatgatcacaccactgcactccagcctgggtgaccctgtctctca

SEQ ID NO: 92297 - DNA, 80 bp, synthetic construct; identical to SEQ ID NO: 33363
  misc_feature 1..80: note = Artificially Synthesized Probe
  source 1..80: mol_type = other DNA

SEQ ID NO: 92298 - DNA, 80 bp, synthetic construct
  misc_feature 1..80: note = Artificially Synthesized Probe
  source 1..80: mol_type = other DNA
acattttttggaggacagtctggaaattgtcatcaaaactgaaaaggtacacaccctttaagccagcaatttgccttcac

SEQ ID NO: 92299 - DNA, 80 bp, synthetic construct
  misc_feature 1..80: note = Artificially Synthesized Probe
  source 1..80: mol_type = other DNA
tgactaaatgaattatggagcaataaaagagtagttttctgtagccgtcaaaagaacaaggaagaatccatgtgcacgga

SEQ ID NO: 92300 - DNA, 80 bp, synthetic construct
  misc_feature 1..80: note = Artificially Synthesized Probe
  source 1..80: mol_type = other DNA
tttcaaaatacatgcctgaggtgagactgcttgtatgtttgcatgtggtagcttccagaggaaatcttcagttttaatct

SEQ ID NO: 92301 - DNA, 80 bp, synthetic construct
  misc_feature 1..80: note = Artificially Synthesized Probe
  source 1..80: mol_type = other DNA
gatgggaggtggttgatccctactttatatatgtctgtaacttgaatttatttcttaagcagacaggcattacttttaca

SEQ ID NO: 92302 - DNA, 80 bp, synthetic construct; identical to SEQ ID NO: 33364
  misc_feature 1..80: note = Artificially Synthesized Probe
  source 1..80: mol_type = other DNA

SEQ ID NO: 92303 - DNA, 80 bp, synthetic construct
  misc_feature 1..80: note = Artificially Synthesized Probe
  source 1..80: mol_type = other DNA
ggtcgattaattgtttcataacccttttcatgagctttctttgagcaggcatgcttggttttggtaaagtcctgtcaaaa

SEQ ID NO: 92304 - DNA, 80 bp, synthetic construct
  misc_feature 1..80: note = Artificially Synthesized Probe
  source 1..80: mol_type = other DNA
atgaacattaggttcactttcttgctacactaggggaaacatctttttttggggcaaggtgcatagaaattttggtgtga

SEQ ID NO: 92305 - DNA, 80 bp, synthetic construct
  misc_feature 1..80: note = Artificially Synthesized Probe
  source 1..80: mol_type = other DNA
tcatcttttcctctaggacacccatgtattttcttctcttcttgctctactgattcgcaagaactcttgtccagggttaa

SEQ ID NO: 92306 - DNA, 80 bp, synthetic construct
  misc_feature 1..80: note = Artificially Synthesized Probe
  source 1..80: mol_type = other DNA
ggctctatatcttcattttcttcccttttctttgatccttcctcagtttaaagtcattctcaagtctcctccacattaaa

SEQ ID NO: 92307 - DNA, 80 bp, synthetic construct; identical to SEQ ID NO: 33365
  misc_feature 1..80: note = Artificially Synthesized Probe
  source 1..80: mol_type = other DNA

SEQ ID NO: 92308 - DNA, 80 bp, synthetic construct
  misc_feature 1..80: note = Artificially Synthesized Probe
  source 1..80: mol_type = other DNA
tatcccttgaaaattctcctcagctgctttgttttaccatgtatcaaccttggctgtgtaattccattcattcccagggt

SEQ ID NO: 92309 - DNA, 80 bp, synthetic construct
  misc_feature 1..80: note = Artificially Synthesized Probe
  source 1..80: mol_type = other DNA
actaaaaatacaaaattagccaggtgtagtggtgcatgcctgtaatcacagctattcaggaggctgaggcaggagaatcg

SEQ ID NO: 92310 - DNA, 80 bp, synthetic construct
  misc_feature 1..80: note = Artificially Synthesized Probe
  source 1..80: mol_type = other DNA
cttctcatttgcattcccaatttatatttgcaggcgcttacaggtattctccaagtgggattctcaaaaactatttacat

SEQ ID NO: 92311 - DNA, 80 bp, synthetic construct; identical to SEQ ID NO: 33366
  misc_feature 1..80: note = Artificially Synthesized Probe
  source 1..80: mol_type = other DNA

SEQ ID NO: 92312 - DNA, 80 bp, synthetic construct; identical to SEQ ID NO: 33336
  misc_feature 1..80: note = Artificially Synthesized Probe
  source 1..80: mol_type = other DNA

SEQ ID NO: 92313 - DNA, 80 bp, synthetic construct
  misc_feature 1..80: note = Artificially Synthesized Probe
  source 1..80: mol_type = other DNA
tagggtacaacttgatggattttctctgccttccctagaaaatgagagttcgagttaaaaattataagttgtatcttaaa

SEQ ID NO: 92314 - DNA, 80 bp, synthetic construct
  misc_feature 1..80: note = Artificially Synthesized Probe
  source 1..80: mol_type = other DNA
ccatcacataaacagaactaaagacaaaacccacatgattatctcaatagaggcggaaaaggccttcaataaaattcaac

SEQ ID NO: 92315 - DNA, 80 bp, synthetic construct
  misc_feature 1..80: note = Artificially Synthesized Probe
  source 1..80: mol_type = other DNA
ctcaccacccttattcaacatagtattggaagtcctggacaggacaatcaggcaagagaagggtattcaaataggaacag

SEQ ID NO: 92316 - DNA, 80 bp, synthetic construct
  misc_feature 1..80: note = Artificially Synthesized Probe
  source 1..80: mol_type = other DNA
tagacagacagccaaatcatgaatgaattcccattcgcaattgctacaaagaaaataaaatacctaggaatacagaaaac

SEQ ID NO: 92317 - DNA, 80 bp, synthetic construct; identical to SEQ ID NO: 33367
  misc_feature 1..80: note = Artificially Synthesized Probe
  source 1..80: mol_type = other DNA

SEQ ID NO: 92318 - DNA, 80 bp, synthetic construct
  misc_feature 1..80: note = Artificially Synthesized Probe
  source 1..80: mol_type = other DNA
aaccatctgatctttaacaaacctgataaaaacaagcaatggagaaaggattccctatttaataaatgtgctgagaaaac

SEQ ID NO: 92319 - DNA, 80 bp, synthetic construct
  misc_feature 1..80: note = Artificially Synthesized Probe
  source 1..80: mol_type = other DNA
atttcatgacaaaaacatcaaaagcaaccacaacaaaagcaaaaattgacaaatgggacataattaaagagcttctgcac

SEQ ID NO: 92320 - DNA, 80 bp, synthetic construct; identical to SEQ ID NO: 33368
  misc_feature 1..80: note = Artificially Synthesized Probe
  source 1..80: mol_type = other DNA

SEQ ID NO: 92321 - DNA, 80 bp, synthetic construct
  misc_feature 1..80: note = Artificially Synthesized Probe
  source 1..80: mol_type = other DNA
gcaattcgtcaaagatgtagaatgagaaataccatttgacccagcaatcccactactgggtatatacccaatggaataga

SEQ ID NO: 92322 - DNA, 80 bp, synthetic construct
  misc_feature 1..80: note = Artificially Synthesized Probe
  source 1..80: mol_type = other DNA
caagttaatgtcctttgcagggatatggatggagctggaagctgttatcctcaggaaactaacacagaaacagaaaacca

SEQ ID NO: 92323 - DNA, 80 bp, synthetic construct
  misc_feature 1..80: note = Artificially Synthesized Probe
  source 1..80: mol_type = other DNA
aaatgtcaactcagtttccaggcaaaacatctgatgaccacatctggacctggaggactatgaatgaactataaatacat

SEQ ID NO: 92324 - DNA, 80 bp, synthetic construct
  misc_feature 1..80: note = Artificially Synthesized Probe
  source 1..80: mol_type = other DNA
ttgataagtgcagcaaaccaccatggcacacgtttacttgtgtaaaaaacctgcacgtcccaggactttgaattaaatta

SEQ ID NO: 92325 - DNA, 80 bp, synthetic construct; identical to SEQ ID NO: 33369
  misc_feature 1..80: note = Artificially Synthesized Probe
  source 1..80: mol_type = other DNA

SEQ ID NO: 92326 - DNA, 80 bp, synthetic construct
  misc_feature 1..80: note = Artificially Synthesized Probe
  source 1..80: mol_type = other DNA
ttcatttctgctatgtaaggaaaaaaagggttttgtgatttttcaaattggttaatcataatgataattttataaaggaa

SEQ ID NO: 92327 - DNA, 80 bp, synthetic construct
  misc_feature 1..80: note = Artificially Synthesized Probe
  source 1..80: mol_type = other DNA
aagtatatgaatagtagattaaaaataaatgttaccatacttggttctttttaacagctgtcagggtgtattatcaagaa

SEQ ID NO: 92328 - DNA, 80 bp, synthetic construct
  misc_feature 1..80: note = Artificially Synthesized Probe
  source 1..80: mol_type = other DNA
tgctggggtaagtatggtgacacagaaacagtcaaagtgacaggtactgagctgaataatacatatttacgtttttacct

SEQ ID NO: 92329 - DNA, 80 bp, synthetic construct; identical to SEQ ID NO: 33370
  misc_feature 1..80: note = Artificially Synthesized Probe
  source 1..80: mol_type = other DNA

SEQ ID NO: 92330 - DNA, 80 bp, synthetic construct
  misc_feature 1..80: note = Artificially Synthesized Probe
  source 1..80: mol_type = other DNA
acaaatatttgttatgagatgtttgccacagaaatcggtgtttgttcacttaaagttgtaaattatggttttcagaggaa

SEQ ID NO: 92331 - DNA, 80 bp, synthetic construct
  misc_feature 1..80: note = Artificially Synthesized Probe
  source 1..80: mol_type = other DNA
aggatttctattctcctggatggtgctcgttgatgatacacaacatgtaaggcagaaatgggaactaatctcttcctgtt

SEQ ID NO: 92332 - DNA, 80 bp, synthetic construct
  misc_feature 1..80: note = Artificially Synthesized Probe
  source 1..80: mol_type = other DNA
cctcaagtgatcctcctgccgcaccctcccaagtagctgggactataggcactagccatggtgcctgactattttgttgt

SEQ ID NO: 92333 - DNA, 80 bp, synthetic construct; identical to SEQ ID NO: 33371
  misc_feature 1..80: note = Artificially Synthesized Probe
  source 1..80: mol_type = other DNA

SEQ ID NO: 92334 - DNA, 80 bp, synthetic construct
  misc_feature 1..80: note = Artificially Synthesized Probe
  source 1..80: mol_type = other DNA
attctctccaacttaaactgtcatttaggggaacagtaagaccagttcttggactgcttagagtataccaccaaggagaa

SEQ ID NO: 92335 - DNA, 80 bp, synthetic construct
  misc_feature 1..80: note = Artificially Synthesized Probe
  source 1..80: mol_type = other DNA
taatttttatatttttagtagagacagggtttcaccatgttggccaggctggtcctgaactactgacctcaagtgatctg

SEQ ID NO: 92336 - DNA, 80 bp, synthetic construct
  misc_feature 1..80: note = Artificially Synthesized Probe
  source 1..80: mol_type = other DNA
ccactgtaactttaagggagagaaaaagaaaaatttaatgtagattttaaaatgtatacttcttgggaggctgaggtggg

SEQ ID NO: 92337 - DNA, 80 bp, synthetic construct
  misc_feature 1..80: note = Artificially Synthesized Probe
  source 1..80: mol_type = other DNA
attatgccatgagaagagtgtgtgcccatgagtctatatagggatgtatatgcatataggcatgtgcaagaatgtgtgtg

SEQ ID NO: 92338 - DNA, 80 bp, synthetic construct
  misc_feature 1..80: note = Artificially Synthesized Probe
  source 1..80: mol_type = other DNA
aaatctgcttttctcttaataagattgtgaggttccctttggaaggcaaactttttctttgcctgaaattaatctcatta

SEQ ID NO: 92339 - DNA, 80 bp, synthetic construct; identical to SEQ ID NO: 33372
  misc_feature 1..80: note = Artificially Synthesized Probe
  source 1..80: mol_type = other DNA

SEQ ID NO: 92340 - DNA, 80 bp, synthetic construct
  misc_feature 1..80: note = Artificially Synthesized Probe
  source 1..80: mol_type = other DNA
gattatttttagagagaagataagggaaaatgaaatacctctattcagcacagggtcgaagtacactggccttgtgcaga

SEQ ID NO: 92341 - DNA, 80 bp, synthetic construct
  misc_feature 1..80: note = Artificially Synthesized Probe
  source 1..80: mol_type = other DNA
ttccagatcaaaacttcagagggcaaaagttcaagaaaggatttatttttaatgttgaaagagaagagattgtgagtaaa

SEQ ID NO: 92342 - DNA, 80 bp, synthetic construct; identical to SEQ ID NO: 33373
  misc_feature 1..80: note = Artificially Synthesized Probe
  source 1..80: mol_type = other DNA

SEQ ID NO: 92343 - DNA, 80 bp, synthetic construct
  misc_feature 1..80: note = Artificially Synthesized Probe
  source 1..80: mol_type = other DNA
aaagtcacagataagtaggagcatagctgagaccataaactagcagtaaagcacataactgatatgaattctaccacttt

SEQ ID NO: 92344 - DNA, 80 bp, synthetic construct; identical to SEQ ID NO: 33337
  misc_feature 1..80: note = Artificially Synthesized Probe
  source 1..80: mol_type = other DNA

SEQ ID NO: 92345 - DNA, 80 bp, synthetic construct
  misc_feature 1..80: note = Artificially Synthesized Probe
  source 1..80: mol_type = other DNA
catgtggcttgcctaaggtaccgagtttttgtcaaagtattttattccccacctggtggtcattatctttgtcattctta

SEQ ID NO: 92346 - DNA, 80 bp, synthetic construct
  misc_feature 1..80: note = Artificially Synthesized Probe
  source 1..80: mol_type = other DNA
ttcttgggaggtaaagtgagtcttaaagctgtgtgaactggttttatgtattttgctcttcctttgaagaaacttacaaa

SEQ ID NO: 92347 - DNA, 80 bp, synthetic construct
  misc_feature 1..80: note = Artificially Synthesized Probe
  source 1..80: mol_type = other DNA
ggaagtgaccaataatgacacaggacaaaatcaaagtgcaacctgcaggaccatgcagggcatggaggagatgggattcc

SEQ ID NO: 92348 - DNA, 80 bp, synthetic construct; identical to SEQ ID NO: 33374
  misc_feature 1..80: note = Artificially Synthesized Probe
  source 1..80: mol_type = other DNA

SEQ ID NO: 92349 - DNA, 80 bp, synthetic construct
  misc_feature 1..80: note = Artificially Synthesized Probe
  source 1..80: mol_type = other DNA
gacagtaatttattagatgatctcgcctttgttctctaggaaagtagttctttccagaatgttatctttggagctactct

SEQ ID NO: 92350 - DNA, 80 bp, synthetic construct
  misc_feature 1..80: note = Artificially Synthesized Probe
  source 1..80: mol_type = other DNA
ctcattcgaggcagctaataccaatgtcttattttgacattgtgtaactgaaagaaaagtgcgtctaatgtccttcaggt

SEQ ID NO: 92351 - DNA, 80 bp, synthetic construct
  misc_feature 1..80: note = Artificially Synthesized Probe
  source 1..80: mol_type = other DNA
caaggactatcaacctgtgcttgaggacctcaggggagtggttgatgggacttggacatctgtatggtgccaaaataaca

SEQ ID NO: 92352 - DNA, 80 bp, synthetic construct
  misc_feature 1..80: note = Artificially Synthesized Probe
  source 1..80: mol_type = other DNA
cttacatgacaatttatgatttgaatatctagtggcaaagctttggaacataggcatttacacataagcagagggaaatc

SEQ ID NO: 92353 - DNA, 80 bp, synthetic construct; identical to SEQ ID NO: 33375
  misc_feature 1..80: note = Artificially Synthesized Probe
  source 1..80: mol_type = other DNA

SEQ ID NO: 92354 - DNA, 80 bp, synthetic construct
  misc_feature 1..80: note = Artificially Synthesized Probe
  source 1..80: mol_type = other DNA
aggattggttcctcgtttggacaaagaagctgggaaggacattcagggaaacatttggtgaatttgaataatataatggc

SEQ ID NO: 92355 - DNA, 80 bp, synthetic construct
  misc_feature 1..80: note = Artificially Synthesized Probe
  source 1..80: mol_type = other DNA
ctgtgatgttcaagtcccctgtggaaaggttgaacaaaagtagacatttaaccaacatacttgtcagagactagcaggta

SEQ ID NO: 92356 - DNA, 80 bp, synthetic construct
  misc_feature 1..80: note = Artificially Synthesized Probe
  source 1..80: mol_type = other DNA
gtaagaatctctttcatgtttcgataagctgctgtttgctgaaatttcttttctaattcctgcttagtaaaaaatgtcag

SEQ ID NO: 92357 - DNA, 80 bp, synthetic construct
  misc_feature 1..80: note = Artificially Synthesized Probe
  source 1..80: mol_type = other DNA
atttaattttaatattgctactagaacctaatttccacttgtcataatgaagaatttttataacttttcttcacttattg

SEQ ID NO: 92358 - DNA, 80 bp, synthetic construct; identical to SEQ ID NO: 33376
  misc_feature 1..80: note = Artificially Synthesized Probe
  source 1..80: mol_type = other DNA

SEQ ID NO: 92359 - DNA, 80 bp, synthetic construct
  misc_feature 1..80: note = Artificially Synthesized Probe
  source 1..80: mol_type = other DNA
caagtgagtgctgcattattgtctgttttaacaagggagtaggttttctcaccacattcagccaatgtggtaaattttct

SEQ ID NO: 92360 - DNA, 80 bp, synthetic construct
  misc_feature 1..80: note = Artificially Synthesized Probe
  source 1..80: mol_type = other DNA
aggaacgtgaaacaagcataaaccgaatgtgatggcagagctgtcacaccttgtggccatcgattacatttccactgacc

SEQ ID NO: 92361 - DNA, 80 bp, synthetic construct
  misc_feature 1..80: note = Artificially Synthesized Probe
  source 1..80: mol_type = other DNA
tctttcagaggaagggtaaacagaattctaaccacattttaaaacacctcttccctctgcttattgaagtaggatactca

SEQ ID NO: 92362 - DNA, 80 bp, synthetic construct; identical to SEQ ID NO: 33377
  misc_feature 1..80: note = Artificially Synthesized Probe
  source 1..80: mol_type = other DNA

SEQ ID NO: 92363 - DNA, 80 bp, synthetic construct
  misc_feature 1..80: note = Artificially Synthesized Probe
  source 1..80: mol_type = other DNA
ttgaaaacagtttggcagttcctcaaaaagttaaacatagagttatcatatgacccagccatttcactcctgagtgttta

SEQ ID NO: 92364 - DNA, 80 bp, synthetic construct
  misc_feature 1..80: note = Artificially Synthesized Probe
  source 1..80: mol_type = other DNA
tggtataggccatgtaatcgaatactattccacaataataggaaacaactattggtacacatgacaacgtgaatgcatct

SEQ ID NO: 92365 - DNA, 80 bp, synthetic construct
  misc_feature 1..80: note = Artificially Synthesized Probe
  source 1..80: mol_type = other DNA
aatgggtccaaggacacttttggggtgatggatatgttcaccaccttcattgtgctaatgattgatccggtgtgtactac

SEQ ID NO: 92366 - DNA, 80 bp, synthetic construct
  misc_feature 1..80: note = Artificially Synthesized Probe
  source 1..80: mol_type = other DNA
atgaagacgaaaaatttaaaagcccctacactttcaaaaagaaaaccgttaacattttggggctttttcttccaggaaag

SEQ ID NO: 92367 - DNA, 80 bp, synthetic construct
  misc_feature 1..80: note = Artificially Synthesized Probe
  source 1..80: mol_type = other DNA
tctttcaaatgagaagccataaaatagtaacattttcccaagtacagtgttggtaaataactcaagccctggatatgata

SEQ ID NO: 92368 - DNA, 80 bp, synthetic construct; identical to SEQ ID NO: 33378
  misc_feature 1..80: note = Artificially Synthesized Probe
  source 1..80: mol_type = other DNA

SEQ ID NO: 92369 - DNA, 80 bp, synthetic construct
  misc_feature 1..80: note = Artificially Synthesized Probe
  source 1..80: mol_type = other DNA
atggatccaattaagtaggttaacaatttggttttacattgtgtagctaaaaataagatagttgcggccaggtgaagtgg

SEQ ID NO: 92370 - DNA, 80 bp, synthetic construct
  misc_feature 1..80: note = Artificially Synthesized Probe
  source 1..80: mol_type = other DNA
agctgggcatggtggcgcatgcctgtaatcccagctacttaggcggctgaggcaggagaatcgcttgaacccaggaggct

SEQ ID NO: 92371 - DNA, 80 bp, synthetic construct
  misc_feature 1..80: note = Artificially Synthesized Probe
  source 1..80: mol_type = other DNA
taaattaatttgttaattgccttctctttcactcagtttcccctttggtaaatgggagtaataataatatcttcctctca

SEQ ID NO: 92372 - DNA, 80 bp, synthetic construct; identical to SEQ ID NO: 33379
  misc_feature 1..80: note = Artificially Synthesized Probe
  source 1..80: mol_type = other DNA

SEQ ID NO: 92373 - DNA, 80 bp, synthetic construct
  misc_feature 1..80: note = Artificially Synthesized Probe
  source 1..80: mol_type = other DNA
aaaatatcaaaaaattagctgggcacagtggtgcatgcctgtagtcccagctacttgggaggctgatgtgggaggatcac

SEQ ID NO: 92374 - DNA, 80 bp, synthetic construct
  misc_feature 1..80: note = Artificially Synthesized Probe
  source 1..80: mol_type = other DNA
ttctgtctctggatagctctggtgatgagaaggattcaagggcagcaattttctttcaagaagattttccattaggtata

SEQ ID NO: 92375 - DNA, 80 bp, synthetic construct
  misc_feature 1..80: note = Artificially Synthesized Probe
  source 1..80: mol_type = other DNA
ttaaagtataataaaaatatatatatatataaatttttaaaaagtattttaatttttttgcaaaaaaaaaaagaggattt

SEQ ID NO: 92376 - DNA, 80 bp, synthetic construct; identical to SEQ ID NO: 33380
  misc_feature 1..80: note = Artificially Synthesized Probe
  source 1..80: mol_type = other DNA

SEQ ID NO: 92377 - DNA, 80 bp, synthetic construct
  misc_feature 1..80: note = Artificially Synthesized Probe
  source 1..80: mol_type = other DNA
cttttttcccattttttatatgaaaaaatttttaatttttttatagagatgggggtcttgctatgttggccaggctggtc

SEQ ID NO: 92378 - DNA, 80 bp, synthetic construct
  misc_feature 1..80: note = Artificially Synthesized Probe
  source 1..80: mol_type = other DNA
ttctcagtcagtggtagggggggtaaacccaactctctctgattccaaagcaagtatatcatctacatgatagaaaatca

SEQ ID NO: 92379 - DNA, 80 bp, synthetic construct; identical to SEQ ID NO: 33381
  misc_feature 1..80: note = Artificially Synthesized Probe
  source 1..80: mol_type = other DNA

SEQ ID NO: 92380 - DNA, 80 bp, synthetic construct
  misc_feature 1..80: note = Artificially Synthesized Probe
  source 1..80: mol_type = other DNA
ctagcaggtcttgtgtgacactgactgaagagctaaagacagtgcatgtgcatgggcaggaagggatgggcagagcacga

SEQ ID NO: 92381 - DNA, 80 bp, synthetic construct
  misc_feature 1..80: note = Artificially Synthesized Probe
  source 1..80: mol_type = other DNA
tgtaatcaatttttatttttcatttcatgaagactttcctagaagcaggaaaaagaagacgccatgccttccagtcatgc

SEQ ID NO: 92382 - DNA, 80 bp, synthetic construct
  misc_feature 1..80: note = Artificially Synthesized Probe
  source 1..80: mol_type = other DNA
ccatctctaacttttaagacaacgcagccaactctgagcctacacccccttgtgtcattgatgtacccctcctttgtgga

SEQ ID NO: 92383 - DNA, 80 bp, synthetic construct
  misc_feature 1..80: note = Artificially Synthesized Probe
  source 1..80: mol_type = other DNA
atctgggacatccaagatgacacccaagatgaaagatgatgtcatcatcaatcctctggtttaaaactatttccctcagg

SEQ ID NO: 92384 - DNA, 80 bp, synthetic construct; identical to SEQ ID NO: 33382
  misc_feature 1..80: note = Artificially Synthesized Probe
  source 1..80: mol_type = other DNA

SEQ ID NO: 92385 - DNA, 80 bp, synthetic construct
  misc_feature 1..80: note = Artificially Synthesized Probe
  source 1..80: mol_type = other DNA
tctcttggttttcgctgctctagaattatgagttgacaatcagatggcacagaagcctggaaactaagttatcagttaat

SEQ ID NO: 92386 - DNA, 80 bp, synthetic construct
  misc_feature 1..80: note = Artificially Synthesized Probe
  source 1..80: mol_type = other DNA
gtgtgtgtttgtggttgaacacagagaaactatctttcttcttgatgatcagatgaacaatgagtgcttttgacaaatgg

SEQ ID NO: 92387 - DNA, 80 bp, synthetic construct; identical to SEQ ID NO: 33383
  misc_feature 1..80: note = Artificially Synthesized Probe
  source 1..80: mol_type = other DNA

SEQ ID NO: 92388 - DNA, 80 bp, synthetic construct; identical to SEQ ID NO: 33338
  misc_feature 1..80: note = Artificially Synthesized Probe
  source 1..80: mol_type = other DNA

SEQ ID NO: 92389 - DNA, 80 bp, synthetic construct
  misc_feature 1..80: note = Artificially Synthesized Probe
  source 1..80: mol_type = other DNA
atctattatacaagttgctttatttgttcagaaacatgccctgggaatcttttcatgttagtacatgtagatccacatta

SEQ ID NO: 92390 - DNA, 80 bp, synthetic construct
  misc_feature 1..80: note = Artificially Synthesized Probe
  source 1..80: mol_type = other DNA
atttctccagaggggatgccagaatggagttgctttgatacaaggaatgcaaactttgtatcttagcagatattgctgtc

SEQ ID NO: 92391 - DNA, 80 bp, synthetic construct
  misc_feature 1..80: note = Artificially Synthesized Probe
  source 1..80: mol_type = other DNA
acattgtttttatttaatatgcattttcctactactagctagatagagcaccttttcatatgtttttccgctcatctggg

SEQ ID NO: 92392 - DNA, 80 bp, synthetic construct
  misc_feature 1..80: note = Artificially Synthesized Probe
  source 1..80: mol_type = other DNA
atagagaaaaaagtctgtggtatgtgtatgtgcatttttttttttccatagagtgacgctaacacccacacacctttagc

SEQ ID NO: 92393 - DNA, 80 bp, synthetic construct; identical to SEQ ID NO: 33384
  misc_feature 1..80: note = Artificially Synthesized Probe
  source 1..80: mol_type = other DNA

SEQ ID NO: 92394 - DNA, 80 bp, synthetic construct
  misc_feature 1..80: note = Artificially Synthesized Probe
  source 1..80: mol_type = other DNA
caccctcaaccacagcagaatttatcgccacagtgcatctcttgggggaaagctgaagtctgggggcttgagaaaattag

SEQ ID NO: 92395 - DNA, 80 bp, synthetic construct
  misc_feature 1..80: note = Artificially Synthesized Probe
  source 1..80: mol_type = other DNA
gcggggctgtggtgtcgatcgagtacttggggtgtgtggcacacccatttaagcttttgtttaaatagtgttttaaaaga

SEQ ID NO: 92396 - DNA, 80 bp, synthetic construct; identical to SEQ ID NO: 33385
  misc_feature 1..80: note = Artificially Synthesized Probe
  source 1..80: mol_type = other DNA

SEQ ID NO: 92397 - DNA, 80 bp, synthetic construct
  misc_feature 1..80: note = Artificially Synthesized Probe
  source 1..80: mol_type = other DNA
gaaccatcaggctagcgatgactggctaaagaaacttttaactggggagacaacagatgctgtgaccttttgtagatagt

SEQ ID NO: 92398 - DNA, 80 bp, synthetic construct
  misc_feature 1..80: note = Artificially Synthesized Probe
  source 1..80: mol_type = other DNA
gtcttagaaagagtattctaatctaaactgagggccagggccaagataagattaagtattagtgagaaaaagagcatatt

SEQ ID NO: 92399 - DNA, 80 bp, synthetic construct
  misc_feature 1..80: note = Artificially Synthesized Probe
  source 1..80: mol_type = other DNA
tttccccactgctagtcctattccccaaaccaatttttcaagcttctcaaactttactgagtacacaaaccctggggatt

SEQ ID NO: 92400 - DNA, 80 bp, synthetic construct
  misc_feature 1..80: note = Artificially Synthesized Probe
  source 1..80: mol_type = other DNA
agaaaaaataatctgaatttgcagttgtccaacgtttatcttagccacatgtattcctctatactgtgtgcattaatcat

SEQ ID NO: 92401 - DNA, 80 bp, synthetic construct
  misc_feature 1..80: note = Artificially Synthesized Probe
  source 1..80: mol_type = other DNA
acattcttcatttatttcctgcaataatttatgaacatttcatttctccatcagccttacttgccttacttgccttccca

SEQ ID NO: 92402 - DNA, 80 bp, synthetic construct; identical to SEQ ID NO: 33386
  misc_feature 1..80: note = Artificially Synthesized Probe
  source 1..80: mol_type = other DNA

SEQ ID NO: 92403 - DNA, 80 bp, synthetic construct
  misc_feature 1..80: note = Artificially Synthesized Probe
  source 1..80: mol_type = other DNA
aggcttacgtgccacctgttgaagtgttactcattgctctaatctaatataacctttgtagtcagtttgcttccctatca

SEQ ID NO: 92404 - DNA, 80 bp, synthetic construct
  misc_feature 1..80: note = Artificially Synthesized Probe
  source 1..80: mol_type = other DNA
tctgcctgtttcaccatctccacttcctttcttgctgttaatctctcccatcttcattcttcattaatattccctttgct

SEQ ID NO: 92405 - DNA, 80 bp, synthetic construct
  misc_feature 1..80: note = Artificially Synthesized Probe
  source 1..80: mol_type = other DNA
atgttatactatgttgctctcccgtgtacttgctgctaagtcctttatttaatatatgaccatgcaacaggtctgtgtgc

SEQ ID NO: 92406 - DNA, 80 bp, synthetic construct; identical to SEQ ID NO: 33387
  misc_feature 1..80: note = Artificially Synthesized Probe
  source 1..80: mol_type = other DNA

SEQ ID NO: 92407 - DNA, 80 bp, synthetic construct
  misc_feature 1..80: note = Artificially Synthesized Probe
  source 1..80: mol_type = other DNA
agtatgcaacaaagtgatggtgtggcagttctaagcccagaccttcagagtcactgtgtacttctctctctataacctta

SEQ ID NO: 92408 - DNA, 80 bp, synthetic construct
  misc_feature 1..80: note = Artificially Synthesized Probe
  source 1..80: mol_type = other DNA
cctgggctagcaggcccaactgaggtcagctaaggttagttgaagaacttctcaattgagcccagcttaaaatacaactt

SEQ ID NO: 92409 - DNA, 80 bp, synthetic construct
  misc_feature 1..80: note = Artificially Synthesized Probe
  source 1..80: mol_type = other DNA
ctttgaatgtgagctctatgagggtatgccccttgtctgtttggttcattaccgtattcttagtatttagaatagtgtct

SEQ ID NO: 92410 - DNA, 80 bp, synthetic construct; identical to SEQ ID NO: 33388
  misc_feature 1..80: note = Artificially Synthesized Probe
  source 1..80: mol_type = other DNA

SEQ ID NO: 92411 - DNA, 80 bp, synthetic construct
  misc_feature 1..80: note = Artificially Synthesized Probe
  source 1..80: mol_type = other DNA
gaaagaaagaaacaaaagcaaaaacaatattcatctacatagtggttgtgaagatcaaacgtgaaaattattttgcaaat

SEQ ID NO: 92412 - DNA, 80 bp, synthetic construct
  misc_feature 1..80: note = Artificially Synthesized Probe
  source 1..80: mol_type = other DNA
ttaaggcagcgacagtgttttctaagttacttaagtcttgggcctttataaaatcctatgaaaaataaatgcatgcatgt

SEQ ID NO: 92413 - DNA, 80 bp, synthetic construct
  misc_feature 1..80: note = Artificially Synthesized Probe
  source 1..80: mol_type = other DNA
aaggggaggaaaaaattatggcctttgaaattagttgaatcccagctaccactactgtgtgatcttaggacattcggtta

SEQ ID NO: 92414 - DNA, 80 bp, synthetic construct
  misc_feature 1..80: note = Artificially Synthesized Probe
  source 1..80: mol_type = other DNA
agtcaagtgaagcctgaggctcttgacgctcagggacataggacagctcaaaggctttgggatgtttaagaaggagggtt

SEQ ID NO: 92415 - DNA, 80 bp, synthetic construct; identical to SEQ ID NO: 33389
  misc_feature 1..80: note = Artificially Synthesized Probe
  source 1..80: mol_type = other DNA

SEQ ID NO: 92416 - DNA, 80 bp, synthetic construct
  misc_feature 1..80: note = Artificially Synthesized Probe
  source 1..80: mol_type = other DNA
ctggctcgactctttcctgtattagttctttttcctctcacagcaatcccttgaagggggtagtatcatcctattttata

SEQ ID NO: 92417 - DNA, 80 bp, synthetic construct
  misc_feature 1..80: note = Artificially Synthesized Probe
  source 1..80: mol_type = other DNA
aaatgagctaaatctttgagatggaaaggaaggctggacctggctgggttagtcacaggactggggagtggaagggtaac

SEQ ID NO: 92418 - DNA, 80 bp, synthetic construct; identical to SEQ ID NO: 33390
  misc_feature 1..80: note = Artificially Synthesized Probe
  source 1..80: mol_type = other DNA

SEQ ID NO: 92419 - DNA, 80 bp, synthetic construct
  misc_feature 1..80: note = Artificially Synthesized Probe
  source 1..80: mol_type = other DNA
cctcccaggttcaagcaattctcctgcctcagcctcccaagtagctgggactacaggcacacgccaccacgcctggctaa

SEQ ID NO: 92420 - DNA, 80 bp, synthetic construct
  misc_feature 1..80: note = Artificially Synthesized Probe
  source 1..80: mol_type = other DNA
tgcccacagaactctgtttgggaaggctgctagatattgttttggtttttctttggtaaattttttccaaatatggttaa

SEQ ID NO: 92421 - DNA, 80 bp, synthetic construct
  misc_feature 1..80: note = Artificially Synthesized Probe
  source 1..80: mol_type = other DNA
agtggcttgatcttggcgcactgcaacctctgcctcccaggttcaagcaattctctcacctcagcctcctgagtagctgg

SEQ ID NO: 92422 - DNA, 80 bp, synthetic construct
  misc_feature 1..80: note = Artificially Synthesized Probe
  source 1..80: mol_type = other DNA
cagcccatttactagtttttaactgacaaataataattttatttatggggtacaatgtgatgtatctacatggtggaaag

SEQ ID NO: 92423 - DNA, 80 bp, synthetic construct
  misc_feature 1..80: note = Artificially Synthesized Probe
  source 1..80: mol_type = other DNA
agccctgggtacgtggtgtcttgcacacagccgacactcagtagccactgaattccaaatacataaaatatgatttgtga

SEQ ID NO: 92424 - DNA, 80 bp, synthetic construct; identical to SEQ ID NO: 33391
  misc_feature 1..80: note = Artificially Synthesized Probe
  source 1..80: mol_type = other DNA

SEQ ID NO: 92425 - DNA, 80 bp, synthetic construct
  misc_feature 1..80: note = Artificially Synthesized Probe
  source 1..80: mol_type = other DNA
ggacaaagtggggcagggtgaggctgggggatggggcccatttctaatgtaatttcttatttaaaaaactaaacatgtaa

SEQ ID NO: 92426 - DNA, 80 bp, synthetic construct
  misc_feature 1..80: note = Artificially Synthesized Probe
  source 1..80: mol_type = other DNA
aactcttaaaactcaacaataagaaaataagcaacccaattaaaaaacaggcaaaagacctaaagagatacttcactggg

SEQ ID NO: 92427 - DNA, 80 bp, synthetic construct
  misc_feature 1..80: note = Artificially Synthesized Probe
  source 1..80: mol_type = other DNA
tgaaaatacattcgacatcataggtcattagggaacttcagattaaagccacacacctattagaatagcccaggccctaa

SEQ ID NO: 92428 - DNA, 80 bp, synthetic construct; identical to SEQ ID NO: 33392
  misc_feature 1..80: note = Artificially Synthesized Probe
  source 1..80: mol_type = other DNA

SEQ ID NO: 92429 - DNA, 80 bp, synthetic construct
  misc_feature 1..80: note = Artificially Synthesized Probe
  source 1..80: mol_type = other DNA
acatggaggagccttaaatccatatcagtaagtgagagaagcccatctgaaaaggctatatactgtatgattccaacaaa

SEQ ID NO: 92430 - DNA, 80 bp, synthetic construct
  misc_feature 1..80: note = Artificially Synthesized Probe
  source 1..80: mol_type = other DNA
tccaaacccacagagtgttcaatacaaagagtgaaacctaaagtaaactactttgggtgatagtgatgtatgagtgtaga

SEQ ID NO: 92431 - DNA, 80 bp, synthetic construct
  misc_feature 1..80: note = Artificially Synthesized Probe
  source 1..80: mol_type = other DNA
ttaaaaaaacccataagcacttctcagtgaataatgatggtcatcactagaaatgttccctgggtgacgtttagtgtgtg

SEQ ID NO: 92432 - DNA, 80 bp, synthetic construct; identical to SEQ ID NO: 33393
  misc_feature 1..80: note = Artificially Synthesized Probe
  source 1..80: mol_type = other DNA

SEQ ID NO: 92433 - DNA, 80 bp, synthetic construct
  misc_feature 1..80: note = Artificially Synthesized Probe
  source 1..80: mol_type = other DNA
gcgtggtgatgggcacctgtaatcccagctactcaggaagctgagacaggagaatcacttgaacccaggaggtggaggtt

SEQ ID NO: 92434 - DNA, 80 bp, synthetic construct
  misc_feature 1..80: note = Artificially Synthesized Probe
  source 1..80: mol_type = other DNA
agacatatgttttagtcattatttacaaggaaataatatgagagcacaattactgattacatggttttctaaatttttaa

SEQ ID NO: 92435 - DNA, 80 bp, synthetic construct
  misc_feature 1..80: note = Artificially Synthesized Probe
  source 1..80: mol_type = other DNA
agcccaacatgctcgtgcccctccaaattatctggccgcccctcactgcaagctgtcctcctgcctgttggtctttctca

SEQ ID NO: 92436 - DNA, 80 bp, synthetic construct
  misc_feature 1..80: note = Artificially Synthesized Probe
  source 1..80: mol_type = other DNA
ccactccctccatcacctctgtctgtactgattctctgcatggcatttgtcgctatttaatgtgctctgtcttgctgact

SEQ ID NO: 92437 - DNA, 80 bp, synthetic construct; identical to SEQ ID NO: 33394
  misc_feature 1..80: note = Artificially Synthesized Probe
  source 1..80: mol_type = other DNA

SEQ ID NO: 92438 - DNA, 80 bp, synthetic construct
  misc_feature 1..80: note = Artificially Synthesized Probe
  source 1..80: mol_type = other DNA
acatttcctcccacacacttgctcagttaaagatacccaagtcttcccacagcctccaactggttttgttctcttcctcc

SEQ ID NO: 92439 - DNA, 80 bp, synthetic construct
  misc_feature 1..80: note = Artificially Synthesized Probe
  source 1..80: mol_type = other DNA
attcatggtaactgaatttagcaaaaatgactactttctcctcattcctgtcctttaagggttttgattactaactgcga

SEQ ID NO: 92440 - DNA, 80 bp, synthetic construct
  misc_feature 1..80: note = Artificially Synthesized Probe
  source 1..80: mol_type = other DNA
gagtctgccacaggccagctgccctggcttgcatcataatgtgagctatctaaggctagagccgaggtagaaatattagc

SEQ ID NO: 92441 - DNA, 80 bp, synthetic construct; identical to SEQ ID NO: 33395
  misc_feature 1..80: note = Artificially Synthesized Probe
  source 1..80: mol_type = other DNA

SEQ ID NO: 92442 - DNA, 80 bp, synthetic construct
  misc_feature 1..80: note = Artificially Synthesized Probe
  source 1..80: mol_type = other DNA
gacctaggactctttttacctgcactgatcataatgtcaccaccaactactaactgcctccagacactttggctttccaa

SEQ ID NO: 92443 - DNA, 80 bp, synthetic construct
  misc_feature 1..80: note = Artificially Synthesized Probe
  source 1..80: mol_type = other DNA
cctaaaaagtagaggactgaagtaaaattaattttttctgtgccagagactgtgctagatacttggtatattggaatgaa

SEQ ID NO: 92444 - DNA, 80 bp, synthetic construct; identical to SEQ ID NO: 33396
  misc_feature 1..80: note = Artificially Synthesized Probe
  source 1..80: mol_type = other DNA

SEQ ID NO: 92445 - DNA, 80 bp, synthetic construct; identical to SEQ ID NO: 33339
  misc_feature 1..80: note = Artificially Synthesized Probe
  source 1..80: mol_type = other DNA

SEQ ID NO: 92446 - DNA, 80 bp, synthetic construct
  misc_feature 1..80: note = Artificially Synthesized Probe
  source 1..80: mol_type = other DNA
cacatttgagaatgaagtctcagtttagaatttgtaatattttgatacttctacaagggggaccttgcccttaaacagaa

SEQ ID NO: 92447 - DNA, 80 bp, synthetic construct
  misc_feature 1..80: note = Artificially Synthesized Probe
  source 1..80: mol_type = other DNA
cggtctcattttctgcaaagtttttattcatgaattaacagtatttctctttgcccattattcccaaggcaagtacagaa

SEQ ID NO: 92448 - DNA, 80 bp, synthetic construct
  misc_feature 1..80: note = Artificially Synthesized Probe
  source 1..80: mol_type = other DNA
tcaaataagattacacagtcaaggtagggcagtatttttcttatgctgagttttataagacataagcaaattatcattta

SEQ ID NO: 92449 - DNA, 80 bp, synthetic construct
  misc_feature 1..80: note = Artificially Synthesized Probe
  source 1..80: mol_type = other DNA
gcaaccccgttaactcaccagaatacagacctcagtctcacaatttcttggacataattcttctcaaaccttttcctcaa

SEQ ID NO: 92450 - DNA, 80 bp, synthetic construct; identical to SEQ ID NO: 33397
  misc_feature 1..80: note = Artificially Synthesized Probe
  source 1..80: mol_type = other DNA

SEQ ID NO: 92451 - DNA, 80 bp, synthetic construct
  misc_feature 1..80: note = Artificially Synthesized Probe
  source 1..80: mol_type = other DNA
atcacagagcaaggattcagttaagcagctagaagcaggcccaggagcaaaacactgacaatcctctcactagtccagtg

SEQ ID NO: 92452 - DNA, 80 bp, synthetic construct
  misc_feature 1..80: note = Artificially Synthesized Probe
  source 1..80: mol_type = other DNA
acagagggcactcagcctctagagaacctccatctcttccctcagagtatgcttatagtgccctgtcctccagaactcac

SEQ ID NO: 92453 - DNA, 80 bp, synthetic construct
  misc_feature 1..80: note = Artificially Synthesized Probe
  source 1..80: mol_type = other DNA
aggatagggcttttttcaggaatggacctaaactagattgcagcaaagggagtcacatttgcacaagctcctttgagaaa

SEQ ID NO: 92454 - DNA, 80 bp, synthetic construct
  misc_feature 1..80: note = Artificially Synthesized Probe
  source 1..80: mol_type = other DNA
acccgtgcagaggagggaatcttcccacaccggtgcatttaccccttctcctcttccctgacggccagcctcaccttcct

SEQ ID NO: 92455 - DNA, 80 bp, synthetic construct; identical to SEQ ID NO: 33398
  misc_feature 1..80: note = Artificially Synthesized Probe
  source 1..80: mol_type = other DNA

SEQ ID NO: 92456 - DNA, 80 bp, synthetic construct
  misc_feature 1..80: note = Artificially Synthesized Probe
  source 1..80: mol_type = other DNA
cttaaggctgatgaatcagacacctctttcgttcttactgtgcatgccctctacctttcagatgacctatttgttggcct

SEQ ID NO: 92457 - DNA, 80 bp, synthetic construct
  misc_feature 1..80: note = Artificially Synthesized Probe
  source 1..80: mol_type = other DNA
ccacaagagtgtagtcatgattttcccccagaacaaatatataaaagggatctttgtcataacaatgacaggaaatcatt

SEQ ID NO: 92458 - DNA, 80 bp, synthetic construct
  misc_feature 1..80: note = Artificially Synthesized Probe
  source 1..80: mol_type = other DNA
ttgagccggtgaggtcaaggttgtagtgagccatggttgcaccaccgcactccagcatgggaaacagaataaggccctgt

SEQ ID NO: 92459 - DNA, 80 bp, synthetic construct; identical to SEQ ID NO: 33399
  misc_feature 1..80: note = Artificially Synthesized Probe
  source 1..80: mol_type = other DNA

SEQ ID NO: 92460 - DNA, 80 bp, synthetic construct
  misc_feature 1..80: note = Artificially Synthesized Probe
  source 1..80: mol_type = other DNA
ttgaaatgtacctggcatgactgagaaactagttaacacttaaaacatttttcttttttgatacagggtctcagtctgtt

SEQ ID NO: 92461 - DNA, 80 bp, synthetic construct
  misc_feature 1..80: note = Artificially Synthesized Probe
  source 1..80: mol_type = other DNA
tgtttttgtgtgttttgtagagatgaggtttcaccatgttgtccaggctgttcttgaactcctaggctctgcctagtgat

SEQ ID NO: 92462 - DNA, 80 bp, synthetic construct
  misc_feature 1..80: note = Artificially Synthesized Probe
  source 1..80: mol_type = other DNA
ccagaaaaggtatgttgcgatggatagtgctacatctgccactgggtggtaatctgatacaggcctgctcaggtgacacc

SEQ ID NO: 92463 - DNA, 80 bp, synthetic construct; identical to SEQ ID NO: 33400
  misc_feature 1..80: note = Artificially Synthesized Probe
  source 1..80: mol_type = other DNA

SEQ ID NO: 92464 - DNA, 80 bp, synthetic construct
  misc_feature 1..80: note = Artificially Synthesized Probe
  source 1..80: mol_type = other DNA
acactgagagctggtggtgcctgctgtcccagggagagttgcatcgccctccacagtgagtattgctcttcttcttgttg

SEQ ID NO: 92465 - DNA, 80 bp, synthetic construct
  misc_feature 1..80: note = Artificially Synthesized Probe
  source 1..80: mol_type = other DNA
ttgtagggcgagtaataaaactccctcccccttcacatacatgaagcttaggcttaaggcagtctgtgatttatacctta

SEQ ID NO: 92466 - DNA, 80 bp, synthetic construct
  misc_feature 1..80: note = Artificially Synthesized Probe
  source 1..80: mol_type = other DNA
tggaaacaaggaaactatgcatcaggaggcgaatggttaaatgaattgtgatgtatctagacaatggaatacacagcagc

SEQ ID NO: 92467 - DNA, 80 bp, synthetic construct; identical to SEQ ID NO: 33401
  misc_feature 1..80: note = Artificially Synthesized Probe
  source 1..80: mol_type = other DNA

SEQ ID NO: 92468 - DNA, 80 bp, synthetic construct
  misc_feature 1..80: note = Artificially Synthesized Probe
  source 1..80: mol_type = other DNA
gcaaaaagttattttaaatgactcatcagtggatgctggtttgccttttcaaacacacctaccctctttagttctgaatt

SEQ ID NO: 92469 - DNA, 80 bp, synthetic construct
  misc_feature 1..80: note = Artificially Synthesized Probe
  source 1..80: mol_type = other DNA
gagcaaaagctaatttactatttcagcatctggaatttcggagtccttttcttccaatatctgcttatctgttctgaagc

SEQ ID NO: 92470 - DNA, 80 bp, synthetic construct
  misc_feature 1..80: note = Artificially Synthesized Probe
  source 1..80: mol_type = other DNA
aaattggagcaaagccccaaaaagcttttaaacaaattcatcagccacatgtgtttgcaattgtttgacttaggagaaat

SEQ ID NO: 92471 - DNA, 80 bp, synthetic construct
  misc_feature 1..80: note = Artificially Synthesized Probe
  source 1..80: mol_type = other DNA
ctatgaaaaaatgtaagagatgattcaagctccgtgtagcaaattgtacaaagttcaaagtaaggacctgcattcctgac

SEQ ID NO: 92472 - DNA, 80 bp, synthetic construct
  misc_feature 1..80: note = Artificially Synthesized Probe
  source 1..80: mol_type = other DNA
taacttttctaataggcacttttctcttttggagaattagcagctctctcccttcctttatctcccaggtccctgcacat

SEQ ID NO: 92473 - DNA, 80 bp, synthetic construct; identical to SEQ ID NO: 33402
  misc_feature 1..80: note = Artificially Synthesized Probe
  source 1..80: mol_type = other DNA

SEQ ID NO: 92474 - DNA, 80 bp, synthetic construct
  misc_feature 1..80: note = Artificially Synthesized Probe
  source 1..80: mol_type = other DNA
ttgccacagtgctgagtcaactgcccatccactcccgacagaccgctgagatggtcctcactctcagtatgtttggtcat

SEQ ID NO: 92475 - DNA, 80 bp, synthetic construct
  misc_feature 1..80: note = Artificially Synthesized Probe
  source 1..80: mol_type = other DNA
gatgtgggctctagggaggggtatgtcctgtttttactctttggctctctccaaattttctatgagccagaagcagatgc

SEQ ID NO: 92476 - DNA, 80 bp, synthetic construct
  misc_feature 1..80: note = Artificially Synthesized Probe
  source 1..80: mol_type = other DNA
gttcaagcgattgtcctgcgtcagccagctgagtagctgggactacagggtaggcaaccatgcctggcatatttttaaat

SEQ ID NO: 92477 - DNA, 80 bp, synthetic construct; identical to SEQ ID NO: 33403
  misc_feature 1..80: note = Artificially Synthesized Probe
  source 1..80: mol_type = other DNA

SEQ ID NO: 92478 - DNA, 80 bp, synthetic construct
  misc_feature 1..80: note = Artificially Synthesized Probe
  source 1..80: mol_type = other DNA
tatttaaatagtttgcaaaatctaaatgaaaacatgaaagttcattttccactggtcacagtggttcagtctccttccag

SEQ ID NO: 92479 - DNA, 80 bp, synthetic construct
  misc_feature 1..80: note = Artificially Synthesized Probe
  source 1..80: mol_type = other DNA
ttcctacatgttgcattttaatcttatagtcttgaggacctcttttctatcagcatgaggaccatccttgtttattggct

SEQ ID NO: 92480 - DNA, 80 bp, synthetic construct
  misc_feature 1..80: note = Artificially Synthesized Probe
  source 1..80: mol_type = other DNA
tggttcaacgtctgagatttgcttcaaaaaaacatggctggtgggaagaagaaagtagaggtacaaatgaaaccagactg

SEQ ID NO: 92481 - DNA, 80 bp, synthetic construct; identical to SEQ ID NO: 33404
  misc_feature 1..80: note = Artificially Synthesized Probe
  source 1..80: mol_type = other DNA

SEQ ID NO: 92482 - DNA, 80 bp, synthetic construct
  misc_feature 1..80: note = Artificially Synthesized Probe
  source 1..80: mol_type = other DNA
gtttctttctttgggaatttttctcaggtattacatgattaatattcagtcctttcatgcaagcaaaaaggaggtgacat

SEQ ID NO: 92483 - DNA, 80 bp, synthetic construct
  misc_feature 1..80: note = Artificially Synthesized Probe
  source 1..80: mol_type = other DNA
aatcaacctccgtattccccaagctgtaataaaataaaatttgctgagttgaggtcttccaaactcaactgggcattttt

SEQ ID NO: 92484 - DNA, 80 bp, synthetic construct
  misc_feature 1..80: note = Artificially Synthesized Probe
  source 1..80: mol_type = other DNA
gtcagaaccgttcagaaatactgcctggggaaagttcttggttcttcggcttaggaggaaaggggcagaatacaaccttt

SEQ ID NO: 92485 - DNA, 80 bp, synthetic construct; identical to SEQ ID NO: 33405
  misc_feature 1..80: note = Artificially Synthesized Probe
  source 1..80: mol_type = other DNA

SEQ ID NO: 92486 - DNA, 80 bp, synthetic construct
  misc_feature 1..80: note = Artificially Synthesized Probe
  source 1..80: mol_type = other DNA
aacacgtgtgttacttttgtaacaaaaaaagtcatttttcagataaatgtcagtgttttcctggcccccagagggctgca

SEQ ID NO: 92487 - DNA, 80 bp, synthetic construct
  misc_feature 1..80: note = Artificially Synthesized Probe
  source 1..80: mol_type = other DNA
cttgtatctaatttcaagctcactgaaaagtgaaaaattgtgtaaagaatgcttataaacccttcacccaaaccattgtt

SEQ ID NO: 92488 - DNA, 80 bp, synthetic construct
  misc_feature 1..80: note = Artificially Synthesized Probe
  source 1..80: mol_type = other DNA
caggggcattctcctgtaaaaccacaatgcagtcagcaaaatcaggaaatttaatccggatgcagcactatcatcgaatt

SEQ ID NO: 92489 - DNA, 80 bp, synthetic construct
  misc_feature 1..80: note = Artificially Synthesized Probe
  source 1..80: mol_type = other DNA
aagcagattttgggtttgtttaccagacatttgcaatgagagtatgaccactagaaaagccaatgctgtactgaatatct

SEQ ID NO: 92490 - DNA, 80 bp, synthetic construct
  misc_feature 1..80: note = Artificially Synthesized Probe
  source 1..80: mol_type = other DNA
cacttgaccttgatatttggccaattactttgcagaaagtccttcattttgcgtttttctgatgcttcctcattctttga

SEQ ID NO: 92491 - DNA, 80 bp, synthetic construct; identical to SEQ ID NO: 33406
  misc_feature 1..80: note = Artificially Synthesized Probe
  source 1..80: mol_type = other DNA

SEQ ID NO: 92492 - DNA, 80 bp, synthetic construct
  misc_feature 1..80: note = Artificially Synthesized Probe
  source 1..80: mol_type = other DNA
ttcacaatagcaaaaacatggaatcaacctaaatgttcatcaacgatagactggataaggaaaatgtggtacatatacat

SEQ ID NO: 92493 - DNA, 80 bp, synthetic construct
  misc_feature 1..80: note = Artificially Synthesized Probe
  source 1..80: mol_type = other DNA
gacacaaaaaagggaataacagacactgggacccccttgaggatggagggaggtaggagggtgaggataaaaaaactatc

SEQ ID NO: 92494 - DNA, 80 bp, synthetic construct
  misc_feature 1..80: note = Artificially Synthesized Probe
  source 1..80: mol_type = other DNA
cacgtgggtccgtagtgatctctcaagttggctacaacagcacaaggcactccagtgcacttttgaaaagctaccagcag

SEQ ID NO: 92495 - DNA, 80 bp, synthetic construct; identical to SEQ ID NO: 33407
  misc_feature 1..80: note = Artificially Synthesized Probe
  source 1..80: mol_type = other DNA

SEQ ID NO: 92496 - DNA, 80 bp, synthetic construct
  misc_feature 1..80: note = Artificially Synthesized Probe
  source 1..80: mol_type = other DNA
ctggagtgcagtggtgcaatcttggctcactgcaacctctgcctcccaggttcaagtgatcctcctgcctcagcctcctg

SEQ ID NO: 92497 - DNA, 80 bp, synthetic construct
  misc_feature 1..80: note = Artificially Synthesized Probe
  source 1..80: mol_type = other DNA
caccatgcccagccacctccccttctctctctctctattgccaggacatcagtgattctgctttccgtcagtatagatta

SEQ ID NO: 92498 - DNA, 80 bp, synthetic construct
  misc_feature 1..80: note = Artificially Synthesized Probe
  source 1..80: mol_type = other DNA
catttactacttgatggacatttaggctgttagcagtttttgcctaccacagagtaaagctgtaataaacactcacatac

SEQ ID NO: 92499 - DNA, 80 bp, synthetic construct; identical to SEQ ID NO: 33408
  misc_feature 1..80: note = Artificially Synthesized Probe
  source 1..80: mol_type = other DNA

SEQ ID NO: 92500 - DNA, 80 bp, synthetic construct; identical to SEQ ID NO: 33340
  misc_feature 1..80: note = Artificially Synthesized Probe
  source 1..80: mol_type = other DNA

SEQ ID NO: 92501 - DNA, 80 bp, synthetic construct
  misc_feature 1..80: note = Artificially Synthesized Probe
  source 1..80: mol_type = other DNA
caaaacacatgaaaatgacaactcgagatttatttcagtcagttccgaggccctgtgcattagggaactagaactcattt

SEQ ID NO: 92502 - DNA, 80 bp, synthetic construct
  misc_feature 1..80: note = Artificially Synthesized Probe
  source 1..80: mol_type = other DNA
ccttttcctggggagtccagagcccagggcattctcaaagcgaccactgtcctgttagcttcggtgagtcccttagctga

SEQ ID NO: 92503 - DNA, 80 bp, synthetic construct; identical to SEQ ID NO: 33409
  misc_feature 1..80: note = Artificially Synthesized Probe
  source 1..80: mol_type = other DNA

SEQ ID NO: 92504 - DNA, 80 bp, synthetic construct
  misc_feature 1..80: note = Artificially Synthesized Probe
  source 1..80: mol_type = other DNA
tttttgatttttgtcccttttccaggagcaggcttgcatctgactgacccaccatgacacccacagacttcacagtgagt

SEQ ID NO: 92505 - DNA, 80 bp, synthetic construct
  misc_feature 1..80: note = Artificially Synthesized Probe
  source 1..80: mol_type = other DNA
gagggttttgcaaatgcaaagaggcagctatgctttggggtatgttgtggagacagaggaaaatgtggtgttataaacag

SEQ ID NO: 92506 - DNA, 80 bp, synthetic construct
  misc_feature 1..80: note = Artificially Synthesized Probe
  source 1..80: mol_type = other DNA
tatgaaaacacgtaacagtatacattcccctgaaagagaccaagagctgagcaaaaattagtgagtcagtctgggcgtgg

SEQ ID NO: 92507 - DNA, 80 bp, synthetic construct
  misc_feature 1..80: note = Artificially Synthesized Probe
  source 1..80: mol_type = other DNA
ctacgtgggaggctgaggcacgagagtcgcttgagcctgggaggtggaggttgcagtgagccaagatcacgccattgcac

SEQ ID NO: 92508 - DNA, 80 bp, synthetic construct; identical to SEQ ID NO: 33410
  misc_feature 1..80: note = Artificially Synthesized Probe
  source 1..80: mol_type = other DNA

SEQ ID NO: 92509 - DNA, 80 bp, synthetic construct
  misc_feature 1..80: note = Artificially Synthesized Probe
  source 1..80: mol_type = other DNA
ccataacaacaaaaaagtaattaatttggtcctggtgaagtaactattattctgacaaaaagtagactcttcagtttctc

SEQ ID NO: 92510 - DNA, 80 bp, synthetic construct
  misc_feature 1..80: note = Artificially Synthesized Probe
  source 1..80: mol_type = other DNA
aatagccaactctgcaaagcagccccagataagaaggaaactgcacctcagtaatgacctgctcttgtcagaggagtctg

SEQ ID NO: 92511 - DNA, 80 bp, synthetic construct; identical to SEQ ID NO: 33411
  misc_feature 1..80: note = Artificially Synthesized Probe
  source 1..80: mol_type = other DNA

SEQ ID NO: 92512 - DNA, 80 bp, synthetic construct
  misc_feature 1..80: note = Artificially Synthesized Probe
  source 1..80: mol_type = other DNA
aaataaatgtgagaatatcttgcatgccagggaaactgcaggtgtgtgagctatgtactgtcccctctgccctagaggat

SEQ ID NO: 92513 - DNA, 80 bp, synthetic construct
  misc_feature 1..80: note = Artificially Synthesized Probe
  source 1..80: mol_type = other DNA
tccccacctccctccttcttgtgccctctcttattccatctcccccattgccttgtgcccattcttggtgctaaggcaca

SEQ ID NO: 92514 - DNA, 80 bp, synthetic construct
  misc_feature 1..80: note = Artificially Synthesized Probe
  source 1..80: mol_type = other DNA
aactgggacgcctgggctgctgcttctgagcccaggactcctgagggaagaggacgtgcctgtgtgggagcaacagcctg

SEQ ID NO: 92515 - DNA, 80 bp, synthetic construct
  misc_feature 1..80: note = Artificially Synthesized Probe
  source 1..80: mol_type = other DNA
ggtgttgttccaggattcctctcgtggtcctgacaaattttatataaatctagatttggggtgtaaaattcaatcactta

SEQ ID NO: 92516 - DNA, 80 bp, synthetic construct
  misc_feature 1..80: note = Artificially Synthesized Probe
  source 1..80: mol_type = other DNA
ctgctcaccgggcagtggagaaagctgggtcacccaggtcctgggatttctgcacaatttctcccattctgctcctgcag

SEQ ID NO: 92517 - DNA, 80 bp, synthetic construct; identical to SEQ ID NO: 33412
  misc_feature 1..80: note = Artificially Synthesized Probe
  source 1..80: mol_type = other DNA

SEQ ID NO: 92518 - DNA, 80 bp, synthetic construct
  misc_feature 1..80: note = Artificially Synthesized Probe
  source 1..80: mol_type = other DNA
taaagctatttgaccaaaaaaaaaaaaaaaaaacacacaaaacacaaaacaccaacccacaaataacaaaaaaaaaactt

SEQ ID NO: 92519 - DNA, 80 bp, synthetic construct
  misc_feature 1..80: note = Artificially Synthesized Probe
  source 1..80: mol_type = other DNA
tattctcaagttcttctttcactcaaagtccactcaaacctcacctcctacaggacgactgtcttagtggggccatgatt

SEQ ID NO: 92520 - DNA, 80 bp, synthetic construct
  misc_feature 1..80: note = Artificially Synthesized Probe
  source 1..80: mol_type = other DNA
caagggactaatcacatataaaatagggagacgagttttctttagttctttgcgtttgtgggccatttccagctgccctg

SEQ ID NO: 92521 - DNA, 80 bp, synthetic construct; identical to SEQ ID NO: 33413
  misc_feature 1..80: note = Artificially Synthesized Probe
  source 1..80: mol_type = other DNA

SEQ ID NO: 92522 - DNA, 80 bp, synthetic construct
  misc_feature 1..80: note = Artificially Synthesized Probe
  source 1..80: mol_type = other DNA
actttcggaggccaaagtgggtggattacgaggtcagaagttcgagaccagcctgaccaacatggtgaaatcccgtctct

SEQ ID NO: 92523 - DNA, 80 bp, synthetic construct
  misc_feature 1..80: note = Artificially Synthesized Probe
  source 1..80: mol_type = other DNA
aatgtgagaaaggtagctaaaacttgtttcaccttttgatttccttgatcaagctgtaaatcttgcagtgctttttctag

SEQ ID NO: 92524 - DNA, 80 bp, synthetic construct
  misc_feature 1..80: note = Artificially Synthesized Probe
  source 1..80: mol_type = other DNA
gcgccattgcactccagcctgggaagcaagagcaaaactccgtctcaaaacaaacaaacaaataaataaaacaagttttg

SEQ ID NO: 92525 - DNA, 80 bp, synthetic construct; identical to SEQ ID NO: 33414
  misc_feature 1..80: note = Artificially Synthesized Probe
  source 1..80: mol_type = other DNA

SEQ ID NO: 92526 - DNA, 80 bp, synthetic construct
  misc_feature 1..80: note = Artificially Synthesized Probe
  source 1..80: mol_type = other DNA
aggataaataaaagtagagatgagatttggcaaggaatgtccctcaaggaaagggagtgagagctggtagtccctggtgg

SEQ ID NO: 92527 - DNA, 80 bp, synthetic construct
  misc_feature 1..80: note = Artificially Synthesized Probe
  source 1..80: mol_type = other DNA
caggtttgactcaagggcttacatctcagggtctcatttccagacctcatttcctgtttccgtagcaggggttttaggat

SEQ ID NO: 92528 - DNA, 80 bp, synthetic construct
  misc_feature 1..80: note = Artificially Synthesized Probe
  source 1..80: mol_type = other DNA
gcatgtttgtgtacgagagcatgtgcaagtgcatgtattatgtgtatgcatgtacatatgagtgtgtgtgcttgttgggg

SEQ ID NO: 92529 - DNA, 80 bp, synthetic construct; identical to SEQ ID NO: 33415
  misc_feature 1..80: note = Artificially Synthesized Probe
  source 1..80: mol_type = other DNA

SEQ ID NO: 92530 - DNA, 80 bp, synthetic construct
  misc_feature 1..80: note = Artificially Synthesized Probe
  source 1..80: mol_type = other DNA
actcaggggactgggatccagatgagtttaagagcccttgctaacctttttagggtcagtgaaaaactgaatagatagga

SEQ ID NO: 92531 - DNA, 80 bp, synthetic construct
  misc_feature 1..80: note = Artificially Synthesized Probe
  source 1..80: mol_type = other DNA
gctctatgggtaggtaagtttcctgagagtgaagccacacatctgacttatttattatggtttctttggcacatagcaca

SEQ ID NO: 92532 - DNA, 80 bp, synthetic construct
  misc_feature 1..80: note = Artificially Synthesized Probe
  source 1..80: mol_type = other DNA
ccttcaaaatattttccttgacctaatgccatcttgtgtccccttgcagagccctattcctaacatggctgatgactatg

SEQ ID NO: 92533 - DNA, 80 bp, synthetic construct; identical to SEQ ID NO: 33416
  misc_feature 1..80: note = Artificially Synthesized Probe
  source 1..80: mol_type = other DNA

SEQ ID NO: 92534 - DNA, 80 bp, synthetic construct
  misc_feature 1..80: note = Artificially Synthesized Probe
  source 1..80: mol_type = other DNA
catgagagcacatacttggagggagaaaaggcttttgtacagcaaaatggtttgctttaccatctgggtattggcagctg

SEQ ID NO: 92535 - DNA, 80 bp, synthetic construct
  misc_feature 1..80: note = Artificially Synthesized Probe
  source 1..80: mol_type = other DNA
ttgaagtcttaaaatttcctttgtgagtaaattcaaattttattatattaaccaaaatattttaatatttgaaattatta

SEQ ID NO: 92536 - DNA, 80 bp, synthetic construct
  misc_feature 1..80: note = Artificially Synthesized Probe
  source 1..80: mol_type = other DNA
ttgctgctataccatcatcattcacaccctgatacaagccaagaagtcttccaagcacaaagccctaaaagtgaccatca

SEQ ID NO: 92537 - DNA, 80 bp, synthetic construct
  misc_feature 1..80: note = Artificially Synthesized Probe
  source 1..80: mol_type = other DNA
cctgaaccctgttctctatgtttttgtgggtgagagattccgccgggatctcgtgaaaaccctgaagaacttgggttgca

SEQ ID NO: 92538 - DNA, 80 bp, synthetic construct; identical to SEQ ID NO: 33417
  misc_feature 1..80: note = Artificially Synthesized Probe
  source 1..80: mol_type = other DNA

SEQ ID NO: 92539 - DNA, 80 bp, synthetic construct
  misc_feature 1..80: note = Artificially Synthesized Probe
  source 1..80: mol_type = other DNA
ctggaggagcccttggattttctccatgcactgtgaacttctgtggcttcagttctcatgctgcctcttccaaaagggga

SEQ ID NO: 92540 - DNA, 80 bp, synthetic construct
  misc_feature 1..80: note = Artificially Synthesized Probe
  source 1..80: mol_type = other DNA
tcctgatctagaacctttccaggcaatctcagacctaatttccttctgttctccttgttctgttctgggccagtgaaggt

SEQ ID NO: 92541 - DNA, 80 bp, synthetic construct
  misc_feature 1..80: note = Artificially Synthesized Probe
  source 1..80: mol_type = other DNA
tgacagtgtctctccatggcctgagcagggagattataacagctgggttcgcaggagccagccttggccctgttgtaggc

SEQ ID NO: 92542 - DNA, 80 bp, synthetic construct; identical to SEQ ID NO: 33418
  misc_feature 1..80: note = Artificially Synthesized Probe
  source 1..80: mol_type = other DNA

SEQ ID NO: 92543 - DNA, 80 bp, synthetic construct
  misc_feature 1..80: note = Artificially Synthesized Probe
  source 1..80: mol_type = other DNA
tttaccctgtctcaatattttaagtgtgtgcaattaaagatcaaatagatacattaagagtgtgaaggctggtctgaagg

SEQ ID NO: 92544 - DNA, 80 bp, synthetic construct
  misc_feature 1..80: note = Artificially Synthesized Probe
  source 1..80: mol_type = other DNA
catcatggctgacaactttttatttctcctctgtccaaacttactcctcaggcttttccgtgttagtcaaatggaatttc

SEQ ID NO: 92545 - DNA, 80 bp, synthetic construct
  misc_feature 1..80: note = Artificially Synthesized Probe
  source 1..80: mol_type = other DNA
caccctttttctccctgcccacttctaaagcacatgagaatgaggaataaagtgagcagacatgggcagcagccagggag

SEQ ID NO: 92546 - DNA, 80 bp, synthetic construct; identical to SEQ ID NO: 33341
  misc_feature 1..80: note = Artificially Synthesized Probe
  source 1..80: mol_type = other DNA

SEQ ID NO: 92547 - DNA, 80 bp, synthetic construct; identical to SEQ ID NO: 33419
  misc_feature 1..80: note = Artificially Synthesized Probe
  source 1..80: mol_type = other DNA

SEQ ID NO: 92548 - DNA, 80 bp, synthetic construct
  misc_feature 1..80: note = Artificially Synthesized Probe
  source 1..80: mol_type = other DNA
agccttcccaggtgggagcctgggcaagtagctttgtgtggacctgttctggtacatgttttaaatgcccagactcctca

SEQ ID NO: 92549 - DNA, 80 bp, synthetic construct
  misc_feature 1..80: note = Artificially Synthesized Probe
  source 1..80: mol_type = other DNA
acttctagaaaataaagattgccaaccttgaccattgggacattacatcctttgggcagtgatgctgtcctgctatctac

SEQ ID NO: 92550 - DNA, 80 bp, synthetic construct
  misc_feature 1..80: note = Artificially Synthesized Probe
  source 1..80: mol_type = other DNA
aacttcttctttgcccattgtagttgttacagagagtcctgagcaaggaaggaagcagtccacagtgagctccttccatt

SEQ ID NO: 92551 - DNA, 80 bp, synthetic construct; identical to SEQ ID NO: 33420
  misc_feature 1..80: note = Artificially Synthesized Probe
  source 1..80: mol_type = other DNA

SEQ ID NO: 92552 - DNA, 80 bp, synthetic construct
  misc_feature 1..80: note = Artificially Synthesized Probe
  source 1..80: mol_type = other DNA
attggacagcttgtctcaatgtgaggtctgttcaggggctccccgtgactttgaaaaaagagaagtaatcatgggctcca

SEQ ID NO: 92553 - DNA, 80 bp, synthetic construct
  misc_feature 1..80: note = Artificially Synthesized Probe
  source 1..80: mol_type = other DNA
tctctctctccccatctcatgtgctcctcccttccagttgaggtccctatccaacatgctcctgggacaatgagctagtt

SEQ ID NO: 92554 - DNA, 80 bp, synthetic construct
  misc_feature 1..80: note = Artificially Synthesized Probe
  source 1..80: mol_type = other DNA
tgtatacgctcaattgtggcaccacaagctaagcaaaaaacctctatggtcatatggagatgcctcaagaaagaacttgt

SEQ ID NO: 92555 - DNA, 80 bp, synthetic construct
  misc_feature 1..80: note = Artificially Synthesized Probe
  source 1..80: mol_type = other DNA
gggcagaatccactccagggcactctgccagcacaccctcatggtgcacttttgaagaagggaatcagcagggccttggc

SEQ ID NO: 92556 - DNA, 80 bp, synthetic construct; identical to SEQ ID NO: 33421
  misc_feature 1..80: note = Artificially Synthesized Probe
  source 1..80: mol_type = other DNA

SEQ ID NO: 92557 - DNA, 80 bp, synthetic construct
  misc_feature 1..80: note = Artificially Synthesized Probe
  source 1..80: mol_type = other DNA
acatttgaatcatctgtgttatttttcagtagactcaaataaacacatcagcccagtcagagggcactgcactctgtttc

SEQ ID NO: 92558 - DNA, 80 bp, synthetic construct
  misc_feature 1..80: note = Artificially Synthesized Probe
  source 1..80: mol_type = other DNA
tctgagaaggctgagagcatgggtcctgtctcattataacctaagcattcagcagatatgcttgggcaccagctgcatgc

SEQ ID NO: 92559 - DNA, 80 bp, synthetic construct
  misc_feature 1..80: note = Artificially Synthesized Probe
  source 1..80: mol_type = other DNA
ccatgcagttagtaattggctttgtctgacatggtcagacaaaccagcccttgctttggagggttgaccagcatttgcca

SEQ ID NO: 92560 - DNA, 80 bp, synthetic construct; identical to SEQ ID NO: 33422
  misc_feature 1..80: note = Artificially Synthesized Probe
  source 1..80: mol_type = other DNA

SEQ ID NO: 92561 - DNA, 80 bp, synthetic construct
  misc_feature 1..80: note = Artificially Synthesized Probe
  source 1..80: mol_type = other DNA
aaacacctgggcctaggcatgtgtctgaaccttagaattcctgctgttggctttcctcttctccctgccccattcccctg

SEQ ID NO: 92562 - DNA, 80 bp, synthetic construct
  misc_feature 1..80: note = Artificially Synthesized Probe
  source 1..80: mol_type = other DNA
ctgtccccacgtggccccagatctcctctgcagccagtcagatgatctcaaggggcatgcagacctctcaggttggctct

SEQ ID NO: 92563 - DNA, 80 bp, synthetic construct
  misc_feature 1..80: note = Artificially Synthesized Probe
  source 1..80: mol_type = other DNA
ctcccctgcccagggactggcatctccttctgggagtcaccctccaggctttcctgaaaagctgtggctgctgcctggat

SEQ ID NO: 92564 - DNA, 80 bp, synthetic construct; identical to SEQ ID NO: 33333
  misc_feature 1..80: note = Artificially Synthesized Probe
  source 1..80: mol_type = other DNA

SEQ ID NO: 92565 - DNA, 80 bp, synthetic construct
  misc_feature 1..80: note = Artificially Synthesized Probe
  source 1..80: mol_type = other DNA
tttctagacctcaaatacacatttcaagcacatctgaattgtgtcatctggaaatttctaaacagtgtaaacaaccctca

SEQ ID NO: 92566 - DNA, 80 bp, synthetic construct; identical to SEQ ID NO: 33423
  misc_feature 1..80: note = Artificially Synthesized Probe
  source 1..80: mol_type = other DNA

SEQ ID NO: 92567 - DNA, 80 bp, synthetic construct
  misc_feature 1..80: note = Artificially Synthesized Probe
  source 1..80: mol_type = other DNA
acttggagagttaggcaagaaagacagggactgaactctgaacagctgcagacagtgagtcagctgggtggattaaggat

SEQ ID NO: 92568 - DNA, 80 bp, synthetic construct
  misc_feature 1..80: note = Artificially Synthesized Probe
  source 1..80: mol_type = other DNA
gactcagaagaagaggctggcagcttccacatcctgtgccgtgggaggcttgctctggaaaccctaagctgccgtgtcag

SEQ ID NO: 92569 - DNA, 80 bp, synthetic construct; identical to SEQ ID NO: 33424
  misc_feature 1..80: note = Artificially Synthesized Probe
  source 1..80: mol_type = other DNA

SEQ ID NO: 92570 - DNA, 80 bp, synthetic construct
  misc_feature 1..80: note = Artificially Synthesized Probe
  source 1..80: mol_type = other DNA
aactgagtcttctctgctacccagtatgacacctgtagcacacaggagaatattctctggtctctatttctagaacatca

SEQ ID NO: 92571 - DNA, 80 bp, synthetic construct
  misc_feature 1..80: note = Artificially Synthesized Probe
  source 1..80: mol_type = other DNA
tgcctgtgggacatcactgtcaactctctggtgaagtgtccatgcatgcaattggtttaggacttctccactcatgttct

SEQ ID NO: 92572 - DNA, 80 bp, synthetic construct
  misc_feature 1..80: note = Artificially Synthesized Probe
  source 1..80: mol_type = other DNA
tgagtgaagcttcgtctgtatttatagctgctccccatcgcctgcatcaccgcctgagcttcgccaactgtcatatcagt

SEQ ID NO: 92573 - DNA, 80 bp, synthetic construct
  misc_feature 1..80: note = Artificially Synthesized Probe
  source 1..80: mol_type = other DNA
gagatcgtctagttgcaggaaaacaagctcaggcttcccactgattctacattatggcgagttgtataattatctcatta

SEQ ID NO: 92574 - DNA, 80 bp, synthetic construct; identical to SEQ ID NO: 33425
  misc_feature 1..80: note = Artificially Synthesized Probe
  source 1..80: mol_type = other DNA

SEQ ID NO: 92575 - DNA, 80 bp, synthetic construct
  misc_feature 1..80: note = Artificially Synthesized Probe
  source 1..80: mol_type = other DNA
aaatcacaattttaaaacattaaaataagaaatggagactggatggactcttcctctgtgtggttaggccaccactcaac

SEQ ID NO: 92576 - DNA, 80 bp, synthetic construct
  misc_feature 1..80: note = Artificially Synthesized Probe
  source 1..80: mol_type = other DNA
gttcaacttttggaaaccaggaagtttctaaggaccacaggaaaactgatgttgcctgagacaaggtgggaccatcaccc

SEQ ID NO: 92577 - DNA, 80 bp, synthetic construct
  misc_feature 1..80: note = Artificially Synthesized Probe
  source 1..80: mol_type = other DNA
tccacttcaggaagatttttaagtggggtgtggcatgatccaattcatgttttaaagatctctaaagcccccaggagaag

SEQ ID NO: 92578 - DNA, 80 bp, synthetic construct; identical to SEQ ID NO: 33426
  misc_feature 1..80: note = Artificially Synthesized Probe
  source 1..80: mol_type = other DNA

SEQ ID NO: 92579 - DNA, 80 bp, synthetic construct
  misc_feature 1..80: note = Artificially Synthesized Probe
  source 1..80: mol_type = other DNA
actgtgattggctgaggagcaaatcaatgggaagtgaggatgtggaaagaggatgtgtaggtgaaacttgtgtcaggttt

SEQ ID NO: 92580 - DNA, 80 bp, synthetic construct
  misc_feature 1..80: note = Artificially Synthesized Probe
  source 1..80: mol_type = other DNA
tataaaaacaataaccattttattttattcgccattttgtgagccgggaatttggaaggggctcagcagggcatatttag

SEQ ID NO: 92581 - DNA, 80 bp, synthetic construct
  misc_feature 1..80: note = Artificially Synthesized Probe
  source 1..80: mol_type = other DNA
aaaaattagccgggcgtggtggcaggcgctactcggaggctgaggcaggagaatggcgtgaacccgggaggtggagcttg

SEQ ID NO: 92582 - DNA, 80 bp, synthetic construct
  misc_feature 1..80: note = Artificially Synthesized Probe
  source 1..80: mol_type = other DNA
actcagaccttttacatggcagctggcttcccctgtgcaagagaaccaaggggaagttgcaggtccttttctgacatggc

SEQ ID NO: 92583 - DNA, 80 bp, synthetic construct
  misc_feature 1..80: note = Artificially Synthesized Probe
  source 1..80: mol_type = other DNA
catattttaaaatcaccaaaggtggctactctgtaaattaactcatctttcaatgatcccaatcactcggtcccccaact

SEQ ID NO: 92584 - DNA, 80 bp, synthetic construct; identical to SEQ ID NO: 33427
  misc_feature 1..80: note = Artificially Synthesized Probe
  source 1..80: mol_type = other DNA

SEQ ID NO: 92585 - DNA, 80 bp, synthetic construct
  misc_feature 1..80: note = Artificially Synthesized Probe
  source 1..80: mol_type = other DNA
gctcatggctttatgccgttcagctttgctggtaagtaggtcacccctttggtgaatgcagaaagacatcaacaactgtg

SEQ ID NO: 92586 - DNA, 80 bp, synthetic construct
  misc_feature 1..80: note = Artificially Synthesized Probe
  source 1..80: mol_type = other DNA
acctactaaaaatacttcaaacgacatagaaaagtataaagagaaaagtaaaagcatcttattcctgccaccaactccaa

SEQ ID NO: 92587 - DNA, 80 bp, synthetic construct; identical to SEQ ID NO: 33428
  misc_feature 1..80: note = Artificially Synthesized Probe
  source 1..80: mol_type = other DNA

SEQ ID NO: 92588 - DNA, 80 bp, synthetic construct
  misc_feature 1..80: note = Artificially Synthesized Probe
  source 1..80: mol_type = other DNA
gccctttataaagtgactttgcagttcctcccatccagaggagtcccttttcccacacctggaatctgggctggcctgtg

SEQ ID NO: 92589 - DNA, 80 bp, synthetic construct
  misc_feature 1..80: note = Artificially Synthesized Probe
  source 1..80: mol_type = other DNA
acagccaagttgtctggccaagaccatcctagcctagccagcctttctttgaccaactgaccacagatgtaggagtcaac

SEQ ID NO: 92590 - DNA, 80 bp, synthetic construct
  misc_feature 1..80: note = Artificially Synthesized Probe
  source 1..80: mol_type = other DNA
aagccacggttttgaggttatccaacttcaaataacgcagaataatgcagcttggtctgacaacaggtaactgatacagc

SEQ ID NO: 92591 - DNA, 80 bp, synthetic construct; identical to SEQ ID NO: 33429
  misc_feature 1..80: note = Artificially Synthesized Probe
  source 1..80: mol_type = other DNA

SEQ ID NO: 92592 - DNA, 80 bp, synthetic construct
  misc_feature 1..80: note = Artificially Synthesized Probe
  source 1..80: mol_type = other DNA
gcctcatccacacctttgacaatctgacaaagcctatagcccctttctcagaatgctttaaaatgcaaacaataaaatag

SEQ ID NO: 92593 - DNA, 80 bp, synthetic construct; identical to SEQ ID NO: 33342
  misc_feature 1..80: note = Artificially Synthesized Probe
  source 1..80: mol_type = other DNA

SEQ ID NO: 92594 - DNA, 80 bp, synthetic construct
  misc_feature 1..80: note = Artificially Synthesized Probe
  source 1..80: mol_type = other DNA
gagtctgcagaaattgtcatgtaatacaaaaatatctgccatttctactggtgacaaagtgacaggtctagctagtacta

SEQ ID NO: 92595 - DNA, 80 bp, synthetic construct
  misc_feature 1..80: note = Artificially Synthesized Probe
  source 1..80: mol_type = other DNA
taccccctggatactttctccatttcttaaaatttggacatgtatggaactcttctggatttggggaaggggatgttttt

SEQ ID NO: 92596 - DNA, 80 bp, synthetic construct
  misc_feature 1..80: note = Artificially Synthesized Probe
  source 1..80: mol_type = other DNA
ccactcagaaatgatctgccagttggcaccagaacccttgaataaaaatataagccataaaaaagttatggttgtaaact

SEQ ID NO: 92597 - DNA, 80 bp, synthetic construct; identical to SEQ ID NO: 33430
  misc_feature 1..80: note = Artificially Synthesized Probe
  source 1..80: mol_type = other DNA

SEQ ID NO: 92598 - DNA, 80 bp, synthetic construct
  misc_feature 1..80: note = Artificially Synthesized Probe
  source 1..80: mol_type = other DNA
cagcctcaaactcccaggcttaagggattctgccacctcagcctccccagtggctgggactagaggcgcctggctaatat

SEQ ID NO: 92599 - DNA, 80 bp, synthetic construct
  misc_feature 1..80: note = Artificially Synthesized Probe
  source 1..80: mol_type = other DNA
taactaaagcaagagaaccttctcctaagaatctctctgcaacttccttttatttactgacacctaataaatgaacagtt

SEQ ID NO: 92600 - DNA, 80 bp, synthetic construct
  misc_feature 1..80: note = Artificially Synthesized Probe
  source 1..80: mol_type = other DNA
tcctctttctgagaccacccaacagctgggtggcgtccctgctggtgcagaggagctgcctcttccaagaccttgggttc

SEQ ID NO: 92601 - DNA, 80 bp, synthetic construct; identical to SEQ ID NO: 33431
  misc_feature 1..80: note = Artificially Synthesized Probe
  source 1..80: mol_type = other DNA

SEQ ID NO: 92602 - DNA, 80 bp, synthetic construct
  misc_feature 1..80: note = Artificially Synthesized Probe
  source 1..80: mol_type = other DNA
ccgatcttttatccccgcaccgcccacctccgccccacccttctccctcaccagctttcctctctcaagccagggagaag

SEQ ID NO: 92603 - DNA, 80 bp, synthetic construct
  misc_feature 1..80: note = Artificially Synthesized Probe
  source 1..80: mol_type = other DNA
ccgaagacagacctgtcctagaaacaaggacttccttttggtaaggacactcatgcatctcaggttttgttcatttttta

SEQ ID NO: 92604 - DNA, 80 bp, synthetic construct
  misc_feature 1..80: note = Artificially Synthesized Probe
  source 1..80: mol_type = other DNA
ataatttttttttttttttgagatggagtctcgctctgtcgcccaggctagagtgcagtggcgtgatctcagctcactgc

SEQ ID NO: 92605 - DNA, 80 bp, synthetic construct
  misc_feature 1..80: note = Artificially Synthesized Probe
  source 1..80: mol_type = other DNA
cagaggttggccatcacccttctgctcgcattaccatccttcttcagaaaacagcgggtgtgggaaaagtaaaaggctga

SEQ ID NO: 92606 - DNA, 80 bp, synthetic construct; identical to SEQ ID NO: 33432
  misc_feature 1..80: note = Artificially Synthesized Probe
  source 1..80: mol_type = other DNA

SEQ ID NO: 92607 - DNA, 80 bp, synthetic construct
  misc_feature 1..80: note = Artificially Synthesized Probe
  source 1..80: mol_type = other DNA
caataaacgctgtccaaaatttcatgctcttcactttaccttgaaaaggtgtgatcaggagctacttcaggctctctaga

SEQ ID NO: 92608 - DNA, 80 bp, synthetic construct
  misc_feature 1..80: note = Artificially Synthesized Probe
  source 1..80: mol_type = other DNA
taatattaccttgtttaggagttctgctgttccaccttcattaagtggagcaagttttggctttgtgacatctaagatgg

SEQ ID NO: 92609 - DNA, 80 bp, synthetic construct; identical to SEQ ID NO: 33343
  misc_feature 1..80: note = Artificially Synthesized Probe
  source 1..80: mol_type = other DNA

SEQ ID NO: 92610 - DNA, 80 bp, synthetic construct
  misc_feature 1..80: note = Artificially Synthesized Probe
  source 1..80: mol_type = other DNA
gccgaggccccgagaggcctgcgcgaacttgtccccggcgacggcggcgcgggctcggggtccggcgcctacaggaagaa

SEQ ID NO: 92611 - DNA, 80 bp, synthetic construct
  misc_feature 1..80: note = Artificially Synthesized Probe
  source 1..80: mol_type = other DNA
cacctccagcttcagctgctccacctggctctggagttggcacttctcgctctccagaatgtgccgctgctgcacccgct

SEQ ID NO: 92612 - DNA, 80 bp, synthetic construct
  misc_feature 1..80: note = Artificially Synthesized Probe
  source 1..80: mol_type = other DNA
ccaggcgcacgtggtggcccgcgccaccgccgtgtcccgcgccgccatggtggtggtggtggtggtggtggtggtgggcg

SEQ ID NO: 92613 - DNA, 80 bp, synthetic construct; identical to SEQ ID NO: 33444
  misc_feature 1..80: note = Artificially Synthesized Probe
  source 1..80: mol_type = other DNA

SEQ ID NO: 92614 - DNA, 80 bp, synthetic construct
  misc_feature 1..80: note = Artificially Synthesized Probe
  source 1..80: mol_type = other DNA
tgagtcgcggagtcttgcagttaaggtattaatattattgcgtctcaaggtgcctcaggtcagaggttccaaaggtgaat

SEQ ID NO: 92615 - DNA, 80 bp, synthetic construct
  misc_feature 1..80: note = Artificially Synthesized Probe
  source 1..80: mol_type = other DNA
cgcgcagaagctgggcgaggagggcacggaggagcagggcgtgctgagcggcgtcgaggacagcgagcctggcggcaggc

SEQ ID NO: 92616 - DNA, 80 bp, synthetic construct
  misc_feature 1..80: note = Artificially Synthesized Probe
  source 1..80: mol_type = other DNA
ccgcgccccgacgggcggcgtgggagtggggggggagctgcaggcctctcccccccctgctccccgcgggcggcggtccc

SEQ ID NO: 92617 - DNA, 80 bp, synthetic construct
  misc_feature 1..80: note = Artificially Synthesized Probe
  source 1..80: mol_type = other DNA
tcctccccgcggccgccgcctcgggctgctccgggaccgctcccgcgccccacccgcgccgccggccggccccgcctccc

SEQ ID NO: 92618 - DNA, 80 bp, synthetic construct
  misc_feature 1..80: note = Artificially Synthesized Probe
  source 1..80: mol_type = other DNA
ggcccccgctctacctccagctggggaagggcagaggtcaggccgactccagtccagcccctctgccaccatggcggggg

SEQ ID NO: 92619 - DNA, 80 bp, synthetic construct; identical to SEQ ID NO: 33434
  misc_feature 1..80: note = Artificially Synthesized Probe
  source 1..80: mol_type = other DNA

SEQ ID NO: 92620 - DNA, 80 bp, synthetic construct
  misc_feature 1..80: note = Artificially Synthesized Probe
  source 1..80: mol_type = other DNA
tacgcccaggacccagagggcagagacggtgggtgaggaaccatctctgcagggaaccgccagcaggaacagaagggtga

SEQ ID NO: 92621 - DNA, 80 bp, synthetic construct
  misc_feature 1..80: note = Artificially Synthesized Probe
  source 1..80: mol_type = other DNA
ctgcagccgctccagccccgactttatacacacaggcccagccacctacgggcaggcgaggcctcctggaggcccggcgg

SEQ ID NO: 92622 - DNA, 80 bp, synthetic construct
  misc_feature 1..80: note = Artificially Synthesized Probe
  source 1..80: mol_type = other DNA
ccgctgccctgcgtcctgccgcgccccagcccgcgcgtctcacacaccgcgactgcgtgtctacaggtgccgcctcttga

SEQ ID NO: 92623 - DNA, 80 bp, synthetic construct; identical to SEQ ID NO: 33435
  misc_feature 1..80: note = Artificially Synthesized Probe
  source 1..80: mol_type = other DNA

SEQ ID NO: 92624 - DNA, 80 bp, synthetic construct
  misc_feature 1..80: note = Artificially Synthesized Probe
  source 1..80: mol_type = other DNA
gcagcagctcagcctggccctggaattttccataaaggtctttccaggtaagaatgattagacaacatattttgtattca

SEQ ID NO: 92625 - DNA, 80 bp, synthetic construct
  misc_feature 1..80: note = Artificially Synthesized Probe
  source 1..80: mol_type = other DNA
gggagaagctggggatgggtggggtgggcccagccagggcccctgtgtttgaaactcccttgtcgcagaggagccgtggg

SEQ ID NO: 92626 - DNA, 80 bp, synthetic construct
  misc_feature 1..80: note = Artificially Synthesized Probe
  source 1..80: mol_type = other DNA
gtcccagccaggagacgggagcaagggtgctgcaggagaagggactccgggaccctccttcctagagaagccagagtccc

SEQ ID NO: 92627 - DNA, 80 bp, synthetic construct
  misc_feature 1..80: note = Artificially Synthesized Probe
  source 1..80: mol_type = other DNA
ggactgggtgggagggaggcaaaggggccatcccctgcgagctagaccacgctgagtgggtgccgggaggtgcagtggag

SEQ ID NO: 92628 - DNA, 80 bp, synthetic construct; identical to SEQ ID NO: 33436
  misc_feature 1..80: note = Artificially Synthesized Probe
  source 1..80: mol_type = other DNA

SEQ ID NO: 92629 - DNA, 80 bp, synthetic construct
  misc_feature 1..80: note = Artificially Synthesized Probe
  source 1..80: mol_type = other DNA
cctgcaacccccacagcctcccccgccgaccccttcatgcccccccgcccccctgcccggcgctcctccccggccgcggg

SEQ ID NO: 92630 - DNA, 80 bp, synthetic construct
  misc_feature 1..80: note = Artificially Synthesized Probe
  source 1..80: mol_type = other DNA
ccttcctgccacctcctgattcggggtacactcccttcccccatcccccacctcctccgcctcccaggtgaggaagcggt

SEQ ID NO: 92631 - DNA, 80 bp, synthetic construct
  misc_feature 1..80: note = Artificially Synthesized Probe
  source 1..80: mol_type = other DNA
gtccctcggccgccaccctctccctgggagcccggggatccaaatgcctcctctcagggaccctggagggtactcctgtc

SEQ ID NO: 92632 - DNA, 80 bp, synthetic construct; identical to SEQ ID NO: 33437
  misc_feature 1..80: note = Artificially Synthesized Probe
  source 1..80: mol_type = other DNA

SEQ ID NO: 92633 - DNA, 80 bp, synthetic construct; identical to SEQ ID NO: 33433
  misc_feature 1..80: note = Artificially Synthesized Probe
  source 1..80: mol_type = other DNA

SEQ ID NO: 92634 - DNA, 80 bp, synthetic construct
  misc_feature 1..80: note = Artificially Synthesized Probe
  source 1..80: mol_type = other DNA
tgggcttgaatctgggacagcgggggcactcaggccctgccccgcacccttgctgggcctccccagccctcggctggact

SEQ ID NO: 92635 - DNA, 80 bp, synthetic construct
  misc_feature 1..80: note = Artificially Synthesized Probe
  source 1..80: mol_type = other DNA
gtcagcccatcacctctgtgtctgactcagagccccggagtatctgctttccagagtggctggcaggtggggagaccaag

SEQ ID NO: 92636 - DNA, 80 bp, synthetic construct; identical to SEQ ID NO: 33438
  misc_feature 1..80: note = Artificially Synthesized Probe
  source 1..80: mol_type = other DNA

SEQ ID NO: 92637 - DNA, 80 bp, synthetic construct
  misc_feature 1..80: note = Artificially Synthesized Probe
  source 1..80: mol_type = other DNA
gaggcttccatcctggagggcatctgggcccctcacggtggctccaaggaccagggctgggagagaggtggcaaggagag

SEQ ID NO: 92638 - DNA, 80 bp, synthetic construct
  misc_feature 1..80: note = Artificially Synthesized Probe
  source 1..80: mol_type = other DNA
gacaaaaccatggggttggtttgcgtatagggccggtgggtccacatgcatgtgtctgggtgtaactccaccctcatgtg

SEQ ID NO: 92639 - DNA, 80 bp, synthetic construct
  misc_feature 1..80: note = Artificially Synthesized Probe
  source 1..80: mol_type = other DNA
tgtgctggggctggggcagaggacacttccgctttgtcctggccctcatctcagagccggctctataggaggctgggggg

SEQ ID NO: 92640 - DNA, 80 bp, synthetic construct; identical to SEQ ID NO: 33439
  misc_feature 1..80: note = Artificially Synthesized Probe
  source 1..80: mol_type = other DNA

SEQ ID NO: 92641 - DNA, 80 bp, synthetic construct
  misc_feature 1..80: note = Artificially Synthesized Probe
  source 1..80: mol_type = other DNA
gtgctcctgctcgtgtgtccagtgtgtgccatgggtgtccacccaggcccagggccttaaccccggccccttcagcctct

SEQ ID NO: 92642 - DNA, 80 bp, synthetic construct
  misc_feature 1..80: note = Artificially Synthesized Probe
  source 1..80: mol_type = other DNA
gccgagtgtcacatgcaggacactccagttggtgtctccctccggagctcttgggccagggctgtcacctgggtccctgc

SEQ ID NO: 92643 - DNA, 80 bp, synthetic construct
  misc_feature 1..80: note = Artificially Synthesized Probe
  source 1..80: mol_type = other DNA
ggtggcgggggcagggggcacccaggccaggcaccatcactgacctctggggacatccaggtgggggtgggggtgaggtc

SEQ ID NO: 92644 - DNA, 80 bp, synthetic construct
  misc_feature 1..80: note = Artificially Synthesized Probe
  source 1..80: mol_type = other DNA
ggacagacccagcggatgaggggtttgaaaaggaggagtggggactgcagtgatgggcagcgcactgcggctgagtaggg

SEQ ID NO: 92645 - DNA, 80 bp, synthetic construct; identical to SEQ ID NO: 33440
  misc_feature 1..80: note = Artificially Synthesized Probe
  source 1..80: mol_type = other DNA

SEQ ID NO: 92646 - DNA, 80 bp, synthetic construct
  misc_feature 1..80: note = Artificially Synthesized Probe
  source 1..80: mol_type = other DNA
agctgtacagagtctgggtcaggtgtgtgccgctggtccaggcctgtgctgtgtgggtgggcacgggtgcaactgaagcc

SEQ ID NO: 92647 - DNA, 80 bp, synthetic construct
  misc_feature 1..80: note = Artificially Synthesized Probe
  source 1..80: mol_type = other DNA
cttgtgtgtggcggaaagcagggggacagacgaaagagagaaagagaaaggggagagaaaacagaaaacaggaaagtgaa

SEQ ID NO: 92648 - DNA, 80 bp, synthetic construct
  misc_feature 1..80: note = Artificially Synthesized Probe
  source 1..80: mol_type = other DNA
cccgtgcaccaggaagcccagttctggcccctgagtgcagggctcccagacgcctggggtgggggtagggagcagggagg

SEQ ID NO: 92649 - DNA, 80 bp, synthetic construct; identical to SEQ ID NO: 33441
  misc_feature 1..80: note = Artificially Synthesized Probe
  source 1..80: mol_type = other DNA

SEQ ID NO: 92650 - DNA, 80 bp, synthetic construct
  misc_feature 1..80: note = Artificially Synthesized Probe
  source 1..80: mol_type = other DNA
tttctgtaattcccaccagcattctcctccacagagatgccttcacggccagctcccctgctgggattctgcttgaactc

SEQ ID NO: 92651 - DNA, 80 bp, synthetic construct
  misc_feature 1..80: note = Artificially Synthesized Probe
  source 1..80: mol_type = other DNA
gaaagaacctccgcttacccccgatggaaaagcagcacagccccctcccaagaaaggcgagtttggaagcccttgcaggc

SEQ ID NO: 92652 - DNA, 80 bp, synthetic construct
  misc_feature 1..80: note = Artificially Synthesized Probe
  source 1..80: mol_type = other DNA
ccagtccatgcccagccagccgttcagaggagcaagggtaggctgcgccttcaggtgggagacgggcagactccgagggc

SEQ ID NO: 92653 - DNA, 80 bp, synthetic construct
  misc_feature 1..80: note = Artificially Synthesized Probe
  source 1..80: mol_type = other DNA
gcaggccggctaacgctgcctcgctgctcagtttctccctggtcctgccgtcacccagggcccgtccgtcacccagggcc

SEQ ID NO: 92654 - DNA, 80 bp, synthetic construct; identical to SEQ ID NO: 33442
  misc_feature 1..80: note = Artificially Synthesized Probe
  source 1..80: mol_type = other DNA

SEQ ID NO: 92655 - DNA, 80 bp, synthetic construct
  misc_feature 1..80: note = Artificially Synthesized Probe
  source 1..80: mol_type = other DNA
gaaagattccacaaacaaaacgaaacacaatttaaattaaaataaaaacactttctccacccgccccatgccagaaggct

SEQ ID NO: 92656 - DNA, 80 bp, synthetic construct
  misc_feature 1..80: note = Artificially Synthesized Probe
  source 1..80: mol_type = other DNA
aagacatctccggtcttggattgggggcacccctgtaaatcccgccccggtgcacctggagaggcacatcccactccacg

SEQ ID NO: 92657 - DNA, 80 bp, synthetic construct
  misc_feature 1..80: note = Artificially Synthesized Probe
  source 1..80: mol_type = other DNA
atccgggccagcccccacccgactgagcacaggactcacccccctccccccacccccggttgagcatagtaggacagcag

SEQ ID NO: 92658 - DNA, 80 bp, synthetic construct
  misc_feature 1..80: note = Artificially Synthesized Probe
  source 1..80: mol_type = other DNA
gctggggaaagaaggggcttcctccaaggttttcttttctaatcaccaagcataataattataaatacttcgaaaataag

SEQ ID NO: 92659 - DNA, 80 bp, synthetic construct; identical to SEQ ID NO: 33443
  misc_feature 1..80: note = Artificially Synthesized Probe
  source 1..80: mol_type = other DNA

SEQ ID NO: 92660 - DNA, 80 bp, synthetic construct
  misc_feature 1..80: note = Artificially Synthesized Probe
  source 1..80: mol_type = other DNA
tctgacgcagtcgccgtaggacgcagccccgtacgctggagcgcagcggagacaggcgcgggcgcactggccgcatagag

SEQ ID NO: 92661 - DNA, 80 bp, synthetic construct; identical to SEQ ID NO: 33455
  misc_feature 1..80: note = Artificially Synthesized Probe
  source 1..80: mol_type = other DNA

SEQ ID NO: 92662 - DNA, 80 bp, synthetic construct
  misc_feature 1..80: note = Artificially Synthesized Probe
  source 1..80: mol_type = other DNA
tcaaaagtgccacgtttgtactcccagcatgtaagccatctgtggttgtaagaggccttttgctgatcctgggacagatt

SEQ ID NO: 92663 - DNA, 80 bp, synthetic construct
  misc_feature 1..80: note = Artificially Synthesized Probe
  source 1..80: mol_type = other DNA
tgtgtggccatcctggcatcttggggccacctcactgtcactagtgctcctgtttggatgaaagattctctactcctcca

SEQ ID NO: 92664 - DNA, 80 bp, synthetic construct
  misc_feature 1..80: note = Artificially Synthesized Probe
  source 1..80: mol_type = other DNA
ctgccactcagcagcctgcacctcaggatgatggggccgctttgggtgcagggctgtgccttggccgtgggtatggagcg

SEQ ID NO: 92665 - DNA, 80 bp, synthetic construct
  misc_feature 1..80: note = Artificially Synthesized Probe
  source 1..80: mol_type = other DNA
acacagggcacaccaggtgaggccacacctgcaccccttcctccccgggcgctcaggggctggtggctgatgggtgcagg

SEQ ID NO: 92666 - DNA, 80 bp, synthetic construct; identical to SEQ ID NO: 33456
  misc_feature 1..80: note = Artificially Synthesized Probe
  source 1..80: mol_type = other DNA

SEQ ID NO: 92667 - DNA, 80 bp, synthetic construct
  misc_feature 1..80: note = Artificially Synthesized Probe
  source 1..80: mol_type = other DNA
gacagttgagacgttccgtgtgatatattcagtaagaaatgtcattctctgtacctcccttagaaatggaagcaactgtc

SEQ ID NO: 92668 - DNA, 80 bp, synthetic construct
  misc_feature 1..80: note = Artificially Synthesized Probe
  source 1..80: mol_type = other DNA
cagactgaaaagcagggctgaggacagccacccccagagtcgtttgcttgtctgtgggggctcatggcaggtcgctgagt

SEQ ID NO: 92669 - DNA, 80 bp, synthetic construct
  misc_feature 1..80: note = Artificially Synthesized Probe
  source 1..80: mol_type = other DNA
aaggaggcctcagaacctttcctgagaggacgtgtggtttggtgccgttacacacgtgtcaatccacacattagtcaatg

SEQ ID NO: 92670 - DNA, 80 bp, synthetic construct
  misc_feature 1..80: note = Artificially Synthesized Probe
  source 1..80: mol_type = other DNA
cagagtcttgctttgtcacttcactgcaacgtctgccttctgggttcaagcaagtctcctgcctcagcctccctagtagc

SEQ ID NO: 92671 - DNA, 80 bp, synthetic construct; identical to SEQ ID NO: 33457
  misc_feature 1..80: note = Artificially Synthesized Probe
  source 1..80: mol_type = other DNA

SEQ ID NO: 92672 - DNA, 80 bp, synthetic construct
  misc_feature 1..80: note = Artificially Synthesized Probe
  source 1..80: mol_type = other DNA
cacccttgtccctttggccagaggccaccgaggcccaaggagggtgtgcctgcccaggcgccaggtggaggtgcatgggc

SEQ ID NO: 92673 - DNA, 80 bp, synthetic construct
  misc_feature 1..80: note = Artificially Synthesized Probe
  source 1..80: mol_type = other DNA
cccaccgtcatctttgccccatgggggtcacagcagtgctctgcctgagggtgtccatctgtgccgacgccaggaccacg

SEQ ID NO: 92674 - DNA, 80 bp, synthetic construct; identical to SEQ ID NO: 33458
  misc_feature 1..80: note = Artificially Synthesized Probe
  source 1..80: mol_type = other DNA

SEQ ID NO: 92675 - DNA, 80 bp, synthetic construct
  misc_feature 1..80: note = Artificially Synthesized Probe
  source 1..80: mol_type = other DNA
caaggcacacacagggccgctgtccccagacctctgcaggagttgagtgtggactctttgggggacgtccaagggacatt

SEQ ID NO: 92676 - DNA, 80 bp, synthetic construct
  misc_feature 1..80: note = Artificially Synthesized Probe
  source 1..80: mol_type = other DNA
aattttttgaataggttgaagaccaccagtaaacgacgtgtgtaatttttttgggtcgtagcctttggttgtgacccatt

SEQ ID NO: 92677 - DNA, 80 bp, synthetic construct
  misc_feature 1..80: note = Artificially Synthesized Probe
  source 1..80: mol_type = other DNA
tttgtttttgagatggagtctttcactgtctcctgggctggagtgcaatggcgcaatctcggctcattgcaaccttggcc

SEQ ID NO: 92678 - DNA, 80 bp, synthetic construct
  misc_feature 1..80: note = Artificially Synthesized Probe
  source 1..80: mol_type = other DNA
gcaatcttgcattctaccttaaacagctccaggaggcatatatggcaacgaattggcaagaaatcaagataaagagaaag

SEQ ID NO: 92679 - DNA, 80 bp, synthetic construct
  misc_feature 1..80: note = Artificially Synthesized Probe
  source 1..80: mol_type = other DNA
ggcatgcgccaccatactcagctaatttttgtgtttttagtagagatggggttttcccatgttgtccaggctggtctcta

SEQ ID NO: 92680 - DNA, 80 bp, synthetic construct; identical to SEQ ID NO: 33459
  misc_feature 1..80: note = Artificially Synthesized Probe
  source 1..80: mol_type = other DNA

SEQ ID NO: 92681 - DNA, 80 bp, synthetic construct
  misc_feature 1..80: note = Artificially Synthesized Probe
  source 1..80: mol_type = other DNA
cgtgactgtcttcctgtttcctcttcaaatgcactggagtctgtttctgagctcatattcgtgagctgatgaagccactt

SEQ ID NO: 92682 - DNA, 80 bp, synthetic construct
  misc_feature 1..80: note = Artificially Synthesized Probe
  source 1..80: mol_type = other DNA
ctcatataccaggaggattttggaaatcggctaatgcctgccttcagaacaccatccaagattccttactcggatgtgaa

SEQ ID NO: 92683 - DNA, 80 bp, synthetic construct; identical to SEQ ID NO: 33460
  misc_feature 1..80: note = Artificially Synthesized Probe
  source 1..80: mol_type = other DNA

SEQ ID NO: 92684 - DNA, 80 bp, synthetic construct
  misc_feature 1..80: note = Artificially Synthesized Probe
  source 1..80: mol_type = other DNA
caggagtacaggtcggtggtgttacacacattcatgctgttgcaggcgtgcaggttggtgctgttacacacatgctgttg

SEQ ID NO: 92685 - DNA, 80 bp, synthetic construct
  misc_feature 1..80: note = Artificially Synthesized Probe
  source 1..80: mol_type = other DNA
caggtgtgcaggtcggtggtggtacacacattcatgctgttgcaggagtataggtcggtggtgttacacacattcactgt

SEQ ID NO: 92686 - DNA, 80 bp, synthetic construct; identical to SEQ ID NO: 33461
  misc_feature 1..80: note = Artificially Synthesized Probe
  source 1..80: mol_type = other DNA

SEQ ID NO: 92687 - DNA, 80 bp, synthetic construct
  misc_feature 1..80: note = Artificially Synthesized Probe
  source 1..80: mol_type = other DNA
acattcacactgttgcagacatgcaggtcggtgctgttacacacattcatgctgttgcaggcgtgcaggtcggtggtgtt

SEQ ID NO: 92688 - DNA, 80 bp, synthetic construct
  misc_feature 1..80: note = Artificially Synthesized Probe
  source 1..80: mol_type = other DNA
gtggtgttacacacattcacgctgttgcaggcatgcaggtcggtggtgttacacacattcacgcttttgcaggcgtgcag

SEQ ID NO: 92689 - DNA, 80 bp, synthetic construct; identical to SEQ ID NO: 33446
  misc_feature 1..80: note = Artificially Synthesized Probe
  source 1..80: mol_type = other DNA

SEQ ID NO: 92690 - DNA, 80 bp, synthetic construct
  misc_feature 1..80: note = Artificially Synthesized Probe
  source 1..80: mol_type = other DNA
ggtcggtggtgttacattcacactgttgcaggcgtgcaggtcggtggtacacacattcacactgttgcaggcgtgcaggt

SEQ ID NO: 92691 - DNA, 80 bp, synthetic construct
  misc_feature 1..80: note = Artificially Synthesized Probe
  source 1..80: mol_type = other DNA
aggtcagtggtgttacattcatgctgttgcaggcgtgcaggtcggtggtgttacattcacgctggtgcaggcatgcaggt

SEQ ID NO: 92692 - DNA, 80 bp, synthetic construct
  misc_feature 1..80: note = Artificially Synthesized Probe
  source 1..80: mol_type = other DNA
ggtcggtggtgttacacacattcatgctgttgcaggcgtgcaggtcggtgttacacacattcacacttgcaggcgtgcag

SEQ ID NO: 92693 - DNA, 80 bp, synthetic construct; identical to SEQ ID NO: 33462
  misc_feature 1..80: note = Artificially Synthesized Probe
  source 1..80: mol_type = other DNA

SEQ ID NO: 92694 - DNA, 80 bp, synthetic construct
  misc_feature 1..80: note = Artificially Synthesized Probe
  source 1..80: mol_type = other DNA
tgctgttgtgcagctatcacttccatctccagagcccttttcatcttaaaactgaagctctcccatcacacagtgaccct

SEQ ID NO: 92695 - DNA, 80 bp, synthetic construct
  misc_feature 1..80: note = Artificially Synthesized Probe
  source 1..80: mol_type = other DNA
ctggagtgcagtggcgtgatctcagctcactgcaacctccactcccaggttcaagtgattctcctgcctcagcctcccaa

SEQ ID NO: 92696 - DNA, 80 bp, synthetic construct
  misc_feature 1..80: note = Artificially Synthesized Probe
  source 1..80: mol_type = other DNA
cgtgagctaccacacccggctgatttatccttttatttgggctcctttcactcagcgtctttaagcttcatacgcgaaag

SEQ ID NO: 92697 - DNA, 80 bp, synthetic construct; identical to SEQ ID NO: 33463
  misc_feature 1..80: note = Artificially Synthesized Probe
  source 1..80: mol_type = other DNA

SEQ ID NO: 92698 - DNA, 80 bp, synthetic construct
  misc_feature 1..80: note = Artificially Synthesized Probe
  source 1..80: mol_type = other DNA
attctcctgcctcagcctcccgagtagctgggaccacacccaccaccacaccccgttatttttttgtatttttagtagag

SEQ ID NO: 92699 - DNA, 80 bp, synthetic construct
  misc_feature 1..80: note = Artificially Synthesized Probe
  source 1..80: mol_type = other DNA
tgtcattttcatgaagcacagctggtcagtttattgttgctcatgtatttggcctcatgttcgagtccctgtttttaatc

SEQ ID NO: 92700 - DNA, 80 bp, synthetic construct
  misc_feature 1..80: note = Artificially Synthesized Probe
  source 1..80: mol_type = other DNA
cattcccttgggacattgttgaattcatttcagtgactatcaggtatcataatgttgatttgtaatggatagtgcctgcc

SEQ ID NO: 92701 - DNA, 80 bp, synthetic construct
  misc_feature 1..80: note = Artificially Synthesized Probe
  source 1..80: mol_type = other DNA
gccccaggcccccatgggcacccccatgtcaccagggcctctggttgctgccggtacacagggataggcagccaggcctc

SEQ ID NO: 92702 - DNA, 80 bp, synthetic construct; identical to SEQ ID NO: 33464
  misc_feature 1..80: note = Artificially Synthesized Probe
  source 1..80: mol_type = other DNA

SEQ ID NO: 92703 - DNA, 80 bp, synthetic construct
  misc_feature 1..80: note = Artificially Synthesized Probe
  source 1..80: mol_type = other DNA
tgtggtgaccacccgttgggagcagtgacattcaggtgcgttgcactggtggctgtgtggctgtgtggtacggccaccag

SEQ ID NO: 92704 - DNA, 80 bp, synthetic construct
  misc_feature 1..80: note = Artificially Synthesized Probe
  source 1..80: mol_type = other DNA
ctttctgccgcaggaggcagtggagaaggtgacacagcacatccacggcctgtctgggaagaaggatgggctggtgccca

SEQ ID NO: 92705 - DNA, 80 bp, synthetic construct
  misc_feature 1..80: note = Artificially Synthesized Probe
  source 1..80: mol_type = other DNA
tcccgcggctcccccgttcccgcagccccccactcctgctgcccccagctcccacggcccccgctcctgctgccccccgc

SEQ ID NO: 92706 - DNA, 80 bp, synthetic construct
  misc_feature 1..80: note = Artificially Synthesized Probe
  source 1..80: mol_type = other DNA
gtccggcaagggccaggcctgctgtacttgtgtgggcccaggatgtgcctgtccctggtgccccacgggagccgatgcac

SEQ ID NO: 92707 - DNA, 80 bp, synthetic construct; identical to SEQ ID NO: 33465
  misc_feature 1..80: note = Artificially Synthesized Probe
  source 1..80: mol_type = other DNA

SEQ ID NO: 92708 - DNA, 80 bp, synthetic construct
  misc_feature 1..80: note = Artificially Synthesized Probe
  source 1..80: mol_type = other DNA
tgcccggtgtgtagcaggtcctcgggcggtgtgtgggggccgggttggagggcctggtccaggcagctccgctgttccat

SEQ ID NO: 92709 - DNA, 80 bp, synthetic construct
  misc_feature 1..80: note = Artificially Synthesized Probe
  source 1..80: mol_type = other DNA
tgcttcctgccagggacgctggctctgggcgtctaccacggcctgcccgccagccacatggagctggcccaggagctcat

SEQ ID NO: 92710 - DNA, 80 bp, synthetic construct; identical to SEQ ID NO: 33466
  misc_feature 1..80: note = Artificially Synthesized Probe
  source 1..80: mol_type = other DNA

SEQ ID NO: 92711 - DNA, 80 bp, synthetic construct
  misc_feature 1..80: note = Artificially Synthesized Probe
  source 1..80: mol_type = other DNA
cgtcttaccagctcctcagaaggcggacaccgaccctgagaacttacctgagatttcgtcacaggtactttgagcaaatg

SEQ ID NO: 92712 - DNA, 80 bp, synthetic construct
  misc_feature 1..80: note = Artificially Synthesized Probe
  source 1..80: mol_type = other DNA
tgtggggctcaggctggctccgctcttggtggtggctgtgacctggatccgggaggggcgggcttgccgcagcctcgggg

SEQ ID NO: 92713 - DNA, 80 bp, synthetic construct
  misc_feature 1..80: note = Artificially Synthesized Probe
  source 1..80: mol_type = other DNA
ccccagtttaggaggcacacgcacccatgactggggcaccatccccactgtggaccaggccctgttttaggtcacgccct

SEQ ID NO: 92714 - DNA, 80 bp, synthetic construct
  misc_feature 1..80: note = Artificially Synthesized Probe
  source 1..80: mol_type = other DNA
tggtcacttgagggttgttggcatttccaggtgggctccggtggaaccacacggctcgcctgggggtggccatcatccag

SEQ ID NO: 92715 - DNA, 80 bp, synthetic construct; identical to SEQ ID NO: 33467
  misc_feature 1..80: note = Artificially Synthesized Probe
  source 1..80: mol_type = other DNA

SEQ ID NO: 92716 - DNA, 80 bp, synthetic construct
  misc_feature 1..80: note = Artificially Synthesized Probe
  source 1..80: mol_type = other DNA
gggtctgtggcattttccaagggcccacgtagcaccggcaaccgccaagtggcccaggctctgaactggctctgggctcc

SEQ ID NO: 92717 - DNA, 80 bp, synthetic construct
  misc_feature 1..80: note = Artificially Synthesized Probe
  source 1..80: mol_type = other DNA
ctctgtgggccgaccagaggggggcttcgaggtggtccctggtactggggtgaccgagtggacagcccagggtgcagctc

SEQ ID NO: 92718 - DNA, 80 bp, synthetic construct
  misc_feature 1..80: note = Artificially Synthesized Probe
  source 1..80: mol_type = other DNA
ctggacggcaagtccgtctagctcacgggcccctccagtggaatgggtcttttcggtggagataaaagttgatttgctct

SEQ ID NO: 92719 - DNA, 80 bp, synthetic construct
  misc_feature 1..80: note = Artificially Synthesized Probe
  source 1..80: mol_type = other DNA
cgccaccactgtagtcatgtacccaccgccgccgccgccgcctcatcgggacttcatctcggtgacgctgagctttggcg

SEQ ID NO: 92720 - DNA, 80 bp, synthetic construct
  misc_feature 1..80: note = Artificially Synthesized Probe
  source 1..80: mol_type = other DNA
ctttgcttcattctttttgaagaccagccatggccagttccggttttacttctgactgtgcagtgttgaataagacagac

SEQ ID NO: 92721 - DNA, 80 bp, synthetic construct
  misc_feature 1..80: note = Artificially Synthesized Probe
  source 1..80: mol_type = other DNA
gaggccgtggcactgagggcaagatctgagggctgagaagctgctggcaccgggcaaggtggggagaggcagacttgagc

SEQ ID NO: 92722 - DNA, 80 bp, synthetic construct; identical to SEQ ID NO: 33447
  misc_feature 1..80: note = Artificially Synthesized Probe
  source 1..80: mol_type = other DNA

SEQ ID NO: 92723 - DNA, 80 bp, synthetic construct
  misc_feature 1..80: note = Artificially Synthesized Probe
  source 1..80: mol_type = other DNA
ctgcccactgtgagatgtctgggaggcgccatggagaccttggtgggcaggtggtgccaggatcagagtctgccagggga

SEQ ID NO: 92724 - DNA, 80 bp, synthetic construct
  misc_feature 1..80: note = Artificially Synthesized Probe
  source 1..80: mol_type = other DNA
agaaccaggaaaacgtcctgtcagtgaaggtttggttcaggaagaacagccaaatccccgacaccgttgagaacaccagg

SEQ ID NO: 92725 - DNA, 80 bp, synthetic construct; identical to SEQ ID NO: 33448
  misc_feature 1..80: note = Artificially Synthesized Probe
  source 1..80: mol_type = other DNA

SEQ ID NO: 92726 - DNA, 80 bp, synthetic construct
  misc_feature 1..80: note = Artificially Synthesized Probe
  source 1..80: mol_type = other DNA
caggctggagtgcagtggtgtgatctcagctcactgcaacctccgcctcccgggttcaagtgattctcctgcctcagctt

SEQ ID NO: 92727 - DNA, 80 bp, synthetic construct
  misc_feature 1..80: note = Artificially Synthesized Probe
  source 1..80: mol_type = other DNA
ccaccatgcccggccctttgatttctttaacaagaaaatgtgtccttttaaaatttctataagctcaatagagaggggat

SEQ ID NO: 92728 - DNA, 80 bp, synthetic construct
  misc_feature 1..80: note = Artificially Synthesized Probe
  source 1..80: mol_type = other DNA
gagtcctgctcttgattggccatggggccactgctccacactcttcggtgtgaggatttctgcctttgaccaaggtcttt

SEQ ID NO: 92729 - DNA, 80 bp, synthetic construct; identical to SEQ ID NO: 33449
  misc_feature 1..80: note = Artificially Synthesized Probe
  source 1..80: mol_type = other DNA

SEQ ID NO: 92730 - DNA, 80 bp, synthetic construct
  misc_feature 1..80: note = Artificially Synthesized Probe
  source 1..80: mol_type = other DNA
ggcgccgccctctccaccccttccccgcaaaaaggggcaaatgtgcgttcctggttggggcagccgtgggcggctcgcct

SEQ ID NO: 92731 - DNA, 80 bp, synthetic construct
  misc_feature 1..80: note = Artificially Synthesized Probe
  source 1..80: mol_type = other DNA
ttgttttatatttttttttttttttttttttttgagacagagtcttcctctgtttcccaggctgcagtgcagtagcgcaa

SEQ ID NO: 92732 - DNA, 80 bp, synthetic construct
  misc_feature 1..80: note = Artificially Synthesized Probe
  source 1..80: mol_type = other DNA
ttcaccgtgttagccaggatggtcttgatcacctgacctcgtgatctgcccgcctcagcctcccaaagtgctgggattac

SEQ ID NO: 92733 - DNA, 80 bp, synthetic construct
  misc_feature 1..80: note = Artificially Synthesized Probe
  source 1..80: mol_type = other DNA
ctgtctgatttcaaatgttataggggcttaggagagaaaatgggaacattgagaaggtataaaggggaatacacagccac

SEQ ID NO: 92734 - DNA, 80 bp, synthetic construct
  misc_feature 1..80: note = Artificially Synthesized Probe
  source 1..80: mol_type = other DNA
gagaccaccatctctaccaaaaaaaaaaaaaattagccaggcacgacatgcctatagtcccagctacctgggaggctgag

SEQ ID NO: 92735 - DNA, 80 bp, synthetic construct; identical to SEQ ID NO: 33450
  misc_feature 1..80: note = Artificially Synthesized Probe
  source 1..80: mol_type = other DNA

SEQ ID NO: 92736 - DNA, 80 bp, synthetic construct
  misc_feature 1..80: note = Artificially Synthesized Probe
  source 1..80: mol_type = other DNA
aagattttgatgtcctatgacgtgtatcatgacaaactattcccgaatttgcttcccctgctacggtgctgagagtagca

SEQ ID NO: 92737 - DNA, 80 bp, synthetic construct
  misc_feature 1..80: note = Artificially Synthesized Probe
  source 1..80: mol_type = other DNA
tatgtgctcccatcccggaagctgtccgtgtcctttgatgagtcttaggacttttatattttcctttattattggtattc

SEQ ID NO: 92738 - DNA, 80 bp, synthetic construct; identical to SEQ ID NO: 33451
  misc_feature 1..80: note = Artificially Synthesized Probe
  source 1..80: mol_type = other DNA

SEQ ID NO: 92739 - DNA, 80 bp, synthetic construct
  misc_feature 1..80: note = Artificially Synthesized Probe
  source 1..80: mol_type = other DNA
taatcccagctactcagcaggctgaggcctgaactgggaggtggaggctgcagcaagcggagttcgcaccactgcattcc

SEQ ID NO: 92740 - DNA, 80 bp, synthetic construct
  misc_feature 1..80: note = Artificially Synthesized Probe
  source 1..80: mol_type = other DNA
acactcaaggtatttgaaaagacctaaataagtagacattttattcttctgctgtgaagatttaagcagtggctcacgcc

SEQ ID NO: 92741 - DNA, 80 bp, synthetic construct
  misc_feature 1..80: note = Artificially Synthesized Probe
  source 1..80: mol_type = other DNA
tactcgggaggctgaggcaggagaatggcgtgaacctgggaggcggaggttgcagtgagccgagatcgcgccactgcact

SEQ ID NO: 92742 - DNA, 80 bp, synthetic construct
  misc_feature 1..80: note = Artificially Synthesized Probe
  source 1..80: mol_type = other DNA
tgtatgctcccctcggtacagtgagaaatgagcccctcttgattggctcctggtctgttcgtggtggtctcaggccgaag

SEQ ID NO: 92743 - DNA, 80 bp, synthetic construct; identical to SEQ ID NO: 33452
  misc_feature 1..80: note = Artificially Synthesized Probe
  source 1..80: mol_type = other DNA

SEQ ID NO: 92744 - DNA, 80 bp, synthetic construct
  misc_feature 1..80: note = Artificially Synthesized Probe
  source 1..80: mol_type = other DNA
ctttttgattttttgtagaggtggggtctcactttgttacccaggctggtctggaactcctgggctcaggtgatcctcct

SEQ ID NO: 92745 - DNA, 80 bp, synthetic construct
  misc_feature 1..80: note = Artificially Synthesized Probe
  source 1..80: mol_type = other DNA
gaggacagtgattgcatgacctggtggagaagagactagagaaacacagtggaactagtggctcacatctgtcatcccag

SEQ ID NO: 92746 - DNA, 80 bp, synthetic construct
  misc_feature 1..80: note = Artificially Synthesized Probe
  source 1..80: mol_type = other DNA
gctgagacgggtggattgcttgagaccaggagttcaaaaccagcctggccaacatggtgaaatcctgtctctactaacaa

SEQ ID NO: 92747 - DNA, 80 bp, synthetic construct; identical to SEQ ID NO: 33453
  misc_feature 1..80: note = Artificially Synthesized Probe
  source 1..80: mol_type = other DNA

SEQ ID NO: 92748 - DNA, 80 bp, synthetic construct
  misc_feature 1..80: note = Artificially Synthesized Probe
  source 1..80: mol_type = other DNA
cgtttgaacccaggaggtggaggttgcagtgagccaagattgcaccattgcactccggcctgggtgacaaaacaagactc

SEQ ID NO: 92749 - DNA, 80 bp, synthetic construct
  misc_feature 1..80: note = Artificially Synthesized Probe
  source 1..80: mol_type = other DNA
agccaccgtgcccagccataagtaagcattctttccttttttaaaaaaaaaaaaagtggagcaatctaaatatccatcag

SEQ ID NO: 92750 - DNA, 80 bp, synthetic construct
  misc_feature 1..80: note = Artificially Synthesized Probe
  source 1..80: mol_type = other DNA
aaaattaaggtttggtaataccacagaaaactgaggccataggagagaatggatttgcctctagactcacgtaggaggac

SEQ ID NO: 92751 - DNA, 80 bp, synthetic construct
  misc_feature 1..80: note = Artificially Synthesized Probe
  source 1..80: mol_type = other DNA
caaggggaacccagctccatatgtcatcggaagctttgtgctttgtagtgaggatgtgggtgcctgcctcactttgcaga

SEQ ID NO: 92752 - DNA, 80 bp, synthetic construct; identical to SEQ ID NO: 33454
  misc_feature 1..80: note = Artificially Synthesized Probe
  source 1..80: mol_type = other DNA

SEQ ID NO: 92753 - DNA, 80 bp, synthetic construct; identical to SEQ ID NO: 33445
  misc_feature 1..80: note = Artificially Synthesized Probe
  source 1..80: mol_type = other DNA

SEQ ID NO: 92754 - DNA, 80 bp, synthetic construct
  misc_feature 1..80: note = Artificially Synthesized Probe
  source 1..80: mol_type = other DNA
gccaagacctgaaggatgggacccaggaggaggccacaaaaaggcaagaagcccctgtggatccccgcccggaaggagat

SEQ ID NO: 92755 - DNA, 80 bp, synthetic construct
  misc_feature 1..80: note = Artificially Synthesized Probe
  source 1..80: mol_type = other DNA
ctcattaaccttagattacagaatcgaatttttaaaactggaggtcagagctaaattaggtccccgataatgtcctcatg

SEQ ID NO: 92756 - DNA, 80 bp, synthetic construct
  misc_feature 1..80: note = Artificially Synthesized Probe
  source 1..80: mol_type = other DNA
ggagttgcccggtgcccaggctcccagagtgctgtcctctgcccggttcgtcaagtccaggtagtggatcccagtggagc

SEQ ID NO: 92757 - DNA, 80 bp, synthetic construct
  misc_feature 1..80: note = Artificially Synthesized Probe
  source 1..80: mol_type = other DNA
gcgcagttcggccggggtctccccggcgctgcccagtctgtctccggcgccgcccgtcgcggactcgtccttgctgcagt

SEQ ID NO: 92758 - DNA, 80 bp, synthetic construct
  misc_feature 1..80: note = Artificially Synthesized Probe
  source 1..80: mol_type = other DNA
tatgtccagagaggtgaagccacttgcctgagggcacacagctaggaaggggcagagttgcagttgagcccaggccttgg

SEQ ID NO: 92759 - DNA, 80 bp, synthetic construct
  misc_feature 1..80: note = Artificially Synthesized Probe
  source 1..80: mol_type = other DNA
aggcaagacgacgtagtagctaggacagtcacagggaagagcatttcaggcagagggaagggcatgtgtgaaggccctgc

SEQ ID NO: 92760 - DNA, 80 bp, synthetic construct; identical to SEQ ID NO: 33479
  misc_feature 1..80: note = Artificially Synthesized Probe
  source 1..80: mol_type = other DNA

SEQ ID NO: 92761 - DNA, 80 bp, synthetic construct
  misc_feature 1..80: note = Artificially Synthesized Probe
  source 1..80: mol_type = other DNA
agcctgaggcctgtttctaggctgtctccatgacggcctcacccactccctctgacagctgggtggcttccccatggagc

SEQ ID NO: 92762 - DNA, 80 bp, synthetic construct
  misc_feature 1..80: note = Artificially Synthesized Probe
  source 1..80: mol_type = other DNA
ggggccacatgatacaacattcccaaatcccaaggcatgaggtgggtggcaggctggggccagagggaccaagagcagag

SEQ ID NO: 92763 - DNA, 80 bp, synthetic construct
  misc_feature 1..80: note = Artificially Synthesized Probe
  source 1..80: mol_type = other DNA
tacctataattctcattacttagggcagttttttttttcacctctgcagagaggctggtcatatccatggtgaccattta

SEQ ID NO: 92764 - DNA, 80 bp, synthetic construct
  misc_feature 1..80: note = Artificially Synthesized Probe
  source 1..80: mol_type = other DNA
tgccagggtcgcagagctggagtttaccacggctgcgccactccaagcccagagcctcagaagttcagagactttggccc

SEQ ID NO: 92765 - DNA, 80 bp, synthetic construct; identical to SEQ ID NO: 33480
  misc_feature 1..80: note = Artificially Synthesized Probe
  source 1..80: mol_type = other DNA

SEQ ID NO: 92766 - DNA, 80 bp, synthetic construct
  misc_feature 1..80: note = Artificially Synthesized Probe
  source 1..80: mol_type = other DNA
aaactcggagggcaaaaggggaattttttttttttcaggaagaggaaaggatgtttttggtgcgtcggagtttcagtagg

SEQ ID NO: 92767 - DNA, 80 bp, synthetic construct
  misc_feature 1..80: note = Artificially Synthesized Probe
  source 1..80: mol_type = other DNA
cagtgagacccatgcggtccctgacagccagggtgttgctgcatcttaaaatgagataaaaacgctgcgcacaggagtag

SEQ ID NO: 92768 - DNA, 80 bp, synthetic construct
  misc_feature 1..80: note = Artificially Synthesized Probe
  source 1..80: mol_type = other DNA
gtggaaaggctgcaggtatctgcttgcctggctcctgcactctgcccacctgccccaggatggaccctgggacccctgtc

SEQ ID NO: 92769 - DNA, 80 bp, synthetic construct
  misc_feature 1..80: note = Artificially Synthesized Probe
  source 1..80: mol_type = other DNA
tgaacctggcttggaggcggcttcagagactggggtcttcttggcaggcggcagcagggccatgggcagtttctaagccc

SEQ ID NO: 92770 - DNA, 80 bp, synthetic construct; identical to SEQ ID NO: 33481
  misc_feature 1..80: note = Artificially Synthesized Probe
  source 1..80: mol_type = other DNA

SEQ ID NO: 92771 - DNA, 80 bp, synthetic construct
  misc_feature 1..80: note = Artificially Synthesized Probe
  source 1..80: mol_type = other DNA
gtggacactggggcctctcgcctgtccctaggggtggagtgaggaaggtactgccccgggactctggcctgcctggtgca

SEQ ID NO: 92772 - DNA, 80 bp, synthetic construct
  misc_feature 1..80: note = Artificially Synthesized Probe
  source 1..80: mol_type = other DNA
cttcctcatcttggatgcagtatgagccccatcctgctacctgcagctaatgaagcccctgtacagtggctgctgcaggt

SEQ ID NO: 92773 - DNA, 80 bp, synthetic construct
  misc_feature 1..80: note = Artificially Synthesized Probe
  source 1..80: mol_type = other DNA
caggcctgggtctgtcctgctctgctcccctgcagggctggtgggcctccttccccctttgaaggcctaacggcctggct

SEQ ID NO: 92774 - DNA, 80 bp, synthetic construct; identical to SEQ ID NO: 33482
  misc_feature 1..80: note = Artificially Synthesized Probe
  source 1..80: mol_type = other DNA

SEQ ID NO: 92775 - DNA, 80 bp, synthetic construct
  misc_feature 1..80: note = Artificially Synthesized Probe
  source 1..80: mol_type = other DNA
gttcatgcagcaccatttgctctgctctgctcacttctcaccctgtcttggaggctcgatgaggccgtgcccagctcagt

SEQ ID NO: 92776 - DNA, 80 bp, synthetic construct; identical to SEQ ID NO: 33469
  misc_feature 1..80: note = Artificially Synthesized Probe
  source 1..80: mol_type = other DNA

SEQ ID NO: 92777 - DNA, 80 bp, synthetic construct
  misc_feature 1..80: note = Artificially Synthesized Probe
  source 1..80: mol_type = other DNA
gacccccccggaacctggactcccggaccttcatcaccattggagacagagtaggtgccagccgccacccctgcagggcc

SEQ ID NO: 92778 - DNA, 80 bp, synthetic construct; identical to SEQ ID NO: 33483
  misc_feature 1..80: note = Artificially Synthesized Probe
  source 1..80: mol_type = other DNA

SEQ ID NO: 92779 - DNA, 80 bp, synthetic construct
  misc_feature 1..80: note = Artificially Synthesized Probe
  source 1..80: mol_type = other DNA
accgtgctatgccccgttcctcccaacagaaaccctactcccaggccaggtgcagtggctcacacctgtaatccccacac

SEQ ID NO: 92780 - DNA, 80 bp, synthetic construct
  misc_feature 1..80: note = Artificially Synthesized Probe
  source 1..80: mol_type = other DNA
gcttgaacccaggaggtggatgttgcagtgagccatgatcgtaccactgccctccagcttgggtgacggagtgagacccc

SEQ ID NO: 92781 - DNA, 80 bp, synthetic construct
  misc_feature 1..80: note = Artificially Synthesized Probe
  source 1..80: mol_type = other DNA
cccggtgtggtggcaggcgcctataatcccagctattcaggaggctgagacaggagaatcgcttgaacccaggaggtgga

SEQ ID NO: 92782 - DNA, 80 bp, synthetic construct; identical to SEQ ID NO: 33484
  misc_feature 1..80: note = Artificially Synthesized Probe
  source 1..80: mol_type = other DNA

SEQ ID NO: 92783 - DNA, 80 bp, synthetic construct
  misc_feature 1..80: note = Artificially Synthesized Probe
  source 1..80: mol_type = other DNA
agcagccttggggtgttggcactgtgcctgttttatagagggcatcgtgaggctcagagaggttaagtgacttgctgagg

SEQ ID NO: 92784 - DNA, 80 bp, synthetic construct
  misc_feature 1..80: note = Artificially Synthesized Probe
  source 1..80: mol_type = other DNA
gaggctgatgacttggtgaccatctcagaactgggccgtggagcctatggggtggtagagaaggtgcggcacgcccagag

SEQ ID NO: 92785 - DNA, 80 bp, synthetic construct
  misc_feature 1..80: note = Artificially Synthesized Probe
  source 1..80: mol_type = other DNA
agtgcagcctcagagtgagcaggaggaagcacctagcagcgggcacctagtgggcacttcatcaggggtcagccgctctt

SEQ ID NO: 92786 - DNA, 80 bp, synthetic construct
  misc_feature 1..80: note = Artificially Synthesized Probe
  source 1..80: mol_type = other DNA
gctcctggccctcctgtcatgagtgtgggtgttggcctctgccacggcaacctctgaatggcagtccttccctgcagcgg

SEQ ID NO: 92787 - DNA, 80 bp, synthetic construct; identical to SEQ ID NO: 33485
  misc_feature 1..80: note = Artificially Synthesized Probe
  source 1..80: mol_type = other DNA

SEQ ID NO: 92788 - DNA, 80 bp, synthetic construct
  misc_feature 1..80: note = Artificially Synthesized Probe
  source 1..80: mol_type = other DNA
cattcgcatccccatggcatacagggcgtgggaatggcatatggggcgtggggtgcccaagcaggcaacggccatggaga

SEQ ID NO: 92789 - DNA, 80 bp, synthetic construct
  misc_feature 1..80: note = Artificially Synthesized Probe
  source 1..80: mol_type = other DNA
acttgcccctcaaagagctgtggcagggtcagggcatctgagtccagccatcgggcaaggtcagggctgcttcacctgtc

SEQ ID NO: 92790 - DNA, 80 bp, synthetic construct
  misc_feature 1..80: note = Artificially Synthesized Probe
  source 1..80: mol_type = other DNA
gagccatctgccagggtcagctggcatgagggtgtctgtcggtcagcagggccggctgttgccatggagctggtgcaggt

SEQ ID NO: 92791 - DNA, 80 bp, synthetic construct
  misc_feature 1..80: note = Artificially Synthesized Probe
  source 1..80: mol_type = other DNA
ggtgggagcccggtgaactgtggctgagtgggtgggcacacgtcggagagggggctggggctggggctggtgctggggca

SEQ ID NO: 92792 - DNA, 80 bp, synthetic construct; identical to SEQ ID NO: 33486
  misc_feature 1..80: note = Artificially Synthesized Probe
  source 1..80: mol_type = other DNA

SEQ ID NO: 92793 - DNA, 80 bp, synthetic construct
  misc_feature 1..80: note = Artificially Synthesized Probe
  source 1..80: mol_type = other DNA
gccccacagatttggcagatccaggtgtctgagccattgattccaactcttgagttccagatcattttttaaaaaaggaa

SEQ ID NO: 92794 - DNA, 80 bp, synthetic construct
  misc_feature 1..80: note = Artificially Synthesized Probe
  source 1..80: mol_type = other DNA
ccttacataagtgggaggccggatccctgaccattgcccaaccactgtgagtaactcgggaggcactcgacgggggaggt

SEQ ID NO: 92795 - DNA, 80 bp, synthetic construct
  misc_feature 1..80: note = Artificially Synthesized Probe
  source 1..80: mol_type = other DNA
aaaggaaaaaggaaaatagaaccagtgagactggttcaatcctcactgcatctggaaacatttacaatatacccctgcct

SEQ ID NO: 92796 - DNA, 80 bp, synthetic construct; identical to SEQ ID NO: 33487
  misc_feature 1..80: note = Artificially Synthesized Probe
  source 1..80: mol_type = other DNA

SEQ ID NO: 92797 - DNA, 80 bp, synthetic construct
  misc_feature 1..80: note = Artificially Synthesized Probe
  source 1..80: mol_type = other DNA
ggagcatctgcacagcaagctgtcggtgatccacagaggtcagtgcccggcagccacccaggcacggtgtagccagtggg

SEQ ID NO: 92798 - DNA, 80 bp, synthetic construct
  misc_feature 1..80: note = Artificially Synthesized Probe
  source 1..80: mol_type = other DNA
ttgacttctgtcctgagaaaggtggactgggttctgttctgatgtatagtttacaaatcgtgaaactccagcatagagtg

SEQ ID NO: 92799 - DNA, 80 bp, synthetic construct
  misc_feature 1..80: note = Artificially Synthesized Probe
  source 1..80: mol_type = other DNA
gatgtatagtttacaaatcgtgaaactccagcatagagtgcatataatcatgttcacacccatgcaaccacctccctcca

SEQ ID NO: 92800 - DNA, 80 bp, synthetic construct
  misc_feature 1..80: note = Artificially Synthesized Probe
  source 1..80: mol_type = other DNA
ctgggtctggtgtggtctcagtttgttcctttttgctgctgagcacaagtctatttttccagatttactgcttttcaaaa

SEQ ID NO: 92801 - DNA, 80 bp, synthetic construct; identical to SEQ ID NO: 33488
  misc_feature 1..80: note = Artificially Synthesized Probe
  source 1..80: mol_type = other DNA

SEQ ID NO: 92802 - DNA, 80 bp, synthetic construct
  misc_feature 1..80: note = Artificially Synthesized Probe
  source 1..80: mol_type = other DNA
ctggtctgtggggactccatgtccaaacacgcagatcctgcctcccaggctttaattgatcctgctgccctctgggagca

SEQ ID NO: 92803 - DNA, 80 bp, synthetic construct
  misc_feature 1..80: note = Artificially Synthesized Probe
  source 1..80: mol_type = other DNA
cccggcacctcttgcagcctcagttccctggtctgacccttgggaccctggtgcaacctgcccactggggcatgggaggg

SEQ ID NO: 92804 - DNA, 80 bp, synthetic construct
  misc_feature 1..80: note = Artificially Synthesized Probe
  source 1..80: mol_type = other DNA
gtgactttggcatcagtggctacttggtggactctgtggccaagacgatggatgccggctgcaagccctacatggccgtg

SEQ ID NO: 92805 - DNA, 80 bp, synthetic construct
  misc_feature 1..80: note = Artificially Synthesized Probe
  source 1..80: mol_type = other DNA
ttagctctccaggcagagaatgcctcatcaaaataaaagttccagttgcagagttgtgaaaggagaggggtcatagatgc

SEQ ID NO: 92806 - DNA, 80 bp, synthetic construct; identical to SEQ ID NO: 33489
  misc_feature 1..80: note = Artificially Synthesized Probe
  source 1..80: mol_type = other DNA

SEQ ID NO: 92807 - DNA, 80 bp, synthetic construct
  misc_feature 1..80: note = Artificially Synthesized Probe
  source 1..80: mol_type = other DNA
aagctgagcgctcagtttggggattgggaggcaaggcctagccatgggggcttacctggggcgggtgttcacgcctcact

SEQ ID NO: 92808 - DNA, 80 bp, synthetic construct
  misc_feature 1..80: note = Artificially Synthesized Probe
  source 1..80: mol_type = other DNA
gagcttttgggggactcatcaaatagtttaggttctggaaagaagtattggcttcaaaatctgagaagaaaatgtgccat

SEQ ID NO: 92809 - DNA, 80 bp, synthetic construct
  misc_feature 1..80: note = Artificially Synthesized Probe
  source 1..80: mol_type = other DNA
taaatcatgcaaaagcaagatggtaaagatcttttcaaaaatatttcatagcagaaggtttgttgtcggtggcgtcctgg

SEQ ID NO: 92810 - DNA, 80 bp, synthetic construct; identical to SEQ ID NO: 33490
  misc_feature 1..80: note = Artificially Synthesized Probe
  source 1..80: mol_type = other DNA

SEQ ID NO: 92811 - DNA, 80 bp, synthetic construct
  misc_feature 1..80: note = Artificially Synthesized Probe
  source 1..80: mol_type = other DNA
tccttccctgcccagggaagcctggcccaggacattcctgcttgtccctagtccctttgactgtttggtgttggggatga

SEQ ID NO: 92812 - DNA, 80 bp, synthetic construct
  misc_feature 1..80: note = Artificially Synthesized Probe
  source 1..80: mol_type = other DNA
gctctgtcccaccagactgcccccaacatcacacaccagttggaagtagcgggtctcccatactactggactgaccagct

SEQ ID NO: 92813 - DNA, 80 bp, synthetic construct
  misc_feature 1..80: note = Artificially Synthesized Probe
  source 1..80: mol_type = other DNA
tgtggggtgcagagctgccgtgccctctcagggcctggcaccctcctggtacctccctgtgcttgcgaacctacaggctt

SEQ ID NO: 92814 - DNA, 80 bp, synthetic construct
  misc_feature 1..80: note = Artificially Synthesized Probe
  source 1..80: mol_type = other DNA
catgcccagctgatttttgtatttttagtggagatggggttttgccatgttggcgaggctggtcttgaactcctgacctc

SEQ ID NO: 92815 - DNA, 80 bp, synthetic construct; identical to SEQ ID NO: 33491
  misc_feature 1..80: note = Artificially Synthesized Probe
  source 1..80: mol_type = other DNA

SEQ ID NO: 92816 - DNA, 80 bp, synthetic construct; identical to SEQ ID NO: 33470
  misc_feature 1..80: note = Artificially Synthesized Probe
  source 1..80: mol_type = other DNA

SEQ ID NO: 92817 - DNA, 80 bp, synthetic construct
  misc_feature 1..80: note = Artificially Synthesized Probe
  source 1..80: mol_type = other DNA
ccctcctctcagcatcagttggcgggtgatgctgagagttcccaccctctataatcagctgggttttctggggagcagcc

SEQ ID NO: 92818 - DNA, 80 bp, synthetic construct
  misc_feature 1..80: note = Artificially Synthesized Probe
  source 1..80: mol_type = other DNA
gggggtggagaagactggagcaggtaggggtggctctggggacaggtggaaggccactgttgcagatgcggaggcctctg

SEQ ID NO: 92819 - DNA, 80 bp, synthetic construct
  misc_feature 1..80: note = Artificially Synthesized Probe
  source 1..80: mol_type = other DNA
agttgacgcaggtgttgtgggttttactggtgttgctgctaccattgttatcatcatcatgtggttataactttatttat

SEQ ID NO: 92820 - DNA, 80 bp, synthetic construct; identical to SEQ ID NO: 33492
  misc_feature 1..80: note = Artificially Synthesized Probe
  source 1..80: mol_type = other DNA

SEQ ID NO: 92821 - DNA, 80 bp, synthetic construct
  misc_feature 1..80: note = Artificially Synthesized Probe
  source 1..80: mol_type = other DNA
aggcgtgagccaccacacctggcaaatttttgtatttttaaaaaagacggggtttcaccatgttggccaggctggtctca

SEQ ID NO: 92822 - DNA, 80 bp, synthetic construct
  misc_feature 1..80: note = Artificially Synthesized Probe
  source 1..80: mol_type = other DNA
tcccaggttcaagcaattctcttgcctcagcctctcaagtagctaggattacaggcatttgccaccatgcccggctaatt

SEQ ID NO: 92823 - DNA, 80 bp, synthetic construct
  misc_feature 1..80: note = Artificially Synthesized Probe
  source 1..80: mol_type = other DNA
aactttataaatagtgtatctgtagacagtgactgggaaagactcaaagtcgaaataattttgtcagagaggtgggactg

SEQ ID NO: 92824 - DNA, 80 bp, synthetic construct; identical to SEQ ID NO: 33493
  misc_feature 1..80: note = Artificially Synthesized Probe
  source 1..80: mol_type = other DNA

SEQ ID NO: 92825 - DNA, 80 bp, synthetic construct
  misc_feature 1..80: note = Artificially Synthesized Probe
  source 1..80: mol_type = other DNA
cagcatggagtcgcccgcctcgagccagcccgccagcatgccccagtccaaaggtaggcgctcccggccgggacctcggc

SEQ ID NO: 92826 - DNA, 80 bp, synthetic construct
  misc_feature 1..80: note = Artificially Synthesized Probe
  source 1..80: mol_type = other DNA
cagttatcaaatattgcatagcaaaccaccctagaacctagtgacccaaaccaacagcggtttcttatttctcatgtttc

SEQ ID NO: 92827 - DNA, 80 bp, synthetic construct
  misc_feature 1..80: note = Artificially Synthesized Probe
  source 1..80: mol_type = other DNA
ccctgggcttcagagcatggcagtgtcagcagagttggagttctttcatgatggctggcatctaaaaggaagttctctga

SEQ ID NO: 92828 - DNA, 80 bp, synthetic construct
  misc_feature 1..80: note = Artificially Synthesized Probe
  source 1..80: mol_type = other DNA
ttaggtttttctttcacaagttacaaacgtagtggaaacctaacataaaaatagaggcacagtaaggggaaaatgactgt

SEQ ID NO: 92829 - DNA, 80 bp, synthetic construct
  misc_feature 1..80: note = Artificially Synthesized Probe
  source 1..80: mol_type = other DNA
ggtgcccccacccctggccttgctcagagcatgtgcagtgggcctgtcctcatggccacgtcagacctagaggacagact

SEQ ID NO: 92830 - DNA, 80 bp, synthetic construct; identical to SEQ ID NO: 33494
  misc_feature 1..80: note = Artificially Synthesized Probe
  source 1..80: mol_type = other DNA

SEQ ID NO: 92831 - DNA, 80 bp, synthetic construct
  misc_feature 1..80: note = Artificially Synthesized Probe
  source 1..80: mol_type = other DNA
tacaggtgtgagccactgcgcctggcctcgtaatgcttctttttaaaaaactttttaaaaaaaattttgtagcattacat

SEQ ID NO: 92832 - DNA, 80 bp, synthetic construct
  misc_feature 1..80: note = Artificially Synthesized Probe
  source 1..80: mol_type = other DNA
tgcctcactcaatctcccaagtagctgggattacaggtgtgcaccaccacatccagctaattttgtgtttttagtagaga

SEQ ID NO: 92833 - DNA, 80 bp, synthetic construct; identical to SEQ ID NO: 33495
  misc_feature 1..80: note = Artificially Synthesized Probe
  source 1..80: mol_type = other DNA

SEQ ID NO: 92834 - DNA, 80 bp, synthetic construct
  misc_feature 1..80: note = Artificially Synthesized Probe
  source 1..80: mol_type = other DNA
ttggctttttcccactcactgcacaagcctcaggatgccagtgggaatcacccagaacagacaggggtcatgccggggat

SEQ ID NO: 92835 - DNA, 80 bp, synthetic construct
  misc_feature 1..80: note = Artificially Synthesized Probe
  source 1..80: mol_type = other DNA
tggcgctggacattcaggctgtttcttagtatttcctggcagaaaacaccatatggcacatcttcgtgtctggaggctat

SEQ ID NO: 92836 - DNA, 80 bp, synthetic construct
  misc_feature 1..80: note = Artificially Synthesized Probe
  source 1..80: mol_type = other DNA
tcgtatggggtacttgctctacatattgcagtcagtgaaaattctaagagaaaagccccccaaatcggtacggttttgtc

SEQ ID NO: 92837 - DNA, 80 bp, synthetic construct; identical to SEQ ID NO: 33496
  misc_feature 1..80: note = Artificially Synthesized Probe
  source 1..80: mol_type = other DNA

SEQ ID NO: 92838 - DNA, 80 bp, synthetic construct
  misc_feature 1..80: note = Artificially Synthesized Probe
  source 1..80: mol_type = other DNA
cccgatgtcacccacaggaaatctggatccagcagggcacatgtggccacacaggccacttgtctaggagggaaactgct

SEQ ID NO: 92839 - DNA, 80 bp, synthetic construct
  misc_feature 1..80: note = Artificially Synthesized Probe
  source 1..80: mol_type = other DNA
tgtgtgtgtgtgtgtgtagcatttcccatgtgcctcctctgtgaaaacagcccaaattaatgacagcagatgctgaagtc

SEQ ID NO: 92840 - DNA, 80 bp, synthetic construct
  misc_feature 1..80: note = Artificially Synthesized Probe
  source 1..80: mol_type = other DNA
tgcattgttttgtaaaatcttcagaattcaggttttctgaaaaccctatgatggtcccaccagtcccggtgtgggctgaa

SEQ ID NO: 92841 - DNA, 80 bp, synthetic construct
  misc_feature 1..80: note = Artificially Synthesized Probe
  source 1..80: mol_type = other DNA
atcctgggcactgggcctcccagcactgatcccttctccaccttctcaaaggaatttgaacaaagcagggagtggctggc

SEQ ID NO: 92842 - DNA, 80 bp, synthetic construct
  misc_feature 1..80: note = Artificially Synthesized Probe
  source 1..80: mol_type = other DNA
gctcctgggtgcagagcgtggttgtatctggggccggggcctctgaccccctgtccccgctgcagattgagatggccatc

SEQ ID NO: 92843 - DNA, 80 bp, synthetic construct; identical to SEQ ID NO: 33497
  misc_feature 1..80: note = Artificially Synthesized Probe
  source 1..80: mol_type = other DNA

SEQ ID NO: 92844 - DNA, 80 bp, synthetic construct
  misc_feature 1..80: note = Artificially Synthesized Probe
  source 1..80: mol_type = other DNA
ttgcttttattgatatctagaactttgtaccaaattaaagaatgccccataggagccttataaaaatcatgtttgagagg

SEQ ID NO: 92845 - DNA, 80 bp, synthetic construct
  misc_feature 1..80: note = Artificially Synthesized Probe
  source 1..80: mol_type = other DNA
ataggaaaattagccgggcgtggtggcgcatgcctataatcccagctactcaggaggctgaagcaggagagtcgcttgaa

SEQ ID NO: 92846 - DNA, 80 bp, synthetic construct
  misc_feature 1..80: note = Artificially Synthesized Probe
  source 1..80: mol_type = other DNA
ataaggaagagggcaacttctctgaacttaattaaatagagcaagaattgggtaaggaagaagcggccgggtgcggtggc

SEQ ID NO: 92847 - DNA, 80 bp, synthetic construct; identical to SEQ ID NO: 33498
  misc_feature 1..80: note = Artificially Synthesized Probe
  source 1..80: mol_type = other DNA

SEQ ID NO: 92848 - DNA, 80 bp, synthetic construct
  misc_feature 1..80: note = Artificially Synthesized Probe
  source 1..80: mol_type = other DNA
gggggctgggcttcctccctgccagcctggccacagctgcactattctctcctagcctgaggaagaaccccgcagagcgt

SEQ ID NO: 92849 - DNA, 80 bp, synthetic construct
  misc_feature 1..80: note = Artificially Synthesized Probe
  source 1..80: mol_type = other DNA
tcatttgtttgctcctgcatacctggctccctcctccctccttcctgcatgccaggccctgggaagggtacacaggcagt

SEQ ID NO: 92850 - DNA, 80 bp, synthetic construct
  misc_feature 1..80: note = Artificially Synthesized Probe
  source 1..80: mol_type = other DNA
ctctgctggttttcccctggcctccttgcccacatggccatctctggctggggttagaggccaagtggctggcgctgggg

SEQ ID NO: 92851 - DNA, 80 bp, synthetic construct; identical to SEQ ID NO: 33499
  misc_feature 1..80: note = Artificially Synthesized Probe
  source 1..80: mol_type = other DNA

SEQ ID NO: 92852 - DNA, 80 bp, synthetic construct
  misc_feature 1..80: note = Artificially Synthesized Probe
  source 1..80: mol_type = other DNA
tcttcaccttgcacaaaaccaagaagacggacattgctgccttcgtgaaggagatcctgggagaagactcataggggctg

SEQ ID NO: 92853 - DNA, 80 bp, synthetic construct
  misc_feature 1..80: note = Artificially Synthesized Probe
  source 1..80: mol_type = other DNA
gccaaagaagcagaccattggggctcccagccaggcccttgtcggccccaccagtgcctctccctgctgctcctaggacc

SEQ ID NO: 92854 - DNA, 80 bp, synthetic construct
  misc_feature 1..80: note = Artificially Synthesized Probe
  source 1..80: mol_type = other DNA
atggactttgcacactttggcccagggtggccacacctctatcccggctttggtgcggggtacacaagaggggatgagtt

SEQ ID NO: 92855 - DNA, 80 bp, synthetic construct; identical to SEQ ID NO: 33500
  misc_feature 1..80: note = Artificially Synthesized Probe
  source 1..80: mol_type = other DNA

SEQ ID NO: 92856 - DNA, 80 bp, synthetic construct
  misc_feature 1..80: note = Artificially Synthesized Probe
  source 1..80: mol_type = other DNA
tttaaaaaaagaaaatatatttttttgaaaaaacgactgcccatcccgggtcctttccctgatgggttggggcagttacc

SEQ ID NO: 92857 - DNA, 80 bp, synthetic construct; identical to SEQ ID NO: 33471
  misc_feature 1..80: note = Artificially Synthesized Probe
  source 1..80: mol_type = other DNA

SEQ ID NO: 92858 - DNA, 80 bp, synthetic construct
  misc_feature 1..80: note = Artificially Synthesized Probe
  source 1..80: mol_type = other DNA
aagttctcagttggcccgtgtgaggagaaggccggggcagcggaggcttccggcggtgagtcagcgggcactgggtgctg

SEQ ID NO: 92859 - DNA, 80 bp, synthetic construct
  misc_feature 1..80: note = Artificially Synthesized Probe
  source 1..80: mol_type = other DNA
acccctgggcaggccctctgtgccccacccaggaacttcctctattaggcaaggggctctgcttcctcttgctcacagag

SEQ ID NO: 92860 - DNA, 80 bp, synthetic construct
  misc_feature 1..80: note = Artificially Synthesized Probe
  source 1..80: mol_type = other DNA
ctaagacctcagtttccagagcctgactgcctgggtccaaaccccagctctgtcccttttgcgatgtgacgtgggacaag

SEQ ID NO: 92861 - DNA, 80 bp, synthetic construct
  misc_feature 1..80: note = Artificially Synthesized Probe
  source 1..80: mol_type = other DNA
ctggatgtagacagttccattccacacttgctaagtgtcaggcacaagtcatagtgagactgccctctgcctgcagagaa

SEQ ID NO: 92862 - DNA, 80 bp, synthetic construct; identical to SEQ ID NO: 33472
  misc_feature 1..80: note = Artificially Synthesized Probe
  source 1..80: mol_type = other DNA

SEQ ID NO: 92863 - DNA, 80 bp, synthetic construct
  misc_feature 1..80: note = Artificially Synthesized Probe
  source 1..80: mol_type = other DNA
cgtggggctggggactgcccctggcctcctgggcctcccttgggagggtgagtggggaacagagagctggggcctgctcc

SEQ ID NO: 92864 - DNA, 80 bp, synthetic construct
  misc_feature 1..80: note = Artificially Synthesized Probe
  source 1..80: mol_type = other DNA
tgttggggggtggtgggccaagctgaggggagcaactgggtgccagtgtcttgggagggtcccagaggagggctgctggg

SEQ ID NO: 92865 - DNA, 80 bp, synthetic construct
  misc_feature 1..80: note = Artificially Synthesized Probe
  source 1..80: mol_type = other DNA
gttaggccttgggactgcactcaggcccgagatcacccaggctggacccagactaggactttgttctgctcaccccatcc

SEQ ID NO: 92866 - DNA, 80 bp, synthetic construct; identical to SEQ ID NO: 33473
  misc_feature 1..80: note = Artificially Synthesized Probe
  source 1..80: mol_type = other DNA

SEQ ID NO: 92867 - DNA, 80 bp, synthetic construct
  misc_feature 1..80: note = Artificially Synthesized Probe
  source 1..80: mol_type = other DNA
ctcccagctggtcccctgcccagggtggccggcaccacctcctgccatgtggcccatggccgggattgcacctggctctg

SEQ ID NO: 92868 - DNA, 80 bp, synthetic construct
  misc_feature 1..80: note = Artificially Synthesized Probe
  source 1..80: mol_type = other DNA
ctgcgaggggctgtggatgccagcggtgtgttcagacctaatcaggaggtgtgtgggggctggggagcactgctgcctgg

SEQ ID NO: 92869 - DNA, 80 bp, synthetic construct
  misc_feature 1..80: note = Artificially Synthesized Probe
  source 1..80: mol_type = other DNA
tggcacacggcatcccggatggctggggcagaccccagggtggcgcgggcagacactcgttgggaaagtctgcagggact

SEQ ID NO: 92870 - DNA, 80 bp, synthetic construct; identical to SEQ ID NO: 33474
  misc_feature 1..80: note = Artificially Synthesized Probe
  source 1..80: mol_type = other DNA

SEQ ID NO: 92871 - DNA, 80 bp, synthetic construct
  misc_feature 1..80: note = Artificially Synthesized Probe
  source 1..80: mol_type = other DNA
ggaggttgaggctgcaatgagtgccacagcactccagcctgggtgacagagtgagaccctgtctgtttaaaaaaaataga

SEQ ID NO: 92872 - DNA, 80 bp, synthetic construct
  misc_feature 1..80: note = Artificially Synthesized Probe
  source 1..80: mol_type = other DNA
gtctgtagtcccagctactcgggaggctgaggcaggagaatggcatgaacccgggaggcggagcttgcagtgagccggga

SEQ ID NO: 92873 - DNA, 80 bp, synthetic construct
  misc_feature 1..80: note = Artificially Synthesized Probe
  source 1..80: mol_type = other DNA
acaacacaacacaacacaacacgtagtgataacagtgaagcacagatggcgtttgttcaggtttgttttccgttctgcag

SEQ ID NO: 92874 - DNA, 80 bp, synthetic construct
  misc_feature 1..80: note = Artificially Synthesized Probe
  source 1..80: mol_type = other DNA
attcttctgatgctctgggagggctgagcatcacttgtgggtccccctgccctgtcatggcctcttaaagcctgagcatg

SEQ ID NO: 92875 - DNA, 80 bp, synthetic construct; identical to SEQ ID NO: 33475
  misc_feature 1..80: note = Artificially Synthesized Probe
  source 1..80: mol_type = other DNA

SEQ ID NO: 92876 - DNA, 80 bp, synthetic construct; identical to SEQ ID NO: 33468
  misc_feature 1..80: note = Artificially Synthesized Probe
  source 1..80: mol_type = other DNA

SEQ ID NO: 92877 - DNA, 80 bp, synthetic construct
  misc_feature 1..80: note = Artificially Synthesized Probe
  source 1..80: mol_type = other DNA
tggtggtttctccactgaggtgcggggaaggcaggagctgggacccaggctgggggcctgactctgctgctgccctggtg

SEQ ID NO: 92878 - DNA, 80 bp, synthetic construct
  misc_feature 1..80: note = Artificially Synthesized Probe
  source 1..80: mol_type = other DNA
caggcctctttgtttcttcttttctttaaattgcctgcacttgagtagcctttatcacacagtgcaggaatctcaaaggg

SEQ ID NO: 92879 - DNA, 80 bp, synthetic construct; identical to SEQ ID NO: 33476
  misc_feature 1..80: note = Artificially Synthesized Probe
  source 1..80: mol_type = other DNA

SEQ ID NO: 92880 - DNA, 80 bp, synthetic construct
  misc_feature 1..80: note = Artificially Synthesized Probe
  source 1..80: mol_type = other DNA
cctcaagtaatccttctgccttggcctcccaaagtgctgggattacaggcgtgagccacctcacatggtctgaccggcat

SEQ ID NO: 92881 - DNA, 80 bp, synthetic construct
  misc_feature 1..80: note = Artificially Synthesized Probe
  source 1..80: mol_type = other DNA
tggagatcacattagtacctgcctcaaggggttgctgagaggatcaaatgagatgtaatgaaagaaatttgcataggcca

SEQ ID NO: 92882 - DNA, 80 bp, synthetic construct
  misc_feature 1..80: note = Artificially Synthesized Probe
  source 1..80: mol_type = other DNA
cattttgatggccatggggcatggaggacccagaccggtgaggtctggccatgggaggccaggctgcaccctgatgcccg

SEQ ID NO: 92883 - DNA, 80 bp, synthetic construct; identical to SEQ ID NO: 33477
  misc_feature 1..80: note = Artificially Synthesized Probe
  source 1..80: mol_type = other DNA

SEQ ID NO: 92884 - DNA, 80 bp, synthetic construct
  misc_feature 1..80: note = Artificially Synthesized Probe
  source 1..80: mol_type = other DNA
gccctggaggccaggccctggccaggtggccttgcacagccgggcagaggcagggcagggctgtggagggcagagccttg

SEQ ID NO: 92885 - DNA, 80 bp, synthetic construct
  misc_feature 1..80: note = Artificially Synthesized Probe
  source 1..80: mol_type = other DNA
tccagagcccaggacaggggccccagaacctcagggcaaggggccctgcctgaaggtgcatggccaccccctgctgccca

SEQ ID NO: 92886 - DNA, 80 bp, synthetic construct
  misc_feature 1..80: note = Artificially Synthesized Probe
  source 1..80: mol_type = other DNA
agtttcccccgtgccatggagcgcattggccttgttgctgtccctctgagggaccctggggaatagaggtggcctggggc

SEQ ID NO: 92887 - DNA, 80 bp, synthetic construct
  misc_feature 1..80: note = Artificially Synthesized Probe
  source 1..80: mol_type = other DNA
ccctccctaaggtacagccccctctctaccggcctctctctgtcttgagttgcaagcttctccctgcactgggggttctc

SEQ ID NO: 92888 - DNA, 80 bp, synthetic construct; identical to SEQ ID NO: 33478
  misc_feature 1..80: note = Artificially Synthesized Probe
  source 1..80: mol_type = other DNA

SEQ ID NO: 92889 - DNA, 80 bp, synthetic construct
  misc_feature 1..80: note = Artificially Synthesized Probe
  source 1..80: mol_type = other DNA
accgtgtggcctctctaagtcacctcttctcccgcatgcttgatacaacagataagtgaacctcccctactcccttgtgg

SEQ ID NO: 92890 - DNA, 80 bp, synthetic construct
  misc_feature 1..80: note = Artificially Synthesized Probe
  source 1..80: mol_type = other DNA
aagctgggctcgtcccgtcccggccccgcccccaccccgggagcccgataccggtttcagagtcctgggcagcgtgcgcg

SEQ ID NO: 92891 - DNA, 80 bp, synthetic construct; identical to SEQ ID NO: 33511
  misc_feature 1..80: note = Artificially Synthesized Probe
  source 1..80: mol_type = other DNA

SEQ ID NO: 92892 - DNA, 80 bp, synthetic construct
  misc_feature 1..80: note = Artificially Synthesized Probe
  source 1..80: mol_type = other DNA
ataataaaaaaatatatatatattaaaaaaaaaaaaagaaattgtagctgttacatcgagttcatattaggactttgagc

SEQ ID NO: 92893 - DNA, 80 bp, synthetic construct
  misc_feature 1..80: note = Artificially Synthesized Probe
  source 1..80: mol_type = other DNA
ttaaagttctgtgctgttctttgtatccttctcaccttgctttcagatgccaaattttttactacactcacaggacagtt

SEQ ID NO: 92894 - DNA, 80 bp, synthetic construct
  misc_feature 1..80: note = Artificially Synthesized Probe
  source 1..80: mol_type = other DNA
aggtgcccaccaccgcggccggctaattttttgtatttttagtggagacggggtttcaccatgttagctagtttcacgag

SEQ ID NO: 92895 - DNA, 80 bp, synthetic construct; identical to SEQ ID NO: 33512
  misc_feature 1..80: note = Artificially Synthesized Probe
  source 1..80: mol_type = other DNA

SEQ ID NO: 92896 - DNA, 80 bp, synthetic construct
  misc_feature 1..80: note = Artificially Synthesized Probe
  source 1..80: mol_type = other DNA
agatactggacattattattattattattattattattatttttagacagagtcttgctctgtcgcccaggctggagtgc

SEQ ID NO: 92897 - DNA, 80 bp, synthetic construct
  misc_feature 1..80: note = Artificially Synthesized Probe
  source 1..80: mol_type = other DNA
gtctcgaacccctgacctcgtgatccacccgccttagcctcccaaagtgctgggattacaggcgtgagtcaccgcgcccg

SEQ ID NO: 92898 - DNA, 80 bp, synthetic construct
  misc_feature 1..80: note = Artificially Synthesized Probe
  source 1..80: mol_type = other DNA
ctcccaagtagctgggactacaggcatgcaccaccatgccagttaatttttaaataatttttagtagagaagaggtctca

SEQ ID NO: 92899 - DNA, 80 bp, synthetic construct
  misc_feature 1..80: note = Artificially Synthesized Probe
  source 1..80: mol_type = other DNA
ggggaaattgcttactttctctgaacttcagtttcctgtctgttgtttggtttaatactagggggtgccttcttattttg

SEQ ID NO: 92900 - DNA, 80 bp, synthetic construct
  misc_feature 1..80: note = Artificially Synthesized Probe
  source 1..80: mol_type = other DNA
tttagagaaagaaagagaaaggtacaaaaataactgattgttataatatacagagccgctttgcattgggcaccctgctg

SEQ ID NO: 92901 - DNA, 80 bp, synthetic construct; identical to SEQ ID NO: 33513
  misc_feature 1..80: note = Artificially Synthesized Probe
  source 1..80: mol_type = other DNA

SEQ ID NO: 92902 - DNA, 80 bp, synthetic construct
  misc_feature 1..80: note = Artificially Synthesized Probe
  source 1..80: mol_type = other DNA
aagcaattgtcctgcctcagcctcccttagttctctctatttctaacctgacagatattcattcagcccatttttaagtt

SEQ ID NO: 92903 - DNA, 80 bp, synthetic construct
  misc_feature 1..80: note = Artificially Synthesized Probe
  source 1..80: mol_type = other DNA
ttaatgcagtcttcccacaaaagcctgacgaagatttaattctttgtctcatatgtggttttagatttcttcccaataga

SEQ ID NO: 92904 - DNA, 80 bp, synthetic construct
  misc_feature 1..80: note = Artificially Synthesized Probe
  source 1..80: mol_type = other DNA
aaaaatacaaaaattagccaggcatggtggtgcatgcctgtaatcccagctactcgggaggctgaggcaggagagtggct

SEQ ID NO: 92905 - DNA, 80 bp, synthetic construct; identical to SEQ ID NO: 33514
  misc_feature 1..80: note = Artificially Synthesized Probe
  source 1..80: mol_type = other DNA

SEQ ID NO: 92906 - DNA, 80 bp, synthetic construct
  misc_feature 1..80: note = Artificially Synthesized Probe
  source 1..80: mol_type = other DNA
aaaattagccgggtgtggtggcgcaagcctgtaatcccagctacttgggagactgaggcgggagaatgacttgaacctgg

SEQ ID NO: 92907 - DNA, 80 bp, synthetic construct
  misc_feature 1..80: note = Artificially Synthesized Probe
  source 1..80: mol_type = other DNA
tgaaatgtctacatggaaatattctgatttcttcaggctccctttctatattaaaaggtaagtcttacaattagggatgg

SEQ ID NO: 92908 - DNA, 80 bp, synthetic construct
  misc_feature 1..80: note = Artificially Synthesized Probe
  source 1..80: mol_type = other DNA
tcagcaccatgagatctggattgttaaacatttaggagttaaaccatgtgtccatatgggggtcaaaaaaaataaaacag

SEQ ID NO: 92909 - DNA, 80 bp, synthetic construct; identical to SEQ ID NO: 33515
  misc_feature 1..80: note = Artificially Synthesized Probe
  source 1..80: mol_type = other DNA

SEQ ID NO: 92910 - DNA, 80 bp, synthetic construct
  misc_feature 1..80: note = Artificially Synthesized Probe
  source 1..80: mol_type = other DNA
gttaaagtgctagtggtttttagaatgagctaatattaaaccaaagccagtttcagggtaaggaaatcaggaaacaaagg

SEQ ID NO: 92911 - DNA, 80 bp, synthetic construct
  misc_feature 1..80: note = Artificially Synthesized Probe
  source 1..80: mol_type = other DNA
aaatcctgtttggttttttatttgcagtgaagtaggggccctcccaagccactctcagtttagttcagcaagcatttctc

SEQ ID NO: 92912 - DNA, 80 bp, synthetic construct
  misc_feature 1..80: note = Artificially Synthesized Probe
  source 1..80: mol_type = other DNA
ctgctgctccccaaggctaagctggaggggtggagaatgaggtatagatagataaaatgatcagatgtctggggtttact

SEQ ID NO: 92913 - DNA, 80 bp, synthetic construct; identical to SEQ ID NO: 33516
  misc_feature 1..80: note = Artificially Synthesized Probe
  source 1..80: mol_type = other DNA

SEQ ID NO: 92914 - DNA, 80 bp, synthetic construct
  misc_feature 1..80: note = Artificially Synthesized Probe
  source 1..80: mol_type = other DNA
caataaaccaaatagttctgggttatttatttatttatttgtttgtttgttttttgagacagggtttcactctgtcaccc

SEQ ID NO: 92915 - DNA, 80 bp, synthetic construct
  misc_feature 1..80: note = Artificially Synthesized Probe
  source 1..80: mol_type = other DNA
gtaatcctagcactttgggaggctgaggtgggtggattgcctgagctcagaagtttgagaccagactaggaaatatggtg

SEQ ID NO: 92916 - DNA, 80 bp, synthetic construct
  misc_feature 1..80: note = Artificially Synthesized Probe
  source 1..80: mol_type = other DNA
gaacgagactctgtctcaagaaaaaatatatttttttaattttttttgtagagacagcatctccctatgttgcccaggct

SEQ ID NO: 92917 - DNA, 80 bp, synthetic construct
  misc_feature 1..80: note = Artificially Synthesized Probe
  source 1..80: mol_type = other DNA
gtggcacaatctcagctccttgccacctccgcctcccgggctcaagccattctcctgcctcagcctcctgagtagctggg

SEQ ID NO: 92918 - DNA, 80 bp, synthetic construct; identical to SEQ ID NO: 33517
  misc_feature 1..80: note = Artificially Synthesized Probe
  source 1..80: mol_type = other DNA

SEQ ID NO: 92919 - DNA, 80 bp, synthetic construct
  misc_feature 1..80: note = Artificially Synthesized Probe
  source 1..80: mol_type = other DNA
cacgtgtaagcccctgcacctggcctcaacctcacttcttttcttttctttttttttttttttgagacagagtctcactc

SEQ ID NO: 92920 - DNA, 80 bp, synthetic construct
  misc_feature 1..80: note = Artificially Synthesized Probe
  source 1..80: mol_type = other DNA
tcaccatgctggccaggctggtctcgaacacctgacctcgtgatccaccgacctcggcctcccaaggtgctgagattaca

SEQ ID NO: 92921 - DNA, 80 bp, synthetic construct; identical to SEQ ID NO: 33518
  misc_feature 1..80: note = Artificially Synthesized Probe
  source 1..80: mol_type = other DNA

SEQ ID NO: 92922 - DNA, 80 bp, synthetic construct
  misc_feature 1..80: note = Artificially Synthesized Probe
  source 1..80: mol_type = other DNA
atataattgtgatgtgaaatgttaactcttatttccacttttcttcctcctgtcttcctccccattttcttcttcttctt

SEQ ID NO: 92923 - DNA, 80 bp, synthetic construct
  misc_feature 1..80: note = Artificially Synthesized Probe
  source 1..80: mol_type = other DNA
ttaaatacctgtctagcatttgacctcttctcaagatctcagtgatccattggattatttcaatggcctagccagtcttc

SEQ ID NO: 92924 - DNA, 80 bp, synthetic construct
  misc_feature 1..80: note = Artificially Synthesized Probe
  source 1..80: mol_type = other DNA
cagacacacaccgctgcatctgccagatttttttttttttaaacagagtctcagtctgtctcccaagctggagtgcagtg

SEQ ID NO: 92925 - DNA, 80 bp, synthetic construct
  misc_feature 1..80: note = Artificially Synthesized Probe
  source 1..80: mol_type = other DNA
caaactcctgatctcaagtggtcagcccacctcggtttcccaaagtgctgggattacaggcgtgagccactgtgcctggc

SEQ ID NO: 92926 - DNA, 80 bp, synthetic construct
  misc_feature 1..80: note = Artificially Synthesized Probe
  source 1..80: mol_type = other DNA
gagggtttttttctacttatgtttattaacaaatcctctttttctccctaactgcagtgtgaaatggccaccagtggtga

SEQ ID NO: 92927 - DNA, 80 bp, synthetic construct; identical to SEQ ID NO: 33519
  misc_feature 1..80: note = Artificially Synthesized Probe
  source 1..80: mol_type = other DNA

SEQ ID NO: 92928 - DNA, 80 bp, synthetic construct
  misc_feature 1..80: note = Artificially Synthesized Probe
  source 1..80: mol_type = other DNA
tttttcccctagaaaataccctgtgattcagacagatgatgagcgagaacgctataaagctgtgttccaagaccagtttt

SEQ ID NO: 92929 - DNA, 80 bp, synthetic construct
  misc_feature 1..80: note = Artificially Synthesized Probe
  source 1..80: mol_type = other DNA
ccacatcattcggaaagccgacaggttagtatgtgcagctgcctaggaggagcactgaaatctagaggatgaataaaatc

SEQ ID NO: 92930 - DNA, 80 bp, synthetic construct; identical to SEQ ID NO: 33520
  misc_feature 1..80: note = Artificially Synthesized Probe
  source 1..80: mol_type = other DNA

SEQ ID NO: 92931 - DNA, 80 bp, synthetic construct
  misc_feature 1..80: note = Artificially Synthesized Probe
  source 1..80: mol_type = other DNA
agtgcagtggcgtgatcttggctcactgcaagctccacctcccgagttcatgccattctcctgcctcagcctcccgagta

SEQ ID NO: 92932 - DNA, 80 bp, synthetic construct
  misc_feature 1..80: note = Artificially Synthesized Probe
  source 1..80: mol_type = other DNA
gcctggcccccaaaatctggcttttaaaaaaatttataaccatttacatctgctttctgtgtctaggaaagcatttgaga

SEQ ID NO: 92933 - DNA, 80 bp, synthetic construct; identical to SEQ ID NO: 33502
  misc_feature 1..80: note = Artificially Synthesized Probe
  source 1..80: mol_type = other DNA

SEQ ID NO: 92934 - DNA, 80 bp, synthetic construct
  misc_feature 1..80: note = Artificially Synthesized Probe
  source 1..80: mol_type = other DNA
actgagtcagtcagggtcccaaaggagacagatagcacattcaaactaggataattcacaaaggtttattcagaaaggga

SEQ ID NO: 92935 - DNA, 80 bp, synthetic construct
  misc_feature 1..80: note = Artificially Synthesized Probe
  source 1..80: mol_type = other DNA
aaggtgggcagatcgcttgagcccaggcatgcaagaccagcctggacaacatggtgaaaccctgtctctacaaaaaatat

SEQ ID NO: 92936 - DNA, 80 bp, synthetic construct; identical to SEQ ID NO: 33521
  misc_feature 1..80: note = Artificially Synthesized Probe
  source 1..80: mol_type = other DNA

SEQ ID NO: 92937 - DNA, 80 bp, synthetic construct
  misc_feature 1..80: note = Artificially Synthesized Probe
  source 1..80: mol_type = other DNA
ttaagctttttcgtagtgctcttccgcaccccccacatttttcacattttgaaataggaatattgaaataggaatgcctt

SEQ ID NO: 92938 - DNA, 80 bp, synthetic construct
  misc_feature 1..80: note = Artificially Synthesized Probe
  source 1..80: mol_type = other DNA
gggattcaggcatgcgccaccatgcccagctaattttgtatttttagtagagacggggtttcaccatggtggttaggctg

SEQ ID NO: 92939 - DNA, 80 bp, synthetic construct
  misc_feature 1..80: note = Artificially Synthesized Probe
  source 1..80: mol_type = other DNA
gggagtgcagtggtgcaatctcggctcactgcaacctttgcctcccaggttacgcgattctcctgcctcagcttcctgag

SEQ ID NO: 92940 - DNA, 80 bp, synthetic construct; identical to SEQ ID NO: 33522
  misc_feature 1..80: note = Artificially Synthesized Probe
  source 1..80: mol_type = other DNA

SEQ ID NO: 92941 - DNA, 80 bp, synthetic construct
  misc_feature 1..80: note = Artificially Synthesized Probe
  source 1..80: mol_type = other DNA
tcgagaccagcctggccaacatggtgaaatgctgtctctactaaaagtacaaaaattagttgggcatgttggcaggctga

SEQ ID NO: 92942 - DNA, 80 bp, synthetic construct
  misc_feature 1..80: note = Artificially Synthesized Probe
  source 1..80: mol_type = other DNA
acgaattagcagttatttcccattctcagctctgtccaaccattgacaaccactaatctactttctgtccgaatggattt

SEQ ID NO: 92943 - DNA, 80 bp, synthetic construct; identical to SEQ ID NO: 33523
  misc_feature 1..80: note = Artificially Synthesized Probe
  source 1..80: mol_type = other DNA

SEQ ID NO: 92944 - DNA, 80 bp, synthetic construct
  misc_feature 1..80: note = Artificially Synthesized Probe
  source 1..80: mol_type = other DNA
caagtcgtgtgaacccgggaggcggaggttgcagtgagccaagatcatgccactgcactccagcctgggcgacagagcca

SEQ ID NO: 92945 - DNA, 80 bp, synthetic construct
  misc_feature 1..80: note = Artificially Synthesized Probe
  source 1..80: mol_type = other DNA
atactcagatatccctttctctgtgaagatttccctgcccactcggtttaagatggtaacatcctgtccccattgcagtc

SEQ ID NO: 92946 - DNA, 80 bp, synthetic construct
  misc_feature 1..80: note = Artificially Synthesized Probe
  source 1..80: mol_type = other DNA
ttgttaagtgtgcatttaaatcacttatcgttatgagttaactaagccaaatgtgtattacagtaacattttcctaatcc

SEQ ID NO: 92947 - DNA, 80 bp, synthetic construct
  misc_feature 1..80: note = Artificially Synthesized Probe
  source 1..80: mol_type = other DNA
ggaaggcatgaggccccaggaatctggatcagcacaggctgggaaatgcaggcttgttgggagaaataatgaagaaaatc

SEQ ID NO: 92948 - DNA, 80 bp, synthetic construct
  misc_feature 1..80: note = Artificially Synthesized Probe
  source 1..80: mol_type = other DNA
gcactttgggaggccaaggtgaaaccgcgtctctactaaaaatacaaaaattagccaggcatggtggtgtgtgcctgtaa

SEQ ID NO: 92949 - DNA, 80 bp, synthetic construct; identical to SEQ ID NO: 33524
  misc_feature 1..80: note = Artificially Synthesized Probe
  source 1..80: mol_type = other DNA

SEQ ID NO: 92950 - DNA, 80 bp, synthetic construct
  misc_feature 1..80: note = Artificially Synthesized Probe
  source 1..80: mol_type = other DNA
gtcaggagatcgagaccagcctggccagcatagtgaaaccccgtccctactaaaaatacaaaaaattagccgagcatggt

SEQ ID NO: 92951 - DNA, 80 bp, synthetic construct
  misc_feature 1..80: note = Artificially Synthesized Probe
  source 1..80: mol_type = other DNA
accttgacctgtaatctttgagccaacacccagtggtatctggtttgtgtgctttgtatgaatggacaagggctgcagca

SEQ ID NO: 92952 - DNA, 80 bp, synthetic construct; identical to SEQ ID NO: 33525
  misc_feature 1..80: note = Artificially Synthesized Probe
  source 1..80: mol_type = other DNA

SEQ ID NO: 92953 - DNA, 80 bp, synthetic construct
  misc_feature 1..80: note = Artificially Synthesized Probe
  source 1..80: mol_type = other DNA
gacatggttgtgcaccactgaaaaatagtcacatgacttttctgagcccataaagtagaaatattgccccaaacaatccc

SEQ ID NO: 92954 - DNA, 80 bp, synthetic construct
  misc_feature 1..80: note = Artificially Synthesized Probe
  source 1..80: mol_type = other DNA
gatctgttattacagattacaattaaatcaccaggtttatcttcactgctggcaagcattcaaaacacaaacatactcat

SEQ ID NO: 92955 - DNA, 80 bp, synthetic construct
  misc_feature 1..80: note = Artificially Synthesized Probe
  source 1..80: mol_type = other DNA
aaagtaaaagttagcggccggtcatggtggctcacacctgtaaccccagcactttgggaggccgaggtgggtgaatcaca

SEQ ID NO: 92956 - DNA, 80 bp, synthetic construct
  misc_feature 1..80: note = Artificially Synthesized Probe
  source 1..80: mol_type = other DNA
ggttaaatgaagggtcttcgttttccaaagtaaaataaaataaagccttaggaatttccaaattgttcaacagtataaag

SEQ ID NO: 92957 - DNA, 80 bp, synthetic construct
  misc_feature 1..80: note = Artificially Synthesized Probe
  source 1..80: mol_type = other DNA
gagccgagatcgcaccactgcactccagcctgggtgacagaattgagactccatctcaaaaataaaaaaaaataaatata

SEQ ID NO: 92958 - DNA, 80 bp, synthetic construct; identical to SEQ ID NO: 33526
  misc_feature 1..80: note = Artificially Synthesized Probe
  source 1..80: mol_type = other DNA

SEQ ID NO: 92959 - DNA, 80 bp, synthetic construct
  misc_feature 1..80: note = Artificially Synthesized Probe
  source 1..80: mol_type = other DNA
ccggggaggcccgcgtcccgccaggtttcgctctgcggacgcaggtgcggccgagccgccgtccttccgggcgcggggcg

SEQ ID NO: 92960 - DNA, 80 bp, synthetic construct
  misc_feature 1..80: note = Artificially Synthesized Probe
  source 1..80: mol_type = other DNA
gccaccatgcctggctaatttttgtatttttagtagagatggggtttcgccatgttggccaggctggtcttgaactcctg

SEQ ID NO: 92961 - DNA, 80 bp, synthetic construct
  misc_feature 1..80: note = Artificially Synthesized Probe
  source 1..80: mol_type = other DNA
tcgagaccagcctgggaaacatggcaaaactccatctctactaaaaatacaaaaattagctgggcatggtgatgcacacc

SEQ ID NO: 92962 - DNA, 80 bp, synthetic construct; identical to SEQ ID NO: 33527
  misc_feature 1..80: note = Artificially Synthesized Probe
  source 1..80: mol_type = other DNA

SEQ ID NO: 92963 - DNA, 80 bp, synthetic construct
  misc_feature 1..80: note = Artificially Synthesized Probe
  source 1..80: mol_type = other DNA
aaaggatgaacataatcatagctaatgtggttattatgtggcaagcactttataaggatcatttcaaataagtgaacctt

SEQ ID NO: 92964 - DNA, 80 bp, synthetic construct
  misc_feature 1..80: note = Artificially Synthesized Probe
  source 1..80: mol_type = other DNA
ctgggcctagcagacagtaagccttcaaatatttgcctgtgaattgaatttttgtgtgtgaatgttttcattattttctt

SEQ ID NO: 92965 - DNA, 80 bp, synthetic construct
  misc_feature 1..80: note = Artificially Synthesized Probe
  source 1..80: mol_type = other DNA
acagttttcttcaaactgtattcttatccaagtacatatgtgataatttacagactctagattctgttagctaaaatagt

SEQ ID NO: 92966 - DNA, 80 bp, synthetic construct; identical to SEQ ID NO: 33528
  misc_feature 1..80: note = Artificially Synthesized Probe
  source 1..80: mol_type = other DNA

SEQ ID NO: 92967 - DNA, 80 bp, synthetic construct
  misc_feature 1..80: note = Artificially Synthesized Probe
  source 1..80: mol_type = other DNA
gggaggatcacttgtgcctgggaggcagaggttgcactgggagacagtacgccactgcactctagcctgggcaacaaagt

SEQ ID NO: 92968 - DNA, 80 bp, synthetic construct; identical to SEQ ID NO: 33503
  misc_feature 1..80: note = Artificially Synthesized Probe
  source 1..80: mol_type = other DNA

SEQ ID NO: 92969 - DNA, 80 bp, synthetic construct
  misc_feature 1..80: note = Artificially Synthesized Probe
  source 1..80: mol_type = other DNA
cctcagcctcctgagttgctgggactacaggcacatgccactgtacctggctttatcagatattaaaatgaaaggtgtct

SEQ ID NO: 92970 - DNA, 80 bp, synthetic construct
  misc_feature 1..80: note = Artificially Synthesized Probe
  source 1..80: mol_type = other DNA
tgtttctgtgtttttcactgaggaagccaggagccaaaataatacttatatttcttttacaggatcctacatttctggaa

SEQ ID NO: 92971 - DNA, 80 bp, synthetic construct
  misc_feature 1..80: note = Artificially Synthesized Probe
  source 1..80: mol_type = other DNA
tctcgctctgttacccaggctggaatgcagtggcacaatctcggctcactgcaacctccacctcccgggttcaagcaatt

SEQ ID NO: 92972 - DNA, 80 bp, synthetic construct; identical to SEQ ID NO: 33529
  misc_feature 1..80: note = Artificially Synthesized Probe
  source 1..80: mol_type = other DNA

SEQ ID NO: 92973 - DNA, 80 bp, synthetic construct
  misc_feature 1..80: note = Artificially Synthesized Probe
  source 1..80: mol_type = other DNA
catttaaatgtgtcatcattttagagatcgtatcctggcagtgtgatgggcaagtggaccatcaattctggtgctacttt

SEQ ID NO: 92974 - DNA, 80 bp, synthetic construct
  misc_feature 1..80: note = Artificially Synthesized Probe
  source 1..80: mol_type = other DNA
gtgtcatttattcccttgaaaggtgtttgaatcccagatcaacattttcagacatcctgatcttgggcaaattgcttaat

SEQ ID NO: 92975 - DNA, 80 bp, synthetic construct; identical to SEQ ID NO: 33530
  misc_feature 1..80: note = Artificially Synthesized Probe
  source 1..80: mol_type = other DNA

SEQ ID NO: 92976 - DNA, 80 bp, synthetic construct
  misc_feature 1..80: note = Artificially Synthesized Probe
  source 1..80: mol_type = other DNA
tttttttttttttttgtgagacagagtcttactctgttgcccagactggagtgcagtggtgcgatctcggctcactgcaa

SEQ ID NO: 92977 - DNA, 80 bp, synthetic construct
  misc_feature 1..80: note = Artificially Synthesized Probe
  source 1..80: mol_type = other DNA
ccacccgcctcagcctcccaaagtgttgggattacaggcgtgagtcaccgcgcccagctggtattgcttttctattccct

SEQ ID NO: 92978 - DNA, 80 bp, synthetic construct
  misc_feature 1..80: note = Artificially Synthesized Probe
  source 1..80: mol_type = other DNA
tgcctctgcctcccaagtagctgggattacaggcacccaccaccatgcccagctaattttttgtatttttagtagagaca

SEQ ID NO: 92979 - DNA, 80 bp, synthetic construct
  misc_feature 1..80: note = Artificially Synthesized Probe
  source 1..80: mol_type = other DNA
gcctgggcaacagattgagactctgtctcaaaaaaaaaaaaaaaaagaattagctgggtatggtggcatgcacctgtagt

SEQ ID NO: 92980 - DNA, 80 bp, synthetic construct
  misc_feature 1..80: note = Artificially Synthesized Probe
  source 1..80: mol_type = other DNA
tctttctaagaattatcttggctttggactttattcataaatgttttatttctgttagtatgaacaatagactgccttaa

SEQ ID NO: 92981 - DNA, 80 bp, synthetic construct; identical to SEQ ID NO: 33531
  misc_feature 1..80: note = Artificially Synthesized Probe
  source 1..80: mol_type = other DNA

SEQ ID NO: 92982 - DNA, 80 bp, synthetic construct
  misc_feature 1..80: note = Artificially Synthesized Probe
  source 1..80: mol_type = other DNA
aagaagagcaccagtgctttaaaaaaaaaaaaaggtaaaatattaccattttgatagactgtaaagagttagattcctgt

SEQ ID NO: 92983 - DNA, 80 bp, synthetic construct
  misc_feature 1..80: note = Artificially Synthesized Probe
  source 1..80: mol_type = other DNA
ttttatgtttgccttcctagcattcctgtgttcactgtgcatgttcttgaaaatattttcacttgtcagaaaataaactg

SEQ ID NO: 92984 - DNA, 80 bp, synthetic construct
  misc_feature 1..80: note = Artificially Synthesized Probe
  source 1..80: mol_type = other DNA
tatccattttaattttgagaccttcatagtatcaagtacaataccatgtgcccagtttaagtcttcaataatgagtcttg

SEQ ID NO: 92985 - DNA, 80 bp, synthetic construct
  misc_feature 1..80: note = Artificially Synthesized Probe
  source 1..80: mol_type = other DNA
cttagtaaaagtgcattttctatgctttatttttgaggtggattgaataccttctgagatacttgagtctctccttggga

SEQ ID NO: 92986 - DNA, 80 bp, synthetic construct; identical to SEQ ID NO: 33504
  misc_feature 1..80: note = Artificially Synthesized Probe
  source 1..80: mol_type = other DNA

SEQ ID NO: 92987 - DNA, 80 bp, synthetic construct
  misc_feature 1..80: note = Artificially Synthesized Probe
  source 1..80: mol_type = other DNA
ttattgtttaatagggctcacagataaattagatttataaatcatttttcatttctttttttttttcttttttttagaga

SEQ ID NO: 92988 - DNA, 80 bp, synthetic construct
  misc_feature 1..80: note = Artificially Synthesized Probe
  source 1..80: mol_type = other DNA
gagatagtgtttcaccatgttggtcaggctggtctcaaactcctgacctgaaatgatccgtctgtcttggcctcccaaag

SEQ ID NO: 92989 - DNA, 80 bp, synthetic construct
  misc_feature 1..80: note = Artificially Synthesized Probe
  source 1..80: mol_type = other DNA
taactttaaatttggccacaggtgtgaaaatcacaaatgtcaaatgatggaagatccaggaatcgggacaggcgctacga

SEQ ID NO: 92990 - DNA, 80 bp, synthetic construct; identical to SEQ ID NO: 33505
  misc_feature 1..80: note = Artificially Synthesized Probe
  source 1..80: mol_type = other DNA

SEQ ID NO: 92991 - DNA, 80 bp, synthetic construct
  misc_feature 1..80: note = Artificially Synthesized Probe
  source 1..80: mol_type = other DNA
gaggctgacgcagtgtttccccgggatccctatggatctctagaccgacacacacaaacagttcgaacatacagtgagaa

SEQ ID NO: 92992 - DNA, 80 bp, synthetic construct
  misc_feature 1..80: note = Artificially Synthesized Probe
  source 1..80: mol_type = other DNA
tttgtgggaccgggcgcccagaggctggcgcgggggagaccccacagctaaaatgctcggtacccccgggcagtcgtggg

SEQ ID NO: 92993 - DNA, 80 bp, synthetic construct
  misc_feature 1..80: note = Artificially Synthesized Probe
  source 1..80: mol_type = other DNA
caaccgtatggcatgggaggcgttggtggattgggcagtatgtatgggggctattactacactggccctaagaccccttt

SEQ ID NO: 92994 - DNA, 80 bp, synthetic construct
  misc_feature 1..80: note = Artificially Synthesized Probe
  source 1..80: mol_type = other DNA
atagtctatgtgaatgataccaaccgaggtggcctctgctactatccgttatttaatacaccagtgaatgcagtgttctg

SEQ ID NO: 92995 - DNA, 80 bp, synthetic construct
  misc_feature 1..80: note = Artificially Synthesized Probe
  source 1..80: mol_type = other DNA
cctcatttgtgtgtgtatgtttgttttttctgttatttgctcccttgttaaaaaatgtatagcgctcaaaacagaaagct

SEQ ID NO: 92996 - DNA, 80 bp, synthetic construct; identical to SEQ ID NO: 33506
  misc_feature 1..80: note = Artificially Synthesized Probe
  source 1..80: mol_type = other DNA

SEQ ID NO: 92997 - DNA, 80 bp, synthetic construct
  misc_feature 1..80: note = Artificially Synthesized Probe
  source 1..80: mol_type = other DNA
tgagagattgaattgtaatgaacatactctgaaaacttgcccagtggttttgataatttgtctttatttgaggaagacgt

SEQ ID NO: 92998 - DNA, 80 bp, synthetic construct
  misc_feature 1..80: note = Artificially Synthesized Probe
  source 1..80: mol_type = other DNA
agtagcaaatgttagagtatgttccactggctacattattctctgaagtaagttgatattttgccttcttccaaggatat

SEQ ID NO: 92999 - DNA, 80 bp, synthetic construct; identical to SEQ ID NO: 33507
  misc_feature 1..80: note = Artificially Synthesized Probe
  source 1..80: mol_type = other DNA

SEQ ID NO: 93000 - DNA, 80 bp, synthetic construct
  misc_feature 1..80: note = Artificially Synthesized Probe
  source 1..80: mol_type = other DNA
ccttggcatcccaaagtgctgggattacaggtgtgagccaccatgcctggcccgttttttggtttttttaattttctttt

SEQ ID NO: 93001 - DNA, 80 bp, synthetic construct
  misc_feature 1..80: note = Artificially Synthesized Probe
  source 1..80: mol_type = other DNA
aattaatacttttataatttcttatgcctgtctttactgcagtctctgaacataaattgtgaagatttcatggacactta

SEQ ID NO: 93002 - DNA, 80 bp, synthetic construct
  misc_feature 1..80: note = Artificially Synthesized Probe
  source 1..80: mol_type = other DNA
tgaaatctgggcaccttgaaaaaagaacaggataacagcaatgttcagggaacaagggagataaccttaaactctggctg

SEQ ID NO: 93003 - DNA, 80 bp, synthetic construct
  misc_feature 1..80: note = Artificially Synthesized Probe
  source 1..80: mol_type = other DNA
agccatttctcctgccattgccgcggctttccaagatgagtgtccaagagtggagtaagggtccggggcctgagcaggac

SEQ ID NO: 93004 - DNA, 80 bp, synthetic construct; identical to SEQ ID NO: 33508
  misc_feature 1..80: note = Artificially Synthesized Probe
  source 1..80: mol_type = other DNA

SEQ ID NO: 93005 - DNA, 80 bp, synthetic construct
  misc_feature 1..80: note = Artificially Synthesized Probe
  source 1..80: mol_type = other DNA
attaccttgtaaagcatgtgatctctgtgacccacaccctattcatacactccctccccttttgaaaatcactaataaaa

SEQ ID NO: 93006 - DNA, 80 bp, synthetic construct
  misc_feature 1..80: note = Artificially Synthesized Probe
  source 1..80: mol_type = other DNA
cgacacttagggaatatagaaaagaacctatgtgaaatatcggggatgaatttcccccaatatctggcaccaggctggag

SEQ ID NO: 93007 - DNA, 80 bp, synthetic construct
  misc_feature 1..80: note = Artificially Synthesized Probe
  source 1..80: mol_type = other DNA
gtatttagtagagacagggttttgccatgttggccaggctgatcttgagctcctgacctctggtgatccatctgccttgg

SEQ ID NO: 93008 - DNA, 80 bp, synthetic construct
  misc_feature 1..80: note = Artificially Synthesized Probe
  source 1..80: mol_type = other DNA
tacggtggcacaatcatggctcactccagctttgacctcccaggctcaagcaatcttcccacctcagcctcccaggtagc

SEQ ID NO: 93009 - DNA, 80 bp, synthetic construct; identical to SEQ ID NO: 33509
  misc_feature 1..80: note = Artificially Synthesized Probe
  source 1..80: mol_type = other DNA

SEQ ID NO: 93010 - DNA, 80 bp, synthetic construct
  misc_feature 1..80: note = Artificially Synthesized Probe
  source 1..80: mol_type = other DNA
ggcataagccaccatgcctagcttgattgtcacaaaataatttatcttgctagaactctacatagattcaagttatttct

SEQ ID NO: 93011 - DNA, 80 bp, synthetic construct
  misc_feature 1..80: note = Artificially Synthesized Probe
  source 1..80: mol_type = other DNA
tgtacaaagtaaaaaatgttaattctaatcagtatgaaatccagatagtgaaacacatacttcctcataaatttatgcta

SEQ ID NO: 93012 - DNA, 80 bp, synthetic construct
  misc_feature 1..80: note = Artificially Synthesized Probe
  source 1..80: mol_type = other DNA
cctgtctgtacgttgctataacttcctaaaggttagaagatgtaatggcctagggcttttttctattaattttatagagt

SEQ ID NO: 93013 - DNA, 80 bp, synthetic construct; identical to SEQ ID NO: 33510
  misc_feature 1..80: note = Artificially Synthesized Probe
  source 1..80: mol_type = other DNA

SEQ ID NO: 93014 - DNA, 80 bp, synthetic construct
  misc_feature 1..80: note = Artificially Synthesized Probe
  source 1..80: mol_type = other DNA
gatttgttaatacttttctcttaggtctgtttatctacatagtagtatcgtacatctgtgaaatgtagctattggccagg

SEQ ID NO: 93015 - DNA, 80 bp, synthetic construct; identical to SEQ ID NO: 33501
  misc_feature 1..80: note = Artificially Synthesized Probe
  source 1..80: mol_type = other DNA

SEQ ID NO: 93016 - DNA, 80 bp, synthetic construct
  misc_feature 1..80: note = Artificially Synthesized Probe
  source 1..80: mol_type = other DNA
agctactctggaggctgaggcacgagaaccacttgaatctgggaggtgaaggtttcagtgagccaagatcacgtcactgc

SEQ ID NO: 93017 - DNA, 80 bp, synthetic construct; identical to SEQ ID NO: 33532
  misc_feature 1..80: note = Artificially Synthesized Probe
  source 1..80: mol_type = other DNA

SEQ ID NO: 93018 - DNA, 80 bp, synthetic construct
  misc_feature 1..80: note = Artificially Synthesized Probe
  source 1..80: mol_type = other DNA
tgtgtcacatgaggtatggttgatcattatcccagtttggggtgtgtgtattaccacataaaattgccccccttttctac

SEQ ID NO: 93019 - DNA, 80 bp, synthetic construct
  misc_feature 1..80: note = Artificially Synthesized Probe
  source 1..80: mol_type = other DNA
atacaatagtgtatacttgctcacacatgtgaattgtgtgtaattggagggacacacaccaaaacggtaacgattaggcc

SEQ ID NO: 93020 - DNA, 80 bp, synthetic construct
  misc_feature 1..80: note = Artificially Synthesized Probe
  source 1..80: mol_type = other DNA
ccggctactggggaagctgaagcaggagaattgcttgaacccaggaggcagaggtttcagtgagtcgagattgtgccact

SEQ ID NO: 93021 - DNA, 80 bp, synthetic construct; identical to SEQ ID NO: 33543
  misc_feature 1..80: note = Artificially Synthesized Probe
  source 1..80: mol_type = other DNA

SEQ ID NO: 93022 - DNA, 80 bp, synthetic construct
  misc_feature 1..80: note = Artificially Synthesized Probe
  source 1..80: mol_type = other DNA
atgttcataattttctgtattttccatcttctaccatgaatattgttgctttcatacttagaaaaatattgtcggccggg

SEQ ID NO: 93023 - DNA, 80 bp, synthetic construct
  misc_feature 1..80: note = Artificially Synthesized Probe
  source 1..80: mol_type = other DNA
caaaattagccgggcgtggtagcacatgcctgtaatcccagctactagggaggctgaggcaggagaatcgcttgaacctg

SEQ ID NO: 93024 - DNA, 80 bp, synthetic construct
  misc_feature 1..80: note = Artificially Synthesized Probe
  source 1..80: mol_type = other DNA
gcaggtgggttgcctgagctcaggagttcaagaccagcttgggcagcacggtgaaataccatctctactaaaatacaaaa

SEQ ID NO: 93025 - DNA, 80 bp, synthetic construct; identical to SEQ ID NO: 33544
  misc_feature 1..80: note = Artificially Synthesized Probe
  source 1..80: mol_type = other DNA

SEQ ID NO: 93026 - DNA, 80 bp, synthetic construct
  misc_feature 1..80: note = Artificially Synthesized Probe
  source 1..80: mol_type = other DNA
gcactccagcctgggtgacagagtgagactccgacacacacacacacacacacacacacacacacacacacactctctct

SEQ ID NO: 93027 - DNA, 80 bp, synthetic construct; identical to SEQ ID NO: 33533
  misc_feature 1..80: note = Artificially Synthesized Probe
  source 1..80: mol_type = other DNA

SEQ ID NO: 93028 - DNA, 80 bp, synthetic construct
  misc_feature 1..80: note = Artificially Synthesized Probe
  source 1..80: mol_type = other DNA
gggggtagctgacgtgggagaatcgcttgaacccaggagacagaggttgcagtgatctgagattgtaccactgtactcca

SEQ ID NO: 93029 - DNA, 80 bp, synthetic construct; identical to SEQ ID NO: 33545
  misc_feature 1..80: note = Artificially Synthesized Probe
  source 1..80: mol_type = other DNA

SEQ ID NO: 93030 - DNA, 80 bp, synthetic construct
  misc_feature 1..80: note = Artificially Synthesized Probe
  source 1..80: mol_type = other DNA
cttaagcctggaaagatagaaattgcagtgagccgagatcacaccgctgcactccagtctgggcaacagagcaagaccct

SEQ ID NO: 93031 - DNA, 80 bp, synthetic construct
  misc_feature 1..80: note = Artificially Synthesized Probe
  source 1..80: mol_type = other DNA
caagatccatctttctgacaaactgcagtaaaggatttcaggggcaagtgaccctaaagaagaattcagaatatattaat

SEQ ID NO: 93032 - DNA, 80 bp, synthetic construct
  misc_feature 1..80: note = Artificially Synthesized Probe
  source 1..80: mol_type = other DNA
ccaccgcctcggtgcacgtctatgccacctaggttacgtatttcatcactcaacaggtattggcattttatgaatcagat

SEQ ID NO: 93033 - DNA, 80 bp, synthetic construct
  misc_feature 1..80: note = Artificially Synthesized Probe
  source 1..80: mol_type = other DNA
gccagcatggtgaaaccctgtctctactaaaaaaatacaaaaaattagcctggcatggtggcgtgcacctgtaatcccag

SEQ ID NO: 93034 - DNA, 80 bp, synthetic construct; identical to SEQ ID NO: 33546
  misc_feature 1..80: note = Artificially Synthesized Probe
  source 1..80: mol_type = other DNA

SEQ ID NO: 93035 - DNA, 80 bp, synthetic construct
  misc_feature 1..80: note = Artificially Synthesized Probe
  source 1..80: mol_type = other DNA
tgagcctgagaggtcaaggctgtggtgagctgtgatcgtgccactgcactccagcctgggtgacaaagtgagaccctgtc

SEQ ID NO: 93036 - DNA, 80 bp, synthetic construct
  misc_feature 1..80: note = Artificially Synthesized Probe
  source 1..80: mol_type = other DNA
gtccatcagctttcaccgccagcgtcattcacagggaaacatttttcgacttgctaagataatgtttttctaaaatcaaa

SEQ ID NO: 93037 - DNA, 80 bp, synthetic construct
  misc_feature 1..80: note = Artificially Synthesized Probe
  source 1..80: mol_type = other DNA
ggagatcgagaccatcctggctaacaaggtgaaaccccgtctctactaaaaatacaaaaaattagccgggcgcggtggcg

SEQ ID NO: 93038 - DNA, 80 bp, synthetic construct
  misc_feature 1..80: note = Artificially Synthesized Probe
  source 1..80: mol_type = other DNA
gtggtgccgaggcatgaaaggctagtatgagcgagaaaaggagagagcgcgtgcagagacttggtggtgcataatggata

SEQ ID NO: 93039 - DNA, 80 bp, synthetic construct; identical to SEQ ID NO: 33547
  misc_feature 1..80: note = Artificially Synthesized Probe
  source 1..80: mol_type = other DNA

SEQ ID NO: 93040 - DNA, 80 bp, synthetic construct
  misc_feature 1..80: note = Artificially Synthesized Probe
  source 1..80: mol_type = other DNA
aagaacataaagaggacgtgttaatttcttacctgtgcccctaaagcaacacgctaagcattttttaaaattatactcct

SEQ ID NO: 93041 - DNA, 80 bp, synthetic construct
  misc_feature 1..80: note = Artificially Synthesized Probe
  source 1..80: mol_type = other DNA
ctcatctttctgtcattccagccacttcacaaagagctgctgtcgtgtgtgaccaacagaaaagttgcccgttttatttt

SEQ ID NO: 93042 - DNA, 80 bp, synthetic construct
  misc_feature 1..80: note = Artificially Synthesized Probe
  source 1..80: mol_type = other DNA
tttttgtatttttagtggagacggggctactacctcatctaatttttgtatttttagtggagacggggtttcaccacgtt

SEQ ID NO: 93043 - DNA, 80 bp, synthetic construct; identical to SEQ ID NO: 33548
  misc_feature 1..80: note = Artificially Synthesized Probe
  source 1..80: mol_type = other DNA

SEQ ID NO: 93044 - DNA, 80 bp, synthetic construct
  misc_feature 1..80: note = Artificially Synthesized Probe
  source 1..80: mol_type = other DNA
tgcagaagctcatagccagtctcgcaaaagatggagaagctgtctttcaggatgtatttggcttgcacaggtgaaacgtg

SEQ ID NO: 93045 - DNA, 80 bp, synthetic construct
  misc_feature 1..80: note = Artificially Synthesized Probe
  source 1..80: mol_type = other DNA
gtggggtagggttctttaaaaccaaaggcaagattaaactctcaggtgcttttgcaaattaaggtttcttgttttccctg

SEQ ID NO: 93046 - DNA, 80 bp, synthetic construct; identical to SEQ ID NO: 33549
  misc_feature 1..80: note = Artificially Synthesized Probe
  source 1..80: mol_type = other DNA

SEQ ID NO: 93047 - DNA, 80 bp, synthetic construct
  misc_feature 1..80: note = Artificially Synthesized Probe
  source 1..80: mol_type = other DNA
ccataggacagctgttatggcatggggagaaaaaccggctgacagacttgaaactaaagatccaggctgatttggggagc

SEQ ID NO: 93048 - DNA, 80 bp, synthetic construct
  misc_feature 1..80: note = Artificially Synthesized Probe
  source 1..80: mol_type = other DNA
tctcctccctccagcacctgctagcatccagtgatccctgccaagctgctggggcagctgggtgcacctgggtgcccctg

SEQ ID NO: 93049 - DNA, 80 bp, synthetic construct
  misc_feature 1..80: note = Artificially Synthesized Probe
  source 1..80: mol_type = other DNA
gggcctcagagggcagagccagggccagtgggggtggtcctgagaggcagagtgtgtagatcctggctgcaaactgctga

SEQ ID NO: 93050 - DNA, 80 bp, synthetic construct
  misc_feature 1..80: note = Artificially Synthesized Probe
  source 1..80: mol_type = other DNA
cattagatgaatgtgttaagtgaaatgatacttgtactccccctacccctttgtcaactgctgtgaatgctgtatggtgt

SEQ ID NO: 93051 - DNA, 80 bp, synthetic construct; identical to SEQ ID NO: 33550
  misc_feature 1..80: note = Artificially Synthesized Probe
  source 1..80: mol_type = other DNA

SEQ ID NO: 93052 - DNA, 80 bp, synthetic construct
  misc_feature 1..80: note = Artificially Synthesized Probe
  source 1..80: mol_type = other DNA
tgtttctgtgactgttcccttactggactgagcagaggctgtgagaactgtggcttccacgttacatatccctagtagac

SEQ ID NO: 93053 - DNA, 80 bp, synthetic construct
  misc_feature 1..80: note = Artificially Synthesized Probe
  source 1..80: mol_type = other DNA
atgggtgtatggatagatggctggctggatagaaagataagtaaggtagaagaatgggtggatggacagatgaatggctg

SEQ ID NO: 93054 - DNA, 80 bp, synthetic construct
  misc_feature 1..80: note = Artificially Synthesized Probe
  source 1..80: mol_type = other DNA
gatgaatggatgcatggatggatggaagaataggattggtaggtagaaggatgggtgggtggatagatggatagctggaa

SEQ ID NO: 93055 - DNA, 80 bp, synthetic construct; identical to SEQ ID NO: 33551
  misc_feature 1..80: note = Artificially Synthesized Probe
  source 1..80: mol_type = other DNA

SEQ ID NO: 93056 - DNA, 80 bp, synthetic construct
  misc_feature 1..80: note = Artificially Synthesized Probe
  source 1..80: mol_type = other DNA
tggatggaaggatgggtaggtgggtgggtagatgtacagaaggatggatggatggggctgggcgcggtggctcacgcctg

SEQ ID NO: 93057 - DNA, 80 bp, synthetic construct
  misc_feature 1..80: note = Artificially Synthesized Probe
  source 1..80: mol_type = other DNA
caggagacttgcttgttccaggaggcagaggttgcagtgagctgagattgtgccactgcactccagcctggcaacagagc

SEQ ID NO: 93058 - DNA, 80 bp, synthetic construct
  misc_feature 1..80: note = Artificially Synthesized Probe
  source 1..80: mol_type = other DNA
aaggatggatggatgggtatatggatggatggataggattggtaggtaaaataatgggtgggtggatagatggacagctg

SEQ ID NO: 93059 - DNA, 80 bp, synthetic construct; identical to SEQ ID NO: 33552
  misc_feature 1..80: note = Artificially Synthesized Probe
  source 1..80: mol_type = other DNA

SEQ ID NO: 93060 - DNA, 80 bp, synthetic construct
  misc_feature 1..80: note = Artificially Synthesized Probe
  source 1..80: mol_type = other DNA
gaaggatggatagatggatggatggatggatggatggatggaaggatgtgttggtagaaggaagggtagatgggtagatg

SEQ ID NO: 93061 - DNA, 80 bp, synthetic construct
  misc_feature 1..80: note = Artificially Synthesized Probe
  source 1..80: mol_type = other DNA
gttagctacccataagaatgctgtttgctgcagttctgtgtcctgtgcttggatgctttttataagagttgtcattgttg

SEQ ID NO: 93062 - DNA, 80 bp, synthetic construct
  misc_feature 1..80: note = Artificially Synthesized Probe
  source 1..80: mol_type = other DNA
aggatgatggatggatagataggtgtctggaagaattggcagatggatggatggatggatggatggatgagtggatggat

SEQ ID NO: 93063 - DNA, 80 bp, synthetic construct
  misc_feature 1..80: note = Artificially Synthesized Probe
  source 1..80: mol_type = other DNA
aagtgggtgggtgggtggatggatggtggatggatggatggatggatggatggatggatggatggaatgatgggtaggta

SEQ ID NO: 93064 - DNA, 80 bp, synthetic construct; identical to SEQ ID NO: 33553
  misc_feature 1..80: note = Artificially Synthesized Probe
  source 1..80: mol_type = other DNA

SEQ ID NO: 93065 - DNA, 80 bp, synthetic construct
  misc_feature 1..80: note = Artificially Synthesized Probe
  source 1..80: mol_type = other DNA
atgagtggatgggtggatggataagattggtaggtagaaggatgggtgggtggctatatggatagctggaaggaatggat

SEQ ID NO: 93066 - DNA, 80 bp, synthetic construct
  misc_feature 1..80: note = Artificially Synthesized Probe
  source 1..80: mol_type = other DNA
gggtagaaggataggtgaatgaatagatggatagctggaaggatgaatggactgatgatagaagaatggatagttagaag

SEQ ID NO: 93067 - DNA, 80 bp, synthetic construct
  misc_feature 1..80: note = Artificially Synthesized Probe
  source 1..80: mol_type = other DNA
gatgggtggtagaaggatggctgaatagaaggatggatggataggatgggtaggtagaagaatgggtggatggttgtgtg

SEQ ID NO: 93068 - DNA, 80 bp, synthetic construct
  misc_feature 1..80: note = Artificially Synthesized Probe
  source 1..80: mol_type = other DNA
agggagggacagcgggtgcttccccttagaagactgctgcctcagacctcagacaccactaaacctggtgtcccttccta

SEQ ID NO: 93069 - DNA, 80 bp, synthetic construct; identical to SEQ ID NO: 33554
  misc_feature 1..80: note = Artificially Synthesized Probe
  source 1..80: mol_type = other DNA

SEQ ID NO: 93070 - DNA, 80 bp, synthetic construct
  misc_feature 1..80: note = Artificially Synthesized Probe
  source 1..80: mol_type = other DNA
ggccatggattggggtgcccctccccactctgcctcccacacttgtactcgaaggccccagccttggacctccatagagc

SEQ ID NO: 93071 - DNA, 80 bp, synthetic construct
  misc_feature 1..80: note = Artificially Synthesized Probe
  source 1..80: mol_type = other DNA
cagaccttgagaaagtcgtagggacacagggtttcagggtgtgtctccacatcgaaggactccacaaagtccagaatgac

SEQ ID NO: 93072 - DNA, 80 bp, synthetic construct; identical to SEQ ID NO: 33555
  misc_feature 1..80: note = Artificially Synthesized Probe
  source 1..80: mol_type = other DNA

SEQ ID NO: 93073 - DNA, 80 bp, synthetic construct; identical to SEQ ID NO: 33534
  misc_feature 1..80: note = Artificially Synthesized Probe
  source 1..80: mol_type = other DNA

SEQ ID NO: 93074 - DNA, 80 bp, synthetic construct
  misc_feature 1..80: note = Artificially Synthesized Probe
  source 1..80: mol_type = other DNA
tttagctgaaacaggcagcactcgggatggagcgcacaggccctcactcacacccccagggagcgtggtggtgtcctgag

SEQ ID NO: 93075 - DNA, 80 bp, synthetic construct
  misc_feature 1..80: note = Artificially Synthesized Probe
  source 1..80: mol_type = other DNA
aagggccccttcggagctcccctaaattcccttacagccaccccagtgattcccaagtttattcatcaggggtctcctac

SEQ ID NO: 93076 - DNA, 80 bp, synthetic construct
  misc_feature 1..80: note = Artificially Synthesized Probe
  source 1..80: mol_type = other DNA
tcctcgctggaacagctgatgctgctgccacgggcggggtgttgggctgggctctatccctcaaggaaggcttggtcccc

SEQ ID NO: 93077 - DNA, 80 bp, synthetic construct; identical to SEQ ID NO: 33556
  misc_feature 1..80: note = Artificially Synthesized Probe
  source 1..80: mol_type = other DNA

SEQ ID NO: 93078 - DNA, 80 bp, synthetic construct
  misc_feature 1..80: note = Artificially Synthesized Probe
  source 1..80: mol_type = other DNA
aggcagagaggagcgcaccccgccgcctcccgaccctcccaccccagagacacgtggcagcaggtggggtggggccaggt

SEQ ID NO: 93079 - DNA, 80 bp, synthetic construct
  misc_feature 1..80: note = Artificially Synthesized Probe
  source 1..80: mol_type = other DNA
gcaaggagagacaccgagagggagaaaccgagtcgggggaggcagggtcagcgccagcaggtggggctgcccacgcccca

SEQ ID NO: 93080 - DNA, 80 bp, synthetic construct
  misc_feature 1..80: note = Artificially Synthesized Probe
  source 1..80: mol_type = other DNA
cagggtggcactgatgagcctggctgctgagaggggaagcagggctgagaaggggagctggaggcagcagggcctagaag

SEQ ID NO: 93081 - DNA, 80 bp, synthetic construct
  misc_feature 1..80: note = Artificially Synthesized Probe
  source 1..80: mol_type = other DNA
ggagcagtagaaaccgcccaggtggttgtggcagtggtggtcgcaggtgggcgcctctcccggggccacctggcactcgt

SEQ ID NO: 93082 - DNA, 80 bp, synthetic construct
  misc_feature 1..80: note = Artificially Synthesized Probe
  source 1..80: mol_type = other DNA
gcatttgggtgatgttctatttacatggcctgtgtaaatctccattgggaagtcatgccttctaaaaagattcttatttg

SEQ ID NO: 93083 - DNA, 80 bp, synthetic construct; identical to SEQ ID NO: 33557
  misc_feature 1..80: note = Artificially Synthesized Probe
  source 1..80: mol_type = other DNA

SEQ ID NO: 93084 - DNA, 80 bp, synthetic construct
  misc_feature 1..80: note = Artificially Synthesized Probe
  source 1..80: mol_type = other DNA
atcaaacatcctggcagcgctcccgctggcagggccccactttgtcagctgtaaatggggccctcggcccctgcgtcgtt

SEQ ID NO: 93085 - DNA, 80 bp, synthetic construct
  misc_feature 1..80: note = Artificially Synthesized Probe
  source 1..80: mol_type = other DNA
gctttgggaatcagggtggatttggtaatagcagagggggtggagctggtttgggaaacaatcaaggtagtaatatgggt

SEQ ID NO: 93086 - DNA, 80 bp, synthetic construct
  misc_feature 1..80: note = Artificially Synthesized Probe
  source 1..80: mol_type = other DNA
agctaatttttgtagttttagtggagatagagtttcaccgtgttgccctggctggccttgaactcctgacctcaaatgat

SEQ ID NO: 93087 - DNA, 80 bp, synthetic construct; identical to SEQ ID NO: 33558
  misc_feature 1..80: note = Artificially Synthesized Probe
  source 1..80: mol_type = other DNA

SEQ ID NO: 93088 - DNA, 80 bp, synthetic construct
  misc_feature 1..80: note = Artificially Synthesized Probe
  source 1..80: mol_type = other DNA
gtgtccttgccaggggcccgctccgtgtctgtgctctcctgcccgcacagcgtggccagcaccttggcccccgagctcag

SEQ ID NO: 93089 - DNA, 80 bp, synthetic construct
  misc_feature 1..80: note = Artificially Synthesized Probe
  source 1..80: mol_type = other DNA
gacgaagtcgtactcgcagaggtgggagagctccaggtcgaagtgggtgaagtagaggcgcaggcggtagccggggggtg

SEQ ID NO: 93090 - DNA, 80 bp, synthetic construct
  misc_feature 1..80: note = Artificially Synthesized Probe
  source 1..80: mol_type = other DNA
ggggcggtgagggcccaggcctgtgctcccaccccacaccctgcagggaggctgtgggcgcccacctacctcatggtgtg

SEQ ID NO: 93091 - DNA, 80 bp, synthetic construct
  misc_feature 1..80: note = Artificially Synthesized Probe
  source 1..80: mol_type = other DNA
ataaagtagaagaaaccacaaattatcttgtgcctgaaatccattaagaggcctgatagctttaagaattagggtgggtt

SEQ ID NO: 93092 - DNA, 80 bp, synthetic construct
  misc_feature 1..80: note = Artificially Synthesized Probe
  source 1..80: mol_type = other DNA
ttttgtaactaattctgtgagagttgagctcattttctagttggaagaatgtgatatttgttgtgttggtagtttaccta

SEQ ID NO: 93093 - DNA, 80 bp, synthetic construct; identical to SEQ ID NO: 33535
  misc_feature 1..80: note = Artificially Synthesized Probe
  source 1..80: mol_type = other DNA

SEQ ID NO: 93094 - DNA, 80 bp, synthetic construct
  misc_feature 1..80: note = Artificially Synthesized Probe
  source 1..80: mol_type = other DNA
tgtgtaaatttcagttactggtcatagaaggctttcaatgttgagtggccttttattaacatgtttatggtactgcatag

SEQ ID NO: 93095 - DNA, 80 bp, synthetic construct
  misc_feature 1..80: note = Artificially Synthesized Probe
  source 1..80: mol_type = other DNA
tttagtgtctggagtcttactggaaaaacacgatttctttttatatgtgatatacagatgctggaaagttacctttaaaa

SEQ ID NO: 93096 - DNA, 80 bp, synthetic construct
  misc_feature 1..80: note = Artificially Synthesized Probe
  source 1..80: mol_type = other DNA
tttaggaaggaatagccagctaaaaccaaatgagatttttaaagttaaatcagcacttaagttgtgtccttagtaggaaa

SEQ ID NO: 93097 - DNA, 80 bp, synthetic construct
  misc_feature 1..80: note = Artificially Synthesized Probe
  source 1..80: mol_type = other DNA
gttgtgtgatgtgtgcttttgttaggcatcactgtgcccaagtatttcatgttcattgtaaagaggaaaaatacagattt

SEQ ID NO: 93098 - DNA, 80 bp, synthetic construct; identical to SEQ ID NO: 33536
  misc_feature 1..80: note = Artificially Synthesized Probe
  source 1..80: mol_type = other DNA

SEQ ID NO: 93099 - DNA, 80 bp, synthetic construct
  misc_feature 1..80: note = Artificially Synthesized Probe
  source 1..80: mol_type = other DNA
gtcaatacctgggctgaagtatcagtgtttccaacctacctacccaaaaaaaggattcaaggttattcctcaatcagtac

SEQ ID NO: 93100 - DNA, 80 bp, synthetic construct
  misc_feature 1..80: note = Artificially Synthesized Probe
  source 1..80: mol_type = other DNA
taatgaaatgtaatttgagcagtgacattacactgggtgggcaaagatgactgtcactctcgtggtttatgtccccttga

SEQ ID NO: 93101 - DNA, 80 bp, synthetic construct
  misc_feature 1..80: note = Artificially Synthesized Probe
  source 1..80: mol_type = other DNA
agccaaaccaggccttcggttctggaaataactcttatagtggctctaattctggtgcagcaattggttggggatcagca

SEQ ID NO: 93102 - DNA, 80 bp, synthetic construct
  misc_feature 1..80: note = Artificially Synthesized Probe
  source 1..80: mol_type = other DNA
aatgaagaatccttgactgcagacacgcaagttaaaaatcactaattatgttctcgatccagggaatatagttaataact

SEQ ID NO: 93103 - DNA, 80 bp, synthetic construct; identical to SEQ ID NO: 33537
  misc_feature 1..80: note = Artificially Synthesized Probe
  source 1..80: mol_type = other DNA

SEQ ID NO: 93104 - DNA, 80 bp, synthetic construct
  misc_feature 1..80: note = Artificially Synthesized Probe
  source 1..80: mol_type = other DNA
atttaatcagtgctatgtcattgtcaaagccagcatcatgagtataaccttcatgtataaaaacagcttcagaccaggct

SEQ ID NO: 93105 - DNA, 80 bp, synthetic construct
  misc_feature 1..80: note = Artificially Synthesized Probe
  source 1..80: mol_type = other DNA
gcacctgctgctgtggttccacctaatatcaggacttgccaaggaaaatcaccaggttttgccttttgccctccatatat

SEQ ID NO: 93106 - DNA, 80 bp, synthetic construct; identical to SEQ ID NO: 33538
  misc_feature 1..80: note = Artificially Synthesized Probe
  source 1..80: mol_type = other DNA

SEQ ID NO: 93107 - DNA, 80 bp, synthetic construct
  misc_feature 1..80: note = Artificially Synthesized Probe
  source 1..80: mol_type = other DNA
gagtttgagaccagcctggccaacatggtgagaccctgtctctactacatacacaaaaattagccgggcgtggtgatggg

SEQ ID NO: 93108 - DNA, 80 bp, synthetic construct
  misc_feature 1..80: note = Artificially Synthesized Probe
  source 1..80: mol_type = other DNA
gcaggcattgtctgagcagatggactggatgatgtgcataggaattagaaggatataaccttttcattgtttctgttttc

SEQ ID NO: 93109 - DNA, 80 bp, synthetic construct
  misc_feature 1..80: note = Artificially Synthesized Probe
  source 1..80: mol_type = other DNA
ggtctagttgattcttccaaactaagttttattgtatctttattgcaaattaaatacgcccattaatgtagcatatatgt

SEQ ID NO: 93110 - DNA, 80 bp, synthetic construct
  misc_feature 1..80: note = Artificially Synthesized Probe
  source 1..80: mol_type = other DNA
gacagagtctcgctctgtcacccaggttggagtgcagtggtacaatcttggctcactgcaagctctgcctcccaggttca

SEQ ID NO: 93111 - DNA, 80 bp, synthetic construct; identical to SEQ ID NO: 33539
  misc_feature 1..80: note = Artificially Synthesized Probe
  source 1..80: mol_type = other DNA

SEQ ID NO: 93112 - DNA, 80 bp, synthetic construct
  misc_feature 1..80: note = Artificially Synthesized Probe
  source 1..80: mol_type = other DNA
atggtctcgatctcctgacctcgtgatctttccgccttggcctcccaaagtgctgggattacaggcgtgagccaccatgc

SEQ ID NO: 93113 - DNA, 80 bp, synthetic construct
  misc_feature 1..80: note = Artificially Synthesized Probe
  source 1..80: mol_type = other DNA
acatatgtactaagaattttcaaaattggtttgttcagtgtggagtatattcagcagtatttttgacatttttctttaga

SEQ ID NO: 93114 - DNA, 80 bp, synthetic construct
  misc_feature 1..80: note = Artificially Synthesized Probe
  source 1..80: mol_type = other DNA
taaaaaaaaaagtactattaaaaggcagattgcattgatgtttaaaaactagatgttgaaaacaattgcttggggaaatt

SEQ ID NO: 93115 - DNA, 80 bp, synthetic construct
  misc_feature 1..80: note = Artificially Synthesized Probe
  source 1..80: mol_type = other DNA
tataatggtgcgatctgggctcaccgcaacctccaccacctgggttcaagcaattctgcctcagccgctcgagtagctgg

SEQ ID NO: 93116 - DNA, 80 bp, synthetic construct; identical to SEQ ID NO: 33540
  misc_feature 1..80: note = Artificially Synthesized Probe
  source 1..80: mol_type = other DNA

SEQ ID NO: 93117 - DNA, 80 bp, synthetic construct
  misc_feature 1..80: note = Artificially Synthesized Probe
  source 1..80: mol_type = other DNA
tttccatcaattaccagtctcttgtataaatgtatccattaccaggctcacagactgggagtgatttttctcctttggag

SEQ ID NO: 93118 - DNA, 80 bp, synthetic construct
  misc_feature 1..80: note = Artificially Synthesized Probe
  source 1..80: mol_type = other DNA
accattttacatgatttcataaataggaggtctctgcattaccatgtttgcttgcaaagtggaaaccttttagatgtgta

SEQ ID NO: 93119 - DNA, 80 bp, synthetic construct
  misc_feature 1..80: note = Artificially Synthesized Probe
  source 1..80: mol_type = other DNA
cttagcggatgggagaagtggcttttaatcttttgtctagccttagccaaaaatgttggttaaagtttattttcagacca

SEQ ID NO: 93120 - DNA, 80 bp, synthetic construct; identical to SEQ ID NO: 33541
  misc_feature 1..80: note = Artificially Synthesized Probe
  source 1..80: mol_type = other DNA

SEQ ID NO: 93121 - DNA, 80 bp, synthetic construct
  misc_feature 1..80: note = Artificially Synthesized Probe
  source 1..80: mol_type = other DNA
gaggctgaggtgggaggtaactaaatggctgaactgagggggagtcgtccatgtggaggaagaggtgtgctgcctttcct

SEQ ID NO: 93122 - DNA, 80 bp, synthetic construct
  misc_feature 1..80: note = Artificially Synthesized Probe
  source 1..80: mol_type = other DNA
taacacggtgaaaccccgtctctactaaaaatacaaaaaaaaaaaattagccaggcgtggtagcgggcgcctgtagtccc

SEQ ID NO: 93123 - DNA, 80 bp, synthetic construct; identical to SEQ ID NO: 33542
  misc_feature 1..80: note = Artificially Synthesized Probe
  source 1..80: mol_type = other DNA

SEQ ID NO: 93124 - DNA, 80 bp, synthetic construct
  misc_feature 1..80: note = Artificially Synthesized Probe
  source 1..80: mol_type = other DNA
tgaattctttgcatgttcaaaacggaaaccattgattagaactacattctttaccccttgttttaatttgaaccccacca

SEQ ID NO: 93125 - DNA, 80 bp, synthetic construct
  misc_feature 1..80: note = Artificially Synthesized Probe
  source 1..80: mol_type = other DNA
gtctgggcaatagcgaaaccctctctacaaaaggtaaattggctgggcttggtggcgtggtctcagctactcaggaggct

SEQ ID NO: 93126 - DNA, 80 bp, synthetic construct
  misc_feature 1..80: note = Artificially Synthesized Probe
  source 1..80: mol_type = other DNA
tctgatccttttaataaattgaagtttttagaaagacctggaagtctttctaaagctcactgggcacggctcacacgtgt

SEQ ID NO: 93127 - DNA, 80 bp, synthetic construct; identical to SEQ ID NO: 33559
  misc_feature 1..80: note = Artificially Synthesized Probe
  source 1..80: mol_type = other DNA

SEQ ID NO: 93128 - DNA, 80 bp, synthetic construct
  misc_feature 1..80: note = Artificially Synthesized Probe
  source 1..80: mol_type = other DNA
ctgaggccatttccttcctctgggccagatgcaggtcctggacttcactggccaggctcaccagctgggcagaagggggt

SEQ ID NO: 93129 - DNA, 80 bp, synthetic construct
  misc_feature 1..80: note = Artificially Synthesized Probe
  source 1..80: mol_type = other DNA
ccctcctcccctttccctgttctgtgcttacctgctctcacgcaatcacggaggtttcgatactatccacacgctgagga

SEQ ID NO: 93130 - DNA, 80 bp, synthetic construct; identical to SEQ ID NO: 33570
  misc_feature 1..80: note = Artificially Synthesized Probe
  source 1..80: mol_type = other DNA

SEQ ID NO: 93131 - DNA, 80 bp, synthetic construct
  misc_feature 1..80: note = Artificially Synthesized Probe
  source 1..80: mol_type = other DNA
gtgatctgcccgccttgaaatcccttaagtttgagtctgttgcctctttccatctccactactgagctgaatatgttgta

SEQ ID NO: 93132 - DNA, 80 bp, synthetic construct
  misc_feature 1..80: note = Artificially Synthesized Probe
  source 1..80: mol_type = other DNA
ttgggctggctgtcacccttgatagatcatttcaaggtgggtggctctacacaccctttaaaaaaaataattttggccgg

SEQ ID NO: 93133 - DNA, 80 bp, synthetic construct
  misc_feature 1..80: note = Artificially Synthesized Probe
  source 1..80: mol_type = other DNA
gcctgtaattccagctactcaggaggctgaggcaggagaatcgcttgaacctgggaggcggaggttgcggtaagccaaga

SEQ ID NO: 93134 - DNA, 80 bp, synthetic construct; identical to SEQ ID NO: 33571
  misc_feature 1..80: note = Artificially Synthesized Probe
  source 1..80: mol_type = other DNA

SEQ ID NO: 93135 - DNA, 80 bp, synthetic construct
  misc_feature 1..80: note = Artificially Synthesized Probe
  source 1..80: mol_type = other DNA
cccttcctccctcagacccaggagatcaggccccagtccctcctccctcagacccaggagaccagaccccacctccctcc

SEQ ID NO: 93136 - DNA, 80 bp, synthetic construct
  misc_feature 1..80: note = Artificially Synthesized Probe
  source 1..80: mol_type = other DNA
ttgtagagacagggtctcactatattgcccaggctggtcttaaactcctggcctccagcagtcctcccactatgacctcc

SEQ ID NO: 93137 - DNA, 80 bp, synthetic construct
  misc_feature 1..80: note = Artificially Synthesized Probe
  source 1..80: mol_type = other DNA
ttgctcttctacatcctgcccaattggtggccactccttcagtcatcctaaatgcgcgtttcctgctgcaactcagacct

SEQ ID NO: 93138 - DNA, 80 bp, synthetic construct
  misc_feature 1..80: note = Artificially Synthesized Probe
  source 1..80: mol_type = other DNA
cctttatctgagtccatcccatcttgccctgttccacttcaattctccttcagcatccagaacgagttttctttcttttc

SEQ ID NO: 93139 - DNA, 80 bp, synthetic construct; identical to SEQ ID NO: 33572
  misc_feature 1..80: note = Artificially Synthesized Probe
  source 1..80: mol_type = other DNA

SEQ ID NO: 93140 - DNA, 80 bp, synthetic construct
  misc_feature 1..80: note = Artificially Synthesized Probe
  source 1..80: mol_type = other DNA
caccacaacctccgcctcctgggttcaagcaattctcctgcctcagcctcccgagtagctgggattacaggtatgtgcca

SEQ ID NO: 93141 - DNA, 80 bp, synthetic construct
  misc_feature 1..80: note = Artificially Synthesized Probe
  source 1..80: mol_type = other DNA
aacgagtatttttaaacatttaaaactggtcacattgcctcttctggcagcaaaccaaaaatcccctcttccagcagatc

SEQ ID NO: 93142 - DNA, 80 bp, synthetic construct
  misc_feature 1..80: note = Artificially Synthesized Probe
  source 1..80: mol_type = other DNA
ctgaaatgctcctccacgaacccctctctcatccaacctactcctgccaccactgagctcccacagggcacactgaatgc

SEQ ID NO: 93143 - DNA, 80 bp, synthetic construct; identical to SEQ ID NO: 33573
  misc_feature 1..80: note = Artificially Synthesized Probe
  source 1..80: mol_type = other DNA

SEQ ID NO: 93144 - DNA, 80 bp, synthetic construct
  misc_feature 1..80: note = Artificially Synthesized Probe
  source 1..80: mol_type = other DNA
gcccagggcagcaagtgaggtgacgtcccacccccagggtgtgttggaggtaaaatcccggggagccactgaagggggag

SEQ ID NO: 93145 - DNA, 80 bp, synthetic construct
  misc_feature 1..80: note = Artificially Synthesized Probe
  source 1..80: mol_type = other DNA
gataggagaaagtccaggccagagccagggcgtggcaggagctgggcaaaagcaggaggcgcactgtgttgggcacagaa

SEQ ID NO: 93146 - DNA, 80 bp, synthetic construct
  misc_feature 1..80: note = Artificially Synthesized Probe
  source 1..80: mol_type = other DNA
gctacaggcctctgtctccttcagggatccaggagctcgcagccttccatacacactcagtcctatcaagaccctcttct

SEQ ID NO: 93147 - DNA, 80 bp, synthetic construct
  misc_feature 1..80: note = Artificially Synthesized Probe
  source 1..80: mol_type = other DNA
acatagaaacacacaccaacagagaatgaggttaagagaagcttcgggtgaagaccctgcaatcctccactttttcttta

SEQ ID NO: 93148 - DNA, 80 bp, synthetic construct
  misc_feature 1..80: note = Artificially Synthesized Probe
  source 1..80: mol_type = other DNA
agaaagaaaagcagatgaaggccggatgcggtggctcacgcctgtaatcccagcactttggaaggctgaggtgggcagat

SEQ ID NO: 93149 - DNA, 80 bp, synthetic construct; identical to SEQ ID NO: 33574
  misc_feature 1..80: note = Artificially Synthesized Probe
  source 1..80: mol_type = other DNA

SEQ ID NO: 93150 - DNA, 80 bp, synthetic construct
  misc_feature 1..80: note = Artificially Synthesized Probe
  source 1..80: mol_type = other DNA
ctccctctcctccctccaccaaattctcaccagggctgggcctgaatgagggcccaggtcccgaggatggtgaccagaga

SEQ ID NO: 93151 - DNA, 80 bp, synthetic construct
  misc_feature 1..80: note = Artificially Synthesized Probe
  source 1..80: mol_type = other DNA
agggagcctgactcaccggctttcttaaagaggaagccgatggggatggagataagaagaaccactagatacgtccattc

SEQ ID NO: 93152 - DNA, 80 bp, synthetic construct; identical to SEQ ID NO: 33575
  misc_feature 1..80: note = Artificially Synthesized Probe
  source 1..80: mol_type = other DNA

SEQ ID NO: 93153 - DNA, 80 bp, synthetic construct
  misc_feature 1..80: note = Artificially Synthesized Probe
  source 1..80: mol_type = other DNA
aaaaacccagaaacggcacccctcccggacccttcctcttcgacagcccaggaatctagacctccgagccccctcttcca

SEQ ID NO: 93154 - DNA, 80 bp, synthetic construct
  misc_feature 1..80: note = Artificially Synthesized Probe
  source 1..80: mol_type = other DNA
cctctcctactgagaacccggggatcgaacaccctcccctccccaggcccaggcccaggcccagccccaacccgtcccgc

SEQ ID NO: 93155 - DNA, 80 bp, synthetic construct
  misc_feature 1..80: note = Artificially Synthesized Probe
  source 1..80: mol_type = other DNA
cctgagctgctcgccgggcaggaggcggccgagcagtcccagcccgcttgccgccgcagctccggccacgcctcccccgc

SEQ ID NO: 93156 - DNA, 80 bp, synthetic construct
  misc_feature 1..80: note = Artificially Synthesized Probe
  source 1..80: mol_type = other DNA
tccaggtccacactgggatccgagctccgagtacgtgaaggggcgggccttcgggctcggaacaaggaggagccaaaagc

SEQ ID NO: 93157 - DNA, 80 bp, synthetic construct
  misc_feature 1..80: note = Artificially Synthesized Probe
  source 1..80: mol_type = other DNA
ctcactgcaagctccgcctcccaggttcacgccattctcctgcctcagcctcccgagtagctgggactacaggcgcctgc

SEQ ID NO: 93158 - DNA, 80 bp, synthetic construct; identical to SEQ ID NO: 33576
  misc_feature 1..80: note = Artificially Synthesized Probe
  source 1..80: mol_type = other DNA

SEQ ID NO: 93159 - DNA, 80 bp, synthetic construct
  misc_feature 1..80: note = Artificially Synthesized Probe
  source 1..80: mol_type = other DNA
cagcccggtggttcttaacctggggtcccaggtctggcatcagcatcacctgagaacttgtgagacatacaaatccttgt

SEQ ID NO: 93160 - DNA, 80 bp, synthetic construct; identical to SEQ ID NO: 33561
  misc_feature 1..80: note = Artificially Synthesized Probe
  source 1..80: mol_type = other DNA

SEQ ID NO: 93161 - DNA, 80 bp, synthetic construct
  misc_feature 1..80: note = Artificially Synthesized Probe
  source 1..80: mol_type = other DNA
ttttgttgttgttgttcagacggagtctcgctctgccgcccatgctggagtgcagtggtgcaatctcggctcactgcaac

SEQ ID NO: 93162 - DNA, 80 bp, synthetic construct
  misc_feature 1..80: note = Artificially Synthesized Probe
  source 1..80: mol_type = other DNA
aagaggcttcccactcccaggacctgcccccaagctccgaccccacattgtggatgcaaagaaagggaatttgcccaaaa

SEQ ID NO: 93163 - DNA, 80 bp, synthetic construct
  misc_feature 1..80: note = Artificially Synthesized Probe
  source 1..80: mol_type = other DNA
ttgtgatccacccgccgtggcctaccaaagtgctgggattacaggcgtgagccactgcacccagccatttttgtattttt

SEQ ID NO: 93164 - DNA, 80 bp, synthetic construct
  misc_feature 1..80: note = Artificially Synthesized Probe
  source 1..80: mol_type = other DNA
ctatgttgacctggctggtctcgaactcctgagcttaagtgatcctctcaccttggcctcccaaaatactggaattacag

SEQ ID NO: 93165 - DNA, 80 bp, synthetic construct
  misc_feature 1..80: note = Artificially Synthesized Probe
  source 1..80: mol_type = other DNA
tcatggtagcacgtgcctataatcccagctactaggggggctgagacaggaggattgcttgaacctgggagggagaggtt

SEQ ID NO: 93166 - DNA, 80 bp, synthetic construct; identical to SEQ ID NO: 33562
  misc_feature 1..80: note = Artificially Synthesized Probe
  source 1..80: mol_type = other DNA

SEQ ID NO: 93167 - DNA, 80 bp, synthetic construct
  misc_feature 1..80: note = Artificially Synthesized Probe
  source 1..80: mol_type = other DNA
acctcatctctatacattttttaaaaagtaaaaaaaaaataataataatacttaaaaaattttggccgggcatggtgact

SEQ ID NO: 93168 - DNA, 80 bp, synthetic construct
  misc_feature 1..80: note = Artificially Synthesized Probe
  source 1..80: mol_type = other DNA
ctgagatcacaacactgcactccatcctgggtgacagagcatcaaaatactaatactaatactaatactaatactaataa

SEQ ID NO: 93169 - DNA, 80 bp, synthetic construct
  misc_feature 1..80: note = Artificially Synthesized Probe
  source 1..80: mol_type = other DNA
ccaggctggagtgcagtggcgcgatctcggctcactgcaagctccgtctcccgggttcacaccattctcctgcctcagcc

SEQ ID NO: 93170 - DNA, 80 bp, synthetic construct; identical to SEQ ID NO: 33563
  misc_feature 1..80: note = Artificially Synthesized Probe
  source 1..80: mol_type = other DNA

SEQ ID NO: 93171 - DNA, 80 bp, synthetic construct
  misc_feature 1..80: note = Artificially Synthesized Probe
  source 1..80: mol_type = other DNA
tcaccatattgccctgacctcaagatgatccacctgcctgggcctcccaaactgctgggattacaagtgtgagccaccat

SEQ ID NO: 93172 - DNA, 80 bp, synthetic construct
  misc_feature 1..80: note = Artificially Synthesized Probe
  source 1..80: mol_type = other DNA
cagcctcccgagtagctgggactacaggcgcccaccaccacaccagggtaattttttgtatttttagtagagacagcatg

SEQ ID NO: 93173 - DNA, 80 bp, synthetic construct
  misc_feature 1..80: note = Artificially Synthesized Probe
  source 1..80: mol_type = other DNA
gcttcagttgcaggcagggtatttagctggggaagaggaaattctctccaggaccctctccaaggtaaggactctttctg

SEQ ID NO: 93174 - DNA, 80 bp, synthetic construct; identical to SEQ ID NO: 33564
  misc_feature 1..80: note = Artificially Synthesized Probe
  source 1..80: mol_type = other DNA

SEQ ID NO: 93175 - DNA, 80 bp, synthetic construct
  misc_feature 1..80: note = Artificially Synthesized Probe
  source 1..80: mol_type = other DNA
aggaaggctggctattgagtccacaggactcagtacattgcttctgctgagtgaggctgactttacagaagtagcaactg

SEQ ID NO: 93176 - DNA, 80 bp, synthetic construct
  misc_feature 1..80: note = Artificially Synthesized Probe
  source 1..80: mol_type = other DNA
ggagatgtagttctgcagtgtcacctgagactgggcgggctcactcaccgcaggacataggaacgggcaggtgcgctctt

SEQ ID NO: 93177 - DNA, 80 bp, synthetic construct
  misc_feature 1..80: note = Artificially Synthesized Probe
  source 1..80: mol_type = other DNA
gggtggaggatgagggtgggggacagacatgcagctcagccaggccccctcccgacgcctgctagtgtcccagccccgga

SEQ ID NO: 93178 - DNA, 80 bp, synthetic construct
  misc_feature 1..80: note = Artificially Synthesized Probe
  source 1..80: mol_type = other DNA
tggtacctaatggggcccgccacagccatgaaaagccttgaagggctatggttgctaagctatgagtcctttagcaacca

SEQ ID NO: 93179 - DNA, 80 bp, synthetic construct; identical to SEQ ID NO: 33565
  misc_feature 1..80: note = Artificially Synthesized Probe
  source 1..80: mol_type = other DNA

SEQ ID NO: 93180 - DNA, 80 bp, synthetic construct
  misc_feature 1..80: note = Artificially Synthesized Probe
  source 1..80: mol_type = other DNA
tgaggaccgagcagatttagaaaaaccttcaattcctgcttggctttactagggggacatcctctctctagcagctggag

SEQ ID NO: 93181 - DNA, 80 bp, synthetic construct
  misc_feature 1..80: note = Artificially Synthesized Probe
  source 1..80: mol_type = other DNA
cagtccaagcccctgggggaaggctgactgcagctgtcaggaacacaagggcagtctactcctggttgccgggggtgcca

SEQ ID NO: 93182 - DNA, 80 bp, synthetic construct; identical to SEQ ID NO: 33566
  misc_feature 1..80: note = Artificially Synthesized Probe
  source 1..80: mol_type = other DNA

SEQ ID NO: 93183 - DNA, 80 bp, synthetic construct
  misc_feature 1..80: note = Artificially Synthesized Probe
  source 1..80: mol_type = other DNA
actgttgctagggatcctgcttccctagcaaatagtggcgttctgttgctagggaaccgtttccctagcaacagagggtg

SEQ ID NO: 93184 - DNA, 80 bp, synthetic construct
  misc_feature 1..80: note = Artificially Synthesized Probe
  source 1..80: mol_type = other DNA
ccagccccagccccagggctgccagggccaggaagtggatacagaagtagatggaggcccagtaccgaagggtgtcggcc

SEQ ID NO: 93185 - DNA, 80 bp, synthetic construct
  misc_feature 1..80: note = Artificially Synthesized Probe
  source 1..80: mol_type = other DNA
gacaagcgctagcaacaaggggcatctgtcagtaccagggatcttttccctaccgacaggggctggcaggccatggttgc

SEQ ID NO: 93186 - DNA, 80 bp, synthetic construct
  misc_feature 1..80: note = Artificially Synthesized Probe
  source 1..80: mol_type = other DNA
gcattggagggtggggccgcctccggcccgggctttggcggccacggggtaggccccaaagccggcggcaatgcagccgc

SEQ ID NO: 93187 - DNA, 80 bp, synthetic construct
  misc_feature 1..80: note = Artificially Synthesized Probe
  source 1..80: mol_type = other DNA
gcaggccgaagagcggggccggccaggcgcggcgcagcaggggccgcaggctgggcactgccccggggaagggctgctcc

SEQ ID NO: 93188 - DNA, 80 bp, synthetic construct; identical to SEQ ID NO: 33567
  misc_feature 1..80: note = Artificially Synthesized Probe
  source 1..80: mol_type = other DNA

SEQ ID NO: 93189 - DNA, 80 bp, synthetic construct
  misc_feature 1..80: note = Artificially Synthesized Probe
  source 1..80: mol_type = other DNA
aagaccccatcactacaaaaaataaaaatcagccaggtgtggagggcacctgaattcccagctactggggaggctgaggc

SEQ ID NO: 93190 - DNA, 80 bp, synthetic construct
  misc_feature 1..80: note = Artificially Synthesized Probe
  source 1..80: mol_type = other DNA
gaagaagggagggaaggagggaaggaaggagggagggagggaaggagggaaggaaggagggagggaaggagggaaggaag

SEQ ID NO: 93191 - DNA, 80 bp, synthetic construct
  misc_feature 1..80: note = Artificially Synthesized Probe
  source 1..80: mol_type = other DNA
aggagggaaggaaggagggagggaaggagggaaggaaggagggagggaaggaaggagggagggagggaaggagggaagga

SEQ ID NO: 93192 - DNA, 80 bp, synthetic construct
  misc_feature 1..80: note = Artificially Synthesized Probe
  source 1..80: mol_type = other DNA
gaagggaccggggttaaaatttttatatgttcacaaaggccgtatgtttaggtcaatgtagcatgggaagataaaaggaa

SEQ ID NO: 93193 - DNA, 80 bp, synthetic construct; identical to SEQ ID NO: 33568
  misc_feature 1..80: note = Artificially Synthesized Probe
  source 1..80: mol_type = other DNA

SEQ ID NO: 93194 - DNA, 80 bp, synthetic construct
  misc_feature 1..80: note = Artificially Synthesized Probe
  source 1..80: mol_type = other DNA
tatatatacacacatgcacacacacatacatatgtattttttgagatggagtcttgctctgttgcccaggatggagtgca

SEQ ID NO: 93195 - DNA, 80 bp, synthetic construct; identical to SEQ ID NO: 33560
  misc_feature 1..80: note = Artificially Synthesized Probe
  source 1..80: mol_type = other DNA

SEQ ID NO: 93196 - DNA, 80 bp, synthetic construct
  misc_feature 1..80: note = Artificially Synthesized Probe
  source 1..80: mol_type = other DNA
tctcaaactcctgacctcaggtgatctgcctgtctcagcctcccaaagtgctgggattacaggcgtgagccactgcgccc

SEQ ID NO: 93197 - DNA, 80 bp, synthetic construct; identical to SEQ ID NO: 33569
  misc_feature 1..80: note = Artificially Synthesized Probe
  source 1..80: mol_type = other DNA

SEQ ID NO: 93198 - DNA, 80 bp, synthetic construct
  misc_feature 1..80: note = Artificially Synthesized Probe
  source 1..80: mol_type = other DNA
acatgcccaccctcacagcagcagatgctaggatggaggttgccctgggcagggcgggaacacagaacaggcactcaggg

SEQ ID NO: 93199 - DNA, 80 bp, synthetic construct
  misc_feature 1..80: note = Artificially Synthesized Probe
  source 1..80: mol_type = other DNA
gcagtgcccagaattgaaggcgaagccccagaagcatgttttgcagagaagtgcccagggaagctctgagggcccatgta

SEQ ID NO: 93200 - DNA, 80 bp, synthetic construct
  misc_feature 1..80: note = Artificially Synthesized Probe
  source 1..80: mol_type = other DNA
agaagagccggtgttccagggacaatgcagcagaggctgagcccaggcctgctgtcctgagaggtggctggatcactgac

SEQ ID NO: 93201 - DNA, 80 bp, synthetic construct
  misc_feature 1..80: note = Artificially Synthesized Probe
  source 1..80: mol_type = other DNA
ctgaggcgcacgtggctccccgggtgcccacaggcagcgtggctcaccagccgggcccttttccactgagccagaacccc

SEQ ID NO: 93202 - DNA, 80 bp, synthetic construct
  misc_feature 1..80: note = Artificially Synthesized Probe
  source 1..80: mol_type = other DNA
ggtgggactgttggtccggcggtgacccccacctccatgtctgtggccgcagctggacaggccactccctgggccacaga

SEQ ID NO: 93203 - DNA, 80 bp, synthetic construct
  misc_feature 1..80: note = Artificially Synthesized Probe
  source 1..80: mol_type = other DNA
tgtgtgggtaaacatttgtatgtgcacgcgtgtgtgggtaaacgtgtgtgcgcacgtatgtatgtgtgtacatttgtatg

SEQ ID NO: 93204 - DNA, 80 bp, synthetic construct; identical to SEQ ID NO: 33579
  misc_feature 1..80: note = Artificially Synthesized Probe
  source 1..80: mol_type = other DNA

SEQ ID NO: 93205 - DNA, 80 bp, synthetic construct
  misc_feature 1..80: note = Artificially Synthesized Probe
  source 1..80: mol_type = other DNA
gggtgcacatttgtgtgtgcgcctgtgtgtgtgggtgcacatttgtgtgtgtgtgcgcctgtgtgtgtgggtgcctgtgt

SEQ ID NO: 93206 - DNA, 80 bp, synthetic construct
  misc_feature 1..80: note = Artificially Synthesized Probe
  source 1..80: mol_type = other DNA
ggcggaggctgcagccagacagcatcagaagccagcgtggttctggaaggatcgagaacaccaaggtgttagggctgcag

SEQ ID NO: 93207 - DNA, 80 bp, synthetic construct
  misc_feature 1..80: note = Artificially Synthesized Probe
  source 1..80: mol_type = other DNA
ggtgcacatttgtgtgtgtgtgtgcctgtgtgtgtgggtgcacatttgtgtgtgtgtgcctgtgtgtgtgggtgcacatt

SEQ ID NO: 93208 - DNA, 80 bp, synthetic construct
  misc_feature 1..80: note = Artificially Synthesized Probe
  source 1..80: mol_type = other DNA
tgtgtgcctgtgtgtgtgttgcaggccctggatgccagacactgaataaacgcaggaagacgtctgtcttcattctcctc

SEQ ID NO: 93209 - DNA, 80 bp, synthetic construct; identical to SEQ ID NO: 33580
  misc_feature 1..80: note = Artificially Synthesized Probe
  source 1..80: mol_type = other DNA

SEQ ID NO: 93210 - DNA, 80 bp, synthetic construct
  misc_feature 1..80: note = Artificially Synthesized Probe
  source 1..80: mol_type = other DNA
cctttcaagtcccgggctggggggtagcagtggaggctggggttaaccgccgtccgtctcaaaggcctcattgtggagct

SEQ ID NO: 93211 - DNA, 80 bp, synthetic construct
  misc_feature 1..80: note = Artificially Synthesized Probe
  source 1..80: mol_type = other DNA
ccagtggagccgtcttccttcccgaggcagaggcttggccttctcacaccttgggacccttctctcccctgtgctcatgc

SEQ ID NO: 93212 - DNA, 80 bp, synthetic construct
  misc_feature 1..80: note = Artificially Synthesized Probe
  source 1..80: mol_type = other DNA
cctgccgatttgaagatggtttgaccaagtctcccaaagctgaagagaggtccctgcccatgtcccccgggtggcaatcc

SEQ ID NO: 93213 - DNA, 80 bp, synthetic construct; identical to SEQ ID NO: 33581
  misc_feature 1..80: note = Artificially Synthesized Probe
  source 1..80: mol_type = other DNA

SEQ ID NO: 93214 - DNA, 80 bp, synthetic construct
  misc_feature 1..80: note = Artificially Synthesized Probe
  source 1..80: mol_type = other DNA
gtcaggagatcaagaccgtcctggccaacatggtgaaaccccatctctactaaaaaaaatacaaaaatttgccgggtgtg

SEQ ID NO: 93215 - DNA, 80 bp, synthetic construct
  misc_feature 1..80: note = Artificially Synthesized Probe
  source 1..80: mol_type = other DNA
agatggggtgtgggggctcatccctgtaatctcagcattttgggaggctgaggcggaccgatcacctgaggtcaggagtt

SEQ ID NO: 93216 - DNA, 80 bp, synthetic construct
  misc_feature 1..80: note = Artificially Synthesized Probe
  source 1..80: mol_type = other DNA
ccactacactccagcctgcgcgacagagtgaaactgtctcaaaataaataaatacataaaaattatatgtatatatatat

SEQ ID NO: 93217 - DNA, 80 bp, synthetic construct; identical to SEQ ID NO: 33577
  misc_feature 1..80: note = Artificially Synthesized Probe
  source 1..80: mol_type = other DNA

SEQ ID NO: 93218 - DNA, 80 bp, synthetic construct
  misc_feature 1..80: note = Artificially Synthesized Probe
  source 1..80: mol_type = other DNA
ctgatttttgtatttttagtagagatggagtttcaccatattacccaagctggtcttgaactcctgacctcatgatccgc

SEQ ID NO: 93219 - DNA, 80 bp, synthetic construct; identical to SEQ ID NO: 33582
  misc_feature 1..80: note = Artificially Synthesized Probe
  source 1..80: mol_type = other DNA

SEQ ID NO: 93220 - DNA, 80 bp, synthetic construct
  misc_feature 1..80: note = Artificially Synthesized Probe
  source 1..80: mol_type = other DNA
tgtaacaagtatttactgtaccagtaaatatgaaaaatattaatgtcctcacacacatggaggtggcttgtgagtggtgt

SEQ ID NO: 93221 - DNA, 80 bp, synthetic construct
  misc_feature 1..80: note = Artificially Synthesized Probe
  source 1..80: mol_type = other DNA
tccacccttcagcacagacgcagtcttcagcaaggaagtgctgggaacgccctggagtgaacccaggaagatgcctgcag

SEQ ID NO: 93222 - DNA, 80 bp, synthetic construct
  misc_feature 1..80: note = Artificially Synthesized Probe
  source 1..80: mol_type = other DNA
tggcgcgccgcccggggagggcgggagcagcgtcccgggtgcccctgtgaggatgagcgacgagatgactggagggtccc

SEQ ID NO: 93223 - DNA, 80 bp, synthetic construct; identical to SEQ ID NO: 33583
  misc_feature 1..80: note = Artificially Synthesized Probe
  source 1..80: mol_type = other DNA

SEQ ID NO: 93224 - DNA, 80 bp, synthetic construct
  misc_feature 1..80: note = Artificially Synthesized Probe
  source 1..80: mol_type = other DNA
ctgacgaggggaggggtgaagggtggggcctctggagagggcaggtcccggggaagctccggactcctagaggggcggcc

SEQ ID NO: 93225 - DNA, 80 bp, synthetic construct
  misc_feature 1..80: note = Artificially Synthesized Probe
  source 1..80: mol_type = other DNA
ctctgagaacgactttttaaaacgcagagaaaagctccattcttcccaggacctcagcgcagccctggcccaggaaggca

SEQ ID NO: 93226 - DNA, 80 bp, synthetic construct; identical to SEQ ID NO: 33584
  misc_feature 1..80: note = Artificially Synthesized Probe
  source 1..80: mol_type = other DNA

SEQ ID NO: 93227 - DNA, 80 bp, synthetic construct
  misc_feature 1..80: note = Artificially Synthesized Probe
  source 1..80: mol_type = other DNA
gctggccatttctaggagcggtgccctgaggtcccagctgtgatagccccacgctctgcaggaagagatcatgggggcgg

SEQ ID NO: 93228 - DNA, 80 bp, synthetic construct
  misc_feature 1..80: note = Artificially Synthesized Probe
  source 1..80: mol_type = other DNA
tccacccccacagccatcccccagctggggctggctgccaaccagacaggagcccggtgcctggaggtgtccatctctga

SEQ ID NO: 93229 - DNA, 80 bp, synthetic construct
  misc_feature 1..80: note = Artificially Synthesized Probe
  source 1..80: mol_type = other DNA
gccgtcatcctcctgctggaggccggtgcactggtggcccgggctgcggtgctgcagcagctggacaatgtcattgacgt

SEQ ID NO: 93230 - DNA, 80 bp, synthetic construct
  misc_feature 1..80: note = Artificially Synthesized Probe
  source 1..80: mol_type = other DNA
agcacgctcttcatcgcctactacgaccacgtggccgtcctgctgtgcctcgtggtcttcttcctggctatgctggtgct

SEQ ID NO: 93231 - DNA, 80 bp, synthetic construct
  misc_feature 1..80: note = Artificially Synthesized Probe
  source 1..80: mol_type = other DNA
cccttcttcctgcatctcacactcatcgtcctctgccccgagcaccccacgtgcggctgcatcttcaagaacttcaacct

SEQ ID NO: 93232 - DNA, 80 bp, synthetic construct; identical to SEQ ID NO: 33585
  misc_feature 1..80: note = Artificially Synthesized Probe
  source 1..80: mol_type = other DNA

SEQ ID NO: 93233 - DNA, 80 bp, synthetic construct
  misc_feature 1..80: note = Artificially Synthesized Probe
  source 1..80: mol_type = other DNA
aaagagacattttccgcccactcctgggacactccgtctgctccaatgactgagcagcatccaccccaccccatctttgc

SEQ ID NO: 93234 - DNA, 80 bp, synthetic construct
  misc_feature 1..80: note = Artificially Synthesized Probe
  source 1..80: mol_type = other DNA
gtgccaagagctactcccacagcagccccaggagaaggggctttgtgaccagaaagcttcatccacagccttgcagcggc

SEQ ID NO: 93235 - DNA, 80 bp, synthetic construct; identical to SEQ ID NO: 33586
  misc_feature 1..80: note = Artificially Synthesized Probe
  source 1..80: mol_type = other DNA

SEQ ID NO: 93236 - DNA, 80 bp, synthetic construct; identical to SEQ ID NO: 33578
  misc_feature 1..80: note = Artificially Synthesized Probe
  source 1..80: mol_type = other DNA

SEQ ID NO: 93237 - DNA, 80 bp, synthetic construct; identical to SEQ ID NO: 33587
  misc_feature 1..80: note = Artificially Synthesized Probe
  source 1..80: mol_type = other DNA

SEQ ID NO: 93238 - DNA, 80 bp, synthetic construct
  misc_feature 1..80: note = Artificially Synthesized Probe
  source 1..80: mol_type = other DNA
ggtgggagggccctgcacgcggcccccggtggggaaggggacgggccagggattcagactcgggctctcccctcaggatg

SEQ ID NO: 93239 - DNA, 80 bp, synthetic construct
  misc_feature 1..80: note = Artificially Synthesized Probe
  source 1..80: mol_type = other DNA
aggcggctcccgagggagtctccccgtgccccagtcctgaactctgttcctcgcgcgttgtagataaggtgaagaagggc

SEQ ID NO: 93240 - DNA, 80 bp, synthetic construct
  misc_feature 1..80: note = Artificially Synthesized Probe
  source 1..80: mol_type = other DNA
gagggcaggagacggggggcacagcctcgccgaagcctgggcggacccttggcggagggcggggccgcgggccgcgcagc

SEQ ID NO: 93241 - DNA, 80 bp, synthetic construct; identical to SEQ ID NO: 33588
  misc_feature 1..80: note = Artificially Synthesized Probe
  source 1..80: mol_type = other DNA

SEQ ID NO: 93242 - DNA, 80 bp, synthetic construct
  misc_feature 1..80: note = Artificially Synthesized Probe
  source 1..80: mol_type = other DNA
cagacggctcctgtcagcgccaagtttcaccaaatccaggcctgcgggctcctcccccaggacccccactcgcagtccct

SEQ ID NO: 93243 - DNA, 80 bp, synthetic construct
  misc_feature 1..80: note = Artificially Synthesized Probe
  source 1..80: mol_type = other DNA
caaactactccattggagcatctggcttaggacccagggagagtgtcctggaacggcttgcctttgtcagctctccagcc

SEQ ID NO: 93244 - DNA, 80 bp, synthetic construct
  misc_feature 1..80: note = Artificially Synthesized Probe
  source 1..80: mol_type = other DNA
ggactaggactggaaacttgaaggttttctgatcccaagtggaaataggaagctggggatgtcccatgtccacatcacaa

SEQ ID NO: 93245 - DNA, 80 bp, synthetic construct
  misc_feature 1..80: note = Artificially Synthesized Probe
  source 1..80: mol_type = other DNA
agggaaaggactagacgccaagcctggatgccaaggagcccctggtgtcacatggggcctggcccacgccctccctctcc

SEQ ID NO: 93246 - DNA, 80 bp, synthetic construct; identical to SEQ ID NO: 33589
  misc_feature 1..80: note = Artificially Synthesized Probe
  source 1..80: mol_type = other DNA

SEQ ID NO: 93247 - DNA, 80 bp, synthetic construct
  misc_feature 1..80: note = Artificially Synthesized Probe
  source 1..80: mol_type = other DNA
ccggccgtggaggggagcgggtcccgcgggttatacaggcgccggggctccgcggcaggcaagagaagctgaggcctgag

SEQ ID NO: 93248 - DNA, 80 bp, synthetic construct
  misc_feature 1..80: note = Artificially Synthesized Probe
  source 1..80: mol_type = other DNA
caccggcggggagacgcgaggacgcggggccgggaacacggacgccggagtagaagcgcggggggcgcgggctggagcgg

SEQ ID NO: 93249 - DNA, 80 bp, synthetic construct
  misc_feature 1..80: note = Artificially Synthesized Probe
  source 1..80: mol_type = other DNA
ggagcgaagcagcgcgggcagcgagcgagtgagcgcgcggcggcccctggtccgcccggccgcggccgatctaggggctg

SEQ ID NO: 93250 - DNA, 80 bp, synthetic construct
  misc_feature 1..80: note = Artificially Synthesized Probe
  source 1..80: mol_type = other DNA
gcgctgacgcctggcagggagaaggcggcagcacatgctgggctcgggggcgatgggcttgtgcgcggacctggcgacgc

SEQ ID NO: 93251 - DNA, 80 bp, synthetic construct; identical to SEQ ID NO: 33600
  misc_feature 1..80: note = Artificially Synthesized Probe
  source 1..80: mol_type = other DNA

SEQ ID NO: 93252 - DNA, 80 bp, synthetic construct
  misc_feature 1..80: note = Artificially Synthesized Probe
  source 1..80: mol_type = other DNA
ctgcttctaaattatttttgaaaaccttattaccaaattttcatgtcactggcagtatatgaatatacctgttctaatcc

SEQ ID NO: 93253 - DNA, 80 bp, synthetic construct
  misc_feature 1..80: note = Artificially Synthesized Probe
  source 1..80: mol_type = other DNA
tgtttttgatgttagattgggtctcctgctgaataaaaagtgctgagcaaacagcataagctaaaggtgttccttgggaa

SEQ ID NO: 93254 - DNA, 80 bp, synthetic construct
  misc_feature 1..80: note = Artificially Synthesized Probe
  source 1..80: mol_type = other DNA
gagatgctgtttaaaaacacctaggtgaaagtaaacaaggtgccttcaagtattttcacatagcatgatttttacaatgt

SEQ ID NO: 93255 - DNA, 80 bp, synthetic construct; identical to SEQ ID NO: 33601
  misc_feature 1..80: note = Artificially Synthesized Probe
  source 1..80: mol_type = other DNA

SEQ ID NO: 93256 - DNA, 80 bp, synthetic construct
  misc_feature 1..80: note = Artificially Synthesized Probe
  source 1..80: mol_type = other DNA
attacttaattagaatccttcagcctatttatctgtttgagtggataaaatgtcctctaggtgtgggatagtggggcagg

SEQ ID NO: 93257 - DNA, 80 bp, synthetic construct
  misc_feature 1..80: note = Artificially Synthesized Probe
  source 1..80: mol_type = other DNA
caggagtttgagaccagccaggccaacatggcaaaaccccatctctactaaaagtataaaaattggccaggcatggtggc

SEQ ID NO: 93258 - DNA, 80 bp, synthetic construct
  misc_feature 1..80: note = Artificially Synthesized Probe
  source 1..80: mol_type = other DNA
aaaaaacctcaaggattttgttgtcagcaccagaaggctcttgcacatttgaattgcttttaaaaaaacattaaatgttg

SEQ ID NO: 93259 - DNA, 80 bp, synthetic construct
  misc_feature 1..80: note = Artificially Synthesized Probe
  source 1..80: mol_type = other DNA
cgttttctctttatggaagtctgttaagccaagatagggctgaagctcctgtgcaactgtaggtctggtgaaagggaggg

SEQ ID NO: 93260 - DNA, 80 bp, synthetic construct
  misc_feature 1..80: note = Artificially Synthesized Probe
  source 1..80: mol_type = other DNA
agacgcagactatgagggtcaggctggcagagagagctgtcctcatgacttcatcctgtgtatgtgggctttcctttcct

SEQ ID NO: 93261 - DNA, 80 bp, synthetic construct; identical to SEQ ID NO: 33602
  misc_feature 1..80: note = Artificially Synthesized Probe
  source 1..80: mol_type = other DNA

SEQ ID NO: 93262 - DNA, 80 bp, synthetic construct
  misc_feature 1..80: note = Artificially Synthesized Probe
  source 1..80: mol_type = other DNA
tagaagggccatctttagatacagcggcacctaaatggtaatctgataatatttcaagtagacataattaaactatggga

SEQ ID NO: 93263 - DNA, 80 bp, synthetic construct
  misc_feature 1..80: note = Artificially Synthesized Probe
  source 1..80: mol_type = other DNA
atgtgctttttcaatgcattagatagcaagttctagtggaggacctagtaacagctatatcagaaggagtgaggagtgta

SEQ ID NO: 93264 - DNA, 80 bp, synthetic construct
  misc_feature 1..80: note = Artificially Synthesized Probe
  source 1..80: mol_type = other DNA
tgactttaaatgaaacgttataatggaaccaattttttttctcatcaatgttttaaagaaaggatgttattcaaggacct

SEQ ID NO: 93265 - DNA, 80 bp, synthetic construct; identical to SEQ ID NO: 33603
  misc_feature 1..80: note = Artificially Synthesized Probe
  source 1..80: mol_type = other DNA

SEQ ID NO: 93266 - DNA, 80 bp, synthetic construct
  misc_feature 1..80: note = Artificially Synthesized Probe
  source 1..80: mol_type = other DNA
aatgctaaggggagtcagagcctggttatcagcattttggatgaccatatattttctccccgtttcactatctttaagat

SEQ ID NO: 93267 - DNA, 80 bp, synthetic construct; identical to SEQ ID NO: 33591
  misc_feature 1..80: note = Artificially Synthesized Probe
  source 1..80: mol_type = other DNA

SEQ ID NO: 93268 - DNA, 80 bp, synthetic construct
  misc_feature 1..80: note = Artificially Synthesized Probe
  source 1..80: mol_type = other DNA
gataatgggcttgcctttgacctaaatgtaggtaggctgggtgaggtggcttgcacctgtaatcccagcactttgggagg

SEQ ID NO: 93269 - DNA, 80 bp, synthetic construct; identical to SEQ ID NO: 33604
  misc_feature 1..80: note = Artificially Synthesized Probe
  source 1..80: mol_type = other DNA

SEQ ID NO: 93270 - DNA, 80 bp, synthetic construct
  misc_feature 1..80: note = Artificially Synthesized Probe
  source 1..80: mol_type = other DNA
gaaattacagctatggaaagatctgtgtcacaagcttgatgtttgaacaaattaggatcctactctaaacttgaatatat

SEQ ID NO: 93271 - DNA, 80 bp, synthetic construct
  misc_feature 1..80: note = Artificially Synthesized Probe
  source 1..80: mol_type = other DNA
gatttagttcctagtataaaaccttttgccccggtgaggatcttcctctgggttcttgagctttacctccacttattccc

SEQ ID NO: 93272 - DNA, 80 bp, synthetic construct
  misc_feature 1..80: note = Artificially Synthesized Probe
  source 1..80: mol_type = other DNA
cttgatattttaaagcaaaggtgttggccgcttgccagggaagtagaaggaattcataaatcacttatgggtcagactgc

SEQ ID NO: 93273 - DNA, 80 bp, synthetic construct; identical to SEQ ID NO: 33605
  misc_feature 1..80: note = Artificially Synthesized Probe
  source 1..80: mol_type = other DNA

SEQ ID NO: 93274 - DNA, 80 bp, synthetic construct
  misc_feature 1..80: note = Artificially Synthesized Probe
  source 1..80: mol_type = other DNA
tgttagtattaaatgcttcaaagtattgaatcatggttgtgaaagtagcctagtgcctccctcaaggtacaaggctcttc

SEQ ID NO: 93275 - DNA, 80 bp, synthetic construct
  misc_feature 1..80: note = Artificially Synthesized Probe
  source 1..80: mol_type = other DNA
ataagactctgacttctagccacctggctcagtgtagcttccagtgtttttactgatggctttgctggggattgtatgtt

SEQ ID NO: 93276 - DNA, 80 bp, synthetic construct
  misc_feature 1..80: note = Artificially Synthesized Probe
  source 1..80: mol_type = other DNA
cacaaaaataactgtcctggagttgccaggcagaatgagtagaatacatgagtttgagttctaaaatgtggcagtggtgt

SEQ ID NO: 93277 - DNA, 80 bp, synthetic construct
  misc_feature 1..80: note = Artificially Synthesized Probe
  source 1..80: mol_type = other DNA
tgggcgaatcatatgaggtcaggagtttagagaccagcctggccaacatgatgaaaccccgtgtctactaaaaatacaaa

SEQ ID NO: 93278 - DNA, 80 bp, synthetic construct
  misc_feature 1..80: note = Artificially Synthesized Probe
  source 1..80: mol_type = other DNA
aagctattctcctgcctcagcctcccaagtagctgggactacaggcacacaccactacacatggctaatttttgtatttt

SEQ ID NO: 93279 - DNA, 80 bp, synthetic construct; identical to SEQ ID NO: 33606
  misc_feature 1..80: note = Artificially Synthesized Probe
  source 1..80: mol_type = other DNA

SEQ ID NO: 93280 - DNA, 80 bp, synthetic construct
  misc_feature 1..80: note = Artificially Synthesized Probe
  source 1..80: mol_type = other DNA
aaaacaaaccaacaaatgaggaaaccgagttgaaagatctgtgttatatgtttgagtcagagaggtaggtagtggtggag

SEQ ID NO: 93281 - DNA, 80 bp, synthetic construct
  misc_feature 1..80: note = Artificially Synthesized Probe
  source 1..80: mol_type = other DNA
gtggttaactctagaggttaacagaaatggataaattaagtgggacatttccaggaatgctaaactgcttctggattaag

SEQ ID NO: 93282 - DNA, 80 bp, synthetic construct
  misc_feature 1..80: note = Artificially Synthesized Probe
  source 1..80: mol_type = other DNA
ctgtaactatccccagtgagtatttttgtattattgataggaaactgaaggactatagggttaaagtaatcgcaactcct

SEQ ID NO: 93283 - DNA, 80 bp, synthetic construct; identical to SEQ ID NO: 33607
  misc_feature 1..80: note = Artificially Synthesized Probe
  source 1..80: mol_type = other DNA

SEQ ID NO: 93284 - DNA, 80 bp, synthetic construct
  misc_feature 1..80: note = Artificially Synthesized Probe
  source 1..80: mol_type = other DNA
ggtggtttgtgcttatttgtcttttcattcttacagatttaaaaaaaaattatggtgtttcacacatagtgattagtgct

SEQ ID NO: 93285 - DNA, 80 bp, synthetic construct
  misc_feature 1..80: note = Artificially Synthesized Probe
  source 1..80: mol_type = other DNA
tggttgtctgtaggaggagatgtgtccaatgaatgaactggtacgtgcctagcagttttttagaggttacctaataaaac

SEQ ID NO: 93286 - DNA, 80 bp, synthetic construct
  misc_feature 1..80: note = Artificially Synthesized Probe
  source 1..80: mol_type = other DNA
ctgggcaacatagtgagaaaaatttttctctacagataatttaaaagttagccaagtgtggtgttgcacacctgtatgta

SEQ ID NO: 93287 - DNA, 80 bp, synthetic construct; identical to SEQ ID NO: 33608
  misc_feature 1..80: note = Artificially Synthesized Probe
  source 1..80: mol_type = other DNA

SEQ ID NO: 93288 - DNA, 80 bp, synthetic construct
  misc_feature 1..80: note = Artificially Synthesized Probe
  source 1..80: mol_type = other DNA
attggctctagccattgtctttaacctcgctggctgttcatccaggaaacaataaaaagattgagttgaggaatcttatt

SEQ ID NO: 93289 - DNA, 80 bp, synthetic construct
  misc_feature 1..80: note = Artificially Synthesized Probe
  source 1..80: mol_type = other DNA
atgtgattttattgatgataatgtcttcaatttgccttgccctcagtacaaagcagcatgttgtaccaagggttctgggc

SEQ ID NO: 93290 - DNA, 80 bp, synthetic construct
  misc_feature 1..80: note = Artificially Synthesized Probe
  source 1..80: mol_type = other DNA
tttgtttgttttagtctgattgtaaagccaattcattggtttaggctgagcagatggcaaggagagattgagaagagctc

SEQ ID NO: 93291 - DNA, 80 bp, synthetic construct
  misc_feature 1..80: note = Artificially Synthesized Probe
  source 1..80: mol_type = other DNA
tataattttaaataaaataccccctctctcatctcctcctgggattaagggaagatccttggttatctctgcttgggcag

SEQ ID NO: 93292 - DNA, 80 bp, synthetic construct; identical to SEQ ID NO: 33609
  misc_feature 1..80: note = Artificially Synthesized Probe
  source 1..80: mol_type = other DNA

SEQ ID NO: 93293 - DNA, 80 bp, synthetic construct
  misc_feature 1..80: note = Artificially Synthesized Probe
  source 1..80: mol_type = other DNA
acagctagaggatcccatgggcttcttgaatgcatatatgggcttcatcaactccttctgagctggaaagagtagcttcc

SEQ ID NO: 93294 - DNA, 80 bp, synthetic construct
  misc_feature 1..80: note = Artificially Synthesized Probe
  source 1..80: mol_type = other DNA
ctgactaaggttgacataatagtccacctcccattactttgatatctgatcaaatgtatagacttggctttgttttttgt

SEQ ID NO: 93295 - DNA, 80 bp, synthetic construct; identical to SEQ ID NO: 33610
  misc_feature 1..80: note = Artificially Synthesized Probe
  source 1..80: mol_type = other DNA

SEQ ID NO: 93296 - DNA, 80 bp, synthetic construct
  misc_feature 1..80: note = Artificially Synthesized Probe
  source 1..80: mol_type = other DNA
tttataaagatactaaaccagcatacccttactctgccagagtagtgaagctaattaaacacatttggtttctgaataaa

SEQ ID NO: 93297 - DNA, 80 bp, synthetic construct
  misc_feature 1..80: note = Artificially Synthesized Probe
  source 1..80: mol_type = other DNA
tctctcttgagctacagtagaggggaagggattgttgtgtagtcaagtcaccatgctgaatgtacactgattcctttatg

SEQ ID NO: 93298 - DNA, 80 bp, synthetic construct
  misc_feature 1..80: note = Artificially Synthesized Probe
  source 1..80: mol_type = other DNA
aaagccacatttcattgtcttagtcaaagcaggattattaagtgattatttaaaattcgtttttttaaattagcaacttc

SEQ ID NO: 93299 - DNA, 80 bp, synthetic construct; identical to SEQ ID NO: 33611
  misc_feature 1..80: note = Artificially Synthesized Probe
  source 1..80: mol_type = other DNA

SEQ ID NO: 93300 - DNA, 80 bp, synthetic construct
  misc_feature 1..80: note = Artificially Synthesized Probe
  source 1..80: mol_type = other DNA
catacctgccacagggttacccagcccccagtggacagagaatttgtcccataccaaaatggctgagccacccaatccct

SEQ ID NO: 93301 - DNA, 80 bp, synthetic construct
  misc_feature 1..80: note = Artificially Synthesized Probe
  source 1..80: mol_type = other DNA
cttcttttcttcaaaccaaacatgcccatctatttcaaacagggaggcagtgtggagtagtggaaagaaggccaactttg

SEQ ID NO: 93302 - DNA, 80 bp, synthetic construct
  misc_feature 1..80: note = Artificially Synthesized Probe
  source 1..80: mol_type = other DNA
ggcggggaaggagtggagcctccccgtgcaccctcgcagcccgctccaggagtgggactagccctccttgggggtgtggc

SEQ ID NO: 93303 - DNA, 80 bp, synthetic construct
  misc_feature 1..80: note = Artificially Synthesized Probe
  source 1..80: mol_type = other DNA
atgctcatggtaggagcttaaaatacgagaactgttacaccttcagtttgcaattcatttagttgaccttctctgaacac

SEQ ID NO: 93304 - DNA, 80 bp, synthetic construct; identical to SEQ ID NO: 33592
  misc_feature 1..80: note = Artificially Synthesized Probe
  source 1..80: mol_type = other DNA

SEQ ID NO: 93305 - DNA, 80 bp, synthetic construct
  misc_feature 1..80: note = Artificially Synthesized Probe
  source 1..80: mol_type = other DNA
tgatcccataccactgttgtgaatcagcgagataataaatgcagagctttctacatgaatttttgcacagatctgaggtc

SEQ ID NO: 93306 - DNA, 80 bp, synthetic construct
  misc_feature 1..80: note = Artificially Synthesized Probe
  source 1..80: mol_type = other DNA
tttgaatttatgtgtggctgtgtgttttctcagggctccaagtgttttataccttgggtcaaattctccccctgcggagg

SEQ ID NO: 93307 - DNA, 80 bp, synthetic construct
  misc_feature 1..80: note = Artificially Synthesized Probe
  source 1..80: mol_type = other DNA
aatatgctttctctgcctaagatctgggttccatgcccatctcaacctcaatccctccttcaaggaagtttttcctaact

SEQ ID NO: 93308 - DNA, 80 bp, synthetic construct; identical to SEQ ID NO: 33593
  misc_feature 1..80: note = Artificially Synthesized Probe
  source 1..80: mol_type = other DNA

SEQ ID NO: 93309 - DNA, 80 bp, synthetic construct
  misc_feature 1..80: note = Artificially Synthesized Probe
  source 1..80: mol_type = other DNA
tggaagaaccgatttagattttgcagagtaattcagtctttaaaaggtagtggtagttaaaataggtaatctttgacttg

SEQ ID NO: 93310 - DNA, 80 bp, synthetic construct
  misc_feature 1..80: note = Artificially Synthesized Probe
  source 1..80: mol_type = other DNA
gctttgcgaaagccgtcccctccggctggaatgttctttgtctctctggtaaatgtctattcatcattcaagaccaccct

SEQ ID NO: 93311 - DNA, 80 bp, synthetic construct; identical to SEQ ID NO: 33594
  misc_feature 1..80: note = Artificially Synthesized Probe
  source 1..80: mol_type = other DNA

SEQ ID NO: 93312 - DNA, 80 bp, synthetic construct
  misc_feature 1..80: note = Artificially Synthesized Probe
  source 1..80: mol_type = other DNA
gagagcctcggtcgtcgcctcccagcacctcggggtcgtagagaacacaaaagtcacacaaccctcgccgaggcttgacc

SEQ ID NO: 93313 - DNA, 80 bp, synthetic construct
  misc_feature 1..80: note = Artificially Synthesized Probe
  source 1..80: mol_type = other DNA
gtgtacctgtgttgtgccagaggttctgatgataggcttataggcggtagtttcctcagtgtccgtgggtcgcccccggt

SEQ ID NO: 93314 - DNA, 80 bp, synthetic construct
  misc_feature 1..80: note = Artificially Synthesized Probe
  source 1..80: mol_type = other DNA
ctcgcaccccacgtttgttcaccagtatttcagtttacggtcagaaaatgaacacagacacttcgtgatactctacactt

SEQ ID NO: 93315 - DNA, 80 bp, synthetic construct
  misc_feature 1..80: note = Artificially Synthesized Probe
  source 1..80: mol_type = other DNA
gcggaccggcgcatgcagcgagcggggctgcgagggcgctgctgtggccaggcgtctggcatgctgaccacgtcgcgctg

SEQ ID NO: 93316 - DNA, 80 bp, synthetic construct
  misc_feature 1..80: note = Artificially Synthesized Probe
  source 1..80: mol_type = other DNA
cgtgcccttggtggttaccggtagttaagcttagggcgcatagggccctcgtggctcgccacctctcacggttcagtacc

SEQ ID NO: 93317 - DNA, 80 bp, synthetic construct; identical to SEQ ID NO: 33595
  misc_feature 1..80: note = Artificially Synthesized Probe
  source 1..80: mol_type = other DNA

SEQ ID NO: 93318 - DNA, 80 bp, synthetic construct
  misc_feature 1..80: note = Artificially Synthesized Probe
  source 1..80: mol_type = other DNA
ggcgagcaagggagcaggcggtaggggttctgcggcgatgggcgggctaggggcggggcgcgggtgggctctaaaagtcg

SEQ ID NO: 93319 - DNA, 80 bp, synthetic construct
  misc_feature 1..80: note = Artificially Synthesized Probe
  source 1..80: mol_type = other DNA
ggctgcgcccccgctgctggccagctctgcacggctgcgggctctgcggcgcccggtgctctgcaacgctgcggcgggcg

SEQ ID NO: 93320 - DNA, 80 bp, synthetic construct
  misc_feature 1..80: note = Artificially Synthesized Probe
  source 1..80: mol_type = other DNA
gaaaactctaccgacaggcggcacgcattccgcgcccgctctgcctacttgaggagggggtgtcactcctgcccgcaatg

SEQ ID NO: 93321 - DNA, 80 bp, synthetic construct; identical to SEQ ID NO: 33596
  misc_feature 1..80: note = Artificially Synthesized Probe
  source 1..80: mol_type = other DNA

SEQ ID NO: 93322 - DNA, 80 bp, synthetic construct
  misc_feature 1..80: note = Artificially Synthesized Probe
  source 1..80: mol_type = other DNA
ggaggttggaaaggtcgcaggcacacgggtgtgaccgagtggtagagggcgtggctgttccgggtcggagctgcaggtgt

SEQ ID NO: 93323 - DNA, 80 bp, synthetic construct
  misc_feature 1..80: note = Artificially Synthesized Probe
  source 1..80: mol_type = other DNA
cccagcatcgctctggtgcgacttaaaggataggccccagcatcgccctggtgcgatgtaggatttttagaaccccggtg

SEQ ID NO: 93324 - DNA, 80 bp, synthetic construct
  misc_feature 1..80: note = Artificially Synthesized Probe
  source 1..80: mol_type = other DNA
atttttcagatttcagtaacaagcgcgagtgagaacggcgatgtgaccaaactgtcatgttgcgcagggattgttcacct

SEQ ID NO: 93325 - DNA, 80 bp, synthetic construct; identical to SEQ ID NO: 33597
  misc_feature 1..80: note = Artificially Synthesized Probe
  source 1..80: mol_type = other DNA

SEQ ID NO: 93326 - DNA, 80 bp, synthetic construct
  misc_feature 1..80: note = Artificially Synthesized Probe
  source 1..80: mol_type = other DNA
tggtcgatagcctcgttttttaaccccccactttccctgagcagcggcggggaagcctccccatttgccgctctggccgc

SEQ ID NO: 93327 - DNA, 80 bp, synthetic construct
  misc_feature 1..80: note = Artificially Synthesized Probe
  source 1..80: mol_type = other DNA
aaacctaatggtttttgtcatctgacctttcaaggagatactgggatacagcctgctattgttgggtgaaaactgtgata

SEQ ID NO: 93328 - DNA, 80 bp, synthetic construct
  misc_feature 1..80: note = Artificially Synthesized Probe
  source 1..80: mol_type = other DNA
aagaaacatggttattttaccactgtaaaaccacaggcttgtttttagattttagcaaaaagtatcagggatatgggggg

SEQ ID NO: 93329 - DNA, 80 bp, synthetic construct; identical to SEQ ID NO: 33598
  misc_feature 1..80: note = Artificially Synthesized Probe
  source 1..80: mol_type = other DNA

SEQ ID NO: 93330 - DNA, 80 bp, synthetic construct
  misc_feature 1..80: note = Artificially Synthesized Probe
  source 1..80: mol_type = other DNA
cgctgggtatgagttatgccttatctgggggtgggggagcatcttaggaaattaaatggaaacttaaagagtctgctaag

SEQ ID NO: 93331 - DNA, 80 bp, synthetic construct
  misc_feature 1..80: note = Artificially Synthesized Probe
  source 1..80: mol_type = other DNA
ggagtactaaatggggcttcatttaggcaggagggctgaaaatcaggagtagctctctgcttgaggacatgtgataagtt

SEQ ID NO: 93332 - DNA, 80 bp, synthetic construct; identical to SEQ ID NO: 33590
  misc_feature 1..80: note = Artificially Synthesized Probe
  source 1..80: mol_type = other DNA

SEQ ID NO: 93333 - DNA, 80 bp, synthetic construct
  misc_feature 1..80: note = Artificially Synthesized Probe
  source 1..80: mol_type = other DNA
acgaaagagtgtccagcatttaagtcatgtcccttttatttatataaagtcctcttcagcaggtattgggaagaccacaa

SEQ ID NO: 93334 - DNA, 80 bp, synthetic construct; identical to SEQ ID NO: 33599
  misc_feature 1..80: note = Artificially Synthesized Probe
  source 1..80: mol_type = other DNA

SEQ ID NO: 93335 - DNA, 80 bp, synthetic construct
  misc_feature 1..80: note = Artificially Synthesized Probe
  source 1..80: mol_type = other DNA
catggaagtcttcaggcaagtttttcacttacaagggactgcgtatcttctaccaaggtaagaagtggactattggaagt

SEQ ID NO: 93336 - DNA, 80 bp, synthetic construct
  misc_feature 1..80: note = Artificially Synthesized Probe
  source 1..80: mol_type = other DNA
gggtagggactgagattccaacctgcagaccttaccttttagtataagttttctttgtagcttgatatgtattccaatat

SEQ ID NO: 93337 - DNA, 80 bp, synthetic construct
  misc_feature 1..80: note = Artificially Synthesized Probe
  source 1..80: mol_type = other DNA
aatttgctagtgatgatgattattatgaccactacttatcaagtaattaccatatgccaggcactgagttatgttttcag

SEQ ID NO: 93338 - DNA, 80 bp, synthetic construct
  misc_feature 1..80: note = Artificially Synthesized Probe
  source 1..80: mol_type = other DNA
ctgcaagtcagcgtttattgctcaagcgtattaaacaaaaatgtagactgaaagagacagttcttttaaaccccattttt

SEQ ID NO: 93339 - DNA, 80 bp, synthetic construct
  misc_feature 1..80: note = Artificially Synthesized Probe
  source 1..80: mol_type = other DNA
agatcgtaccactgcactccagcctgggtgacagagcaagactctgtctcaaacaaacaaaaccaagaaacaaaaaacat

SEQ ID NO: 93340 - DNA, 80 bp, synthetic construct
  misc_feature 1..80: note = Artificially Synthesized Probe
  source 1..80: mol_type = other DNA
gcaaagcactcagggtccacattttggcagcagtcattaacgatcgaccagttcaattgtttgcggtcagtttgtggcag

SEQ ID NO: 93341 - DNA, 80 bp, synthetic construct
  misc_feature 1..80: note = Artificially Synthesized Probe
  source 1..80: mol_type = other DNA
cctataatcccagctactcaggaggctgaggcaagagaatcacttgaacccgggaggcggaggttgcagtgagccaagat

SEQ ID NO: 93342 - DNA, 80 bp, synthetic construct; identical to SEQ ID NO: 33623
  misc_feature 1..80: note = Artificially Synthesized Probe
  source 1..80: mol_type = other DNA

SEQ ID NO: 93343 - DNA, 80 bp, synthetic construct
  misc_feature 1..80: note = Artificially Synthesized Probe
  source 1..80: mol_type = other DNA
catgactggcaatggcacttggaaagcactaagagaaaagaaaaaggaaagattttagaggaaatagtcgaagaagtcga

SEQ ID NO: 93344 - DNA, 80 bp, synthetic construct
  misc_feature 1..80: note = Artificially Synthesized Probe
  source 1..80: mol_type = other DNA
ctctgttcctcaaccattggtttaaaattttaagcctgtagaaaagctgcaagagcagtggagggggcatctgaggcccc

SEQ ID NO: 93345 - DNA, 80 bp, synthetic construct; identical to SEQ ID NO: 33624
  misc_feature 1..80: note = Artificially Synthesized Probe
  source 1..80: mol_type = other DNA

SEQ ID NO: 93346 - DNA, 80 bp, synthetic construct
  misc_feature 1..80: note = Artificially Synthesized Probe
  source 1..80: mol_type = other DNA
gagacggggtttcgccttgttggccaggctggtctcgaactcctgacctcaggtgatccgcccgcctcggcctcccaaag

SEQ ID NO: 93347 - DNA, 80 bp, synthetic construct
  misc_feature 1..80: note = Artificially Synthesized Probe
  source 1..80: mol_type = other DNA
aggggctcagcttcccccggtcactggggccagggagacgtggtccagccggtttacaaagccttggatgcagccccacc

SEQ ID NO: 93348 - DNA, 80 bp, synthetic construct
  misc_feature 1..80: note = Artificially Synthesized Probe
  source 1..80: mol_type = other DNA
cgttacctggtcgcttctggggggtgcagcccatcagctgcagtcgggcctccgtgtgggacaggatttcctcatgatga

SEQ ID NO: 93349 - DNA, 80 bp, synthetic construct
  misc_feature 1..80: note = Artificially Synthesized Probe
  source 1..80: mol_type = other DNA
cctcttcctttttataaccaagaaatgcccttttcccacttattgtgaggagcctgccttagttccgcacaatgtaggca

SEQ ID NO: 93350 - DNA, 80 bp, synthetic construct; identical to SEQ ID NO: 33625
  misc_feature 1..80: note = Artificially Synthesized Probe
  source 1..80: mol_type = other DNA

SEQ ID NO: 93351 - DNA, 80 bp, synthetic construct
  misc_feature 1..80: note = Artificially Synthesized Probe
  source 1..80: mol_type = other DNA
ggccccagtgagccatgggagggcgggagtttccccgttcacccagcatggccactccggcccctgccctagagggccag

SEQ ID NO: 93352 - DNA, 80 bp, synthetic construct
  misc_feature 1..80: note = Artificially Synthesized Probe
  source 1..80: mol_type = other DNA
tggagctgggtccctcaccacgcatgcctcagcgctctcctctcctcctggggtctcctgccctgaagagagggttggga

SEQ ID NO: 93353 - DNA, 80 bp, synthetic construct
  misc_feature 1..80: note = Artificially Synthesized Probe
  source 1..80: mol_type = other DNA
agggcaagtgcctttcattctcaactttttggaggtatgtggtctctgtcctccctcagcttcgggatgtaatccctgcg

SEQ ID NO: 93354 - DNA, 80 bp, synthetic construct; identical to SEQ ID NO: 33626
  misc_feature 1..80: note = Artificially Synthesized Probe
  source 1..80: mol_type = other DNA

SEQ ID NO: 93355 - DNA, 80 bp, synthetic construct
  misc_feature 1..80: note = Artificially Synthesized Probe
  source 1..80: mol_type = other DNA
cccttctcggcagtccacctggccatactgctcccaggcaggcatgggcctcggcagcttcaggaagagccccactgctg

SEQ ID NO: 93356 - DNA, 80 bp, synthetic construct
  misc_feature 1..80: note = Artificially Synthesized Probe
  source 1..80: mol_type = other DNA
accggtgtgcaggccactacgcggcaaggtgctgagaacctcgtggggtctgcgtccggaggcaggtgggtggtggctct

SEQ ID NO: 93357 - DNA, 80 bp, synthetic construct
  misc_feature 1..80: note = Artificially Synthesized Probe
  source 1..80: mol_type = other DNA
cccggtctctactaaaaatacaaaaaaattagctgggcatggtggtccacgcctgtaatcccagctacttgggaggctga

SEQ ID NO: 93358 - DNA, 80 bp, synthetic construct
  misc_feature 1..80: note = Artificially Synthesized Probe
  source 1..80: mol_type = other DNA
tcaggtgctgtgtgacacatctgctgcagtaacatttaatgtaaagtaataacagaaatatgctgcattgtatgaaacac

SEQ ID NO: 93359 - DNA, 80 bp, synthetic construct
  misc_feature 1..80: note = Artificially Synthesized Probe
  source 1..80: mol_type = other DNA
gcacccaggacgtgggccggccagtgtggcggtggatccctctagaatgactgggtctaagtagggagacagggcaggcg

SEQ ID NO: 93360 - DNA, 80 bp, synthetic construct; identical to SEQ ID NO: 33627
  misc_feature 1..80: note = Artificially Synthesized Probe
  source 1..80: mol_type = other DNA

SEQ ID NO: 93361 - DNA, 80 bp, synthetic construct
  misc_feature 1..80: note = Artificially Synthesized Probe
  source 1..80: mol_type = other DNA
gttcagggcaatgatccccccgaggacggcagagatgcctgcgattacctcgacgacctggaggggacaggacagcatcg

SEQ ID NO: 93362 - DNA, 80 bp, synthetic construct
  misc_feature 1..80: note = Artificially Synthesized Probe
  source 1..80: mol_type = other DNA
gctgcggcttttcacgtccctcctggagtaaaatagccaaagaggtgtttcccccactgctgcttttgtccacagaaact

SEQ ID NO: 93363 - DNA, 80 bp, synthetic construct
  misc_feature 1..80: note = Artificially Synthesized Probe
  source 1..80: mol_type = other DNA
ccacccgtgccatgtgggtttgccattgccacggcaacactggacgtcaccacccctttccgtggcaatgatccaaccac

SEQ ID NO: 93364 - DNA, 80 bp, synthetic construct; identical to SEQ ID NO: 33628
  misc_feature 1..80: note = Artificially Synthesized Probe
  source 1..80: mol_type = other DNA

SEQ ID NO: 93365 - DNA, 80 bp, synthetic construct
  misc_feature 1..80: note = Artificially Synthesized Probe
  source 1..80: mol_type = other DNA
ggaagaaacacacgcccgaaaacctgctcccgtgaaggatctctgtgagtcgcaaacacagagctgtggccagcaggaaa

SEQ ID NO: 93366 - DNA, 80 bp, synthetic construct
  misc_feature 1..80: note = Artificially Synthesized Probe
  source 1..80: mol_type = other DNA
ccgaggcagacggatcgtgaggtcaggagtttgagtacagcctggccaacatggtaaaccccgtctctactaaaaataac

SEQ ID NO: 93367 - DNA, 80 bp, synthetic construct
  misc_feature 1..80: note = Artificially Synthesized Probe
  source 1..80: mol_type = other DNA
aggaaaaaaaaaaaagaagcagaacggaaatggaacctaagagaggactgaaatgctaaataaggggaagtgaaggcact

SEQ ID NO: 93368 - DNA, 80 bp, synthetic construct; identical to SEQ ID NO: 33629
  misc_feature 1..80: note = Artificially Synthesized Probe
  source 1..80: mol_type = other DNA

SEQ ID NO: 93369 - DNA, 80 bp, synthetic construct
  misc_feature 1..80: note = Artificially Synthesized Probe
  source 1..80: mol_type = other DNA
gaaatttatcagtaataactctcagaggaaatgggctacattcaaaaagctagggagagagaatgacaagataaagaaca

SEQ ID NO: 93370 - DNA, 80 bp, synthetic construct; identical to SEQ ID NO: 33613
  misc_feature 1..80: note = Artificially Synthesized Probe
  source 1..80: mol_type = other DNA

SEQ ID NO: 93371 - DNA, 80 bp, synthetic construct
  misc_feature 1..80: note = Artificially Synthesized Probe
  source 1..80: mol_type = other DNA
accagcctggccaacatgccgaaaccctgcctctactaaaaataaaataattagccgggcgtggtggcatgtgcctgtag

SEQ ID NO: 93372 - DNA, 80 bp, synthetic construct
  misc_feature 1..80: note = Artificially Synthesized Probe
  source 1..80: mol_type = other DNA
aaaaaaaaaaaaaaattcctcggggacaacagtgtcaactcacctacggcagtaacaaactccccctaaaaattacagga

SEQ ID NO: 93373 - DNA, 80 bp, synthetic construct; identical to SEQ ID NO: 33630
  misc_feature 1..80: note = Artificially Synthesized Probe
  source 1..80: mol_type = other DNA

SEQ ID NO: 93374 - DNA, 80 bp, synthetic construct
  misc_feature 1..80: note = Artificially Synthesized Probe
  source 1..80: mol_type = other DNA
gaggcgcccgtggatctttgggcttgaggaaatgttcacacacattgtccttgcatatgaaaattagcagatgtggtgtc

SEQ ID NO: 93375 - DNA, 80 bp, synthetic construct
  misc_feature 1..80: note = Artificially Synthesized Probe
  source 1..80: mol_type = other DNA
gcccctcctggccggggtttctgagacccaggagagaggggtctcatgggaatgccctggagcagcccagatcggccctc

SEQ ID NO: 93376 - DNA, 80 bp, synthetic construct
  misc_feature 1..80: note = Artificially Synthesized Probe
  source 1..80: mol_type = other DNA
cagcgatgatcaccgtggccgccatgagcagctccagcaggagcagcaggatgaggttgaagttgatctgccaaggggca

SEQ ID NO: 93377 - DNA, 80 bp, synthetic construct; identical to SEQ ID NO: 33631
  misc_feature 1..80: note = Artificially Synthesized Probe
  source 1..80: mol_type = other DNA

SEQ ID NO: 93378 - DNA, 80 bp, synthetic construct
  misc_feature 1..80: note = Artificially Synthesized Probe
  source 1..80: mol_type = other DNA
tggagggtaatgaaacgactgcaggccctgaccgtattggcagtgacatgaatttatatgtgtgttaatattcatagaag

SEQ ID NO: 93379 - DNA, 80 bp, synthetic construct
  misc_feature 1..80: note = Artificially Synthesized Probe
  source 1..80: mol_type = other DNA
cgagtaagctggggttacaggcacctaccagcacgcccggctaattttgtatttttagtagagaggggtttctccatgtt

SEQ ID NO: 93380 - DNA, 80 bp, synthetic construct; identical to SEQ ID NO: 33632
  misc_feature 1..80: note = Artificially Synthesized Probe
  source 1..80: mol_type = other DNA

SEQ ID NO: 93381 - DNA, 80 bp, synthetic construct
  misc_feature 1..80: note = Artificially Synthesized Probe
  source 1..80: mol_type = other DNA
tggtgaaaccccttgtctactaaaaatacaaaaatcagctgggtacggtggcgcacgcctgtaatcccagctactcggga

SEQ ID NO: 93382 - DNA, 80 bp, synthetic construct
  misc_feature 1..80: note = Artificially Synthesized Probe
  source 1..80: mol_type = other DNA
cggcctgggaagttgcggccatgctcctgctgttacgacacgggagccactcggagctgactgatctcactgaggcacag

SEQ ID NO: 93383 - DNA, 80 bp, synthetic construct
  misc_feature 1..80: note = Artificially Synthesized Probe
  source 1..80: mol_type = other DNA
agatcaaaaagacaaaagcataaggagaactctaaaattcagaaaagtgtgacattaaccttgtcttttattttctgtat

SEQ ID NO: 93384 - DNA, 80 bp, synthetic construct
  misc_feature 1..80: note = Artificially Synthesized Probe
  source 1..80: mol_type = other DNA
gtcacaggccgggcgcggtggctcatacctgtaatcccagcactatgggaggccgaggtggatggatcacctgaggtcag

SEQ ID NO: 93385 - DNA, 80 bp, synthetic construct; identical to SEQ ID NO: 33633
  misc_feature 1..80: note = Artificially Synthesized Probe
  source 1..80: mol_type = other DNA

SEQ ID NO: 93386 - DNA, 80 bp, synthetic construct
  misc_feature 1..80: note = Artificially Synthesized Probe
  source 1..80: mol_type = other DNA
cctggtttcctttgggatttttgtctttttttttttttttttttttttgagacggagtcttgctctgtcttccaggctgg

SEQ ID NO: 93387 - DNA, 80 bp, synthetic construct
  misc_feature 1..80: note = Artificially Synthesized Probe
  source 1..80: mol_type = other DNA
ataaatctgtcccgcagaatcacgagacttcaataaagacaattattttctttggatgcataaatctctcaactttagtc

SEQ ID NO: 93388 - DNA, 80 bp, synthetic construct
  misc_feature 1..80: note = Artificially Synthesized Probe
  source 1..80: mol_type = other DNA
accaaattaaacacgtagtggtcacagcaaacgtggaaacaaacaatatctgaaagttgggaatctgaaaaacaaggcag

SEQ ID NO: 93389 - DNA, 80 bp, synthetic construct
  misc_feature 1..80: note = Artificially Synthesized Probe
  source 1..80: mol_type = other DNA
agctttactgtctggggggcaacctcgggggcccctctcggtgccacaacgtctgtgcgtgggcacacacacaagcacac

SEQ ID NO: 93390 - DNA, 80 bp, synthetic construct; identical to SEQ ID NO: 33634
  misc_feature 1..80: note = Artificially Synthesized Probe
  source 1..80: mol_type = other DNA

SEQ ID NO: 93391 - DNA, 80 bp, synthetic construct
  misc_feature 1..80: note = Artificially Synthesized Probe
  source 1..80: mol_type = other DNA
aggcatgagccgctgcgcccaacccccaggtacttcaaaataatttattctgaaagaagtttttatttttctgatgtgct

SEQ ID NO: 93392 - DNA, 80 bp, synthetic construct
  misc_feature 1..80: note = Artificially Synthesized Probe
  source 1..80: mol_type = other DNA
cggaggctgagctgggaggatctcttgagcccaggagttcgaggctgcagtgagctgtgaatactcggtgatagagtgag

SEQ ID NO: 93393 - DNA, 80 bp, synthetic construct
  misc_feature 1..80: note = Artificially Synthesized Probe
  source 1..80: mol_type = other DNA
ctgccacccggtttccgcgtctgggggtcactgggccatttgcaccacgacggctctccaggctttctccttgtcgaact

SEQ ID NO: 93394 - DNA, 80 bp, synthetic construct
  misc_feature 1..80: note = Artificially Synthesized Probe
  source 1..80: mol_type = other DNA
atagtgaaaccccatctctactaaaaatacaaaaaaaattagctgggcgtggtggcgggtgcctgtagtcccagctactc

SEQ ID NO: 93395 - DNA, 80 bp, synthetic construct; identical to SEQ ID NO: 33635
  misc_feature 1..80: note = Artificially Synthesized Probe
  source 1..80: mol_type = other DNA

SEQ ID NO: 93396 - DNA, 80 bp, synthetic construct
  misc_feature 1..80: note = Artificially Synthesized Probe
  source 1..80: mol_type = other DNA
ctgaggggctgagcacagcagtgctgggtgaggaggcagaagaagccccgtcggggcctgagcgaggggcagagctaggg

SEQ ID NO: 93397 - DNA, 80 bp, synthetic construct
  misc_feature 1..80: note = Artificially Synthesized Probe
  source 1..80: mol_type = other DNA
ctccactgggacaagggcggctcccatggtgaggataaaggccacggagaagcttccagagagggcagcagagtgggacg

SEQ ID NO: 93398 - DNA, 80 bp, synthetic construct
  misc_feature 1..80: note = Artificially Synthesized Probe
  source 1..80: mol_type = other DNA
tgtggaagcgagaggaggggagagctcgggaccagctgaagcaggaggggcgtggggtccgcggcttgcgggccagaggg

SEQ ID NO: 93399 - DNA, 80 bp, synthetic construct; identical to SEQ ID NO: 33636
  misc_feature 1..80: note = Artificially Synthesized Probe
  source 1..80: mol_type = other DNA

SEQ ID NO: 93400 - DNA, 80 bp, synthetic construct
  misc_feature 1..80: note = Artificially Synthesized Probe
  source 1..80: mol_type = other DNA
atcagtaattctcaaaggtgatgaactctacgtgaaactaaagtcatatgaagagttttttgtttttttcttgttgttgt

SEQ ID NO: 93401 - DNA, 80 bp, synthetic construct
  misc_feature 1..80: note = Artificially Synthesized Probe
  source 1..80: mol_type = other DNA
tgtatttttagtagagatggggtttgtccatgttggtcagactggtctcaaacacctgacctcaggtgatccacccacct

SEQ ID NO: 93402 - DNA, 80 bp, synthetic construct; identical to SEQ ID NO: 33614
  misc_feature 1..80: note = Artificially Synthesized Probe
  source 1..80: mol_type = other DNA

SEQ ID NO: 93403 - DNA, 80 bp, synthetic construct; identical to SEQ ID NO: 33637
  misc_feature 1..80: note = Artificially Synthesized Probe
  source 1..80: mol_type = other DNA

SEQ ID NO: 93404 - DNA, 80 bp, synthetic construct
  misc_feature 1..80: note = Artificially Synthesized Probe
  source 1..80: mol_type = other DNA
gcccatcctggactcctcctgtaggacagacgcagccccgccgcagcccaggacatggaccagcctcccccagccatgtc

SEQ ID NO: 93405 - DNA, 80 bp, synthetic construct
  misc_feature 1..80: note = Artificially Synthesized Probe
  source 1..80: mol_type = other DNA
caggagcagaccccgccagcctcaaagctgcagggaggtgggggtggcctgcagacagggtggggtctgcatccggtacc

SEQ ID NO: 93406 - DNA, 80 bp, synthetic construct
  misc_feature 1..80: note = Artificially Synthesized Probe
  source 1..80: mol_type = other DNA
gaaaacaactgcccatccccctccgtctgcagaacctaatttccagatctggaagaagatccctccaggcaggggctcca

SEQ ID NO: 93407 - DNA, 80 bp, synthetic construct
  misc_feature 1..80: note = Artificially Synthesized Probe
  source 1..80: mol_type = other DNA
cccagggtcctggcagaggaagcgaggtctggggcagaggggatctggcctgggcgggggaggggctgcgaccaagtcca

SEQ ID NO: 93408 - DNA, 80 bp, synthetic construct; identical to SEQ ID NO: 33638
  misc_feature 1..80: note = Artificially Synthesized Probe
  source 1..80: mol_type = other DNA

SEQ ID NO: 93409 - DNA, 80 bp, synthetic construct
  misc_feature 1..80: note = Artificially Synthesized Probe
  source 1..80: mol_type = other DNA
ttgttccccagctccctcccagccggcccctgaggccctccctaggaggaggaggtccctgaggttctctctgtgagggc

SEQ ID NO: 93410 - DNA, 80 bp, synthetic construct
  misc_feature 1..80: note = Artificially Synthesized Probe
  source 1..80: mol_type = other DNA
aggctggcacaacagacacccataaattaataaaaataattgtgaaaacacaagcaaaacaagctcgtcggcatccaaga

SEQ ID NO: 93411 - DNA, 80 bp, synthetic construct
  misc_feature 1..80: note = Artificially Synthesized Probe
  source 1..80: mol_type = other DNA
agctactcacccccatcagcacagagaagacccacgtcttgtggctgaagcaggggggcagtctcttcgacagctgcagg

SEQ ID NO: 93412 - DNA, 80 bp, synthetic construct
  misc_feature 1..80: note = Artificially Synthesized Probe
  source 1..80: mol_type = other DNA
accacagctgtgctgaatgtacagccacgtgtcaccagttctttatctggaataaaattatcatcggctttggccactct

SEQ ID NO: 93413 - DNA, 80 bp, synthetic construct
  misc_feature 1..80: note = Artificially Synthesized Probe
  source 1..80: mol_type = other DNA
cgcccaaggttgggcatgtgcctgacggctgaggaagaaaacacttaaggcagaggtaaccagatgcctccaggcaaaag

SEQ ID NO: 93414 - DNA, 80 bp, synthetic construct; identical to SEQ ID NO: 33639
  misc_feature 1..80: note = Artificially Synthesized Probe
  source 1..80: mol_type = other DNA

SEQ ID NO: 93415 - DNA, 80 bp, synthetic construct
  misc_feature 1..80: note = Artificially Synthesized Probe
  source 1..80: mol_type = other DNA
acatgcctctactcaacggcttaatgtctgagcacttacctcccccgctgctctgccgttgggagcactggtctctgggt

SEQ ID NO: 93416 - DNA, 80 bp, synthetic construct
  misc_feature 1..80: note = Artificially Synthesized Probe
  source 1..80: mol_type = other DNA
gagccccagccgtccaccctgagccccagccgcccaccctgagccccaaccgcccaccctgagcccaagccacccacctt

SEQ ID NO: 93417 - DNA, 80 bp, synthetic construct
  misc_feature 1..80: note = Artificially Synthesized Probe
  source 1..80: mol_type = other DNA
caggcccagggactgccgtcctagcagggagactgaccacagccaggaaaaatggcagcaaagcaactgaggaggcaggt

SEQ ID NO: 93418 - DNA, 80 bp, synthetic construct
  misc_feature 1..80: note = Artificially Synthesized Probe
  source 1..80: mol_type = other DNA
ctgaggccggtggtgtgctgaacacaggagggcagggtgtgcagggcaagagcagcggccggtccgcccaggatggccta

SEQ ID NO: 93419 - DNA, 80 bp, synthetic construct; identical to SEQ ID NO: 33615
  misc_feature 1..80: note = Artificially Synthesized Probe
  source 1..80: mol_type = other DNA

SEQ ID NO: 93420 - DNA, 80 bp, synthetic construct
  misc_feature 1..80: note = Artificially Synthesized Probe
  source 1..80: mol_type = other DNA
ttaagtccagaatatttcccagggatgggtctgggtttacccaggctttgtgtttgtatttttaaaagacattttacggc

SEQ ID NO: 93421 - DNA, 80 bp, synthetic construct
  misc_feature 1..80: note = Artificially Synthesized Probe
  source 1..80: mol_type = other DNA
ccagctactcgggaggctgaggcaggagaattgcttgaacccaggaggcggaggttgtggtgagccgtgatcgcgccact

SEQ ID NO: 93422 - DNA, 80 bp, synthetic construct; identical to SEQ ID NO: 33616
  misc_feature 1..80: note = Artificially Synthesized Probe
  source 1..80: mol_type = other DNA

SEQ ID NO: 93423 - DNA, 80 bp, synthetic construct
  misc_feature 1..80: note = Artificially Synthesized Probe
  source 1..80: mol_type = other DNA
ggctgggcacccctgtgggctactcacctccccagcaccccctccccctgcaggccactcacctccccggctgggcaccc

SEQ ID NO: 93424 - DNA, 80 bp, synthetic construct
  misc_feature 1..80: note = Artificially Synthesized Probe
  source 1..80: mol_type = other DNA
ggatgcaccctgcagccttgcactgaccttgaagcgcacgcactggatggcggtgcccgtgttgaggccggcctgcagca

SEQ ID NO: 93425 - DNA, 80 bp, synthetic construct
  misc_feature 1..80: note = Artificially Synthesized Probe
  source 1..80: mol_type = other DNA
cccccttcaatggttgaaaataatgattccacttgtcatgaacaccatgaaggtatcttggcagccagagtcactcctgt

SEQ ID NO: 93426 - DNA, 80 bp, synthetic construct
  misc_feature 1..80: note = Artificially Synthesized Probe
  source 1..80: mol_type = other DNA
cccagtaacccaaacgcattgctatttcaacaacctgatgataatcattctagctcaattaatgaggtcaattctgcttt

SEQ ID NO: 93427 - DNA, 80 bp, synthetic construct
  misc_feature 1..80: note = Artificially Synthesized Probe
  source 1..80: mol_type = other DNA
gcagaagcgctgaccgttccgtgtcagcaggatcctgagcggaggagacagggggcagccgtcctggggggatggggtgc

SEQ ID NO: 93428 - DNA, 80 bp, synthetic construct; identical to SEQ ID NO: 33617
  misc_feature 1..80: note = Artificially Synthesized Probe
  source 1..80: mol_type = other DNA

SEQ ID NO: 93429 - DNA, 80 bp, synthetic construct
  misc_feature 1..80: note = Artificially Synthesized Probe
  source 1..80: mol_type = other DNA
tgcctcaacctcgccagtagctgggattacaggtacccgccaccacgcccagctaattttcgtagttttagtagagacgg

SEQ ID NO: 93430 - DNA, 80 bp, synthetic construct
  misc_feature 1..80: note = Artificially Synthesized Probe
  source 1..80: mol_type = other DNA
ctggaggatggtaaaggcatgggccccatgtggtctttgctcttcggttgttgagacaccatttattgcaaagcctatgc

SEQ ID NO: 93431 - DNA, 80 bp, synthetic construct
  misc_feature 1..80: note = Artificially Synthesized Probe
  source 1..80: mol_type = other DNA
gagctggtctcccccggcaccagggttagcggaaaatggtcaggagacatgagcagagtccactgaaaaagcaatgcaga

SEQ ID NO: 93432 - DNA, 80 bp, synthetic construct; identical to SEQ ID NO: 33618
  misc_feature 1..80: note = Artificially Synthesized Probe
  source 1..80: mol_type = other DNA

SEQ ID NO: 93433 - DNA, 80 bp, synthetic construct
  misc_feature 1..80: note = Artificially Synthesized Probe
  source 1..80: mol_type = other DNA
ccccttgggtatcgagaaaacaccaggataaattattaagtttaaaaaaacaagcaaggggctgggcacggtggcagaag

SEQ ID NO: 93434 - DNA, 80 bp, synthetic construct
  misc_feature 1..80: note = Artificially Synthesized Probe
  source 1..80: mol_type = other DNA
cgtctgtaatcccagcacttcgggaggccaaggtgggcggatcgcttcagcccaggagctcatgaccagcccgggcaaca

SEQ ID NO: 93435 - DNA, 80 bp, synthetic construct
  misc_feature 1..80: note = Artificially Synthesized Probe
  source 1..80: mol_type = other DNA
atagtgaaaccctgtctctgctaaaagtacaaaaattagccgggtgtgttggcatatgcctgtaatcccagatgctccgg

SEQ ID NO: 93436 - DNA, 80 bp, synthetic construct; identical to SEQ ID NO: 33612
  misc_feature 1..80: note = Artificially Synthesized Probe
  source 1..80: mol_type = other DNA

SEQ ID NO: 93437 - DNA, 80 bp, synthetic construct; identical to SEQ ID NO: 33619
  misc_feature 1..80: note = Artificially Synthesized Probe
  source 1..80: mol_type = other DNA

SEQ ID NO: 93438 - DNA, 80 bp, synthetic construct
  misc_feature 1..80: note = Artificially Synthesized Probe
  source 1..80: mol_type = other DNA
accaagccctaaaatggaatacaaccagaggccattaaacttaatggggtatcgaacccagaggataaccccacacagaa

SEQ ID NO: 93439 - DNA, 80 bp, synthetic construct
  misc_feature 1..80: note = Artificially Synthesized Probe
  source 1..80: mol_type = other DNA
aggagatatattaaatgtcacaggaaacaaaataattggagtaggagtgggtgaagcaaacacaagagaagtgaagaaaa

SEQ ID NO: 93440 - DNA, 80 bp, synthetic construct; identical to SEQ ID NO: 33620
  misc_feature 1..80: note = Artificially Synthesized Probe
  source 1..80: mol_type = other DNA

SEQ ID NO: 93441 - DNA, 80 bp, synthetic construct
  misc_feature 1..80: note = Artificially Synthesized Probe
  source 1..80: mol_type = other DNA
gtcaggcagtgactccatcccccatcagtgactccatcccccatcagacagtgactccatcccccatcagacagtgactc

SEQ ID NO: 93442 - DNA, 80 bp, synthetic construct
  misc_feature 1..80: note = Artificially Synthesized Probe
  source 1..80: mol_type = other DNA
ctccatccccccatcaggcagtgactccattccccatcagcacacgcatgttgacctggagcaaacagcttaatacaggt

SEQ ID NO: 93443 - DNA, 80 bp, synthetic construct
  misc_feature 1..80: note = Artificially Synthesized Probe
  source 1..80: mol_type = other DNA
ctttgaattctccttaaattcacctgttaaactcaatgcagttctgatgcaaatccgaaaagcatgtctcataaacccag

SEQ ID NO: 93444 - DNA, 80 bp, synthetic construct
  misc_feature 1..80: note = Artificially Synthesized Probe
  source 1..80: mol_type = other DNA
gacagattctaaaatgggctcagggacagagtgggtcccaggtccctgtgaagcaggtggtggccccagatacagggcgg

SEQ ID NO: 93445 - DNA, 80 bp, synthetic construct; identical to SEQ ID NO: 33621
  misc_feature 1..80: note = Artificially Synthesized Probe
  source 1..80: mol_type = other DNA

SEQ ID NO: 93446 - DNA, 80 bp, synthetic construct
  misc_feature 1..80: note = Artificially Synthesized Probe
  source 1..80: mol_type = other DNA
cgggcatggccgggcactcatgggcatagtcccaagctggttccctgcatgactcctgctgaaacctctgccttttcttt

SEQ ID NO: 93447 - DNA, 80 bp, synthetic construct
  misc_feature 1..80: note = Artificially Synthesized Probe
  source 1..80: mol_type = other DNA
gccaccacacccagctaatttttgtatttttagtagagaccgtgttttgccacgttggtcaggctggtcttgaactcctg

SEQ ID NO: 93448 - DNA, 80 bp, synthetic construct
  misc_feature 1..80: note = Artificially Synthesized Probe
  source 1..80: mol_type = other DNA
gtgttattctcacacccaactgtccctgcagcctggcaggtgggcagtgaccgcctgggctgtaccctaagaccccaaaa

SEQ ID NO: 93449 - DNA, 80 bp, synthetic construct; identical to SEQ ID NO: 23798
  misc_feature 1..80: note = Artificially Synthesized Probe
  source 1..80: mol_type = other DNA

SEQ ID NO: 93450 - DNA, 80 bp, synthetic construct
  misc_feature 1..80: note = Artificially Synthesized Probe
  source 1..80: mol_type = other DNA
acttaccatctaggcaaggtggctcacatctgtaatccaagcactttgggaggccgaggagggcggatcacctgaggtca

SEQ ID NO: 93451 - DNA, 80 bp, synthetic construct
  misc_feature 1..80: note = Artificially Synthesized Probe
  source 1..80: mol_type = other DNA
ttcacaacacccttatgtgtaactcccattactattctcatcatggagaagagagaaaaaagtcagtagaagattcagta

SEQ ID NO: 93452 - DNA, 80 bp, synthetic construct
  misc_feature 1..80: note = Artificially Synthesized Probe
  source 1..80: mol_type = other DNA
gctcaagcatgttgaggagacaaagcaccaagaaaggagagagaaggagcagtagaagagggactttgggttcccatgct

SEQ ID NO: 93453 - DNA, 80 bp, synthetic construct
  misc_feature 1..80: note = Artificially Synthesized Probe
  source 1..80: mol_type = other DNA
tcattatagcccaggtttcaccaccggcctcgggggagggcccaacctgctggccctggtacagccagtaccagcctggt

SEQ ID NO: 93454 - DNA, 80 bp, synthetic construct
  misc_feature 1..80: note = Artificially Synthesized Probe
  source 1..80: mol_type = other DNA
ctgagcttgcgggccccgctgagcacccaaaggccggccctagagtccaggagaagagcgcagcggcgcggagctcccag

SEQ ID NO: 93455 - DNA, 80 bp, synthetic construct
  misc_feature 1..80: note = Artificially Synthesized Probe
  source 1..80: mol_type = other DNA
ccatttccacattctgaagtccctcaccctctctttcccattctctctacgtaaactcaaatgttctctcactgttttca

SEQ ID NO: 93456 - DNA, 80 bp, synthetic construct
  misc_feature 1..80: note = Artificially Synthesized Probe
  source 1..80: mol_type = other DNA
caacttgtaacttctcattgcctgagtataggcgaatgcagagaaatggaaaaggggggagaaccatgttttccaaggag

SEQ ID NO: 93457 - DNA, 80 bp, synthetic construct; identical to SEQ ID NO: 33651
  misc_feature 1..80: note = Artificially Synthesized Probe
  source 1..80: mol_type = other DNA

SEQ ID NO: 93458 - DNA, 80 bp, synthetic construct
  misc_feature 1..80: note = Artificially Synthesized Probe
  source 1..80: mol_type = other DNA
attgttcattctgtgcctgaggctgtttgctcagaatgagccagtggctggggcgttaattggcccagtctgctatgtga

SEQ ID NO: 93459 - DNA, 80 bp, synthetic construct
  misc_feature 1..80: note = Artificially Synthesized Probe
  source 1..80: mol_type = other DNA
ttgctatgatgggtcttactatgagagtacatgtcagcaggtgacacatttgggaggcaaagaatcatgtaaaccagtgg

SEQ ID NO: 93460 - DNA, 80 bp, synthetic construct
  misc_feature 1..80: note = Artificially Synthesized Probe
  source 1..80: mol_type = other DNA
cctcgcaagcacagttcacaacagacaactatgggagctctatgagtatctaacgctgccgctgacctggcaggaggcgg

SEQ ID NO: 93461 - DNA, 80 bp, synthetic construct
  misc_feature 1..80: note = Artificially Synthesized Probe
  source 1..80: mol_type = other DNA
attgtttcatttgtgcttgtcttttgttgactgccctattggttaaatatgtcactaaaaggagagctgcctctacctgt

SEQ ID NO: 93462 - DNA, 80 bp, synthetic construct; identical to SEQ ID NO: 33652
  misc_feature 1..80: note = Artificially Synthesized Probe
  source 1..80: mol_type = other DNA

SEQ ID NO: 93463 - DNA, 80 bp, synthetic construct
  misc_feature 1..80: note = Artificially Synthesized Probe
  source 1..80: mol_type = other DNA
ctcggggtcctcatgtctgctcccggtcaccgagtcttaaatatctgaatcagcaagaggctggatgaagaaactggtgc

SEQ ID NO: 93464 - DNA, 80 bp, synthetic construct
  misc_feature 1..80: note = Artificially Synthesized Probe
  source 1..80: mol_type = other DNA
gggggaattgtgaaaccaagaaacacaccatcgtttcttggaaagagctttactacccagaatatgcatcaggggaacac

SEQ ID NO: 93465 - DNA, 80 bp, synthetic construct
  misc_feature 1..80: note = Artificially Synthesized Probe
  source 1..80: mol_type = other DNA
tcctgatgcctggcagaatcgaaggggtgagggtacgctctctgcagcagaaagccctgggcttaaagtcctatttatta

SEQ ID NO: 93466 - DNA, 80 bp, synthetic construct; identical to SEQ ID NO: 33653
  misc_feature 1..80: note = Artificially Synthesized Probe
  source 1..80: mol_type = other DNA

SEQ ID NO: 93467 - DNA, 80 bp, synthetic construct
  misc_feature 1..80: note = Artificially Synthesized Probe
  source 1..80: mol_type = other DNA
agcatcctgtccccaagccacggaagctcctgctcccttggccaggcctgcccctccctccaagctgtgctgtggacatt

SEQ ID NO: 93468 - DNA, 80 bp, synthetic construct
  misc_feature 1..80: note = Artificially Synthesized Probe
  source 1..80: mol_type = other DNA
atagagtgggagggctgttcctgcctcccacgaggacacagtgctgtgcaccatagaatcgaaaacttgaagatgtacaa

SEQ ID NO: 93469 - DNA, 80 bp, synthetic construct
  misc_feature 1..80: note = Artificially Synthesized Probe
  source 1..80: mol_type = other DNA
cttgactttactctgtggttagtttgaagcctcctctttttcccgctggcccattattggaataaattgccaatgacaga

SEQ ID NO: 93470 - DNA, 80 bp, synthetic construct; identical to SEQ ID NO: 33654
  misc_feature 1..80: note = Artificially Synthesized Probe
  source 1..80: mol_type = other DNA

SEQ ID NO: 93471 - DNA, 80 bp, synthetic construct
  misc_feature 1..80: note = Artificially Synthesized Probe
  source 1..80: mol_type = other DNA
gtcatcataaggagagaatcagacaagggttacaggagagaagaactagaaagaccctaatgtccaaatgttcaggcttt

SEQ ID NO: 93472 - DNA, 80 bp, synthetic construct
  misc_feature 1..80: note = Artificially Synthesized Probe
  source 1..80: mol_type = other DNA
tttgttttgtgagacagggtcttgctctgttacccaggctggagtgcagtggcgtgatcatggctcactgcagcctcgac

SEQ ID NO: 93473 - DNA, 80 bp, synthetic construct
  misc_feature 1..80: note = Artificially Synthesized Probe
  source 1..80: mol_type = other DNA
acttcaacctctcaaagtgctgggattacagatgtgagccactacacttagccagattttacttttttaaaaaaatacgt

SEQ ID NO: 93474 - DNA, 80 bp, synthetic construct; identical to SEQ ID NO: 33655
  misc_feature 1..80: note = Artificially Synthesized Probe
  source 1..80: mol_type = other DNA

SEQ ID NO: 93475 - DNA, 80 bp, synthetic construct
  misc_feature 1..80: note = Artificially Synthesized Probe
  source 1..80: mol_type = other DNA
gtaaatagctgcatgtgccctagcagctaggagctactacagcagctagacaacacatctaaacaatgagtcccaagttt

SEQ ID NO: 93476 - DNA, 80 bp, synthetic construct; identical to SEQ ID NO: 33641
  misc_feature 1..80: note = Artificially Synthesized Probe
  source 1..80: mol_type = other DNA

SEQ ID NO: 93477 - DNA, 80 bp, synthetic construct
  misc_feature 1..80: note = Artificially Synthesized Probe
  source 1..80: mol_type = other DNA
gatttctcctccacctccaagcaccccatccccatcttggatgcaggctgttgccaaagttaagttcccaggactcatgg

SEQ ID NO: 93478 - DNA, 80 bp, synthetic construct
  misc_feature 1..80: note = Artificially Synthesized Probe
  source 1..80: mol_type = other DNA
tcttctctccctccaccctcaccgtcttgttgtccattctccccacatcccccagactcatgccttaaaaatgtggatca

SEQ ID NO: 93479 - DNA, 80 bp, synthetic construct
  misc_feature 1..80: note = Artificially Synthesized Probe
  source 1..80: mol_type = other DNA
cctgccggcatctaagccccatgagggttctgctgctttggcgctgtgtcaccagcccccagcacagtactgaccatgga

SEQ ID NO: 93480 - DNA, 80 bp, synthetic construct; identical to SEQ ID NO: 33656
  misc_feature 1..80: note = Artificially Synthesized Probe
  source 1..80: mol_type = other DNA

SEQ ID NO: 93481 - DNA, 80 bp, synthetic construct
  misc_feature 1..80: note = Artificially Synthesized Probe
  source 1..80: mol_type = other DNA
ttaacctcacacacacacacaccattcagaaagaatatagaagacaccattaataatgattgctttctggtcatggaggt

SEQ ID NO: 93482 - DNA, 80 bp, synthetic construct
  misc_feature 1..80: note = Artificially Synthesized Probe
  source 1..80: mol_type = other DNA
cctggctaacatagtgaaaccacgtctctactaaaaaaaaaaaaaaaaaaaaaaaaatacaaaaaaattagccaggcatg

SEQ ID NO: 93483 - DNA, 80 bp, synthetic construct
  misc_feature 1..80: note = Artificially Synthesized Probe
  source 1..80: mol_type = other DNA
taatgtgtgttaaaacttttccgctcatctccaaataatgtccagaccttacacttgcttgctgtatcttttaagtctct

SEQ ID NO: 93484 - DNA, 80 bp, synthetic construct
  misc_feature 1..80: note = Artificially Synthesized Probe
  source 1..80: mol_type = other DNA
gtaatctggtggtgagttccatagaagtggtcctcagagtgctctcatcttgagtgttttagattcattcatatcacttg

SEQ ID NO: 93485 - DNA, 80 bp, synthetic construct; identical to SEQ ID NO: 33657
  misc_feature 1..80: note = Artificially Synthesized Probe
  source 1..80: mol_type = other DNA

SEQ ID NO: 93486 - DNA, 80 bp, synthetic construct
  misc_feature 1..80: note = Artificially Synthesized Probe
  source 1..80: mol_type = other DNA
tgcttgtgtcaagttctcccagtaactgctttctgcatttgttagggtagcccctcagctgtggttatggtagaaattaa

SEQ ID NO: 93487 - DNA, 80 bp, synthetic construct
  misc_feature 1..80: note = Artificially Synthesized Probe
  source 1..80: mol_type = other DNA
acaaatcaaatattaggactgccaacctgccctggaaaggcaaataggtggtgacgtggatttgtgatctctgcaaacag

SEQ ID NO: 93488 - DNA, 80 bp, synthetic construct
  misc_feature 1..80: note = Artificially Synthesized Probe
  source 1..80: mol_type = other DNA
gttcgagaccagcctggtcagcatggcgaaaccccatctctactaaaaatacaaaaattagccagccatgatggcaggcg

SEQ ID NO: 93489 - DNA, 80 bp, synthetic construct
  misc_feature 1..80: note = Artificially Synthesized Probe
  source 1..80: mol_type = other DNA
gctgggcggagcggggcgcagcccacgtggttcgggcgggaggcgccgggacgtggccagttgcccgcctgccccggaga

SEQ ID NO: 93490 - DNA, 80 bp, synthetic construct; identical to SEQ ID NO: 33658
  misc_feature 1..80: note = Artificially Synthesized Probe
  source 1..80: mol_type = other DNA

SEQ ID NO: 93491 - DNA, 80 bp, synthetic construct
  misc_feature 1..80: note = Artificially Synthesized Probe
  source 1..80: mol_type = other DNA
caccactcacttcctcttcatcttttttatcgtcatcttggtcttcccctttagaggatctccaggaacttgagtgagtt

SEQ ID NO: 93492 - DNA, 80 bp, synthetic construct
  misc_feature 1..80: note = Artificially Synthesized Probe
  source 1..80: mol_type = other DNA
ctggatcctgtgactcactggatcttttgtgctccagtccccaactcagggtcaccctcaggaatcatttctccattacc

SEQ ID NO: 93493 - DNA, 80 bp, synthetic construct; identical to SEQ ID NO: 33659
  misc_feature 1..80: note = Artificially Synthesized Probe
  source 1..80: mol_type = other DNA

SEQ ID NO: 93494 - DNA, 80 bp, synthetic construct
  misc_feature 1..80: note = Artificially Synthesized Probe
  source 1..80: mol_type = other DNA
cctgccgacaccttgatgttagctcaatgaatcctgagtcaaacttctgccctccagagctgtcaggtaatgcatttgca

SEQ ID NO: 93495 - DNA, 80 bp, synthetic construct
  misc_feature 1..80: note = Artificially Synthesized Probe
  source 1..80: mol_type = other DNA
attacaggtgcccaccaccacacggggctgattttttgtatttttagtagagatggggattcaccatgttggccaggctg

SEQ ID NO: 93496 - DNA, 80 bp, synthetic construct
  misc_feature 1..80: note = Artificially Synthesized Probe
  source 1..80: mol_type = other DNA
acggccagccctcagccttgcagaagggccccctgcatgacctccactctgttggaggccgccggttctgtccaccatgc

SEQ ID NO: 93497 - DNA, 80 bp, synthetic construct; identical to SEQ ID NO: 33660
  misc_feature 1..80: note = Artificially Synthesized Probe
  source 1..80: mol_type = other DNA

SEQ ID NO: 93498 - DNA, 80 bp, synthetic construct
  misc_feature 1..80: note = Artificially Synthesized Probe
  source 1..80: mol_type = other DNA
ttttggccaggccagcagctgggccttgggagaaaggctcatgaccctcccggtggccaggttgatggggtctggactcc

SEQ ID NO: 93499 - DNA, 80 bp, synthetic construct
  misc_feature 1..80: note = Artificially Synthesized Probe
  source 1..80: mol_type = other DNA
gctgtggcctcttccaccaaccccaagcctctgccagtcccctggctgctcctcatcgcatgcagtcctgctggagcatg

SEQ ID NO: 93500 - DNA, 80 bp, synthetic construct
  misc_feature 1..80: note = Artificially Synthesized Probe
  source 1..80: mol_type = other DNA
gtccggtgagtgcactgagaagagggaacagcggggccagggtggcgcccaggactcggggcttaggctttggggggtgc

SEQ ID NO: 93501 - DNA, 80 bp, synthetic construct
  misc_feature 1..80: note = Artificially Synthesized Probe
  source 1..80: mol_type = other DNA
ccagccccgccatcctgggctctccccagtattcctgcatgttgccaccacacccctgtctagatttcaccccaagaggg

SEQ ID NO: 93502 - DNA, 80 bp, synthetic construct
  misc_feature 1..80: note = Artificially Synthesized Probe
  source 1..80: mol_type = other DNA
gacaggagtgcccccttggctctgttctgccccaccagtcacagctctggcatgcgtgtcccagggccctctggaggtgg

SEQ ID NO: 93503 - DNA, 80 bp, synthetic construct; identical to SEQ ID NO: 33661
  misc_feature 1..80: note = Artificially Synthesized Probe
  source 1..80: mol_type = other DNA

SEQ ID NO: 93504 - DNA, 80 bp, synthetic construct
  misc_feature 1..80: note = Artificially Synthesized Probe
  source 1..80: mol_type = other DNA
gtttttataaaaaatgagattttcccaaaatcagagtgtgagtaaggtgagtggtgttgttctgcttttgcaaatctctt

SEQ ID NO: 93505 - DNA, 80 bp, synthetic construct
  misc_feature 1..80: note = Artificially Synthesized Probe
  source 1..80: mol_type = other DNA
tcgagtgagcaattcctgtcccttttaagggcttacaactctaagggggttcatgtgagagggtcatgatcgattgagca

SEQ ID NO: 93506 - DNA, 80 bp, synthetic construct
  misc_feature 1..80: note = Artificially Synthesized Probe
  source 1..80: mol_type = other DNA
gggtgtggcgctgggctgtctgcctgtggatttcatttctgccttttagtttttacttcttttttctttggaggcagaaa

SEQ ID NO: 93507 - DNA, 80 bp, synthetic construct; identical to SEQ ID NO: 33662
  misc_feature 1..80: note = Artificially Synthesized Probe
  source 1..80: mol_type = other DNA

SEQ ID NO: 93508 - DNA, 80 bp, synthetic construct
  misc_feature 1..80: note = Artificially Synthesized Probe
  source 1..80: mol_type = other DNA
agtagctgtgactacaggtgcgtgccaccatgtctggctaatttttgcatttttagtagagacagggtttcaccacattg

SEQ ID NO: 93509 - DNA, 80 bp, synthetic construct
  misc_feature 1..80: note = Artificially Synthesized Probe
  source 1..80: mol_type = other DNA
ttctgtttgttcaaatccattggtctctcttgcacttgaagtggattttctacccctgtgtgatttttgtaacaccatgc

SEQ ID NO: 93510 - DNA, 80 bp, synthetic construct; identical to SEQ ID NO: 33663
  misc_feature 1..80: note = Artificially Synthesized Probe
  source 1..80: mol_type = other DNA

SEQ ID NO: 93511 - DNA, 80 bp, synthetic construct
  misc_feature 1..80: note = Artificially Synthesized Probe
  source 1..80: mol_type = other DNA
cccaagtcgaaacagttcatctctctgttgttctctcaagtgaaaatgctatttcataagaaaagtttctagctcaggtg

SEQ ID NO: 93512 - DNA, 80 bp, synthetic construct
  misc_feature 1..80: note = Artificially Synthesized Probe
  source 1..80: mol_type = other DNA
ggtgggagtgggatggcgggggatccccattttgggcaaaacggttggttttaatcagaagctccattgcctccattgcg

SEQ ID NO: 93513 - DNA, 80 bp, synthetic construct
  misc_feature 1..80: note = Artificially Synthesized Probe
  source 1..80: mol_type = other DNA
ggggccacggttcaaaaagactcataacttttagggtttcatcaaggtgattctttaatgaaactgttttttcttctcat

SEQ ID NO: 93514 - DNA, 80 bp, synthetic construct
  misc_feature 1..80: note = Artificially Synthesized Probe
  source 1..80: mol_type = other DNA
ggctaatttttgtatttttagtagagacggggtttcaccatgttggccaggctggtcttgaactccttacctcaggtgat

SEQ ID NO: 93515 - DNA, 80 bp, synthetic construct; identical to SEQ ID NO: 33664
  misc_feature 1..80: note = Artificially Synthesized Probe
  source 1..80: mol_type = other DNA

SEQ ID NO: 93516 - DNA, 80 bp, synthetic construct
  misc_feature 1..80: note = Artificially Synthesized Probe
  source 1..80: mol_type = other DNA
ttggatctaatattccacggtagaaattgtgcccatttccccctccattgtgagctgtgatttctcgccatctctgtctt

SEQ ID NO: 93517 - DNA, 80 bp, synthetic construct
  misc_feature 1..80: note = Artificially Synthesized Probe
  source 1..80: mol_type = other DNA
taagtcacattcaggagggtcttttattcctgaagctaactttaaattggagccacgtgccgggctcttgcctgttgagg

SEQ ID NO: 93518 - DNA, 80 bp, synthetic construct
  misc_feature 1..80: note = Artificially Synthesized Probe
  source 1..80: mol_type = other DNA
tctctggctatgaagaagggaagttatgttttaaagaatctaaagcacagtacagttctcctttcccctaatttcagcct

SEQ ID NO: 93519 - DNA, 80 bp, synthetic construct
  misc_feature 1..80: note = Artificially Synthesized Probe
  source 1..80: mol_type = other DNA
gttctccctgggacagaggctaacaagccctgtccagcgaaggggtggcctccaggttttctggttggtgcagagctggc

SEQ ID NO: 93520 - DNA, 80 bp, synthetic construct; identical to SEQ ID NO: 33665
  misc_feature 1..80: note = Artificially Synthesized Probe
  source 1..80: mol_type = other DNA

SEQ ID NO: 93521 - DNA, 80 bp, synthetic construct
  misc_feature 1..80: note = Artificially Synthesized Probe
  source 1..80: mol_type = other DNA
gcttcagagttctcagaagacaatggcacctagtgtccttcttgtttttgtcactaagaatggattaattttatctcatc

SEQ ID NO: 93522 - DNA, 80 bp, synthetic construct
  misc_feature 1..80: note = Artificially Synthesized Probe
  source 1..80: mol_type = other DNA
cttccgggtgctagatgattcctgctctggaaactcaccgagccatttcagctgcgctctagaggagcaaacctggggcg

SEQ ID NO: 93523 - DNA, 80 bp, synthetic construct
  misc_feature 1..80: note = Artificially Synthesized Probe
  source 1..80: mol_type = other DNA
tgttttattggaatcaccttttgtttgcagacagactccctgggcccaccagggaggtgtgggaagtagagatgtgggaa

SEQ ID NO: 93524 - DNA, 80 bp, synthetic construct; identical to SEQ ID NO: 33666
  misc_feature 1..80: note = Artificially Synthesized Probe
  source 1..80: mol_type = other DNA

SEQ ID NO: 93525 - DNA, 80 bp, synthetic construct
  misc_feature 1..80: note = Artificially Synthesized Probe
  source 1..80: mol_type = other DNA
tgtttctgatattttcccaagggcgttgaagggcaagattaagaaggaaagctccaagagggagctgctttccgacactg

SEQ ID NO: 93526 - DNA, 80 bp, synthetic construct
  misc_feature 1..80: note = Artificially Synthesized Probe
  source 1..80: mol_type = other DNA
caggtgagcccaggccttgaggtaaaatgaccttgatagtttctggatctggcgtgtcccttccatggggctagctgaag

SEQ ID NO: 93527 - DNA, 80 bp, synthetic construct
  misc_feature 1..80: note = Artificially Synthesized Probe
  source 1..80: mol_type = other DNA
aagcccgcttcaagaggttcggaagtgccaaggtcatccggtccctccacgggcggctgcagggtggaggtaaggagtgg

SEQ ID NO: 93528 - DNA, 80 bp, synthetic construct
  misc_feature 1..80: note = Artificially Synthesized Probe
  source 1..80: mol_type = other DNA
ttttttttttttaatttttgtagagacaggcatctcaccatgtttcccagactggcctcgaactcctgggctcaagcaat

SEQ ID NO: 93529 - DNA, 80 bp, synthetic construct; identical to SEQ ID NO: 33667
  misc_feature 1..80: note = Artificially Synthesized Probe
  source 1..80: mol_type = other DNA

SEQ ID NO: 93530 - DNA, 80 bp, synthetic construct
  misc_feature 1..80: note = Artificially Synthesized Probe
  source 1..80: mol_type = other DNA
tccaagtatttatttcatgatgaatttgaaatccaggcagtaggcttaaactaaacaatgtgttcgcctgtaagatcccc

SEQ ID NO: 93531 - DNA, 80 bp, synthetic construct
  misc_feature 1..80: note = Artificially Synthesized Probe
  source 1..80: mol_type = other DNA
aagcattcgggtgggacagccgccaccaagccaggtgtctggggtctcagtgtcctggatgactccatctgcaagaccaa

SEQ ID NO: 93532 - DNA, 80 bp, synthetic construct
  misc_feature 1..80: note = Artificially Synthesized Probe
  source 1..80: mol_type = other DNA
cttaaagcctcaagtttgattgaagaagcagaagttggcatagacacctttgagcattcaagctctcgccgggcctgctg

SEQ ID NO: 93533 - DNA, 80 bp, synthetic construct; identical to SEQ ID NO: 33668
  misc_feature 1..80: note = Artificially Synthesized Probe
  source 1..80: mol_type = other DNA

SEQ ID NO: 93534 - DNA, 80 bp, synthetic construct; identical to SEQ ID NO: 33642
  misc_feature 1..80: note = Artificially Synthesized Probe
  source 1..80: mol_type = other DNA

SEQ ID NO: 93535 - DNA, 80 bp, synthetic construct
  misc_feature 1..80: note = Artificially Synthesized Probe
  source 1..80: mol_type = other DNA
taaggatagaaacgacacataacaccgggaaaagccatgctgtcaagcatctcagaatctcaaccccagaggcagtcttt

SEQ ID NO: 93536 - DNA, 80 bp, synthetic construct
  misc_feature 1..80: note = Artificially Synthesized Probe
  source 1..80: mol_type = other DNA
aacagaaaacagctgctccttgaacttggattcccagcagctcccccaagcgcccacaggggctgcattcctccctgctg

SEQ ID NO: 93537 - DNA, 80 bp, synthetic construct
  misc_feature 1..80: note = Artificially Synthesized Probe
  source 1..80: mol_type = other DNA
tagtaagtgggcctctgggggtcttcattgagtgaaccttcagagtgctggtgtttcaccaaggccttccatagaggacg

SEQ ID NO: 93538 - DNA, 80 bp, synthetic construct; identical to SEQ ID NO: 33669
  misc_feature 1..80: note = Artificially Synthesized Probe
  source 1..80: mol_type = other DNA

SEQ ID NO: 93539 - DNA, 80 bp, synthetic construct
  misc_feature 1..80: note = Artificially Synthesized Probe
  source 1..80: mol_type = other DNA
tgacaaaagggaccaacactaaaaggatccctgagatcctgggatacttcctcttcatgttcattgtgggggccggggac

SEQ ID NO: 93540 - DNA, 80 bp, synthetic construct
  misc_feature 1..80: note = Artificially Synthesized Probe
  source 1..80: mol_type = other DNA
ctctgtcatctgggcacgttcggagccaaaagccttgaccttctgaaagttcactgaaaaatcatctcgtaaaaggcaga

SEQ ID NO: 93541 - DNA, 80 bp, synthetic construct; identical to SEQ ID NO: 33670
  misc_feature 1..80: note = Artificially Synthesized Probe
  source 1..80: mol_type = other DNA

SEQ ID NO: 93542 - DNA, 80 bp, synthetic construct
  misc_feature 1..80: note = Artificially Synthesized Probe
  source 1..80: mol_type = other DNA
tttttttttagagatgggttctcactatgttgcccaggctggttttgaactcctgggctcaagcagtcctcccacttggg

SEQ ID NO: 93543 - DNA, 80 bp, synthetic construct
  misc_feature 1..80: note = Artificially Synthesized Probe
  source 1..80: mol_type = other DNA
tggggaagagggattctagtttctgtggctggccttggggaagaatgggcctgagagacaagagggcaggagaaggtcag

SEQ ID NO: 93544 - DNA, 80 bp, synthetic construct
  misc_feature 1..80: note = Artificially Synthesized Probe
  source 1..80: mol_type = other DNA
gacagcttttatctttaagagaaagatttaagtaaaaaatgtaccatgctgcctcccccatctttccttccactggggaa

SEQ ID NO: 93545 - DNA, 80 bp, synthetic construct; identical to SEQ ID NO: 33671
  misc_feature 1..80: note = Artificially Synthesized Probe
  source 1..80: mol_type = other DNA

SEQ ID NO: 93546 - DNA, 80 bp, synthetic construct
  misc_feature 1..80: note = Artificially Synthesized Probe
  source 1..80: mol_type = other DNA
ggcctgcatctgtcctaggaaacccatccctccagctggcctgcatctgtcctaggaaacacatccctccacctgctcat

SEQ ID NO: 93547 - DNA, 80 bp, synthetic construct
  misc_feature 1..80: note = Artificially Synthesized Probe
  source 1..80: mol_type = other DNA
aggtgcacagtgaggtctccatctcgcaggaggctttggaagatgcgtcggtgattgattgagtacatccgccgaatgct

SEQ ID NO: 93548 - DNA, 80 bp, synthetic construct
  misc_feature 1..80: note = Artificially Synthesized Probe
  source 1..80: mol_type = other DNA
ccccaggcccgagagatgaggataggatccccacggggatcacaggtgggccagtcagggaaatgtctaaaacagaaacc

SEQ ID NO: 93549 - DNA, 80 bp, synthetic construct
  misc_feature 1..80: note = Artificially Synthesized Probe
  source 1..80: mol_type = other DNA
gcagctccaaggaggccacccaggggtgggacccagccctccaaggcaggggtgctgcccactggtgcccatgtctcagg

SEQ ID NO: 93550 - DNA, 80 bp, synthetic construct
  misc_feature 1..80: note = Artificially Synthesized Probe
  source 1..80: mol_type = other DNA
ctcccacatcacagagcagagagtgaaggtggctctgaggccaccctgggccctgcacccgcagtcctgcttccctttgc

SEQ ID NO: 93551 - DNA, 80 bp, synthetic construct; identical to SEQ ID NO: 33672
  misc_feature 1..80: note = Artificially Synthesized Probe
  source 1..80: mol_type = other DNA

SEQ ID NO: 93552 - DNA, 80 bp, synthetic construct
  misc_feature 1..80: note = Artificially Synthesized Probe
  source 1..80: mol_type = other DNA
cctgtagtgatgaggtcaggcctgctgaccagcaaatgctatgagcctgcaggtgaaaccatgtgtttgggagaacatga

SEQ ID NO: 93553 - DNA, 80 bp, synthetic construct
  misc_feature 1..80: note = Artificially Synthesized Probe
  source 1..80: mol_type = other DNA
ttggtaatgttgatgcagattaccggtttttatactgtaattcagaccagctctaagtgatgtttggataggtatacgaa

SEQ ID NO: 93554 - DNA, 80 bp, synthetic construct; identical to SEQ ID NO: 33673
  misc_feature 1..80: note = Artificially Synthesized Probe
  source 1..80: mol_type = other DNA

SEQ ID NO: 93555 - DNA, 80 bp, synthetic construct
  misc_feature 1..80: note = Artificially Synthesized Probe
  source 1..80: mol_type = other DNA
cactcaggctctaagaacagtagcaggtgcctcagaggattgactgaggacacatttagagaacatgggatggtgcccgg

SEQ ID NO: 93556 - DNA, 80 bp, synthetic construct
  misc_feature 1..80: note = Artificially Synthesized Probe
  source 1..80: mol_type = other DNA
atggataaatagatgtctgagtggatgaatgcattggtgggtggatgggtaggcagctgggtagatgtatgaaggagtga

SEQ ID NO: 93557 - DNA, 80 bp, synthetic construct
  misc_feature 1..80: note = Artificially Synthesized Probe
  source 1..80: mol_type = other DNA
agataggtaggtggataggtggatggatgggcagataaggtggtaggtgggtcaatggatggatgggtgggtgagtggat

SEQ ID NO: 93558 - DNA, 80 bp, synthetic construct
  misc_feature 1..80: note = Artificially Synthesized Probe
  source 1..80: mol_type = other DNA
tcgggagggatgagtggtgggtggatggatagatgaatggatggataggcaggtggaggggtggatgggtaggtgaatga

SEQ ID NO: 93559 - DNA, 80 bp, synthetic construct
  misc_feature 1..80: note = Artificially Synthesized Probe
  source 1..80: mol_type = other DNA
aggagagaggcatgggtggtaggtggatggatggatgaataaatggataggtaggtggatgggcagatgggtaggcggat

SEQ ID NO: 93560 - DNA, 80 bp, synthetic construct; identical to SEQ ID NO: 33674
  misc_feature 1..80: note = Artificially Synthesized Probe
  source 1..80: mol_type = other DNA

SEQ ID NO: 93561 - DNA, 80 bp, synthetic construct
  misc_feature 1..80: note = Artificially Synthesized Probe
  source 1..80: mol_type = other DNA
gggtaggtgaatagatgaatagattgataaatagggggatgggtggattggtagatgggtagatggagggatacattgct

SEQ ID NO: 93562 - DNA, 80 bp, synthetic construct
  misc_feature 1..80: note = Artificially Synthesized Probe
  source 1..80: mol_type = other DNA
tggagtcatgcaggtatctattgcagctgggcctgaactgatatctgaagagagaagtggagacagcgaccagacagatg

SEQ ID NO: 93563 - DNA, 80 bp, synthetic construct; identical to SEQ ID NO: 33675
  misc_feature 1..80: note = Artificially Synthesized Probe
  source 1..80: mol_type = other DNA

SEQ ID NO: 93564 - DNA, 80 bp, synthetic construct
  misc_feature 1..80: note = Artificially Synthesized Probe
  source 1..80: mol_type = other DNA
agtctgggggcacacgggtgtagtgagtgcaggggactgctgtaggacaggcaggggtcctggagggctctcgagggtcc

SEQ ID NO: 93565 - DNA, 80 bp, synthetic construct
  misc_feature 1..80: note = Artificially Synthesized Probe
  source 1..80: mol_type = other DNA
gtgtttctgttttcacgtattgtttaacttattttgggtgggcgagacaaacgaggtaacacctgggttttggggtggga

SEQ ID NO: 93566 - DNA, 80 bp, synthetic construct
  misc_feature 1..80: note = Artificially Synthesized Probe
  source 1..80: mol_type = other DNA
tcatgctatttatgaagttcccagaatgctctgcagtgcctggagtattccctacatgatagagcagtttaaaggatcaa

SEQ ID NO: 93567 - DNA, 80 bp, synthetic construct; identical to SEQ ID NO: 33643
  misc_feature 1..80: note = Artificially Synthesized Probe
  source 1..80: mol_type = other DNA

SEQ ID NO: 93568 - DNA, 80 bp, synthetic construct
  misc_feature 1..80: note = Artificially Synthesized Probe
  source 1..80: mol_type = other DNA
tgcctgccccctaggcggggtccctggggcaagtgcaggggttcagctcagtgttccttcagctcagccaagtttctgga

SEQ ID NO: 93569 - DNA, 80 bp, synthetic construct; identical to SEQ ID NO: 33676
  misc_feature 1..80: note = Artificially Synthesized Probe
  source 1..80: mol_type = other DNA

SEQ ID NO: 93570 - DNA, 80 bp, synthetic construct
  misc_feature 1..80: note = Artificially Synthesized Probe
  source 1..80: mol_type = other DNA
tgagtggcaggtgctcaggccccaggtgagggacagcactctggaagcagtgtctgatggccacacagtcccacctggct

SEQ ID NO: 93571 - DNA, 80 bp, synthetic construct
  misc_feature 1..80: note = Artificially Synthesized Probe
  source 1..80: mol_type = other DNA
tcggtgcttgggacagaaataaggcagaacccccgagactcaggagggcgggacagagaagggcatctgaggtggagtca

SEQ ID NO: 93572 - DNA, 80 bp, synthetic construct; identical to SEQ ID NO: 33677
  misc_feature 1..80: note = Artificially Synthesized Probe
  source 1..80: mol_type = other DNA

SEQ ID NO: 93573 - DNA, 80 bp, synthetic construct
  misc_feature 1..80: note = Artificially Synthesized Probe
  source 1..80: mol_type = other DNA
gagtagatacggtaatggaggctgaaatttgggtttgcataaaggtctttggtatagacttttctagttaaattaggttt

SEQ ID NO: 93574 - DNA, 80 bp, synthetic construct
  misc_feature 1..80: note = Artificially Synthesized Probe
  source 1..80: mol_type = other DNA
ttaaggttattagttatgagattaagctccattgctagcaagaagcctaaggtgtttacacctagggctgcgagcttcag

SEQ ID NO: 93575 - DNA, 80 bp, synthetic construct
  misc_feature 1..80: note = Artificially Synthesized Probe
  source 1..80: mol_type = other DNA
tttgttaatagtaaccagagtcgtgtagcgaggttgtcctattagagcgaagaaaacaatatgggtactatagacagctg

SEQ ID NO: 93576 - DNA, 80 bp, synthetic construct; identical to SEQ ID NO: 33678
  misc_feature 1..80: note = Artificially Synthesized Probe
  source 1..80: mol_type = other DNA

SEQ ID NO: 93577 - DNA, 80 bp, synthetic construct
  misc_feature 1..80: note = Artificially Synthesized Probe
  source 1..80: mol_type = other DNA
tggtagtaacagccgccagacagaatgtaaaggtttggattgatagattcttttctattgaagggtagaagcagatgagc

SEQ ID NO: 93578 - DNA, 80 bp, synthetic construct
  misc_feature 1..80: note = Artificially Synthesized Probe
  source 1..80: mol_type = other DNA
gaaactaagaccctgagaggaggggcatctttcccaggtggctgggctggctgtgcctgaactgggatgggaacccagct

SEQ ID NO: 93579 - DNA, 80 bp, synthetic construct
  misc_feature 1..80: note = Artificially Synthesized Probe
  source 1..80: mol_type = other DNA
cagggctgagactgggcttggaccttcaaacacctgctacaactatagtgctggagcggagcagggctgagactggggtt

SEQ ID NO: 93580 - DNA, 80 bp, synthetic construct
  misc_feature 1..80: note = Artificially Synthesized Probe
  source 1..80: mol_type = other DNA
ggagcagggctgagactggggttgggccttcaaacacctgctacaactatagtgctggagcggagcagggctgagactgg

SEQ ID NO: 93581 - DNA, 80 bp, synthetic construct
  misc_feature 1..80: note = Artificially Synthesized Probe
  source 1..80: mol_type = other DNA
gagtggagcagggctgagactgggcttggaccttcaaacacctgctacaactatagtgctggagcggagcagggctgaga

SEQ ID NO: 93582 - DNA, 80 bp, synthetic construct; identical to SEQ ID NO: 33679
  misc_feature 1..80: note = Artificially Synthesized Probe
  source 1..80: mol_type = other DNA

SEQ ID NO: 93583 - DNA, 80 bp, synthetic construct
  misc_feature 1..80: note = Artificially Synthesized Probe
  source 1..80: mol_type = other DNA
aggaaccatgctatagctaaaataaagccaatatcaccgatgcggttgtactggactgcttgagggctgctgtattagca

SEQ ID NO: 93584 - DNA, 80 bp, synthetic construct
  misc_feature 1..80: note = Artificially Synthesized Probe
  source 1..80: mol_type = other DNA
catattgagaattctacaatagatcggataatgaatagtgctgctgggataaatattgtggagaagtggtctagtgtgaa

SEQ ID NO: 93585 - DNA, 80 bp, synthetic construct; identical to SEQ ID NO: 33680
  misc_feature 1..80: note = Artificially Synthesized Probe
  source 1..80: mol_type = other DNA

SEQ ID NO: 93586 - DNA, 80 bp, synthetic construct
  misc_feature 1..80: note = Artificially Synthesized Probe
  source 1..80: mol_type = other DNA
gataagaagttgcaggcttctattgttaggtccacaatctaatgttttggttaaactatagctacagcatgcaaacccca

SEQ ID NO: 93587 - DNA, 80 bp, synthetic construct
  misc_feature 1..80: note = Artificially Synthesized Probe
  source 1..80: mol_type = other DNA
agtcctataagcataacagtgatagttgatcaggagaacgaggccatagtcacaaagagttctcctactagattactgat

SEQ ID NO: 93588 - DNA, 80 bp, synthetic construct
  misc_feature 1..80: note = Artificially Synthesized Probe
  source 1..80: mol_type = other DNA
ttgaagggctcatggcaggagtagtagtagagtgatctctaagtcgaacaggaggaacgtgatggctactaggtagaatt

SEQ ID NO: 93589 - DNA, 80 bp, synthetic construct; identical to SEQ ID NO: 33681
  misc_feature 1..80: note = Artificially Synthesized Probe
  source 1..80: mol_type = other DNA

SEQ ID NO: 93590 - DNA, 80 bp, synthetic construct
  misc_feature 1..80: note = Artificially Synthesized Probe
  source 1..80: mol_type = other DNA
agttggtgggcaggtggctgaggggcagaacaccctcccagtgctgttgctgctggggccattccagacccttgtggcta

SEQ ID NO: 93591 - DNA, 80 bp, synthetic construct
  misc_feature 1..80: note = Artificially Synthesized Probe
  source 1..80: mol_type = other DNA
tccgatgttcgagggcaggaaacatccagcacagaagaaagatgtaggctgggaggctaggcctgtcttgtcgcttcacg

SEQ ID NO: 93592 - DNA, 80 bp, synthetic construct
  misc_feature 1..80: note = Artificially Synthesized Probe
  source 1..80: mol_type = other DNA
aagttgacactcattactaatcatcatagatgctgtacctggaaggcatgagactcacaggcaggcagtgaaggtaacta

SEQ ID NO: 93593 - DNA, 80 bp, synthetic construct
  misc_feature 1..80: note = Artificially Synthesized Probe
  source 1..80: mol_type = other DNA
gaagcagggtgggtcctggaagccagcagccaattggtttctgggccacaggtcctgctctaactggaggctgtcctaag

SEQ ID NO: 93594 - DNA, 80 bp, synthetic construct; identical to SEQ ID NO: 33682
  misc_feature 1..80: note = Artificially Synthesized Probe
  source 1..80: mol_type = other DNA

SEQ ID NO: 93595 - DNA, 80 bp, synthetic construct
  misc_feature 1..80: note = Artificially Synthesized Probe
  source 1..80: mol_type = other DNA
gtaggcaacaaataggcaatatatgctttaggcacagtctttgaaattaaacagaactgagtggcaggggccagcgcaga

SEQ ID NO: 93596 - DNA, 80 bp, synthetic construct
  misc_feature 1..80: note = Artificially Synthesized Probe
  source 1..80: mol_type = other DNA
ccttaaggaacttaagtccctacatcaactcttaagggatttattaatcttaacaagtaacagtaaagtatatggcaagg

SEQ ID NO: 93597 - DNA, 80 bp, synthetic construct
  misc_feature 1..80: note = Artificially Synthesized Probe
  source 1..80: mol_type = other DNA
gtgcttagtccctcacagatgagtcctgctcagagaaggcagcccctcacaaggctgagggcctggaggaggctgatact

SEQ ID NO: 93598 - DNA, 80 bp, synthetic construct
  misc_feature 1..80: note = Artificially Synthesized Probe
  source 1..80: mol_type = other DNA
gatgggctcggcatgggggagcaggtcactgaggaacaaccccaccaccctgacctatccaacacacgggctgatttgaa

SEQ ID NO: 93599 - DNA, 80 bp, synthetic construct
  misc_feature 1..80: note = Artificially Synthesized Probe
  source 1..80: mol_type = other DNA
aggtggccagcccacagctccctgcttccagcctggggtgggacatgcaggcctccctgaaatgactagaaccactggtc

SEQ ID NO: 93600 - DNA, 80 bp, synthetic construct; identical to SEQ ID NO: 33683
  misc_feature 1..80: note = Artificially Synthesized Probe
  source 1..80: mol_type = other DNA

SEQ ID NO: 93601 - DNA, 80 bp, synthetic construct
  misc_feature 1..80: note = Artificially Synthesized Probe
  source 1..80: mol_type = other DNA
gacggggaccttggaggctttgggaggaaggcagggctctactttcccccaaaaacaatgattaaatgaatctactttgg

SEQ ID NO: 93602 - DNA, 80 bp, synthetic construct
  misc_feature 1..80: note = Artificially Synthesized Probe
  source 1..80: mol_type = other DNA
aacagccacaaaggattaaggcagagggcactacagttgtcatctctgccacctcccctttatcagcaagaataacacca

SEQ ID NO: 93603 - DNA, 80 bp, synthetic construct
  misc_feature 1..80: note = Artificially Synthesized Probe
  source 1..80: mol_type = other DNA
ctgtttcactggttctcacacacgttctttttacacaccaacctctcaaacggggagtgtcttacagtgaatgtggtaag

SEQ ID NO: 93604 - DNA, 80 bp, synthetic construct; identical to SEQ ID NO: 33684
  misc_feature 1..80: note = Artificially Synthesized Probe
  source 1..80: mol_type = other DNA

SEQ ID NO: 93605 - DNA, 80 bp, synthetic construct
  misc_feature 1..80: note = Artificially Synthesized Probe
  source 1..80: mol_type = other DNA
atttactttgcaaacatgcaaagtatgtccactcataacccccacccacaatgccaggcaaggtcctcttttttcctgaa

SEQ ID NO: 93606 - DNA, 80 bp, synthetic construct
  misc_feature 1..80: note = Artificially Synthesized Probe
  source 1..80: mol_type = other DNA
taaacacgtccatcagctttcaggttttcactgcaagtaattcaaacccactctcgctctgaagggtcgaatgtcatcag

SEQ ID NO: 93607 - DNA, 80 bp, synthetic construct
  misc_feature 1..80: note = Artificially Synthesized Probe
  source 1..80: mol_type = other DNA
ctttgggtggagtctttttacctccacaccaagtcactttagagaaattacagcttttaatactttcaaactatgaaatt

SEQ ID NO: 93608 - DNA, 80 bp, synthetic construct
  misc_feature 1..80: note = Artificially Synthesized Probe
  source 1..80: mol_type = other DNA
aattgaagacagggactgaaaaagatatttgcaaccccgtatccatagcagcgttatttgtaataatcaaaaggtggaag

SEQ ID NO: 93609 - DNA, 80 bp, synthetic construct; identical to SEQ ID NO: 33685
  misc_feature 1..80: note = Artificially Synthesized Probe
  source 1..80: mol_type = other DNA

SEQ ID NO: 93610 - DNA, 80 bp, synthetic construct
  misc_feature 1..80: note = Artificially Synthesized Probe
  source 1..80: mol_type = other DNA
aataccttaaaaatggataaaagggtaaatttttatatgtattttataattgaaaaaagtaatattttattgaatttagg

SEQ ID NO: 93611 - DNA, 80 bp, synthetic construct
  misc_feature 1..80: note = Artificially Synthesized Probe
  source 1..80: mol_type = other DNA
cctgagtagctgggaatacaggcgtgcaccaccatgcctggctaatttttgtatttttagtagagacggggtttcacctt

SEQ ID NO: 93612 - DNA, 80 bp, synthetic construct; identical to SEQ ID NO: 33686
  misc_feature 1..80: note = Artificially Synthesized Probe
  source 1..80: mol_type = other DNA

SEQ ID NO: 93613 - DNA, 80 bp, synthetic construct
  misc_feature 1..80: note = Artificially Synthesized Probe
  source 1..80: mol_type = other DNA
gaaaatatatattttatacttgatcaagtattatatattttacaagaggaggaaataatctgtcagctatgtgaaacgct

SEQ ID NO: 93614 - DNA, 80 bp, synthetic construct
  misc_feature 1..80: note = Artificially Synthesized Probe
  source 1..80: mol_type = other DNA
acccccaccctgatttcccttcaatttggccaaaaaattaattcaactctttagcggataaagatgacacactactggaa

SEQ ID NO: 93615 - DNA, 80 bp, synthetic construct
  misc_feature 1..80: note = Artificially Synthesized Probe
  source 1..80: mol_type = other DNA
ccaccacgcccggctaatttttgtatttttagtagagatggggtttcaccatgctgaccagtctggtcttgaactcttga

SEQ ID NO: 93616 - DNA, 80 bp, synthetic construct
  misc_feature 1..80: note = Artificially Synthesized Probe
  source 1..80: mol_type = other DNA
aacttatgaaataattcatcacaagattcaagtgccctgagttccgcttgctgcatttaaatgatgattctgttgagtca

SEQ ID NO: 93617 - DNA, 80 bp, synthetic construct; identical to SEQ ID NO: 33687
  misc_feature 1..80: note = Artificially Synthesized Probe
  source 1..80: mol_type = other DNA

SEQ ID NO: 93618 - DNA, 80 bp, synthetic construct
  misc_feature 1..80: note = Artificially Synthesized Probe
  source 1..80: mol_type = other DNA
gggaagggaatgccctgtggagcttcccttcgggcctgtgggctctgggctgtcaggagggaggctaagtgaaagctgag

SEQ ID NO: 93619 - DNA, 80 bp, synthetic construct
  misc_feature 1..80: note = Artificially Synthesized Probe
  source 1..80: mol_type = other DNA
agcatcacccagctcttcagccacagggctgcagattcctctcccaaggccttggcctacactgtggcagtcactagacc

SEQ ID NO: 93620 - DNA, 80 bp, synthetic construct
  misc_feature 1..80: note = Artificially Synthesized Probe
  source 1..80: mol_type = other DNA
ctgcacccagagaaatgatctaccaaaaatgagcacctgaatttcaaaaagagacttccttagcatggcaatatggggaa

SEQ ID NO: 93621 - DNA, 80 bp, synthetic construct; identical to SEQ ID NO: 33688
  misc_feature 1..80: note = Artificially Synthesized Probe
  source 1..80: mol_type = other DNA

SEQ ID NO: 93622 - DNA, 80 bp, synthetic construct
  misc_feature 1..80: note = Artificially Synthesized Probe
  source 1..80: mol_type = other DNA
ggcccacaattcctgaggcatggaactccttttgtgtaacagcaagcaaggccctgacacaaggaagtgtcctttcattc

SEQ ID NO: 93623 - DNA, 80 bp, synthetic construct
  misc_feature 1..80: note = Artificially Synthesized Probe
  source 1..80: mol_type = other DNA
aacacacacaagtcgagcagagccacttcattactcacagtcaggcagcgaggtcccccaggctcagggaagctgcaggg

SEQ ID NO: 93624 - DNA, 80 bp, synthetic construct; identical to SEQ ID NO: 33644
  misc_feature 1..80: note = Artificially Synthesized Probe
  source 1..80: mol_type = other DNA

SEQ ID NO: 93625 - DNA, 80 bp, synthetic construct
  misc_feature 1..80: note = Artificially Synthesized Probe
  source 1..80: mol_type = other DNA
ttacatcaggaagtggctttcttgacacattctacagttattctgagaaaaggggaagagccaactcagccaagtccatc

SEQ ID NO: 93626 - DNA, 80 bp, synthetic construct; identical to SEQ ID NO: 33689
  misc_feature 1..80: note = Artificially Synthesized Probe
  source 1..80: mol_type = other DNA

SEQ ID NO: 93627 - DNA, 80 bp, synthetic construct
  misc_feature 1..80: note = Artificially Synthesized Probe
  source 1..80: mol_type = other DNA
gccccactgaaaccaattatcctttatacctgcttggaattattctctagttcatgtttgtatatcctgcctgtggaatt

SEQ ID NO: 93628 - DNA, 80 bp, synthetic construct
  misc_feature 1..80: note = Artificially Synthesized Probe
  source 1..80: mol_type = other DNA
tggactagtgaagttttcacctatgtagaaattgtagcaggatcacaaccttgcaaaggaacagtgacctggggggccct

SEQ ID NO: 93629 - DNA, 80 bp, synthetic construct
  misc_feature 1..80: note = Artificially Synthesized Probe
  source 1..80: mol_type = other DNA
tcccatgcatctttatatggaggaaattaagcagcagaaagaagctccaaatgcagcagcgatcctgtacttcagagaaa

SEQ ID NO: 93630 - DNA, 80 bp, synthetic construct
  misc_feature 1..80: note = Artificially Synthesized Probe
  source 1..80: mol_type = other DNA
aggcagctgtgcattgcctgcctttgcatttgtattgacagtcacagctttcccgacgaggggtaaagacttcctgtaga

SEQ ID NO: 93631 - DNA, 80 bp, synthetic construct; identical to SEQ ID NO: 33690
  misc_feature 1..80: note = Artificially Synthesized Probe
  source 1..80: mol_type = other DNA

SEQ ID NO: 93632 - DNA, 80 bp, synthetic construct
  misc_feature 1..80: note = Artificially Synthesized Probe
  source 1..80: mol_type = other DNA
cccaccagagcagttgttactgttggagaaatataatttttagaaaaacccgaaatcttttcattacccagaaaatctct

SEQ ID NO: 93633 - DNA, 80 bp, synthetic construct
  misc_feature 1..80: note = Artificially Synthesized Probe
  source 1..80: mol_type = other DNA
agcacaaaccatcaccagtccttaccaatgagaggagctgatggtgcctttgatcacagtgtacatcctcactctagcat

SEQ ID NO: 93634 - DNA, 80 bp, synthetic construct
  misc_feature 1..80: note = Artificially Synthesized Probe
  source 1..80: mol_type = other DNA
agagcagccctgcactcctcatgggtctagcatattctctgccctcacctccctgagcccatggaggtcgaggcagcagt

SEQ ID NO: 93635 - DNA, 80 bp, synthetic construct; identical to SEQ ID NO: 33691
  misc_feature 1..80: note = Artificially Synthesized Probe
  source 1..80: mol_type = other DNA

SEQ ID NO: 93636 - DNA, 80 bp, synthetic construct
  misc_feature 1..80: note = Artificially Synthesized Probe
  source 1..80: mol_type = other DNA
aaactccacctcccagattcaagcgattctcctgcctcagcctcccgagtagctgggattacaggcatgagccaccaccc

SEQ ID NO: 93637 - DNA, 80 bp, synthetic construct
  misc_feature 1..80: note = Artificially Synthesized Probe
  source 1..80: mol_type = other DNA
gcttctgcagatgctcaacgggaccagagggtgactcagttactagtggccgctcaaggcgtgggccgaggtctaactga

SEQ ID NO: 93638 - DNA, 80 bp, synthetic construct
  misc_feature 1..80: note = Artificially Synthesized Probe
  source 1..80: mol_type = other DNA
cgtaaatgagataatggcaggaaagatgcatctgctgggtgaggaagaaaactagaaaattgatttatcatgtctcagtc

SEQ ID NO: 93639 - DNA, 80 bp, synthetic construct
  misc_feature 1..80: note = Artificially Synthesized Probe
  source 1..80: mol_type = other DNA
ccaggctcttgctagctaatgactgtgagtttgatcactgtggcgtaattaactgatgtcttcctgtgctgctcggtacc

SEQ ID NO: 93640 - DNA, 80 bp, synthetic construct; identical to SEQ ID NO: 33692
  misc_feature 1..80: note = Artificially Synthesized Probe
  source 1..80: mol_type = other DNA

SEQ ID NO: 93641 - DNA, 80 bp, synthetic construct
  misc_feature 1..80: note = Artificially Synthesized Probe
  source 1..80: mol_type = other DNA
ttctgctgcagatctttgagctgaataagcatatttcagctgtggaatgcctgctgacctacctggagaacacagttgtg

SEQ ID NO: 93642 - DNA, 80 bp, synthetic construct
  misc_feature 1..80: note = Artificially Synthesized Probe
  source 1..80: mol_type = other DNA
ctgtttgtaaggttaagttctgtgtgtagttctcagagagccaggcagttcccaccacatagcctgagtgaagtcttctg

SEQ ID NO: 93643 - DNA, 80 bp, synthetic construct; identical to SEQ ID NO: 33693
  misc_feature 1..80: note = Artificially Synthesized Probe
  source 1..80: mol_type = other DNA

SEQ ID NO: 93644 - DNA, 80 bp, synthetic construct
  misc_feature 1..80: note = Artificially Synthesized Probe
  source 1..80: mol_type = other DNA
agcctctaggacattggttgtgatgctctgtgatctttttatccattcacttcctggtcactgactgtgctctaagaatg

SEQ ID NO: 93645 - DNA, 80 bp, synthetic construct
  misc_feature 1..80: note = Artificially Synthesized Probe
  source 1..80: mol_type = other DNA
tggtgacagagggcaggagagacagaaagcaagatggaactgaacttgcttttataacaaccaccctggaatgaataaca

SEQ ID NO: 93646 - DNA, 80 bp, synthetic construct
  misc_feature 1..80: note = Artificially Synthesized Probe
  source 1..80: mol_type = other DNA
tgaactttaggggacacagtcaaaccacaacagcacaccgagacaacctgatggggagtaaataaaacaaaccatggcct

SEQ ID NO: 93647 - DNA, 80 bp, synthetic construct
  misc_feature 1..80: note = Artificially Synthesized Probe
  source 1..80: mol_type = other DNA
aaatatgattaagtattgagtttctttgagcacaaagtttgaggacagccttctgggccacacagactccataggaatgg

SEQ ID NO: 93648 - DNA, 80 bp, synthetic construct; identical to SEQ ID NO: 33694
  misc_feature 1..80: note = Artificially Synthesized Probe
  source 1..80: mol_type = other DNA

SEQ ID NO: 93649 - DNA, 80 bp, synthetic construct
  misc_feature 1..80: note = Artificially Synthesized Probe
  source 1..80: mol_type = other DNA
cttgtagcaccctaggtttgcagctgctcatttttcttggggccagggctccggagaaacagatctgggtgaagctcggg

SEQ ID NO: 93650 - DNA, 80 bp, synthetic construct
  misc_feature 1..80: note = Artificially Synthesized Probe
  source 1..80: mol_type = other DNA
aaggggatgagttactgtgctctgtgctttatgggttactagagccaggctgaccatgtgccataatttcatttaatcct

SEQ ID NO: 93651 - DNA, 80 bp, synthetic construct
  misc_feature 1..80: note = Artificially Synthesized Probe
  source 1..80: mol_type = other DNA
ggaagggcccctgcctgcactgagtcagagtggccccaacacaagctccagcgccccatcggaccccatgtcccatatcc

SEQ ID NO: 93652 - DNA, 80 bp, synthetic construct; identical to SEQ ID NO: 33695
  misc_feature 1..80: note = Artificially Synthesized Probe
  source 1..80: mol_type = other DNA

SEQ ID NO: 93653 - DNA, 80 bp, synthetic construct
  misc_feature 1..80: note = Artificially Synthesized Probe
  source 1..80: mol_type = other DNA
ggccatcaaggagctggacctgagaggcagcggggccctccaccttgaggggctggatctggggccaccagcatcctgtc

SEQ ID NO: 93654 - DNA, 80 bp, synthetic construct; identical to SEQ ID NO: 33645
  misc_feature 1..80: note = Artificially Synthesized Probe
  source 1..80: mol_type = other DNA

SEQ ID NO: 93655 - DNA, 80 bp, synthetic construct
  misc_feature 1..80: note = Artificially Synthesized Probe
  source 1..80: mol_type = other DNA
tgtaggtttgtgtgtgtgtgtgtgaatttatttactggcttacaaagcgaagacaatccctgcctctcccaggcatctac

SEQ ID NO: 93656 - DNA, 80 bp, synthetic construct
  misc_feature 1..80: note = Artificially Synthesized Probe
  source 1..80: mol_type = other DNA
ccgatctttccaccgagggcctctgtgatttgggggctttgtcaggaaagtggagcctcacggaaaagcatactggctaa

SEQ ID NO: 93657 - DNA, 80 bp, synthetic construct
  misc_feature 1..80: note = Artificially Synthesized Probe
  source 1..80: mol_type = other DNA
tcgatgcagcccaggggcgccgtgggctgtgagcaacttcctggtggaggcacctgctctccctccctcccagccctcca

SEQ ID NO: 93658 - DNA, 80 bp, synthetic construct; identical to SEQ ID NO: 33696
  misc_feature 1..80: note = Artificially Synthesized Probe
  source 1..80: mol_type = other DNA

SEQ ID NO: 93659 - DNA, 80 bp, synthetic construct
  misc_feature 1..80: note = Artificially Synthesized Probe
  source 1..80: mol_type = other DNA
gggcggggcctgcgtctgctgaagggaactcagcatagacagggtcacagggaaaaggccaatgatgtgttactgtgcac

SEQ ID NO: 93660 - DNA, 80 bp, synthetic construct
  misc_feature 1..80: note = Artificially Synthesized Probe
  source 1..80: mol_type = other DNA
agataaaaatctctcgggtaaccaggagctgccctcgaagaatcggcagcagtccatgctggcggcgtcgctgtccgacg

SEQ ID NO: 93661 - DNA, 80 bp, synthetic construct; identical to SEQ ID NO: 33697
  misc_feature 1..80: note = Artificially Synthesized Probe
  source 1..80: mol_type = other DNA

SEQ ID NO: 93662 - DNA, 80 bp, synthetic construct
  misc_feature 1..80: note = Artificially Synthesized Probe
  source 1..80: mol_type = other DNA
gtggctgtctaaggtcaagtgttgcagcccctcctaaggtcccaaggagggagccgctgcaggagacagcccggccaaga

SEQ ID NO: 93663 - DNA, 80 bp, synthetic construct
  misc_feature 1..80: note = Artificially Synthesized Probe
  source 1..80: mol_type = other DNA
tgctctggccatcctcctgagaacaggttgtggaggtgggggtgaggcagcagggccggctgggagaaggcggtggtcga

SEQ ID NO: 93664 - DNA, 80 bp, synthetic construct
  misc_feature 1..80: note = Artificially Synthesized Probe
  source 1..80: mol_type = other DNA
aaatgtgagttttacagtgtgagtgacactttcaatctcatcgcctaccttagcaccatgttggctgtaagaggcaattg

SEQ ID NO: 93665 - DNA, 80 bp, synthetic construct
  misc_feature 1..80: note = Artificially Synthesized Probe
  source 1..80: mol_type = other DNA
cctaaatctgactgtaaaggaacagagtttgaatgctcccagggcattggggcaatctcttcttgtattgcaaacactca

SEQ ID NO: 93666 - DNA, 80 bp, synthetic construct; identical to SEQ ID NO: 33698
  misc_feature 1..80: note = Artificially Synthesized Probe
  source 1..80: mol_type = other DNA

SEQ ID NO: 93667 - DNA, 80 bp, synthetic construct
  misc_feature 1..80: note = Artificially Synthesized Probe
  source 1..80: mol_type = other DNA
cgtgggaagagcccagcccctgaagctggacccgaccaaggctgtctgtgtatttccctgagagagagtgggcagagatc

SEQ ID NO: 93668 - DNA, 80 bp, synthetic construct
  misc_feature 1..80: note = Artificially Synthesized Probe
  source 1..80: mol_type = other DNA
gcagaacctgctcctggagtctgggactgggccccagaggggcatgttggacaagctggcatggagaagggaggcagctg

SEQ ID NO: 93669 - DNA, 80 bp, synthetic construct
  misc_feature 1..80: note = Artificially Synthesized Probe
  source 1..80: mol_type = other DNA
gccctgaggaggaagctggaggagctgaccagcaacgtcagtgaccaggagacctcgtccgaggaggaggaagccaagga

SEQ ID NO: 93670 - DNA, 80 bp, synthetic construct
  misc_feature 1..80: note = Artificially Synthesized Probe
  source 1..80: mol_type = other DNA
cacaggagcacaccaagggcccttgatggggtctgcagcgggtggccggctcctgaccaaccagctcccagggttcagag

SEQ ID NO: 93671 - DNA, 80 bp, synthetic construct; identical to SEQ ID NO: 33699
  misc_feature 1..80: note = Artificially Synthesized Probe
  source 1..80: mol_type = other DNA

SEQ ID NO: 93672 - DNA, 80 bp, synthetic construct
  misc_feature 1..80: note = Artificially Synthesized Probe
  source 1..80: mol_type = other DNA
tgggggtttctgggggactcacctaattcgccaccccctgagccctccaccccttccctttttcctgttcaacttggtga

SEQ ID NO: 93673 - DNA, 80 bp, synthetic construct
  misc_feature 1..80: note = Artificially Synthesized Probe
  source 1..80: mol_type = other DNA
ttgaatctgggtgaggaacccatcaatagtgcacaaaggtcaaagggcagagccaaagcattcaggcctcccagggacag

SEQ ID NO: 93674 - DNA, 80 bp, synthetic construct; identical to SEQ ID NO: 33700
  misc_feature 1..80: note = Artificially Synthesized Probe
  source 1..80: mol_type = other DNA

SEQ ID NO: 93675 - DNA, 80 bp, synthetic construct
  misc_feature 1..80: note = Artificially Synthesized Probe
  source 1..80: mol_type = other DNA
gatcatttgggttcatgaaaagtgtgattaagacaatcagtgaaggtgagcccctagagtgctcggggcagggcgattga

SEQ ID NO: 93676 - DNA, 80 bp, synthetic construct
  misc_feature 1..80: note = Artificially Synthesized Probe
  source 1..80: mol_type = other DNA
cccttttcatagttaacctcttgtgcaacaaaatcgaagtacgtctccagcacagggggagttttgttagtatttttatg

SEQ ID NO: 93677 - DNA, 80 bp, synthetic construct
  misc_feature 1..80: note = Artificially Synthesized Probe
  source 1..80: mol_type = other DNA
gatgaggggagagtgtgaggagggtggacggcaaaggcccctgggggccactgcaaggatctgagtagggggtgatgggg

SEQ ID NO: 93678 - DNA, 80 bp, synthetic construct
  misc_feature 1..80: note = Artificially Synthesized Probe
  source 1..80: mol_type = other DNA
ccagcccctcatgggagccggactccctgagactcaagaaaatgcacccgtcctgcgttcctcctgcctggggtgaccca

SEQ ID NO: 93679 - DNA, 80 bp, synthetic construct; identical to SEQ ID NO: 33701
  misc_feature 1..80: note = Artificially Synthesized Probe
  source 1..80: mol_type = other DNA

SEQ ID NO: 93680 - DNA, 80 bp, synthetic construct
  misc_feature 1..80: note = Artificially Synthesized Probe
  source 1..80: mol_type = other DNA
agggacagtggtgagtggggacagtggtgagtggggggacagtggtgagtggagggacagtggtgagtggggacagtggt

SEQ ID NO: 93681 - DNA, 80 bp, synthetic construct; identical to SEQ ID NO: 33702
  misc_feature 1..80: note = Artificially Synthesized Probe
  source 1..80: mol_type = other DNA

SEQ ID NO: 93682 - DNA, 80 bp, synthetic construct
  misc_feature 1..80: note = Artificially Synthesized Probe
  source 1..80: mol_type = other DNA
ggcacagtagtgagtagggggacagtggtgaatgggggacagtggtgaatgggggacagtggtgagtgggggacagtggt

SEQ ID NO: 93683 - DNA, 80 bp, synthetic construct
  misc_feature 1..80: note = Artificially Synthesized Probe
  source 1..80: mol_type = other DNA
gggggcacggtagtgactggggcgacagtggtgagtggggggacagtggtgagtgggggacagtggtgagtgggggacag

SEQ ID NO: 93684 - DNA, 80 bp, synthetic construct
  misc_feature 1..80: note = Artificially Synthesized Probe
  source 1..80: mol_type = other DNA
gagtgggggacagtggtgagtgggggacagtggtgagtgggcacggtagtgagtggggggacagtggtgagtgggaggac

SEQ ID NO: 93685 - DNA, 80 bp, synthetic construct; identical to SEQ ID NO: 93684
  misc_feature 1..80: note = Artificially Synthesized Probe
  source 1..80: mol_type = other DNA

SEQ ID NO: 93686 - DNA, 80 bp, synthetic construct
  misc_feature 1..80: note = Artificially Synthesized Probe
  source 1..80: mol_type = other DNA
gtggggggacagtggtgagttggggggacagtggtgagtggggacagtggtgagtggggacagtaatgagtcgggggaca

SEQ ID NO: 93687 - DNA, 80 bp, synthetic construct
  misc_feature 1..80: note = Artificially Synthesized Probe
  source 1..80: mol_type = other DNA
aaaacttattgaaattacgaggtggtttttaaactttcagttactcacaacagaactcccagtcatccattccccaaagc

SEQ ID NO: 93688 - DNA, 80 bp, synthetic construct; identical to SEQ ID NO: 33703
  misc_feature 1..80: note = Artificially Synthesized Probe
  source 1..80: mol_type = other DNA

SEQ ID NO: 93689 - DNA, 80 bp, synthetic construct
  misc_feature 1..80: note = Artificially Synthesized Probe
  source 1..80: mol_type = other DNA
acagtggtgagtggggacagtggtgagtggggggacagtggtgagtgggcacggtggtgagtggggggacagtggtgagt

SEQ ID NO: 93690 - DNA, 80 bp, synthetic construct
  misc_feature 1..80: note = Artificially Synthesized Probe
  source 1..80: mol_type = other DNA
cagtggtgagtgggcacagtagtgagtggggggacagtggtgagtggggacagtggtgagtggggggacagtggtgaatg

SEQ ID NO: 93691 - DNA, 80 bp, synthetic construct
  misc_feature 1..80: note = Artificially Synthesized Probe
  source 1..80: mol_type = other DNA
cagtggtgagtggggggacagtggtgagtggagggcacagtggtgagtggggacagtggtgagtggggacagtggtgagt

SEQ ID NO: 93692 - DNA, 80 bp, synthetic construct; identical to SEQ ID NO: 33704
  misc_feature 1..80: note = Artificially Synthesized Probe
  source 1..80: mol_type = other DNA

SEQ ID NO: 93693 - DNA, 80 bp, synthetic construct
  misc_feature 1..80: note = Artificially Synthesized Probe
  source 1..80: mol_type = other DNA
aggagctgctcacgtcaggccaacatcctcctctcctgatcccattcaggaatcttcagacaaaaccatcctgattagga

SEQ ID NO: 93694 - DNA, 80 bp, synthetic construct
  misc_feature 1..80: note = Artificially Synthesized Probe
  source 1..80: mol_type = other DNA
ctgtcgatcttgtgaacacaaaatatctgagacaggtctcagtcaatttggaaagtttattttgccaaagttaaggacac

SEQ ID NO: 93695 - DNA, 80 bp, synthetic construct
  misc_feature 1..80: note = Artificially Synthesized Probe
  source 1..80: mol_type = other DNA
ttcctggttgtagtagataagagacaaaaggttgcattcttttgagttcttgatcagccttccactgaacacacaattta

SEQ ID NO: 93696 - DNA, 80 bp, synthetic construct; identical to SEQ ID NO: 33705
  misc_feature 1..80: note = Artificially Synthesized Probe
  source 1..80: mol_type = other DNA

SEQ ID NO: 93697 - DNA, 80 bp, synthetic construct
  misc_feature 1..80: note = Artificially Synthesized Probe
  source 1..80: mol_type = other DNA
ctttgccctccagatatttctccctcgagtggctgggaaacttggcaagagaccagaggacccaaatgcagacccttcaa

SEQ ID NO: 93698 - DNA, 80 bp, synthetic construct
  misc_feature 1..80: note = Artificially Synthesized Probe
  source 1..80: mol_type = other DNA
ataactaatgagacatcaccaactgttaaggggtataaagaaacgttaaagggatggggacaggtgaaggagtaaaaacc

SEQ ID NO: 93699 - DNA, 80 bp, synthetic construct
  misc_feature 1..80: note = Artificially Synthesized Probe
  source 1..80: mol_type = other DNA
gtggcaactcttgtgagttggcttcctccgtggcacacacctgagctggatttgtgtagatgcatttgttgaaaatccaa

SEQ ID NO: 93700 - DNA, 80 bp, synthetic construct
  misc_feature 1..80: note = Artificially Synthesized Probe
  source 1..80: mol_type = other DNA
cacccacacccgtcagtcctgagtaagggccaggccctgggccacacacattcccaggcacttctgcccttccctgaaca

SEQ ID NO: 93701 - DNA, 80 bp, synthetic construct
  misc_feature 1..80: note = Artificially Synthesized Probe
  source 1..80: mol_type = other DNA
agcctgggagggaggagctccccgtgtttaggtggagtggttaggagtaggagcagtgcacagagggcagagccagcctg

SEQ ID NO: 93702 - DNA, 80 bp, synthetic construct; identical to SEQ ID NO: 33706
  misc_feature 1..80: note = Artificially Synthesized Probe
  source 1..80: mol_type = other DNA

SEQ ID NO: 93703 - DNA, 80 bp, synthetic construct
  misc_feature 1..80: note = Artificially Synthesized Probe
  source 1..80: mol_type = other DNA
gtggttaggggtaggagcagtgcacagagggcagagccagcctgggagggagttgctccccgtgttcaggtggagtggtt

SEQ ID NO: 93704 - DNA, 80 bp, synthetic construct
  misc_feature 1..80: note = Artificially Synthesized Probe
  source 1..80: mol_type = other DNA
agtccatctttccacaggatgtttacagcacccagcgggtaggcagtgctatttattaaccctgttgtactgatgaacaa

SEQ ID NO: 93705 - DNA, 80 bp, synthetic construct
  misc_feature 1..80: note = Artificially Synthesized Probe
  source 1..80: mol_type = other DNA
tttgtccctggaagcccagcctgacagcttctgcagtgcctctggcagccgcccacaaacccagccaggcaaaatcccag

SEQ ID NO: 93706 - DNA, 80 bp, synthetic construct; identical to SEQ ID NO: 33707
  misc_feature 1..80: note = Artificially Synthesized Probe
  source 1..80: mol_type = other DNA

SEQ ID NO: 93707 - DNA, 80 bp, synthetic construct
  misc_feature 1..80: note = Artificially Synthesized Probe
  source 1..80: mol_type = other DNA
ccgaggtgggcggatcacaagatcaggagatcgagaccattctggctaacacggtgaaaccctgtctctactaaaaatac

SEQ ID NO: 93708 - DNA, 80 bp, synthetic construct; identical to SEQ ID NO: 33646
  misc_feature 1..80: note = Artificially Synthesized Probe
  source 1..80: mol_type = other DNA

SEQ ID NO: 93709 - DNA, 80 bp, synthetic construct
  misc_feature 1..80: note = Artificially Synthesized Probe
  source 1..80: mol_type = other DNA
catctcaaacaaaaaaagaagtgaattaattgtccatgtcacacagtggtaagggggagtgctgggatttaaaccagacc

SEQ ID NO: 93710 - DNA, 80 bp, synthetic construct
  misc_feature 1..80: note = Artificially Synthesized Probe
  source 1..80: mol_type = other DNA
tggccatggttaattagaagctggaagaacaataagaaatccaaaattagttgacaattcctaaacgtcacaacttgatg

SEQ ID NO: 93711 - DNA, 80 bp, synthetic construct; identical to SEQ ID NO: 33708
  misc_feature 1..80: note = Artificially Synthesized Probe
  source 1..80: mol_type = other DNA

SEQ ID NO: 93712 - DNA, 80 bp, synthetic construct; identical to SEQ ID NO: 33640
  misc_feature 1..80: note = Artificially Synthesized Probe
  source 1..80: mol_type = other DNA

SEQ ID NO: 93713 - DNA, 80 bp, synthetic construct
  misc_feature 1..80: note = Artificially Synthesized Probe
  source 1..80: mol_type = other DNA
cggctcatcatttagccttccttgaaggcttggtggtgacaaggacattagctttgtcctggacgaacgggatgtgaggc

SEQ ID NO: 93714 - DNA, 80 bp, synthetic construct
  misc_feature 1..80: note = Artificially Synthesized Probe
  source 1..80: mol_type = other DNA
actgatctcctgttgtccctgtcttctgagctttgccctcacacacaccattgttcaaactctgccacagctgcagtcct

SEQ ID NO: 93715 - DNA, 80 bp, synthetic construct
  misc_feature 1..80: note = Artificially Synthesized Probe
  source 1..80: mol_type = other DNA
ccttcccgtgcgtaggacaacgcacagcggacgctggtttcagagcgcaccaagcaggcacttgcctccacgcctgggtg

SEQ ID NO: 93716 - DNA, 80 bp, synthetic construct; identical to SEQ ID NO: 33709
  misc_feature 1..80: note = Artificially Synthesized Probe
  source 1..80: mol_type = other DNA

SEQ ID NO: 93717 - DNA, 80 bp, synthetic construct
  misc_feature 1..80: note = Artificially Synthesized Probe
  source 1..80: mol_type = other DNA
ttgttttattttgttgagacagggtctcactctgtcgcccaggctggagtgcaatggcgtgatctcagctcactgcaccc

SEQ ID NO: 93718 - DNA, 80 bp, synthetic construct
  misc_feature 1..80: note = Artificially Synthesized Probe
  source 1..80: mol_type = other DNA
tccacctcggcctcccaaagtgctgggattacaggcgtgagccaccgtgcccggccaagagattcatgtttgtagcagga

SEQ ID NO: 93719 - DNA, 80 bp, synthetic construct
  misc_feature 1..80: note = Artificially Synthesized Probe
  source 1..80: mol_type = other DNA
aggcctgacccttcacatttctccccgccatcctcaccagcatctgccaagcgtggccacgggagcttttcactgtctgc

SEQ ID NO: 93720 - DNA, 80 bp, synthetic construct
  misc_feature 1..80: note = Artificially Synthesized Probe
  source 1..80: mol_type = other DNA
ggccaacacgtgcactcgagctgcctggagatcttgttcaaaggcagattctgaatgagtaggtctgggttggagcctga

SEQ ID NO: 93721 - DNA, 80 bp, synthetic construct; identical to SEQ ID NO: 33710
  misc_feature 1..80: note = Artificially Synthesized Probe
  source 1..80: mol_type = other DNA

SEQ ID NO: 93722 - DNA, 80 bp, synthetic construct
  misc_feature 1..80: note = Artificially Synthesized Probe
  source 1..80: mol_type = other DNA
agacatgcaaaagtgaagaagggcgggtgcctgcaccagccacctggacaccaacactcaactaggatgtgaggccagat

SEQ ID NO: 93723 - DNA, 80 bp, synthetic construct
  misc_feature 1..80: note = Artificially Synthesized Probe
  source 1..80: mol_type = other DNA
ggatcacttgaagtcaggagttcgagaccagcctggccaacatggtgaaaccccatctctactaaaaaatacaaaaatta

SEQ ID NO: 93724 - DNA, 80 bp, synthetic construct; identical to SEQ ID NO: 33711
  misc_feature 1..80: note = Artificially Synthesized Probe
  source 1..80: mol_type = other DNA

SEQ ID NO: 93725 - DNA, 80 bp, synthetic construct
  misc_feature 1..80: note = Artificially Synthesized Probe
  source 1..80: mol_type = other DNA
gtccatttttttctaccttttaaatttctgaggaggccaaggcacttgtttgggctaagtatgtgattgataaagcacca

SEQ ID NO: 93726 - DNA, 80 bp, synthetic construct
  misc_feature 1..80: note = Artificially Synthesized Probe
  source 1..80: mol_type = other DNA
tcgcggtaaagttttctctcattctctgaggagtttttaaagttcagtgacccgtcagatttatgtattaaaattaagtc

SEQ ID NO: 93727 - DNA, 80 bp, synthetic construct
  misc_feature 1..80: note = Artificially Synthesized Probe
  source 1..80: mol_type = other DNA
taatatcttgtgttttagagctttaaattttcaaatatctgctgtccacacaccccattggaggaggacctgtgtcacta

SEQ ID NO: 93728 - DNA, 80 bp, synthetic construct
  misc_feature 1..80: note = Artificially Synthesized Probe
  source 1..80: mol_type = other DNA
taagtaaaaaaccccaagagagttcacctaatattgtgaagaaagcaaacccagggtttcactaacttgtccatgtgtgt

SEQ ID NO: 93729 - DNA, 80 bp, synthetic construct; identical to SEQ ID NO: 33712
  misc_feature 1..80: note = Artificially Synthesized Probe
  source 1..80: mol_type = other DNA

SEQ ID NO: 93730 - DNA, 80 bp, synthetic construct
  misc_feature 1..80: note = Artificially Synthesized Probe
  source 1..80: mol_type = other DNA
tactttccattttcatctgagatgcagtggaaagggggtatagcaaagggagtagctgctgaaccttttgttcctcaggc

SEQ ID NO: 93731 - DNA, 80 bp, synthetic construct
  misc_feature 1..80: note = Artificially Synthesized Probe
  source 1..80: mol_type = other DNA
tctaaatttgtgtctacagatgtgcacatccatgtacacacctgtgtatttgtatgtgcatgcccatgtgtgtctgtgtt

SEQ ID NO: 93732 - DNA, 80 bp, synthetic construct
  misc_feature 1..80: note = Artificially Synthesized Probe
  source 1..80: mol_type = other DNA
ttcaaaaaaaaagggcataagatcatctgaggtttgacttcttggtcatcaggttacctacaaacacagcatcacatagt

SEQ ID NO: 93733 - DNA, 80 bp, synthetic construct
  misc_feature 1..80: note = Artificially Synthesized Probe
  source 1..80: mol_type = other DNA
tttccactatacacagtcaccgtcccaatgagaaacaagaaggagcaccctccacatggactcccacctgcaagtggaca

SEQ ID NO: 93734 - DNA, 80 bp, synthetic construct; identical to SEQ ID NO: 33713
  misc_feature 1..80: note = Artificially Synthesized Probe
  source 1..80: mol_type = other DNA

SEQ ID NO: 93735 - DNA, 80 bp, synthetic construct
  misc_feature 1..80: note = Artificially Synthesized Probe
  source 1..80: mol_type = other DNA
tagacatccggacaagtgactgaactaatgatctgctgaataatgaaggaggaatagacaccccagtccccaccctacgt

SEQ ID NO: 93736 - DNA, 80 bp, synthetic construct
  misc_feature 1..80: note = Artificially Synthesized Probe
  source 1..80: mol_type = other DNA
agatgggcaaggaagaggcttggttctagcctggctctgcccctcactgcagtggatccagtggggcagaggacagaggg

SEQ ID NO: 93737 - DNA, 80 bp, synthetic construct
  misc_feature 1..80: note = Artificially Synthesized Probe
  source 1..80: mol_type = other DNA
tccaagactctccagagctgcctttgaacatcctaacagtaatcacatctcaccctccctgaggttcactttagacagga

SEQ ID NO: 93738 - DNA, 80 bp, synthetic construct; identical to SEQ ID NO: 33714
  misc_feature 1..80: note = Artificially Synthesized Probe
  source 1..80: mol_type = other DNA

SEQ ID NO: 93739 - DNA, 80 bp, synthetic construct
  misc_feature 1..80: note = Artificially Synthesized Probe
  source 1..80: mol_type = other DNA
gtaaggtggctcatacctataatcccagccctttgagaggccaaggtgggagaattgcttgaggccaggagtttgagacc

SEQ ID NO: 93740 - DNA, 80 bp, synthetic construct
  misc_feature 1..80: note = Artificially Synthesized Probe
  source 1..80: mol_type = other DNA
catcactatactcgagcctgggcaacagagtgagaccttgtctcttaaaaaaattaataataaataaatgaaaataattc

SEQ ID NO: 93741 - DNA, 80 bp, synthetic construct; identical to SEQ ID NO: 33647
  misc_feature 1..80: note = Artificially Synthesized Probe
  source 1..80: mol_type = other DNA

SEQ ID NO: 93742 - DNA, 80 bp, synthetic construct
  misc_feature 1..80: note = Artificially Synthesized Probe
  source 1..80: mol_type = other DNA
acaagcacatcgccctcacaggcatcaggctcatatgacctccccctggaaccacccccaaacacacacatggcaaacct

SEQ ID NO: 93743 - DNA, 80 bp, synthetic construct
  misc_feature 1..80: note = Artificially Synthesized Probe
  source 1..80: mol_type = other DNA
actatgaatttgctgtgaagtttcctcttttctgtgctgttccctctcccaagaaacttaaggcgagaagcctcaggaat

SEQ ID NO: 93744 - DNA, 80 bp, synthetic construct
  misc_feature 1..80: note = Artificially Synthesized Probe
  source 1..80: mol_type = other DNA
tttaaaattcgaatgtgggaattttgcatagattcacttaaattcattaaactacacaagtttccagacaagcattagaa

SEQ ID NO: 93745 - DNA, 80 bp, synthetic construct
  misc_feature 1..80: note = Artificially Synthesized Probe
  source 1..80: mol_type = other DNA
aagaaactggatctttccaagctcactgatgaagaggcccagcatgtcttggaagttgttcaacgagattttgacctccg

SEQ ID NO: 93746 - DNA, 80 bp, synthetic construct
  misc_feature 1..80: note = Artificially Synthesized Probe
  source 1..80: mol_type = other DNA
ttcacctaatggctttattcctatcattttgcagataggaaaactgaattgcaaaagcggttcctggagaacagaatgtg

SEQ ID NO: 93747 - DNA, 80 bp, synthetic construct; identical to SEQ ID NO: 33648
  misc_feature 1..80: note = Artificially Synthesized Probe
  source 1..80: mol_type = other DNA

SEQ ID NO: 93748 - DNA, 80 bp, synthetic construct
  misc_feature 1..80: note = Artificially Synthesized Probe
  source 1..80: mol_type = other DNA
caaaaggtgatacatggggaaagtctccatgccattctgaaacacctagatgttggaatcaagtctttaggacagaggct

SEQ ID NO: 93749 - DNA, 80 bp, synthetic construct
  misc_feature 1..80: note = Artificially Synthesized Probe
  source 1..80: mol_type = other DNA
gggcccccttatcctttcttgatgtctttagtagattgggtcaccctatgggaaggaagcatatgagggaagtagttaag

SEQ ID NO: 93750 - DNA, 80 bp, synthetic construct
  misc_feature 1..80: note = Artificially Synthesized Probe
  source 1..80: mol_type = other DNA
ctggtgtgccccagggagagcacaggctggcgaggctggagtggagtaaatgagggggccaggaagagaggcagttggag

SEQ ID NO: 93751 - DNA, 80 bp, synthetic construct; identical to SEQ ID NO: 33649
  misc_feature 1..80: note = Artificially Synthesized Probe
  source 1..80: mol_type = other DNA

SEQ ID NO: 93752 - DNA, 80 bp, synthetic construct
  misc_feature 1..80: note = Artificially Synthesized Probe
  source 1..80: mol_type = other DNA
agaggagatgcgttacgagagcttcgtaaaggtgaagcttcatatggtgaaacggatgaaaggtatttgtattcatttct

SEQ ID NO: 93753 - DNA, 80 bp, synthetic construct
  misc_feature 1..80: note = Artificially Synthesized Probe
  source 1..80: mol_type = other DNA
gttctagaggcttcctggattccctggctcctggcccctcctccacctccaaggccatcagcacaatgtctaacaatgtc

SEQ ID NO: 93754 - DNA, 80 bp, synthetic construct; identical to SEQ ID NO: 33650
  misc_feature 1..80: note = Artificially Synthesized Probe
  source 1..80: mol_type = other DNA

SEQ ID NO: 93755 - DNA, 80 bp, synthetic construct; identical to SEQ ID NO: 33715
  misc_feature 1..80: note = Artificially Synthesized Probe
  source 1..80: mol_type = other DNA

SEQ ID NO: 93756 - DNA, 80 bp, synthetic construct; identical to SEQ ID NO: 33716
  misc_feature 1..80: note = Artificially Synthesized Probe
  source 1..80: mol_type = other DNA

SEQ ID NO: 93757 - DNA, 80 bp, synthetic construct
  misc_feature 1..80: note = Artificially Synthesized Probe
  source 1..80: mol_type = other DNA
gggtccaccttctgctcagacccttccaccccgatgtctggcaataccagcccttgtccgtagaagtagccaattccacc

SEQ ID NO: 93758 - DNA, 80 bp, synthetic construct
  misc_feature 1..80: note = Artificially Synthesized Probe
  source 1..80: mol_type = other DNA
tttcctcctgcctgggcactgcctgattcaaacacaaactctatggaaatgggaattttcagggtcacctgctgtatcaa

SEQ ID NO: 93759 - DNA, 80 bp, synthetic construct
  misc_feature 1..80: note = Artificially Synthesized Probe
  source 1..80: mol_type = other DNA
gaggtccagaagacattgtagcttgaaggggagaagataaataggaaatattattcaagagaaggcagtgggcattataa

SEQ ID NO: 93760 - DNA, 80 bp, synthetic construct
  misc_feature 1..80: note = Artificially Synthesized Probe
  source 1..80: mol_type = other DNA
aaaagtgtaaagcggaagtcaccaagttcactggtgtgcccactgataaacttcaactgccccttggccccaacctctgg

SEQ ID NO: 93761 - DNA, 80 bp, synthetic construct; identical to SEQ ID NO: 33717
  misc_feature 1..80: note = Artificially Synthesized Probe
  source 1..80: mol_type = other DNA

SEQ ID NO: 93762 - DNA, 80 bp, synthetic construct
  misc_feature 1..80: note = Artificially Synthesized Probe
  source 1..80: mol_type = other DNA
gtccagccgtggaaagggcggcagcccatgcctcgcccatcgcggtcactgtactgctcccaaagaaagcctgtagcctg

SEQ ID NO: 93763 - DNA, 80 bp, synthetic construct
  misc_feature 1..80: note = Artificially Synthesized Probe
  source 1..80: mol_type = other DNA
aactctacacagttgatttcatttaattctttttttttttttttttttttgaggcggagtctcgctctgtcgcccaggct

SEQ ID NO: 93764 - DNA, 80 bp, synthetic construct
  misc_feature 1..80: note = Artificially Synthesized Probe
  source 1..80: mol_type = other DNA
ccaggatggtctccatctcctgacctcatgatccgcccgcctcagcctcccaaagtgctgggattacaggcgtgagccac

SEQ ID NO: 93765 - DNA, 80 bp, synthetic construct
  misc_feature 1..80: note = Artificially Synthesized Probe
  source 1..80: mol_type = other DNA
accacgcccggctaattttatattttcagtagagacggtgtttctccattttggtcaggctggtctggaactcctgacct

SEQ ID NO: 93766 - DNA, 80 bp, synthetic construct; identical to SEQ ID NO: 33718
  misc_feature 1..80: note = Artificially Synthesized Probe
  source 1..80: mol_type = other DNA

SEQ ID NO: 93767 - DNA, 80 bp, synthetic construct
  misc_feature 1..80: note = Artificially Synthesized Probe
  source 1..80: mol_type = other DNA
gatgtgttggcgcccgaaggagaggccgtcgtggaactcccagccatagggacccacaccgtccccctgctcacacgtgt

SEQ ID NO: 93768 - DNA, 80 bp, synthetic construct
  misc_feature 1..80: note = Artificially Synthesized Probe
  source 1..80: mol_type = other DNA
tcgcttcaagctggggcgcccagattaggagtccgcctgcctgcccgccctggggcccggttaccggtgaggaggggctt

SEQ ID NO: 93769 - DNA, 80 bp, synthetic construct; identical to SEQ ID NO: 33719
  misc_feature 1..80: note = Artificially Synthesized Probe
  source 1..80: mol_type = other DNA

SEQ ID NO: 93770 - DNA, 80 bp, synthetic construct
  misc_feature 1..80: note = Artificially Synthesized Probe
  source 1..80: mol_type = other DNA
acctctccggctcccgcctctcgccctggcgaccaccgtccggttagcgacacctgccagccagcgcctgcgcctccgcc

SEQ ID NO: 93771 - DNA, 80 bp, synthetic construct
  misc_feature 1..80: note = Artificially Synthesized Probe
  source 1..80: mol_type = other DNA
tcatgctctgaattgcgctggccataaaaggagctggaggctgcaagggagcgtaaaccaaaggggctccagagatggcg

SEQ ID NO: 93772 - DNA, 80 bp, synthetic construct
  misc_feature 1..80: note = Artificially Synthesized Probe
  source 1..80: mol_type = other DNA
ggcttcagctgtactgcttttgtgtggttcccaaagtctgcaaagactcctagctctggggcccagtgcagctcatccag

SEQ ID NO: 93773 - DNA, 80 bp, synthetic construct
  misc_feature 1..80: note = Artificially Synthesized Probe
  source 1..80: mol_type = other DNA
gggtagtcatccagcccagagggtagggtcttggggttcagtaaggttggtaaggcagggtcccgtccccgccagcggta

SEQ ID NO: 93774 - DNA, 80 bp, synthetic construct; identical to SEQ ID NO: 33720
  misc_feature 1..80: note = Artificially Synthesized Probe
  source 1..80: mol_type = other DNA

SEQ ID NO: 93775 - DNA, 80 bp, synthetic construct
  misc_feature 1..80: note = Artificially Synthesized Probe
  source 1..80: mol_type = other DNA
ccgtccccttctgcgcaggcgccgctccgccccggtcctaggggtgcttccgtggtcggcggctgctgggctccgcgccg

SEQ ID NO: 93776 - DNA, 80 bp, synthetic construct
  misc_feature 1..80: note = Artificially Synthesized Probe
  source 1..80: mol_type = other DNA
agcgcccaccgccccgagggttcggggcagagccagagcataggccaagggccaagctcgggccgagagcagtggccgca

SEQ ID NO: 93777 - DNA, 80 bp, synthetic construct
  misc_feature 1..80: note = Artificially Synthesized Probe
  source 1..80: mol_type = other DNA
gaggacttaggtgctgctaaagaccagccctccgggtgctgccaggccggcgctcacccgccaccttcatcttcccttct

SEQ ID NO: 93778 - DNA, 80 bp, synthetic construct; identical to SEQ ID NO: 33721
  misc_feature 1..80: note = Artificially Synthesized Probe
  source 1..80: mol_type = other DNA

SEQ ID NO: 93779 - DNA, 80 bp, synthetic construct
  misc_feature 1..80: note = Artificially Synthesized Probe
  source 1..80: mol_type = other DNA
tccccaggtcatgcagcctgggcccccatgccgtgcagctcgcacatatgtggggcagagcagccaccctgcccccagca

SEQ ID NO: 93780 - DNA, 80 bp, synthetic construct
  misc_feature 1..80: note = Artificially Synthesized Probe
  source 1..80: mol_type = other DNA
ccctgcagacccagataaaccttcaagtggccagaagcgggggatggctctgctgggtgctggggctgccatgggccgtg

SEQ ID NO: 93781 - DNA, 80 bp, synthetic construct
  misc_feature 1..80: note = Artificially Synthesized Probe
  source 1..80: mol_type = other DNA
accacacagctgtctcctattcggatgcttatttattttttttcccattacagttttgccgacggatggggcaaaagaag

SEQ ID NO: 93782 - DNA, 80 bp, synthetic construct
  misc_feature 1..80: note = Artificially Synthesized Probe
  source 1..80: mol_type = other DNA
tctcaagcccaaagggccaccttacccgactggggttggagttcttcgaccagccggcagtccccctggcccgggcattt

SEQ ID NO: 93783 - DNA, 80 bp, synthetic construct
  misc_feature 1..80: note = Artificially Synthesized Probe
  source 1..80: mol_type = other DNA
cttcatctcagttgcctgaggtcatctgggaagaatgtagagattgtcagtgctgcttgcccagggtggagcaggggtgc

SEQ ID NO: 93784 - DNA, 80 bp, synthetic construct; identical to SEQ ID NO: 33722
  misc_feature 1..80: note = Artificially Synthesized Probe
  source 1..80: mol_type = other DNA

SEQ ID NO: 93785 - DNA, 80 bp, synthetic construct
  misc_feature 1..80: note = Artificially Synthesized Probe
  source 1..80: mol_type = other DNA
aaggccttccctttgtcctttaatgagcctacttttaggttataatcaccaagaagaaccagaagagaaataccagtgcc

SEQ ID NO: 93786 - DNA, 80 bp, synthetic construct
  misc_feature 1..80: note = Artificially Synthesized Probe
  source 1..80: mol_type = other DNA
aggcggaggtgggtggatcacgaggtcaggagtttgagaccagcctgaccaacatggtgaaaccccatctctactaaaaa

SEQ ID NO: 93787 - DNA, 80 bp, synthetic construct; identical to SEQ ID NO: 33723
  misc_feature 1..80: note = Artificially Synthesized Probe
  source 1..80: mol_type = other DNA

SEQ ID NO: 93788 - DNA, 80 bp, synthetic construct
  misc_feature 1..80: note = Artificially Synthesized Probe
  source 1..80: mol_type = other DNA
ctctccataacctcctagtggatgcccttgcagacccctcagccaggcttgggtcatgcactcatccctaaaagggtcac

SEQ ID NO: 93789 - DNA, 80 bp, synthetic construct
  misc_feature 1..80: note = Artificially Synthesized Probe
  source 1..80: mol_type = other DNA
actggtggaaatggtatcagtgaaatcctgatcagaaatttgggatggaaaaggaaacaatgagaaaagggctgtgggaa

SEQ ID NO: 93790 - DNA, 80 bp, synthetic construct
  misc_feature 1..80: note = Artificially Synthesized Probe
  source 1..80: mol_type = other DNA
tgttcacttctgtcctcatggctctggatgcctaaggatttctgggcttcccgcccaggcactgaccccttcttcccacc

SEQ ID NO: 93791 - DNA, 80 bp, synthetic construct
  misc_feature 1..80: note = Artificially Synthesized Probe
  source 1..80: mol_type = other DNA
cagaagcgtaggacggctgcgcactgccgggccgtgttcagccctggtctggcctcggcctctagaggaggctgcctgcg

SEQ ID NO: 93792 - DNA, 80 bp, synthetic construct
  misc_feature 1..80: note = Artificially Synthesized Probe
  source 1..80: mol_type = other DNA
ttcttcccaccaccctacctccgggaagccctcctgaatgctcccggcgctgaccccttcttcccaccaccctatctccg

SEQ ID NO: 93793 - DNA, 80 bp, synthetic construct; identical to SEQ ID NO: 33724
  misc_feature 1..80: note = Artificially Synthesized Probe
  source 1..80: mol_type = other DNA

SEQ ID NO: 93794 - DNA, 80 bp, synthetic construct
  misc_feature 1..80: note = Artificially Synthesized Probe
  source 1..80: mol_type = other DNA
ctatctccgggaagccctcctgaatgctcccccggcgagcatctaagctccagtgcccctcctccccagcccgtgatact

SEQ ID NO: 93795 - DNA, 80 bp, synthetic construct
  misc_feature 1..80: note = Artificially Synthesized Probe
  source 1..80: mol_type = other DNA
cacaactgttggccgttaccaggaccatggtccaggctggggcaccgtggggcagctgggcctactgctcagaaagccgg

SEQ ID NO: 93796 - DNA, 80 bp, synthetic construct; identical to SEQ ID NO: 33725
  misc_feature 1..80: note = Artificially Synthesized Probe
  source 1..80: mol_type = other DNA

SEQ ID NO: 93797 - DNA, 80 bp, synthetic construct
  misc_feature 1..80: note = Artificially Synthesized Probe
  source 1..80: mol_type = other DNA
ctggctagacctgggcggctgacacaccctgagctggggagatgaggtccaggctgggcactgttagggtgagtggaccc

SEQ ID NO: 93798 - DNA, 80 bp, synthetic construct
  misc_feature 1..80: note = Artificially Synthesized Probe
  source 1..80: mol_type = other DNA
aaccgaggcatgttcatgaagccggggaccctgtacgtgtacatcatttacggcatgtacttctgcatgaacatctccag

SEQ ID NO: 93799 - DNA, 80 bp, synthetic construct
  misc_feature 1..80: note = Artificially Synthesized Probe
  source 1..80: mol_type = other DNA
ggccagggtttcgggagctctggctacgctgacggggcagggctggttaggttaaaggggtagaaagggccgggtggggc

SEQ ID NO: 93800 - DNA, 80 bp, synthetic construct
  misc_feature 1..80: note = Artificially Synthesized Probe
  source 1..80: mol_type = other DNA
gctcctgtaatcccagctactagggaggcggaggcaggagaatcgcttgaacccgggaggcggaggttgcagggagccaa

SEQ ID NO: 93801 - DNA, 80 bp, synthetic construct; identical to SEQ ID NO: 33726
  misc_feature 1..80: note = Artificially Synthesized Probe
  source 1..80: mol_type = other DNA

SEQ ID NO: 93802 - DNA, 80 bp, synthetic construct
  misc_feature 1..80: note = Artificially Synthesized Probe
  source 1..80: mol_type = other DNA
caagcctggcgtccacttcctggataaggactccccggcccactccggaccagggctggggcggcctcccaggcgctcac

SEQ ID NO: 93803 - DNA, 80 bp, synthetic construct
  misc_feature 1..80: note = Artificially Synthesized Probe
  source 1..80: mol_type = other DNA
ggctttgactcatttgcaggcggctctgtgggggctcagtgagacaacgaggggcgtgtgccctgcacccacagggatgt

SEQ ID NO: 93804 - DNA, 80 bp, synthetic construct
  misc_feature 1..80: note = Artificially Synthesized Probe
  source 1..80: mol_type = other DNA
agggtatctgctcacaggaacgccgcatttgctggctttgtccactagtgctcgcccctggctgctgatgcggagcctca

SEQ ID NO: 93805 - DNA, 80 bp, synthetic construct; identical to SEQ ID NO: 33727
  misc_feature 1..80: note = Artificially Synthesized Probe
  source 1..80: mol_type = other DNA

SEQ ID NO: 93806 - DNA, 80 bp, synthetic construct
  misc_feature 1..80: note = Artificially Synthesized Probe
  source 1..80: mol_type = other DNA
gtcattgcatgggctctcccaacatccggtgcacactggcagctgctctaagccaactcctagcccccaccacttgacca

SEQ ID NO: 93807 - DNA, 80 bp, synthetic construct
  misc_feature 1..80: note = Artificially Synthesized Probe
  source 1..80: mol_type = other DNA
ggtggaaaggaactgatacccagcatttgtcatgtgtttttaacagtctggctttgtgggggcggccacagtgggggagg

SEQ ID NO: 93808 - DNA, 80 bp, synthetic construct
  misc_feature 1..80: note = Artificially Synthesized Probe
  source 1..80: mol_type = other DNA
cctggcccaggcaggaaggcagctgcaccctccctgcagcacaggatgtctggatgtgtactagggcagagaggacagga

SEQ ID NO: 93809 - DNA, 80 bp, synthetic construct
  misc_feature 1..80: note = Artificially Synthesized Probe
  source 1..80: mol_type = other DNA
ctgcagtggcccctccaagctgtgccaggccctggccatcaacaagagctttgaccagagggacctggcacaggatgaag

SEQ ID NO: 93810 - DNA, 80 bp, synthetic construct; identical to SEQ ID NO: 33728
  misc_feature 1..80: note = Artificially Synthesized Probe
  source 1..80: mol_type = other DNA

SEQ ID NO: 93811 - DNA, 80 bp, synthetic construct
  misc_feature 1..80: note = Artificially Synthesized Probe
  source 1..80: mol_type = other DNA
gcgaccagggcgcaggcgggggcggacagctcattgggaggggcgccggggcacagtgcggggctcgccccacccccagg

SEQ ID NO: 93812 - DNA, 80 bp, synthetic construct
  misc_feature 1..80: note = Artificially Synthesized Probe
  source 1..80: mol_type = other DNA
gggcagctctgggaacttggattaggtggagaggcagttggggggcctcgttgttttgcgtcttagttccgccctcctgt

SEQ ID NO: 93813 - DNA, 80 bp, synthetic construct; identical to SEQ ID NO: 33836
  misc_feature 1..80: note = Artificially Synthesized Probe
  source 1..80: mol_type = other DNA

SEQ ID NO: 93814 - DNA, 80 bp, synthetic construct
  misc_feature 1..80: note = Artificially Synthesized Probe
  source 1..80: mol_type = other DNA
aagaggccttggagtcaggttggtgtttttactataagcagttattgaaggcatttttttttttcgctctgttacaaaca

SEQ ID NO: 93815 - DNA, 80 bp, synthetic construct
  misc_feature 1..80: note = Artificially Synthesized Probe
  source 1..80: mol_type = other DNA
gagatttatggcttgcctgtaacctccttattaacatcatgagtgccgtttgtttactaattacatctatgagttcacgt

SEQ ID NO: 93816 - DNA, 80 bp, synthetic construct
  misc_feature 1..80: note = Artificially Synthesized Probe
  source 1..80: mol_type = other DNA
catagacagatggattattcttgcaactgaataatcatcttaacattctgaataatcctctataccacagggactcttgt

SEQ ID NO: 93817 - DNA, 80 bp, synthetic construct
  misc_feature 1..80: note = Artificially Synthesized Probe
  source 1..80: mol_type = other DNA
taatgattttatttatttatagctgacacaaggaagatggacccttctaaaccgtcttccaacgtggccggagtagtcat

SEQ ID NO: 93818 - DNA, 80 bp, synthetic construct; identical to SEQ ID NO: 33837
  misc_feature 1..80: note = Artificially Synthesized Probe
  source 1..80: mol_type = other DNA

SEQ ID NO: 93819 - DNA, 80 bp, synthetic construct
  misc_feature 1..80: note = Artificially Synthesized Probe
  source 1..80: mol_type = other DNA
tgcctaattgaagaaataattgcttgttttctagcctggcaagatattttcataaaagagggataacaatgctgattact

SEQ ID NO: 93820 - DNA, 80 bp, synthetic construct
  misc_feature 1..80: note = Artificially Synthesized Probe
  source 1..80: mol_type = other DNA
aattgtaactcagcaagtagaagaccatttgaaaagtcaggtacaaatttcctcaagtggcataaaaatgtagtcagttt

SEQ ID NO: 93821 - DNA, 80 bp, synthetic construct
  misc_feature 1..80: note = Artificially Synthesized Probe
  source 1..80: mol_type = other DNA
ggtggagagagggagagagagagagttatttaaggaattggctcacacaattgtggaagctggcaagtccaaaacctgca

SEQ ID NO: 93822 - DNA, 80 bp, synthetic construct; identical to SEQ ID NO: 33838
  misc_feature 1..80: note = Artificially Synthesized Probe
  source 1..80: mol_type = other DNA

SEQ ID NO: 93823 - DNA, 80 bp, synthetic construct
  misc_feature 1..80: note = Artificially Synthesized Probe
  source 1..80: mol_type = other DNA
ggcaacaaagtgacacccctgtctccagtaaaaataaaaaatattaactgggtatggtggcacaggtctatagtcccagc

SEQ ID NO: 93824 - DNA, 80 bp, synthetic construct; identical to SEQ ID NO: 33740
  misc_feature 1..80: note = Artificially Synthesized Probe
  source 1..80: mol_type = other DNA

SEQ ID NO: 93825 - DNA, 80 bp, synthetic construct
  misc_feature 1..80: note = Artificially Synthesized Probe
  source 1..80: mol_type = other DNA
tgcagtgtatttttgggtagacatggtagatttcactattgccttaggatgcaaaaacaagctgaaaatccaggaagact

SEQ ID NO: 93826 - DNA, 80 bp, synthetic construct
  misc_feature 1..80: note = Artificially Synthesized Probe
  source 1..80: mol_type = other DNA
gaacactgttcatgcataaagatttttgaacgccttctcttaaaagactggttgccaatcagttaattgactgaatttga

SEQ ID NO: 93827 - DNA, 80 bp, synthetic construct
  misc_feature 1..80: note = Artificially Synthesized Probe
  source 1..80: mol_type = other DNA
aaatcataagtattgagtggtagtgattacaaaaacacaagtgaaggcggtatggtttacatcctgtctctctcactcac

SEQ ID NO: 93828 - DNA, 80 bp, synthetic construct
  misc_feature 1..80: note = Artificially Synthesized Probe
  source 1..80: mol_type = other DNA
cacaaacaaattacattaaatttagaggctagtatagtggagtttacatatatctatggcaaaagtttcagagttcatta

SEQ ID NO: 93829 - DNA, 80 bp, synthetic construct
  misc_feature 1..80: note = Artificially Synthesized Probe
  source 1..80: mol_type = other DNA
ctcattttgtcccactagggcacgagcagttacaaaatgagatcaagtgtggaaggaagctcagctagacaggaggagat

SEQ ID NO: 93830 - DNA, 80 bp, synthetic construct; identical to SEQ ID NO: 33741
  misc_feature 1..80: note = Artificially Synthesized Probe
  source 1..80: mol_type = other DNA

SEQ ID NO: 93831 - DNA, 80 bp, synthetic construct
  misc_feature 1..80: note = Artificially Synthesized Probe
  source 1..80: mol_type = other DNA
atgtgtcaacatggctgggtcttggtacccagatatttgatcaagcaccagactggatgttgctataaaggttttgtttt

SEQ ID NO: 93832 - DNA, 80 bp, synthetic construct
  misc_feature 1..80: note = Artificially Synthesized Probe
  source 1..80: mol_type = other DNA
gcaaaaatttattataagctttaagcttatgggtctagaactgatctcagagtgtaagtggtgctaacctccctggggtg

SEQ ID NO: 93833 - DNA, 80 bp, synthetic construct; identical to SEQ ID NO: 33742
  misc_feature 1..80: note = Artificially Synthesized Probe
  source 1..80: mol_type = other DNA

SEQ ID NO: 93834 - DNA, 80 bp, synthetic construct
  misc_feature 1..80: note = Artificially Synthesized Probe
  source 1..80: mol_type = other DNA
tttttcctcttttgcaagaggaagttccgttttgccagctagcagctatgtgctgttaagtataagccatccttacatat

SEQ ID NO: 93835 - DNA, 80 bp, synthetic construct
  misc_feature 1..80: note = Artificially Synthesized Probe
  source 1..80: mol_type = other DNA
cactattaaattattaacaaataataccaaaatgtgttgagatgtgtcacactacaaaatcctattctagtctgggcgag

SEQ ID NO: 93836 - DNA, 80 bp, synthetic construct
  misc_feature 1..80: note = Artificially Synthesized Probe
  source 1..80: mol_type = other DNA
gagttggttatggtggtacaagcctgtagtcccagctacttgggaggctgaggcaggaagatcacttgagcccagaagtt

SEQ ID NO: 93837 - DNA, 80 bp, synthetic construct; identical to SEQ ID NO: 33743
  misc_feature 1..80: note = Artificially Synthesized Probe
  source 1..80: mol_type = other DNA

SEQ ID NO: 93838 - DNA, 80 bp, synthetic construct
  misc_feature 1..80: note = Artificially Synthesized Probe
  source 1..80: mol_type = other DNA
taagtctttagggaaatggaagagttggaaacttttgacctaaaagatcgtccttgttacatgaatccacttagccatgc

SEQ ID NO: 93839 - DNA, 80 bp, synthetic construct; identical to SEQ ID NO: 33730
  misc_feature 1..80: note = Artificially Synthesized Probe
  source 1..80: mol_type = other DNA

SEQ ID NO: 93840 - DNA, 80 bp, synthetic construct
  misc_feature 1..80: note = Artificially Synthesized Probe
  source 1..80: mol_type = other DNA
gtgtccgaatctcagattatgagtgttgcatttaaattatgcctgggagtgccatcaaaaacggactgggttgctatcac

SEQ ID NO: 93841 - DNA, 80 bp, synthetic construct
  misc_feature 1..80: note = Artificially Synthesized Probe
  source 1..80: mol_type = other DNA
atctatggaaccacagacaatctgtgctccagaggttatgaaggtaagatgcctggaattttcaccttcgtgttgaaatt

SEQ ID NO: 93842 - DNA, 80 bp, synthetic construct
  misc_feature 1..80: note = Artificially Synthesized Probe
  source 1..80: mol_type = other DNA
aggacatgatggtgaataaatgtgattaaaaagtcctgaatgatacttcagctatttttacttaatgggaagacattctt

SEQ ID NO: 93843 - DNA, 80 bp, synthetic construct; identical to SEQ ID NO: 33744
  misc_feature 1..80: note = Artificially Synthesized Probe
  source 1..80: mol_type = other DNA

SEQ ID NO: 93844 - DNA, 80 bp, synthetic construct
  misc_feature 1..80: note = Artificially Synthesized Probe
  source 1..80: mol_type = other DNA
cagagaaggtgatacctccaatgcggtgggaggaatcctcttatatgtagttggtttcttgacctcttgaaggttaaata

SEQ ID NO: 93845 - DNA, 80 bp, synthetic construct
  misc_feature 1..80: note = Artificially Synthesized Probe
  source 1..80: mol_type = other DNA
gttattgtgaagtgttatctagaacaacctcaaggtcagagaaagagcctacttttggggacaagagataacctgtttcc

SEQ ID NO: 93846 - DNA, 80 bp, synthetic construct
  misc_feature 1..80: note = Artificially Synthesized Probe
  source 1..80: mol_type = other DNA
aggcacagaagaagggagagtaggaattgaagtacggtgagagaagggctcagaaataagttattttgaagcatttttca

SEQ ID NO: 93847 - DNA, 80 bp, synthetic construct; identical to SEQ ID NO: 33745
  misc_feature 1..80: note = Artificially Synthesized Probe
  source 1..80: mol_type = other DNA

SEQ ID NO: 93848 - DNA, 80 bp, synthetic construct
  misc_feature 1..80: note = Artificially Synthesized Probe
  source 1..80: mol_type = other DNA
gctcccccttctactagattcttaatatacatattgggaaaaaccccaggaatctattcaatgatttctatgaagacccg

SEQ ID NO: 93849 - DNA, 80 bp, synthetic construct
  misc_feature 1..80: note = Artificially Synthesized Probe
  source 1..80: mol_type = other DNA
tagggtctctgtatctctgatgagaacatgggggaggggtagaatggtggaactttttgaaaataggaattattttagaa

SEQ ID NO: 93850 - DNA, 80 bp, synthetic construct
  misc_feature 1..80: note = Artificially Synthesized Probe
  source 1..80: mol_type = other DNA
cagctgatttttgtagttttagtagagacaacgtttcaccatgttggccaggctggcctcgaactcctgacctcaagtga

SEQ ID NO: 93851 - DNA, 80 bp, synthetic construct; identical to SEQ ID NO: 33746
  misc_feature 1..80: note = Artificially Synthesized Probe
  source 1..80: mol_type = other DNA

SEQ ID NO: 93852 - DNA, 80 bp, synthetic construct
  misc_feature 1..80: note = Artificially Synthesized Probe
  source 1..80: mol_type = other DNA
gtactgtggtgttcacctgtagtccgaggtattcaggaggctgaggtgggagcattacttgagcccaggtaattgaggct

SEQ ID NO: 93853 - DNA, 80 bp, synthetic construct
  misc_feature 1..80: note = Artificially Synthesized Probe
  source 1..80: mol_type = other DNA
tggtcttgactggtttcctttgtacgaagaaacagtcatcccagtgactaagaatggcgcaattatttctgaatacagcg

SEQ ID NO: 93854 - DNA, 80 bp, synthetic construct
  misc_feature 1..80: note = Artificially Synthesized Probe
  source 1..80: mol_type = other DNA
caatgagtaaaggaaaaagaaaagaggtcaataactcacattattgtgctcttactatgcgctacatgttttacaagctt

SEQ ID NO: 93855 - DNA, 80 bp, synthetic construct
  misc_feature 1..80: note = Artificially Synthesized Probe
  source 1..80: mol_type = other DNA
ctgcctcagcctcctgagtagttgggattacaggtgcctgccaccatgcccagctagtttttctatttttagtggagaca

SEQ ID NO: 93856 - DNA, 80 bp, synthetic construct; identical to SEQ ID NO: 33747
  misc_feature 1..80: note = Artificially Synthesized Probe
  source 1..80: mol_type = other DNA

SEQ ID NO: 93857 - DNA, 80 bp, synthetic construct
  misc_feature 1..80: note = Artificially Synthesized Probe
  source 1..80: mol_type = other DNA
tttctagttgaacccagagcttcccactcaatctgttggccttaacttgttgaaaagaaaaaccttgattgtagatggta

SEQ ID NO: 93858 - DNA, 80 bp, synthetic construct
  misc_feature 1..80: note = Artificially Synthesized Probe
  source 1..80: mol_type = other DNA
cagctttaaggttttttttaatctagagattccaaagctccatgattccaatcaagagaaagaactgtttcagaggaaat

SEQ ID NO: 93859 - DNA, 80 bp, synthetic construct; identical to SEQ ID NO: 33748
  misc_feature 1..80: note = Artificially Synthesized Probe
  source 1..80: mol_type = other DNA

SEQ ID NO: 93860 - DNA, 80 bp, synthetic construct
  misc_feature 1..80: note = Artificially Synthesized Probe
  source 1..80: mol_type = other DNA
aagtgtaatcagaacagtaagaccaattccttcagtaggcttcttattggaaagttaatgttcagaaatatcactcacat

SEQ ID NO: 93861 - DNA, 80 bp, synthetic construct
  misc_feature 1..80: note = Artificially Synthesized Probe
  source 1..80: mol_type = other DNA
gactatgacacagacaagctatttggatattgtccattgaaatgtaagtactgtttatcaccaagaaaagttgggcacat

SEQ ID NO: 93862 - DNA, 80 bp, synthetic construct
  misc_feature 1..80: note = Artificially Synthesized Probe
  source 1..80: mol_type = other DNA
aactcttcaaaatctggtgagtattgcatacttatagcatgtctcaattcacagtagtgtcattttaagtgtacaatggt

SEQ ID NO: 93863 - DNA, 80 bp, synthetic construct
  misc_feature 1..80: note = Artificially Synthesized Probe
  source 1..80: mol_type = other DNA
aacacagatgttggactttatactgtaggctttgtatgtgtattttgattttgccagtaagactagagtcacccctactg

SEQ ID NO: 93864 - DNA, 80 bp, synthetic construct
  misc_feature 1..80: note = Artificially Synthesized Probe
  source 1..80: mol_type = other DNA
tgcaagctccgcctcccgagttcacgcccttctcctgcctcagcctcccgagtagctgggactacaggcgcccgccacca

SEQ ID NO: 93865 - DNA, 80 bp, synthetic construct; identical to SEQ ID NO: 33749
  misc_feature 1..80: note = Artificially Synthesized Probe
  source 1..80: mol_type = other DNA

SEQ ID NO: 93866 - DNA, 80 bp, synthetic construct
  misc_feature 1..80: note = Artificially Synthesized Probe
  source 1..80: mol_type = other DNA
caggatactcttcttatgtttaaattaagaagggtgccatttagtttcacacagctagaaatcaatggaactcggtaatt

SEQ ID NO: 93867 - DNA, 80 bp, synthetic construct
  misc_feature 1..80: note = Artificially Synthesized Probe
  source 1..80: mol_type = other DNA
aggtggagtggaggagggcgtcatgttgaaggcagagctggggctgaggaaaaaggaaaaggaagtattcctcttagctt

SEQ ID NO: 93868 - DNA, 80 bp, synthetic construct; identical to SEQ ID NO: 33750
  misc_feature 1..80: note = Artificially Synthesized Probe
  source 1..80: mol_type = other DNA

SEQ ID NO: 93869 - DNA, 80 bp, synthetic construct
  misc_feature 1..80: note = Artificially Synthesized Probe
  source 1..80: mol_type = other DNA
actaaaagtaaatttaatttctgagccccatatactattgtaattgtcttcagagtgcagtctctccaatccgaatgaat

SEQ ID NO: 93870 - DNA, 80 bp, synthetic construct
  misc_feature 1..80: note = Artificially Synthesized Probe
  source 1..80: mol_type = other DNA
tgaaacacattgagcaatttttttctaagataaagcaatacttggttttcaagtgattgaaagtgtctttctcctttact

SEQ ID NO: 93871 - DNA, 80 bp, synthetic construct
  misc_feature 1..80: note = Artificially Synthesized Probe
  source 1..80: mol_type = other DNA
ctaatcacaaagaaaactcacaatcttggaaatccttggatgtgtgttggagacgtatcttgagtttgttcagtggaata

SEQ ID NO: 93872 - DNA, 80 bp, synthetic construct; identical to SEQ ID NO: 33751
  misc_feature 1..80: note = Artificially Synthesized Probe
  source 1..80: mol_type = other DNA

SEQ ID NO: 93873 - DNA, 80 bp, synthetic construct
  misc_feature 1..80: note = Artificially Synthesized Probe
  source 1..80: mol_type = other DNA
tcttcataggcacaaatattggggagagaagggggatgctgaagatctgtttacttggagaataaacaaacaaaaaattc

SEQ ID NO: 93874 - DNA, 80 bp, synthetic construct
  misc_feature 1..80: note = Artificially Synthesized Probe
  source 1..80: mol_type = other DNA
aggcacccaccatcacgcctggctagtttttgtattttgagtagagaaggggtttcaccatgttgcccaggctggtctcg

SEQ ID NO: 93875 - DNA, 80 bp, synthetic construct
  misc_feature 1..80: note = Artificially Synthesized Probe
  source 1..80: mol_type = other DNA
ttagtagatgctctccattgtccgttgcattgtttattgtaatgctttccttccatgtagacatttattttcaagtatcg

SEQ ID NO: 93876 - DNA, 80 bp, synthetic construct
  misc_feature 1..80: note = Artificially Synthesized Probe
  source 1..80: mol_type = other DNA
cttggtttaaaatgtactttctttaagtgaaaggtcaattgcatttccttcttacgtcatttatgtcacttgcctccatt

SEQ ID NO: 93877 - DNA, 80 bp, synthetic construct
  misc_feature 1..80: note = Artificially Synthesized Probe
  source 1..80: mol_type = other DNA
attctcctgcctcagcctcctgagtagctgggattacaggcgcgtgccaccatacctgggtaattttttttttttttgta

SEQ ID NO: 93878 - DNA, 80 bp, synthetic construct; identical to SEQ ID NO: 33752
  misc_feature 1..80: note = Artificially Synthesized Probe
  source 1..80: mol_type = other DNA

SEQ ID NO: 93879 - DNA, 80 bp, synthetic construct
  misc_feature 1..80: note = Artificially Synthesized Probe
  source 1..80: mol_type = other DNA
tatgtcatgggaccacaagtttcatatcatggtgtgtggtttgcatattacaaaaaggtctatgatcgcttcctcatcag

SEQ ID NO: 93880 - DNA, 80 bp, synthetic construct
  misc_feature 1..80: note = Artificially Synthesized Probe
  source 1..80: mol_type = other DNA
tacttcacatggcttgtaagcagaattttatattattaaaaagaaaaaagaaatattcactacatgaagcatgccaaaat

SEQ ID NO: 93881 - DNA, 80 bp, synthetic construct
  misc_feature 1..80: note = Artificially Synthesized Probe
  source 1..80: mol_type = other DNA
tctgtggaatgaaaaagttacaagcaacatttgctattgctaagcgctccacctgtattaaatatattctagcaatgaga

SEQ ID NO: 93882 - DNA, 80 bp, synthetic construct; identical to SEQ ID NO: 33753
  misc_feature 1..80: note = Artificially Synthesized Probe
  source 1..80: mol_type = other DNA

SEQ ID NO: 93883 - DNA, 80 bp, synthetic construct
  misc_feature 1..80: note = Artificially Synthesized Probe
  source 1..80: mol_type = other DNA
tcgtcccagctgctggggaggctgaggcaggagaatggcgtgaacccgggaggcggagcttgcagtgagccgagattgca

SEQ ID NO: 93884 - DNA, 80 bp, synthetic construct
  misc_feature 1..80: note = Artificially Synthesized Probe
  source 1..80: mol_type = other DNA
ccttggcccactcccaactccccagtagctgggactttgggcttgagccactatgccaggctaatttttaatttttttta

SEQ ID NO: 93885 - DNA, 80 bp, synthetic construct
  misc_feature 1..80: note = Artificially Synthesized Probe
  source 1..80: mol_type = other DNA
cgcctcccgggttcacgccattctcctgcctcagcctcccgagtagctgggactacaggcgcccgccaccacgcccggct

SEQ ID NO: 93886 - DNA, 80 bp, synthetic construct; identical to SEQ ID NO: 33754
  misc_feature 1..80: note = Artificially Synthesized Probe
  source 1..80: mol_type = other DNA

SEQ ID NO: 93887 - DNA, 80 bp, synthetic construct
  misc_feature 1..80: note = Artificially Synthesized Probe
  source 1..80: mol_type = other DNA
cctttctttctttaggcatgtggaaaagactggatgtagctgatcctttgaaacctcatcccctacttcctatttcattt

SEQ ID NO: 93888 - DNA, 80 bp, synthetic construct
  misc_feature 1..80: note = Artificially Synthesized Probe
  source 1..80: mol_type = other DNA
gagttttagactagcctgggccacatagagagactacatttctgcaaaaagttaaaaagttagccaggcatggtggtgca

SEQ ID NO: 93889 - DNA, 80 bp, synthetic construct
  misc_feature 1..80: note = Artificially Synthesized Probe
  source 1..80: mol_type = other DNA
ttactgtgaatgggttcctttcaacatctttgtgaggaggaaacggggttcccctgcaccacgcagtccacggctaagcc

SEQ ID NO: 93890 - DNA, 80 bp, synthetic construct
  misc_feature 1..80: note = Artificially Synthesized Probe
  source 1..80: mol_type = other DNA
aaaagaaaggaaagaaagaaagtgcttcaggcaaaaatgctcctaggtggtttaaataatactattcactggaagtgttt

SEQ ID NO: 93891 - DNA, 80 bp, synthetic construct; identical to SEQ ID NO: 33755
  misc_feature 1..80: note = Artificially Synthesized Probe
  source 1..80: mol_type = other DNA

SEQ ID NO: 93892 - DNA, 80 bp, synthetic construct
  misc_feature 1..80: note = Artificially Synthesized Probe
  source 1..80: mol_type = other DNA
aactattggttttaagagtctctagagccagtgctaagaaggattctgagggctaatctagaatcagagtaaaagatgcc

SEQ ID NO: 93893 - DNA, 80 bp, synthetic construct
  misc_feature 1..80: note = Artificially Synthesized Probe
  source 1..80: mol_type = other DNA
gataaattaaaagactgctaccactggcagagacaagtcagaggctgttttgaaaccctgaaaccctgagttcttttagc

SEQ ID NO: 93894 - DNA, 80 bp, synthetic construct
  misc_feature 1..80: note = Artificially Synthesized Probe
  source 1..80: mol_type = other DNA
cgcaatctcagctcactgtaacctccacctcccgggttcacatgattctcctgcctcagcctcccacgtagctgggatta

SEQ ID NO: 93895 - DNA, 80 bp, synthetic construct; identical to SEQ ID NO: 33731
  misc_feature 1..80: note = Artificially Synthesized Probe
  source 1..80: mol_type = other DNA

SEQ ID NO: 93896 - DNA, 80 bp, synthetic construct
  misc_feature 1..80: note = Artificially Synthesized Probe
  source 1..80: mol_type = other DNA
caatgtgtttgtttttaaaatatctgtttttattagattgtgaagactaaaagggctaaagtttgcttgagaagagagta

SEQ ID NO: 93897 - DNA, 80 bp, synthetic construct; identical to SEQ ID NO: 33756
  misc_feature 1..80: note = Artificially Synthesized Probe
  source 1..80: mol_type = other DNA

SEQ ID NO: 93898 - DNA, 80 bp, synthetic construct
  misc_feature 1..80: note = Artificially Synthesized Probe
  source 1..80: mol_type = other DNA
cccatgtcatttcttttgcctggaattctcacgattgtgtacagttgaaatgcaattctatttccatctgcatttctctt

SEQ ID NO: 93899 - DNA, 80 bp, synthetic construct
  misc_feature 1..80: note = Artificially Synthesized Probe
  source 1..80: mol_type = other DNA
gggacatcaaagctgaccctgtcttgtccacatgcagcttaaaagtccaatgggaagaaacagatgtaaacaagaaaaca

SEQ ID NO: 93900 - DNA, 80 bp, synthetic construct; identical to SEQ ID NO: 33757
  misc_feature 1..80: note = Artificially Synthesized Probe
  source 1..80: mol_type = other DNA

SEQ ID NO: 93901 - DNA, 80 bp, synthetic construct
  misc_feature 1..80: note = Artificially Synthesized Probe
  source 1..80: mol_type = other DNA
gccttttgtcaaactcctgggtgattctggggcagctggttgaaagaccatatctggcaaaacactgtgttagttcctgc

SEQ ID NO: 93902 - DNA, 80 bp, synthetic construct
  misc_feature 1..80: note = Artificially Synthesized Probe
  source 1..80: mol_type = other DNA
tgtgtgagccaatacaagggcaagagcacactccctaccttgcctcatttcttagcacctacctttttccagctattttc

SEQ ID NO: 93903 - DNA, 80 bp, synthetic construct
  misc_feature 1..80: note = Artificially Synthesized Probe
  source 1..80: mol_type = other DNA
acccttctaatagtggaacagaaaggatcagagtgattcatatttacaaccatgcacaaaaataaggaggaagaggagaa

SEQ ID NO: 93904 - DNA, 80 bp, synthetic construct; identical to SEQ ID NO: 33758
  misc_feature 1..80: note = Artificially Synthesized Probe
  source 1..80: mol_type = other DNA

SEQ ID NO: 93905 - DNA, 80 bp, synthetic construct
  misc_feature 1..80: note = Artificially Synthesized Probe
  source 1..80: mol_type = other DNA
ctcaaaaataaataaataaataaaaatttaaaaaaaaaggaaagaaaatatatcagaggtgcagaggtgaaatggtttca

SEQ ID NO: 93906 - DNA, 80 bp, synthetic construct
  misc_feature 1..80: note = Artificially Synthesized Probe
  source 1..80: mol_type = other DNA
ccacagcattagcaccataagtctctgtgggctgctgccaacggatgggctggttctccctggaggggtccaggagtcta

SEQ ID NO: 93907 - DNA, 80 bp, synthetic construct
  misc_feature 1..80: note = Artificially Synthesized Probe
  source 1..80: mol_type = other DNA
atttcctggttcccggactctgctatcggactcgagctgcaggaaatgcttccctaatcagcaagggcttttcttgtgtc

SEQ ID NO: 93908 - DNA, 80 bp, synthetic construct
  misc_feature 1..80: note = Artificially Synthesized Probe
  source 1..80: mol_type = other DNA
gaatggcatctctaacgagatttgtagtacttcctgcctttctttaagtaaaaaatgtcaggcattaggacaagaaaaac

SEQ ID NO: 93909 - DNA, 80 bp, synthetic construct
  misc_feature 1..80: note = Artificially Synthesized Probe
  source 1..80: mol_type = other DNA
gccattaaaatgaaaaaacaacctacaaaatatttacacttttaaaataagttttcttttatgtgagggttttgaaaagt

SEQ ID NO: 93910 - DNA, 80 bp, synthetic construct; identical to SEQ ID NO: 33759
  misc_feature 1..80: note = Artificially Synthesized Probe
  source 1..80: mol_type = other DNA

SEQ ID NO: 93911 - DNA, 80 bp, synthetic construct
  misc_feature 1..80: note = Artificially Synthesized Probe
  source 1..80: mol_type = other DNA
ctgggctttagttctaaagcccacagcaacctcatgaataaatattattagccccactgtatagatgagataacagacta

SEQ ID NO: 93912 - DNA, 80 bp, synthetic construct
  misc_feature 1..80: note = Artificially Synthesized Probe
  source 1..80: mol_type = other DNA
aacatttcctggctccagtaaatgtgttccagattggtggtgatctgatttcatattatctgccaggtgaaatgtttctg

SEQ ID NO: 93913 - DNA, 80 bp, synthetic construct
  misc_feature 1..80: note = Artificially Synthesized Probe
  source 1..80: mol_type = other DNA
taggaagtgaaatttggcttgtttccccgatggtttttaccagtttcctttggtactgcctgaaaaacacattggacctc

SEQ ID NO: 93914 - DNA, 80 bp, synthetic construct
  misc_feature 1..80: note = Artificially Synthesized Probe
  source 1..80: mol_type = other DNA
cctgtaaccccagagccttgggaggctgaggtgggaggattgttagagttcaggagttcgagatcagcctgggcactaca

SEQ ID NO: 93915 - DNA, 80 bp, synthetic construct; identical to SEQ ID NO: 33760
  misc_feature 1..80: note = Artificially Synthesized Probe
  source 1..80: mol_type = other DNA

SEQ ID NO: 93916 - DNA, 80 bp, synthetic construct
  misc_feature 1..80: note = Artificially Synthesized Probe
  source 1..80: mol_type = other DNA
tcagttcttcaagacaagtttataagtacttagagctggtaaaagatgtcaaaaggtaattctcttaaagagctattatc

SEQ ID NO: 93917 - DNA, 80 bp, synthetic construct
  misc_feature 1..80: note = Artificially Synthesized Probe
  source 1..80: mol_type = other DNA
ttaacttggaaatgggagggtttggctcacaggtagtggtgtattggcaaacaactactggttccaagaaggaaaagaaa

SEQ ID NO: 93918 - DNA, 80 bp, synthetic construct
  misc_feature 1..80: note = Artificially Synthesized Probe
  source 1..80: mol_type = other DNA
gctagtattaaaatgctacttttaggagcatgtcctgtagaatacgtctgtgcaagtagaaagataattatatttaagtt

SEQ ID NO: 93919 - DNA, 80 bp, synthetic construct
  misc_feature 1..80: note = Artificially Synthesized Probe
  source 1..80: mol_type = other DNA
actccatctctaaaaaataaaaataaatttaaaaaatgtttttaaaagccaaaggatagtttttattttaattaattgct

SEQ ID NO: 93920 - DNA, 80 bp, synthetic construct; identical to SEQ ID NO: 33761
  misc_feature 1..80: note = Artificially Synthesized Probe
  source 1..80: mol_type = other DNA

SEQ ID NO: 93921 - DNA, 80 bp, synthetic construct
  misc_feature 1..80: note = Artificially Synthesized Probe
  source 1..80: mol_type = other DNA
cgctgaagagctgaggtccgtgttgtttctggttttatgacttccacatcagtcctagaacagaattggaaacattgtat

SEQ ID NO: 93922 - DNA, 80 bp, synthetic construct
  misc_feature 1..80: note = Artificially Synthesized Probe
  source 1..80: mol_type = other DNA
acctattcatattcacacaagaagactttacactatccttgagaaagtagataatagtcaagatgatggggtttgaagcc

SEQ ID NO: 93923 - DNA, 80 bp, synthetic construct
  misc_feature 1..80: note = Artificially Synthesized Probe
  source 1..80: mol_type = other DNA
caaaggagacatggtaggcatgattattgttacttccctcagtgacattttgattcaagcacttagttctgaatttaatt

SEQ ID NO: 93924 - DNA, 80 bp, synthetic construct
  misc_feature 1..80: note = Artificially Synthesized Probe
  source 1..80: mol_type = other DNA
gaactggttaccaggtagggttaagcctgtttgtgtcgaattaatccaaatttaagtcatctagacgccccgaagacgtt

SEQ ID NO: 93925 - DNA, 80 bp, synthetic construct; identical to SEQ ID NO: 33762
  misc_feature 1..80: note = Artificially Synthesized Probe
  source 1..80: mol_type = other DNA

SEQ ID NO: 93926 - DNA, 80 bp, synthetic construct
  misc_feature 1..80: note = Artificially Synthesized Probe
  source 1..80: mol_type = other DNA
aacatccttgagaggattagccaacatctctttgtaaagtttgacaagtggattgaaattattttgggttggagagattt

SEQ ID NO: 93927 - DNA, 80 bp, synthetic construct
  misc_feature 1..80: note = Artificially Synthesized Probe
  source 1..80: mol_type = other DNA
taaaaattcattagaggtttctcaacagtagtttatagaaaaacagagttggggatgataaaacctacaacagctttcta

SEQ ID NO: 93928 - DNA, 80 bp, synthetic construct
  misc_feature 1..80: note = Artificially Synthesized Probe
  source 1..80: mol_type = other DNA
gatataaagtttttcttattcaccagtaccaactggcgttagtagccacttgaggccttctattgggtataaattcaatc

SEQ ID NO: 93929 - DNA, 80 bp, synthetic construct
  misc_feature 1..80: note = Artificially Synthesized Probe
  source 1..80: mol_type = other DNA
atggagtctctctctgtcacccagccttgagtgcaatggtgtgatcttggctcactgcaacctctgcctcgtgggttcaa

SEQ ID NO: 93930 - DNA, 80 bp, synthetic construct; identical to SEQ ID NO: 33763
  misc_feature 1..80: note = Artificially Synthesized Probe
  source 1..80: mol_type = other DNA

SEQ ID NO: 93931 - DNA, 80 bp, synthetic construct
  misc_feature 1..80: note = Artificially Synthesized Probe
  source 1..80: mol_type = other DNA
ccaccatgcctggctaattttttaattttttgtagtgatgggatttccccacattggccaggccagtctcgaacttctga

SEQ ID NO: 93932 - DNA, 80 bp, synthetic construct
  misc_feature 1..80: note = Artificially Synthesized Probe
  source 1..80: mol_type = other DNA
aaatttttagagaatatattttggcttaaataaattagattttactctgaaattccagtttcaaagcgttacttcaacat

SEQ ID NO: 93933 - DNA, 80 bp, synthetic construct; identical to SEQ ID NO: 33764
  misc_feature 1..80: note = Artificially Synthesized Probe
  source 1..80: mol_type = other DNA

SEQ ID NO: 93934 - DNA, 80 bp, synthetic construct
  misc_feature 1..80: note = Artificially Synthesized Probe
  source 1..80: mol_type = other DNA
tatgattaagaaagggaagcaaatgctttctaaaattaaacttcaattcctaagaagtaggtgcaagattaaatcacctt

SEQ ID NO: 93935 - DNA, 80 bp, synthetic construct
  misc_feature 1..80: note = Artificially Synthesized Probe
  source 1..80: mol_type = other DNA
gatgtacaagtgtgaattcaaatatataataactatggtaaacatcaaaaccactagttgatgtctcaaagttgagagag

SEQ ID NO: 93936 - DNA, 80 bp, synthetic construct
  misc_feature 1..80: note = Artificially Synthesized Probe
  source 1..80: mol_type = other DNA
gtttaagatacctttatgcttattactaactttatgataactttatgcttattactaactttaagataactttggccagg

SEQ ID NO: 93937 - DNA, 80 bp, synthetic construct
  misc_feature 1..80: note = Artificially Synthesized Probe
  source 1..80: mol_type = other DNA
tactcaggaggctgaggcagagaattgcttgaacccaggaggtggaggttgcagtgagctgagatcacgccactggactc

SEQ ID NO: 93938 - DNA, 80 bp, synthetic construct; identical to SEQ ID NO: 33765
  misc_feature 1..80: note = Artificially Synthesized Probe
  source 1..80: mol_type = other DNA

SEQ ID NO: 93939 - DNA, 80 bp, synthetic construct
  misc_feature 1..80: note = Artificially Synthesized Probe
  source 1..80: mol_type = other DNA
cattcatccctttagcaacgttgactttatctggttctttaatcagtttccactaagaaatggataaggcatagctgctg

SEQ ID NO: 93940 - DNA, 80 bp, synthetic construct; identical to SEQ ID NO: 33732
  misc_feature 1..80: note = Artificially Synthesized Probe
  source 1..80: mol_type = other DNA

SEQ ID NO: 93941 - DNA, 80 bp, synthetic construct
  misc_feature 1..80: note = Artificially Synthesized Probe
  source 1..80: mol_type = other DNA
cagtggtgtgatctccactcactgcaacctctgcctcccaggttcaagcaattctcctgcctcagcctcccaagtagctg

SEQ ID NO: 93942 - DNA, 80 bp, synthetic construct
  misc_feature 1..80: note = Artificially Synthesized Probe
  source 1..80: mol_type = other DNA
ccctgccctaataatgtttagtgtggcaggtttggaacatcatgtattctttctttttaataaattctacttgtagattc

SEQ ID NO: 93943 - DNA, 80 bp, synthetic construct; identical to SEQ ID NO: 33766
  misc_feature 1..80: note = Artificially Synthesized Probe
  source 1..80: mol_type = other DNA

SEQ ID NO: 93944 - DNA, 80 bp, synthetic construct
  misc_feature 1..80: note = Artificially Synthesized Probe
  source 1..80: mol_type = other DNA
ttcaagttttaaggtgtagctttattagctgataatgggggaaagggttgtttcaaagaagtatatttgctttatcaaca

SEQ ID NO: 93945 - DNA, 80 bp, synthetic construct
  misc_feature 1..80: note = Artificially Synthesized Probe
  source 1..80: mol_type = other DNA
gctatctgctgggaatagctataatagtccactttaacttttccttttcctcgaaggaagtccatcagctgaacctggaa

SEQ ID NO: 93946 - DNA, 80 bp, synthetic construct; identical to SEQ ID NO: 33767
  misc_feature 1..80: note = Artificially Synthesized Probe
  source 1..80: mol_type = other DNA

SEQ ID NO: 93947 - DNA, 80 bp, synthetic construct
  misc_feature 1..80: note = Artificially Synthesized Probe
  source 1..80: mol_type = other DNA
ttgaggaaaaagatattcagaggatacagaaaccttgcagacatggcaaaaccggaatccaagctagaaagtcaacattt

SEQ ID NO: 93948 - DNA, 80 bp, synthetic construct
  misc_feature 1..80: note = Artificially Synthesized Probe
  source 1..80: mol_type = other DNA
aggctggagtacaatggcgcgatctcagctcactgcaaacttcgcctcctgggttcgtgattctcctgcctcagcctccc

SEQ ID NO: 93949 - DNA, 80 bp, synthetic construct
  misc_feature 1..80: note = Artificially Synthesized Probe
  source 1..80: mol_type = other DNA
ccaccgtgcctggcctgtaactgaattttaaatatcggctagacttcaagaaaaaaaaaaatcaattgtgttgtccctta

SEQ ID NO: 93950 - DNA, 80 bp, synthetic construct; identical to SEQ ID NO: 33768
  misc_feature 1..80: note = Artificially Synthesized Probe
  source 1..80: mol_type = other DNA

SEQ ID NO: 93951 - DNA, 80 bp, synthetic construct
  misc_feature 1..80: note = Artificially Synthesized Probe
  source 1..80: mol_type = other DNA
gatgcattttgacatcatcattttatagatgaagcaccaggctcagggaggtaaaatgtccagaaggtgactgtttagca

SEQ ID NO: 93952 - DNA, 80 bp, synthetic construct
  misc_feature 1..80: note = Artificially Synthesized Probe
  source 1..80: mol_type = other DNA
ggcagtatactataatatgtttttatcctaagttttccacttaacaacaattttggacatcattccacgtagaatataaa

SEQ ID NO: 93953 - DNA, 80 bp, synthetic construct
  misc_feature 1..80: note = Artificially Synthesized Probe
  source 1..80: mol_type = other DNA
gcacatcatttcatgcatgtgatcattcctggaagtggaattgttggattagggaggagatgtgtttgcaattttaattg

SEQ ID NO: 93954 - DNA, 80 bp, synthetic construct
  misc_feature 1..80: note = Artificially Synthesized Probe
  source 1..80: mol_type = other DNA
gtattttttccttttttggaagccttcattacaattctctttctaagacttggaatttccatgttgccaaagaggagaat

SEQ ID NO: 93955 - DNA, 80 bp, synthetic construct; identical to SEQ ID NO: 33769
  misc_feature 1..80: note = Artificially Synthesized Probe
  source 1..80: mol_type = other DNA

SEQ ID NO: 93956 - DNA, 80 bp, synthetic construct
  misc_feature 1..80: note = Artificially Synthesized Probe
  source 1..80: mol_type = other DNA
gaattattgtaacactaacccgtttgtccataatcctcaggtctctagggctgtactctctggcttagcagccacttaac

SEQ ID NO: 93957 - DNA, 80 bp, synthetic construct
  misc_feature 1..80: note = Artificially Synthesized Probe
  source 1..80: mol_type = other DNA
gatactattttcaatttcctaggtagcaaaattaaaataacccaccagagggctccaaagctgtactaagcttgctttct

SEQ ID NO: 93958 - DNA, 80 bp, synthetic construct
  misc_feature 1..80: note = Artificially Synthesized Probe
  source 1..80: mol_type = other DNA
atcctgggcttaaacaatgatgtttcagatactctccacctttaagggaagatacgaccaattcatcaaaggaatagtga

SEQ ID NO: 93959 - DNA, 80 bp, synthetic construct
  misc_feature 1..80: note = Artificially Synthesized Probe
  source 1..80: mol_type = other DNA
aataacaagcagccatatatcaactataacttcaattctttttctcttccaatactcaatacgcttatatgtaccaggcc

SEQ ID NO: 93960 - DNA, 80 bp, synthetic construct; identical to SEQ ID NO: 33770
  misc_feature 1..80: note = Artificially Synthesized Probe
  source 1..80: mol_type = other DNA

SEQ ID NO: 93961 - DNA, 80 bp, synthetic construct
  misc_feature 1..80: note = Artificially Synthesized Probe
  source 1..80: mol_type = other DNA
tgacttgccgaagatcacacaacttaccgcaaattcaggttttaggagttatgactccagatccctctcctagtcacaag

SEQ ID NO: 93962 - DNA, 80 bp, synthetic construct
  misc_feature 1..80: note = Artificially Synthesized Probe
  source 1..80: mol_type = other DNA
cagctctctacttcaacactaacctgcctctcaagagtgactggctccctaatgtccatagaataaagtaaattcaaatc

SEQ ID NO: 93963 - DNA, 80 bp, synthetic construct
  misc_feature 1..80: note = Artificially Synthesized Probe
  source 1..80: mol_type = other DNA
catagacatcacgctaatggtataatcctgatactcctctatttcatttccctcgttgaaatgctaagaaagataattat

SEQ ID NO: 93964 - DNA, 80 bp, synthetic construct; identical to SEQ ID NO: 33771
  misc_feature 1..80: note = Artificially Synthesized Probe
  source 1..80: mol_type = other DNA

SEQ ID NO: 93965 - DNA, 80 bp, synthetic construct
  misc_feature 1..80: note = Artificially Synthesized Probe
  source 1..80: mol_type = other DNA
ttgattaaaaagtaggttattttgttttgtctaaaaaccaacaaaatagtatatgccttgtctatttttggtgaatatgt

SEQ ID NO: 93966 - DNA, 80 bp, synthetic construct
  misc_feature 1..80: note = Artificially Synthesized Probe
  source 1..80: mol_type = other DNA
actcactgtcctagtcagtggtggccgtatgccggtcactgttacaagattcacagagatgagaaaaaaatccagaggga

SEQ ID NO: 93967 - DNA, 80 bp, synthetic construct
  misc_feature 1..80: note = Artificially Synthesized Probe
  source 1..80: mol_type = other DNA
tggctttaatcctgggagcacccctttctacccaactctggaaaattctatcataaacatcaaatttaatcaatgtaaat

SEQ ID NO: 93968 - DNA, 80 bp, synthetic construct
  misc_feature 1..80: note = Artificially Synthesized Probe
  source 1..80: mol_type = other DNA
ttttttcatgcattatctggatgcagagcagtctaccttacacttgtgaacaatgcttaattccttggaattatctgtgt

SEQ ID NO: 93969 - DNA, 80 bp, synthetic construct; identical to SEQ ID NO: 33772
  misc_feature 1..80: note = Artificially Synthesized Probe
  source 1..80: mol_type = other DNA

SEQ ID NO: 93970 - DNA, 80 bp, synthetic construct
  misc_feature 1..80: note = Artificially Synthesized Probe
  source 1..80: mol_type = other DNA
agcagaaaaaaatagatgaataaaatgagctgggaatgcttgtcccgaagatgagcggcttgagaaacagcataatgata

SEQ ID NO: 93971 - DNA, 80 bp, synthetic construct
  misc_feature 1..80: note = Artificially Synthesized Probe
  source 1..80: mol_type = other DNA
gaaactgattggggctgggggaggggaggaaaaagcaactaacaaatagatgagaaacaaatagagtagtagcagaaaaa

SEQ ID NO: 93972 - DNA, 80 bp, synthetic construct; identical to SEQ ID NO: 33773
  misc_feature 1..80: note = Artificially Synthesized Probe
  source 1..80: mol_type = other DNA

SEQ ID NO: 93973 - DNA, 80 bp, synthetic construct
  misc_feature 1..80: note = Artificially Synthesized Probe
  source 1..80: mol_type = other DNA
ttgctataattattttaggaaattggatggccaaagttgctttgaaattcagcatgagaattagtaaataaattagaaaa

SEQ ID NO: 93974 - DNA, 80 bp, synthetic construct; identical to SEQ ID NO: 33733
  misc_feature 1..80: note = Artificially Synthesized Probe
  source 1..80: mol_type = other DNA

SEQ ID NO: 93975 - DNA, 80 bp, synthetic construct
  misc_feature 1..80: note = Artificially Synthesized Probe
  source 1..80: mol_type = other DNA
tttcaagtggacacattaagacctatacacgtaagttatgattataccaatgaatacaacttccccaactaattgataaa

SEQ ID NO: 93976 - DNA, 80 bp, synthetic construct
  misc_feature 1..80: note = Artificially Synthesized Probe
  source 1..80: mol_type = other DNA
tcaatttaaatctttgaggggtacatgaggtcactttgaagcctgcatttgttgctgaaaagatcacgatctgcaaatca

SEQ ID NO: 93977 - DNA, 80 bp, synthetic construct; identical to SEQ ID NO: 33774
  misc_feature 1..80: note = Artificially Synthesized Probe
  source 1..80: mol_type = other DNA

SEQ ID NO: 93978 - DNA, 80 bp, synthetic construct
  misc_feature 1..80: note = Artificially Synthesized Probe
  source 1..80: mol_type = other DNA
ttaaaccttcattgactttaactttatcccatttttgttgtgatatttaggaatttttagcatggcacctacttataaaa

SEQ ID NO: 93979 - DNA, 80 bp, synthetic construct
  misc_feature 1..80: note = Artificially Synthesized Probe
  source 1..80: mol_type = other DNA
agataggtaccaaatgtcaggtgcaagtctcacctcttggtttataattctttcactatatagataattttcactcccag

SEQ ID NO: 93980 - DNA, 80 bp, synthetic construct
  misc_feature 1..80: note = Artificially Synthesized Probe
  source 1..80: mol_type = other DNA
cagatgtatataaataggctaccatcaataacatgagtgcagttggcatggtaaattatttgcaacaataaaagcagctt

SEQ ID NO: 93981 - DNA, 80 bp, synthetic construct; identical to SEQ ID NO: 33775
  misc_feature 1..80: note = Artificially Synthesized Probe
  source 1..80: mol_type = other DNA

SEQ ID NO: 93982 - DNA, 80 bp, synthetic construct
  misc_feature 1..80: note = Artificially Synthesized Probe
  source 1..80: mol_type = other DNA
ttaaatgacattaagattcaaatgtactttgagtggagtgatgggacccctgtaacgtttaccaaatggcttcgtggaga

SEQ ID NO: 93983 - DNA, 80 bp, synthetic construct
  misc_feature 1..80: note = Artificially Synthesized Probe
  source 1..80: mol_type = other DNA
ttggcatggatcaaaggtgaaccaaaattcagatttgatttcttgaatccctctcaactgtctagcaaagtcaaattttc

SEQ ID NO: 93984 - DNA, 80 bp, synthetic construct
  misc_feature 1..80: note = Artificially Synthesized Probe
  source 1..80: mol_type = other DNA
atggcactatatatgtacatggccatatatatagtgccatattataatggtgtatatatatatccaccaaagctctcatc

SEQ ID NO: 93985 - DNA, 80 bp, synthetic construct; identical to SEQ ID NO: 33776
  misc_feature 1..80: note = Artificially Synthesized Probe
  source 1..80: mol_type = other DNA

SEQ ID NO: 93986 - DNA, 80 bp, synthetic construct
  misc_feature 1..80: note = Artificially Synthesized Probe
  source 1..80: mol_type = other DNA
ggtcaagtgattctcccacctcagcctcctaagtagctggcaccacaggtgcatgccaccatgcctggctaacttttgtg

SEQ ID NO: 93987 - DNA, 80 bp, synthetic construct
  misc_feature 1..80: note = Artificially Synthesized Probe
  source 1..80: mol_type = other DNA
gctgtgtgactgactcctttatttgcaaaatgggaataagagctgtacttagctcacctgtggatatgaggttttttttt

SEQ ID NO: 93988 - DNA, 80 bp, synthetic construct
  misc_feature 1..80: note = Artificially Synthesized Probe
  source 1..80: mol_type = other DNA
cccaaatagctgtgactaaaggtgcgtgccaccacgcctggctaattttttgtatttttggtacagatggagttttgcca

SEQ ID NO: 93989 - DNA, 80 bp, synthetic construct
  misc_feature 1..80: note = Artificially Synthesized Probe
  source 1..80: mol_type = other DNA
tgcatgtgtggtacacagttcccagcccatatttattgttcaataatttttgtcattgtggttgtttatttttgtcactg

SEQ ID NO: 93990 - DNA, 80 bp, synthetic construct; identical to SEQ ID NO: 33777
  misc_feature 1..80: note = Artificially Synthesized Probe
  source 1..80: mol_type = other DNA

SEQ ID NO: 93991 - DNA, 80 bp, synthetic construct
  misc_feature 1..80: note = Artificially Synthesized Probe
  source 1..80: mol_type = other DNA
atcttggctcaatgcaacctctgcctcgagagttcaagcgattctcctgcctcagcctcccgagtagctgagattacaag

SEQ ID NO: 93992 - DNA, 80 bp, synthetic construct
  misc_feature 1..80: note = Artificially Synthesized Probe
  source 1..80: mol_type = other DNA
gaaaacatttttttcaagatgtttagcagcgaagggaaggaaaggagaggtccttttaacatgaaatctcaaaggaaaag

SEQ ID NO: 93993 - DNA, 80 bp, synthetic construct
  misc_feature 1..80: note = Artificially Synthesized Probe
  source 1..80: mol_type = other DNA
aacttgattaatttgaagacagagctgactgcagggattgatgaagacgctgcatgcggccgggcccagtggctcacgcc

SEQ ID NO: 93994 - DNA, 80 bp, synthetic construct
  misc_feature 1..80: note = Artificially Synthesized Probe
  source 1..80: mol_type = other DNA
aggcaggaaaatggtgtgaacctgggaggtggagcttgcagtgagccaagatcagagccactgcactccagcctgggcaa

SEQ ID NO: 93995 - DNA, 80 bp, synthetic construct; identical to SEQ ID NO: 33778
  misc_feature 1..80: note = Artificially Synthesized Probe
  source 1..80: mol_type = other DNA

SEQ ID NO: 93996 - DNA, 80 bp, synthetic construct
  misc_feature 1..80: note = Artificially Synthesized Probe
  source 1..80: mol_type = other DNA
gaggtcaggagttcaagaccagcctggccaacatggtgaaaccccatctctactaaaaatacaaaaaattagcagagctt

SEQ ID NO: 93997 - DNA, 80 bp, synthetic construct
  misc_feature 1..80: note = Artificially Synthesized Probe
  source 1..80: mol_type = other DNA
tctacaaatattgcacatgaataactgtagtagaaacttagacctcagggacccatagcttcccataaagcagatgggaa

SEQ ID NO: 93998 - DNA, 80 bp, synthetic construct
  misc_feature 1..80: note = Artificially Synthesized Probe
  source 1..80: mol_type = other DNA
ccccaaactgataatcctttatttttttctctctctctgctccctgcaggatgggtactgggcagatcggggctgtgagt

SEQ ID NO: 93999 - DNA, 80 bp, synthetic construct; identical to SEQ ID NO: 33779
  misc_feature 1..80: note = Artificially Synthesized Probe
  source 1..80: mol_type = other DNA

SEQ ID NO: 94000 - DNA, 80 bp, synthetic construct
  misc_feature 1..80: note = Artificially Synthesized Probe
  source 1..80: mol_type = other DNA
tgtcatccaccttctatagtagaaggtgacagtctactatagtctgtcatcctatgggttgttaagaacatttgcagtag

SEQ ID NO: 94001 - DNA, 80 bp, synthetic construct
  misc_feature 1..80: note = Artificially Synthesized Probe
  source 1..80: mol_type = other DNA
tccctgtgaaatagttttttaaagcacacagaagctatgaaaacacagggtttatggttatcattttcctgtttgattgc

SEQ ID NO: 94002 - DNA, 80 bp, synthetic construct
  misc_feature 1..80: note = Artificially Synthesized Probe
  source 1..80: mol_type = other DNA
ataatggaaaatcatagcatggaagagtcacaaaggacctgggtgatttcacagttcctcttctaagttttgaattctgg

SEQ ID NO: 94003 - DNA, 80 bp, synthetic construct
  misc_feature 1..80: note = Artificially Synthesized Probe
  source 1..80: mol_type = other DNA
cattttctaaaataacaaaccttacatttttattgcttttaatcaatctgttttatttttttctattttcctacacatct

SEQ ID NO: 94004 - DNA, 80 bp, synthetic construct
  misc_feature 1..80: note = Artificially Synthesized Probe
  source 1..80: mol_type = other DNA
gcagaaatttcctgctctgtggtttactctttctggttttcaattcacactatttctgtctcaccgccaacaaacacctt

SEQ ID NO: 94005 - DNA, 80 bp, synthetic construct; identical to SEQ ID NO: 33780
  misc_feature 1..80: note = Artificially Synthesized Probe
  source 1..80: mol_type = other DNA

SEQ ID NO: 94006 - DNA, 80 bp, synthetic construct
  misc_feature 1..80: note = Artificially Synthesized Probe
  source 1..80: mol_type = other DNA
ccctaaaccaagaaatcaacctaaagtggccacaggtttctaatagtccaggattcctgacatatataaatgtaaatcct

SEQ ID NO: 94007 - DNA, 80 bp, synthetic construct
  misc_feature 1..80: note = Artificially Synthesized Probe
  source 1..80: mol_type = other DNA
atgaaaccattcatcagccaccaaattgtctgagaatgtcttaaattcatcctcaccctgaataatagtttagctaggtc

SEQ ID NO: 94008 - DNA, 80 bp, synthetic construct
  misc_feature 1..80: note = Artificially Synthesized Probe
  source 1..80: mol_type = other DNA
ttaaaatcttctccttgtctttggcattctgcagtgcctgggtgaatgccgagtacctagtggaatgctgcagtgtagca

SEQ ID NO: 94009 - DNA, 80 bp, synthetic construct
  misc_feature 1..80: note = Artificially Synthesized Probe
  source 1..80: mol_type = other DNA
gatcaggaaagatataatgtggttcaaaataacactatgttagaagaaggacttagatccctttatctgtatcaattttt

SEQ ID NO: 94010 - DNA, 80 bp, synthetic construct
  misc_feature 1..80: note = Artificially Synthesized Probe
  source 1..80: mol_type = other DNA
ttcttctgcttcagcctcctgagtagctgggactataggcacaagctaccatgcctggctaatttttgtatttttggtag

SEQ ID NO: 94011 - DNA, 80 bp, synthetic construct; identical to SEQ ID NO: 33781
  misc_feature 1..80: note = Artificially Synthesized Probe
  source 1..80: mol_type = other DNA

SEQ ID NO: 94012 - DNA, 80 bp, synthetic construct
  misc_feature 1..80: note = Artificially Synthesized Probe
  source 1..80: mol_type = other DNA
tactatatttaatctgaccattgagtttttaacttcattgctatggttttcttttatagacattccgtactttggggttc

SEQ ID NO: 94013 - DNA, 80 bp, synthetic construct
  misc_feature 1..80: note = Artificially Synthesized Probe
  source 1..80: mol_type = other DNA
ggcttgttgttgttgttgtttttgagaaggagtcttgctatgttgcccaggctggcatgcagtggcatgatctcggctca

SEQ ID NO: 94014 - DNA, 80 bp, synthetic construct
  misc_feature 1..80: note = Artificially Synthesized Probe
  source 1..80: mol_type = other DNA
agtgacccacctgcttcgtccttccaaagtgttggggttacaggtgggagccactgcgcctggctggtttattgcttttg

SEQ ID NO: 94015 - DNA, 80 bp, synthetic construct; identical to SEQ ID NO: 33782
  misc_feature 1..80: note = Artificially Synthesized Probe
  source 1..80: mol_type = other DNA

SEQ ID NO: 94016 - DNA, 80 bp, synthetic construct
  misc_feature 1..80: note = Artificially Synthesized Probe
  source 1..80: mol_type = other DNA
ctccctgcctcaagtgagacaaaggccaaataccatattctgtatggacattaataccacagcctttaggatcttaatct

SEQ ID NO: 94017 - DNA, 80 bp, synthetic construct
  misc_feature 1..80: note = Artificially Synthesized Probe
  source 1..80: mol_type = other DNA
gcattttccattcagcttttagtattctactaaattcgggtacctggagttttcccccttcttcttctcaaactctagca

SEQ ID NO: 94018 - DNA, 80 bp, synthetic construct
  misc_feature 1..80: note = Artificially Synthesized Probe
  source 1..80: mol_type = other DNA
agcctcccgagtagctgggactacaggcacatgccatcatgcctagctaattttataaaattttctgtaaagatagggac

SEQ ID NO: 94019 - DNA, 80 bp, synthetic construct; identical to SEQ ID NO: 33783
  misc_feature 1..80: note = Artificially Synthesized Probe
  source 1..80: mol_type = other DNA

SEQ ID NO: 94020 - DNA, 80 bp, synthetic construct
  misc_feature 1..80: note = Artificially Synthesized Probe
  source 1..80: mol_type = other DNA
gtcataggaggaatgatgtactactgtttcttttattcgtttatgtgtataattttcattgcatttcagattcttcagag

SEQ ID NO: 94021 - DNA, 80 bp, synthetic construct; identical to SEQ ID NO: 33734
  misc_feature 1..80: note = Artificially Synthesized Probe
  source 1..80: mol_type = other DNA

SEQ ID NO: 94022 - DNA, 80 bp, synthetic construct
  misc_feature 1..80: note = Artificially Synthesized Probe
  source 1..80: mol_type = other DNA
cagcctggccagcatggtgaaaccccatctctactaaaaagacagaaaaatttggccgggtgtggtggcacgtgcctgta

SEQ ID NO: 94023 - DNA, 80 bp, synthetic construct
  misc_feature 1..80: note = Artificially Synthesized Probe
  source 1..80: mol_type = other DNA
tgctcatttattcactgcttgataacattaatagggctggaaaaaacatcacttttactgctatatgattggacatacgc

SEQ ID NO: 94024 - DNA, 80 bp, synthetic construct; identical to SEQ ID NO: 33784
  misc_feature 1..80: note = Artificially Synthesized Probe
  source 1..80: mol_type = other DNA

SEQ ID NO: 94025 - DNA, 80 bp, synthetic construct
  misc_feature 1..80: note = Artificially Synthesized Probe
  source 1..80: mol_type = other DNA
ttttttaaagcaggaaagtaactaaaagttgccggctcaaaatcacgttatatctttaccactctctccaccaaaaaaga

SEQ ID NO: 94026 - DNA, 80 bp, synthetic construct
  misc_feature 1..80: note = Artificially Synthesized Probe
  source 1..80: mol_type = other DNA
gtcttccattctttgctttgctttgctatgttaacagactcataggtcaggaaaatcacatggacatagaggagcttatg

SEQ ID NO: 94027 - DNA, 80 bp, synthetic construct
  misc_feature 1..80: note = Artificially Synthesized Probe
  source 1..80: mol_type = other DNA
tttcacttgcagtaaagaagtaacaaaattatggagttttagtacaataagttatatttactggactttcgaggcagacc

SEQ ID NO: 94028 - DNA, 80 bp, synthetic construct; identical to SEQ ID NO: 33785
  misc_feature 1..80: note = Artificially Synthesized Probe
  source 1..80: mol_type = other DNA

SEQ ID NO: 94029 - DNA, 80 bp, synthetic construct
  misc_feature 1..80: note = Artificially Synthesized Probe
  source 1..80: mol_type = other DNA
tccttgtgtatcttctgtaatatttatactcaggagttcactaactgttgttaaatatggtttagagacatttaaggcaa

SEQ ID NO: 94030 - DNA, 80 bp, synthetic construct
  misc_feature 1..80: note = Artificially Synthesized Probe
  source 1..80: mol_type = other DNA
acttcggacaccatttttctttttctcaaaagacagactttttcctatgttgctgcttccattgttttatttgtcatttt

SEQ ID NO: 94031 - DNA, 80 bp, synthetic construct
  misc_feature 1..80: note = Artificially Synthesized Probe
  source 1..80: mol_type = other DNA
ctcttttgtttcagagctgaaatatgagagaataaaattgaggggggaaattcatgcagattattccatgagtattatcc

SEQ ID NO: 94032 - DNA, 80 bp, synthetic construct; identical to SEQ ID NO: 33786
  misc_feature 1..80: note = Artificially Synthesized Probe
  source 1..80: mol_type = other DNA

SEQ ID NO: 94033 - DNA, 80 bp, synthetic construct
  misc_feature 1..80: note = Artificially Synthesized Probe
  source 1..80: mol_type = other DNA
tcggctcaccgcaacctctgcttcctgggttcaagtgattctccagggattataggcgtgcaccaccctgccaggctaat

SEQ ID NO: 94034 - DNA, 80 bp, synthetic construct
  misc_feature 1..80: note = Artificially Synthesized Probe
  source 1..80: mol_type = other DNA
tgttaattcttctttttaaagatatgaacaagccttcctgactagtttcgttggcttaaggcctgaaaaatatttctgga

SEQ ID NO: 94035 - DNA, 80 bp, synthetic construct
  misc_feature 1..80: note = Artificially Synthesized Probe
  source 1..80: mol_type = other DNA
ttcaccctacgaatctgttagataaagtctgttattcctccgggtatctctgcaaatagactaggtaaattagtcatgct

SEQ ID NO: 94036 - DNA, 80 bp, synthetic construct
  misc_feature 1..80: note = Artificially Synthesized Probe
  source 1..80: mol_type = other DNA
gttatattgctgggttatctggtcctggtctacttaaaacctattcatgaaattctcagtggtcgcaaaggtttcaaatg

SEQ ID NO: 94037 - DNA, 80 bp, synthetic construct
  misc_feature 1..80: note = Artificially Synthesized Probe
  source 1..80: mol_type = other DNA
ccagcacgcctggttaatttttgtgtttttagtagagatggggtttcaccatgttggccaggctggtctcgaactcctcg

SEQ ID NO: 94038 - DNA, 80 bp, synthetic construct; identical to SEQ ID NO: 33787
  misc_feature 1..80: note = Artificially Synthesized Probe
  source 1..80: mol_type = other DNA

SEQ ID NO: 94039 - DNA, 80 bp, synthetic construct
  misc_feature 1..80: note = Artificially Synthesized Probe
  source 1..80: mol_type = other DNA
agcctggccaacatagggaaaccccatctctactaaaaatacaaaaattagccaagtgcagtggtgcgtgcctgtcatcc

SEQ ID NO: 94040 - DNA, 80 bp, synthetic construct
  misc_feature 1..80: note = Artificially Synthesized Probe
  source 1..80: mol_type = other DNA
agtttatgtgactagaaagcttccaagcatggatttagactaatctgtgtcatccccaaatctgtgctacttacactcgc

SEQ ID NO: 94041 - DNA, 80 bp, synthetic construct
  misc_feature 1..80: note = Artificially Synthesized Probe
  source 1..80: mol_type = other DNA
catcccttatagcaaatatttcattgtgcttgggtgaaaagctaaaaaataatagctcgagtctatcaatttactacctg

SEQ ID NO: 94042 - DNA, 80 bp, synthetic construct; identical to SEQ ID NO: 33788
  misc_feature 1..80: note = Artificially Synthesized Probe
  source 1..80: mol_type = other DNA

SEQ ID NO: 94043 - DNA, 80 bp, synthetic construct
  misc_feature 1..80: note = Artificially Synthesized Probe
  source 1..80: mol_type = other DNA
tacagctgcaggaggagtgggcaaggagcctggggctcgggcctgagcatcaggtcaactgaattgattctgatggttaa

SEQ ID NO: 94044 - DNA, 80 bp, synthetic construct
  misc_feature 1..80: note = Artificially Synthesized Probe
  source 1..80: mol_type = other DNA
gttctctgctctttcatttcatcttattctgaaacatctcacactgtctgtacgactgattttgccaagttaacaataat

SEQ ID NO: 94045 - DNA, 80 bp, synthetic construct
  misc_feature 1..80: note = Artificially Synthesized Probe
  source 1..80: mol_type = other DNA
agatttcagagaaaatattctaaaaaaggtgtacctccccagaacttcatgaatgacttctaagcacttcatgttcttta

SEQ ID NO: 94046 - DNA, 80 bp, synthetic construct; identical to SEQ ID NO: 33789
  misc_feature 1..80: note = Artificially Synthesized Probe
  source 1..80: mol_type = other DNA

SEQ ID NO: 94047 - DNA, 80 bp, synthetic construct
  misc_feature 1..80: note = Artificially Synthesized Probe
  source 1..80: mol_type = other DNA
gaagggaagaaggaaggaaaaagggaaggaaggagggagggagagagaagcagtaaactatttttgccattatggtgaat

SEQ ID NO: 94048 - DNA, 80 bp, synthetic construct
  misc_feature 1..80: note = Artificially Synthesized Probe
  source 1..80: mol_type = other DNA
cttcagcaggcacctgtcaagtgaattctacttcatatatttaatgcagggcgaaagccagggtgtgttgccatgagaac

SEQ ID NO: 94049 - DNA, 80 bp, synthetic construct
  misc_feature 1..80: note = Artificially Synthesized Probe
  source 1..80: mol_type = other DNA
tgtttcaaggtgagtatcagttataaagctggtaagagaatctggagtatgcttcagcctaaagaatcatctaaggacat

SEQ ID NO: 94050 - DNA, 80 bp, synthetic construct
  misc_feature 1..80: note = Artificially Synthesized Probe
  source 1..80: mol_type = other DNA
tttttctcacctgctctgccgctatcacctcctctctgcttctctcctttctcccaggccttctagatctgcctccctcc

SEQ ID NO: 94051 - DNA, 80 bp, synthetic construct; identical to SEQ ID NO: 33790
  misc_feature 1..80: note = Artificially Synthesized Probe
  source 1..80: mol_type = other DNA

SEQ ID NO: 94052 - DNA, 80 bp, synthetic construct
  misc_feature 1..80: note = Artificially Synthesized Probe
  source 1..80: mol_type = other DNA
cgacaatgaggaggtcctgctatttccccctttattttacagatggggaagtggaagcacagagtaatgttgaacttggc

SEQ ID NO: 94053 - DNA, 80 bp, synthetic construct
  misc_feature 1..80: note = Artificially Synthesized Probe
  source 1..80: mol_type = other DNA
aatacagtaatacagtcatggctcactgcagcctcaaacatctgggctcaagtgctcctcccacctaagcctcccaagta

SEQ ID NO: 94054 - DNA, 80 bp, synthetic construct
  misc_feature 1..80: note = Artificially Synthesized Probe
  source 1..80: mol_type = other DNA
cacccagcctcttttcgtcttgatagaaatttctgtttcctgtcacgctgttgtattccaattcatttttttcccatgct

SEQ ID NO: 94055 - DNA, 80 bp, synthetic construct; identical to SEQ ID NO: 33791
  misc_feature 1..80: note = Artificially Synthesized Probe
  source 1..80: mol_type = other DNA

SEQ ID NO: 94056 - DNA, 80 bp, synthetic construct
  misc_feature 1..80: note = Artificially Synthesized Probe
  source 1..80: mol_type = other DNA
tggtcttttacactctctcttttataagtcacatcctttctggagaaaattagccttagccaaatacagaaatgtaccta

SEQ ID NO: 94057 - DNA, 80 bp, synthetic construct
  misc_feature 1..80: note = Artificially Synthesized Probe
  source 1..80: mol_type = other DNA
ggcaggacagagaagagcatttgagagtgtaggagaagctaccacttataaaaccatcagatcttctgagaactcattca

SEQ ID NO: 94058 - DNA, 80 bp, synthetic construct
  misc_feature 1..80: note = Artificially Synthesized Probe
  source 1..80: mol_type = other DNA
tactgttttctaatagtcctgctctctgtacttcttttattcaatctctttgaatggcatatggccatgacatgccctgt

SEQ ID NO: 94059 - DNA, 80 bp, synthetic construct
  misc_feature 1..80: note = Artificially Synthesized Probe
  source 1..80: mol_type = other DNA
ataatttacatagaaggcgatgtattgggctaagacagaagaggtttgtaaatggattatttgaggactaacacaaagaa

SEQ ID NO: 94060 - DNA, 80 bp, synthetic construct; identical to SEQ ID NO: 33792
  misc_feature 1..80: note = Artificially Synthesized Probe
  source 1..80: mol_type = other DNA

SEQ ID NO: 94061 - DNA, 80 bp, synthetic construct
  misc_feature 1..80: note = Artificially Synthesized Probe
  source 1..80: mol_type = other DNA
atactgatgtggatatttacttaaacacctttgtccacatagcttgagtcaagttagggtcaaggtgaaggttgtcttcg

SEQ ID NO: 94062 - DNA, 80 bp, synthetic construct
  misc_feature 1..80: note = Artificially Synthesized Probe
  source 1..80: mol_type = other DNA
gaccgtcactgttgactgcatttcactattctctgcagtcctctggatattatgacacaattcctaaatcatataatctt

SEQ ID NO: 94063 - DNA, 80 bp, synthetic construct
  misc_feature 1..80: note = Artificially Synthesized Probe
  source 1..80: mol_type = other DNA
acctagtaaagggttttgtttatttatcttaagggggatctggggaggctggcattcagaggctgaagaaataggagtga

SEQ ID NO: 94064 - DNA, 80 bp, synthetic construct
  misc_feature 1..80: note = Artificially Synthesized Probe
  source 1..80: mol_type = other DNA
agctgaacacactaacaaactgtgcacaattttagaaaagttattttccttcaaattcttcttcttcatgtttactttat

SEQ ID NO: 94065 - DNA, 80 bp, synthetic construct; identical to SEQ ID NO: 33793
  misc_feature 1..80: note = Artificially Synthesized Probe
  source 1..80: mol_type = other DNA

SEQ ID NO: 94066 - DNA, 80 bp, synthetic construct
  misc_feature 1..80: note = Artificially Synthesized Probe
  source 1..80: mol_type = other DNA
atatcatcttcagctgtatgcaaaaggaaaacatgagaagaaaacgtggtttgaatctcgagatttttgtcgagctctgg

SEQ ID NO: 94067 - DNA, 80 bp, synthetic construct
  misc_feature 1..80: note = Artificially Synthesized Probe
  source 1..80: mol_type = other DNA
agaaaatttgtctgtttctgaaattgttgtctcaggatgctagtttgagcacctgtatcatctcccaaatctgtgggccc

SEQ ID NO: 94068 - DNA, 80 bp, synthetic construct
  misc_feature 1..80: note = Artificially Synthesized Probe
  source 1..80: mol_type = other DNA
ttactctcaggcagtggtctgtttttaagatatttatgggatataccaaaatgcacatctattgcataagtcttctattt

SEQ ID NO: 94069 - DNA, 80 bp, synthetic construct; identical to SEQ ID NO: 33794
  misc_feature 1..80: note = Artificially Synthesized Probe
  source 1..80: mol_type = other DNA

SEQ ID NO: 94070 - DNA, 80 bp, synthetic construct
  misc_feature 1..80: note = Artificially Synthesized Probe
  source 1..80: mol_type = other DNA
tagatcaatagaaatggaaacatttttgatattcccactaataatgattaggcttcgtcagacttctccatttccaggaa

SEQ ID NO: 94071 - DNA, 80 bp, synthetic construct
  misc_feature 1..80: note = Artificially Synthesized Probe
  source 1..80: mol_type = other DNA
cattgacatttgggttttatatttacatctctggaaaacacatcaccgtgcttagtccagaaccccgtgggttatgattc

SEQ ID NO: 94072 - DNA, 80 bp, synthetic construct; identical to SEQ ID NO: 33795
  misc_feature 1..80: note = Artificially Synthesized Probe
  source 1..80: mol_type = other DNA

SEQ ID NO: 94073 - DNA, 80 bp, synthetic construct
  misc_feature 1..80: note = Artificially Synthesized Probe
  source 1..80: mol_type = other DNA
gttccatgtaatgaaagctgtttcttttctactacgtttgtgaactgtgctttcaaagcaaagctattgtgaaaaaaaag

SEQ ID NO: 94074 - DNA, 80 bp, synthetic construct
  misc_feature 1..80: note = Artificially Synthesized Probe
  source 1..80: mol_type = other DNA
gaatactgtggtgagctgaaaggtgaccctactatgtcttggaatgatattaattgtgaacaccttaacaactggatttg

SEQ ID NO: 94075 - DNA, 80 bp, synthetic construct; identical to SEQ ID NO: 33735
  misc_feature 1..80: note = Artificially Synthesized Probe
  source 1..80: mol_type = other DNA

SEQ ID NO: 94076 - DNA, 80 bp, synthetic construct
  misc_feature 1..80: note = Artificially Synthesized Probe
  source 1..80: mol_type = other DNA
aggaaactgtcagtggccatcattgcataggataagcatgaagttgataagcacagataaatgtgccaaaggaacagaga

SEQ ID NO: 94077 - DNA, 80 bp, synthetic construct; identical to SEQ ID NO: 33796
  misc_feature 1..80: note = Artificially Synthesized Probe
  source 1..80: mol_type = other DNA

SEQ ID NO: 94078 - DNA, 80 bp, synthetic construct
  misc_feature 1..80: note = Artificially Synthesized Probe
  source 1..80: mol_type = other DNA
attagccaaaccatgttattgatggtcaaacaatacgcatgctgacagccattatctgggactcagaaagttctgcatat

SEQ ID NO: 94079 - DNA, 80 bp, synthetic construct
  misc_feature 1..80: note = Artificially Synthesized Probe
  source 1..80: mol_type = other DNA
accatttcaactctatggctggagatgacttactgctctgtttattttccatcctcctgcttagattattgctttcaaag

SEQ ID NO: 94080 - DNA, 80 bp, synthetic construct
  misc_feature 1..80: note = Artificially Synthesized Probe
  source 1..80: mol_type = other DNA
cccaaaagctaggtaacctgagtccctttatcagctttcaacaaaatccagatatatcattaactaattggaaagaaaaa

SEQ ID NO: 94081 - DNA, 80 bp, synthetic construct
  misc_feature 1..80: note = Artificially Synthesized Probe
  source 1..80: mol_type = other DNA
ctgttaaacacctattacataccaataactcacatattttcacaaactaatctatttggtttagttgacaaaattaaggc

SEQ ID NO: 94082 - DNA, 80 bp, synthetic construct; identical to SEQ ID NO: 33797
  misc_feature 1..80: note = Artificially Synthesized Probe
  source 1..80: mol_type = other DNA

SEQ ID NO: 94083 - DNA, 80 bp, synthetic construct
  misc_feature 1..80: note = Artificially Synthesized Probe
  source 1..80: mol_type = other DNA
caaaacctgagccaacaccagctcctcaagacagtaggtgttttcttattttctgatctctgtactgataaccctttctc

SEQ ID NO: 94084 - DNA, 80 bp, synthetic construct
  misc_feature 1..80: note = Artificially Synthesized Probe
  source 1..80: mol_type = other DNA
agggttcatgaatcaattccaaggtcccaggttccttcttctttagcacatatattagtgtccacaggctgctgtaacca

SEQ ID NO: 94085 - DNA, 80 bp, synthetic construct; identical to SEQ ID NO: 33798
  misc_feature 1..80: note = Artificially Synthesized Probe
  source 1..80: mol_type = other DNA

SEQ ID NO: 94086 - DNA, 80 bp, synthetic construct
  misc_feature 1..80: note = Artificially Synthesized Probe
  source 1..80: mol_type = other DNA
gtaagctaacattcataggttccaggggttaggaactagatacctttgggagcttttattcagcctactgtagcacggaa

SEQ ID NO: 94087 - DNA, 80 bp, synthetic construct
  misc_feature 1..80: note = Artificially Synthesized Probe
  source 1..80: mol_type = other DNA
ctacagtgcagtggcacgatcttggctcactgcaacctccgccttgtgggttcaagagattctcctgcctcagcccccca

SEQ ID NO: 94088 - DNA, 80 bp, synthetic construct
  misc_feature 1..80: note = Artificially Synthesized Probe
  source 1..80: mol_type = other DNA
gatgtagaagattatgggtgcattatacataaatcctcacagctatgctattgtattgatgaaagtgacacccggagttc

SEQ ID NO: 94089 - DNA, 80 bp, synthetic construct
  misc_feature 1..80: note = Artificially Synthesized Probe
  source 1..80: mol_type = other DNA
atagcagctctatccctttcacctttgtgtgctgtacacaccagattcttgaatttgtctgcataaaactcattgccttt

SEQ ID NO: 94090 - DNA, 80 bp, synthetic construct; identical to SEQ ID NO: 33799
  misc_feature 1..80: note = Artificially Synthesized Probe
  source 1..80: mol_type = other DNA

SEQ ID NO: 94091 - DNA, 80 bp, synthetic construct
  misc_feature 1..80: note = Artificially Synthesized Probe
  source 1..80: mol_type = other DNA
gcatccccaaagtccattgtatcattcttatgcctttgcatcctcatagcttagcttccacttatgagtgagaacatgag

SEQ ID NO: 94092 - DNA, 80 bp, synthetic construct
  misc_feature 1..80: note = Artificially Synthesized Probe
  source 1..80: mol_type = other DNA
catttaggctggttccatatgtttgcaattgcaaattgtgccaatattataacgtgtgtgcaagtgtctttttcatataa

SEQ ID NO: 94093 - DNA, 80 bp, synthetic construct
  misc_feature 1..80: note = Artificially Synthesized Probe
  source 1..80: mol_type = other DNA
ccatgccaacatctattatattttgactttttaattacagccattcttgcaggagtaaagtggtgtcacattgtgatttt

SEQ ID NO: 94094 - DNA, 80 bp, synthetic construct; identical to SEQ ID NO: 33800
  misc_feature 1..80: note = Artificially Synthesized Probe
  source 1..80: mol_type = other DNA

SEQ ID NO: 94095 - DNA, 80 bp, synthetic construct
  misc_feature 1..80: note = Artificially Synthesized Probe
  source 1..80: mol_type = other DNA
gcacaccaccatgcctggctaatttttgtatttttagtagagacagggtttcaccatgttggccaagctgaccttgaact

SEQ ID NO: 94096 - DNA, 80 bp, synthetic construct
  misc_feature 1..80: note = Artificially Synthesized Probe
  source 1..80: mol_type = other DNA
gcaaagattataattcttaactagttgttatatgtcagtcctggaccctttgtgtatcatatagtttaatttttaattta

SEQ ID NO: 94097 - DNA, 80 bp, synthetic construct
  misc_feature 1..80: note = Artificially Synthesized Probe
  source 1..80: mol_type = other DNA
ctgattaaaattcttcatggcctcattgccagagaggaggtaacagagagagcaggaaaaaataagttgaacagtactga

SEQ ID NO: 94098 - DNA, 80 bp, synthetic construct
  misc_feature 1..80: note = Artificially Synthesized Probe
  source 1..80: mol_type = other DNA
aacaccctccatcagcccccagcacctggcatagcttcttgaatgtactaggtgcagggtaaatatttgtttttcactga

SEQ ID NO: 94099 - DNA, 80 bp, synthetic construct; identical to SEQ ID NO: 33801
  misc_feature 1..80: note = Artificially Synthesized Probe
  source 1..80: mol_type = other DNA

SEQ ID NO: 94100 - DNA, 80 bp, synthetic construct
  misc_feature 1..80: note = Artificially Synthesized Probe
  source 1..80: mol_type = other DNA
gtataatatattttatattatacatatcaatcctctcacctcagcctcccaagtagctgggactacaggtatgcaccacc

SEQ ID NO: 94101 - DNA, 80 bp, synthetic construct
  misc_feature 1..80: note = Artificially Synthesized Probe
  source 1..80: mol_type = other DNA
tttctgccagaatcattcagacacttgattgttagaaagttcatccttatctgtattctagactattcaaactgccgcat

SEQ ID NO: 94102 - DNA, 80 bp, synthetic construct
  misc_feature 1..80: note = Artificially Synthesized Probe
  source 1..80: mol_type = other DNA
ctccataatgttaaatgcctacagtagttacattgttgaagacattctttaaaaccaagtaggcagtcaggattgtagga

SEQ ID NO: 94103 - DNA, 80 bp, synthetic construct
  misc_feature 1..80: note = Artificially Synthesized Probe
  source 1..80: mol_type = other DNA
ctagataaggtttcgattaggctgcctcattaacatgtatgttttgtttaagaacttcctgattgtgtgattctaaatta

SEQ ID NO: 94104 - DNA, 80 bp, synthetic construct
  misc_feature 1..80: note = Artificially Synthesized Probe
  source 1..80: mol_type = other DNA
tttgagatttttctttgtggaatgcatttttaaaaatcctacagcattctcaattgaaaaagcaacttgaaaaaaggaat

SEQ ID NO: 94105 - DNA, 80 bp, synthetic construct; identical to SEQ ID NO: 33736
  misc_feature 1..80: note = Artificially Synthesized Probe
  source 1..80: mol_type = other DNA

SEQ ID NO: 94106 - DNA, 80 bp, synthetic construct; identical to SEQ ID NO: 33802
  misc_feature 1..80: note = Artificially Synthesized Probe
  source 1..80: mol_type = other DNA

SEQ ID NO: 94107 - DNA, 80 bp, synthetic construct
  misc_feature 1..80: note = Artificially Synthesized Probe
  source 1..80: mol_type = other DNA
cttttttcttgtaccttaatacatatgtcctctagagtttgaagggcagatacgtcctcctggctcatgtgcagattttt

SEQ ID NO: 94108 - DNA, 80 bp, synthetic construct
  misc_feature 1..80: note = Artificially Synthesized Probe
  source 1..80: mol_type = other DNA
cctgggttcaagcaatccttccgcttcagcctcccaagtagctgggatgacggacatgcaccaccataccccacagggtc

SEQ ID NO: 94109 - DNA, 80 bp, synthetic construct; identical to SEQ ID NO: 33803
  misc_feature 1..80: note = Artificially Synthesized Probe
  source 1..80: mol_type = other DNA

SEQ ID NO: 94110 - DNA, 80 bp, synthetic construct
  misc_feature 1..80: note = Artificially Synthesized Probe
  source 1..80: mol_type = other DNA
gggagggaaaagaaggtagcctggacatggcatcagggttgctactgcggagcatgatgcataggacacaccacatactc

SEQ ID NO: 94111 - DNA, 80 bp, synthetic construct
  misc_feature 1..80: note = Artificially Synthesized Probe
  source 1..80: mol_type = other DNA
cagcctccgcctcccagttcaagcgatcctcctgcctcagcctcctgagtggctgggattacaggagcccacaaccatgc

SEQ ID NO: 94112 - DNA, 80 bp, synthetic construct
  misc_feature 1..80: note = Artificially Synthesized Probe
  source 1..80: mol_type = other DNA
tagtctaatgattggatcgtttcaaaatgcctgaattttcttttccagttggatggatggaagcaaagtggattacgtgt

SEQ ID NO: 94113 - DNA, 80 bp, synthetic construct; identical to SEQ ID NO: 33804
  misc_feature 1..80: note = Artificially Synthesized Probe
  source 1..80: mol_type = other DNA

SEQ ID NO: 94114 - DNA, 80 bp, synthetic construct
  misc_feature 1..80: note = Artificially Synthesized Probe
  source 1..80: mol_type = other DNA
ttgaaaaaacttatccagaatttgtttatctatctcctttatttctctctggctccttattattctgcaaaatgggaata

SEQ ID NO: 94115 - DNA, 80 bp, synthetic construct
  misc_feature 1..80: note = Artificially Synthesized Probe
  source 1..80: mol_type = other DNA
ataggatgctctctataaagtggaactattattagtttaagtaaaacagcaaaaggatattgcatggatacctctagtca

SEQ ID NO: 94116 - DNA, 80 bp, synthetic construct
  misc_feature 1..80: note = Artificially Synthesized Probe
  source 1..80: mol_type = other DNA
tctctttgccagggttttggaatgacattaactgtggctatccaaacgccttcatttgccagcgacataacagtagtatc

SEQ ID NO: 94117 - DNA, 80 bp, synthetic construct
  misc_feature 1..80: note = Artificially Synthesized Probe
  source 1..80: mol_type = other DNA
aaggtacaagagatttagagccgtcagcggttctccttggcctctgatgaaggcttcctcctacagggcattcgttttct

SEQ ID NO: 94118 - DNA, 80 bp, synthetic construct
  misc_feature 1..80: note = Artificially Synthesized Probe
  source 1..80: mol_type = other DNA
tagcctcattactttagaaaatttttggcaagaataggtgaaaattcgcgtgacaaactctttatggaaattgagagcat

SEQ ID NO: 94119 - DNA, 80 bp, synthetic construct; identical to SEQ ID NO: 33805
  misc_feature 1..80: note = Artificially Synthesized Probe
  source 1..80: mol_type = other DNA

SEQ ID NO: 94120 - DNA, 80 bp, synthetic construct
  misc_feature 1..80: note = Artificially Synthesized Probe
  source 1..80: mol_type = other DNA
tgcaaaatggtaaaatattgctgacagtaactgactttttggttttccagtgtaaaagctaaaaaagtggaaaaaatcaa

SEQ ID NO: 94121 - DNA, 80 bp, synthetic construct
  misc_feature 1..80: note = Artificially Synthesized Probe
  source 1..80: mol_type = other DNA
ttagagctgggagtcaaacctaggtttgtccagctttctaccaaatcagtttgctcccaaagagtcaaagaagagtactt

SEQ ID NO: 94122 - DNA, 80 bp, synthetic construct; identical to SEQ ID NO: 33806
  misc_feature 1..80: note = Artificially Synthesized Probe
  source 1..80: mol_type = other DNA

SEQ ID NO: 94123 - DNA, 80 bp, synthetic construct
  misc_feature 1..80: note = Artificially Synthesized Probe
  source 1..80: mol_type = other DNA
ccatacctggctttgaaatattttttgataaaacatgaaaataagccagaactatgaaggaggatattcaccatatccat

SEQ ID NO: 94124 - DNA, 80 bp, synthetic construct
  misc_feature 1..80: note = Artificially Synthesized Probe
  source 1..80: mol_type = other DNA
tgaggagggtgttgactaactgcaggagattaagactaaactgatgaagggtttcgaaatcactgcaagtgagtcagggt

SEQ ID NO: 94125 - DNA, 80 bp, synthetic construct
  misc_feature 1..80: note = Artificially Synthesized Probe
  source 1..80: mol_type = other DNA
taggctcaaaattagggggccattgttacagaacaatggctggtatgttggctggtatgtagtatagaagatgctcaaca

SEQ ID NO: 94126 - DNA, 80 bp, synthetic construct; identical to SEQ ID NO: 33807
  misc_feature 1..80: note = Artificially Synthesized Probe
  source 1..80: mol_type = other DNA

SEQ ID NO: 94127 - DNA, 80 bp, synthetic construct
  misc_feature 1..80: note = Artificially Synthesized Probe
  source 1..80: mol_type = other DNA
cagcagagaaacacaataattgatttctcctcttaaccacaaagtgctgattcctggcatagtgaaattgaaactggata

SEQ ID NO: 94128 - DNA, 80 bp, synthetic construct
  misc_feature 1..80: note = Artificially Synthesized Probe
  source 1..80: mol_type = other DNA
cagctacttgctgcttttcctcttatctggcttctctgtcttccagaagttattgtcttttgtgttccaatgtcagcatt

SEQ ID NO: 94129 - DNA, 80 bp, synthetic construct
  misc_feature 1..80: note = Artificially Synthesized Probe
  source 1..80: mol_type = other DNA
ggtagagcttttccatgtttcatttcaagctggggatgaggcaaaagttatgatcttatttggaaaacaaaataaaacca

SEQ ID NO: 94130 - DNA, 80 bp, synthetic construct
  misc_feature 1..80: note = Artificially Synthesized Probe
  source 1..80: mol_type = other DNA
gtgcaccatcatacctgactaatttttaaatttttttgtagagagagggtcttgctatgttgcccaggctggcttaaaac

SEQ ID NO: 94131 - DNA, 80 bp, synthetic construct
  misc_feature 1..80: note = Artificially Synthesized Probe
  source 1..80: mol_type = other DNA
ctctgagacggtagctgcctcttctactctgcagaaagagtaagcgtatagcaatggaattgcttgaaattttatgagat

SEQ ID NO: 94132 - DNA, 80 bp, synthetic construct; identical to SEQ ID NO: 33808
  misc_feature 1..80: note = Artificially Synthesized Probe
  source 1..80: mol_type = other DNA

SEQ ID NO: 94133 - DNA, 80 bp, synthetic construct
  misc_feature 1..80: note = Artificially Synthesized Probe
  source 1..80: mol_type = other DNA
tgataagcaagaagccatattctatagtctcatccagtgatgtgagcactttattactaattgatttgtgtagagatggg

SEQ ID NO: 94134 - DNA, 80 bp, synthetic construct
  misc_feature 1..80: note = Artificially Synthesized Probe
  source 1..80: mol_type = other DNA
catgacaccgatgctttgttaatttttgtatttctttgtagagacagggtgtcgccatgttgcccaggctgatcttgaac

SEQ ID NO: 94135 - DNA, 80 bp, synthetic construct; identical to SEQ ID NO: 33809
  misc_feature 1..80: note = Artificially Synthesized Probe
  source 1..80: mol_type = other DNA

SEQ ID NO: 94136 - DNA, 80 bp, synthetic construct
  misc_feature 1..80: note = Artificially Synthesized Probe
  source 1..80: mol_type = other DNA
ggagagagaagtgcaaagcaaagcattaaaagataaaaccatcagctcttgtaagaactcatctcattcactatcaggag

SEQ ID NO: 94137 - DNA, 80 bp, synthetic construct
  misc_feature 1..80: note = Artificially Synthesized Probe
  source 1..80: mol_type = other DNA
caacagcctaatgattcttgttttgacagtttttattttttcagaactgtctgggttaagagtcctttgtcccatagtta

SEQ ID NO: 94138 - DNA, 80 bp, synthetic construct
  misc_feature 1..80: note = Artificially Synthesized Probe
  source 1..80: mol_type = other DNA
ttcagtggcctagataaaacctagacttttattgtatgaaacttttcaaagtccaaagcgcaagtgacaacacaatgctg

SEQ ID NO: 94139 - DNA, 80 bp, synthetic construct; identical to SEQ ID NO: 33810
  misc_feature 1..80: note = Artificially Synthesized Probe
  source 1..80: mol_type = other DNA

SEQ ID NO: 94140 - DNA, 80 bp, synthetic construct
  misc_feature 1..80: note = Artificially Synthesized Probe
  source 1..80: mol_type = other DNA
taaaaaaaatccaggccaggcgcggtggctcatgcctgtaatcccagcactttgggaggccggggcaggtggatcacttg

SEQ ID NO: 94141 - DNA, 80 bp, synthetic construct
  misc_feature 1..80: note = Artificially Synthesized Probe
  source 1..80: mol_type = other DNA
cagcttgcacagggttatcatcttattgattactgttccatgaaagaatctaccagaatactccttgatctgttctatgc

SEQ ID NO: 94142 - DNA, 80 bp, synthetic construct
  misc_feature 1..80: note = Artificially Synthesized Probe
  source 1..80: mol_type = other DNA
tgagcctaacttgcagtcaaaagaaacacttcaacctagagttatcaactttctttgtatcaccttccccttattccttg

SEQ ID NO: 94143 - DNA, 80 bp, synthetic construct
  misc_feature 1..80: note = Artificially Synthesized Probe
  source 1..80: mol_type = other DNA
agactgcttattatgtgccagatgcttttgtacattaacctggaagacagattgctactttattttactacttttattct

SEQ ID NO: 94144 - DNA, 80 bp, synthetic construct; identical to SEQ ID NO: 33811
  misc_feature 1..80: note = Artificially Synthesized Probe
  source 1..80: mol_type = other DNA

SEQ ID NO: 94145 - DNA, 80 bp, synthetic construct
  misc_feature 1..80: note = Artificially Synthesized Probe
  source 1..80: mol_type = other DNA
tccctctccctctccctctccctctttcactgtccctttccctctccctttttcactctgtcaatctctcaacctattgc

SEQ ID NO: 94146 - DNA, 80 bp, synthetic construct
  misc_feature 1..80: note = Artificially Synthesized Probe
  source 1..80: mol_type = other DNA
caccatgcctgactaatttttgcatttttagtagagatgggcttttaccatattggccagggtggcctccaactcctgac

SEQ ID NO: 94147 - DNA, 80 bp, synthetic construct
  misc_feature 1..80: note = Artificially Synthesized Probe
  source 1..80: mol_type = other DNA
ccttcaagcaagagatacatgatgtgtttgggcaaatggagtaaatggctttgaatacagcaggagttttatccagaaaa

SEQ ID NO: 94148 - DNA, 80 bp, synthetic construct; identical to SEQ ID NO: 33812
  misc_feature 1..80: note = Artificially Synthesized Probe
  source 1..80: mol_type = other DNA

SEQ ID NO: 94149 - DNA, 80 bp, synthetic construct
  misc_feature 1..80: note = Artificially Synthesized Probe
  source 1..80: mol_type = other DNA
caaaaaaaattagccgggcgtggtggtgggcgcctgtcatcccagctgctccggaggctgagggaggagaatggcatgaa

SEQ ID NO: 94150 - DNA, 80 bp, synthetic construct
  misc_feature 1..80: note = Artificially Synthesized Probe
  source 1..80: mol_type = other DNA
ctcatgacaccaatgagggctgaaagacttactgaagaagcgaaagtagaatggagcgagatagcattagcttagattta

SEQ ID NO: 94151 - DNA, 80 bp, synthetic construct
  misc_feature 1..80: note = Artificially Synthesized Probe
  source 1..80: mol_type = other DNA
gattttttctcccagacattttcatagtgcatataaacagataaagtttatatttcacaaaaatggaatcaaaatacaca

SEQ ID NO: 94152 - DNA, 80 bp, synthetic construct
  misc_feature 1..80: note = Artificially Synthesized Probe
  source 1..80: mol_type = other DNA
cgtgttgagatcacaccactgcactccagcctgggcgacagagtgactctgtctcaaaaaaaaaaaaaaaaaaaagaaag

SEQ ID NO: 94153 - DNA, 80 bp, synthetic construct
  misc_feature 1..80: note = Artificially Synthesized Probe
  source 1..80: mol_type = other DNA
ccaccacacctggctaattttttttgtactgttagtagagatggggtttcactatgttggccagactggtctcgaactcc

SEQ ID NO: 94154 - DNA, 80 bp, synthetic construct; identical to SEQ ID NO: 33813
  misc_feature 1..80: note = Artificially Synthesized Probe
  source 1..80: mol_type = other DNA

SEQ ID NO: 94155 - DNA, 80 bp, synthetic construct
  misc_feature 1..80: note = Artificially Synthesized Probe
  source 1..80: mol_type = other DNA
atgtgctgacttcacagtgacatgtctcttaagtactttcattcagaaaaactgcagtcacctttttttggttgtctttg

SEQ ID NO: 94156 - DNA, 80 bp, synthetic construct
  misc_feature 1..80: note = Artificially Synthesized Probe
  source 1..80: mol_type = other DNA
atggctcagaatatggtctgtcttggtgaatgtttcatgtgatcttgagaagaatgtatattctactattattggaagaa

SEQ ID NO: 94157 - DNA, 80 bp, synthetic construct; identical to SEQ ID NO: 33814
  misc_feature 1..80: note = Artificially Synthesized Probe
  source 1..80: mol_type = other DNA

SEQ ID NO: 94158 - DNA, 80 bp, synthetic construct
  misc_feature 1..80: note = Artificially Synthesized Probe
  source 1..80: mol_type = other DNA
agcgtatctttctccatttttctccacttttaacttatgtgtatctttatatttaaagtgaatttcttataccaatatct

SEQ ID NO: 94159 - DNA, 80 bp, synthetic construct
  misc_feature 1..80: note = Artificially Synthesized Probe
  source 1..80: mol_type = other DNA
ttttgtcttccactctttcttgccttctctggttttacttcaatattttgtatgattttatttgttctccactcctagca

SEQ ID NO: 94160 - DNA, 80 bp, synthetic construct
  misc_feature 1..80: note = Artificially Synthesized Probe
  source 1..80: mol_type = other DNA
accactcttggcctaaaacaaaaacagaaacaaactttctttagtggttgctcttgagtttgcagtatatatttacaact

SEQ ID NO: 94161 - DNA, 80 bp, synthetic construct; identical to SEQ ID NO: 33815
  misc_feature 1..80: note = Artificially Synthesized Probe
  source 1..80: mol_type = other DNA

SEQ ID NO: 94162 - DNA, 80 bp, synthetic construct
  misc_feature 1..80: note = Artificially Synthesized Probe
  source 1..80: mol_type = other DNA
acatatataattttccttcttttttccttttaacatttctttcaagctaagtttacaggcaacaaattttctcaatgttt

SEQ ID NO: 94163 - DNA, 80 bp, synthetic construct; identical to SEQ ID NO: 33737
  misc_feature 1..80: note = Artificially Synthesized Probe
  source 1..80: mol_type = other DNA

SEQ ID NO: 94164 - DNA, 80 bp, synthetic construct
  misc_feature 1..80: note = Artificially Synthesized Probe
  source 1..80: mol_type = other DNA
tattcttgcttctttagagataagattttttttttcgtctggcttctttcaagattttctcttcatctttgattttctgc

SEQ ID NO: 94165 - DNA, 80 bp, synthetic construct
  misc_feature 1..80: note = Artificially Synthesized Probe
  source 1..80: mol_type = other DNA
ttggccacacccagtgagcctatcagagatagtcttcatttctcttaaggtgtttttgatgtctagaatttccttttgat

SEQ ID NO: 94166 - DNA, 80 bp, synthetic construct; identical to SEQ ID NO: 33816
  misc_feature 1..80: note = Artificially Synthesized Probe
  source 1..80: mol_type = other DNA

SEQ ID NO: 94167 - DNA, 80 bp, synthetic construct
  misc_feature 1..80: note = Artificially Synthesized Probe
  source 1..80: mol_type = other DNA
cctcctgtcagatcagcagtggcattagattctcatagaaacgtgaaccctactgtgaactgtgcatgcgtgggatctag

SEQ ID NO: 94168 - DNA, 80 bp, synthetic construct
  misc_feature 1..80: note = Artificially Synthesized Probe
  source 1..80: mol_type = other DNA
ttatttatttatttatttatttatttatttttgagatggagtctcactctgttgcccaggctggagtgcagtggcgcgat

SEQ ID NO: 94169 - DNA, 80 bp, synthetic construct
  misc_feature 1..80: note = Artificially Synthesized Probe
  source 1..80: mol_type = other DNA
cctgacctcgtgatctgcccgcctcggcctcccgaagtgctgggattacaggcgtgagccattgcgcccggtgctcatta

SEQ ID NO: 94170 - DNA, 80 bp, synthetic construct; identical to SEQ ID NO: 33817
  misc_feature 1..80: note = Artificially Synthesized Probe
  source 1..80: mol_type = other DNA

SEQ ID NO: 94171 - DNA, 80 bp, synthetic construct
  misc_feature 1..80: note = Artificially Synthesized Probe
  source 1..80: mol_type = other DNA
atggtggtaagatattggggaggggaagtatttcgtagtcctatgatggggactctgacttttagggaatctgtgctgtg

SEQ ID NO: 94172 - DNA, 80 bp, synthetic construct
  misc_feature 1..80: note = Artificially Synthesized Probe
  source 1..80: mol_type = other DNA
tgctggtcttattaagaacagaatgaatgctctgtcgtattttaaaatggctcttttcccacctctcctgttggaagcaa

SEQ ID NO: 94173 - DNA, 80 bp, synthetic construct
  misc_feature 1..80: note = Artificially Synthesized Probe
  source 1..80: mol_type = other DNA
tcaatgacatttagtatctcctacctcaatacttgttccctttttctgctcctgggcttctgctctggtcaattcttatt

SEQ ID NO: 94174 - DNA, 80 bp, synthetic construct
  misc_feature 1..80: note = Artificially Synthesized Probe
  source 1..80: mol_type = other DNA
tcacatattagatcctacaaaagagattgcagagaaattaaaacagatcgactgtgtcgatctgttcatctttgccgtat

SEQ ID NO: 94175 - DNA, 80 bp, synthetic construct; identical to SEQ ID NO: 33818
  misc_feature 1..80: note = Artificially Synthesized Probe
  source 1..80: mol_type = other DNA

SEQ ID NO: 94176 - DNA, 80 bp, synthetic construct
  misc_feature 1..80: note = Artificially Synthesized Probe
  source 1..80: mol_type = other DNA
cgaggtcaagagatcgagaccatcctggccaacatggtgaaaccccatctctactaaaagtacaaaaattagctgggcgt

SEQ ID NO: 94177 - DNA, 80 bp, synthetic construct
  misc_feature 1..80: note = Artificially Synthesized Probe
  source 1..80: mol_type = other DNA
ataactgtgaaaataaacacagtgaaatttgggggctccagcaaaaaagcaaagtgatttgaccaggtctcttgtcttta

SEQ ID NO: 94178 - DNA, 80 bp, synthetic construct
  misc_feature 1..80: note = Artificially Synthesized Probe
  source 1..80: mol_type = other DNA
agtctcctgagtagctgagaccacaggcatgcaccaccatgcccagctaattttgtttattttttgtagagttgaggtct

SEQ ID NO: 94179 - DNA, 80 bp, synthetic construct; identical to SEQ ID NO: 33819
  misc_feature 1..80: note = Artificially Synthesized Probe
  source 1..80: mol_type = other DNA

SEQ ID NO: 94180 - DNA, 80 bp, synthetic construct
  misc_feature 1..80: note = Artificially Synthesized Probe
  source 1..80: mol_type = other DNA
tgtaagactataaataagatgtgaaactttctggctataccagccacatactatgaatctataataatacttttataaat

SEQ ID NO: 94181 - DNA, 80 bp, synthetic construct
  misc_feature 1..80: note = Artificially Synthesized Probe
  source 1..80: mol_type = other DNA
atttctcagtcctgtctccaaaatttatccaaatcggttgggttttcgattcatatagtgagagttcaaatgtggaggat

SEQ ID NO: 94182 - DNA, 80 bp, synthetic construct
  misc_feature 1..80: note = Artificially Synthesized Probe
  source 1..80: mol_type = other DNA
tctccataaatatacaggctgactgtgttgttattattggaggtgcatcaaatgaagcaggaaaatggatggatgatacc

SEQ ID NO: 94183 - DNA, 80 bp, synthetic construct; identical to SEQ ID NO: 33820
  misc_feature 1..80: note = Artificially Synthesized Probe
  source 1..80: mol_type = other DNA

SEQ ID NO: 94184 - DNA, 80 bp, synthetic construct
  misc_feature 1..80: note = Artificially Synthesized Probe
  source 1..80: mol_type = other DNA
gaggaagaagtatgacattttaagtcagacatgttgcagagatgatgataaaggcaaaatgacatgctgattacttgggg

SEQ ID NO: 94185 - DNA, 80 bp, synthetic construct
  misc_feature 1..80: note = Artificially Synthesized Probe
  source 1..80: mol_type = other DNA
aggtgatctacctgcctcggcctcccaaagtgctgggattacaggagtaagccactgtgcctgacctcacttttatttta

SEQ ID NO: 94186 - DNA, 80 bp, synthetic construct
  misc_feature 1..80: note = Artificially Synthesized Probe
  source 1..80: mol_type = other DNA
agctctttgtcctgatgaacagctgtgtttttaaatgtactttaaaatatataatcatggttgggcactgtggctcatgc

SEQ ID NO: 94187 - DNA, 80 bp, synthetic construct
  misc_feature 1..80: note = Artificially Synthesized Probe
  source 1..80: mol_type = other DNA
ggtgtggtgacttatgcctgtagtcccagctacctgggagactgaggtgagaggatcacttgtgccagagaggctgaggc

SEQ ID NO: 94188 - DNA, 80 bp, synthetic construct
  misc_feature 1..80: note = Artificially Synthesized Probe
  source 1..80: mol_type = other DNA
tatgacagacaaaaagggtaatgttttctatacttaattcatgaatctgcttttttttttttaaccagacagttttgggc

SEQ ID NO: 94189 - DNA, 80 bp, synthetic construct; identical to SEQ ID NO: 33821
  misc_feature 1..80: note = Artificially Synthesized Probe
  source 1..80: mol_type = other DNA

SEQ ID NO: 94190 - DNA, 80 bp, synthetic construct
  misc_feature 1..80: note = Artificially Synthesized Probe
  source 1..80: mol_type = other DNA
gggcaagctggtggtgttaacaacttttattaaagcaacagtgcacagcagcagcagacatagtgcttcttgtggagcag

SEQ ID NO: 94191 - DNA, 80 bp, synthetic construct
  misc_feature 1..80: note = Artificially Synthesized Probe
  source 1..80: mol_type = other DNA
agtcttcaatctggtctggagtgagtcctgcctcctacctcatagctacacaaaagggtcagaaatttaaaaatagatta

SEQ ID NO: 94192 - DNA, 80 bp, synthetic construct; identical to SEQ ID NO: 33822
  misc_feature 1..80: note = Artificially Synthesized Probe
  source 1..80: mol_type = other DNA

SEQ ID NO: 94193 - DNA, 80 bp, synthetic construct
  misc_feature 1..80: note = Artificially Synthesized Probe
  source 1..80: mol_type = other DNA
gaatggtgattcacacgcttatttaaaaacttctctttcttttccttatacacatacatgatagaatatgttgccacaaa

SEQ ID NO: 94194 - DNA, 80 bp, synthetic construct
  misc_feature 1..80: note = Artificially Synthesized Probe
  source 1..80: mol_type = other DNA
ttgaggccaggagttcaagatcagcctgagcaacagaacaagaccctgactctaaaataaaataaaataaaatgaaatga

SEQ ID NO: 94195 - DNA, 80 bp, synthetic construct
  misc_feature 1..80: note = Artificially Synthesized Probe
  source 1..80: mol_type = other DNA
tttaggttttgcaggacatacagtctctactgcaaatagtcaactctgctgtggtcacagatgatcataggcaatacaca

SEQ ID NO: 94196 - DNA, 80 bp, synthetic construct
  misc_feature 1..80: note = Artificially Synthesized Probe
  source 1..80: mol_type = other DNA
catttccaagtaccctttttgtaagtatacacatttctaaattgctcttcagtaaaaataagctttcaggggaaaaatga

SEQ ID NO: 94197 - DNA, 80 bp, synthetic construct
  misc_feature 1..80: note = Artificially Synthesized Probe
  source 1..80: mol_type = other DNA
acaggtcagatttcatcctctggctattatttgctgacttctagggcatcagataatacagacagaaacaagctcttttg

SEQ ID NO: 94198 - DNA, 80 bp, synthetic construct; identical to SEQ ID NO: 33823
  misc_feature 1..80: note = Artificially Synthesized Probe
  source 1..80: mol_type = other DNA

SEQ ID NO: 94199 - DNA, 80 bp, synthetic construct; identical to SEQ ID NO: 33729
  misc_feature 1..80: note = Artificially Synthesized Probe
  source 1..80: mol_type = other DNA

SEQ ID NO: 94200 - DNA, 80 bp, synthetic construct
  misc_feature 1..80: note = Artificially Synthesized Probe
  source 1..80: mol_type = other DNA
agcaatgacacaatcatctatgttctttaatttgtgggattaaactacggcatttctttcatcaagataccagattggat

SEQ ID NO: 94201 - DNA, 80 bp, synthetic construct
  misc_feature 1..80: note = Artificially Synthesized Probe
  source 1..80: mol_type = other DNA
tgaatgtttggagttatgctactttgcttatttttatgatagatgagatacacttatcattactgataaggctcaattac

SEQ ID NO: 94202 - DNA, 80 bp, synthetic construct
  misc_feature 1..80: note = Artificially Synthesized Probe
  source 1..80: mol_type = other DNA
aagcttcacaattcccttatagccagcattctggatccctacagtaatgcatttgcgtggctgcagatggaaacatctaa

SEQ ID NO: 94203 - DNA, 80 bp, synthetic construct; identical to SEQ ID NO: 33824
  misc_feature 1..80: note = Artificially Synthesized Probe
  source 1..80: mol_type = other DNA

SEQ ID NO: 94204 - DNA, 80 bp, synthetic construct
  misc_feature 1..80: note = Artificially Synthesized Probe
  source 1..80: mol_type = other DNA
cagtgatggggacaatttttttttgttgtggcaagacgttctagacttgttgtaggtcctgaggttgtggagctcccatc

SEQ ID NO: 94205 - DNA, 80 bp, synthetic construct
  misc_feature 1..80: note = Artificially Synthesized Probe
  source 1..80: mol_type = other DNA
ccctctattcatccttctagctagccaaccagcaagcttcctagtagaagtagatatgacagtcagcaattaagatataa

SEQ ID NO: 94206 - DNA, 80 bp, synthetic construct; identical to SEQ ID NO: 33738
  misc_feature 1..80: note = Artificially Synthesized Probe
  source 1..80: mol_type = other DNA

SEQ ID NO: 94207 - DNA, 80 bp, synthetic construct; identical to SEQ ID NO: 33825
  misc_feature 1..80: note = Artificially Synthesized Probe
  source 1..80: mol_type = other DNA

SEQ ID NO: 94208 - DNA, 80 bp, synthetic construct
  misc_feature 1..80: note = Artificially Synthesized Probe
  source 1..80: mol_type = other DNA
tcacagacatgttcacgattctcttatgagtttaaagtaagcttttatttttagaaagattaaatagtttttcattgtgg

SEQ ID NO: 94209 - DNA, 80 bp, synthetic construct
  misc_feature 1..80: note = Artificially Synthesized Probe
  source 1..80: mol_type = other DNA
taaattaaataatgcagtcaaaagggtgataattgcttgaatctttgaaaaattcagctacctctgattaatattatata

SEQ ID NO: 94210 - DNA, 80 bp, synthetic construct
  misc_feature 1..80: note = Artificially Synthesized Probe
  source 1..80: mol_type = other DNA
tcacgcctgtaaccccagcagtttgggaggctgaggcaggcagatcacctgaggtcaggagttcaagaccagcctggcaa

SEQ ID NO: 94211 - DNA, 80 bp, synthetic construct
  misc_feature 1..80: note = Artificially Synthesized Probe
  source 1..80: mol_type = other DNA
gggggacaagagcgagacttctctcaaaaaaaaaaaaaaaaaaagaaagaaattgactgtgcaagtagactaaaatgact

SEQ ID NO: 94212 - DNA, 80 bp, synthetic construct; identical to SEQ ID NO: 33826
  misc_feature 1..80: note = Artificially Synthesized Probe
  source 1..80: mol_type = other DNA

SEQ ID NO: 94213 - DNA, 80 bp, synthetic construct
  misc_feature 1..80: note = Artificially Synthesized Probe
  source 1..80: mol_type = other DNA
taacttccaaggatgtattcctggggatctctaagaaataactgtttctaagaaaggctgcatgtactgaatttgagttg

SEQ ID NO: 94214 - DNA, 80 bp, synthetic construct
  misc_feature 1..80: note = Artificially Synthesized Probe
  source 1..80: mol_type = other DNA
taatcaatacacttggactgataagtggagggtgaggtacactaactgggctgctgatgagcccaaattgaaatcagcat

SEQ ID NO: 94215 - DNA, 80 bp, synthetic construct
  misc_feature 1..80: note = Artificially Synthesized Probe
  source 1..80: mol_type = other DNA
acagtaatgtgtcttggatagctaagaataatatagaacatactccctcacctatcaaaagactatctttataaaccaac

SEQ ID NO: 94216 - DNA, 80 bp, synthetic construct; identical to SEQ ID NO: 33827
  misc_feature 1..80: note = Artificially Synthesized Probe
  source 1..80: mol_type = other DNA

SEQ ID NO: 94217 - DNA, 80 bp, synthetic construct
  misc_feature 1..80: note = Artificially Synthesized Probe
  source 1..80: mol_type = other DNA
aatcccaacacgttgggaggccgaggtgtgcggatcacttgaggtcaggagttcgagaccagcttggccaacatggtgaa

SEQ ID NO: 94218 - DNA, 80 bp, synthetic construct
  misc_feature 1..80: note = Artificially Synthesized Probe
  source 1..80: mol_type = other DNA
gaggtcaggaggttgagaccagcttggccaacatggtgaaaccccttctctactaaaaatacaaaaactagctgggtctg

SEQ ID NO: 94219 - DNA, 80 bp, synthetic construct
  misc_feature 1..80: note = Artificially Synthesized Probe
  source 1..80: mol_type = other DNA
aggtatctatagatcgattgtcttaactatgagtgtaactgactgccgctataccatagcacattctattgaaatatatt

SEQ ID NO: 94220 - DNA, 80 bp, synthetic construct; identical to SEQ ID NO: 33828
  misc_feature 1..80: note = Artificially Synthesized Probe
  source 1..80: mol_type = other DNA

SEQ ID NO: 94221 - DNA, 80 bp, synthetic construct
  misc_feature 1..80: note = Artificially Synthesized Probe
  source 1..80: mol_type = other DNA
cataatcatctattctggggtccactgacactatacatgaaatatacaaagaatgtaaaaatacctgtttatatttttaa

SEQ ID NO: 94222 - DNA, 80 bp, synthetic construct
  misc_feature 1..80: note = Artificially Synthesized Probe
  source 1..80: mol_type = other DNA
tcatcctcagttattccaagtgttgtactcacctcttatcactggtaagctgaagttttacaagtgcccaggaactgttt

SEQ ID NO: 94223 - DNA, 80 bp, synthetic construct
  misc_feature 1..80: note = Artificially Synthesized Probe
  source 1..80: mol_type = other DNA
ccgttaaatattttactgaattatatttacttcatgttttttatgccctaactcaagagttctccatccaacagtggtac

SEQ ID NO: 94224 - DNA, 80 bp, synthetic construct; identical to SEQ ID NO: 33829
  misc_feature 1..80: note = Artificially Synthesized Probe
  source 1..80: mol_type = other DNA

SEQ ID NO: 94225 - DNA, 80 bp, synthetic construct
  misc_feature 1..80: note = Artificially Synthesized Probe
  source 1..80: mol_type = other DNA
gtgtctttgaatctcaagcgtcttttttagacagcacatagttggatctttcttattaattaattttcactctgccagtc

SEQ ID NO: 94226 - DNA, 80 bp, synthetic construct
  misc_feature 1..80: note = Artificially Synthesized Probe
  source 1..80: mol_type = other DNA
catttgttttctatatgtcttatggtccccctattcctctattactgccttcttgtgtgttaactagataatttcttgtg

SEQ ID NO: 94227 - DNA, 80 bp, synthetic construct
  misc_feature 1..80: note = Artificially Synthesized Probe
  source 1..80: mol_type = other DNA
agcctcccaagtagctgagacaacaggcacatgccaccttgcccagctaatttttgtatttttagtagagacagagtttc

SEQ ID NO: 94228 - DNA, 80 bp, synthetic construct; identical to SEQ ID NO: 33830
  misc_feature 1..80: note = Artificially Synthesized Probe
  source 1..80: mol_type = other DNA

SEQ ID NO: 94229 - DNA, 80 bp, synthetic construct
  misc_feature 1..80: note = Artificially Synthesized Probe
  source 1..80: mol_type = other DNA
tgtctcaaggaaagaaagaaaaggaaagttgacacttgagctgtgaccttagtgagcatcccaagaagagggaactcaaa

SEQ ID NO: 94230 - DNA, 80 bp, synthetic construct
  misc_feature 1..80: note = Artificially Synthesized Probe
  source 1..80: mol_type = other DNA
aacatttaattttaatagtgtacaaaaactttgctgttatgtagctccattccctctgccttcctctgtgctgttattgg

SEQ ID NO: 94231 - DNA, 80 bp, synthetic construct
  misc_feature 1..80: note = Artificially Synthesized Probe
  source 1..80: mol_type = other DNA
ttatttctttgtgtgggtttgagttactgttgagtgcccttttatttccactggaagtattttcttcagtagttcttaaa

SEQ ID NO: 94232 - DNA, 80 bp, synthetic construct
  misc_feature 1..80: note = Artificially Synthesized Probe
  source 1..80: mol_type = other DNA
tgaaattagtgttaagatccctgtacatgatgagacccttctctctcacagattttaagactttctgtcttttggtagtt

SEQ ID NO: 94233 - DNA, 80 bp, synthetic construct; identical to SEQ ID NO: 33831
  misc_feature 1..80: note = Artificially Synthesized Probe
  source 1..80: mol_type = other DNA

SEQ ID NO: 94234 - DNA, 80 bp, synthetic construct
  misc_feature 1..80: note = Artificially Synthesized Probe
  source 1..80: mol_type = other DNA
agatggttacaatgttagacaattgccactgatagttttttacaaacacttgaagggaaaagtctgtttgcactgactga

SEQ ID NO: 94235 - DNA, 80 bp, synthetic construct
  misc_feature 1..80: note = Artificially Synthesized Probe
  source 1..80: mol_type = other DNA
tggttgtggggctgttggtttttaaggctacagcagaactggaaagaaggcagagggattaggacaagttaaaacactat

SEQ ID NO: 94236 - DNA, 80 bp, synthetic construct
  misc_feature 1..80: note = Artificially Synthesized Probe
  source 1..80: mol_type = other DNA
tattctgcatttctcatgatgtcacctgatgccttgtttgaacttttgtaattaaaaaaatgttttcttcatattgctaa

SEQ ID NO: 94237 - DNA, 80 bp, synthetic construct; identical to SEQ ID NO: 33832
  misc_feature 1..80: note = Artificially Synthesized Probe
  source 1..80: mol_type = other DNA

SEQ ID NO: 94238 - DNA, 80 bp, synthetic construct
  misc_feature 1..80: note = Artificially Synthesized Probe
  source 1..80: mol_type = other DNA
ggttaatgcttgtaaagtccaaagcaaaatgtccagaatgaaatgcttaaaagatattagttattattaaaaagctagag

SEQ ID NO: 94239 - DNA, 80 bp, synthetic construct
  misc_feature 1..80: note = Artificially Synthesized Probe
  source 1..80: mol_type = other DNA
ctaactgttatgtataggaccagtcaaagcaaggtgatgggttattgcatcattcagctgcctgaaaaaaaaacttggtg

SEQ ID NO: 94240 - DNA, 80 bp, synthetic construct; identical to SEQ ID NO: 33739
  misc_feature 1..80: note = Artificially Synthesized Probe
  source 1..80: mol_type = other DNA

SEQ ID NO: 94241 - DNA, 80 bp, synthetic construct
  misc_feature 1..80: note = Artificially Synthesized Probe
  source 1..80: mol_type = other DNA
ctctttgtctttcctcttattacctctttttcctggaattattttctatcctttttacttgaaatcctattcttctctct

SEQ ID NO: 94242 - DNA, 80 bp, synthetic construct
  misc_feature 1..80: note = Artificially Synthesized Probe
  source 1..80: mol_type = other DNA
tcctactaatctttgactatcctgcaggaactagttcagtgcttgtactcaaatgatgctaatgatgcttaaaaacgtat

SEQ ID NO: 94243 - DNA, 80 bp, synthetic construct; identical to SEQ ID NO: 33833
  misc_feature 1..80: note = Artificially Synthesized Probe
  source 1..80: mol_type = other DNA

SEQ ID NO: 94244 - DNA, 80 bp, synthetic construct
  misc_feature 1..80: note = Artificially Synthesized Probe
  source 1..80: mol_type = other DNA
gaaaattcaaactcatatttttatttaagaactgaaatttaaaatgagtttcatatcatgctatcctcaaagttgctaat

SEQ ID NO: 94245 - DNA, 80 bp, synthetic construct
  misc_feature 1..80: note = Artificially Synthesized Probe
  source 1..80: mol_type = other DNA
tttttcgtttccttccctgtaataattagtcattatagtcttgcctgttaagtctggttataaatgactattgattctag

SEQ ID NO: 94246 - DNA, 80 bp, synthetic construct; identical to SEQ ID NO: 33834
  misc_feature 1..80: note = Artificially Synthesized Probe
  source 1..80: mol_type = other DNA

SEQ ID NO: 94247 - DNA, 80 bp, synthetic construct
  misc_feature 1..80: note = Artificially Synthesized Probe
  source 1..80: mol_type = other DNA
tctgccgttgtagttcattactgtttgcagctctgcgtgagtgagagacactctctgtctgcttagctgttgtattgatt

SEQ ID NO: 94248 - DNA, 80 bp, synthetic construct
  misc_feature 1..80: note = Artificially Synthesized Probe
  source 1..80: mol_type = other DNA
attgattgtggaatgagtcacgtcagactaattcagtctccttttaagatggaaagtgagaccatgaaaggaacaggatt

SEQ ID NO: 94249 - DNA, 80 bp, synthetic construct
  misc_feature 1..80: note = Artificially Synthesized Probe
  source 1..80: mol_type = other DNA
tttttgtttgttggtttgtttgagacagaatcttgctctgccaccaggctggagtgcaatggtgcgatctcggctcactg

SEQ ID NO: 94250 - DNA, 80 bp, synthetic construct; identical to SEQ ID NO: 33835
  misc_feature 1..80: note = Artificially Synthesized Probe
  source 1..80: mol_type = other DNA

SEQ ID NO: 94251 - DNA, 80 bp, synthetic construct
  misc_feature 1..80: note = Artificially Synthesized Probe
  source 1..80: mol_type = other DNA
ggtgacaagtcaggcccggctcctcccagaaaactgggagatcaggtgttatcttttttgatgattccattttcaagaga

SEQ ID NO: 94252 - DNA, 80 bp, synthetic construct
  misc_feature 1..80: note = Artificially Synthesized Probe
  source 1..80: mol_type = other DNA
cgcacgccactatgcccagctaatttttgtatttttaatagagatggggtttcactatgttggccaggctggtctcgaac

SEQ ID NO: 94253 - DNA, 80 bp, synthetic construct
  misc_feature 1..80: note = Artificially Synthesized Probe
  source 1..80: mol_type = other DNA
gttttacttatgggtagattgggtaggttttaagggtgagtatcagtggctcaaatgtaacttggagaatcacatttcca

SEQ ID NO: 94254 - DNA, 80 bp, synthetic construct
  misc_feature 1..80: note = Artificially Synthesized Probe
  source 1..80: mol_type = other DNA
caatcaacacacatcaaatgtggaggattccatgtatttgtgagccaaataatatttgctatctacctgcaattattctg

SEQ ID NO: 94255 - DNA, 80 bp, synthetic construct; identical to SEQ ID NO: 33839
  misc_feature 1..80: note = Artificially Synthesized Probe
  source 1..80: mol_type = other DNA

SEQ ID NO: 94256 - DNA, 80 bp, synthetic construct
  misc_feature 1..80: note = Artificially Synthesized Probe
  source 1..80: mol_type = other DNA
agggcagtagtcttttcttcctggacctgctctccacaccacactgaccatgtaacaagcactcttccctccatcctgac

SEQ ID NO: 94257 - DNA, 80 bp, synthetic construct; identical to SEQ ID NO: 33850
  misc_feature 1..80: note = Artificially Synthesized Probe
  source 1..80: mol_type = other DNA

SEQ ID NO: 94258 - DNA, 80 bp, synthetic construct
  misc_feature 1..80: note = Artificially Synthesized Probe
  source 1..80: mol_type = other DNA
actgcctgggtgcccaagggctccagttcacactcaaactcctctacaaagtctttccggggcactggtctggggcacca

SEQ ID NO: 94259 - DNA, 80 bp, synthetic construct
  misc_feature 1..80: note = Artificially Synthesized Probe
  source 1..80: mol_type = other DNA
gagtgaacagacaggaagggcacatgaaagctcaaaaagggacagagacctttttgactctcaaaaagcagtcagaacca

SEQ ID NO: 94260 - DNA, 80 bp, synthetic construct
  misc_feature 1..80: note = Artificially Synthesized Probe
  source 1..80: mol_type = other DNA
ccacagtgacctgatgggttccctcaggcaccagaccagaagggtgaaggtagaagttggagccacacagggtcagcctt

SEQ ID NO: 94261 - DNA, 80 bp, synthetic construct; identical to SEQ ID NO: 33851
  misc_feature 1..80: note = Artificially Synthesized Probe
  source 1..80: mol_type = other DNA

SEQ ID NO: 94262 - DNA, 80 bp, synthetic construct
  misc_feature 1..80: note = Artificially Synthesized Probe
  source 1..80: mol_type = other DNA
ctgggcgtggtggctcacgcctgtaatcccagcactttgggaggccaaggtgggtggatcacgaggtcaggagatcgaga

SEQ ID NO: 94263 - DNA, 80 bp, synthetic construct
  misc_feature 1..80: note = Artificially Synthesized Probe
  source 1..80: mol_type = other DNA
tccttctgctggccgcacatgttcccacaccagccacagcccatgaaatgccatgcccttaggcaacgcccacaggtcag

SEQ ID NO: 94264 - DNA, 80 bp, synthetic construct
  misc_feature 1..80: note = Artificially Synthesized Probe
  source 1..80: mol_type = other DNA
ctccctggattggatggagagtctgtgatcccacaaccctggccccaggccctgcccctgcccacctcacctggtcccca

SEQ ID NO: 94265 - DNA, 80 bp, synthetic construct
  misc_feature 1..80: note = Artificially Synthesized Probe
  source 1..80: mol_type = other DNA
atggagacaaggacccagggctaggggactgtggggatgaggacccacctgcaggatacgcccatccattgtgcccatgt

SEQ ID NO: 94266 - DNA, 80 bp, synthetic construct
  misc_feature 1..80: note = Artificially Synthesized Probe
  source 1..80: mol_type = other DNA
ggaaaggtcagggaagggaaggagtcagggttcagccttgtgccccgaccctctggggcctttgtcagtggccacagcag

SEQ ID NO: 94267 - DNA, 80 bp, synthetic construct; identical to SEQ ID NO: 33852
  misc_feature 1..80: note = Artificially Synthesized Probe
  source 1..80: mol_type = other DNA

SEQ ID NO: 94268 - DNA, 80 bp, synthetic construct
  misc_feature 1..80: note = Artificially Synthesized Probe
  source 1..80: mol_type = other DNA
acccctggctaattttttgtatttttagtagagatgggggtttcacgatgttggccaggctggtctcgaactcctgacct

SEQ ID NO: 94269 - DNA, 80 bp, synthetic construct
  misc_feature 1..80: note = Artificially Synthesized Probe
  source 1..80: mol_type = other DNA
ccagttggaagtctcagctccgcaagagtcttctcctgccccctgctggctcttctctgactctctgtgtgcacttcagc

SEQ ID NO: 94270 - DNA, 80 bp, synthetic construct; identical to SEQ ID NO: 33853
  misc_feature 1..80: note = Artificially Synthesized Probe
  source 1..80: mol_type = other DNA

SEQ ID NO: 94271 - DNA, 80 bp, synthetic construct
  misc_feature 1..80: note = Artificially Synthesized Probe
  source 1..80: mol_type = other DNA
ggactctctctcaccagcccggagggcactcctcgaagcaggagcctctgaaggctccatcagaccacagaggcttaacc

SEQ ID NO: 94272 - DNA, 80 bp, synthetic construct
  misc_feature 1..80: note = Artificially Synthesized Probe
  source 1..80: mol_type = other DNA
ccggaaggctgccaggtgtttctagcatgactcagggacaggtggggctctgaaggggaatagagccctaccttagtcag

SEQ ID NO: 94273 - DNA, 80 bp, synthetic construct
  misc_feature 1..80: note = Artificially Synthesized Probe
  source 1..80: mol_type = other DNA
agtgagccgagattgcaccactgcactccagcctgggcaacagagcgagactccatctcaaaaaaaaaaaaaaaaaatta

SEQ ID NO: 94274 - DNA, 80 bp, synthetic construct
  misc_feature 1..80: note = Artificially Synthesized Probe
  source 1..80: mol_type = other DNA
gccaaccactatgtgggtgctgccctagtggctgcatgcccagagttgctgggcaaacactgcacggggtgattcacaca

SEQ ID NO: 94275 - DNA, 80 bp, synthetic construct
  misc_feature 1..80: note = Artificially Synthesized Probe
  source 1..80: mol_type = other DNA
gccaggcaggcctgcccaggcccagacaaggagtccccaaccctagggcctctcaacccagatgtactcagcagagggag

SEQ ID NO: 94276 - DNA, 80 bp, synthetic construct; identical to SEQ ID NO: 33854
  misc_feature 1..80: note = Artificially Synthesized Probe
  source 1..80: mol_type = other DNA

SEQ ID NO: 94277 - DNA, 80 bp, synthetic construct
  misc_feature 1..80: note = Artificially Synthesized Probe
  source 1..80: mol_type = other DNA
agaaccttctagaaccaagctgccattccatgagttctgggtactcccccaatcacccccaatcatggcaaaaacgttag

SEQ ID NO: 94278 - DNA, 80 bp, synthetic construct
  misc_feature 1..80: note = Artificially Synthesized Probe
  source 1..80: mol_type = other DNA
aagcagagcaaaacaagggaaagtgaaactgttggcaagcagctgtgagtctgtgaatctgtgagcatctccctgtgtat

SEQ ID NO: 94279 - DNA, 80 bp, synthetic construct; identical to SEQ ID NO: 33855
  misc_feature 1..80: note = Artificially Synthesized Probe
  source 1..80: mol_type = other DNA

SEQ ID NO: 94280 - DNA, 80 bp, synthetic construct
  misc_feature 1..80: note = Artificially Synthesized Probe
  source 1..80: mol_type = other DNA
aagcagcctgtgttcagccatgtgcatgcagctcacaagtaagggccccttctttcagcttaccgggttggggcaaaaac

SEQ ID NO: 94281 - DNA, 80 bp, synthetic construct
  misc_feature 1..80: note = Artificially Synthesized Probe
  source 1..80: mol_type = other DNA
cacaaagaccccaaatagtacttcctggccctcggcgatgctcagctcagtggcaagttgggcacccactggagcggagt

SEQ ID NO: 94282 - DNA, 80 bp, synthetic construct
  misc_feature 1..80: note = Artificially Synthesized Probe
  source 1..80: mol_type = other DNA
gtacagtcaggaagtatacgaaggctcccgtgtggaagctgtgcacgtattcaatactgtaggagacaagatgcttgggc

SEQ ID NO: 94283 - DNA, 80 bp, synthetic construct
  misc_feature 1..80: note = Artificially Synthesized Probe
  source 1..80: mol_type = other DNA
aaaaaaaaaaaattctgaagcaagagcatttggggcagcaccagtggcaccctggtcctgaagcagaggttccccaggtt

SEQ ID NO: 94284 - DNA, 80 bp, synthetic construct; identical to SEQ ID NO: 33856
  misc_feature 1..80: note = Artificially Synthesized Probe
  source 1..80: mol_type = other DNA

SEQ ID NO: 94285 - DNA, 80 bp, synthetic construct
  misc_feature 1..80: note = Artificially Synthesized Probe
  source 1..80: mol_type = other DNA
cacacgtctggcagccagggtctccagcagggcccgtggccaggctctggacagacttcaggtcaggcccaagcacatgc

SEQ ID NO: 94286 - DNA, 80 bp, synthetic construct
  misc_feature 1..80: note = Artificially Synthesized Probe
  source 1..80: mol_type = other DNA
cgcccgccgcgggcttggcaggcaacagcagcagcaacaggaaggactgaggcagcggcgggaggagctccatcgaggcg

SEQ ID NO: 94287 - DNA, 80 bp, synthetic construct
  misc_feature 1..80: note = Artificially Synthesized Probe
  source 1..80: mol_type = other DNA
ccttcccggccctcgggtctgagcacctgacgcctgcggacgcacgacagcaacgccccagccgcctcacctgccgcccc

SEQ ID NO: 94288 - DNA, 80 bp, synthetic construct
  misc_feature 1..80: note = Artificially Synthesized Probe
  source 1..80: mol_type = other DNA
ggaaattgaggcccagagaggagaagggctggactgctgaagtggaccctatggtgtgccacccagatacccctttactt

SEQ ID NO: 94289 - DNA, 80 bp, synthetic construct; identical to SEQ ID NO: 33841
  misc_feature 1..80: note = Artificially Synthesized Probe
  source 1..80: mol_type = other DNA

SEQ ID NO: 94290 - DNA, 80 bp, synthetic construct
  misc_feature 1..80: note = Artificially Synthesized Probe
  source 1..80: mol_type = other DNA
cagtgaattaaagaagtgaatagtaagagcaaacccaaggcaggtaggactgtgaggaagggctactcgcatccttcttg

SEQ ID NO: 94291 - DNA, 80 bp, synthetic construct
  misc_feature 1..80: note = Artificially Synthesized Probe
  source 1..80: mol_type = other DNA
gcctggcatggcccagaggcagcttggggttagctcaaggcagctaagcaggtccagcccaagaactaagtcaagtgggc

SEQ ID NO: 94292 - DNA, 80 bp, synthetic construct
  misc_feature 1..80: note = Artificially Synthesized Probe
  source 1..80: mol_type = other DNA
caatgcagctgccgccatccctccaggaatggggaatctgaaaccacatacagtgaaaaaacctgacctggagatccaga

SEQ ID NO: 94293 - DNA, 80 bp, synthetic construct
  misc_feature 1..80: note = Artificially Synthesized Probe
  source 1..80: mol_type = other DNA
ttaccatggcaactgtgaggtcctcccagggtcctactctgcatgagggtgggaccagttcacagatgaggaaattgagg

SEQ ID NO: 94294 - DNA, 80 bp, synthetic construct
  misc_feature 1..80: note = Artificially Synthesized Probe
  source 1..80: mol_type = other DNA
cgccgaccctgggccaggaagtgggtaaggtcaaaagggtcaatgtggcggtatggtggggcaccccgtgtcagcagttc

SEQ ID NO: 94295 - DNA, 80 bp, synthetic construct; identical to SEQ ID NO: 33842
  misc_feature 1..80: note = Artificially Synthesized Probe
  source 1..80: mol_type = other DNA

SEQ ID NO: 94296 - DNA, 80 bp, synthetic construct
  misc_feature 1..80: note = Artificially Synthesized Probe
  source 1..80: mol_type = other DNA
ttcttgggtgccaaagccatgtggactgtagggcaggtggggcctcaccacatcagacttggtggtaaatctataggtct

SEQ ID NO: 94297 - DNA, 80 bp, synthetic construct
  misc_feature 1..80: note = Artificially Synthesized Probe
  source 1..80: mol_type = other DNA
ggatcacacttaggactggcccttaccaggccctgaacccacctgttctaggcccttacagaattttttttttttttgag

SEQ ID NO: 94298 - DNA, 80 bp, synthetic construct
  misc_feature 1..80: note = Artificially Synthesized Probe
  source 1..80: mol_type = other DNA
tttgtatttttagtagagacggggtttcaccgtgttagccaggatggtctcgatctcctgacctcatgatccgccttcct

SEQ ID NO: 94299 - DNA, 80 bp, synthetic construct; identical to SEQ ID NO: 33843
  misc_feature 1..80: note = Artificially Synthesized Probe
  source 1..80: mol_type = other DNA

SEQ ID NO: 94300 - DNA, 80 bp, synthetic construct
  misc_feature 1..80: note = Artificially Synthesized Probe
  source 1..80: mol_type = other DNA
agcccccaacccagagccagatgaacactgacccgctgaggtgagcggatgaactggagcaggtcaccgtggcacatata

SEQ ID NO: 94301 - DNA, 80 bp, synthetic construct
  misc_feature 1..80: note = Artificially Synthesized Probe
  source 1..80: mol_type = other DNA
gtcaggcacagggcagggcgtccctttataaggctcagatggggaaatgggaaatgaaggtctcctgctcagggtcactc

SEQ ID NO: 94302 - DNA, 80 bp, synthetic construct
  misc_feature 1..80: note = Artificially Synthesized Probe
  source 1..80: mol_type = other DNA
agtgcagacactatctgctccacctcccccactagtactctgaaggtgggtcgcactgctgggtctgcctcccagcattg

SEQ ID NO: 94303 - DNA, 80 bp, synthetic construct; identical to SEQ ID NO: 33844
  misc_feature 1..80: note = Artificially Synthesized Probe
  source 1..80: mol_type = other DNA

SEQ ID NO: 94304 - DNA, 80 bp, synthetic construct
  misc_feature 1..80: note = Artificially Synthesized Probe
  source 1..80: mol_type = other DNA
aggttcaagtgattctcctgcctcagcctcctgagtagctgggattacaggcaactgccactacacacagctaatttttt

SEQ ID NO: 94305 - DNA, 80 bp, synthetic construct
  misc_feature 1..80: note = Artificially Synthesized Probe
  source 1..80: mol_type = other DNA
gcagggctgcgtgcagtggctcacacctgtaatgccagcactttgagaggccaaggcgggtggatcacgaggtcaggagt

SEQ ID NO: 94306 - DNA, 80 bp, synthetic construct
  misc_feature 1..80: note = Artificially Synthesized Probe
  source 1..80: mol_type = other DNA
actccatccccctcaaagaaaagcagcagaagccaagcgcagtgcgcctgtaatcccagttactcaggaggctgaggcaa

SEQ ID NO: 94307 - DNA, 80 bp, synthetic construct
  misc_feature 1..80: note = Artificially Synthesized Probe
  source 1..80: mol_type = other DNA
ggttcaagaccagtctggccaacatgatgaaaccccgtctctactaaaactacaaaaattagacaggtgtggtggcagtg

SEQ ID NO: 94308 - DNA, 80 bp, synthetic construct; identical to SEQ ID NO: 33845
  misc_feature 1..80: note = Artificially Synthesized Probe
  source 1..80: mol_type = other DNA

SEQ ID NO: 94309 - DNA, 80 bp, synthetic construct
  misc_feature 1..80: note = Artificially Synthesized Probe
  source 1..80: mol_type = other DNA
aggcagaggttgcagtgagctgagatcatgccactgcactccagcctgggtgacagagtgaggttctgtctcaaaaataa

SEQ ID NO: 94310 - DNA, 80 bp, synthetic construct
  misc_feature 1..80: note = Artificially Synthesized Probe
  source 1..80: mol_type = other DNA
ctactaaaaatacaaaaattagccaggtgtggtggcgggcgcctgtaatcccagctactagggagggtgaggcaggagaa

SEQ ID NO: 94311 - DNA, 80 bp, synthetic construct
  misc_feature 1..80: note = Artificially Synthesized Probe
  source 1..80: mol_type = other DNA
aggcgggtggatcatgaggtcaggagatcgagaccatcctggctaacacggtgaaaccccatctctactaaaaatacaaa

SEQ ID NO: 94312 - DNA, 80 bp, synthetic construct; identical to SEQ ID NO: 33846
  misc_feature 1..80: note = Artificially Synthesized Probe
  source 1..80: mol_type = other DNA

SEQ ID NO: 94313 - DNA, 80 bp, synthetic construct
  misc_feature 1..80: note = Artificially Synthesized Probe
  source 1..80: mol_type = other DNA
atcaggggcagctcttctcatccctatgattactgttccagtcctgccttcccaccctggcagaggtcgaactacctcag

SEQ ID NO: 94314 - DNA, 80 bp, synthetic construct
  misc_feature 1..80: note = Artificially Synthesized Probe
  source 1..80: mol_type = other DNA
atcacttgaacccgggaggaggaggttgcaatgagccgagatcgcgccattgcactccagcctgggcaacaagagtgaaa

SEQ ID NO: 94315 - DNA, 80 bp, synthetic construct
  misc_feature 1..80: note = Artificially Synthesized Probe
  source 1..80: mol_type = other DNA
gttcgaggccagcctggacaacatgattcgaggcccatctctacaaaaaataaacaaaaaattagccaggcatggtggtg

SEQ ID NO: 94316 - DNA, 80 bp, synthetic construct; identical to SEQ ID NO: 33847
  misc_feature 1..80: note = Artificially Synthesized Probe
  source 1..80: mol_type = other DNA

SEQ ID NO: 94317 - DNA, 80 bp, synthetic construct
  misc_feature 1..80: note = Artificially Synthesized Probe
  source 1..80: mol_type = other DNA
ttttttttttgagaaggagtctcgctctgtcgcccaggctggagtgcagtggtgcaatcttggctcactgcaagctccgc

SEQ ID NO: 94318 - DNA, 80 bp, synthetic construct
  misc_feature 1..80: note = Artificially Synthesized Probe
  source 1..80: mol_type = other DNA
atgatctgcccgcctcggcctcccaaagtgctgggattacaggagtgagccaccacgcctggcctagcctatgtcatctt

SEQ ID NO: 94319 - DNA, 80 bp, synthetic construct
  misc_feature 1..80: note = Artificially Synthesized Probe
  source 1..80: mol_type = other DNA
ttccgcagcagtggcacacaggattcatcttcactatcggagaaggatgctccatggacacaagtggtggaatccagacc

SEQ ID NO: 94320 - DNA, 80 bp, synthetic construct; identical to SEQ ID NO: 33848
  misc_feature 1..80: note = Artificially Synthesized Probe
  source 1..80: mol_type = other DNA

SEQ ID NO: 94321 - DNA, 80 bp, synthetic construct
  misc_feature 1..80: note = Artificially Synthesized Probe
  source 1..80: mol_type = other DNA
gtagctgaagaccagtgcagtcgccagtgcagccacaagcagcagcaaaggcagcaggataccaaggagcgtgctctgtg

SEQ ID NO: 94322 - DNA, 80 bp, synthetic construct
  misc_feature 1..80: note = Artificially Synthesized Probe
  source 1..80: mol_type = other DNA
tggggcaccatcctggccaagctgcagggatgggggcagggggcagacaaccatgtccccccggaactcgtgctggcagc

SEQ ID NO: 94323 - DNA, 80 bp, synthetic construct
  misc_feature 1..80: note = Artificially Synthesized Probe
  source 1..80: mol_type = other DNA
caaacttaatggcatgctcctcaggcttcagtggaactaggttggcactgggtggatggggtgggggtaggaagcgaaag

SEQ ID NO: 94324 - DNA, 80 bp, synthetic construct; identical to SEQ ID NO: 33840
  misc_feature 1..80: note = Artificially Synthesized Probe
  source 1..80: mol_type = other DNA

SEQ ID NO: 94325 - DNA, 80 bp, synthetic construct
  misc_feature 1..80: note = Artificially Synthesized Probe
  source 1..80: mol_type = other DNA
gattagccaggaaccccacctgtgattgctcctcgcctcagcccagcacgaggttgggctgcagctcagggaactcatcc

SEQ ID NO: 94326 - DNA, 80 bp, synthetic construct; identical to SEQ ID NO: 33849
  misc_feature 1..80: note = Artificially Synthesized Probe
  source 1..80: mol_type = other DNA

SEQ ID NO: 94327 - DNA, 80 bp, synthetic construct
  misc_feature 1..80: note = Artificially Synthesized Probe
  source 1..80: mol_type = other DNA
gaacaagagattgggctcaaggttaccctctttgtgatggccaggcccacttcttccaggggcctgttgacctctcccag

SEQ ID NO: 94328 - DNA, 80 bp, synthetic construct
  misc_feature 1..80: note = Artificially Synthesized Probe
  source 1..80: mol_type = other DNA
ccaatatggtttatttctgccccagccaagcttctttggaccctggctgggggaaaggcaccccaggcaccggcaagttc

SEQ ID NO: 94329 - DNA, 80 bp, synthetic construct; identical to SEQ ID NO: 33963
  misc_feature 1..80: note = Artificially Synthesized Probe
  source 1..80: mol_type = other DNA

SEQ ID NO: 94330 - DNA, 80 bp, synthetic construct
  misc_feature 1..80: note = Artificially Synthesized Probe
  source 1..80: mol_type = other DNA
aagaaacgggagaagatgaggtcatgacaggtgaagacagtgagaaagaggcagagctggcttcttccacagagggatgg

SEQ ID NO: 94331 - DNA, 80 bp, synthetic construct
  misc_feature 1..80: note = Artificially Synthesized Probe
  source 1..80: mol_type = other DNA
tggtaatggtcatttctgtagattctgtcttgatgggggaggtagagagcctggtgatcacttcagtggatatgtcttgt

SEQ ID NO: 94332 - DNA, 80 bp, synthetic construct; identical to SEQ ID NO: 33867
  misc_feature 1..80: note = Artificially Synthesized Probe
  source 1..80: mol_type = other DNA

SEQ ID NO: 94333 - DNA, 80 bp, synthetic construct
  misc_feature 1..80: note = Artificially Synthesized Probe
  source 1..80: mol_type = other DNA
tcagggtggatgttgactccatctcaattcttgttatctcagaggaagcaggtatggttgtagaaacaatgtcttttatg

SEQ ID NO: 94334 - DNA, 80 bp, synthetic construct
  misc_feature 1..80: note = Artificially Synthesized Probe
  source 1..80: mol_type = other DNA
ccagactctcatctgaggtgatattcatactgggaggtgaagtggtcacaggttccaagcttgtgtccaacatgtctgtg

SEQ ID NO: 94335 - DNA, 80 bp, synthetic construct; identical to SEQ ID NO: 33964
  misc_feature 1..80: note = Artificially Synthesized Probe
  source 1..80: mol_type = other DNA

SEQ ID NO: 94336 - DNA, 80 bp, synthetic construct
  misc_feature 1..80: note = Artificially Synthesized Probe
  source 1..80: mol_type = other DNA
gaaattctagtgatggtttccgtggagatttctggtgatattgtggattgagcaggacctggggtggatgttctgcctaa

SEQ ID NO: 94337 - DNA, 80 bp, synthetic construct
  misc_feature 1..80: note = Artificially Synthesized Probe
  source 1..80: mol_type = other DNA
agtcagggaggaagttggctgtgtcatcatagtttctgggaaggcaggagttgatgtggaaacacttgtattccccagag

SEQ ID NO: 94338 - DNA, 80 bp, synthetic construct; identical to SEQ ID NO: 33965
  misc_feature 1..80: note = Artificially Synthesized Probe
  source 1..80: mol_type = other DNA

SEQ ID NO: 94339 - DNA, 80 bp, synthetic construct
  misc_feature 1..80: note = Artificially Synthesized Probe
  source 1..80: mol_type = other DNA
cagagctggcttcttccacagagggaaggctcggccatggcacatctccaggagttctactcataagagtggtcatctct

SEQ ID NO: 94340 - DNA, 80 bp, synthetic construct
  misc_feature 1..80: note = Artificially Synthesized Probe
  source 1..80: mol_type = other DNA
gcactttctgctgattctgtcataatgggggaagtagaaagcctggtgatcgcttcagtagagatgtctggtgatatggt

SEQ ID NO: 94341 - DNA, 80 bp, synthetic construct
  misc_feature 1..80: note = Artificially Synthesized Probe
  source 1..80: mol_type = other DNA
agggaggatgttggttctatctgaattctgctggtctcaaagaagtcagaagtggatatggaaacactcgtttcccccat

SEQ ID NO: 94342 - DNA, 80 bp, synthetic construct; identical to SEQ ID NO: 33966
  misc_feature 1..80: note = Artificially Synthesized Probe
  source 1..80: mol_type = other DNA

SEQ ID NO: 94343 - DNA, 80 bp, synthetic construct
  misc_feature 1..80: note = Artificially Synthesized Probe
  source 1..80: mol_type = other DNA
agaggcagagctggtttcttccacagaggattgactaggccataacatatcaccagggcttctgctcacaagagtggtca

SEQ ID NO: 94344 - DNA, 80 bp, synthetic construct
  misc_feature 1..80: note = Artificially Synthesized Probe
  source 1..80: mol_type = other DNA
ggcctcccaaagtgctgggattacaggtgtgagccaccgcgcctggctgagctaggattttaaaggtgggatggagggtt

SEQ ID NO: 94345 - DNA, 80 bp, synthetic construct
  misc_feature 1..80: note = Artificially Synthesized Probe
  source 1..80: mol_type = other DNA
tgatcatcatttctgctgattctgtcattatgctggaggtagggagtctggtgatggtttctgtggaagtctctggtgac

SEQ ID NO: 94346 - DNA, 80 bp, synthetic construct
  misc_feature 1..80: note = Artificially Synthesized Probe
  source 1..80: mol_type = other DNA
gggtcagggaggatgttggttctgtctgaattctgctagtctcaaaaaagccaggagttgatgtggagacactcgtatcc

SEQ ID NO: 94347 - DNA, 80 bp, synthetic construct
  misc_feature 1..80: note = Artificially Synthesized Probe
  source 1..80: mol_type = other DNA
aggtggccagtatttcaactgaggtgctgctcaaatttgcaggtgagttggttacaggttctgagcttttgtgcaacata

SEQ ID NO: 94348 - DNA, 80 bp, synthetic construct; identical to SEQ ID NO: 33967
  misc_feature 1..80: note = Artificially Synthesized Probe
  source 1..80: mol_type = other DNA

SEQ ID NO: 94349 - DNA, 80 bp, synthetic construct
  misc_feature 1..80: note = Artificially Synthesized Probe
  source 1..80: mol_type = other DNA
gtgatattgtggattgagcgggacctgggatggaggtgacgtcttccttggagatctcagtagtagcaccagtgggcact

SEQ ID NO: 94350 - DNA, 80 bp, synthetic construct
  misc_feature 1..80: note = Artificially Synthesized Probe
  source 1..80: mol_type = other DNA
aggtggtacacattggagatgagtcagctaggacagaggactgtgatttatatccagagctggtggttgccacattggtc

SEQ ID NO: 94351 - DNA, 80 bp, synthetic construct
  misc_feature 1..80: note = Artificially Synthesized Probe
  source 1..80: mol_type = other DNA
gaagtgaagtcacaggaaggggagagggggggatatgtgctaggaatgtggtggaaacaggatgaggtgaggtcacggca

SEQ ID NO: 94352 - DNA, 80 bp, synthetic construct; identical to SEQ ID NO: 33968
  misc_feature 1..80: note = Artificially Synthesized Probe
  source 1..80: mol_type = other DNA

SEQ ID NO: 94353 - DNA, 80 bp, synthetic construct
  misc_feature 1..80: note = Artificially Synthesized Probe
  source 1..80: mol_type = other DNA
acctcagtagtagcaccagtggacactttagaaagaacagtgtttgcttctgtggctaagctggtctcttcagaggtgct

SEQ ID NO: 94354 - DNA, 80 bp, synthetic construct
  misc_feature 1..80: note = Artificially Synthesized Probe
  source 1..80: mol_type = other DNA
gaggaaggggattcatgtccagaactggaagttccaactttggttactgccgtgtttgagaaaggatgaattttctccgt

SEQ ID NO: 94355 - DNA, 80 bp, synthetic construct
  misc_feature 1..80: note = Artificially Synthesized Probe
  source 1..80: mol_type = other DNA
cagcaattgcaggtgctgagaaacccagagtcttctaactaatgatcattgttcctaaagggtcttcttgcctttgctct

SEQ ID NO: 94356 - DNA, 80 bp, synthetic construct
  misc_feature 1..80: note = Artificially Synthesized Probe
  source 1..80: mol_type = other DNA
cttgctggtaatgtggaagaaacaggagaaggtgagatcatggcagataaagacagctgggaagatggagggcttgtttc

SEQ ID NO: 94357 - DNA, 80 bp, synthetic construct; identical to SEQ ID NO: 33969
  misc_feature 1..80: note = Artificially Synthesized Probe
  source 1..80: mol_type = other DNA

SEQ ID NO: 94358 - DNA, 80 bp, synthetic construct
  misc_feature 1..80: note = Artificially Synthesized Probe
  source 1..80: mol_type = other DNA
gaactgcctgtctccctcaatttagggctcagggaggaaattgactctttctgaattctgctagtctccaagaagtgagg

SEQ ID NO: 94359 - DNA, 80 bp, synthetic construct
  misc_feature 1..80: note = Artificially Synthesized Probe
  source 1..80: mol_type = other DNA
gcttctgtatttgtggtgtccttgccagtggtcagtctctcatctgaagtgtggctcagctttggaggtgaactggttac

SEQ ID NO: 94360 - DNA, 80 bp, synthetic construct
  misc_feature 1..80: note = Artificially Synthesized Probe
  source 1..80: mol_type = other DNA
tgaggttgtggcaggtaaagacagcagggaagggagagagctgggattttccagagagggagagctttgccatgacatat

SEQ ID NO: 94361 - DNA, 80 bp, synthetic construct; identical to SEQ ID NO: 33970
  misc_feature 1..80: note = Artificially Synthesized Probe
  source 1..80: mol_type = other DNA

SEQ ID NO: 94362 - DNA, 80 bp, synthetic construct
  misc_feature 1..80: note = Artificially Synthesized Probe
  source 1..80: mol_type = other DNA
atatgttgactctctcttaatttttgtagtctcagaggaaacagacattgatgtggaaacagttgtatgccccatggtgg

SEQ ID NO: 94363 - DNA, 80 bp, synthetic construct
  misc_feature 1..80: note = Artificially Synthesized Probe
  source 1..80: mol_type = other DNA
gcatggcttctatagctgtggtgtcttcatctgttgtcagtatctcatgtgaggtactgctcaaatttggaggtgaactg

SEQ ID NO: 94364 - DNA, 80 bp, synthetic construct; identical to SEQ ID NO: 33971
  misc_feature 1..80: note = Artificially Synthesized Probe
  source 1..80: mol_type = other DNA

SEQ ID NO: 94365 - DNA, 80 bp, synthetic construct
  misc_feature 1..80: note = Artificially Synthesized Probe
  source 1..80: mol_type = other DNA
gtcatatttgaagattctgtaatgccaagggagataggcaggctggggatcacttcagtggagatgtctggtgactctgt

SEQ ID NO: 94366 - DNA, 80 bp, synthetic construct
  misc_feature 1..80: note = Artificially Synthesized Probe
  source 1..80: mol_type = other DNA
gagaatgttgactccatctcaatccttgtaatctcagaggagccaggcatggatgtggaaacaatggtgtcccttatgtt

SEQ ID NO: 94367 - DNA, 80 bp, synthetic construct
  misc_feature 1..80: note = Artificially Synthesized Probe
  source 1..80: mol_type = other DNA
cctctccagtatcaaagtggatgctccagctacaccaatcttcttaaacttgccccaaaatgccactttttttttttttg

SEQ ID NO: 94368 - DNA, 80 bp, synthetic construct
  misc_feature 1..80: note = Artificially Synthesized Probe
  source 1..80: mol_type = other DNA
atacattttctctgtatctttaatgtcttctgaagtagtcggtatcttatgtgaggtgctgcccaagtttggaggtaaac

SEQ ID NO: 94369 - DNA, 80 bp, synthetic construct; identical to SEQ ID NO: 33972
  misc_feature 1..80: note = Artificially Synthesized Probe
  source 1..80: mol_type = other DNA

SEQ ID NO: 94370 - DNA, 80 bp, synthetic construct
  misc_feature 1..80: note = Artificially Synthesized Probe
  source 1..80: mol_type = other DNA
cggattttgtcaggccagcaaaagtagaaagcatggtgacagatcttgtggaggtgtccggtgacattgtgggcttttca

SEQ ID NO: 94371 - DNA, 80 bp, synthetic construct
  misc_feature 1..80: note = Artificially Synthesized Probe
  source 1..80: mol_type = other DNA
gaggtgctagtctccctcagtctaaatatcagggagaaagttgtctcagactcaatctttttcatcgcagaggatctagg

SEQ ID NO: 94372 - DNA, 80 bp, synthetic construct
  misc_feature 1..80: note = Artificially Synthesized Probe
  source 1..80: mol_type = other DNA
gtgtgtgtatctgtggtggcttctgaagtggccaaggtgttccttaaattttgaggtgaacgagtcacaggttctaagtt

SEQ ID NO: 94373 - DNA, 80 bp, synthetic construct; identical to SEQ ID NO: 33973
  misc_feature 1..80: note = Artificially Synthesized Probe
  source 1..80: mol_type = other DNA

SEQ ID NO: 94374 - DNA, 80 bp, synthetic construct
  misc_feature 1..80: note = Artificially Synthesized Probe
  source 1..80: mol_type = other DNA
gaaatgtctggggactttgttgactgagcagaagctggcatgaatgtaggatcatagtaggtgacttctgccctggagac

SEQ ID NO: 94375 - DNA, 80 bp, synthetic construct
  misc_feature 1..80: note = Artificially Synthesized Probe
  source 1..80: mol_type = other DNA
gtcaacatttttagtctcaggagaaccaggtgttgatgtggaaacaatagcgtcctccatcatagatccagtaacctttg

SEQ ID NO: 94376 - DNA, 80 bp, synthetic construct
  misc_feature 1..80: note = Artificially Synthesized Probe
  source 1..80: mol_type = other DNA
ttgtggaggcttcagaagtgagtatctcacctgagaagctacttgcacttggtaaggagctggtcacaagttctgagtgt

SEQ ID NO: 94377 - DNA, 80 bp, synthetic construct
  misc_feature 1..80: note = Artificially Synthesized Probe
  source 1..80: mol_type = other DNA
tacaggcacgcaccaccatgcctggctaatttttgtatttttagcagagatggggtttcatcatattggtcaggctggtc

SEQ ID NO: 94378 - DNA, 80 bp, synthetic construct
  misc_feature 1..80: note = Artificially Synthesized Probe
  source 1..80: mol_type = other DNA
cagagggagggctttgccatgacacgcccttagtacttctgctcatagtagtggtctcctctgagtgtggaaatctctga

SEQ ID NO: 94379 - DNA, 80 bp, synthetic construct; identical to SEQ ID NO: 33974
  misc_feature 1..80: note = Artificially Synthesized Probe
  source 1..80: mol_type = other DNA

SEQ ID NO: 94380 - DNA, 80 bp, synthetic construct
  misc_feature 1..80: note = Artificially Synthesized Probe
  source 1..80: mol_type = other DNA
aaacacttgtatcccccatggcgaaggtgatacccattggagatgtggctttggatgtgtgtgaatcagctgggacagaa

SEQ ID NO: 94381 - DNA, 80 bp, synthetic construct
  misc_feature 1..80: note = Artificially Synthesized Probe
  source 1..80: mol_type = other DNA
ctgggcttgttgtgcccaatacatttgtggttgtcaccagaacagaagtaagaagtgcagtcacagggagaggagaggag

SEQ ID NO: 94382 - DNA, 80 bp, synthetic construct
  misc_feature 1..80: note = Artificially Synthesized Probe
  source 1..80: mol_type = other DNA
atccctgagacacggttgaatgagtccctccctggaaaagtgtggttgatgtgtcccagggaaggataccctgtgatgta

SEQ ID NO: 94383 - DNA, 80 bp, synthetic construct; identical to SEQ ID NO: 33975
  misc_feature 1..80: note = Artificially Synthesized Probe
  source 1..80: mol_type = other DNA

SEQ ID NO: 94384 - DNA, 80 bp, synthetic construct
  misc_feature 1..80: note = Artificially Synthesized Probe
  source 1..80: mol_type = other DNA
ggacagaggattgtgatttatgtccagacccggaagtccctacattggtcactgcggtgtttgtggaatgatgcatggcg

SEQ ID NO: 94385 - DNA, 80 bp, synthetic construct
  misc_feature 1..80: note = Artificially Synthesized Probe
  source 1..80: mol_type = other DNA
aggaggggatgctctgtggtgatgtggaggaaacaggagaaggggatgtcatggcaggtgaagacatcagggaagacaca

SEQ ID NO: 94386 - DNA, 80 bp, synthetic construct
  misc_feature 1..80: note = Artificially Synthesized Probe
  source 1..80: mol_type = other DNA
gcgatgcagactcaggaggacttgcttgggtggtgatcgtcatttctgcagattttgtcttaatagaggaggtgaagacc

SEQ ID NO: 94387 - DNA, 80 bp, synthetic construct; identical to SEQ ID NO: 33976
  misc_feature 1..80: note = Artificially Synthesized Probe
  source 1..80: mol_type = other DNA

SEQ ID NO: 94388 - DNA, 80 bp, synthetic construct; identical to SEQ ID NO: 33868
  misc_feature 1..80: note = Artificially Synthesized Probe
  source 1..80: mol_type = other DNA

SEQ ID NO: 94389 - DNA, 80 bp, synthetic construct
  misc_feature 1..80: note = Artificially Synthesized Probe
  source 1..80: mol_type = other DNA
tagaaggaaaaatttcctttgtgtctttactgtctttagaagtggccagtatcttatctgaggtgctgctgaaatttgga

SEQ ID NO: 94390 - DNA, 80 bp, synthetic construct
  misc_feature 1..80: note = Artificially Synthesized Probe
  source 1..80: mol_type = other DNA
agggggagctggttttatccacagagggaggacttgtccatgatacatcctgtggaattctgctcataagagtggtcaca

SEQ ID NO: 94391 - DNA, 80 bp, synthetic construct
  misc_feature 1..80: note = Artificially Synthesized Probe
  source 1..80: mol_type = other DNA
atggttatttctgcagattctgtcattattggggaggtagacagcctggtgttggtttctgtggagatgtctagtgacac

SEQ ID NO: 94392 - DNA, 80 bp, synthetic construct; identical to SEQ ID NO: 33977
  misc_feature 1..80: note = Artificially Synthesized Probe
  source 1..80: mol_type = other DNA

SEQ ID NO: 94393 - DNA, 80 bp, synthetic construct
  misc_feature 1..80: note = Artificially Synthesized Probe
  source 1..80: mol_type = other DNA
gtgaccgatatgtcatccaaagtgttgctcatactttgaggtgaactggtcactgtttctaagcttgtatccaccttgcc

SEQ ID NO: 94394 - DNA, 80 bp, synthetic construct
  misc_feature 1..80: note = Artificially Synthesized Probe
  source 1..80: mol_type = other DNA
gtctgtgacacgtccttgacatcattgttcattgcagtggttatttttgagtgggcaaacccctcagtcaccactgatgg

SEQ ID NO: 94395 - DNA, 80 bp, synthetic construct; identical to SEQ ID NO: 33978
  misc_feature 1..80: note = Artificially Synthesized Probe
  source 1..80: mol_type = other DNA

SEQ ID NO: 94396 - DNA, 80 bp, synthetic construct
  misc_feature 1..80: note = Artificially Synthesized Probe
  source 1..80: mol_type = other DNA
ctcagaaccaggtattgatatagaagcaagagcgtcccccatgctggaggcaggaaccattggagatgtggctgtagatg

SEQ ID NO: 94397 - DNA, 80 bp, synthetic construct
  misc_feature 1..80: note = Artificially Synthesized Probe
  source 1..80: mol_type = other DNA
tgaattggtcacaggttccatgcttgtgttcaacatatctgtggtcttcaccagtccagaggtaagaactgaagtcgcag

SEQ ID NO: 94398 - DNA, 80 bp, synthetic construct
  misc_feature 1..80: note = Artificially Synthesized Probe
  source 1..80: mol_type = other DNA
ctctgattgcataaaatctggagtcacagctaatggagtctctgtcaagtaaggcatggttgatgtgtccaagagatatg

SEQ ID NO: 94399 - DNA, 80 bp, synthetic construct
  misc_feature 1..80: note = Artificially Synthesized Probe
  source 1..80: mol_type = other DNA
tctcggctcactgcaagctctgcctcccgggttcacgccattctcctgcctcagcctcccgagtagctgcgactacaggt

SEQ ID NO: 94400 - DNA, 80 bp, synthetic construct
  misc_feature 1..80: note = Artificially Synthesized Probe
  source 1..80: mol_type = other DNA
gaaagtggcttgtgtcttggtgacatgagtagtagcatcaccactagacacatgggtaatgacagtgcttgtctctgtag

SEQ ID NO: 94401 - DNA, 80 bp, synthetic construct; identical to SEQ ID NO: 33979
  misc_feature 1..80: note = Artificially Synthesized Probe
  source 1..80: mol_type = other DNA

SEQ ID NO: 94402 - DNA, 80 bp, synthetic construct
  misc_feature 1..80: note = Artificially Synthesized Probe
  source 1..80: mol_type = other DNA
tggagtagaggagggactgtgcccttgtgatgtcaacaaaatattggaaggcgaggttgtagcatggataggtaccaggg

SEQ ID NO: 94403 - DNA, 80 bp, synthetic construct
  misc_feature 1..80: note = Artificially Synthesized Probe
  source 1..80: mol_type = other DNA
tgcacttagtgatgtagcgccaggtggacttgtttgcatagcaaggatcattcctccagattctgtcatggcaggaaagt

SEQ ID NO: 94404 - DNA, 80 bp, synthetic construct; identical to SEQ ID NO: 33980
  misc_feature 1..80: note = Artificially Synthesized Probe
  source 1..80: mol_type = other DNA

SEQ ID NO: 94405 - DNA, 80 bp, synthetic construct
  misc_feature 1..80: note = Artificially Synthesized Probe
  source 1..80: mol_type = other DNA
agaagggtgaattgcctctttgtctgtggtggactcagaaggggcaattctctcatatgggctgcttttccaacttgggg

SEQ ID NO: 94406 - DNA, 80 bp, synthetic construct
  misc_feature 1..80: note = Artificially Synthesized Probe
  source 1..80: mol_type = other DNA
gtcagatgtagctcttgcctctgttgtaagagctgtctgcccttgtctctgaaaagttgcatctggagtttttgctgtgt

SEQ ID NO: 94407 - DNA, 80 bp, synthetic construct
  misc_feature 1..80: note = Artificially Synthesized Probe
  source 1..80: mol_type = other DNA
gactgcacttgtaatgtgccctatagagaagggcaactgtgaggtagctgggctgatcatggtttccaaagtgagttcct

SEQ ID NO: 94408 - DNA, 80 bp, synthetic construct; identical to SEQ ID NO: 33981
  misc_feature 1..80: note = Artificially Synthesized Probe
  source 1..80: mol_type = other DNA

SEQ ID NO: 94409 - DNA, 80 bp, synthetic construct
  misc_feature 1..80: note = Artificially Synthesized Probe
  source 1..80: mol_type = other DNA
ggagtctaattcagtgcttgaggctaagaatgaagttgtatgcattgtggaaattgttccaggagatcttgcaactttca

SEQ ID NO: 94410 - DNA, 80 bp, synthetic construct
  misc_feature 1..80: note = Artificially Synthesized Probe
  source 1..80: mol_type = other DNA
tccattgtttattgaatgaatgaattattcatttactgattcattcatttaattgatcattttaattgatcaattaatca

SEQ ID NO: 94411 - DNA, 80 bp, synthetic construct
  misc_feature 1..80: note = Artificially Synthesized Probe
  source 1..80: mol_type = other DNA
ggttcccatggtggtgatggtggtggagatacctggagtaggagctgtggttacgtccaggatgctcacttccgcaggag

SEQ ID NO: 94412 - DNA, 80 bp, synthetic construct
  misc_feature 1..80: note = Artificially Synthesized Probe
  source 1..80: mol_type = other DNA
tccagagggcagagacactagtgaggtggtttgtgctgtggaggtgatgtataatgtgtttgtgacatcaggagatgcac

SEQ ID NO: 94413 - DNA, 80 bp, synthetic construct; identical to SEQ ID NO: 33982
  misc_feature 1..80: note = Artificially Synthesized Probe
  source 1..80: mol_type = other DNA

SEQ ID NO: 94414 - DNA, 80 bp, synthetic construct
  misc_feature 1..80: note = Artificially Synthesized Probe
  source 1..80: mol_type = other DNA
tgactgcctggtccctcctggagttccagaataaaggttggtccaagcctcaggtggggatggggagagggagacccttt

SEQ ID NO: 94415 - DNA, 80 bp, synthetic construct
  misc_feature 1..80: note = Artificially Synthesized Probe
  source 1..80: mol_type = other DNA
agaatttctcacagtggacctgatctctgggctgatgctgggttccttggagctcatgattttgagagtggtagacattt

SEQ ID NO: 94416 - DNA, 80 bp, synthetic construct
  misc_feature 1..80: note = Artificially Synthesized Probe
  source 1..80: mol_type = other DNA
cttttaattctcacactttaagcctctggacaccagggaacacattaaacattccaagggagatggtgaagttagagctt

SEQ ID NO: 94417 - DNA, 80 bp, synthetic construct
  misc_feature 1..80: note = Artificially Synthesized Probe
  source 1..80: mol_type = other DNA
aggctacccccaaactatttccacttttgtctttggagcttgcccttgccaaaccaatttcagcttccaactttcagcct

SEQ ID NO: 94418 - DNA, 80 bp, synthetic construct; identical to SEQ ID NO: 33983
  misc_feature 1..80: note = Artificially Synthesized Probe
  source 1..80: mol_type = other DNA

SEQ ID NO: 94419 - DNA, 80 bp, synthetic construct
  misc_feature 1..80: note = Artificially Synthesized Probe
  source 1..80: mol_type = other DNA
gatccttcactctggagcagaagaaagtacagaaagaatcgactctgtagcattctctcctgctgaattaattggctatt

SEQ ID NO: 94420 - DNA, 80 bp, synthetic construct; identical to SEQ ID NO: 33869
  misc_feature 1..80: note = Artificially Synthesized Probe
  source 1..80: mol_type = other DNA

SEQ ID NO: 94421 - DNA, 80 bp, synthetic construct
  misc_feature 1..80: note = Artificially Synthesized Probe
  source 1..80: mol_type = other DNA
ggcgtgatctcggctcactgcaacctccgcctcccaggttcaagtgattctccttcctcagcctcccaagtagctgggat

SEQ ID NO: 94422 - DNA, 80 bp, synthetic construct
  misc_feature 1..80: note = Artificially Synthesized Probe
  source 1..80: mol_type = other DNA
ctaggaacctattttaaaacctagtccttgctgggtgtggtggctcaagcctgtaatcccagtgcttagggaggccgagg

SEQ ID NO: 94423 - DNA, 80 bp, synthetic construct; identical to SEQ ID NO: 33984
  misc_feature 1..80: note = Artificially Synthesized Probe
  source 1..80: mol_type = other DNA

SEQ ID NO: 94424 - DNA, 80 bp, synthetic construct
  misc_feature 1..80: note = Artificially Synthesized Probe
  source 1..80: mol_type = other DNA
gggaggctggggcaggaaaaacgcttgaacccgagaggcagaggttgcaatgagctgagatcgtgccattgcactccagc

SEQ ID NO: 94425 - DNA, 80 bp, synthetic construct
  misc_feature 1..80: note = Artificially Synthesized Probe
  source 1..80: mol_type = other DNA
aaaaacaacaacaataagctgggcatagcacagaggctctagagcccagtgagtgagctggactgctgcccagctactca

SEQ ID NO: 94426 - DNA, 80 bp, synthetic construct
  misc_feature 1..80: note = Artificially Synthesized Probe
  source 1..80: mol_type = other DNA
tcaaaaataaatgaaagagagagagagagaaagaagagaagagaaggagaggagagagaaagagagagagagagagagag

SEQ ID NO: 94427 - DNA, 80 bp, synthetic construct; identical to SEQ ID NO: 33985
  misc_feature 1..80: note = Artificially Synthesized Probe
  source 1..80: mol_type = other DNA

SEQ ID NO: 94428 - DNA, 80 bp, synthetic construct
  misc_feature 1..80: note = Artificially Synthesized Probe
  source 1..80: mol_type = other DNA
gaaagaaagaaagaaagaaagaaagaaagaaagaaagaaagaaagaaagaaagggagagaaagaaaagaaaagaaaagaa

SEQ ID NO: 94429 - DNA, 80 bp, synthetic construct
  misc_feature 1..80: note = Artificially Synthesized Probe
  source 1..80: mol_type = other DNA
tttatggtggtcactagcgttccatcagttgctgaaagaaaagggcaataggaaggtttagctatccattacttcagaat

SEQ ID NO: 94430 - DNA, 80 bp, synthetic construct
  misc_feature 1..80: note = Artificially Synthesized Probe
  source 1..80: mol_type = other DNA
cagaaagactgacagatctcagatgggaaggggttcattttataagtaatcacaaattaaaatgtgacaagtggccaggc

SEQ ID NO: 94431 - DNA, 80 bp, synthetic construct; identical to SEQ ID NO: 33986
  misc_feature 1..80: note = Artificially Synthesized Probe
  source 1..80: mol_type = other DNA

SEQ ID NO: 94432 - DNA, 80 bp, synthetic construct
  misc_feature 1..80: note = Artificially Synthesized Probe
  source 1..80: mol_type = other DNA
ggatgtccaccaactggtaggtggagcccagccaatggaatgaggcattcagggtcttatctagaaagacttgctccacc

SEQ ID NO: 94433 - DNA, 80 bp, synthetic construct
  misc_feature 1..80: note = Artificially Synthesized Probe
  source 1..80: mol_type = other DNA
tggattcttaacctctttttattataggtccctttgacaggcttgtgaaccatatgaattcctttataaattaaaataaa

SEQ ID NO: 94434 - DNA, 80 bp, synthetic construct
  misc_feature 1..80: note = Artificially Synthesized Probe
  source 1..80: mol_type = other DNA
catcaacctaagcaaaataactcaaaaacagaaaattaaatactgcacattctcacttataagtgggagctaaccaatgg

SEQ ID NO: 94435 - DNA, 80 bp, synthetic construct
  misc_feature 1..80: note = Artificially Synthesized Probe
  source 1..80: mol_type = other DNA
cacgtaacaaacctgcacatatacccctgaatctaaaatttaaaaaacaaaggaaatgattatattgaaatgttgttatc

SEQ ID NO: 94436 - DNA, 80 bp, synthetic construct
  misc_feature 1..80: note = Artificially Synthesized Probe
  source 1..80: mol_type = other DNA
tccggaatttctgttgttggcaaaggcacaggcactgctaggattaatgtggtttgttttgttacctctattcatcaata

SEQ ID NO: 94437 - DNA, 80 bp, synthetic construct; identical to SEQ ID NO: 33987
  misc_feature 1..80: note = Artificially Synthesized Probe
  source 1..80: mol_type = other DNA

SEQ ID NO: 94438 - DNA, 80 bp, synthetic construct
  misc_feature 1..80: note = Artificially Synthesized Probe
  source 1..80: mol_type = other DNA
aactgaaatagagcttgcccatgtttctggagaactctttcttctggctgtgggttctgtgggagaagagacaggtaaca

SEQ ID NO: 94439 - DNA, 80 bp, synthetic construct
  misc_feature 1..80: note = Artificially Synthesized Probe
  source 1..80: mol_type = other DNA
atgcaccaatatgttgggctgccttgccatggaaggcccaagaaatagtgaagtctttctggaggtggatgcagtggggg

SEQ ID NO: 94440 - DNA, 80 bp, synthetic construct
  misc_feature 1..80: note = Artificially Synthesized Probe
  source 1..80: mol_type = other DNA
ctctgaggcatatctagggtcccctgttcctgaagtggggactctgggttcatgccctgccatagaaggggaggcagatc

SEQ ID NO: 94441 - DNA, 80 bp, synthetic construct; identical to SEQ ID NO: 33988
  misc_feature 1..80: note = Artificially Synthesized Probe
  source 1..80: mol_type = other DNA

SEQ ID NO: 94442 - DNA, 80 bp, synthetic construct
  misc_feature 1..80: note = Artificially Synthesized Probe
  source 1..80: mol_type = other DNA
tgtctttaaagagcaaaagatctagaggcacccaccctcagtctagagaagggttctgatcaaaatgggaggccttcggc

SEQ ID NO: 94443 - DNA, 80 bp, synthetic construct
  misc_feature 1..80: note = Artificially Synthesized Probe
  source 1..80: mol_type = other DNA
agacatggctgtaacctcacctgggttcatggtcagagggagagaagaaaatgttttggttccagttgagtgagtggacc

SEQ ID NO: 94444 - DNA, 80 bp, synthetic construct
  misc_feature 1..80: note = Artificially Synthesized Probe
  source 1..80: mol_type = other DNA
tctgactgaatacaagggaaccagtagttcccgcaggcaaagtagaaagtgccactgtgatcgaaccttcataggttgta

SEQ ID NO: 94445 - DNA, 80 bp, synthetic construct; identical to SEQ ID NO: 33989
  misc_feature 1..80: note = Artificially Synthesized Probe
  source 1..80: mol_type = other DNA

SEQ ID NO: 94446 - DNA, 80 bp, synthetic construct
  misc_feature 1..80: note = Artificially Synthesized Probe
  source 1..80: mol_type = other DNA
ctgaagtctcagtgactaccaaaaggctctcaggagtagctgaagtttcccagtttgctccagaggtgggtgtagttggg

SEQ ID NO: 94447 - DNA, 80 bp, synthetic construct
  misc_feature 1..80: note = Artificially Synthesized Probe
  source 1..80: mol_type = other DNA
gacttgtcttgagaaagcccatggcaggtaagtcagtagtactgcctacactggtccatgtacctggtgctggaacagaa

SEQ ID NO: 94448 - DNA, 80 bp, synthetic construct
  misc_feature 1..80: note = Artificially Synthesized Probe
  source 1..80: mol_type = other DNA
ccacattggagcccccatcaagagaataggtgttactggaaacagatggagaggtggctgtatttgtctctgttgtagat

SEQ ID NO: 94449 - DNA, 80 bp, synthetic construct; identical to SEQ ID NO: 33990
  misc_feature 1..80: note = Artificially Synthesized Probe
  source 1..80: mol_type = other DNA

SEQ ID NO: 94450 - DNA, 80 bp, synthetic construct
  misc_feature 1..80: note = Artificially Synthesized Probe
  source 1..80: mol_type = other DNA
actcatgagtgagagatgaaatggttctaaatgaatgagttgtcttttctgggaaatgtgagatagttgtcacttcagta

SEQ ID NO: 94451 - DNA, 80 bp, synthetic construct
  misc_feature 1..80: note = Artificially Synthesized Probe
  source 1..80: mol_type = other DNA
acactgtccatggatccttgttcattctaaaggaaaccaaagactctgaagtgggcagggatattgtcctagttaatttg

SEQ ID NO: 94452 - DNA, 80 bp, synthetic construct
  misc_feature 1..80: note = Artificially Synthesized Probe
  source 1..80: mol_type = other DNA
cagtgttcaaagtactcgcggctgtattctggggaccatgggtctctgtttctggatttctttgcttagcagcagatgtg

SEQ ID NO: 94453 - DNA, 80 bp, synthetic construct
  misc_feature 1..80: note = Artificially Synthesized Probe
  source 1..80: mol_type = other DNA
tccctgctacatggggggctgaggcaggagaattgcttgaacccaggaggcagttgtagtgagccgagatcataccactg

SEQ ID NO: 94454 - DNA, 80 bp, synthetic construct
  misc_feature 1..80: note = Artificially Synthesized Probe
  source 1..80: mol_type = other DNA
tactgattgtggaatccaaggattcaagtgaggctgaggaatatggagaggatgtgctgcttccagaagagactgaattc

SEQ ID NO: 94455 - DNA, 80 bp, synthetic construct; identical to SEQ ID NO: 33991
  misc_feature 1..80: note = Artificially Synthesized Probe
  source 1..80: mol_type = other DNA

SEQ ID NO: 94456 - DNA, 80 bp, synthetic construct
  misc_feature 1..80: note = Artificially Synthesized Probe
  source 1..80: mol_type = other DNA
tagaagaggtatcagagccgttttccaatctggaggctctagtgacaccagtattcaatgacctgtcagtggccaaagtc

SEQ ID NO: 94457 - DNA, 80 bp, synthetic construct
  misc_feature 1..80: note = Artificially Synthesized Probe
  source 1..80: mol_type = other DNA
tccatagaggcagttctgagtttttcttttcctgtattttcagtgcttcccaaagctgtggacataagggtagctgagct

SEQ ID NO: 94458 - DNA, 80 bp, synthetic construct; identical to SEQ ID NO: 33992
  misc_feature 1..80: note = Artificially Synthesized Probe
  source 1..80: mol_type = other DNA

SEQ ID NO: 94459 - DNA, 80 bp, synthetic construct
  misc_feature 1..80: note = Artificially Synthesized Probe
  source 1..80: mol_type = other DNA
ggggaggatgttcctatgggaaggtgggctatgcccagggtgactccactactactgctccctgttgttgtgttgtccat

SEQ ID NO: 94460 - DNA, 80 bp, synthetic construct
  misc_feature 1..80: note = Artificially Synthesized Probe
  source 1..80: mol_type = other DNA
atagatgtttgatctttgagtgactgtgtcacgtgagtaggactcatcgttgcagaaagggtgtcctgtgcttgtgttga

SEQ ID NO: 94461 - DNA, 80 bp, synthetic construct
  misc_feature 1..80: note = Artificially Synthesized Probe
  source 1..80: mol_type = other DNA
tgagaaggtgtggacataggtggaaaaatagcaaatgtactcatgggtgaacttggacttgaaatatcaaggtctgttga

SEQ ID NO: 94462 - DNA, 80 bp, synthetic construct; identical to SEQ ID NO: 33993
  misc_feature 1..80: note = Artificially Synthesized Probe
  source 1..80: mol_type = other DNA

SEQ ID NO: 94463 - DNA, 80 bp, synthetic construct
  misc_feature 1..80: note = Artificially Synthesized Probe
  source 1..80: mol_type = other DNA
tgtggttctgagtgtcctcactgagtggggtgtagagacctgagctgaacttgtatccttaggatccgtagtggtgatgt

SEQ ID NO: 94464 - DNA, 80 bp, synthetic construct; identical to SEQ ID NO: 33870
  misc_feature 1..80: note = Artificially Synthesized Probe
  source 1..80: mol_type = other DNA

SEQ ID NO: 94465 - DNA, 80 bp, synthetic construct
  misc_feature 1..80: note = Artificially Synthesized Probe
  source 1..80: mol_type = other DNA
ggaaggtgagaggtgtgtaagagccaggttttactactgaagccatggtaagtttgatggtgcttggactttctgaacta

SEQ ID NO: 94466 - DNA, 80 bp, synthetic construct
  misc_feature 1..80: note = Artificially Synthesized Probe
  source 1..80: mol_type = other DNA
ttggtgtcaaggaagtcgtggaaggtaagttgggcatgttccaccgactagtttcaactgtgtccattatcatgcttgtg

SEQ ID NO: 94467 - DNA, 80 bp, synthetic construct; identical to SEQ ID NO: 33994
  misc_feature 1..80: note = Artificially Synthesized Probe
  source 1..80: mol_type = other DNA

SEQ ID NO: 94468 - DNA, 80 bp, synthetic construct
  misc_feature 1..80: note = Artificially Synthesized Probe
  source 1..80: mol_type = other DNA
ttccaattgggatgttggtagaagccacagccatagagcctgggccattcgtggtctctgttgtgaggatggttgttgat

SEQ ID NO: 94469 - DNA, 80 bp, synthetic construct
  misc_feature 1..80: note = Artificially Synthesized Probe
  source 1..80: mol_type = other DNA
tttggggtgcagcagagtcattaaacgtgtctctattggtctgtgacattgttgccgtcccagtgaggtgagatatttta

SEQ ID NO: 94470 - DNA, 80 bp, synthetic construct
  misc_feature 1..80: note = Artificially Synthesized Probe
  source 1..80: mol_type = other DNA
ctctggaaacagaagtctcaggttgagacacagatggattcgaagtttcctctgtttcttctccactagtaaatagatga

SEQ ID NO: 94471 - DNA, 80 bp, synthetic construct
  misc_feature 1..80: note = Artificially Synthesized Probe
  source 1..80: mol_type = other DNA
ctgctgtctcttcccctgatggagatggatgagtcagaggggaagttgcatttctgactctttcaggacttgttgctgca

SEQ ID NO: 94472 - DNA, 80 bp, synthetic construct; identical to SEQ ID NO: 33995
  misc_feature 1..80: note = Artificially Synthesized Probe
  source 1..80: mol_type = other DNA

SEQ ID NO: 94473 - DNA, 80 bp, synthetic construct
  misc_feature 1..80: note = Artificially Synthesized Probe
  source 1..80: mol_type = other DNA
tggccagagtcaaatctgcggatgtctcagatgatgctgtggctctggtgagtaggtgggttgtgccctggcttcccctg

SEQ ID NO: 94474 - DNA, 80 bp, synthetic construct
  misc_feature 1..80: note = Artificially Synthesized Probe
  source 1..80: mol_type = other DNA
agggaacagaagtggtgataggggctgccacactggttgatgctgggggtctctctgttttcatgctaggacttgtctcc

SEQ ID NO: 94475 - DNA, 80 bp, synthetic construct
  misc_feature 1..80: note = Artificially Synthesized Probe
  source 1..80: mol_type = other DNA
ggactccctatgttgccctcgctggtcttgaacttctgggctcaagagatccacctgccctggcctcccaaagtgctggg

SEQ ID NO: 94476 - DNA, 80 bp, synthetic construct; identical to SEQ ID NO: 33996
  misc_feature 1..80: note = Artificially Synthesized Probe
  source 1..80: mol_type = other DNA

SEQ ID NO: 94477 - DNA, 80 bp, synthetic construct
  misc_feature 1..80: note = Artificially Synthesized Probe
  source 1..80: mol_type = other DNA
ttctgtttcctttccactcgtggagtgatgggtgttggtctcctctgagactaaagtggtagatggagatgtggttgtca

SEQ ID NO: 94478 - DNA, 80 bp, synthetic construct
  misc_feature 1..80: note = Artificially Synthesized Probe
  source 1..80: mol_type = other DNA
cagagaggaaattgtgcttctgaccctttcggcacttgtttctgcattgcttagtgtcatggaaaaagggatagctgagt

SEQ ID NO: 94479 - DNA, 80 bp, synthetic construct
  misc_feature 1..80: note = Artificially Synthesized Probe
  source 1..80: mol_type = other DNA
aggttcaggagaggagaagggatatccagtggttgatagaatcagttccaggcttgtttcacctctggaatttggggtcc

SEQ ID NO: 94480 - DNA, 80 bp, synthetic construct; identical to SEQ ID NO: 33997
  misc_feature 1..80: note = Artificially Synthesized Probe
  source 1..80: mol_type = other DNA

SEQ ID NO: 94481 - DNA, 80 bp, synthetic construct
  misc_feature 1..80: note = Artificially Synthesized Probe
  source 1..80: mol_type = other DNA
aaaccatgcttgtagcagggtagttcctagagggagttccattgacctggggactcagcgatgggctggttctttgctcg

SEQ ID NO: 94482 - DNA, 80 bp, synthetic construct
  misc_feature 1..80: note = Artificially Synthesized Probe
  source 1..80: mol_type = other DNA
atgtcttaggtgacaaggtggctcctgtcagtcctgaatccatttctggtgtggctttagtgctcctgctccctgtcatc

SEQ ID NO: 94483 - DNA, 80 bp, synthetic construct
  misc_feature 1..80: note = Artificially Synthesized Probe
  source 1..80: mol_type = other DNA
gagatatggctggggtccccgcatttgacctgggaaaacctgtgtctagaagagctgccgtatgtatggaggttggggga

SEQ ID NO: 94484 - DNA, 80 bp, synthetic construct
  misc_feature 1..80: note = Artificially Synthesized Probe
  source 1..80: mol_type = other DNA
ccctcaagcatatatcctttgtgttgcaaacaatccaagcatacacctttagttatattttaaaatgtacagtgaagtta

SEQ ID NO: 94485 - DNA, 80 bp, synthetic construct
  misc_feature 1..80: note = Artificially Synthesized Probe
  source 1..80: mol_type = other DNA
tcttcccaagtataggtatcttcattccttcatccagtcatcagagacctgggttcaaatcccaactttgacagttcttg

SEQ ID NO: 94486 - DNA, 80 bp, synthetic construct; identical to SEQ ID NO: 33871
  misc_feature 1..80: note = Artificially Synthesized Probe
  source 1..80: mol_type = other DNA

SEQ ID NO: 94487 - DNA, 80 bp, synthetic construct
  misc_feature 1..80: note = Artificially Synthesized Probe
  source 1..80: mol_type = other DNA
ggcagaagcggaatgtgtcatgtagttgactgcctttgtagagtgtggtgacctagaaagatgggtagggagagtgggtg

SEQ ID NO: 94488 - DNA, 80 bp, synthetic construct
  misc_feature 1..80: note = Artificially Synthesized Probe
  source 1..80: mol_type = other DNA
tgtgaaatgggaatggtagtcaagagagtacttttggaaactgagagagaacccagaatacatagtgaagtgaagcattt

SEQ ID NO: 94489 - DNA, 80 bp, synthetic construct
  misc_feature 1..80: note = Artificially Synthesized Probe
  source 1..80: mol_type = other DNA
gtattttctagaatttgtctattaagggaatcatatggcatgtactcttttcttcatctggattctttcactaggcataa

SEQ ID NO: 94490 - DNA, 80 bp, synthetic construct
  misc_feature 1..80: note = Artificially Synthesized Probe
  source 1..80: mol_type = other DNA
acaatgtggaaatttatctggtactcgccccggattgataaattctggggtgcatagcctggagccacagagaagaagaa

SEQ ID NO: 94491 - DNA, 80 bp, synthetic construct; identical to SEQ ID NO: 33872
  misc_feature 1..80: note = Artificially Synthesized Probe
  source 1..80: mol_type = other DNA

SEQ ID NO: 94492 - DNA, 80 bp, synthetic construct
  misc_feature 1..80: note = Artificially Synthesized Probe
  source 1..80: mol_type = other DNA
atagtaccctgttaataacagcagtggggtctttgttgtgcccgtaatttgttgttaacttgagtatgagtttttcagag

SEQ ID NO: 94493 - DNA, 80 bp, synthetic construct
  misc_feature 1..80: note = Artificially Synthesized Probe
  source 1..80: mol_type = other DNA
ttaatttgctcactcattcaatgattctttccatactatgatgtgctgatgtactgcgaaccgagggtacagtggcactc

SEQ ID NO: 94494 - DNA, 80 bp, synthetic construct
  misc_feature 1..80: note = Artificially Synthesized Probe
  source 1..80: mol_type = other DNA
aaatgtcagccttgtgcccacctaagaactttgagaccatgtacaacaggatttctcacccttgaaattattggcatttg

SEQ ID NO: 94495 - DNA, 80 bp, synthetic construct; identical to SEQ ID NO: 33873
  misc_feature 1..80: note = Artificially Synthesized Probe
  source 1..80: mol_type = other DNA

SEQ ID NO: 94496 - DNA, 80 bp, synthetic construct
  misc_feature 1..80: note = Artificially Synthesized Probe
  source 1..80: mol_type = other DNA
tcacttatatgtgggatcagaagtcaaacttacagaagcagagagtagcatgatggttatcaggggctgggggcatgggg

SEQ ID NO: 94497 - DNA, 80 bp, synthetic construct
  misc_feature 1..80: note = Artificially Synthesized Probe
  source 1..80: mol_type = other DNA
ctttctctctaactcacacagacgcacacagacacacggtaactatgtgacatgaaagcagtgttaactaatttgatcat

SEQ ID NO: 94498 - DNA, 80 bp, synthetic construct
  misc_feature 1..80: note = Artificially Synthesized Probe
  source 1..80: mol_type = other DNA
acaaacaatttatgacattaatttggtcaaagaatttcatgctatttactcaaaataatgggaaagaccctccccttggt

SEQ ID NO: 94499 - DNA, 80 bp, synthetic construct
  misc_feature 1..80: note = Artificially Synthesized Probe
  source 1..80: mol_type = other DNA
gtcaggagttcgagaccagcctgggcaacatggtgaaaccccatctctactaaaaatacaaaaattagctgagcgtggtg

SEQ ID NO: 94500 - DNA, 80 bp, synthetic construct; identical to SEQ ID NO: 33874
  misc_feature 1..80: note = Artificially Synthesized Probe
  source 1..80: mol_type = other DNA

SEQ ID NO: 94501 - DNA, 80 bp, synthetic construct
  misc_feature 1..80: note = Artificially Synthesized Probe
  source 1..80: mol_type = other DNA
cttgtgtacaagtcttcatatagacatatgtttttatttctcttagataaattactagtagtgggatggtagggtcttac

SEQ ID NO: 94502 - DNA, 80 bp, synthetic construct
  misc_feature 1..80: note = Artificially Synthesized Probe
  source 1..80: mol_type = other DNA
gcatttgaggactctagagaggtcccgagacctctgcaggtaaagagcagtggagggaggagcaggggaaagctgaggaa

SEQ ID NO: 94503 - DNA, 80 bp, synthetic construct
  misc_feature 1..80: note = Artificially Synthesized Probe
  source 1..80: mol_type = other DNA
agaggttgggggtaggatttatcccaccaggagctgctgggaccagggtctcaccaggtgctgaaggaccccctcggtgg

SEQ ID NO: 94504 - DNA, 80 bp, synthetic construct; identical to SEQ ID NO: 33875
  misc_feature 1..80: note = Artificially Synthesized Probe
  source 1..80: mol_type = other DNA

SEQ ID NO: 94505 - DNA, 80 bp, synthetic construct
  misc_feature 1..80: note = Artificially Synthesized Probe
  source 1..80: mol_type = other DNA
gactcactggatgccctgtctaaaggacattctctatactgaacacaagaagaatctttctgaaatgacaatctcactat

SEQ ID NO: 94506 - DNA, 80 bp, synthetic construct
  misc_feature 1..80: note = Artificially Synthesized Probe
  source 1..80: mol_type = other DNA
ttatccatccactctgggttaagctttatgtttcatgcaaaccaaatttctctcacttctccctatactctatgctgttt

SEQ ID NO: 94507 - DNA, 80 bp, synthetic construct
  misc_feature 1..80: note = Artificially Synthesized Probe
  source 1..80: mol_type = other DNA
aaacatctgacattatgatggtctatttatttcataaaatctgggactccacgagggcaggtgtctgattgaaatgctat

SEQ ID NO: 94508 - DNA, 80 bp, synthetic construct; identical to SEQ ID NO: 33876
  misc_feature 1..80: note = Artificially Synthesized Probe
  source 1..80: mol_type = other DNA

SEQ ID NO: 94509 - DNA, 80 bp, synthetic construct
  misc_feature 1..80: note = Artificially Synthesized Probe
  source 1..80: mol_type = other DNA
tggagagatggagggatggttggaaggacagaaggaaggacaaacaggtgaatggggaaaaggatagatggatggatgat

SEQ ID NO: 94510 - DNA, 80 bp, synthetic construct
  misc_feature 1..80: note = Artificially Synthesized Probe
  source 1..80: mol_type = other DNA
ggatagatggatggatggaaagacagaaataaggaaacaggtgaatgaagaggagaatgaatggagagatgggtggatgg

SEQ ID NO: 94511 - DNA, 80 bp, synthetic construct; identical to SEQ ID NO: 33858
  misc_feature 1..80: note = Artificially Synthesized Probe
  source 1..80: mol_type = other DNA

SEQ ID NO: 94512 - DNA, 80 bp, synthetic construct
  misc_feature 1..80: note = Artificially Synthesized Probe
  source 1..80: mol_type = other DNA
ggaggggctagcgagtgagtgggcagaaggatgggtgggtggtggatgagtggatgggtggatggatggatggatggatg

SEQ ID NO: 94513 - DNA, 80 bp, synthetic construct
  misc_feature 1..80: note = Artificially Synthesized Probe
  source 1..80: mol_type = other DNA
gacggatggatggatggaaggacaggtggtgtctgagagatgactggaaggatagaaaaatggatggctggaaagataga

SEQ ID NO: 94514 - DNA, 80 bp, synthetic construct; identical to SEQ ID NO: 33877
  misc_feature 1..80: note = Artificially Synthesized Probe
  source 1..80: mol_type = other DNA

SEQ ID NO: 94515 - DNA, 80 bp, synthetic construct
  misc_feature 1..80: note = Artificially Synthesized Probe
  source 1..80: mol_type = other DNA
aatttggggcaaccttccttcatgaatgaggagaaaagcttgaaccaagacccatggagattgaaatgggcactagattc

SEQ ID NO: 94516 - DNA, 80 bp, synthetic construct
  misc_feature 1..80: note = Artificially Synthesized Probe
  source 1..80: mol_type = other DNA
ggggcccctgcctggatgcctttccctttgtgtatctagagattatggatacatttatgtatcatctaatatttgactta

SEQ ID NO: 94517 - DNA, 80 bp, synthetic construct; identical to SEQ ID NO: 33878
  misc_feature 1..80: note = Artificially Synthesized Probe
  source 1..80: mol_type = other DNA

SEQ ID NO: 94518 - DNA, 80 bp, synthetic construct
  misc_feature 1..80: note = Artificially Synthesized Probe
  source 1..80: mol_type = other DNA
taaatctaaatgaaggaacaaaatgaagcacataagctgtgcagtttacaagggggaacagctccctgcaatagccaagt

SEQ ID NO: 94519 - DNA, 80 bp, synthetic construct
  misc_feature 1..80: note = Artificially Synthesized Probe
  source 1..80: mol_type = other DNA
ttcagccataaagagaaataaaaccatgctgctgaggttgcagataaaaaggagtgtttatacactgttggtgggagtgt

SEQ ID NO: 94520 - DNA, 80 bp, synthetic construct
  misc_feature 1..80: note = Artificially Synthesized Probe
  source 1..80: mol_type = other DNA
tatcataaagacacctgttcactgaagcactattcacaatagcaaagacatggaatctacttaaatgcccatcaaggata

SEQ ID NO: 94521 - DNA, 80 bp, synthetic construct
  misc_feature 1..80: note = Artificially Synthesized Probe
  source 1..80: mol_type = other DNA
ctaatgcaggaacagaaaaccaaatactgcctcttctcacttataagtgggagctaaatgatgagaacacatggacacat

SEQ ID NO: 94522 - DNA, 80 bp, synthetic construct; identical to SEQ ID NO: 33879
  misc_feature 1..80: note = Artificially Synthesized Probe
  source 1..80: mol_type = other DNA

SEQ ID NO: 94523 - DNA, 80 bp, synthetic construct
  misc_feature 1..80: note = Artificially Synthesized Probe
  source 1..80: mol_type = other DNA
accacaaagaaataataagtatgagaggtgagggacatattaattagcttgattgagtcattccataattgtacatatac

SEQ ID NO: 94524 - DNA, 80 bp, synthetic construct
  misc_feature 1..80: note = Artificially Synthesized Probe
  source 1..80: mol_type = other DNA
taggagcaaggtggatgatgagaaaggactaaatggatacaatgtatgttattggagtggtggatactctgaaagctctg

SEQ ID NO: 94525 - DNA, 80 bp, synthetic construct
  misc_feature 1..80: note = Artificially Synthesized Probe
  source 1..80: mol_type = other DNA
cccttctctgtgcctcagtttccctctttgctaaaataagagtaatgaaagcccaggatgtctctccacatcccggtacc

SEQ ID NO: 94526 - DNA, 80 bp, synthetic construct; identical to SEQ ID NO: 33880
  misc_feature 1..80: note = Artificially Synthesized Probe
  source 1..80: mol_type = other DNA

SEQ ID NO: 94527 - DNA, 80 bp, synthetic construct
  misc_feature 1..80: note = Artificially Synthesized Probe
  source 1..80: mol_type = other DNA
ccttctgggttcaagcgattctcctgcctcagcctcccgagtaggtgggactacaggcgtgcgccaccacacccagctaa

SEQ ID NO: 94528 - DNA, 80 bp, synthetic construct
  misc_feature 1..80: note = Artificially Synthesized Probe
  source 1..80: mol_type = other DNA
cccaccaggaagactcttctgtgagttaaacatgtggagtggatcatagcaccgaatgctgacaagtggagttcatatcc

SEQ ID NO: 94529 - DNA, 80 bp, synthetic construct
  misc_feature 1..80: note = Artificially Synthesized Probe
  source 1..80: mol_type = other DNA
gccaagacttgaaccccaagtctttccctagagaaccggcaaacagacaccctcctggactgcagtgggggctggggggt

SEQ ID NO: 94530 - DNA, 80 bp, synthetic construct
  misc_feature 1..80: note = Artificially Synthesized Probe
  source 1..80: mol_type = other DNA
gtgcagaggaggtccacccgtgtctcagcaccgttcttcacagacctgaggagggagaggtgcagctttgggggatgaag

SEQ ID NO: 94531 - DNA, 80 bp, synthetic construct; identical to SEQ ID NO: 33881
  misc_feature 1..80: note = Artificially Synthesized Probe
  source 1..80: mol_type = other DNA

SEQ ID NO: 94532 - DNA, 80 bp, synthetic construct
  misc_feature 1..80: note = Artificially Synthesized Probe
  source 1..80: mol_type = other DNA
atttgttcctgttcctaccagaacatggtctccacgaaggaggaaatgaaccagtttagcttactcttattatattgaag

SEQ ID NO: 94533 - DNA, 80 bp, synthetic construct
  misc_feature 1..80: note = Artificially Synthesized Probe
  source 1..80: mol_type = other DNA
gccagccatacagtataaaccaggacatataccatatgattcctccattcataggaggtcctcagaatcatcagattcac

SEQ ID NO: 94534 - DNA, 80 bp, synthetic construct
  misc_feature 1..80: note = Artificially Synthesized Probe
  source 1..80: mol_type = other DNA
ttttataatatattaagaactcttacaacccaattgttaagaagacaagcaacccttccttgctcaccaggacaccgcag

SEQ ID NO: 94535 - DNA, 80 bp, synthetic construct; identical to SEQ ID NO: 33882
  misc_feature 1..80: note = Artificially Synthesized Probe
  source 1..80: mol_type = other DNA

SEQ ID NO: 94536 - DNA, 80 bp, synthetic construct
  misc_feature 1..80: note = Artificially Synthesized Probe
  source 1..80: mol_type = other DNA
tacaaaattagccaggtgtggtggcacatgcctgtaaccccagctactcgggaggctgaggcagaggaatcgtttgaacc

SEQ ID NO: 94537 - DNA, 80 bp, synthetic construct
  misc_feature 1..80: note = Artificially Synthesized Probe
  source 1..80: mol_type = other DNA
ccacaggggtgagaatatggccaaagccagaggccttatgcttcctctgtctcccttcattgtttcatttaatttctccc

SEQ ID NO: 94538 - DNA, 80 bp, synthetic construct
  misc_feature 1..80: note = Artificially Synthesized Probe
  source 1..80: mol_type = other DNA
acactggcctctttgctgttcatagaacatgccaagctcatttgcacctcaagaccttttctcatgctgttctccctgcc

SEQ ID NO: 94539 - DNA, 80 bp, synthetic construct
  misc_feature 1..80: note = Artificially Synthesized Probe
  source 1..80: mol_type = other DNA
tacttagatatttatgttcctgtttagcatctgttcttctccactgggtgagggcagggacagcatctgtcttatcactc

SEQ ID NO: 94540 - DNA, 80 bp, synthetic construct; identical to SEQ ID NO: 33883
  misc_feature 1..80: note = Artificially Synthesized Probe
  source 1..80: mol_type = other DNA

SEQ ID NO: 94541 - DNA, 80 bp, synthetic construct
  misc_feature 1..80: note = Artificially Synthesized Probe
  source 1..80: mol_type = other DNA
cattctcctgcctcagcctctccagtagctgggactacaggcacccgccaccacgcccggctaattttttgcatttttag

SEQ ID NO: 94542 - DNA, 80 bp, synthetic construct
  misc_feature 1..80: note = Artificially Synthesized Probe
  source 1..80: mol_type = other DNA
acctcaaatgaaaaacagtatggagatttctcaaaaaacaaaaaaaaaaaatcagaactaccatttgacccagcaatccc

SEQ ID NO: 94543 - DNA, 80 bp, synthetic construct
  misc_feature 1..80: note = Artificially Synthesized Probe
  source 1..80: mol_type = other DNA
gtgatcttaaatagatgcagaaaaggaccctctgagaatagctcaacccatatatatctaaaagaaatgaggccatgtgt

SEQ ID NO: 94544 - DNA, 80 bp, synthetic construct
  misc_feature 1..80: note = Artificially Synthesized Probe
  source 1..80: mol_type = other DNA
aaaaaaatttagcctggtgtggtgttgggcgcctgtaatccttgctacctgggaggctgaggcacgagaatcgcttgaac

SEQ ID NO: 94545 - DNA, 80 bp, synthetic construct; identical to SEQ ID NO: 33884
  misc_feature 1..80: note = Artificially Synthesized Probe
  source 1..80: mol_type = other DNA

SEQ ID NO: 94546 - DNA, 80 bp, synthetic construct
  misc_feature 1..80: note = Artificially Synthesized Probe
  source 1..80: mol_type = other DNA
gagctggaggacattaggctaagtgaaataagccaggcacagaaagacaaataccgcataatctaacttataggtggaat

SEQ ID NO: 94547 - DNA, 80 bp, synthetic construct
  misc_feature 1..80: note = Artificially Synthesized Probe
  source 1..80: mol_type = other DNA
ggaagagagcttagtggctcaacacctcatgcctctgatgcccccaaaaactgggcccccagaaagccaggatccctgct

SEQ ID NO: 94548 - DNA, 80 bp, synthetic construct
  misc_feature 1..80: note = Artificially Synthesized Probe
  source 1..80: mol_type = other DNA
tgtataccaaaatatcaagttgtacactttaaatgcaagcaatttttatatgtcaaaaatcaaactgtcatgaataaata

SEQ ID NO: 94549 - DNA, 80 bp, synthetic construct
  misc_feature 1..80: note = Artificially Synthesized Probe
  source 1..80: mol_type = other DNA
atggtatgaggatttctcaaagaacaaaaatgtagaactaccatttgacccagcaatcccactattggggatctacccaa

SEQ ID NO: 94550 - DNA, 80 bp, synthetic construct; identical to SEQ ID NO: 33885
  misc_feature 1..80: note = Artificially Synthesized Probe
  source 1..80: mol_type = other DNA

SEQ ID NO: 94551 - DNA, 80 bp, synthetic construct
  misc_feature 1..80: note = Artificially Synthesized Probe
  source 1..80: mol_type = other DNA
gatactcagaaaggtgggagagtgggagaagggtggggaacctcacttaataagtacaatgtacactattcgggtgatac

SEQ ID NO: 94552 - DNA, 80 bp, synthetic construct
  misc_feature 1..80: note = Artificially Synthesized Probe
  source 1..80: mol_type = other DNA
aggagggtggatcacctgaagtcaggagttcaagaccagcctgatcaacatggagacaccccatctctactaaaaataca

SEQ ID NO: 94553 - DNA, 80 bp, synthetic construct; identical to SEQ ID NO: 33886
  misc_feature 1..80: note = Artificially Synthesized Probe
  source 1..80: mol_type = other DNA

SEQ ID NO: 94554 - DNA, 80 bp, synthetic construct
  misc_feature 1..80: note = Artificially Synthesized Probe
  source 1..80: mol_type = other DNA
ctaggatgggcatggcagggctgcagcgggaggcaggcctctcaccaggtgctgcatgacgttgtctgtgatgttgaact

SEQ ID NO: 94555 - DNA, 80 bp, synthetic construct
  misc_feature 1..80: note = Artificially Synthesized Probe
  source 1..80: mol_type = other DNA
ggacagggtgggggcagtgtgttctaaggaccctgtgtccgcctcttaataaacccaacggtgacttttaatggagacaa

SEQ ID NO: 94556 - DNA, 80 bp, synthetic construct
  misc_feature 1..80: note = Artificially Synthesized Probe
  source 1..80: mol_type = other DNA
aaaggctgcatattaccacactgatgcggaagtcatgactctagacatttttaaaaaatttattctctctctctctcttc

SEQ ID NO: 94557 - DNA, 80 bp, synthetic construct; identical to SEQ ID NO: 33887
  misc_feature 1..80: note = Artificially Synthesized Probe
  source 1..80: mol_type = other DNA

SEQ ID NO: 94558 - DNA, 80 bp, synthetic construct; identical to SEQ ID NO: 33859
  misc_feature 1..80: note = Artificially Synthesized Probe
  source 1..80: mol_type = other DNA

SEQ ID NO: 94559 - DNA, 80 bp, synthetic construct
  misc_feature 1..80: note = Artificially Synthesized Probe
  source 1..80: mol_type = other DNA
ttattatataaaatatatcagcaaatgctttctaatcactccctgtgtgtggaactttatgaaagtatgagttaaggttt

SEQ ID NO: 94560 - DNA, 80 bp, synthetic construct
  misc_feature 1..80: note = Artificially Synthesized Probe
  source 1..80: mol_type = other DNA
agcctcctgagtagctgggaccacaggcatgcaccaccacacctgactaaattttttttgtatttttagtagagacaggg

SEQ ID NO: 94561 - DNA, 80 bp, synthetic construct
  misc_feature 1..80: note = Artificially Synthesized Probe
  source 1..80: mol_type = other DNA
tgcctttcttcttttcaccactcttgaacttccttctgttcattcttccttctctctttccatcctttcttcttcccttc

SEQ ID NO: 94562 - DNA, 80 bp, synthetic construct
  misc_feature 1..80: note = Artificially Synthesized Probe
  source 1..80: mol_type = other DNA
cttatccatccatctatccatccatccacctacccacccatctgtccatccatccatccatccacctacccatttatcca

SEQ ID NO: 94563 - DNA, 80 bp, synthetic construct; identical to SEQ ID NO: 33888
  misc_feature 1..80: note = Artificially Synthesized Probe
  source 1..80: mol_type = other DNA

SEQ ID NO: 94564 - DNA, 80 bp, synthetic construct
  misc_feature 1..80: note = Artificially Synthesized Probe
  source 1..80: mol_type = other DNA
cccaccaatgcctcctattggctgaacctaacaggaagctagttagcatgggagcctgggaaatgtagttttcatgagtc

SEQ ID NO: 94565 - DNA, 80 bp, synthetic construct
  misc_feature 1..80: note = Artificially Synthesized Probe
  source 1..80: mol_type = other DNA
acagaatataaacaaatgagttcaaaaaagtgggagaagtattgtgaaggattaacagaaaaaaaaaaccccaggatctc

SEQ ID NO: 94566 - DNA, 80 bp, synthetic construct
  misc_feature 1..80: note = Artificially Synthesized Probe
  source 1..80: mol_type = other DNA
gcaagaaaaaaacaatcccatcaaaaagtgggctaaggacataaatagacagttgttgaaagaatatatacaaatggcta

SEQ ID NO: 94567 - DNA, 80 bp, synthetic construct; identical to SEQ ID NO: 33889
  misc_feature 1..80: note = Artificially Synthesized Probe
  source 1..80: mol_type = other DNA

SEQ ID NO: 94568 - DNA, 80 bp, synthetic construct
  misc_feature 1..80: note = Artificially Synthesized Probe
  source 1..80: mol_type = other DNA
tagctgagattacaggtgcccgccaaaatgcctggctaatttttgtatgtagtgatggagttttaccatgttggccaggc

SEQ ID NO: 94569 - DNA, 80 bp, synthetic construct
  misc_feature 1..80: note = Artificially Synthesized Probe
  source 1..80: mol_type = other DNA
cacggaactgtgcaactcacagattggaagatctcactcgcgaacccatgccactgggacctagtgtcccaaccccagaa

SEQ ID NO: 94570 - DNA, 80 bp, synthetic construct
  misc_feature 1..80: note = Artificially Synthesized Probe
  source 1..80: mol_type = other DNA
tgggcgggggaagggcggcacccctttcaatagctccaggctgtacttttcccctgctagagccgggtaggctggacggc

SEQ ID NO: 94571 - DNA, 80 bp, synthetic construct; identical to SEQ ID NO: 33890
  misc_feature 1..80: note = Artificially Synthesized Probe
  source 1..80: mol_type = other DNA

SEQ ID NO: 94572 - DNA, 80 bp, synthetic construct
  misc_feature 1..80: note = Artificially Synthesized Probe
  source 1..80: mol_type = other DNA
gatcctactggcatcaggttggtgtccctcgaggtcagaggtcccagaagaagcaggcacctatgttcgctgctctccaa

SEQ ID NO: 94573 - DNA, 80 bp, synthetic construct
  misc_feature 1..80: note = Artificially Synthesized Probe
  source 1..80: mol_type = other DNA
accaaaagacccccataaaaaccccatccaaggatcagcagcctcaaagcctgaaactaaaactcctgaagatgggaaat

SEQ ID NO: 94574 - DNA, 80 bp, synthetic construct
  misc_feature 1..80: note = Artificially Synthesized Probe
  source 1..80: mol_type = other DNA
agctaaaggagcatgttctaatgcaatgcaaagctaagcaccttgatgaaaggttaaaggaattgctaactagaataacc

SEQ ID NO: 94575 - DNA, 80 bp, synthetic construct; identical to SEQ ID NO: 33891
  misc_feature 1..80: note = Artificially Synthesized Probe
  source 1..80: mol_type = other DNA

SEQ ID NO: 94576 - DNA, 80 bp, synthetic construct
  misc_feature 1..80: note = Artificially Synthesized Probe
  source 1..80: mol_type = other DNA
agtgtaaactctggcagacactaaagttgaaccaaggcagaagaggaaagtttccatacattataagaaagcatacttca

SEQ ID NO: 94577 - DNA, 80 bp, synthetic construct
  misc_feature 1..80: note = Artificially Synthesized Probe
  source 1..80: mol_type = other DNA
gcgtacaaaaaagcagagagaagagtataataaatatgcatcacctagatttagtggtttatatttcctccaactaaaac

SEQ ID NO: 94578 - DNA, 80 bp, synthetic construct
  misc_feature 1..80: note = Artificially Synthesized Probe
  source 1..80: mol_type = other DNA
atcagcaggtttatgcactattggggtgactggatataaacacaatgttcaaagcagagaaactgtgtttgcaattgact

SEQ ID NO: 94579 - DNA, 80 bp, synthetic construct
  misc_feature 1..80: note = Artificially Synthesized Probe
  source 1..80: mol_type = other DNA
gagcatagcactttggtgcatattcagtagccaataagttcatatattatccattaactttgttatcaccaccaccatca

SEQ ID NO: 94580 - DNA, 80 bp, synthetic construct; identical to SEQ ID NO: 33892
  misc_feature 1..80: note = Artificially Synthesized Probe
  source 1..80: mol_type = other DNA

SEQ ID NO: 94581 - DNA, 80 bp, synthetic construct
  misc_feature 1..80: note = Artificially Synthesized Probe
  source 1..80: mol_type = other DNA
agggaccagtagaaggggtggatccccagagtttcccaggtccactgtggtagtcccaagagctacagagaaaccctctt

SEQ ID NO: 94582 - DNA, 80 bp, synthetic construct
  misc_feature 1..80: note = Artificially Synthesized Probe
  source 1..80: mol_type = other DNA
cataggggcataggaagacaggacagctcctgccctgcttggtgtataattggggctactggagcatcggttgaatactc

SEQ ID NO: 94583 - DNA, 80 bp, synthetic construct
  misc_feature 1..80: note = Artificially Synthesized Probe
  source 1..80: mol_type = other DNA
ctctatcagtaccctcagatcagggaagaaggtactgaggatgaactcagtccaagatgaagaaactatgaagttcagac

SEQ ID NO: 94584 - DNA, 80 bp, synthetic construct
  misc_feature 1..80: note = Artificially Synthesized Probe
  source 1..80: mol_type = other DNA
taggggcccagctcagtgatgctgtgggtcagctggctcagctccaaatacagctgctctctgtccagcccagggcctgt

SEQ ID NO: 94585 - DNA, 80 bp, synthetic construct; identical to SEQ ID NO: 33893
  misc_feature 1..80: note = Artificially Synthesized Probe
  source 1..80: mol_type = other DNA

SEQ ID NO: 94586 - DNA, 80 bp, synthetic construct
  misc_feature 1..80: note = Artificially Synthesized Probe
  source 1..80: mol_type = other DNA
tatcttgagagaaaccttggaagagaatttaacacctgaaggagagggaggtagggagaagtaagaaattcagaaggatg

SEQ ID NO: 94587 - DNA, 80 bp, synthetic construct; identical to SEQ ID NO: 33860
  misc_feature 1..80: note = Artificially Synthesized Probe
  source 1..80: mol_type = other DNA

SEQ ID NO: 94588 - DNA, 80 bp, synthetic construct
  misc_feature 1..80: note = Artificially Synthesized Probe
  source 1..80: mol_type = other DNA
aactccttgggcctgggaacacttggggtagccagactggttattctcagttctcacctgagcaaggtcagcctgcagcc

SEQ ID NO: 94589 - DNA, 80 bp, synthetic construct; identical to SEQ ID NO: 33894
  misc_feature 1..80: note = Artificially Synthesized Probe
  source 1..80: mol_type = other DNA

SEQ ID NO: 94590 - DNA, 80 bp, synthetic construct
  misc_feature 1..80: note = Artificially Synthesized Probe
  source 1..80: mol_type = other DNA
tatgttcaaaagtagagaacatttaagagtttgtaatagatttatttctaaacatatgcaaccagatttaaagagagtga

SEQ ID NO: 94591 - DNA, 80 bp, synthetic construct
  misc_feature 1..80: note = Artificially Synthesized Probe
  source 1..80: mol_type = other DNA
catcaccaacactgtgaccatcattttcattattgtcatcaccaccaccatcaggacaaaaaccatgatcttcataatcc

SEQ ID NO: 94592 - DNA, 80 bp, synthetic construct
  misc_feature 1..80: note = Artificially Synthesized Probe
  source 1..80: mol_type = other DNA
accacaaccatgacggtccacatcaccaccactagtaccgtgatcaccaacaccatcatcacatcatccttaaccatcat

SEQ ID NO: 94593 - DNA, 80 bp, synthetic construct
  misc_feature 1..80: note = Artificially Synthesized Probe
  source 1..80: mol_type = other DNA
ctaccatcatcaatatcatcatcatcatcttcataatcaccatcatcatcacatcatggtcataagcatcaccatcatta

SEQ ID NO: 94594 - DNA, 80 bp, synthetic construct; identical to SEQ ID NO: 33895
  misc_feature 1..80: note = Artificially Synthesized Probe
  source 1..80: mol_type = other DNA

SEQ ID NO: 94595 - DNA, 80 bp, synthetic construct
  misc_feature 1..80: note = Artificially Synthesized Probe
  source 1..80: mol_type = other DNA
aagcagcataagctctttcatggcagaaatgccagcagataggaatatttctgcatgtggggcttgagattagtgtctct

SEQ ID NO: 94596 - DNA, 80 bp, synthetic construct
  misc_feature 1..80: note = Artificially Synthesized Probe
  source 1..80: mol_type = other DNA
ggttactggaacattagtagaatactcactgctggtggtggacacagagctccgatgagtgaaacctgcatagagaggga

SEQ ID NO: 94597 - DNA, 80 bp, synthetic construct
  misc_feature 1..80: note = Artificially Synthesized Probe
  source 1..80: mol_type = other DNA
ctaaaaacacatttaagctctccttcacttggtggttttatcgtcatcttttagaattcaccttcaatgtcatttcctcc

SEQ ID NO: 94598 - DNA, 80 bp, synthetic construct; identical to SEQ ID NO: 33896
  misc_feature 1..80: note = Artificially Synthesized Probe
  source 1..80: mol_type = other DNA

SEQ ID NO: 94599 - DNA, 80 bp, synthetic construct
  misc_feature 1..80: note = Artificially Synthesized Probe
  source 1..80: mol_type = other DNA
tcagtgatattgtgggtcagctggctcagctcccaatacagctgctctctgtccagcctagggcttttggggtcagggtg

SEQ ID NO: 94600 - DNA, 80 bp, synthetic construct
  misc_feature 1..80: note = Artificially Synthesized Probe
  source 1..80: mol_type = other DNA
agatgagaagccacacttagattctctgagtgcactgactactgtccagcttgggacggtgagcatacttgtggataaaa

SEQ ID NO: 94601 - DNA, 80 bp, synthetic construct
  misc_feature 1..80: note = Artificially Synthesized Probe
  source 1..80: mol_type = other DNA
gtcttgagagaaatcttagttagagaatttaacacctaagggcaagggaggtggggagaaaagagggaattcagagggat

SEQ ID NO: 94602 - DNA, 80 bp, synthetic construct; identical to SEQ ID NO: 33897
  misc_feature 1..80: note = Artificially Synthesized Probe
  source 1..80: mol_type = other DNA

SEQ ID NO: 94603 - DNA, 80 bp, synthetic construct
  misc_feature 1..80: note = Artificially Synthesized Probe
  source 1..80: mol_type = other DNA
ggatgggggctcacggctctgggtgtgagaggaggtgggtgagatcttcttccatgccctgtcatgagtgagacaggtgg

SEQ ID NO: 94604 - DNA, 80 bp, synthetic construct
  misc_feature 1..80: note = Artificially Synthesized Probe
  source 1..80: mol_type = other DNA
gagggctggcagctgtcgtggaggtgggaaagaaacaacatgttcaaaagtggagaactttatatatttccaaaaggcct

SEQ ID NO: 94605 - DNA, 80 bp, synthetic construct
  misc_feature 1..80: note = Artificially Synthesized Probe
  source 1..80: mol_type = other DNA
ttatctgttacctttattattaccattgtcatcatcaatgtcaccaacactgtgaccctcactattattgtcatcaccac

SEQ ID NO: 94606 - DNA, 80 bp, synthetic construct
  misc_feature 1..80: note = Artificially Synthesized Probe
  source 1..80: mol_type = other DNA
tgtaaagccatcatcaggcatggcgagaagggttactggttcctctacttctacaaccctgttatagccaactttttttt

SEQ ID NO: 94607 - DNA, 80 bp, synthetic construct; identical to SEQ ID NO: 33898
  misc_feature 1..80: note = Artificially Synthesized Probe
  source 1..80: mol_type = other DNA

SEQ ID NO: 94608 - DNA, 80 bp, synthetic construct
  misc_feature 1..80: note = Artificially Synthesized Probe
  source 1..80: mol_type = other DNA
tcattattctcattgtcaacatcgtcattactattgtcaatcactaccaagactaccaccatcaccaacaccactatcat

SEQ ID NO: 94609 - DNA, 80 bp, synthetic construct
  misc_feature 1..80: note = Artificially Synthesized Probe
  source 1..80: mol_type = other DNA
atcatcactagcatcaccattcttattgtcatcatctccagtaacttcaccaccaccaactcccatcaccctcacaataa

SEQ ID NO: 94610 - DNA, 80 bp, synthetic construct
  misc_feature 1..80: note = Artificially Synthesized Probe
  source 1..80: mol_type = other DNA
ctaggattttttatctttatttaagtgaaaatggcagagatgttgacagtcatcaggcatgctctaacagagatgcgatt

SEQ ID NO: 94611 - DNA, 80 bp, synthetic construct; identical to SEQ ID NO: 33899
  misc_feature 1..80: note = Artificially Synthesized Probe
  source 1..80: mol_type = other DNA

SEQ ID NO: 94612 - DNA, 80 bp, synthetic construct
  misc_feature 1..80: note = Artificially Synthesized Probe
  source 1..80: mol_type = other DNA
ggtcagttcttgccctgcatgatgtaggatcaggagcactggaaatcagtggatactcactgctagtggtgggcacagag

SEQ ID NO: 94613 - DNA, 80 bp, synthetic construct
  misc_feature 1..80: note = Artificially Synthesized Probe
  source 1..80: mol_type = other DNA
gaaagcagatcctgaggatgaactcagtccaagatgaaatagaaaccatgaagttccaacctcagccatcacatacagac

SEQ ID NO: 94614 - DNA, 80 bp, synthetic construct
  misc_feature 1..80: note = Artificially Synthesized Probe
  source 1..80: mol_type = other DNA
ctgtgggtcagctggctcagctcccagtatagctgctctctgtccagtccagggcttttgggatcagggcggtaggtgca

SEQ ID NO: 94615 - DNA, 80 bp, synthetic construct; identical to SEQ ID NO: 33900
  misc_feature 1..80: note = Artificially Synthesized Probe
  source 1..80: mol_type = other DNA

SEQ ID NO: 94616 - DNA, 80 bp, synthetic construct
  misc_feature 1..80: note = Artificially Synthesized Probe
  source 1..80: mol_type = other DNA
ggaaaggagggaattcagagggatgaccaaggtagaagctcagtcctgctgatgggctctgcatctctcagttgaggtgg

SEQ ID NO: 94617 - DNA, 80 bp, synthetic construct
  misc_feature 1..80: note = Artificially Synthesized Probe
  source 1..80: mol_type = other DNA
cagccagagtacagagggccaacactggtgttcttgaacacaggcctgagctgtggaggagggagagggaggtgagtggg

SEQ ID NO: 94618 - DNA, 80 bp, synthetic construct
  misc_feature 1..80: note = Artificially Synthesized Probe
  source 1..80: mol_type = other DNA
tatttttagtagaggcagggttttaccatgttggccaggctggtttttaactcctgacctcgtgatccgcctgcctcggc

SEQ ID NO: 94619 - DNA, 80 bp, synthetic construct
  misc_feature 1..80: note = Artificially Synthesized Probe
  source 1..80: mol_type = other DNA
ggtgagtggggtagaatgaggtatgtggggctcttaccagaccctgaaggactctctccgtggtgttaaactttctagag

SEQ ID NO: 94620 - DNA, 80 bp, synthetic construct
  misc_feature 1..80: note = Artificially Synthesized Probe
  source 1..80: mol_type = other DNA
atatgcaacatgatttaaagtgacaaaataaaaggttttcacgcctcccttcactgtaatggtacatagttctcatagag

SEQ ID NO: 94621 - DNA, 80 bp, synthetic construct; identical to SEQ ID NO: 33901
  misc_feature 1..80: note = Artificially Synthesized Probe
  source 1..80: mol_type = other DNA

SEQ ID NO: 94622 - DNA, 80 bp, synthetic construct
  misc_feature 1..80: note = Artificially Synthesized Probe
  source 1..80: mol_type = other DNA
tgtcaacatcatgatcacattgtcaattgccatcagaaccatcacatcaccaccaccactatcatccttcccataatcat

SEQ ID NO: 94623 - DNA, 80 bp, synthetic construct
  misc_feature 1..80: note = Artificially Synthesized Probe
  source 1..80: mol_type = other DNA
catcacaacaatataaccttcctgaggatagagatttttatttcttttgtgttccctgccttatccctagggccccgaag

SEQ ID NO: 94624 - DNA, 80 bp, synthetic construct
  misc_feature 1..80: note = Artificially Synthesized Probe
  source 1..80: mol_type = other DNA
aggtcaggagttcgagatcagtttgaccaatatggtgaagctccacctctactaaaaatataaaaattagctgggcatgg

SEQ ID NO: 94625 - DNA, 80 bp, synthetic construct; identical to SEQ ID NO: 33902
  misc_feature 1..80: note = Artificially Synthesized Probe
  source 1..80: mol_type = other DNA

SEQ ID NO: 94626 - DNA, 80 bp, synthetic construct
  misc_feature 1..80: note = Artificially Synthesized Probe
  source 1..80: mol_type = other DNA
atctggagctgggccagagggaaaggggaataacttgtgctctctcttccttccctcatgaagaggatataggggcatag

SEQ ID NO: 94627 - DNA, 80 bp, synthetic construct
  misc_feature 1..80: note = Artificially Synthesized Probe
  source 1..80: mol_type = other DNA
ctggtgcaacagaaggaatttcccagaacacgggccattgaagattctctatcagcaccctcagatttagaaagcagatc

SEQ ID NO: 94628 - DNA, 80 bp, synthetic construct
  misc_feature 1..80: note = Artificially Synthesized Probe
  source 1..80: mol_type = other DNA
catcaaagttgctcaccattgacatagagactgtgcctgtccagggtgtaggggcccagctcagtgatgccgtgggtcag

SEQ ID NO: 94629 - DNA, 80 bp, synthetic construct; identical to SEQ ID NO: 33903
  misc_feature 1..80: note = Artificially Synthesized Probe
  source 1..80: mol_type = other DNA

SEQ ID NO: 94630 - DNA, 80 bp, synthetic construct; identical to SEQ ID NO: 33861
  misc_feature 1..80: note = Artificially Synthesized Probe
  source 1..80: mol_type = other DNA

SEQ ID NO: 94631 - DNA, 80 bp, synthetic construct
  misc_feature 1..80: note = Artificially Synthesized Probe
  source 1..80: mol_type = other DNA
aagcaagtggatgaggcatgcttgtcttgtgagaaatcctggggacagaatttaacaactggaggaaagggaggtgggtg

SEQ ID NO: 94632 - DNA, 80 bp, synthetic construct
  misc_feature 1..80: note = Artificially Synthesized Probe
  source 1..80: mol_type = other DNA
cagggatggcaggaaaaaaaaaaacaatccaaactctttgcgactaggaacaattggggcagctaggctagctcttctaa

SEQ ID NO: 94633 - DNA, 80 bp, synthetic construct
  misc_feature 1..80: note = Artificially Synthesized Probe
  source 1..80: mol_type = other DNA
tgggcagggcttgtgtctctaggggagatggatgagattttcttccatggccctggcatgggtgatgttgttgggaccag

SEQ ID NO: 94634 - DNA, 80 bp, synthetic construct; identical to SEQ ID NO: 33904
  misc_feature 1..80: note = Artificially Synthesized Probe
  source 1..80: mol_type = other DNA

SEQ ID NO: 94635 - DNA, 80 bp, synthetic construct
  misc_feature 1..80: note = Artificially Synthesized Probe
  source 1..80: mol_type = other DNA
ttacataatatttgttagattctgagcccagcttttggtgcatattcagtgctgaaaaatatcagatattacctgttacc

SEQ ID NO: 94636 - DNA, 80 bp, synthetic construct
  misc_feature 1..80: note = Artificially Synthesized Probe
  source 1..80: mol_type = other DNA
cattatctgaataatcatcatcacgatcattgtcatcataatcactatcgccatcactattgtcatcctcaccatcacga

SEQ ID NO: 94637 - DNA, 80 bp, synthetic construct
  misc_feature 1..80: note = Artificially Synthesized Probe
  source 1..80: mol_type = other DNA
catcattgtcaccattgttatcatcaccactccaacatcatcaccacaatcaacacaaccgtcatcatcatcattattat

SEQ ID NO: 94638 - DNA, 80 bp, synthetic construct; identical to SEQ ID NO: 33905
  misc_feature 1..80: note = Artificially Synthesized Probe
  source 1..80: mol_type = other DNA

SEQ ID NO: 94639 - DNA, 80 bp, synthetic construct
  misc_feature 1..80: note = Artificially Synthesized Probe
  source 1..80: mol_type = other DNA
agagtataaacagagatgtttacactcatcaaccatgctccaaataccattgactggtatttacctgtggggccagggag

SEQ ID NO: 94640 - DNA, 80 bp, synthetic construct
  misc_feature 1..80: note = Artificially Synthesized Probe
  source 1..80: mol_type = other DNA
gattagctggggcagtggggaaggggaataatttgtgtcctctatgttccttcccttatggaaaggacataagggcttat

SEQ ID NO: 94641 - DNA, 80 bp, synthetic construct
  misc_feature 1..80: note = Artificially Synthesized Probe
  source 1..80: mol_type = other DNA
ctgtgtgtttatcacaaaactattcacaatagcaaagatatggaatcaacctaagtgcccatcaatggaggactgtataa

SEQ ID NO: 94642 - DNA, 80 bp, synthetic construct; identical to SEQ ID NO: 33906
  misc_feature 1..80: note = Artificially Synthesized Probe
  source 1..80: mol_type = other DNA

SEQ ID NO: 94643 - DNA, 80 bp, synthetic construct
  misc_feature 1..80: note = Artificially Synthesized Probe
  source 1..80: mol_type = other DNA
agaaagagactctaatcacatcagagctgcttaccattgacatagagactgtccctatccagggtgtagggtcccagctc

SEQ ID NO: 94644 - DNA, 80 bp, synthetic construct
  misc_feature 1..80: note = Artificially Synthesized Probe
  source 1..80: mol_type = other DNA
tgaattgcctaaggagaggtcttgagatggcagagtgtaggacaagaaggacagaggaagtaaaaagtctaatacagagg

SEQ ID NO: 94645 - DNA, 80 bp, synthetic construct
  misc_feature 1..80: note = Artificially Synthesized Probe
  source 1..80: mol_type = other DNA
ggggatgaaaacaagtggttgaggcatgtttgtcttgagagaaatcctggttacagagtttaacacctaaagtcaaggga

SEQ ID NO: 94646 - DNA, 80 bp, synthetic construct; identical to SEQ ID NO: 33907
  misc_feature 1..80: note = Artificially Synthesized Probe
  source 1..80: mol_type = other DNA

SEQ ID NO: 94647 - DNA, 80 bp, synthetic construct
  misc_feature 1..80: note = Artificially Synthesized Probe
  source 1..80: mol_type = other DNA
gctggctgtagttggtggagctgacatcagtaggttgtatggggcttttatctcttggggtgaggggaggtgggtgagat

SEQ ID NO: 94648 - DNA, 80 bp, synthetic construct
  misc_feature 1..80: note = Artificially Synthesized Probe
  source 1..80: mol_type = other DNA
tggtgaagttgagtgtgaatggcaccaggagagggccggtggctatagtgaaggtgggaaataaacactatgttcaaaag

SEQ ID NO: 94649 - DNA, 80 bp, synthetic construct
  misc_feature 1..80: note = Artificially Synthesized Probe
  source 1..80: mol_type = other DNA
ttggtgcatattcagtgttccatagtgccagatactatctagtgccgttgttaacaccaccttcattttcaacatcacca

SEQ ID NO: 94650 - DNA, 80 bp, synthetic construct; identical to SEQ ID NO: 33908
  misc_feature 1..80: note = Artificially Synthesized Probe
  source 1..80: mol_type = other DNA

SEQ ID NO: 94651 - DNA, 80 bp, synthetic construct
  misc_feature 1..80: note = Artificially Synthesized Probe
  source 1..80: mol_type = other DNA
tttctatctttatttgaatgaaaatggcacagacgtttacatcaggcatgctctaacagagatgccattgactggtactt

SEQ ID NO: 94652 - DNA, 80 bp, synthetic construct
  misc_feature 1..80: note = Artificially Synthesized Probe
  source 1..80: mol_type = other DNA
caaatagcacatgtatttgactaaataatgcatagacatgtcaatgctaaataatgcataggcatggacatagagagtgg

SEQ ID NO: 94653 - DNA, 80 bp, synthetic construct
  misc_feature 1..80: note = Artificially Synthesized Probe
  source 1..80: mol_type = other DNA
atctatcatctagctatcaatatttatcaacctgtcaatcaattatctaccaatcaataaccatcaattatctctcacct

SEQ ID NO: 94654 - DNA, 80 bp, synthetic construct
  misc_feature 1..80: note = Artificially Synthesized Probe
  source 1..80: mol_type = other DNA
agagatgggtcagtctttggagctggggcagagcagagcttgagtaactgctgccctcttatctcctttgctgaagaaga

SEQ ID NO: 94655 - DNA, 80 bp, synthetic construct
  misc_feature 1..80: note = Artificially Synthesized Probe
  source 1..80: mol_type = other DNA
gagacattggcaaccaaataggggtcaaggctaccctggtgcaaaggaatgaatttcatggtacggggcatttgaagatt

SEQ ID NO: 94656 - DNA, 80 bp, synthetic construct
  misc_feature 1..80: note = Artificially Synthesized Probe
  source 1..80: mol_type = other DNA
gctgctcagcaaggaggaagagacttcaaccacatcacagccactcaccattgacgtagagactgttccggtccagggtg

SEQ ID NO: 94657 - DNA, 80 bp, synthetic construct; identical to SEQ ID NO: 33909
  misc_feature 1..80: note = Artificially Synthesized Probe
  source 1..80: mol_type = other DNA

SEQ ID NO: 94658 - DNA, 80 bp, synthetic construct
  misc_feature 1..80: note = Artificially Synthesized Probe
  source 1..80: mol_type = other DNA
aggccgaggcaggtggatcacctgaggtcaggagttcaagaccagcctgaccaacatggagaaaccctgtctctactaaa

SEQ ID NO: 94659 - DNA, 80 bp, synthetic construct
  misc_feature 1..80: note = Artificially Synthesized Probe
  source 1..80: mol_type = other DNA
aaaaaaaaaaaaagtgcaaagtgaattctgcattctcatggcatggggacaggagagcccagacttgaggccagtgaaga

SEQ ID NO: 94660 - DNA, 80 bp, synthetic construct
  misc_feature 1..80: note = Artificially Synthesized Probe
  source 1..80: mol_type = other DNA
gaccagggtaggggctcaattctgatgatggacaatgcagattctctctgttgaggtggagtgtgggggtgttactatca

SEQ ID NO: 94661 - DNA, 80 bp, synthetic construct
  misc_feature 1..80: note = Artificially Synthesized Probe
  source 1..80: mol_type = other DNA
aggctggctattctagcctcacctgagagagatcagtctgcagccagagtacagagggccgacactggagttcttgaaca

SEQ ID NO: 94662 - DNA, 80 bp, synthetic construct; identical to SEQ ID NO: 33910
  misc_feature 1..80: note = Artificially Synthesized Probe
  source 1..80: mol_type = other DNA

SEQ ID NO: 94663 - DNA, 80 bp, synthetic construct
  misc_feature 1..80: note = Artificially Synthesized Probe
  source 1..80: mol_type = other DNA
ggggaaataaacactatgttcaaaggagagaaaataggagtttgcaatatagttatctttaaatataggcagtatttaat

SEQ ID NO: 94664 - DNA, 80 bp, synthetic construct
  misc_feature 1..80: note = Artificially Synthesized Probe
  source 1..80: mol_type = other DNA
gccccttaaatatatacaaataataattttaaaaagtagtgtgcaatatggagcagccacaagtggctttttaaattaaa

SEQ ID NO: 94665 - DNA, 80 bp, synthetic construct
  misc_feature 1..80: note = Artificially Synthesized Probe
  source 1..80: mol_type = other DNA
gccatcatcatcattgctatcattgtcacaatcacaatctttattatcaccaccatcataataatccccaccatgaccac

SEQ ID NO: 94666 - DNA, 80 bp, synthetic construct; identical to SEQ ID NO: 33911
  misc_feature 1..80: note = Artificially Synthesized Probe
  source 1..80: mol_type = other DNA

SEQ ID NO: 94667 - DNA, 80 bp, synthetic construct
  misc_feature 1..80: note = Artificially Synthesized Probe
  source 1..80: mol_type = other DNA
gagggcagagacatttttattggttttgttttccttgctgtatcccttgggtctggtacacagtaggtggccaacaaata

SEQ ID NO: 94668 - DNA, 80 bp, synthetic construct
  misc_feature 1..80: note = Artificially Synthesized Probe
  source 1..80: mol_type = other DNA
cccaaggtccactgtggaggtcccaggagctgaggaaaagtcctcatcagtgaaagcagaagcactctcatggcagaaat

SEQ ID NO: 94669 - DNA, 80 bp, synthetic construct
  misc_feature 1..80: note = Artificially Synthesized Probe
  source 1..80: mol_type = other DNA
gcttggtgtaggatcaggggcatgtggacttgagttgaatactcactgctggtgggggccacagagctccgatgggtgaa

SEQ ID NO: 94670 - DNA, 80 bp, synthetic construct; identical to SEQ ID NO: 33912
  misc_feature 1..80: note = Artificially Synthesized Probe
  source 1..80: mol_type = other DNA

SEQ ID NO: 94671 - DNA, 80 bp, synthetic construct
  misc_feature 1..80: note = Artificially Synthesized Probe
  source 1..80: mol_type = other DNA
agctgctctctgttgagtccagggcttttggggtcaagacggtggctgcagatggcatccattccagtggctgccccatt

SEQ ID NO: 94672 - DNA, 80 bp, synthetic construct
  misc_feature 1..80: note = Artificially Synthesized Probe
  source 1..80: mol_type = other DNA
actggcttgctttgaactgcaagcagggtaatgaatacaagaatttttatgaaagtgcaaagtggcttggcacagtgcct

SEQ ID NO: 94673 - DNA, 80 bp, synthetic construct
  misc_feature 1..80: note = Artificially Synthesized Probe
  source 1..80: mol_type = other DNA
gaggctgaggcaggagaatcacttgaacatggaaggcggaggttgcactgagctgagaccagcctggtgtgcagtaagac

SEQ ID NO: 94674 - DNA, 80 bp, synthetic construct; identical to SEQ ID NO: 33913
  misc_feature 1..80: note = Artificially Synthesized Probe
  source 1..80: mol_type = other DNA

SEQ ID NO: 94675 - DNA, 80 bp, synthetic construct; identical to SEQ ID NO: 33862
  misc_feature 1..80: note = Artificially Synthesized Probe
  source 1..80: mol_type = other DNA

SEQ ID NO: 94676 - DNA, 80 bp, synthetic construct
  misc_feature 1..80: note = Artificially Synthesized Probe
  source 1..80: mol_type = other DNA
cctttggtgaggatatccctaggaagtgcagcaaggaagcagtgcaaagtcgattggagtgagaacaagtggggcagcca

SEQ ID NO: 94677 - DNA, 80 bp, synthetic construct
  misc_feature 1..80: note = Artificially Synthesized Probe
  source 1..80: mol_type = other DNA
aggtgggcagaacaggcatcagtgagtggggctggtttcaatgggcatggcttgcatctcttggggcaagggtgaggtgg

SEQ ID NO: 94678 - DNA, 80 bp, synthetic construct
  misc_feature 1..80: note = Artificially Synthesized Probe
  source 1..80: mol_type = other DNA
gcaggttggtgatggtgaagttgagggtgaatggcaccaggagagggccagcagctgtagtggaggtgggaaacaaacac

SEQ ID NO: 94679 - DNA, 80 bp, synthetic construct
  misc_feature 1..80: note = Artificially Synthesized Probe
  source 1..80: mol_type = other DNA
cactcctcgtggtgcatattcagagctcaatattgtctgatgttatgtactatctttattgccatcatcatccttgctat

SEQ ID NO: 94680 - DNA, 80 bp, synthetic construct; identical to SEQ ID NO: 33914
  misc_feature 1..80: note = Artificially Synthesized Probe
  source 1..80: mol_type = other DNA

SEQ ID NO: 94681 - DNA, 80 bp, synthetic construct
  misc_feature 1..80: note = Artificially Synthesized Probe
  source 1..80: mol_type = other DNA
acagcatcccactcaacatgtcattattactatcataaccaccatcactatcatcgtcacatgaacacaagctcactgag

SEQ ID NO: 94682 - DNA, 80 bp, synthetic construct
  misc_feature 1..80: note = Artificially Synthesized Probe
  source 1..80: mol_type = other DNA
tcttcatttgagtgaaaacggcacagatgttcatattcatcaggcatgatctaatagacatgtcattgactggtacttac

SEQ ID NO: 94683 - DNA, 80 bp, synthetic construct
  misc_feature 1..80: note = Artificially Synthesized Probe
  source 1..80: mol_type = other DNA
gagctaggactgtctttggagtaggggcagaggggagcttgagtaacttctgccttcctagctcctttgctcaagaggag

SEQ ID NO: 94684 - DNA, 80 bp, synthetic construct; identical to SEQ ID NO: 33915
  misc_feature 1..80: note = Artificially Synthesized Probe
  source 1..80: mol_type = other DNA

SEQ ID NO: 94685 - DNA, 80 bp, synthetic construct
  misc_feature 1..80: note = Artificially Synthesized Probe
  source 1..80: mol_type = other DNA
tacaaaaaaaattagccagacatggtggcaggcgcctgtagtcccagctactcaggaggctgaggcaggaaaatggcatg

SEQ ID NO: 94686 - DNA, 80 bp, synthetic construct
  misc_feature 1..80: note = Artificially Synthesized Probe
  source 1..80: mol_type = other DNA
ctgcccagcaaggaggaagagattcctaccatattgcagctcctcaccattgacatagagactgtttctgtccagggtgt

SEQ ID NO: 94687 - DNA, 80 bp, synthetic construct
  misc_feature 1..80: note = Artificially Synthesized Probe
  source 1..80: mol_type = other DNA
aatgacaatgaaaagattgcctaggacttgtcttgagattgctgagggaaacatatcaaggaaccagaggaaatgagaaa

SEQ ID NO: 94688 - DNA, 80 bp, synthetic construct
  misc_feature 1..80: note = Artificially Synthesized Probe
  source 1..80: mol_type = other DNA
actagtgaagagcttgaaagggggatggatgtatgtggatgaggtatgattgtcttaagagcagtcctggggacagaatt

SEQ ID NO: 94689 - DNA, 80 bp, synthetic construct; identical to SEQ ID NO: 33916
  misc_feature 1..80: note = Artificially Synthesized Probe
  source 1..80: mol_type = other DNA

SEQ ID NO: 94690 - DNA, 80 bp, synthetic construct
  misc_feature 1..80: note = Artificially Synthesized Probe
  source 1..80: mol_type = other DNA
gatgtgaggtgggaggagtaggcaccaatgagcagggctggtctctgtgggcgggacttccatctctcaggggcaggggt

SEQ ID NO: 94691 - DNA, 80 bp, synthetic construct
  misc_feature 1..80: note = Artificially Synthesized Probe
  source 1..80: mol_type = other DNA
tcgtacttcaggttggtgatggtgaagttgagggtgaacggcaccaggagagggccagcagctgtagtgggaattgaaaa

SEQ ID NO: 94692 - DNA, 80 bp, synthetic construct
  misc_feature 1..80: note = Artificially Synthesized Probe
  source 1..80: mol_type = other DNA
gagcatagctagttgtgcatattcagtgctcaatattgtctgatgttatctgttatctttattatggccataatcattgt

SEQ ID NO: 94693 - DNA, 80 bp, synthetic construct; identical to SEQ ID NO: 33917
  misc_feature 1..80: note = Artificially Synthesized Probe
  source 1..80: mol_type = other DNA

SEQ ID NO: 94694 - DNA, 80 bp, synthetic construct
  misc_feature 1..80: note = Artificially Synthesized Probe
  source 1..80: mol_type = other DNA
tcatcatcacactcaacacatcattaccatcataaccttcacaaccatcactgacaacatcctcatgtccgtcatcatca

SEQ ID NO: 94695 - DNA, 80 bp, synthetic construct
  misc_feature 1..80: note = Artificially Synthesized Probe
  source 1..80: mol_type = other DNA
tttccttgctatatccctagggtctggtacactgtaggtggccaatacattttttttggttcactcagtatcactagatt

SEQ ID NO: 94696 - DNA, 80 bp, synthetic construct
  misc_feature 1..80: note = Artificially Synthesized Probe
  source 1..80: mol_type = other DNA
gaaaaaagtcctcatcagtgaaagcagaaagcactctcatggcagaaatggcaagaagatagactattatgaggtctgct

SEQ ID NO: 94697 - DNA, 80 bp, synthetic construct
  misc_feature 1..80: note = Artificially Synthesized Probe
  source 1..80: mol_type = other DNA
ggtaaaacaagaaaaagaaaaacctgtgacaggcatgtgaaaggcttgttgattctgaaggatcaacagtgctctcttgc

SEQ ID NO: 94698 - DNA, 80 bp, synthetic construct
  misc_feature 1..80: note = Artificially Synthesized Probe
  source 1..80: mol_type = other DNA
ctcttgctccacttgatgtaggatcaggggcatctggacatgagttgaatactcactgctgctggtgggcacagggatcc

SEQ ID NO: 94699 - DNA, 80 bp, synthetic construct; identical to SEQ ID NO: 33918
  misc_feature 1..80: note = Artificially Synthesized Probe
  source 1..80: mol_type = other DNA

SEQ ID NO: 94700 - DNA, 80 bp, synthetic construct
  misc_feature 1..80: note = Artificially Synthesized Probe
  source 1..80: mol_type = other DNA
cctgtccagggtgtaggggcccagctctttgatgccattggtcagctggctcagctcccagtatagctgctccctgtcca

SEQ ID NO: 94701 - DNA, 80 bp, synthetic construct
  misc_feature 1..80: note = Artificially Synthesized Probe
  source 1..80: mol_type = other DNA
gaggaaatgagaaatctgggaaagaggtgagaatctgcacttagattatctgagtacatagaccactatcttggttggga

SEQ ID NO: 94702 - DNA, 80 bp, synthetic construct
  misc_feature 1..80: note = Artificially Synthesized Probe
  source 1..80: mol_type = other DNA
ctggggacagaatttaacacctaaatgaaagggaggggcagggaaaggagggaattcagatgggtaatcagggtagtgtc

SEQ ID NO: 94703 - DNA, 80 bp, synthetic construct; identical to SEQ ID NO: 33919
  misc_feature 1..80: note = Artificially Synthesized Probe
  source 1..80: mol_type = other DNA

SEQ ID NO: 94704 - DNA, 80 bp, synthetic construct
  misc_feature 1..80: note = Artificially Synthesized Probe
  source 1..80: mol_type = other DNA
ttggggggaaggggggaagttgttgctatcttctttcatcaccctggcatggatgatgtagaagggactggatatctggg

SEQ ID NO: 94705 - DNA, 80 bp, synthetic construct
  misc_feature 1..80: note = Artificially Synthesized Probe
  source 1..80: mol_type = other DNA
tagtgggaattgaaaataaacactatgttcaaagtcaagaaataggggtttagaatagacttatctttaaacatgtgcaa

SEQ ID NO: 94706 - DNA, 80 bp, synthetic construct
  misc_feature 1..80: note = Artificially Synthesized Probe
  source 1..80: mol_type = other DNA
atgacttgagtgtttattatgtgccaggcagaatatggggttcttggaatatagtggtgaaagagcaaacagttactctc

SEQ ID NO: 94707 - DNA, 80 bp, synthetic construct
  misc_feature 1..80: note = Artificially Synthesized Probe
  source 1..80: mol_type = other DNA
tgatgactggccatcatgattgttgctatcactttcaccatcataaacagcaacatcatcatcatcatcacactccacac

SEQ ID NO: 94708 - DNA, 80 bp, synthetic construct; identical to SEQ ID NO: 33920
  misc_feature 1..80: note = Artificially Synthesized Probe
  source 1..80: mol_type = other DNA

SEQ ID NO: 94709 - DNA, 80 bp, synthetic construct
  misc_feature 1..80: note = Artificially Synthesized Probe
  source 1..80: mol_type = other DNA
agtgaaaatggcacagatgttcacactcatcaggcataatctaagggagatgccattgactagtacttacttgcggggct

SEQ ID NO: 94710 - DNA, 80 bp, synthetic construct
  misc_feature 1..80: note = Artificially Synthesized Probe
  source 1..80: mol_type = other DNA
ctgtctttggagctagggtggaagggagcttcaataacttctgccttcccagctcctttgctcaagaggaggacttatgg

SEQ ID NO: 94711 - DNA, 80 bp, synthetic construct; identical to SEQ ID NO: 33921
  misc_feature 1..80: note = Artificially Synthesized Probe
  source 1..80: mol_type = other DNA

SEQ ID NO: 94712 - DNA, 80 bp, synthetic construct; identical to SEQ ID NO: 33930
  misc_feature 1..80: note = Artificially Synthesized Probe
  source 1..80: mol_type = other DNA

SEQ ID NO: 94713 - DNA, 80 bp, synthetic construct
  misc_feature 1..80: note = Artificially Synthesized Probe
  source 1..80: mol_type = other DNA
aggtaggtggggagaatgactatgaaaagattacttaggttgtgtcctgagactgctgatggaaagacagtaaagaacca

SEQ ID NO: 94714 - DNA, 80 bp, synthetic construct; identical to SEQ ID NO: 33863
  misc_feature 1..80: note = Artificially Synthesized Probe
  source 1..80: mol_type = other DNA

SEQ ID NO: 94715 - DNA, 80 bp, synthetic construct
  misc_feature 1..80: note = Artificially Synthesized Probe
  source 1..80: mol_type = other DNA
agcccagacttgagaccagtgaagagctagaaacagggatgaaagcacttggatgaggcatgattgtcttgagagaaatt

SEQ ID NO: 94716 - DNA, 80 bp, synthetic construct; identical to SEQ ID NO: 33922
  misc_feature 1..80: note = Artificially Synthesized Probe
  source 1..80: mol_type = other DNA

SEQ ID NO: 94717 - DNA, 80 bp, synthetic construct
  misc_feature 1..80: note = Artificially Synthesized Probe
  source 1..80: mol_type = other DNA
cactggtgttcttgaatatgggaccaagctgtggaggagcgagaggaaagtgagtaggagggctaaggtgcatgtgtgtg

SEQ ID NO: 94718 - DNA, 80 bp, synthetic construct
  misc_feature 1..80: note = Artificially Synthesized Probe
  source 1..80: mol_type = other DNA
agatgatgtatctgggatggggcaggagtaaagtgggtggggctctcaccagaccctgcaggaccctctctgtggtgttg

SEQ ID NO: 94719 - DNA, 80 bp, synthetic construct
  misc_feature 1..80: note = Artificially Synthesized Probe
  source 1..80: mol_type = other DNA
atctttcaatatatgcagaatttaaattgagtgacaaaatattttccatgcctcccttgcctataataatataatttatt

SEQ ID NO: 94720 - DNA, 80 bp, synthetic construct; identical to SEQ ID NO: 33923
  misc_feature 1..80: note = Artificially Synthesized Probe
  source 1..80: mol_type = other DNA

SEQ ID NO: 94721 - DNA, 80 bp, synthetic construct
  misc_feature 1..80: note = Artificially Synthesized Probe
  source 1..80: mol_type = other DNA
caccaccatcacctgcatcatcctcatcaccatcatcattgtcatcatcaccaccaccatcatcaagatcaccactatca

SEQ ID NO: 94722 - DNA, 80 bp, synthetic construct
  misc_feature 1..80: note = Artificially Synthesized Probe
  source 1..80: mol_type = other DNA
atcatcataaacaatgtcaccaccaccatcatcatcatcccactcaacacatcatcattaccattgtaactaccaccacc

SEQ ID NO: 94723 - DNA, 80 bp, synthetic construct
  misc_feature 1..80: note = Artificially Synthesized Probe
  source 1..80: mol_type = other DNA
caaatcataagtgaactcccattcataattgcttcaaagagaataaaatacctaggaatgcaacttacaagggacgtgaa

SEQ ID NO: 94724 - DNA, 80 bp, synthetic construct; identical to SEQ ID NO: 33924
  misc_feature 1..80: note = Artificially Synthesized Probe
  source 1..80: mol_type = other DNA

SEQ ID NO: 94725 - DNA, 80 bp, synthetic construct
  misc_feature 1..80: note = Artificially Synthesized Probe
  source 1..80: mol_type = other DNA
atggaacagaacagagccctcagaaataacgccacatatctacaactatctgatctttgacaaatctgagcaatggggaa

SEQ ID NO: 94726 - DNA, 80 bp, synthetic construct
  misc_feature 1..80: note = Artificially Synthesized Probe
  source 1..80: mol_type = other DNA
ggaggatcgcttgagcccaggagttcaagactgcagtgagctatgattgcaccactgtactccattctggttaacagagc

SEQ ID NO: 94727 - DNA, 80 bp, synthetic construct
  misc_feature 1..80: note = Artificially Synthesized Probe
  source 1..80: mol_type = other DNA
aggcattaccatttaggacataggcatgagcaaggacttcatgtctaaaacaccaaaaacaatggcaacaaaagccaaaa

SEQ ID NO: 94728 - DNA, 80 bp, synthetic construct
  misc_feature 1..80: note = Artificially Synthesized Probe
  source 1..80: mol_type = other DNA
caaggaaaaagcaaacaaccccaacaaaaagtgggagaaggacatgaacagacacttctcaaaagaagacatttatgcag

SEQ ID NO: 94729 - DNA, 80 bp, synthetic construct
  misc_feature 1..80: note = Artificially Synthesized Probe
  source 1..80: mol_type = other DNA
acactgttggtgggactgtaaactagttcaaccattgtggaagtcagtgtggcgattcctcagggatctagaactagaaa

SEQ ID NO: 94730 - DNA, 80 bp, synthetic construct; identical to SEQ ID NO: 33925
  misc_feature 1..80: note = Artificially Synthesized Probe
  source 1..80: mol_type = other DNA

SEQ ID NO: 94731 - DNA, 80 bp, synthetic construct
  misc_feature 1..80: note = Artificially Synthesized Probe
  source 1..80: mol_type = other DNA
ggatagcattaggacatatacttaatgctaaatgacgagcaaatgggtgcagcacaccagcatggcacatgtatacatgt

SEQ ID NO: 94732 - DNA, 80 bp, synthetic construct
  misc_feature 1..80: note = Artificially Synthesized Probe
  source 1..80: mol_type = other DNA
tacactaatcaggtatgctctcatagagatgtcattgactgatacttacttgtggggctggagagggaggatggagtccc

SEQ ID NO: 94733 - DNA, 80 bp, synthetic construct
  misc_feature 1..80: note = Artificially Synthesized Probe
  source 1..80: mol_type = other DNA
gagggacacttaaataacttctgccctcctaaatcctttgcttatgaagaggacttaatgggtttatgaggaggggccag

SEQ ID NO: 94734 - DNA, 80 bp, synthetic construct; identical to SEQ ID NO: 33926
  misc_feature 1..80: note = Artificially Synthesized Probe
  source 1..80: mol_type = other DNA

SEQ ID NO: 94735 - DNA, 80 bp, synthetic construct
  misc_feature 1..80: note = Artificially Synthesized Probe
  source 1..80: mol_type = other DNA
ttagagattagaggctgcccagcaagggggaagagatttcaaccacatcacagccactcaccattgacatagagactgtt

SEQ ID NO: 94736 - DNA, 80 bp, synthetic construct
  misc_feature 1..80: note = Artificially Synthesized Probe
  source 1..80: mol_type = other DNA
agggtcagtgggaaaaatcacaatgaaaagtttatctaggaagggtcttgcgattgctgagggaaggacagcaaggacca

SEQ ID NO: 94737 - DNA, 80 bp, synthetic construct
  misc_feature 1..80: note = Artificially Synthesized Probe
  source 1..80: mol_type = other DNA
ctctagaaaaaatacaaaaattatccgggtgtggtggcgcatggctgtagtcccagttacttgggaggctgaagtgggtg

SEQ ID NO: 94738 - DNA, 80 bp, synthetic construct; identical to SEQ ID NO: 33927
  misc_feature 1..80: note = Artificially Synthesized Probe
  source 1..80: mol_type = other DNA

SEQ ID NO: 94739 - DNA, 80 bp, synthetic construct
  misc_feature 1..80: note = Artificially Synthesized Probe
  source 1..80: mol_type = other DNA
caggaaacacactgatcctgaagcctgtgactcctgaattccacctttggtgaggatatccctaggaagtgcagcaagga

SEQ ID NO: 94740 - DNA, 80 bp, synthetic construct
  misc_feature 1..80: note = Artificially Synthesized Probe
  source 1..80: mol_type = other DNA
aacaagggcttgagctgtggaggagggagagggcagtgagtaggagggctaagttttatgtaagagccaggcagaagtga

SEQ ID NO: 94741 - DNA, 80 bp, synthetic construct
  misc_feature 1..80: note = Artificially Synthesized Probe
  source 1..80: mol_type = other DNA
caccctcccaagtagctgggattacaggcatgcaccaccatgcttggctaatttttgtattttagtagggatgaggtttc

SEQ ID NO: 94742 - DNA, 80 bp, synthetic construct; identical to SEQ ID NO: 33928
  misc_feature 1..80: note = Artificially Synthesized Probe
  source 1..80: mol_type = other DNA

SEQ ID NO: 94743 - DNA, 80 bp, synthetic construct
  misc_feature 1..80: note = Artificially Synthesized Probe
  source 1..80: mol_type = other DNA
gagtgtgaaataaacattatgttcaaagtagagagaatagcactttgtaataaccatatgcagcaattaaattgagtgac

SEQ ID NO: 94744 - DNA, 80 bp, synthetic construct
  misc_feature 1..80: note = Artificially Synthesized Probe
  source 1..80: mol_type = other DNA
tcactatcattgtcatcattattatcattattgtcatcacaagtaccaccagcaccaccatgacaatccccatcatgaac

SEQ ID NO: 94745 - DNA, 80 bp, synthetic construct
  misc_feature 1..80: note = Artificially Synthesized Probe
  source 1..80: mol_type = other DNA
caccaccaccatcatcgtcacactcaacatatcattattaccataataacccccaccaccatcaccagcatcattttctt

SEQ ID NO: 94746 - DNA, 80 bp, synthetic construct; identical to SEQ ID NO: 33929
  misc_feature 1..80: note = Artificially Synthesized Probe
  source 1..80: mol_type = other DNA

SEQ ID NO: 94747 - DNA, 80 bp, synthetic construct
  misc_feature 1..80: note = Artificially Synthesized Probe
  source 1..80: mol_type = other DNA
aggagaagtcctcattagtgagagcagaaagcattaccatggcagaaatgccaagaggtgagacttttatagggtttgct

SEQ ID NO: 94748 - DNA, 80 bp, synthetic construct
  misc_feature 1..80: note = Artificially Synthesized Probe
  source 1..80: mol_type = other DNA
tcctgctttgcttggtgtaggatcatgggcatgtggacatgagttgaatactcactgctggtggtgggcatagagcttcg

SEQ ID NO: 94749 - DNA, 80 bp, synthetic construct
  misc_feature 1..80: note = Artificially Synthesized Probe
  source 1..80: mol_type = other DNA
gaggagcaataccatctagggcaggcaagatgggaaccaaaaaccaagtggcttgctaagtacagagagataagaagtcc

SEQ ID NO: 94750 - DNA, 80 bp, synthetic construct
  misc_feature 1..80: note = Artificially Synthesized Probe
  source 1..80: mol_type = other DNA
ccattaaagatttcctatcagtgccctcacatcagggaagaatgccctgatggaattcattccatgatgatgaagaaacc

SEQ ID NO: 94751 - DNA, 80 bp, synthetic construct
  misc_feature 1..80: note = Artificially Synthesized Probe
  source 1..80: mol_type = other DNA
atgcacctgtagtcccagctactcaggaggctgaggcaggagaattgcttgaatccgggaggcggaggttgcagtgagct

SEQ ID NO: 94752 - DNA, 80 bp, synthetic construct
  misc_feature 1..80: note = Artificially Synthesized Probe
  source 1..80: mol_type = other DNA
agtgattacaggctgctcagcaaggaggaagagcctccaaccacatcacagctgctcaccattgacatagagactgttcc

SEQ ID NO: 94753 - DNA, 80 bp, synthetic construct
  misc_feature 1..80: note = Artificially Synthesized Probe
  source 1..80: mol_type = other DNA
gaacctacatatgcttagtccatccacctctccatccttttgtccttcctttccactctttgtcaacccctaatgcagac

SEQ ID NO: 94754 - DNA, 80 bp, synthetic construct
  misc_feature 1..80: note = Artificially Synthesized Probe
  source 1..80: mol_type = other DNA
catcctggctaacatggtgaaaccccgtctcaactaaaaatacaaaaattagctgggcatggtggtacgtgcctgcagtc

SEQ ID NO: 94755 - DNA, 80 bp, synthetic construct
  misc_feature 1..80: note = Artificially Synthesized Probe
  source 1..80: mol_type = other DNA
gagatgcccaccataaacaaattactaggattattagtggaagcagaaagcattaccatggcagaaatgccaagaggtga

SEQ ID NO: 94756 - DNA, 80 bp, synthetic construct
  misc_feature 1..80: note = Artificially Synthesized Probe
  source 1..80: mol_type = other DNA
tcctaggataataatgccagggatctgcatggccccgaataagcctcctgaagtactaggtgtgcgacagctatacttag

SEQ ID NO: 94757 - DNA, 80 bp, synthetic construct; identical to SEQ ID NO: 33931
  misc_feature 1..80: note = Artificially Synthesized Probe
  source 1..80: mol_type = other DNA

SEQ ID NO: 94758 - DNA, 80 bp, synthetic construct
  misc_feature 1..80: note = Artificially Synthesized Probe
  source 1..80: mol_type = other DNA
tgagtagctctatagtaggaacgactttatagtaacaactaccatttattaaatacttcctatgcagcaggcccagcatt

SEQ ID NO: 94759 - DNA, 80 bp, synthetic construct
  misc_feature 1..80: note = Artificially Synthesized Probe
  source 1..80: mol_type = other DNA
aatatatgatatcgttttgcattttatacattactatattatatagtatatacaatatatattattatacctctacctaa

SEQ ID NO: 94760 - DNA, 80 bp, synthetic construct
  misc_feature 1..80: note = Artificially Synthesized Probe
  source 1..80: mol_type = other DNA
ccccaagccttcagattcccagggaaggacccaggtgaggaagtgggagcttccacctcagtcccaatgacccagggagc

SEQ ID NO: 94761 - DNA, 80 bp, synthetic construct; identical to SEQ ID NO: 33932
  misc_feature 1..80: note = Artificially Synthesized Probe
  source 1..80: mol_type = other DNA

SEQ ID NO: 94762 - DNA, 80 bp, synthetic construct
  misc_feature 1..80: note = Artificially Synthesized Probe
  source 1..80: mol_type = other DNA
accacatccagctaatttttgtatttttagtagagatgggttttctccatgtttgccaagctgatcgtgaactactgacc

SEQ ID NO: 94763 - DNA, 80 bp, synthetic construct
  misc_feature 1..80: note = Artificially Synthesized Probe
  source 1..80: mol_type = other DNA
agttcaagtgattctcacgcttcagtctcccgagtagctggaactacagttgtcacaccacgcctggctaatttttgtat

SEQ ID NO: 94764 - DNA, 80 bp, synthetic construct
  misc_feature 1..80: note = Artificially Synthesized Probe
  source 1..80: mol_type = other DNA
aaaaatgccctgtagccgggcgtgatggctcacacctgtaatcccaggattttgggaggccaaggtgggaggattccttg

SEQ ID NO: 94765 - DNA, 80 bp, synthetic construct
  misc_feature 1..80: note = Artificially Synthesized Probe
  source 1..80: mol_type = other DNA
ggctgcagtgagctatgatcgcaccagtgcattccagtctgggtgacagagcaagactctgtctcaaaaataaaaataaa

SEQ ID NO: 94766 - DNA, 80 bp, synthetic construct; identical to SEQ ID NO: 33933
  misc_feature 1..80: note = Artificially Synthesized Probe
  source 1..80: mol_type = other DNA

SEQ ID NO: 94767 - DNA, 80 bp, synthetic construct
  misc_feature 1..80: note = Artificially Synthesized Probe
  source 1..80: mol_type = other DNA
aatatattatatatacacattatattatacatgatatacgttatatgtaatatatataatatgtcatattataacatatg

SEQ ID NO: 94768 - DNA, 80 bp, synthetic construct; identical to SEQ ID NO: 33857
  misc_feature 1..80: note = Artificially Synthesized Probe
  source 1..80: mol_type = other DNA

SEQ ID NO: 94769 - DNA, 80 bp, synthetic construct
  misc_feature 1..80: note = Artificially Synthesized Probe
  source 1..80: mol_type = other DNA
aatacaatgtatgcattatatataacaattatgtataatataattatatataatatatcatatataacatacattatatg

SEQ ID NO: 94770 - DNA, 80 bp, synthetic construct
  misc_feature 1..80: note = Artificially Synthesized Probe
  source 1..80: mol_type = other DNA
gtacatcacacatacacatatatgttatatacattatgtataacataaaagttatacatatgttatatatgtatatatta

SEQ ID NO: 94771 - DNA, 80 bp, synthetic construct
  misc_feature 1..80: note = Artificially Synthesized Probe
  source 1..80: mol_type = other DNA
tgtaacataatgtatgtgttatatataacttgtactatatatgctataacatatataacatgtatacaatataacaatat

SEQ ID NO: 94772 - DNA, 80 bp, synthetic construct; identical to SEQ ID NO: 33864
  misc_feature 1..80: note = Artificially Synthesized Probe
  source 1..80: mol_type = other DNA

SEQ ID NO: 94773 - DNA, 80 bp, synthetic construct
  misc_feature 1..80: note = Artificially Synthesized Probe
  source 1..80: mol_type = other DNA
agggcacagaaggcttcaggcacttgctcagagtcacagatagtaaatggcagagctgggttggttcagaactgaggtct

SEQ ID NO: 94774 - DNA, 80 bp, synthetic construct
  misc_feature 1..80: note = Artificially Synthesized Probe
  source 1..80: mol_type = other DNA
aaatgatatcaaccgctgtctaccctaaaagacctgccctttccagcactcagggacagtgccctcggtgcctctcagtc

SEQ ID NO: 94775 - DNA, 80 bp, synthetic construct
  misc_feature 1..80: note = Artificially Synthesized Probe
  source 1..80: mol_type = other DNA
tcataatgggggcagaggaggaagtgccacctaagggataggagtttggatatagaacctgaagtgctgcagttgctttg

SEQ ID NO: 94776 - DNA, 80 bp, synthetic construct; identical to SEQ ID NO: 33934
  misc_feature 1..80: note = Artificially Synthesized Probe
  source 1..80: mol_type = other DNA

SEQ ID NO: 94777 - DNA, 80 bp, synthetic construct
  misc_feature 1..80: note = Artificially Synthesized Probe
  source 1..80: mol_type = other DNA
aggggtggaccagggtgaggtgggcgtggctgaaatcagtgggcggggcagggaaaggtgggcgtggctggcatcagtag

SEQ ID NO: 94778 - DNA, 80 bp, synthetic construct
  misc_feature 1..80: note = Artificially Synthesized Probe
  source 1..80: mol_type = other DNA
ctcaccagaccctgcagttctctctctgtggcgttgaacttcctggaaccagggtgccgcatgtcctcctcgtactgcag

SEQ ID NO: 94779 - DNA, 80 bp, synthetic construct
  misc_feature 1..80: note = Artificially Synthesized Probe
  source 1..80: mol_type = other DNA
caggtgggtgctttagtttggacggataatggaaagccaggtaaggagaaaagtgggatgttcctaaaatgcattacctg

SEQ ID NO: 94780 - DNA, 80 bp, synthetic construct; identical to SEQ ID NO: 33935
  misc_feature 1..80: note = Artificially Synthesized Probe
  source 1..80: mol_type = other DNA

SEQ ID NO: 94781 - DNA, 80 bp, synthetic construct
  misc_feature 1..80: note = Artificially Synthesized Probe
  source 1..80: mol_type = other DNA
gaccacatggtagagagacatagttaccatggttacggccacactagtgagtcagatttggtttcaaatctcctctctgc

SEQ ID NO: 94782 - DNA, 80 bp, synthetic construct
  misc_feature 1..80: note = Artificially Synthesized Probe
  source 1..80: mol_type = other DNA
agaccagcctggccaacacaatgaaaccccgtctcgactaaaaatacaaaaattagccaggcgtggtggcatgcacttgt

SEQ ID NO: 94783 - DNA, 80 bp, synthetic construct
  misc_feature 1..80: note = Artificially Synthesized Probe
  source 1..80: mol_type = other DNA
ccatccatacaaatattagctgggtgtggtggcacgtgcctgtaatcccagctacttgggaggctgaggcaggagaatca

SEQ ID NO: 94784 - DNA, 80 bp, synthetic construct
  misc_feature 1..80: note = Artificially Synthesized Probe
  source 1..80: mol_type = other DNA
tgatattttggagggaaattaggaaggttacatgactgttaaaaagagcacatctccagggcattacactgagtggaaaa

SEQ ID NO: 94785 - DNA, 80 bp, synthetic construct; identical to SEQ ID NO: 33936
  misc_feature 1..80: note = Artificially Synthesized Probe
  source 1..80: mol_type = other DNA

SEQ ID NO: 94786 - DNA, 80 bp, synthetic construct
  misc_feature 1..80: note = Artificially Synthesized Probe
  source 1..80: mol_type = other DNA
gtgcatgcacacacatgcctgcacacacacgcacatacacaagctcacatatgcacacacgcgtgtaaaaccagtaaaat

SEQ ID NO: 94787 - DNA, 80 bp, synthetic construct
  misc_feature 1..80: note = Artificially Synthesized Probe
  source 1..80: mol_type = other DNA
ttattatttatttatattattatttactttatatttattatttatttcaaaatgaaaagttaaaaataaaaaaaatacat

SEQ ID NO: 94788 - DNA, 80 bp, synthetic construct; identical to SEQ ID NO: 33937
  misc_feature 1..80: note = Artificially Synthesized Probe
  source 1..80: mol_type = other DNA

SEQ ID NO: 94789 - DNA, 80 bp, synthetic construct
  misc_feature 1..80: note = Artificially Synthesized Probe
  source 1..80: mol_type = other DNA
ttaccatgactgctccaggtttcctcacgccatcctttaccaacatctcccagttatatatataatgtgtataactatat

SEQ ID NO: 94790 - DNA, 80 bp, synthetic construct
  misc_feature 1..80: note = Artificially Synthesized Probe
  source 1..80: mol_type = other DNA
tatgtggttactatatggtaactatatatatggttatatataactatatatatggctatatatagttatggctatataaa

SEQ ID NO: 94791 - DNA, 80 bp, synthetic construct
  misc_feature 1..80: note = Artificially Synthesized Probe
  source 1..80: mol_type = other DNA
gtaactgagataaaaagaattcaatggatgggcagaatggagctggtagagaaaaggcttggtgattgtgaaaatattct

SEQ ID NO: 94792 - DNA, 80 bp, synthetic construct
  misc_feature 1..80: note = Artificially Synthesized Probe
  source 1..80: mol_type = other DNA
gcatggtggcgggtgcctgtaatcccagctactccggaggctgaggcaggagaatggcgtgaacccagggggcggagctt

SEQ ID NO: 94793 - DNA, 80 bp, synthetic construct; identical to SEQ ID NO: 33938
  misc_feature 1..80: note = Artificially Synthesized Probe
  source 1..80: mol_type = other DNA

SEQ ID NO: 94794 - DNA, 80 bp, synthetic construct
  misc_feature 1..80: note = Artificially Synthesized Probe
  source 1..80: mol_type = other DNA
gacttgctttgtaatacatgttacatacgtacaagcccagaggggttaggcatgtcacataaatggttgaattgattaga

SEQ ID NO: 94795 - DNA, 80 bp, synthetic construct
  misc_feature 1..80: note = Artificially Synthesized Probe
  source 1..80: mol_type = other DNA
taaatgcttaaaatgcagctagcgtgggagaagaactgaatttctaattttattccacttaattcatttaaaaatagcca

SEQ ID NO: 94796 - DNA, 80 bp, synthetic construct
  misc_feature 1..80: note = Artificially Synthesized Probe
  source 1..80: mol_type = other DNA
taggaatgcccgacctccgtctttttttttttttttttgagatggagcctagctccattgcccaggctggagtgcagtgg

SEQ ID NO: 94797 - DNA, 80 bp, synthetic construct; identical to SEQ ID NO: 33939
  misc_feature 1..80: note = Artificially Synthesized Probe
  source 1..80: mol_type = other DNA

SEQ ID NO: 94798 - DNA, 80 bp, synthetic construct
  misc_feature 1..80: note = Artificially Synthesized Probe
  source 1..80: mol_type = other DNA
accccgtctctactaaaaatacaaaaaattagccaggcatggtggtgtgcacctgtaatcccagctactccggaggctga

SEQ ID NO: 94799 - DNA, 80 bp, synthetic construct
  misc_feature 1..80: note = Artificially Synthesized Probe
  source 1..80: mol_type = other DNA
gagtctgggtggtcagcagggaacagaccatgcagtgttaaatttcatagatgccagagaggagcttcctacctgtggag

SEQ ID NO: 94800 - DNA, 80 bp, synthetic construct
  misc_feature 1..80: note = Artificially Synthesized Probe
  source 1..80: mol_type = other DNA
ttgggtgtcttcctaaaggaatatgggacaggaactgctcattggaatttggacttctatcttgactcacaccaagacct

SEQ ID NO: 94801 - DNA, 80 bp, synthetic construct; identical to SEQ ID NO: 33940
  misc_feature 1..80: note = Artificially Synthesized Probe
  source 1..80: mol_type = other DNA

SEQ ID NO: 94802 - DNA, 80 bp, synthetic construct
  misc_feature 1..80: note = Artificially Synthesized Probe
  source 1..80: mol_type = other DNA
gtcatggacatttcattgagaagaggtggggccaagatcttttgtgaataaaggataatggctatattttatttggtaca

SEQ ID NO: 94803 - DNA, 80 bp, synthetic construct
  misc_feature 1..80: note = Artificially Synthesized Probe
  source 1..80: mol_type = other DNA
aataaatacattacaagggtggaaagacacatgtatggatgagtgtgctttctacccataaagataatttagtttgattc

SEQ ID NO: 94804 - DNA, 80 bp, synthetic construct
  misc_feature 1..80: note = Artificially Synthesized Probe
  source 1..80: mol_type = other DNA
atgtgatgggtgaagggagtggtgtttttaggtaaaagtacagagaaatgagggatagaaacggttcatatggggccggg

SEQ ID NO: 94805 - DNA, 80 bp, synthetic construct
  misc_feature 1..80: note = Artificially Synthesized Probe
  source 1..80: mol_type = other DNA
agctactcaggaggctgaggcaagagaatctcttgaacctgggaggcggaggttgcagtgagcaaagatcgtgccattgc

SEQ ID NO: 94806 - DNA, 80 bp, synthetic construct; identical to SEQ ID NO: 33941
  misc_feature 1..80: note = Artificially Synthesized Probe
  source 1..80: mol_type = other DNA

SEQ ID NO: 94807 - DNA, 80 bp, synthetic construct
  misc_feature 1..80: note = Artificially Synthesized Probe
  source 1..80: mol_type = other DNA
atccataatcccagctacttgggaggctgaggcaggagaatcgcttgaacctgggaagcggaggttgcagtgagctgaga

SEQ ID NO: 94808 - DNA, 80 bp, synthetic construct
  misc_feature 1..80: note = Artificially Synthesized Probe
  source 1..80: mol_type = other DNA
atcagaacaatcccacgtagtatttttattccattccacagaggggacactaaagtctggggaggttacatggcttgtcc

SEQ ID NO: 94809 - DNA, 80 bp, synthetic construct
  misc_feature 1..80: note = Artificially Synthesized Probe
  source 1..80: mol_type = other DNA
gtatatatcctctatttcaagtcagatataaaggaaatctccaagtggattcagaagggaagtaacaaattcagcattag

SEQ ID NO: 94810 - DNA, 80 bp, synthetic construct; identical to SEQ ID NO: 33942
  misc_feature 1..80: note = Artificially Synthesized Probe
  source 1..80: mol_type = other DNA

SEQ ID NO: 94811 - DNA, 80 bp, synthetic construct
  misc_feature 1..80: note = Artificially Synthesized Probe
  source 1..80: mol_type = other DNA
caagcaattctcctgcctcagcctcccgagtagctaggattacaggcacatgccaccaagcctggctagtttttgtattt

SEQ ID NO: 94812 - DNA, 80 bp, synthetic construct
  misc_feature 1..80: note = Artificially Synthesized Probe
  source 1..80: mol_type = other DNA
gttgctattctggtggtggcattgctgcttgggtcattgttgccactgatgttgtgtaaacagttattatttgaggggta

SEQ ID NO: 94813 - DNA, 80 bp, synthetic construct
  misc_feature 1..80: note = Artificially Synthesized Probe
  source 1..80: mol_type = other DNA
acccatttctttccccgtcgtctgcaaactccagctgggctcttacaggatcaaggtggaggaggaaacatttcatacca

SEQ ID NO: 94814 - DNA, 80 bp, synthetic construct; identical to SEQ ID NO: 33943
  misc_feature 1..80: note = Artificially Synthesized Probe
  source 1..80: mol_type = other DNA

SEQ ID NO: 94815 - DNA, 80 bp, synthetic construct
  misc_feature 1..80: note = Artificially Synthesized Probe
  source 1..80: mol_type = other DNA
atacaaaattagctgggcatggtggcacatgcctgtaatcccagctactcaggaggctgaggcaggagaatcacttgaac

SEQ ID NO: 94816 - DNA, 80 bp, synthetic construct
  misc_feature 1..80: note = Artificially Synthesized Probe
  source 1..80: mol_type = other DNA
tagtaataattgccaggaaggaagtgagcatagaggtagaatagagattggctgtgtgcaagatgcgtatacgggggaaa

SEQ ID NO: 94817 - DNA, 80 bp, synthetic construct
  misc_feature 1..80: note = Artificially Synthesized Probe
  source 1..80: mol_type = other DNA
ccagagatgattggacacagcttattcacttactccgttctaaaaatggacactgaagcctggagaggttacatggctct

SEQ ID NO: 94818 - DNA, 80 bp, synthetic construct; identical to SEQ ID NO: 33865
  misc_feature 1..80: note = Artificially Synthesized Probe
  source 1..80: mol_type = other DNA

SEQ ID NO: 94819 - DNA, 80 bp, synthetic construct; identical to SEQ ID NO: 33944
  misc_feature 1..80: note = Artificially Synthesized Probe
  source 1..80: mol_type = other DNA

SEQ ID NO: 94820 - DNA, 80 bp, synthetic construct
  misc_feature 1..80: note = Artificially Synthesized Probe
  source 1..80: mol_type = other DNA
gacctcatgatccactggcctcagcctcccaaagtgctgggattacaggcgtgagccactgcacccagcctcaatgacta

SEQ ID NO: 94821 - DNA, 80 bp, synthetic construct
  misc_feature 1..80: note = Artificially Synthesized Probe
  source 1..80: mol_type = other DNA
tgtgatggtgcgtgcctgtagttccagctactcaggaggctgaggcaggaaaatcgcttgaacctgggagaaggaggttg

SEQ ID NO: 94822 - DNA, 80 bp, synthetic construct
  misc_feature 1..80: note = Artificially Synthesized Probe
  source 1..80: mol_type = other DNA
gagattgcaccattgcactccagcctgggcgacagagtgagactctgccaaaagaaggaaagaaagaaaaagacaggaag

SEQ ID NO: 94823 - DNA, 80 bp, synthetic construct; identical to SEQ ID NO: 33945
  misc_feature 1..80: note = Artificially Synthesized Probe
  source 1..80: mol_type = other DNA

SEQ ID NO: 94824 - DNA, 80 bp, synthetic construct
  misc_feature 1..80: note = Artificially Synthesized Probe
  source 1..80: mol_type = other DNA
agcgtgaatcgggtttgttgggtcctatcatttagcgaggggagaataggactcttggtgagcactggcatctgtgcctt

SEQ ID NO: 94825 - DNA, 80 bp, synthetic construct
  misc_feature 1..80: note = Artificially Synthesized Probe
  source 1..80: mol_type = other DNA
ggaccgatggttataacctgcagagagagagggagaggaaggaagaacgaatcagagtgagaagacaggaggaagttaag

SEQ ID NO: 94826 - DNA, 80 bp, synthetic construct
  misc_feature 1..80: note = Artificially Synthesized Probe
  source 1..80: mol_type = other DNA
actccagcctgggtgacagagcgagactccgtctctaaataaataaataaataaatgaataacagctagtctttttttgt

SEQ ID NO: 94827 - DNA, 80 bp, synthetic construct
  misc_feature 1..80: note = Artificially Synthesized Probe
  source 1..80: mol_type = other DNA
gcacacgccaccacacctgactaatttttgtatttttggtagagaccaggtttcaccatgttggccaggctagtcttgaa

SEQ ID NO: 94828 - DNA, 80 bp, synthetic construct; identical to SEQ ID NO: 33946
  misc_feature 1..80: note = Artificially Synthesized Probe
  source 1..80: mol_type = other DNA

SEQ ID NO: 94829 - DNA, 80 bp, synthetic construct
  misc_feature 1..80: note = Artificially Synthesized Probe
  source 1..80: mol_type = other DNA
gtgcatggcacaatgtcagctcactgcaacctctgcctcctgggctcaagccatcctcccacctcagcctcctaagtaac

SEQ ID NO: 94830 - DNA, 80 bp, synthetic construct
  misc_feature 1..80: note = Artificially Synthesized Probe
  source 1..80: mol_type = other DNA
gataataagaggggagggaaagagagagagagagactgactatggggaggggagaggctagggggtccgcaggagatgat

SEQ ID NO: 94831 - DNA, 80 bp, synthetic construct
  misc_feature 1..80: note = Artificially Synthesized Probe
  source 1..80: mol_type = other DNA
agactggtccaagtggagccctgtggtttacttgggttattaggattttatcttatttgatcttcacaataatcttaggt

SEQ ID NO: 94832 - DNA, 80 bp, synthetic construct
  misc_feature 1..80: note = Artificially Synthesized Probe
  source 1..80: mol_type = other DNA
aaatgcaaaaattagctgggcgtggtggcacgcgcctgtagtcccagctattcgggaggctgaggcaggagaatcgcttc

SEQ ID NO: 94833 - DNA, 80 bp, synthetic construct; identical to SEQ ID NO: 33947
  misc_feature 1..80: note = Artificially Synthesized Probe
  source 1..80: mol_type = other DNA

SEQ ID NO: 94834 - DNA, 80 bp, synthetic construct
  misc_feature 1..80: note = Artificially Synthesized Probe
  source 1..80: mol_type = other DNA
tgcactagggagaatggggaatgggaaattattccttcagtcctgtttggggtgataaaaaaagttttgaaaacagatag

SEQ ID NO: 94835 - DNA, 80 bp, synthetic construct
  misc_feature 1..80: note = Artificially Synthesized Probe
  source 1..80: mol_type = other DNA
ccaggtgtggtcagaggagtaaagaggcttccagccagtgtattgaaggtggttgttgtcttggccacagtgggactgga

SEQ ID NO: 94836 - DNA, 80 bp, synthetic construct
  misc_feature 1..80: note = Artificially Synthesized Probe
  source 1..80: mol_type = other DNA
actgaagttacagatggtgaggtttctgtgttccaggaggtcacagtttggggcttatcagttgttatagaggcactgga

SEQ ID NO: 94837 - DNA, 80 bp, synthetic construct; identical to SEQ ID NO: 33948
  misc_feature 1..80: note = Artificially Synthesized Probe
  source 1..80: mol_type = other DNA

SEQ ID NO: 94838 - DNA, 80 bp, synthetic construct
  misc_feature 1..80: note = Artificially Synthesized Probe
  source 1..80: mol_type = other DNA
atacttgaggaaacacagttgaagcaggaaatgttttacttgtctctgttctgggatgggtgctcaataaggctgtggtc

SEQ ID NO: 94839 - DNA, 80 bp, synthetic construct
  misc_feature 1..80: note = Artificially Synthesized Probe
  source 1..80: mol_type = other DNA
gaactggcttctgtcctaggactggtggccattacaggtgtggcatctggactactatgggaaaaactggaggttgttct

SEQ ID NO: 94840 - DNA, 80 bp, synthetic construct; identical to SEQ ID NO: 33949
  misc_feature 1..80: note = Artificially Synthesized Probe
  source 1..80: mol_type = other DNA

SEQ ID NO: 94841 - DNA, 80 bp, synthetic construct
  misc_feature 1..80: note = Artificially Synthesized Probe
  source 1..80: mol_type = other DNA
tccagcaagatcctcggtaactttgaaaactggcagcctcagaatcatgatatctgtgaaaaccagctgcctagcagtca

SEQ ID NO: 94842 - DNA, 80 bp, synthetic construct
  misc_feature 1..80: note = Artificially Synthesized Probe
  source 1..80: mol_type = other DNA
aaaagttgggaattgtcccagaaaccgttgtgctggtttctgcaggatgagtgagccacgtggctgtagtctctggttca

SEQ ID NO: 94843 - DNA, 80 bp, synthetic construct
  misc_feature 1..80: note = Artificially Synthesized Probe
  source 1..80: mol_type = other DNA
tgtctgacttactatgggaaaacttgggagttgtcctgggaaccattgtgttggtctctgcaggatgaatgagctgtatg

SEQ ID NO: 94844 - DNA, 80 bp, synthetic construct
  misc_feature 1..80: note = Artificially Synthesized Probe
  source 1..80: mol_type = other DNA
taaatgaggttgtggtctctggctcaccagaagaaagagtcagagttggaatagttatactggtgtctgtcccagaacta

SEQ ID NO: 94845 - DNA, 80 bp, synthetic construct
  misc_feature 1..80: note = Artificially Synthesized Probe
  source 1..80: mol_type = other DNA
ctgcaggatgagtaacccatgaggctgttgcctctgattcatgtggggactcaggcactgttggaaaagttgcactgatg

SEQ ID NO: 94846 - DNA, 80 bp, synthetic construct; identical to SEQ ID NO: 33950
  misc_feature 1..80: note = Artificially Synthesized Probe
  source 1..80: mol_type = other DNA

SEQ ID NO: 94847 - DNA, 80 bp, synthetic construct
  misc_feature 1..80: note = Artificially Synthesized Probe
  source 1..80: mol_type = other DNA
gaatggctgaaatcatctttgcctcagaatgggtgaccaatgaagttgtggtctctggttcatcagaagaaatagtcaga

SEQ ID NO: 94848 - DNA, 80 bp, synthetic construct
  misc_feature 1..80: note = Artificially Synthesized Probe
  source 1..80: mol_type = other DNA
attgaaggtgtggtctctggctcactagaagaaagagttagaattggaatagttgtactggtcactgccctggaactagt

SEQ ID NO: 94849 - DNA, 80 bp, synthetic construct; identical to SEQ ID NO: 33951
  misc_feature 1..80: note = Artificially Synthesized Probe
  source 1..80: mol_type = other DNA

SEQ ID NO: 94850 - DNA, 80 bp, synthetic construct
  misc_feature 1..80: note = Artificially Synthesized Probe
  source 1..80: mol_type = other DNA
aggtaaaacagttggaacagctgagccagcttctgtcccatgactggtggccattgaaggtgtggtctctggttcaccaa

SEQ ID NO: 94851 - DNA, 80 bp, synthetic construct
  misc_feature 1..80: note = Artificially Synthesized Probe
  source 1..80: mol_type = other DNA
tttgtttagtgaggaaagcctgttctcaaggcagttgtcaaaaaaaaaaaatcattggtaccccccaccattggaaatga

SEQ ID NO: 94852 - DNA, 80 bp, synthetic construct
  misc_feature 1..80: note = Artificially Synthesized Probe
  source 1..80: mol_type = other DNA
ttcaccaggagaaagagtcagaattggaatagttgtactgatcactgccctagaactggtgaccaaaggggtcactactc

SEQ ID NO: 94853 - DNA, 80 bp, synthetic construct
  misc_feature 1..80: note = Artificially Synthesized Probe
  source 1..80: mol_type = other DNA
gtgtctgatttactatggaaaaaaatggaagttgtccagggaactgttgggctggtctgtgcaggatgcgtgaccaatga

SEQ ID NO: 94854 - DNA, 80 bp, synthetic construct; identical to SEQ ID NO: 33952
  misc_feature 1..80: note = Artificially Synthesized Probe
  source 1..80: mol_type = other DNA

SEQ ID NO: 94855 - DNA, 80 bp, synthetic construct
  misc_feature 1..80: note = Artificially Synthesized Probe
  source 1..80: mol_type = other DNA
agaaaaattggggattgttctgggaatagttgagctggtctctgcaggatgagtgagccatgtggttcttgtctctgttt

SEQ ID NO: 94856 - DNA, 80 bp, synthetic construct
  misc_feature 1..80: note = Artificially Synthesized Probe
  source 1..80: mol_type = other DNA
taattcactgtggaaaaaattgggggttgtcttggaaacagttgggatggtctctgcaggatggataacccatgaagctg

SEQ ID NO: 94857 - DNA, 80 bp, synthetic construct
  misc_feature 1..80: note = Artificially Synthesized Probe
  source 1..80: mol_type = other DNA
agccaatgaggatgtcgtttctggaacatcagggaaaacatatggggttgtgatcatcatttctgtggggattgtgctgg

SEQ ID NO: 94858 - DNA, 80 bp, synthetic construct; identical to SEQ ID NO: 33953
  misc_feature 1..80: note = Artificially Synthesized Probe
  source 1..80: mol_type = other DNA

SEQ ID NO: 94859 - DNA, 80 bp, synthetic construct
  misc_feature 1..80: note = Artificially Synthesized Probe
  source 1..80: mol_type = other DNA
gtattcccctatcttaccttggtctgtaacttggttgcatcttcacctataactcctctgtgaattcttgaccgctactc

SEQ ID NO: 94860 - DNA, 80 bp, synthetic construct
  misc_feature 1..80: note = Artificially Synthesized Probe
  source 1..80: mol_type = other DNA
ctttgcttctcaatatttccttatcacactgtctgaatctgcgttgtaccatccttcacagtctcatttgtaacagctat

SEQ ID NO: 94861 - DNA, 80 bp, synthetic construct
  misc_feature 1..80: note = Artificially Synthesized Probe
  source 1..80: mol_type = other DNA
aagatagccctgcctgggattctggctctttctctaaagagatgggtggctctttaagttaaaaaatattgctggacctc

SEQ ID NO: 94862 - DNA, 80 bp, synthetic construct; identical to SEQ ID NO: 33954
  misc_feature 1..80: note = Artificially Synthesized Probe
  source 1..80: mol_type = other DNA

SEQ ID NO: 94863 - DNA, 80 bp, synthetic construct; identical to SEQ ID NO: 33866
  misc_feature 1..80: note = Artificially Synthesized Probe
  source 1..80: mol_type = other DNA

SEQ ID NO: 94864 - DNA, 80 bp, synthetic construct
  misc_feature 1..80: note = Artificially Synthesized Probe
  source 1..80: mol_type = other DNA
attactacctatcactatggttattactatggttactgctacttactattactactgctgttgctattactattattact

SEQ ID NO: 94865 - DNA, 80 bp, synthetic construct
  misc_feature 1..80: note = Artificially Synthesized Probe
  source 1..80: mol_type = other DNA
attgttgctagcactattacttatgatttctactgtcactactaccactgctactacctactgctactactgttactacc

SEQ ID NO: 94866 - DNA, 80 bp, synthetic construct
  misc_feature 1..80: note = Artificially Synthesized Probe
  source 1..80: mol_type = other DNA
attctactacaaaataaacatttgctaaatagaattctccaccaaccacactagacactaccagagctgaccaaggtgac

SEQ ID NO: 94867 - DNA, 80 bp, synthetic construct; identical to SEQ ID NO: 33955
  misc_feature 1..80: note = Artificially Synthesized Probe
  source 1..80: mol_type = other DNA

SEQ ID NO: 94868 - DNA, 80 bp, synthetic construct
  misc_feature 1..80: note = Artificially Synthesized Probe
  source 1..80: mol_type = other DNA
catgcctgtaatcccagcattttgggaggacgaggtgggcggatcacctgaggtcaggagttctagaccagcctggtcaa

SEQ ID NO: 94869 - DNA, 80 bp, synthetic construct
  misc_feature 1..80: note = Artificially Synthesized Probe
  source 1..80: mol_type = other DNA
gggtgacagagcaagactccacctcaaataaataaataaataaagtgagataaaataaaataaaatgcacattgtataat

SEQ ID NO: 94870 - DNA, 80 bp, synthetic construct
  misc_feature 1..80: note = Artificially Synthesized Probe
  source 1..80: mol_type = other DNA
gatcttgtggggaccagaatggaaagagaatgaagtgaggtgaaaacgcccatctagtaagatggatcttaggatgcatt

SEQ ID NO: 94871 - DNA, 80 bp, synthetic construct; identical to SEQ ID NO: 33956
  misc_feature 1..80: note = Artificially Synthesized Probe
  source 1..80: mol_type = other DNA

SEQ ID NO: 94872 - DNA, 80 bp, synthetic construct
  misc_feature 1..80: note = Artificially Synthesized Probe
  source 1..80: mol_type = other DNA
tgttgaaacttgacagtcagaaaaataactcttgatgctgctgtttcggaagagttggttgagctgaaagacagggcgat

SEQ ID NO: 94873 - DNA, 80 bp, synthetic construct
  misc_feature 1..80: note = Artificially Synthesized Probe
  source 1..80: mol_type = other DNA
tattgtgatttagctctccagtgatgacaaacaaaaataacccaggagctcacccatcttctttatttaagtgacagtta

SEQ ID NO: 94874 - DNA, 80 bp, synthetic construct
  misc_feature 1..80: note = Artificially Synthesized Probe
  source 1..80: mol_type = other DNA
ttatgtctgtttttcaaccagggcatacataaaggctgttaatttatacttccttttcctacatttgctagaactattgg

SEQ ID NO: 94875 - DNA, 80 bp, synthetic construct
  misc_feature 1..80: note = Artificially Synthesized Probe
  source 1..80: mol_type = other DNA
tatatatatatataatttatttatttatttttgagctggagtcttgctctgccacccaggctggagtgcattggcacaat

SEQ ID NO: 94876 - DNA, 80 bp, synthetic construct
  misc_feature 1..80: note = Artificially Synthesized Probe
  source 1..80: mol_type = other DNA
ttgacctcaggtgatccacccacctcagcctcccaaagtattgggattacaggcatgagccactgcgcccagctcatagt

SEQ ID NO: 94877 - DNA, 80 bp, synthetic construct; identical to SEQ ID NO: 33957
  misc_feature 1..80: note = Artificially Synthesized Probe
  source 1..80: mol_type = other DNA

SEQ ID NO: 94878 - DNA, 80 bp, synthetic construct
  misc_feature 1..80: note = Artificially Synthesized Probe
  source 1..80: mol_type = other DNA
ggagaaaaactggggtaactcatctcattcagaagaagagcactgtctaaatggatccacttcattggccacaaacactc

SEQ ID NO: 94879 - DNA, 80 bp, synthetic construct
  misc_feature 1..80: note = Artificially Synthesized Probe
  source 1..80: mol_type = other DNA
tgatcatctattcttccattttttcttccttttattctttccttctatcacccattcttccttttgtctttcctcccttc

SEQ ID NO: 94880 - DNA, 80 bp, synthetic construct; identical to SEQ ID NO: 33958
  misc_feature 1..80: note = Artificially Synthesized Probe
  source 1..80: mol_type = other DNA

SEQ ID NO: 94881 - DNA, 80 bp, synthetic construct
  misc_feature 1..80: note = Artificially Synthesized Probe
  source 1..80: mol_type = other DNA
tgagtcacatagtaacatatgggtcaatagccaccaatgtgtctaaatttagtgtgaattacaaaataatgtgaagaagg

SEQ ID NO: 94882 - DNA, 80 bp, synthetic construct
  misc_feature 1..80: note = Artificially Synthesized Probe
  source 1..80: mol_type = other DNA
cctcttggaagtagtgtttcctccttctaggctctgggtgtcttctaccttcttaggtactttgttccctctattttcat

SEQ ID NO: 94883 - DNA, 80 bp, synthetic construct
  misc_feature 1..80: note = Artificially Synthesized Probe
  source 1..80: mol_type = other DNA
agcacttctcacctcatttcaacttggcaattctgtggtatttaacagaacttaccatttctccttcctaaaaccctccc

SEQ ID NO: 94884 - DNA, 80 bp, synthetic construct
  misc_feature 1..80: note = Artificially Synthesized Probe
  source 1..80: mol_type = other DNA
ggtcagctactgaacctctctgtgcttgtgtattaaatgggaataagaacctgtctttgtggattgttataaaaagtcac

SEQ ID NO: 94885 - DNA, 80 bp, synthetic construct
  misc_feature 1..80: note = Artificially Synthesized Probe
  source 1..80: mol_type = other DNA
ttattgaatcgtcaccacaatcaacataaggaacatccatccatcatccccaaaactttcgtcctggccaggcatggtgg

SEQ ID NO: 94886 - DNA, 80 bp, synthetic construct
  misc_feature 1..80: note = Artificially Synthesized Probe
  source 1..80: mol_type = other DNA
tacttaatctccctgtgcctaaatgtcttcatctccaaaataggcttctaataatctctacttcaattagtgttacaatt

SEQ ID NO: 94887 - DNA, 80 bp, synthetic construct; identical to SEQ ID NO: 33959
  misc_feature 1..80: note = Artificially Synthesized Probe
  source 1..80: mol_type = other DNA

SEQ ID NO: 94888 - DNA, 80 bp, synthetic construct
  misc_feature 1..80: note = Artificially Synthesized Probe
  source 1..80: mol_type = other DNA
ttctggtatccaaaatgggtgatgaagatgtcctgcctggttggcttgaagtgtccaaagtactgaccataaccaagcgt

SEQ ID NO: 94889 - DNA, 80 bp, synthetic construct
  misc_feature 1..80: note = Artificially Synthesized Probe
  source 1..80: mol_type = other DNA
gaggagaatggcacaggagtggatgaaggcaggctctctgcaatggtggacagagtagcatccccagggcctgactctgt

SEQ ID NO: 94890 - DNA, 80 bp, synthetic construct; identical to SEQ ID NO: 33960
  misc_feature 1..80: note = Artificially Synthesized Probe
  source 1..80: mol_type = other DNA

SEQ ID NO: 94891 - DNA, 80 bp, synthetic construct
  misc_feature 1..80: note = Artificially Synthesized Probe
  source 1..80: mol_type = other DNA
aggtgtatttgttggtgtgactgagctggtgtccagggacatgtttgtcttcctaaatccagaagtcaaatgagaaaatg

SEQ ID NO: 94892 - DNA, 80 bp, synthetic construct
  misc_feature 1..80: note = Artificially Synthesized Probe
  source 1..80: mol_type = other DNA
cacattggtcactgccatgcttgaagaaggatgaattttctctgtatctgtggtgacttcagaggcagccagtatttcaa

SEQ ID NO: 94893 - DNA, 80 bp, synthetic construct
  misc_feature 1..80: note = Artificially Synthesized Probe
  source 1..80: mol_type = other DNA
taaggacaacagagaagatgaagagctagttttttccacaaagagagagctcttccatgatggattttcaggactcctac

SEQ ID NO: 94894 - DNA, 80 bp, synthetic construct; identical to SEQ ID NO: 33961
  misc_feature 1..80: note = Artificially Synthesized Probe
  source 1..80: mol_type = other DNA

SEQ ID NO: 94895 - DNA, 80 bp, synthetic construct
  misc_feature 1..80: note = Artificially Synthesized Probe
  source 1..80: mol_type = other DNA
ccctgaatccaggagtcaatgagaatgttggctctgtcggaatcctcctagtctcagagaaggcaggatttgatgtgaaa

SEQ ID NO: 94896 - DNA, 80 bp, synthetic construct
  misc_feature 1..80: note = Artificially Synthesized Probe
  source 1..80: mol_type = other DNA
aattcaggtagaagtgctgggtgctggagctgcttgttggttgataaactgatgactccatttctagaattaaaaaaaaa

SEQ ID NO: 94897 - DNA, 80 bp, synthetic construct
  misc_feature 1..80: note = Artificially Synthesized Probe
  source 1..80: mol_type = other DNA
tcatgatttcagaggtggccggtatttcaactgaggtgctgctcaaatttggagatgaactggttttaggctctgagctt

SEQ ID NO: 94898 - DNA, 80 bp, synthetic construct
  misc_feature 1..80: note = Artificially Synthesized Probe
  source 1..80: mol_type = other DNA
caaagcgagggctcgtccatgacagactttcaggacccctgctcataagattggtcatctctgagtgtgaaagtccttga

SEQ ID NO: 94899 - DNA, 80 bp, synthetic construct
  misc_feature 1..80: note = Artificially Synthesized Probe
  source 1..80: mol_type = other DNA
agatgtctagtgacattgtggactgagcagggccaggaatggatgttctgctagagggcataacttctgtcctggagacc

SEQ ID NO: 94900 - DNA, 80 bp, synthetic construct; identical to SEQ ID NO: 33962
  misc_feature 1..80: note = Artificially Synthesized Probe
  source 1..80: mol_type = other DNA

SEQ ID NO: 94901 - DNA, 80 bp, synthetic construct
  misc_feature 1..80: note = Artificially Synthesized Probe
  source 1..80: mol_type = other DNA
ttgcatccaacatgtctgtggccttcatcatgatagaggtgaaaagagaagtgacagggacaggagaggagtggctactc

SEQ ID NO: 94902 - DNA, 80 bp, synthetic construct
  misc_feature 1..80: note = Artificially Synthesized Probe
  source 1..80: mol_type = other DNA
gagttgtagctgagtgagttcctggccaggaggctgtgcttgatgagtccaaggtaaaggtaccctgcgaggtagcccca

SEQ ID NO: 94903 - DNA, 80 bp, synthetic construct
  misc_feature 1..80: note = Artificially Synthesized Probe
  source 1..80: mol_type = other DNA
agacctcagtagtagcaccagtgggcacactagaaaggacagtgcttttttctgtggcagagctggtctcttcagagatg

SEQ ID NO: 94904 - DNA, 80 bp, synthetic construct
  misc_feature 1..80: note = Artificially Synthesized Probe
  source 1..80: mol_type = other DNA
accacgttttattcagtccagttcaggatccccgctatctcagggctctctgggccagtcctcctgggagcccccaccac

SEQ ID NO: 94905 - DNA, 80 bp, synthetic construct
  misc_feature 1..80: note = Artificially Synthesized Probe
  source 1..80: mol_type = other DNA
tctcctcccaggcctgtcccccaaaactcctctgacctctgcccctcatccttgccaggccctcccctgctcacttcacg

SEQ ID NO: 94906 - DNA, 80 bp, synthetic construct
  misc_feature 1..80: note = Artificially Synthesized Probe
  source 1..80: mol_type = other DNA
gtggtaggtggggtactcgctcataggatggtaggtatcccgggctggaaagatgtccagctgcccgtagttctttcggc

SEQ ID NO: 94907 - DNA, 80 bp, synthetic construct; identical to SEQ ID NO: 33999
  misc_feature 1..80: note = Artificially Synthesized Probe
  source 1..80: mol_type = other DNA

SEQ ID NO: 94908 - DNA, 80 bp, synthetic construct
  misc_feature 1..80: note = Artificially Synthesized Probe
  source 1..80: mol_type = other DNA
tgcttccgttttatactgattgaactgtgtctccacgtcgtggacattgatggtaccttctcggaaggccagagtcaatt

SEQ ID NO: 94909 - DNA, 80 bp, synthetic construct
  misc_feature 1..80: note = Artificially Synthesized Probe
  source 1..80: mol_type = other DNA
tccacacccagaactgtacctgaacttaatattggagaggcccagaaaacccccttgtttataaatctgcaaaaactggg

SEQ ID NO: 94910 - DNA, 80 bp, synthetic construct; identical to SEQ ID NO: 34000
  misc_feature 1..80: note = Artificially Synthesized Probe
  source 1..80: mol_type = other DNA

SEQ ID NO: 94911 - DNA, 80 bp, synthetic construct
  misc_feature 1..80: note = Artificially Synthesized Probe
  source 1..80: mol_type = other DNA
cctgagtggagtggaatggcactggctggccactcagctcagcgggcgacgtgcccctacaagttggcagaagtggctgc

SEQ ID NO: 94912 - DNA, 80 bp, synthetic construct
  misc_feature 1..80: note = Artificially Synthesized Probe
  source 1..80: mol_type = other DNA
ggttgtggtagccctggcagaggtgccgttgtgcaccagagtagaagctgagcctgatgcagagcctgaggccgaggtga

SEQ ID NO: 94913 - DNA, 80 bp, synthetic construct
  misc_feature 1..80: note = Artificially Synthesized Probe
  source 1..80: mol_type = other DNA
gggccggggtggagcccggggcccgcctggtgtccggggccgaggtgacaccgtgggctgggggtgcggtggagcccggg

SEQ ID NO: 94914 - DNA, 80 bp, synthetic construct
  misc_feature 1..80: note = Artificially Synthesized Probe
  source 1..80: mol_type = other DNA
ccgtggactgggggggcggtggagcccggggccggcctggtgtccggggccgaggtgacaccgtgggctgggggggcggt

SEQ ID NO: 94915 - DNA, 80 bp, synthetic construct; identical to SEQ ID NO: 34001
  misc_feature 1..80: note = Artificially Synthesized Probe
  source 1..80: mol_type = other DNA

SEQ ID NO: 94916 - DNA, 80 bp, synthetic construct
  misc_feature 1..80: note = Artificially Synthesized Probe
  source 1..80: mol_type = other DNA
cctggtgtccggggccgaggtgacaccgtgggctgggggggcggtggagcccggggccggcctggtgtccggggccgagg

SEQ ID NO: 94917 - DNA, 80 bp, synthetic construct
  misc_feature 1..80: note = Artificially Synthesized Probe
  source 1..80: mol_type = other DNA
ccggggccggcctgctctccggggccgaggtgacaccgtgggctgggggggcggtggagcccggggccggcctggtgtcc

SEQ ID NO: 94918 - DNA, 80 bp, synthetic construct
  misc_feature 1..80: note = Artificially Synthesized Probe
  source 1..80: mol_type = other DNA
gcggtggagcccggggccggcctggtgtccggggccgaggtgacaccgtgggctgcgggcgcggtgtagcccggggcggg

SEQ ID NO: 94919 - DNA, 80 bp, synthetic construct
  misc_feature 1..80: note = Artificially Synthesized Probe
  source 1..80: mol_type = other DNA
ggctgggggggcggtggagcccggggccggcctgctctccggggccgaggtgacaccgtgggctgcgggcgcggtggagc

SEQ ID NO: 94920 - DNA, 80 bp, synthetic construct
  misc_feature 1..80: note = Artificially Synthesized Probe
  source 1..80: mol_type = other DNA
tgactccgtgggctgcgggcgcggtggagcccggggccggcctgctctctggggccgaggtgacaccgtgggctgcgggc

SEQ ID NO: 94921 - DNA, 80 bp, synthetic construct
  misc_feature 1..80: note = Artificially Synthesized Probe
  source 1..80: mol_type = other DNA
ggccgaggtgacaccgtgggctgggggggcggtggagcccggggccggcctggtgtccggggccgaggtgacaccgtggg

SEQ ID NO: 94922 - DNA, 80 bp, synthetic construct
  misc_feature 1..80: note = Artificially Synthesized Probe
  source 1..80: mol_type = other DNA
aagggttaattcagagagagcacctgccaccccaccagccaggtgactgtaaacagggctgccctcctccctctgctctc

SEQ ID NO: 94923 - DNA, 80 bp, synthetic construct
  misc_feature 1..80: note = Artificially Synthesized Probe
  source 1..80: mol_type = other DNA
tggtgtccggggccgaggtgacaccgtgggctgggggggcggtggagcccggggccggcctggtgtccggggtcgaggtg

SEQ ID NO: 94924 - DNA, 80 bp, synthetic construct
  misc_feature 1..80: note = Artificially Synthesized Probe
  source 1..80: mol_type = other DNA
caccgtgggctgggggggcggtggagcccggggccggcctggtgtccggggccgaggtgacaccgtgggcttggggggcg

SEQ ID NO: 94925 - DNA, 80 bp, synthetic construct
  misc_feature 1..80: note = Artificially Synthesized Probe
  source 1..80: mol_type = other DNA
gccgaggtgacaccgtgggctgggggggcggtggagcccggggccggcctggtgtccggggccgaggtgacaccgtgggc

SEQ ID NO: 94926 - DNA, 80 bp, synthetic construct
  misc_feature 1..80: note = Artificially Synthesized Probe
  source 1..80: mol_type = other DNA
tgctctccgaggccgaggtgacaccgtagactgggggggcggtggagcccggggccggcctggtgtccggggccgaggtg

SEQ ID NO: 94927 - DNA, 80 bp, synthetic construct
  misc_feature 1..80: note = Artificially Synthesized Probe
  source 1..80: mol_type = other DNA
gggaccgacctggtgtccggggccgaggtgacaccgtgggctgcgggcgcggtggagcccggggcggacctggtgtccgg

SEQ ID NO: 94928 - DNA, 80 bp, synthetic construct
  misc_feature 1..80: note = Artificially Synthesized Probe
  source 1..80: mol_type = other DNA
ggtggagcccggggccggcctggtgtccggggccgaggtgacaccgtgggctgggggggcggtggagcccggggctggct

SEQ ID NO: 94929 - DNA, 80 bp, synthetic construct
  misc_feature 1..80: note = Artificially Synthesized Probe
  source 1..80: mol_type = other DNA
cctgagtggtggaggagcctgaaccggggctgtggctggagagtacgctgctggtcatactcacagcattcttctcagta

SEQ ID NO: 94930 - DNA, 80 bp, synthetic construct; identical to SEQ ID NO: 34003
  misc_feature 1..80: note = Artificially Synthesized Probe
  source 1..80: mol_type = other DNA

SEQ ID NO: 94931 - DNA, 80 bp, synthetic construct
  misc_feature 1..80: note = Artificially Synthesized Probe
  source 1..80: mol_type = other DNA
gtacccactctcagggttgggggcaactcttctcagcctgtccttagcctctccctccttctggcacagacagggcagcc

SEQ ID NO: 94932 - DNA, 80 bp, synthetic construct
  misc_feature 1..80: note = Artificially Synthesized Probe
  source 1..80: mol_type = other DNA
ggtgcccggtgtcatggtggtggtgaaatgggtggggagggggcagaacagattcaggcaggcgctggctgcttgagagg

SEQ ID NO: 94933 - DNA, 80 bp, synthetic construct; identical to SEQ ID NO: 33998
  misc_feature 1..80: note = Artificially Synthesized Probe
  source 1..80: mol_type = other DNA

SEQ ID NO: 94934 - DNA, 80 bp, synthetic construct
  misc_feature 1..80: note = Artificially Synthesized Probe
  source 1..80: mol_type = other DNA
ccattcctaggagatgattaggggcacagaggctcacccctgggactcctcgggaagggctcccctgggcatagtgctcc

SEQ ID NO: 94935 - DNA, 80 bp, synthetic construct; identical to SEQ ID NO: 34004
  misc_feature 1..80: note = Artificially Synthesized Probe
  source 1..80: mol_type = other DNA

SEQ ID NO: 94936 - DNA, 80 bp, synthetic construct
  misc_feature 1..80: note = Artificially Synthesized Probe
  source 1..80: mol_type = other DNA
gtgtcaacatcacaggttcctattcctagcacacattcctccacccttcaaacaactccttctactccctcattgcaaac

SEQ ID NO: 94937 - DNA, 80 bp, synthetic construct
  misc_feature 1..80: note = Artificially Synthesized Probe
  source 1..80: mol_type = other DNA
ccatcttctgccagcataactccagtgttttccactaccattcattctgttccttcttcaccatacattttcagtacaga

SEQ ID NO: 94938 - DNA, 80 bp, synthetic construct; identical to SEQ ID NO: 34015
  misc_feature 1..80: note = Artificially Synthesized Probe
  source 1..80: mol_type = other DNA

SEQ ID NO: 94939 - DNA, 80 bp, synthetic construct
  misc_feature 1..80: note = Artificially Synthesized Probe
  source 1..80: mol_type = other DNA
cccaatgcttccagttccactggcactgggactgtacccacaaacacagttttcacaagtactcgactgcccaccagtga

SEQ ID NO: 94940 - DNA, 80 bp, synthetic construct
  misc_feature 1..80: note = Artificially Synthesized Probe
  source 1..80: mol_type = other DNA
agagacaccagtggccactacccagactcctaccacccttacatcacgcaggacaactcgcatcacttctcagatgacca

SEQ ID NO: 94941 - DNA, 80 bp, synthetic construct
  misc_feature 1..80: note = Artificially Synthesized Probe
  source 1..80: mol_type = other DNA
ggcacctgggaacagggccagtgtgcttgccttccggggttttctggggaccgctgtcagctccagaccagatgccagaa

SEQ ID NO: 94942 - DNA, 80 bp, synthetic construct
  misc_feature 1..80: note = Artificially Synthesized Probe
  source 1..80: mol_type = other DNA
gacttatccctctgtggggcctggaggcacccatgcctttttgcccggtccttccctccctgccatctctcccatgccct

SEQ ID NO: 94943 - DNA, 80 bp, synthetic construct
  misc_feature 1..80: note = Artificially Synthesized Probe
  source 1..80: mol_type = other DNA
atctctgatcctaactctgacaaattgtgaaatgggttgaaatccacatgctggggttcatgcttgtaaactaatgaatc

SEQ ID NO: 94944 - DNA, 80 bp, synthetic construct; identical to SEQ ID NO: 34016
  misc_feature 1..80: note = Artificially Synthesized Probe
  source 1..80: mol_type = other DNA

SEQ ID NO: 94945 - DNA, 80 bp, synthetic construct
  misc_feature 1..80: note = Artificially Synthesized Probe
  source 1..80: mol_type = other DNA
cactgttaaggacccttgtgataactttgcctcctccccaaatagtctatgttaattttctcaagatcagctgattacgc

SEQ ID NO: 94946 - DNA, 80 bp, synthetic construct
  misc_feature 1..80: note = Artificially Synthesized Probe
  source 1..80: mol_type = other DNA
ggaggtggatattgcagtaaagcgagatttcgccactgcacactagcgtagatgacagagggagagtgagactctgtctt

SEQ ID NO: 94947 - DNA, 80 bp, synthetic construct
  misc_feature 1..80: note = Artificially Synthesized Probe
  source 1..80: mol_type = other DNA
acgcctgtaatcccagcactttgggaggccgaggcgggcggatcacgaggtcaggagatcgagaccatcccagctaaaac

SEQ ID NO: 94948 - DNA, 80 bp, synthetic construct; identical to SEQ ID NO: 34017
  misc_feature 1..80: note = Artificially Synthesized Probe
  source 1..80: mol_type = other DNA

SEQ ID NO: 94949 - DNA, 80 bp, synthetic construct
  misc_feature 1..80: note = Artificially Synthesized Probe
  source 1..80: mol_type = other DNA
aaagttaggctgattagcaatctaattcaatctgcacccttgatcctcccttgccatgtagtatagcatagtcacagttc

SEQ ID NO: 94950 - DNA, 80 bp, synthetic construct
  misc_feature 1..80: note = Artificially Synthesized Probe
  source 1..80: mol_type = other DNA
ctttctcttttctttttttctttctctttttctttctttctttctctttcttttctttcctttcttttcttctttccctc

SEQ ID NO: 94951 - DNA, 80 bp, synthetic construct
  misc_feature 1..80: note = Artificially Synthesized Probe
  source 1..80: mol_type = other DNA
tctgtggcccaggctggagtgcagtgatgcaatctcggctcactacaacctccgcctcctgagttcaagtgattctcctg

SEQ ID NO: 94952 - DNA, 80 bp, synthetic construct; identical to SEQ ID NO: 34018
  misc_feature 1..80: note = Artificially Synthesized Probe
  source 1..80: mol_type = other DNA

SEQ ID NO: 94953 - DNA, 80 bp, synthetic construct
  misc_feature 1..80: note = Artificially Synthesized Probe
  source 1..80: mol_type = other DNA
ttcacctagtcctcactccatgccctttgaagtcattagtgtgtgagcttagcctgtttctctttggtgttctctgggca

SEQ ID NO: 94954 - DNA, 80 bp, synthetic construct
  misc_feature 1..80: note = Artificially Synthesized Probe
  source 1..80: mol_type = other DNA
gatcttgggtcactgcaacctccgcctcccgggttcacatgattctcttgcctcagcctcccaagtagctgggattacag

SEQ ID NO: 94955 - DNA, 80 bp, synthetic construct
  misc_feature 1..80: note = Artificially Synthesized Probe
  source 1..80: mol_type = other DNA
aggggaattgaagggtcttccctggagctggggttgggcgtctgggtcccctcaggtctgcaggttcggacgtgagccca

SEQ ID NO: 94956 - DNA, 80 bp, synthetic construct
  misc_feature 1..80: note = Artificially Synthesized Probe
  source 1..80: mol_type = other DNA
ttttgtaatcatcagattttataaagaggggtggagggggtacataaggaatcactccctgggtattttttcggatcgtt

SEQ ID NO: 94957 - DNA, 80 bp, synthetic construct
  misc_feature 1..80: note = Artificially Synthesized Probe
  source 1..80: mol_type = other DNA
gagagagagaaagagagagagggagagaacgcacgtctaggggcgcccggtggatgatggcttgatgcaacaagaagaga

SEQ ID NO: 94958 - DNA, 80 bp, synthetic construct; identical to SEQ ID NO: 34019
  misc_feature 1..80: note = Artificially Synthesized Probe
  source 1..80: mol_type = other DNA

SEQ ID NO: 94959 - DNA, 80 bp, synthetic construct
  misc_feature 1..80: note = Artificially Synthesized Probe
  source 1..80: mol_type = other DNA
ttctgaaaaggatgcacgtggcatcccaactcatgacctctgctcccttcccccttctggtgcactttgggttgcttctg

SEQ ID NO: 94960 - DNA, 80 bp, synthetic construct
  misc_feature 1..80: note = Artificially Synthesized Probe
  source 1..80: mol_type = other DNA
aaggaggggctgcagaacgccagccaggatgtgaacagctgccaggactcccagagtgagcccaggctggagggaggggc

SEQ ID NO: 94961 - DNA, 80 bp, synthetic construct
  misc_feature 1..80: note = Artificially Synthesized Probe
  source 1..80: mol_type = other DNA
gtactgggaaagagaccccctgattgtcatggtcagcatttcccggatggctgaagacctcggattattcaggggagatg

SEQ ID NO: 94962 - DNA, 80 bp, synthetic construct; identical to SEQ ID NO: 34020
  misc_feature 1..80: note = Artificially Synthesized Probe
  source 1..80: mol_type = other DNA

SEQ ID NO: 94963 - DNA, 80 bp, synthetic construct
  misc_feature 1..80: note = Artificially Synthesized Probe
  source 1..80: mol_type = other DNA
tggttagtggcttccacctgaggacagcaggggccacgaggagagggtgagggtgctgcgggtggcctcccctcatcgaa

SEQ ID NO: 94964 - DNA, 80 bp, synthetic construct
  misc_feature 1..80: note = Artificially Synthesized Probe
  source 1..80: mol_type = other DNA
gcctggctaatttttgtattttgttttagtagagaaagggtttcaccatgttggtcagactggtctcgaactcctgacct

SEQ ID NO: 94965 - DNA, 80 bp, synthetic construct
  misc_feature 1..80: note = Artificially Synthesized Probe
  source 1..80: mol_type = other DNA
ccgctcccacgggctatgaagagttctacttccccttggtggaggccacccggctccgctgtgtcaccaaatgcacgtcg

SEQ ID NO: 94966 - DNA, 80 bp, synthetic construct; identical to SEQ ID NO: 34021
  misc_feature 1..80: note = Artificially Synthesized Probe
  source 1..80: mol_type = other DNA

SEQ ID NO: 94967 - DNA, 80 bp, synthetic construct
  misc_feature 1..80: note = Artificially Synthesized Probe
  source 1..80: mol_type = other DNA
tgatctaaggtggaatcccgccccctcacctagggtagagccccggcccctcgttctagggtggattcccagccccttgt

SEQ ID NO: 94968 - DNA, 80 bp, synthetic construct
  misc_feature 1..80: note = Artificially Synthesized Probe
  source 1..80: mol_type = other DNA
ggttctctggcccgcgctgcgaggtggccgtccactggagggcgctggtcgggggcctgacggccggcgccgcgctgctg

SEQ ID NO: 94969 - DNA, 80 bp, synthetic construct
  misc_feature 1..80: note = Artificially Synthesized Probe
  source 1..80: mol_type = other DNA
cggccccacctaggtcctgggaccaggacaggaaatggttcgagacctgggatgaggaagtcgtgggcactttttcaaac

SEQ ID NO: 94970 - DNA, 80 bp, synthetic construct; identical to SEQ ID NO: 34022
  misc_feature 1..80: note = Artificially Synthesized Probe
  source 1..80: mol_type = other DNA

SEQ ID NO: 94971 - DNA, 80 bp, synthetic construct
  misc_feature 1..80: note = Artificially Synthesized Probe
  source 1..80: mol_type = other DNA
tccctcactgtgactctgacaggtgcacatcaagagacccgagatgacctcgtcctcagtgtgagccctgcggggcccct

SEQ ID NO: 94972 - DNA, 80 bp, synthetic construct
  misc_feature 1..80: note = Artificially Synthesized Probe
  source 1..80: mol_type = other DNA
gctgaaacccacctggagacgcagttcacgtccaggctcttccactgtggaatcttgggcaagtcagtaacgagcctcag

SEQ ID NO: 94973 - DNA, 80 bp, synthetic construct
  misc_feature 1..80: note = Artificially Synthesized Probe
  source 1..80: mol_type = other DNA
ctcacgtccttcacctggtctctggccctggttcttattttctctcaattccctactgcctgtttcttactttgaacctg

SEQ ID NO: 94974 - DNA, 80 bp, synthetic construct; identical to SEQ ID NO: 34023
  misc_feature 1..80: note = Artificially Synthesized Probe
  source 1..80: mol_type = other DNA

SEQ ID NO: 94975 - DNA, 80 bp, synthetic construct
  misc_feature 1..80: note = Artificially Synthesized Probe
  source 1..80: mol_type = other DNA
aaagcggagtcagcccagacagcagcagggtgccgggagaagcagtggtgggagcagaaggttaatggggggatgggagc

SEQ ID NO: 94976 - DNA, 80 bp, synthetic construct
  misc_feature 1..80: note = Artificially Synthesized Probe
  source 1..80: mol_type = other DNA
ttctccacccctttctctcacccctggagccctgcgggtgggggcagggcatgagttccccagtccccaaggaaaggcag

SEQ ID NO: 94977 - DNA, 80 bp, synthetic construct
  misc_feature 1..80: note = Artificially Synthesized Probe
  source 1..80: mol_type = other DNA
ccttggcggggaagattggctttggggacaggaagtcggcacatctccaggtcttcatgtgcacaatacagagtttattg

SEQ ID NO: 94978 - DNA, 80 bp, synthetic construct
  misc_feature 1..80: note = Artificially Synthesized Probe
  source 1..80: mol_type = other DNA
gaggaatgagggctcccatgccccactgctcccctaggagcagacaggcagtcgtctccagcaccacaaagcacccagct

SEQ ID NO: 94979 - DNA, 80 bp, synthetic construct; identical to SEQ ID NO: 34006
  misc_feature 1..80: note = Artificially Synthesized Probe
  source 1..80: mol_type = other DNA

SEQ ID NO: 94980 - DNA, 80 bp, synthetic construct
  misc_feature 1..80: note = Artificially Synthesized Probe
  source 1..80: mol_type = other DNA
cctggggaggggggataagaaggcaccgcttggggctctgggtgcagggagaaccgaggcacggcctgactgggggaggg

SEQ ID NO: 94981 - DNA, 80 bp, synthetic construct
  misc_feature 1..80: note = Artificially Synthesized Probe
  source 1..80: mol_type = other DNA
gttccaacacctcaaccaccccgacgtccaagtttgccttcaaggttgaaaccactccacccaccgtgttggtctattca

SEQ ID NO: 94982 - DNA, 80 bp, synthetic construct
  misc_feature 1..80: note = Artificially Synthesized Probe
  source 1..80: mol_type = other DNA
tactctatgaccactactgagaaaggaacgtcagccatgacatcttctccctctaccaccactgcaagggaaactcccat

SEQ ID NO: 94983 - DNA, 80 bp, synthetic construct; identical to SEQ ID NO: 34007
  misc_feature 1..80: note = Artificially Synthesized Probe
  source 1..80: mol_type = other DNA

SEQ ID NO: 94984 - DNA, 80 bp, synthetic construct
  misc_feature 1..80: note = Artificially Synthesized Probe
  source 1..80: mol_type = other DNA
ggtctacacctacatctgagaccacctacactacttctcccaccagcactgtcacagactccactaccaaaatcgcctac

SEQ ID NO: 94985 - DNA, 80 bp, synthetic construct
  misc_feature 1..80: note = Artificially Synthesized Probe
  source 1..80: mol_type = other DNA
tcatcaaccatctactccacagtcagcacatccacaactgccatctcctcacttccccctacctcaggtactatggtgac

SEQ ID NO: 94986 - DNA, 80 bp, synthetic construct
  misc_feature 1..80: note = Artificially Synthesized Probe
  source 1..80: mol_type = other DNA
gtccacgagtgtcattccatcttcccccagcattcagaatacagaaacctcatcccttgtcagcatgacctctgccacta

SEQ ID NO: 94987 - DNA, 80 bp, synthetic construct
  misc_feature 1..80: note = Artificially Synthesized Probe
  source 1..80: mol_type = other DNA
ccagcaccagtacactccacacaacagctgaatccaccctggcacccactaccaccacctcattcacaacttccacaact

SEQ ID NO: 94988 - DNA, 80 bp, synthetic construct; identical to SEQ ID NO: 34008
  misc_feature 1..80: note = Artificially Synthesized Probe
  source 1..80: mol_type = other DNA

SEQ ID NO: 94989 - DNA, 80 bp, synthetic construct
  misc_feature 1..80: note = Artificially Synthesized Probe
  source 1..80: mol_type = other DNA
ctatcctaattctccgactggtcctggtacaaactccacgacggaaatcacctatcccaccactatgacagagacatcat

SEQ ID NO: 94990 - DNA, 80 bp, synthetic construct
  misc_feature 1..80: note = Artificially Synthesized Probe
  source 1..80: mol_type = other DNA
gcacatacacaactgccatcacctcagttcccactacgttgggtaccatggtaacttctacatccatgatctcatctact

SEQ ID NO: 94991 - DNA, 80 bp, synthetic construct
  misc_feature 1..80: note = Artificially Synthesized Probe
  source 1..80: mol_type = other DNA
gagggtgggatttacgtcttcccagagcagtgcccttcctgtcttgactccttctgtcacctgcctcacgcccccagctt

SEQ ID NO: 94992 - DNA, 80 bp, synthetic construct
  misc_feature 1..80: note = Artificially Synthesized Probe
  source 1..80: mol_type = other DNA
cccactgtccagaatacagaaatctcaatctctgttagcatgacgtctgctaccactcccagtggaggaccaactttcac

SEQ ID NO: 94993 - DNA, 80 bp, synthetic construct; identical to SEQ ID NO: 34009
  misc_feature 1..80: note = Artificially Synthesized Probe
  source 1..80: mol_type = other DNA

SEQ ID NO: 94994 - DNA, 80 bp, synthetic construct
  misc_feature 1..80: note = Artificially Synthesized Probe
  source 1..80: mol_type = other DNA
ccaatacaatgacttctatgagaactacaacctattggcccacagccactaatacattatcaccactcaccagtagcatt

SEQ ID NO: 94995 - DNA, 80 bp, synthetic construct
  misc_feature 1..80: note = Artificially Synthesized Probe
  source 1..80: mol_type = other DNA
tcccaccagcattgtctcagactccacgactgaaatcacctattccacaagtataacaggtacattgtccactgccacta

SEQ ID NO: 94996 - DNA, 80 bp, synthetic construct
  misc_feature 1..80: note = Artificially Synthesized Probe
  source 1..80: mol_type = other DNA
caactgccatctcctcagcttcccctacctcaggtaccatggtaacttccacaaccatgaccccatcttctctgagtaca

SEQ ID NO: 94997 - DNA, 80 bp, synthetic construct
  misc_feature 1..80: note = Artificially Synthesized Probe
  source 1..80: mol_type = other DNA
cagaatacagaaacctcatcccttgtcagcatgacctctgccaccactcccagtttgagaccaactatcacaagtactga

SEQ ID NO: 94998 - DNA, 80 bp, synthetic construct; identical to SEQ ID NO: 34010
  misc_feature 1..80: note = Artificially Synthesized Probe
  source 1..80: mol_type = other DNA

SEQ ID NO: 94999 - DNA, 80 bp, synthetic construct
  misc_feature 1..80: note = Artificially Synthesized Probe
  source 1..80: mol_type = other DNA
tgacttctatgagaactacgacctcttggcccacagccactaatacgttatcaccactcaccagtagcattttatcttct

SEQ ID NO: 95000 - DNA, 80 bp, synthetic construct
  misc_feature 1..80: note = Artificially Synthesized Probe
  source 1..80: mol_type = other DNA
gagtccacaactgaaatcacctatcccaccactatgacagagacatcatctactgccacctctcttccacccacctcttc

SEQ ID NO: 95001 - DNA, 80 bp, synthetic construct
  misc_feature 1..80: note = Artificially Synthesized Probe
  source 1..80: mol_type = other DNA
cactaccttgggtaccatggtgacttctacatccatgatcccatctactgtgagtacaggtatccctacctcacaaccaa

SEQ ID NO: 95002 - DNA, 80 bp, synthetic construct
  misc_feature 1..80: note = Artificially Synthesized Probe
  source 1..80: mol_type = other DNA
atgtgtctgggtacagctgttggtaccagggccggggcagggagctcctgatgtccacttcgcttccaagggtgcgtctg

SEQ ID NO: 95003 - DNA, 80 bp, synthetic construct; identical to SEQ ID NO: 34011
  misc_feature 1..80: note = Artificially Synthesized Probe
  source 1..80: mol_type = other DNA

SEQ ID NO: 95004 - DNA, 80 bp, synthetic construct
  misc_feature 1..80: note = Artificially Synthesized Probe
  source 1..80: mol_type = other DNA
atgtcattcacaacatttacaaagatggaaacaccttcatccactgtagcaactacaggcacaggtcagactacattcac

SEQ ID NO: 95005 - DNA, 80 bp, synthetic construct
  misc_feature 1..80: note = Artificially Synthesized Probe
  source 1..80: mol_type = other DNA
ccctctagggcccacagccactaatacgttaccatcatttaccagtagcgtttcatcttctacgcctgtcccaagtacag

SEQ ID NO: 95006 - DNA, 80 bp, synthetic construct; identical to SEQ ID NO: 34012
  misc_feature 1..80: note = Artificially Synthesized Probe
  source 1..80: mol_type = other DNA

SEQ ID NO: 95007 - DNA, 80 bp, synthetic construct
  misc_feature 1..80: note = Artificially Synthesized Probe
  source 1..80: mol_type = other DNA
ccctcacacagtactcccagattcacttcttcaatcaccaataccaagaccacctcacacagctctcccagcttcacttc

SEQ ID NO: 95008 - DNA, 80 bp, synthetic construct
  misc_feature 1..80: note = Artificially Synthesized Probe
  source 1..80: mol_type = other DNA
ttcttccatcaccaccactgagaccacatcccacaatactcccagcttgacttcttcgatcacaaccaccgagaccacat

SEQ ID NO: 95009 - DNA, 80 bp, synthetic construct
  misc_feature 1..80: note = Artificially Synthesized Probe
  source 1..80: mol_type = other DNA
cacacagtactctcagcttcacttcttcaatcaccaccactgagaccacctcacacagtactcccagcttcacttcctca

SEQ ID NO: 95010 - DNA, 80 bp, synthetic construct; identical to SEQ ID NO: 34013
  misc_feature 1..80: note = Artificially Synthesized Probe
  source 1..80: mol_type = other DNA

SEQ ID NO: 95011 - DNA, 80 bp, synthetic construct
  misc_feature 1..80: note = Artificially Synthesized Probe
  source 1..80: mol_type = other DNA
ttcttcaatcaccaccactgagactacatcccacagtactcccagcttcacttcttcgatcaccaccactgagaccacct

SEQ ID NO: 95012 - DNA, 80 bp, synthetic construct
  misc_feature 1..80: note = Artificially Synthesized Probe
  source 1..80: mol_type = other DNA
cctcacacagtgctcacagcttcacttcttcgatcaccaccaccgagaccacctcacacaatactcgcagcttcacttct

SEQ ID NO: 95013 - DNA, 80 bp, synthetic construct; identical to SEQ ID NO: 34005
  misc_feature 1..80: note = Artificially Synthesized Probe
  source 1..80: mol_type = other DNA

SEQ ID NO: 95014 - DNA, 80 bp, synthetic construct
  misc_feature 1..80: note = Artificially Synthesized Probe
  source 1..80: mol_type = other DNA
tcgtgggtcaccaccaccaagaccacctcacacattactcctggcctcacttcttcaatcaccaccactgagactacctc

SEQ ID NO: 95015 - DNA, 80 bp, synthetic construct
  misc_feature 1..80: note = Artificially Synthesized Probe
  source 1..80: mol_type = other DNA
gactcccacacctgtaaccccatcttctctgagtacagacatcccgaccacaagcctacgaactctcaccccttcgtctg

SEQ ID NO: 95016 - DNA, 80 bp, synthetic construct; identical to SEQ ID NO: 34014
  misc_feature 1..80: note = Artificially Synthesized Probe
  source 1..80: mol_type = other DNA

SEQ ID NO: 95017 - DNA, 80 bp, synthetic construct
  misc_feature 1..80: note = Artificially Synthesized Probe
  source 1..80: mol_type = other DNA
gagacacaaaaagtcagagagactttatttaaatagagttaatttgaagtaaaccagagagttttgtgtgcagaagcatt

SEQ ID NO: 95018 - DNA, 80 bp, synthetic construct
  misc_feature 1..80: note = Artificially Synthesized Probe
  source 1..80: mol_type = other DNA
tgaccttgtgatccgcttgcctcagcctccaaaagtgctgagattaaaggcgtgagccactgcacccggccagaaagttc

SEQ ID NO: 95019 - DNA, 80 bp, synthetic construct; identical to SEQ ID NO: 34035
  misc_feature 1..80: note = Artificially Synthesized Probe
  source 1..80: mol_type = other DNA

SEQ ID NO: 95020 - DNA, 80 bp, synthetic construct
  misc_feature 1..80: note = Artificially Synthesized Probe
  source 1..80: mol_type = other DNA
ctcggctctgtggtctgattgctgatacggggcttcccccacccctctcaggccaccctccccctccccagacaaatctc

SEQ ID NO: 95021 - DNA, 80 bp, synthetic construct
  misc_feature 1..80: note = Artificially Synthesized Probe
  source 1..80: mol_type = other DNA
tgggctcacaccaggatgggacatcctgggggatggaggatcaaggccaggatcctccagacacctccccaggctgcgct

SEQ ID NO: 95022 - DNA, 80 bp, synthetic construct
  misc_feature 1..80: note = Artificially Synthesized Probe
  source 1..80: mol_type = other DNA
aataggaaagtctccttaaaacagcagattgaaaggaagtgacagagaatagacgaacgtaatttccagaccatcgtcct

SEQ ID NO: 95023 - DNA, 80 bp, synthetic construct
  misc_feature 1..80: note = Artificially Synthesized Probe
  source 1..80: mol_type = other DNA
cccggggctttggtttagccaagaacagtcaccctcagaattagtgctggcaacagacagaaagtggcatccctttgatg

SEQ ID NO: 95024 - DNA, 80 bp, synthetic construct; identical to SEQ ID NO: 34036
  misc_feature 1..80: note = Artificially Synthesized Probe
  source 1..80: mol_type = other DNA

SEQ ID NO: 95025 - DNA, 80 bp, synthetic construct
  misc_feature 1..80: note = Artificially Synthesized Probe
  source 1..80: mol_type = other DNA
atgccggccacaggtgggcatgcgcagtcacacccccgccccagcccggccccgccccgccccgcccacccggagagccg

SEQ ID NO: 95026 - DNA, 80 bp, synthetic construct
  misc_feature 1..80: note = Artificially Synthesized Probe
  source 1..80: mol_type = other DNA
aatcttttttttgagacagagtctcgctctgtcaccaggctggagtgcagtgacgcgatctcagctcactgcaacatctg

SEQ ID NO: 95027 - DNA, 80 bp, synthetic construct
  misc_feature 1..80: note = Artificially Synthesized Probe
  source 1..80: mol_type = other DNA
atccgcccacctcggcctcccaaagcgctgggatgacaggcatgagccaccgcgcccagccttgaatcagttctatgtgc

SEQ ID NO: 95028 - DNA, 80 bp, synthetic construct
  misc_feature 1..80: note = Artificially Synthesized Probe
  source 1..80: mol_type = other DNA
aatttcccaaatttgactctgacctcatcccctacccacctccccactctccccagccagccaaatagtcctaccaaaga

SEQ ID NO: 95029 - DNA, 80 bp, synthetic construct; identical to SEQ ID NO: 34037
  misc_feature 1..80: note = Artificially Synthesized Probe
  source 1..80: mol_type = other DNA

SEQ ID NO: 95030 - DNA, 80 bp, synthetic construct
  misc_feature 1..80: note = Artificially Synthesized Probe
  source 1..80: mol_type = other DNA
gctgggtatgacaaaaagtgaattagagagcagatttgtttggaccattacaaagggttgtacccttagaccaaagggtt

SEQ ID NO: 95031 - DNA, 80 bp, synthetic construct
  misc_feature 1..80: note = Artificially Synthesized Probe
  source 1..80: mol_type = other DNA
ttagtcaggcatggtggcgggtgcctgtaatctcagctattcaggaggctgaaacagaagaatcgcttgaacccgggaag

SEQ ID NO: 95032 - DNA, 80 bp, synthetic construct; identical to SEQ ID NO: 34038
  misc_feature 1..80: note = Artificially Synthesized Probe
  source 1..80: mol_type = other DNA

SEQ ID NO: 95033 - DNA, 80 bp, synthetic construct
  misc_feature 1..80: note = Artificially Synthesized Probe
  source 1..80: mol_type = other DNA
tgtgacattttagacagggcggccaagagaggcctcaccaaggaggggacattggaatgaagacgtaaagaaggtgaggg

SEQ ID NO: 95034 - DNA, 80 bp, synthetic construct
  misc_feature 1..80: note = Artificially Synthesized Probe
  source 1..80: mol_type = other DNA
tggagggggctgggaaggcatccagcgctaggatggatggagggggctgggaaggggtccagcgctaggatggagtggag

SEQ ID NO: 95035 - DNA, 80 bp, synthetic construct
  misc_feature 1..80: note = Artificially Synthesized Probe
  source 1..80: mol_type = other DNA
gggaagtctctgaagggtttgagcagaggaatgccaggagtggaagaatctgctcagtgaatgcagatgcacagggaaaa

SEQ ID NO: 95036 - DNA, 80 bp, synthetic construct
  misc_feature 1..80: note = Artificially Synthesized Probe
  source 1..80: mol_type = other DNA
cctcgcttgactgaggggcaggactggcctagacacaggactgcaggttcttttcccacaaggagacagcagggaagcag

SEQ ID NO: 95037 - DNA, 80 bp, synthetic construct; identical to SEQ ID NO: 34039
  misc_feature 1..80: note = Artificially Synthesized Probe
  source 1..80: mol_type = other DNA

SEQ ID NO: 95038 - DNA, 80 bp, synthetic construct
  misc_feature 1..80: note = Artificially Synthesized Probe
  source 1..80: mol_type = other DNA
cggggcggtgggagtgcagggccagagcggtttccagcttctgagtctagaaacacctgctgcagtgagagaggacactc

SEQ ID NO: 95039 - DNA, 80 bp, synthetic construct
  misc_feature 1..80: note = Artificially Synthesized Probe
  source 1..80: mol_type = other DNA
tgcccctctgccccaggaccctgcccagactcacaggtcattccaaagtggaaaagcatctcctcagggctccctggggg

SEQ ID NO: 95040 - DNA, 80 bp, synthetic construct
  misc_feature 1..80: note = Artificially Synthesized Probe
  source 1..80: mol_type = other DNA
tgctcttgcacctgctgtcaggcctccaggggagccgggaggacgggccctcacaccctgcccgtctgccttcgggaggg

SEQ ID NO: 95041 - DNA, 80 bp, synthetic construct
  misc_feature 1..80: note = Artificially Synthesized Probe
  source 1..80: mol_type = other DNA
aagcccctcggctcccggcccgctctgtgccccaagggttctgctccaaggaggcggagaaagggaggccgagcagggct

SEQ ID NO: 95042 - DNA, 80 bp, synthetic construct; identical to SEQ ID NO: 34040
  misc_feature 1..80: note = Artificially Synthesized Probe
  source 1..80: mol_type = other DNA

SEQ ID NO: 95043 - DNA, 80 bp, synthetic construct
  misc_feature 1..80: note = Artificially Synthesized Probe
  source 1..80: mol_type = other DNA
acgccccgctcgggggtagaggctgcgctctcttggccctgcaccgccacgcaccgggccctgcaccgccacgcaccggg

SEQ ID NO: 95044 - DNA, 80 bp, synthetic construct
  misc_feature 1..80: note = Artificially Synthesized Probe
  source 1..80: mol_type = other DNA
accgccacgcaccgggccctgcaccacaacgcacccggccctgcaccgcaaagcactcggcgcggcaccgccacgcgccc

SEQ ID NO: 95045 - DNA, 80 bp, synthetic construct
  misc_feature 1..80: note = Artificially Synthesized Probe
  source 1..80: mol_type = other DNA
gtctggttatccagcaggacacggattgcgtcgtgaggctcaaggagccattggacctggaaggagatgggagggggcct

SEQ ID NO: 95046 - DNA, 80 bp, synthetic construct; identical to SEQ ID NO: 34041
  misc_feature 1..80: note = Artificially Synthesized Probe
  source 1..80: mol_type = other DNA

SEQ ID NO: 95047 - DNA, 80 bp, synthetic construct
  misc_feature 1..80: note = Artificially Synthesized Probe
  source 1..80: mol_type = other DNA
aggtaatgtcatccccattcttactaggagaaaaccaaattaagtagtttcttcgaagccaagcagctgggaaaccgtgg

SEQ ID NO: 95048 - DNA, 80 bp, synthetic construct
  misc_feature 1..80: note = Artificially Synthesized Probe
  source 1..80: mol_type = other DNA
aaaaatcagctgggcgtggtggtgcatgcctgtagtcccaactactcgggaggctgaggcaggagaatcgcttgaacgcg

SEQ ID NO: 95049 - DNA, 80 bp, synthetic construct
  misc_feature 1..80: note = Artificially Synthesized Probe
  source 1..80: mol_type = other DNA
ggttcccggcacccctcactcaccgtgacggggcccaggctgctggagcggtactgagccgcaaaggcgatgaagttggt

SEQ ID NO: 95050 - DNA, 80 bp, synthetic construct
  misc_feature 1..80: note = Artificially Synthesized Probe
  source 1..80: mol_type = other DNA
aaaaaagagatgctgcctcagcatgacaaatcatgtgtagggctgaggttcctcactgcagtcaggtgcggcacttgtcc

SEQ ID NO: 95051 - DNA, 80 bp, synthetic construct; identical to SEQ ID NO: 34042
  misc_feature 1..80: note = Artificially Synthesized Probe
  source 1..80: mol_type = other DNA

SEQ ID NO: 95052 - DNA, 80 bp, synthetic construct
  misc_feature 1..80: note = Artificially Synthesized Probe
  source 1..80: mol_type = other DNA
gcggcagcaccagctctgtggctccagttcctgggctgcggagaacagcagtgagtcggggaggttgaggacctggagaa

SEQ ID NO: 95053 - DNA, 80 bp, synthetic construct
  misc_feature 1..80: note = Artificially Synthesized Probe
  source 1..80: mol_type = other DNA
tggctttggaatccagcatggcccttctcatgaccttgggcagtgaatagggtgctgtctcttttgcaggcattggggcc

SEQ ID NO: 95054 - DNA, 80 bp, synthetic construct
  misc_feature 1..80: note = Artificially Synthesized Probe
  source 1..80: mol_type = other DNA
acagaccacgtgaccccacacccctgcgctctccagctcccttggagcgtctctgtgggagctgactctcagtcttcccc

SEQ ID NO: 95055 - DNA, 80 bp, synthetic construct; identical to SEQ ID NO: 34043
  misc_feature 1..80: note = Artificially Synthesized Probe
  source 1..80: mol_type = other DNA

SEQ ID NO: 95056 - DNA, 80 bp, synthetic construct
  misc_feature 1..80: note = Artificially Synthesized Probe
  source 1..80: mol_type = other DNA
tgcacagctgcctactgccgaggccccagcgacctgaaacaagtccagtcccactcaggcccaggctggggctgccaggg

SEQ ID NO: 95057 - DNA, 80 bp, synthetic construct
  misc_feature 1..80: note = Artificially Synthesized Probe
  source 1..80: mol_type = other DNA
agacctggttccagccccagctgggccaccgaggctggctcttcagccactgcaggcactcgagacggtagttgggcctt

SEQ ID NO: 95058 - DNA, 80 bp, synthetic construct
  misc_feature 1..80: note = Artificially Synthesized Probe
  source 1..80: mol_type = other DNA
gacccaagtcagatgggcaacaattcctcccccaaagcccctcgcttgacttagcgtctgcttctgacgaccaaacgtgg

SEQ ID NO: 95059 - DNA, 80 bp, synthetic construct; identical to SEQ ID NO: 34026
  misc_feature 1..80: note = Artificially Synthesized Probe
  source 1..80: mol_type = other DNA

SEQ ID NO: 95060 - DNA, 80 bp, synthetic construct; identical to SEQ ID NO: 34044
  misc_feature 1..80: note = Artificially Synthesized Probe
  source 1..80: mol_type = other DNA

SEQ ID NO: 95061 - DNA, 80 bp, synthetic construct
  misc_feature 1..80: note = Artificially Synthesized Probe
  source 1..80: mol_type = other DNA
tcccaggttcaaacaattctcctgcctcaacctattgagtagctggaattacaggtgtgcaccacaacgtctggctaatt

SEQ ID NO: 95062 - DNA, 80 bp, synthetic construct
  misc_feature 1..80: note = Artificially Synthesized Probe
  source 1..80: mol_type = other DNA
gttctcattcctgctctggacaggacacttggagtattgtctgaactgcccattcaaatcccacctcccacaagaccctg

SEQ ID NO: 95063 - DNA, 80 bp, synthetic construct
  misc_feature 1..80: note = Artificially Synthesized Probe
  source 1..80: mol_type = other DNA
gaactgtgtgggggaggcccttcaggatggccgtgatgttagggaggtgccctctaggactgcgatggtgtatgggctgg

SEQ ID NO: 95064 - DNA, 80 bp, synthetic construct
  misc_feature 1..80: note = Artificially Synthesized Probe
  source 1..80: mol_type = other DNA
tctcaggcctctgccgtgcacaggctcttgcctcgcggttgcaaggcgtccattcatcccgctagccggtcagcagctgg

SEQ ID NO: 95065 - DNA, 80 bp, synthetic construct; identical to SEQ ID NO: 34045
  misc_feature 1..80: note = Artificially Synthesized Probe
  source 1..80: mol_type = other DNA

SEQ ID NO: 95066 - DNA, 80 bp, synthetic construct
  misc_feature 1..80: note = Artificially Synthesized Probe
  source 1..80: mol_type = other DNA
gggattacagtggcatctacctcactgtattgtgaggattaaatgcagtaacatctgcaaatccctcagaactgagtgag

SEQ ID NO: 95067 - DNA, 80 bp, synthetic construct
  misc_feature 1..80: note = Artificially Synthesized Probe
  source 1..80: mol_type = other DNA
catcaccatcaccaccaccatcaccatcaccaccaccatcgccaccaccatcatcaccatcaccattaccattgccacca

SEQ ID NO: 95068 - DNA, 80 bp, synthetic construct
  misc_feature 1..80: note = Artificially Synthesized Probe
  source 1..80: mol_type = other DNA
agcttgggttccccagcactgtcctccacctcctggccacagccctatgcacctgcagcggggcccactgggcaggtgct

SEQ ID NO: 95069 - DNA, 80 bp, synthetic construct
  misc_feature 1..80: note = Artificially Synthesized Probe
  source 1..80: mol_type = other DNA
ccaccaccatcaccatcgccaccaccaccatcaccaccaccaccaccatcaccaccatcattgccaccaccatcatcacc

SEQ ID NO: 95070 - DNA, 80 bp, synthetic construct; identical to SEQ ID NO: 34046
  misc_feature 1..80: note = Artificially Synthesized Probe
  source 1..80: mol_type = other DNA

SEQ ID NO: 95071 - DNA, 80 bp, synthetic construct
  misc_feature 1..80: note = Artificially Synthesized Probe
  source 1..80: mol_type = other DNA
aagaaactagtgaaagcagtgtaatcaaaggggtaacctgaacacactcaatgtaagagaagacatttgcagcaattatc

SEQ ID NO: 95072 - DNA, 80 bp, synthetic construct
  misc_feature 1..80: note = Artificially Synthesized Probe
  source 1..80: mol_type = other DNA
atataagcttttgggtgccccctggataagtgggtaattctcaggaagtcaggaaggcagattctagcctcagatgtctg

SEQ ID NO: 95073 - DNA, 80 bp, synthetic construct; identical to SEQ ID NO: 34047
  misc_feature 1..80: note = Artificially Synthesized Probe
  source 1..80: mol_type = other DNA

SEQ ID NO: 95074 - DNA, 80 bp, synthetic construct
  misc_feature 1..80: note = Artificially Synthesized Probe
  source 1..80: mol_type = other DNA
cttgccccaggatgggagtgtgtgtgcagcgaaagccgactctacacccctccctgccaactgctcagtgctgacagccc

SEQ ID NO: 95075 - DNA, 80 bp, synthetic construct
  misc_feature 1..80: note = Artificially Synthesized Probe
  source 1..80: mol_type = other DNA
aaaacacagggatgcccgtgagagatccggggtctcctctcttatgtccccccgcccgtcccacagccctgctctgacac

SEQ ID NO: 95076 - DNA, 80 bp, synthetic construct
  misc_feature 1..80: note = Artificially Synthesized Probe
  source 1..80: mol_type = other DNA
ctgggttacaattcagttagatgagtgtttgttagagaaagctaccagaacctgagatcagccaagataccagagagcta

SEQ ID NO: 95077 - DNA, 80 bp, synthetic construct
  misc_feature 1..80: note = Artificially Synthesized Probe
  source 1..80: mol_type = other DNA
tgactttagaccaggcataaggaagaacttggtgactacaagagcggggtcctcggagggaggacagaggagatggtgtg

SEQ ID NO: 95078 - DNA, 80 bp, synthetic construct; identical to SEQ ID NO: 34048
  misc_feature 1..80: note = Artificially Synthesized Probe
  source 1..80: mol_type = other DNA

SEQ ID NO: 95079 - DNA, 80 bp, synthetic construct
  misc_feature 1..80: note = Artificially Synthesized Probe
  source 1..80: mol_type = other DNA
cagaaagcaaccgatgaacactaaatcagtaccttttcagccacgaattccttttcgggtgtttatcctgagaaataatt

SEQ ID NO: 95080 - DNA, 80 bp, synthetic construct
  misc_feature 1..80: note = Artificially Synthesized Probe
  source 1..80: mol_type = other DNA
ggggcttgctataattagcaatctttcctagagccagagaggattttggaagagtggcccctgcctaggattctaggatg

SEQ ID NO: 95081 - DNA, 80 bp, synthetic construct
  misc_feature 1..80: note = Artificially Synthesized Probe
  source 1..80: mol_type = other DNA
ccccgttgtttgtcatctttctaatccaagactcggcctgctggactagcaggctgtgttcaccatagaacgtctcgtat

SEQ ID NO: 95082 - DNA, 80 bp, synthetic construct; identical to SEQ ID NO: 34049
  misc_feature 1..80: note = Artificially Synthesized Probe
  source 1..80: mol_type = other DNA

SEQ ID NO: 95083 - DNA, 80 bp, synthetic construct
  misc_feature 1..80: note = Artificially Synthesized Probe
  source 1..80: mol_type = other DNA
ttggagcctccacactgccctgtccgtggcaggggcacggtccacacttcctgcagtagctttcatcacatttcctctga

SEQ ID NO: 95084 - DNA, 80 bp, synthetic construct; identical to SEQ ID NO: 34024
  misc_feature 1..80: note = Artificially Synthesized Probe
  source 1..80: mol_type = other DNA

SEQ ID NO: 95085 - DNA, 80 bp, synthetic construct
  misc_feature 1..80: note = Artificially Synthesized Probe
  source 1..80: mol_type = other DNA
tggtcagtctcgcggccgggttggggtattcctggtcagtctcgtggttgggttggggtattcctggtcagtctcgtggt

SEQ ID NO: 95086 - DNA, 80 bp, synthetic construct
  misc_feature 1..80: note = Artificially Synthesized Probe
  source 1..80: mol_type = other DNA
tgggttggtgtattcctggtcagtctcgtggttgggttggggtattcctggtcagtctcgtggttgggttggggtattcc

SEQ ID NO: 95087 - DNA, 80 bp, synthetic construct; identical to SEQ ID NO: 34050
  misc_feature 1..80: note = Artificially Synthesized Probe
  source 1..80: mol_type = other DNA

SEQ ID NO: 95088 - DNA, 80 bp, synthetic construct
  misc_feature 1..80: note = Artificially Synthesized Probe
  source 1..80: mol_type = other DNA
catcgtcccagaacggagccaccagggccacagggtcccggcctgtgaagcctgttgggagtgggttggggtaggagaaa

SEQ ID NO: 95089 - DNA, 80 bp, synthetic construct
  misc_feature 1..80: note = Artificially Synthesized Probe
  source 1..80: mol_type = other DNA
taacaacccctggaagtcacctcctgtgtcctgttttggggagagccctttccatatattctcacagaatgctccgccct

SEQ ID NO: 95090 - DNA, 80 bp, synthetic construct
  misc_feature 1..80: note = Artificially Synthesized Probe
  source 1..80: mol_type = other DNA
cttcctatggaaaaagtttcctagggaaaaaggttcctagggaaaaaggttcctgtggaaaaaggttcctatggaaaatg

SEQ ID NO: 95091 - DNA, 80 bp, synthetic construct
  misc_feature 1..80: note = Artificially Synthesized Probe
  source 1..80: mol_type = other DNA
agtttgcgacacattaggtggggctcagggagtggaaccctctctccatcgctcagggggtggagccctccctccatcgc

SEQ ID NO: 95092 - DNA, 80 bp, synthetic construct
  misc_feature 1..80: note = Artificially Synthesized Probe
  source 1..80: mol_type = other DNA
caccctcccttcatcgctcaggggtgtagacaccctcccttcatcgctcaggggtgtagacaccctccctccatcgctca

SEQ ID NO: 95093 - DNA, 80 bp, synthetic construct
  misc_feature 1..80: note = Artificially Synthesized Probe
  source 1..80: mol_type = other DNA
caccccatctccatcacttagggggtggaaacctctctctatcactcagcaggtgtggacaccctctctccatccctcag

SEQ ID NO: 95094 - DNA, 80 bp, synthetic construct; identical to SEQ ID NO: 34051
  misc_feature 1..80: note = Artificially Synthesized Probe
  source 1..80: mol_type = other DNA

SEQ ID NO: 95095 - DNA, 80 bp, synthetic construct
  misc_feature 1..80: note = Artificially Synthesized Probe
  source 1..80: mol_type = other DNA
tgtagacatcctctctccatcgctcaggggtgtagacaccccctctccatcgctcaggggtgtagacaccctctctccat

SEQ ID NO: 95096 - DNA, 80 bp, synthetic construct
  misc_feature 1..80: note = Artificially Synthesized Probe
  source 1..80: mol_type = other DNA
taggcacccccctccatcgctcaggggtgtagacaccctctctccatcactcaggggtgcagacaccccatctccatcac

SEQ ID NO: 95097 - DNA, 80 bp, synthetic construct
  misc_feature 1..80: note = Artificially Synthesized Probe
  source 1..80: mol_type = other DNA
tggacaccctctcgccatcgctcagcaggtgtggacaccctctctctatcgctcagcaggtgtggacaccctctcgccat

SEQ ID NO: 95098 - DNA, 80 bp, synthetic construct; identical to SEQ ID NO: 34052
  misc_feature 1..80: note = Artificially Synthesized Probe
  source 1..80: mol_type = other DNA

SEQ ID NO: 95099 - DNA, 80 bp, synthetic construct
  misc_feature 1..80: note = Artificially Synthesized Probe
  source 1..80: mol_type = other DNA
ggatggacgaggggcccagccaaggctgcttccattcccgcttcctctgggttccgtctcgaagcaggagagagaagtgg

SEQ ID NO: 95100 - DNA, 80 bp, synthetic construct
  misc_feature 1..80: note = Artificially Synthesized Probe
  source 1..80: mol_type = other DNA
gggaagagggaaactcctgggccaggacagagaagagcaggaagtccaagtgggcctgggccttctttagggctgaaagg

SEQ ID NO: 95101 - DNA, 80 bp, synthetic construct; identical to SEQ ID NO: 34027
  misc_feature 1..80: note = Artificially Synthesized Probe
  source 1..80: mol_type = other DNA

SEQ ID NO: 95102 - DNA, 80 bp, synthetic construct; identical to SEQ ID NO: 34053
  misc_feature 1..80: note = Artificially Synthesized Probe
  source 1..80: mol_type = other DNA

SEQ ID NO: 95103 - DNA, 80 bp, synthetic construct
  misc_feature 1..80: note = Artificially Synthesized Probe
  source 1..80: mol_type = other DNA
tctctacttaaaatacaaaaattagccgggtgtggtggcgcatgcctgtaatcccagccactcgggaggctgaggcagga

SEQ ID NO: 95104 - DNA, 80 bp, synthetic construct
  misc_feature 1..80: note = Artificially Synthesized Probe
  source 1..80: mol_type = other DNA
ggaatgagacttgtttcctaagacggcctttctccagataaacttgaagactcctccaatttaacctaggactccctaga

SEQ ID NO: 95105 - DNA, 80 bp, synthetic construct
  misc_feature 1..80: note = Artificially Synthesized Probe
  source 1..80: mol_type = other DNA
tgcaaatcggaccgctccaggcaccacttgttaaatgccatttgtacaatgcaaaactgagtcctccctggctcccgttg

SEQ ID NO: 95106 - DNA, 80 bp, synthetic construct; identical to SEQ ID NO: 34054
  misc_feature 1..80: note = Artificially Synthesized Probe
  source 1..80: mol_type = other DNA

SEQ ID NO: 95107 - DNA, 80 bp, synthetic construct
  misc_feature 1..80: note = Artificially Synthesized Probe
  source 1..80: mol_type = other DNA
tcataccttccacacccataccttccacaccgataccttccacacccataccttccacacccataccttccacatccata

SEQ ID NO: 95108 - DNA, 80 bp, synthetic construct
  misc_feature 1..80: note = Artificially Synthesized Probe
  source 1..80: mol_type = other DNA
ccataccttccacacccataccttccacacccataccttccacagtcataccttccacacccataccttccacacccata

SEQ ID NO: 95109 - DNA, 80 bp, synthetic construct
  misc_feature 1..80: note = Artificially Synthesized Probe
  source 1..80: mol_type = other DNA
ccataccttccacagccataccttccacacccataccttccacagtcataccttccacacccataccttccacacccata

SEQ ID NO: 95110 - DNA, 80 bp, synthetic construct
  misc_feature 1..80: note = Artificially Synthesized Probe
  source 1..80: mol_type = other DNA
ccataccttccacacccataccttccacacccataccttccacacccataccttccacacccataccttccgcacccata

SEQ ID NO: 95111 - DNA, 80 bp, synthetic construct
  misc_feature 1..80: note = Artificially Synthesized Probe
  source 1..80: mol_type = other DNA
tccaacattaggaatgatttgatccttcagtaaaaaatggatgtctgaaggttcctaggcataaaagaaagttcagaagg

SEQ ID NO: 95112 - DNA, 80 bp, synthetic construct
  misc_feature 1..80: note = Artificially Synthesized Probe
  source 1..80: mol_type = other DNA
ccataccttccacacccataccttccacagtcataccttccacacccataccttccacacccataccttccacaccctta

SEQ ID NO: 95113 - DNA, 80 bp, synthetic construct; identical to SEQ ID NO: 34055
  misc_feature 1..80: note = Artificially Synthesized Probe
  source 1..80: mol_type = other DNA

SEQ ID NO: 95114 - DNA, 80 bp, synthetic construct
  misc_feature 1..80: note = Artificially Synthesized Probe
  source 1..80: mol_type = other DNA
ccataccttccacagtcataccttccacacccataccttccacacccataccttccacatccataccttccacacccata

SEQ ID NO: 95115 - DNA, 80 bp, synthetic construct; identical to SEQ ID NO: 34056
  misc_feature 1..80: note = Artificially Synthesized Probe
  source 1..80: mol_type = other DNA

SEQ ID NO: 95116 - DNA, 80 bp, synthetic construct
  misc_feature 1..80: note = Artificially Synthesized Probe
  source 1..80: mol_type = other DNA
ccataccttccacacccataccttccacacccataccttccacacccataccttccacacccataccttccacagtcata

SEQ ID NO: 95117 - DNA, 80 bp, synthetic construct
  misc_feature 1..80: note = Artificially Synthesized Probe
  source 1..80: mol_type = other DNA
ccataccttccacacccataccttccacatccataccttccacacccataccttccacacccataccttccacacccata

SEQ ID NO: 95118 - DNA, 80 bp, synthetic construct
  misc_feature 1..80: note = Artificially Synthesized Probe
  source 1..80: mol_type = other DNA
agtcctctaaccgccgctaccggaccgtccatctatcccttgctgaatggcactggggtcatttctctgtctccagctcc

SEQ ID NO: 95119 - DNA, 80 bp, synthetic construct
  misc_feature 1..80: note = Artificially Synthesized Probe
  source 1..80: mol_type = other DNA
ccttcagttacatcacccctcaaaaggcacaggcctcacctgtatggcctcacctctctcaggcaggatggggatggggg

SEQ ID NO: 95120 - DNA, 80 bp, synthetic construct
  misc_feature 1..80: note = Artificially Synthesized Probe
  source 1..80: mol_type = other DNA
taaaaattataggttttccttaattgcatagtcagggcttgcctccctgcgcctcctaccccaactccccaacatacagt

SEQ ID NO: 95121 - DNA, 80 bp, synthetic construct; identical to SEQ ID NO: 34057
  misc_feature 1..80: note = Artificially Synthesized Probe
  source 1..80: mol_type = other DNA

SEQ ID NO: 95122 - DNA, 80 bp, synthetic construct
  misc_feature 1..80: note = Artificially Synthesized Probe
  source 1..80: mol_type = other DNA
aggctgaattccgccaaggggcccactgggagacataaaggcgaggcagttggcagctacctggtgtttccatcttcaga

SEQ ID NO: 95123 - DNA, 80 bp, synthetic construct
  misc_feature 1..80: note = Artificially Synthesized Probe
  source 1..80: mol_type = other DNA
ctgtggatgctgaggaagtgtcggtgacaggaagaggggtggtgtcacctgtggatgctgaggaagtgctggtgacagga

SEQ ID NO: 95124 - DNA, 80 bp, synthetic construct; identical to SEQ ID NO: 34058
  misc_feature 1..80: note = Artificially Synthesized Probe
  source 1..80: mol_type = other DNA

SEQ ID NO: 95125 - DNA, 80 bp, synthetic construct
  misc_feature 1..80: note = Artificially Synthesized Probe
  source 1..80: mol_type = other DNA
ctgtggatgctgaggaagtgctggtgacaggaacaggggtggcgtgacctgtggatgctgaggaagggctggtgacagga

SEQ ID NO: 95126 - DNA, 80 bp, synthetic construct
  misc_feature 1..80: note = Artificially Synthesized Probe
  source 1..80: mol_type = other DNA
ctgtggatactgaggaagtgtcggtgacaggaagaggggtggtgtcacctgtggatgctgaggaagtgctggtgacagga

SEQ ID NO: 95127 - DNA, 80 bp, synthetic construct; identical to SEQ ID NO: 34060
  misc_feature 1..80: note = Artificially Synthesized Probe
  source 1..80: mol_type = other DNA

SEQ ID NO: 95128 - DNA, 80 bp, synthetic construct
  misc_feature 1..80: note = Artificially Synthesized Probe
  source 1..80: mol_type = other DNA
ctgtggatgctgaggaagtgtcggtgacaggaagaggggtggtgtcacctgtggatgctgaggaagcgtcggtgacagga

SEQ ID NO: 95129 - DNA, 80 bp, synthetic construct
  misc_feature 1..80: note = Artificially Synthesized Probe
  source 1..80: mol_type = other DNA
cccctgccctgttctctgccctatacagaaaataggacgtgttattcctttgtttctctgacaagcttgccaacttattc

SEQ ID NO: 95130 - DNA, 80 bp, synthetic construct; identical to SEQ ID NO: 34059
  misc_feature 1..80: note = Artificially Synthesized Probe
  source 1..80: mol_type = other DNA

SEQ ID NO: 95131 - DNA, 80 bp, synthetic construct
  misc_feature 1..80: note = Artificially Synthesized Probe
  source 1..80: mol_type = other DNA
ctgtggatactgaggaaaggctggtgacaggaagaggggtggcctgacctgtggatgctgaggaagtgtccgtgacagga

SEQ ID NO: 95132 - DNA, 80 bp, synthetic construct
  misc_feature 1..80: note = Artificially Synthesized Probe
  source 1..80: mol_type = other DNA
ctgtggatgccgaggaagcgtcggtgacaggaagaggggtggtgtcacctgtggatactgaggaaaggctggtgacagga

SEQ ID NO: 95133 - DNA, 80 bp, synthetic construct
  misc_feature 1..80: note = Artificially Synthesized Probe
  source 1..80: mol_type = other DNA
ctgtagatgctgaggaagggctggtgacaggaagaggggtggtgtcacctgtggatgctgaggaagtgtcggtgacagga

SEQ ID NO: 95134 - DNA, 80 bp, synthetic construct; identical to SEQ ID NO: 34062
  misc_feature 1..80: note = Artificially Synthesized Probe
  source 1..80: mol_type = other DNA

SEQ ID NO: 95135 - DNA, 80 bp, synthetic construct
  misc_feature 1..80: note = Artificially Synthesized Probe
  source 1..80: mol_type = other DNA
ctgtggatgctgaggaagcgtcggtgacaagaagaggagtggcgtgacctgtggatactgaggaagtctcggtgacaaga

SEQ ID NO: 95136 - DNA, 80 bp, synthetic construct
  misc_feature 1..80: note = Artificially Synthesized Probe
  source 1..80: mol_type = other DNA
cggtggatgctgaggaagggctagtgacaggaagaggcgtggtgtcacctgtggatactgaggaaaggctggtgacagga

SEQ ID NO: 95137 - DNA, 80 bp, synthetic construct; identical to SEQ ID NO: 95123
  misc_feature 1..80: note = Artificially Synthesized Probe
  source 1..80: mol_type = other DNA

SEQ ID NO: 95138 - DNA, 80 bp, synthetic construct
  misc_feature 1..80: note = Artificially Synthesized Probe
  source 1..80: mol_type = other DNA
ctgtggatgctgaggaagtgtcggtgacaggaagcggggtggcgtgaccggtggatgctgaggaagggctggtgacatga

SEQ ID NO: 95139 - DNA, 80 bp, synthetic construct
  misc_feature 1..80: note = Artificially Synthesized Probe
  source 1..80: mol_type = other DNA
gcctcggggaggtgctggggggtgttgaggcctggcctggggaaggtgctggggggtgttgaggcctggcctggcctggg

SEQ ID NO: 95140 - DNA, 80 bp, synthetic construct
  misc_feature 1..80: note = Artificially Synthesized Probe
  source 1..80: mol_type = other DNA
ctatggatgctgaggaagtgtcggtgacaggaagaagggtggcgtgacctgtggatgctgaggaagtgtcggtgtcagga

SEQ ID NO: 95141 - DNA, 80 bp, synthetic construct; identical to SEQ ID NO: 34061
  misc_feature 1..80: note = Artificially Synthesized Probe
  source 1..80: mol_type = other DNA

SEQ ID NO: 95142 - DNA, 80 bp, synthetic construct
  misc_feature 1..80: note = Artificially Synthesized Probe
  source 1..80: mol_type = other DNA
ctgaggatgctgaggaagggatggtgacaggaagagaggtggcatgacctgtgaacactgaggaagcgtcggtgacagga

SEQ ID NO: 95143 - DNA, 80 bp, synthetic construct
  misc_feature 1..80: note = Artificially Synthesized Probe
  source 1..80: mol_type = other DNA
ctgtggatgctgaggaagtgtcggtgacaggaagaggggtggtgtcacctgtggatactgaggaagtctcggtgacaaga

SEQ ID NO: 95144 - DNA, 80 bp, synthetic construct; identical to SEQ ID NO: 95136
  misc_feature 1..80: note = Artificially Synthesized Probe
  source 1..80: mol_type = other DNA

SEQ ID NO: 95145 - DNA, 80 bp, synthetic construct
  misc_feature 1..80: note = Artificially Synthesized Probe
  source 1..80: mol_type = other DNA
ctgtggatgctgagtaagtgtcggtgacaggaagaggggtggtgtcacctgtggatgctgaggaagtgctggtgacagga

SEQ ID NO: 95146 - DNA, 80 bp, synthetic construct
  misc_feature 1..80: note = Artificially Synthesized Probe
  source 1..80: mol_type = other DNA
ctgtggatgctgagggagtgtcggtgacaggtagaggggtggtgtgacctgtagatgctgaggaagggctggtgacagga

SEQ ID NO: 95147 - DNA, 80 bp, synthetic construct
  misc_feature 1..80: note = Artificially Synthesized Probe
  source 1..80: mol_type = other DNA
ctgtggatgccgaggaaacgttggtgacaggaagacgggtggtgtcacctgtggaagctgaggaaaggccggtgacagga

SEQ ID NO: 95148 - DNA, 80 bp, synthetic construct
  misc_feature 1..80: note = Artificially Synthesized Probe
  source 1..80: mol_type = other DNA
cctcccgctggagagcagagacgatgggggtgtccctgtgtatgcttaagtgcaatggcattttaagaaaactattagca

SEQ ID NO: 95149 - DNA, 80 bp, synthetic construct
  misc_feature 1..80: note = Artificially Synthesized Probe
  source 1..80: mol_type = other DNA
ctgtggatactgaggaagcgtcggtgacatgaagaggggtggcgtgacctgtggatgctgaggaagggctagtgacagga

SEQ ID NO: 95150 - DNA, 80 bp, synthetic construct
  misc_feature 1..80: note = Artificially Synthesized Probe
  source 1..80: mol_type = other DNA
ctgtggatactgaggaaaggctggtgacaggaagagaggtggcgtgacctgtggacactgaggaagcgtcggtgacagga

SEQ ID NO: 95151 - DNA, 80 bp, synthetic construct
  misc_feature 1..80: note = Artificially Synthesized Probe
  source 1..80: mol_type = other DNA
ctgtggatgctgaggaagtgtcggtgacaggaagaggggtggcgtgacctgtggatgctgaggaagtgtcggtgacagga

SEQ ID NO: 95152 - DNA, 80 bp, synthetic construct
  misc_feature 1..80: note = Artificially Synthesized Probe
  source 1..80: mol_type = other DNA
ctgtggataatgaggaagcatcggtgtcatgaagagcggtggcgtgacctgtggatactgaggaagcgtcggtgacaaga

SEQ ID NO: 95153 - DNA, 80 bp, synthetic construct; identical to SEQ ID NO: 34064
  misc_feature 1..80: note = Artificially Synthesized Probe
  source 1..80: mol_type = other DNA

SEQ ID NO: 95154 - DNA, 80 bp, synthetic construct; identical to SEQ ID NO: 34063
  misc_feature 1..80: note = Artificially Synthesized Probe
  source 1..80: mol_type = other DNA

SEQ ID NO: 95155 - DNA, 80 bp, synthetic construct
  misc_feature 1..80: note = Artificially Synthesized Probe
  source 1..80: mol_type = other DNA
ctgtggatactgaggaagcgtcggtgacaagaagagaggtggcgtgacctgtggacactgaggaagcgtcggtgacagga

SEQ ID NO: 95156 - DNA, 80 bp, synthetic construct; identical to SEQ ID NO: 34065
  misc_feature 1..80: note = Artificially Synthesized Probe
  source 1..80: mol_type = other DNA

SEQ ID NO: 95157 - DNA, 80 bp, synthetic construct; identical to SEQ ID NO: 34028
  misc_feature 1..80: note = Artificially Synthesized Probe
  source 1..80: mol_type = other DNA

SEQ ID NO: 95158 - DNA, 80 bp, synthetic construct
  misc_feature 1..80: note = Artificially Synthesized Probe
  source 1..80: mol_type = other DNA
ctgtggatactgaggaaaggctggtgacaggaagaggggtggcctgacctgtggatgccgaggaaacgtcggtgacagga

SEQ ID NO: 95159 - DNA, 80 bp, synthetic construct
  misc_feature 1..80: note = Artificially Synthesized Probe
  source 1..80: mol_type = other DNA
ctgtggataatgaggaagcattggtgacaggaagaggggtggtgtcacctgtggatgctgaggaagtgtcggtgacagga

SEQ ID NO: 95160 - DNA, 80 bp, synthetic construct
  misc_feature 1..80: note = Artificially Synthesized Probe
  source 1..80: mol_type = other DNA
ctgtggatactgaggaagcgtcggtgacaggaagaggggtggtgtcacctgtggatgctgaggaagggctagtgacagga

SEQ ID NO: 95161 - DNA, 80 bp, synthetic construct
  misc_feature 1..80: note = Artificially Synthesized Probe
  source 1..80: mol_type = other DNA
ctgtggatactgaggaagtgtcggtgacaagaagagaggtggcctgacctgtggatgctgaggaagtgtcggtgacagga

SEQ ID NO: 95162 - DNA, 80 bp, synthetic construct
  misc_feature 1..80: note = Artificially Synthesized Probe
  source 1..80: mol_type = other DNA
ctgtggatgctgaggaagggctagtgacaggaagaggcgtggtgtcacctgtggatactgaggaaaggctggtgacagga

SEQ ID NO: 95163 - DNA, 80 bp, synthetic construct
  misc_feature 1..80: note = Artificially Synthesized Probe
  source 1..80: mol_type = other DNA
ctgtggatgctgaggaaaggctggtgacaggaagaggggtggcgtgacctgtggatgctgaggaagggctggtgacatga

SEQ ID NO: 95164 - DNA, 80 bp, synthetic construct
  misc_feature 1..80: note = Artificially Synthesized Probe
  source 1..80: mol_type = other DNA
ctgtggatgctgcggaagggatggttacaggaagagaggtggcgtgatctgtggacactgaggaagcgtcggtgacagga

SEQ ID NO: 95165 - DNA, 80 bp, synthetic construct; identical to SEQ ID NO: 34066
  misc_feature 1..80: note = Artificially Synthesized Probe
  source 1..80: mol_type = other DNA

SEQ ID NO: 95166 - DNA, 80 bp, synthetic construct
  misc_feature 1..80: note = Artificially Synthesized Probe
  source 1..80: mol_type = other DNA
ctgtggatgctgaggaaaggctggtgacaggaagaggggtgacgtgacctgtggatgctgaggaagtgtcagtgacagga

SEQ ID NO: 95167 - DNA, 80 bp, synthetic construct
  misc_feature 1..80: note = Artificially Synthesized Probe
  source 1..80: mol_type = other DNA
aagaccacgtcgttcctgggctcctcactcctccgtggaacgtggtataagaacgcctccaccaccgcggccagcagctg

SEQ ID NO: 95168 - DNA, 80 bp, synthetic construct; identical to SEQ ID NO: 34067
  misc_feature 1..80: note = Artificially Synthesized Probe
  source 1..80: mol_type = other DNA

SEQ ID NO: 95169 - DNA, 80 bp, synthetic construct
  misc_feature 1..80: note = Artificially Synthesized Probe
  source 1..80: mol_type = other DNA
ggctgatagtgtcagaccctctgctggttcttgtcctctgagtctgggccatccgggaaatggcggctgtctcctgagga

SEQ ID NO: 95170 - DNA, 80 bp, synthetic construct; identical to SEQ ID NO: 34068
  misc_feature 1..80: note = Artificially Synthesized Probe
  source 1..80: mol_type = other DNA

SEQ ID NO: 95171 - DNA, 80 bp, synthetic construct
  misc_feature 1..80: note = Artificially Synthesized Probe
  source 1..80: mol_type = other DNA
gtgaggtgctggcagaggctgatgtccattgtccttctgggccccctggtgttgacactacagagttggccagagtaagg

SEQ ID NO: 95172 - DNA, 80 bp, synthetic construct
  misc_feature 1..80: note = Artificially Synthesized Probe
  source 1..80: mol_type = other DNA
gaggaacaatttctgagggcgagtgcccactggctgtgaaggaagaacctggggtggtgactgtcttggtgtcagtcatg

SEQ ID NO: 95173 - DNA, 80 bp, synthetic construct
  misc_feature 1..80: note = Artificially Synthesized Probe
  source 1..80: mol_type = other DNA
tatccagcataggtgaagaagatggggatgtggccgtttttatcatctgagtcacactgtagcttgggctgctgagaaga

SEQ ID NO: 95174 - DNA, 80 bp, synthetic construct
  misc_feature 1..80: note = Artificially Synthesized Probe
  source 1..80: mol_type = other DNA
ctgtagatggatttcctgtgacaagcctagtggcagcacctgttgatgttgagggcagttctgtttgtgaccaagttgtg

SEQ ID NO: 95175 - DNA, 80 bp, synthetic construct; identical to SEQ ID NO: 34069
  misc_feature 1..80: note = Artificially Synthesized Probe
  source 1..80: mol_type = other DNA

SEQ ID NO: 95176 - DNA, 80 bp, synthetic construct
  misc_feature 1..80: note = Artificially Synthesized Probe
  source 1..80: mol_type = other DNA
gtggttgtttcaccagaagggaatgtctcctgagaaactgttccacttgggttgaatccacttggtgaggataaaacagt

SEQ ID NO: 95177 - DNA, 80 bp, synthetic construct
  misc_feature 1..80: note = Artificially Synthesized Probe
  source 1..80: mol_type = other DNA
tcttagaaaaagctgttgtgtcctgagtagaagtccttgagaaagttgctggtgattgtccttctggatcaaatgttact

SEQ ID NO: 95178 - DNA, 80 bp, synthetic construct
  misc_feature 1..80: note = Artificially Synthesized Probe
  source 1..80: mol_type = other DNA
gagatctgggggcttagggggacacagtcccacttacattcgttccacttggctgttgcggagaaaggcccgcatgtcca

SEQ ID NO: 95179 - DNA, 80 bp, synthetic construct
  misc_feature 1..80: note = Artificially Synthesized Probe
  source 1..80: mol_type = other DNA
cacctgaaggagatgtcttctgagaaacagtccctgtcacattgtgtacacttggagagaaagaaggagttgaagtggtt

SEQ ID NO: 95180 - DNA, 80 bp, synthetic construct; identical to SEQ ID NO: 34070
  misc_feature 1..80: note = Artificially Synthesized Probe
  source 1..80: mol_type = other DNA

SEQ ID NO: 95181 - DNA, 80 bp, synthetic construct
  misc_feature 1..80: note = Artificially Synthesized Probe
  source 1..80: mol_type = other DNA
tctccgtgctcttagtctggtggttctgagatgaagctgatatgtcctgattagaggtccttgaagaagctgcagttgat

SEQ ID NO: 95182 - DNA, 80 bp, synthetic construct
  misc_feature 1..80: note = Artificially Synthesized Probe
  source 1..80: mol_type = other DNA
gaataaaatacctaggaatacagctaacaaaggatgtgaaaactaccattcttcacagaatgagaacaaactactttaaa

SEQ ID NO: 95183 - DNA, 80 bp, synthetic construct
  misc_feature 1..80: note = Artificially Synthesized Probe
  source 1..80: mol_type = other DNA
tagataccttggaaataagaccacacatctacaaccatctgatctttgacaaacctgacaaaagcaggcaatggggaaag

SEQ ID NO: 95184 - DNA, 80 bp, synthetic construct; identical to SEQ ID NO: 34071
  misc_feature 1..80: note = Artificially Synthesized Probe
  source 1..80: mol_type = other DNA

SEQ ID NO: 95185 - DNA, 80 bp, synthetic construct
  misc_feature 1..80: note = Artificially Synthesized Probe
  source 1..80: mol_type = other DNA
aataaacaaccccatcaaaaagcaggcaaaggatatgaacagacacttatcaaaagaagacatttatgccaccaacaaac

SEQ ID NO: 95186 - DNA, 80 bp, synthetic construct
  misc_feature 1..80: note = Artificially Synthesized Probe
  source 1..80: mol_type = other DNA
gtgggagtgtaaatcagttcaaccattgtggaagacagtgtggcgattcctcaaggatctagaaccagaaataccatttg

SEQ ID NO: 95187 - DNA, 80 bp, synthetic construct
  misc_feature 1..80: note = Artificially Synthesized Probe
  source 1..80: mol_type = other DNA
ccaaatgtccatcagtgatagactggataaagaaaatgtggtacatatgcagcacggaatactatgcagccatgaaaaag

SEQ ID NO: 95188 - DNA, 80 bp, synthetic construct; identical to SEQ ID NO: 34072
  misc_feature 1..80: note = Artificially Synthesized Probe
  source 1..80: mol_type = other DNA

SEQ ID NO: 95189 - DNA, 80 bp, synthetic construct
  misc_feature 1..80: note = Artificially Synthesized Probe
  source 1..80: mol_type = other DNA
atcacaactgtacatatttgggggataaaaaaataataagagatggggccgggcatggtagccccacctgcaatcccagc

SEQ ID NO: 95190 - DNA, 80 bp, synthetic construct
  misc_feature 1..80: note = Artificially Synthesized Probe
  source 1..80: mol_type = other DNA
ctctgcacccttgcactctagcctagctcagtgagtgtcatgggtccttgcttaataatgtttgttgagagtgaagggtt

SEQ ID NO: 95191 - DNA, 80 bp, synthetic construct
  misc_feature 1..80: note = Artificially Synthesized Probe
  source 1..80: mol_type = other DNA
gagaattgcttgaacccaggaggtggaggttgcagtgagcagacatcatgccacttcactgcagcctgggcgacagagca

SEQ ID NO: 95192 - DNA, 80 bp, synthetic construct; identical to SEQ ID NO: 34073
  misc_feature 1..80: note = Artificially Synthesized Probe
  source 1..80: mol_type = other DNA

SEQ ID NO: 95193 - DNA, 80 bp, synthetic construct
  misc_feature 1..80: note = Artificially Synthesized Probe
  source 1..80: mol_type = other DNA
tcacagactaccaagaagctaatattattgaccataaccactttttaaaaaaaaattatttcccaggcagaggccaggca

SEQ ID NO: 95194 - DNA, 80 bp, synthetic construct
  misc_feature 1..80: note = Artificially Synthesized Probe
  source 1..80: mol_type = other DNA
agaaaaatatttcccaggcagaatgtttaaatattggctttttttgtttaaaatatttcacagcacctgcactagccaca

SEQ ID NO: 95195 - DNA, 80 bp, synthetic construct
  misc_feature 1..80: note = Artificially Synthesized Probe
  source 1..80: mol_type = other DNA
aaccaagaagaaaccaagaaaacttgcctttttttttctcttagaaactgactcttttgggttttcattagttccctagc

SEQ ID NO: 95196 - DNA, 80 bp, synthetic construct
  misc_feature 1..80: note = Artificially Synthesized Probe
  source 1..80: mol_type = other DNA
gtagctgggactacaggcacacacaaccatgcctgggtaatttttttatttctgtagaggtggaatcttgctatgttgcc

SEQ ID NO: 95197 - DNA, 80 bp, synthetic construct; identical to SEQ ID NO: 34074
  misc_feature 1..80: note = Artificially Synthesized Probe
  source 1..80: mol_type = other DNA

SEQ ID NO: 95198 - DNA, 80 bp, synthetic construct
  misc_feature 1..80: note = Artificially Synthesized Probe
  source 1..80: mol_type = other DNA
cgaacgtcccgacccccagcagcaagaggccgcccagggccccaaagaagatgccgaagaacgcgtcgagtttcatgctc

SEQ ID NO: 95199 - DNA, 80 bp, synthetic construct
  misc_feature 1..80: note = Artificially Synthesized Probe
  source 1..80: mol_type = other DNA
gggcccctggcttaatccaaaatgactccacttcaactttaaacggaaacttcctttagttggaattaggttgagatttg

SEQ ID NO: 95200 - DNA, 80 bp, synthetic construct
  misc_feature 1..80: note = Artificially Synthesized Probe
  source 1..80: mol_type = other DNA
aggctttgagtagacaggagctatctaggggccaaactttctgaatgtgtaaattcttggcaattaacatcttttcagag

SEQ ID NO: 95201 - DNA, 80 bp, synthetic construct
  misc_feature 1..80: note = Artificially Synthesized Probe
  source 1..80: mol_type = other DNA
cctgcatcacctctgctaaaatcagtgtcagcagcagaagtttcatgacagcaccgtccttttttttaaagtaaagattt

SEQ ID NO: 95202 - DNA, 80 bp, synthetic construct; identical to SEQ ID NO: 34075
  misc_feature 1..80: note = Artificially Synthesized Probe
  source 1..80: mol_type = other DNA

SEQ ID NO: 95203 - DNA, 80 bp, synthetic construct; identical to SEQ ID NO: 34029
  misc_feature 1..80: note = Artificially Synthesized Probe
  source 1..80: mol_type = other DNA

SEQ ID NO: 95204 - DNA, 80 bp, synthetic construct
  misc_feature 1..80: note = Artificially Synthesized Probe
  source 1..80: mol_type = other DNA
aaaatggaataaatgaagccaaagattagttctttgaaaataaaacaaatacctggcaagagaaagaaagtgggggaggg

SEQ ID NO: 95205 - DNA, 80 bp, synthetic construct
  misc_feature 1..80: note = Artificially Synthesized Probe
  source 1..80: mol_type = other DNA
caaaaagtatgaaaacttagataaattggatatactgtccttaaaaatataatttatcaaaaatgaattaagaaaaaaac

SEQ ID NO: 95206 - DNA, 80 bp, synthetic construct
  misc_feature 1..80: note = Artificially Synthesized Probe
  source 1..80: mol_type = other DNA
gtagctgggattacaggcgcatgccaccacgcccggctaatttttgtatttttagtagagactgggtttcaccatgtcgt

SEQ ID NO: 95207 - DNA, 80 bp, synthetic construct; identical to SEQ ID NO: 34076
  misc_feature 1..80: note = Artificially Synthesized Probe
  source 1..80: mol_type = other DNA

SEQ ID NO: 95208 - DNA, 80 bp, synthetic construct
  misc_feature 1..80: note = Artificially Synthesized Probe
  source 1..80: mol_type = other DNA
caaaaaaaaatatgtatatataatctatccaccccacaaaaaaatgcaggctaagatgagtttacaggcaaatcagacat

SEQ ID NO: 95209 - DNA, 80 bp, synthetic construct
  misc_feature 1..80: note = Artificially Synthesized Probe
  source 1..80: mol_type = other DNA
agattaataagtcccagtaataatacatggaagcatcgtaaataaaatattagcaagccaaagtgcatcatggccgggcg

SEQ ID NO: 95210 - DNA, 80 bp, synthetic construct
  misc_feature 1..80: note = Artificially Synthesized Probe
  source 1..80: mol_type = other DNA
ttggtggcacacacctgtaatcccagctactcaggaggctgaggcacgagaattgcttgaacccaggaggcagagattgc

SEQ ID NO: 95211 - DNA, 80 bp, synthetic construct; identical to SEQ ID NO: 34077
  misc_feature 1..80: note = Artificially Synthesized Probe
  source 1..80: mol_type = other DNA

SEQ ID NO: 95212 - DNA, 80 bp, synthetic construct
  misc_feature 1..80: note = Artificially Synthesized Probe
  source 1..80: mol_type = other DNA
aggaataaaaacaagatgccaacaatcactgcttctaatcaacattaggttgaaggttttagctggtgaaataagacgag

SEQ ID NO: 95213 - DNA, 80 bp, synthetic construct
  misc_feature 1..80: note = Artificially Synthesized Probe
  source 1..80: mol_type = other DNA
gttgactcaggtgctatgattgtccctgtgtttacagatgacctgttatatgatgtgtctagttagcacacctgctctag

SEQ ID NO: 95214 - DNA, 80 bp, synthetic construct
  misc_feature 1..80: note = Artificially Synthesized Probe
  source 1..80: mol_type = other DNA
aaataattgcattccagctgggtgtggtgattcatgcctgaatcccagtgctttgagaggctgaggcaggaggaacactt

SEQ ID NO: 95215 - DNA, 80 bp, synthetic construct
  misc_feature 1..80: note = Artificially Synthesized Probe
  source 1..80: mol_type = other DNA
cgaggctgcagtgagctatgatcaccccactgtactccagcctgcatgacagagggagactctgtctcaaaaagagattt

SEQ ID NO: 95216 - DNA, 80 bp, synthetic construct; identical to SEQ ID NO: 34078
  misc_feature 1..80: note = Artificially Synthesized Probe
  source 1..80: mol_type = other DNA

SEQ ID NO: 95217 - DNA, 80 bp, synthetic construct
  misc_feature 1..80: note = Artificially Synthesized Probe
  source 1..80: mol_type = other DNA
cgtctctactaaaaatacaaaaaaattagccgggcgtggtggcgggcgcctgtagtcccagctactcgggaggctgaggc

SEQ ID NO: 95218 - DNA, 80 bp, synthetic construct
  misc_feature 1..80: note = Artificially Synthesized Probe
  source 1..80: mol_type = other DNA
tatcctgcctttttagccatacctgatatgagcatttcttcaagatactagcttcgtaaacatagcctgagaagacgcac

SEQ ID NO: 95219 - DNA, 80 bp, synthetic construct; identical to SEQ ID NO: 34079
  misc_feature 1..80: note = Artificially Synthesized Probe
  source 1..80: mol_type = other DNA

SEQ ID NO: 95220 - DNA, 80 bp, synthetic construct
  misc_feature 1..80: note = Artificially Synthesized Probe
  source 1..80: mol_type = other DNA
cgggggtcatgtggactccactgctccctgctcgcaatttctccttaatacatcttactttatgcccgttctgtgtgttg

SEQ ID NO: 95221 - DNA, 80 bp, synthetic construct
  misc_feature 1..80: note = Artificially Synthesized Probe
  source 1..80: mol_type = other DNA
cacgatttcggcccactgcaacctccacctccgtgattctcctgcttcagcctcccaagtagctgggattacaggcatgt

SEQ ID NO: 95222 - DNA, 80 bp, synthetic construct
  misc_feature 1..80: note = Artificially Synthesized Probe
  source 1..80: mol_type = other DNA
aaataataagccatcatagagaaagctcatattgttaacttactgttggacaattaggatatttccaatgtattgcttat

SEQ ID NO: 95223 - DNA, 80 bp, synthetic construct; identical to SEQ ID NO: 34080
  misc_feature 1..80: note = Artificially Synthesized Probe
  source 1..80: mol_type = other DNA

SEQ ID NO: 95224 - DNA, 80 bp, synthetic construct
  misc_feature 1..80: note = Artificially Synthesized Probe
  source 1..80: mol_type = other DNA
tgaaatgtcctttagtttctttcagatcataaccaagatgcttagaggtctcggctggggtgacttggcaccctggcctc

SEQ ID NO: 95225 - DNA, 80 bp, synthetic construct
  misc_feature 1..80: note = Artificially Synthesized Probe
  source 1..80: mol_type = other DNA
ggtggatcatttgaggtcaggagttcaagaccagcctggccaacatgatgaaaccccatctctactaaaaatacaaaaat

SEQ ID NO: 95226 - DNA, 80 bp, synthetic construct
  misc_feature 1..80: note = Artificially Synthesized Probe
  source 1..80: mol_type = other DNA
aattcttgctaaacagggctgtgtcctggtagtcctccttttaaatctttatttagagaacttgctcatcttgagccaag

SEQ ID NO: 95227 - DNA, 80 bp, synthetic construct
  misc_feature 1..80: note = Artificially Synthesized Probe
  source 1..80: mol_type = other DNA
ttaaatctttatttagagaacttgctcatcttgagccaagttgattagagtttcctgctgccgcaaataggagggcaagt

SEQ ID NO: 95228 - DNA, 80 bp, synthetic construct
  misc_feature 1..80: note = Artificially Synthesized Probe
  source 1..80: mol_type = other DNA
tgaagccactcctgcaatagattgattattcagctgtttaggaaaacaatttgcagataactcaatctactaagcttgag

SEQ ID NO: 95229 - DNA, 80 bp, synthetic construct
  misc_feature 1..80: note = Artificially Synthesized Probe
  source 1..80: mol_type = other DNA
tgcttatgatgagtcgaggtttctgtcttgggccttcctcacttcctaatgccctgcacctcccatggggcaagaggctc

SEQ ID NO: 95230 - DNA, 80 bp, synthetic construct; identical to SEQ ID NO: 34081
  misc_feature 1..80: note = Artificially Synthesized Probe
  source 1..80: mol_type = other DNA

SEQ ID NO: 95231 - DNA, 80 bp, synthetic construct
  misc_feature 1..80: note = Artificially Synthesized Probe
  source 1..80: mol_type = other DNA
gtaagccaaaaccatctcgctgaagttgtcaggcagagaaatttgaagccttgatcaagttttattctaaaaaatactca

SEQ ID NO: 95232 - DNA, 80 bp, synthetic construct
  misc_feature 1..80: note = Artificially Synthesized Probe
  source 1..80: mol_type = other DNA
atttgcgcctaaagagttgatattggagagaaacaggtctctcctctctcttctctccccgtgaccctccattttctact

SEQ ID NO: 95233 - DNA, 80 bp, synthetic construct
  misc_feature 1..80: note = Artificially Synthesized Probe
  source 1..80: mol_type = other DNA
ctccgacgttctttctgcctttctccttctctcctgcctgtgagcatgttcaggtgtctgttggcctaaaacaagtctgt

SEQ ID NO: 95234 - DNA, 80 bp, synthetic construct; identical to SEQ ID NO: 34082
  misc_feature 1..80: note = Artificially Synthesized Probe
  source 1..80: mol_type = other DNA

SEQ ID NO: 95235 - DNA, 80 bp, synthetic construct
  misc_feature 1..80: note = Artificially Synthesized Probe
  source 1..80: mol_type = other DNA
gtctccagccctttccctctcctgctgcccctccctctctggccaccctgcgtctactctcacgccttacaaatctgtac

SEQ ID NO: 95236 - DNA, 80 bp, synthetic construct
  misc_feature 1..80: note = Artificially Synthesized Probe
  source 1..80: mol_type = other DNA
tgtgggtcctctggatttctttctcttccttgtcccctgtgtcctagtcagtactcgttgatcttcctcccaagtgttca

SEQ ID NO: 95237 - DNA, 80 bp, synthetic construct
  misc_feature 1..80: note = Artificially Synthesized Probe
  source 1..80: mol_type = other DNA
gggttgctgctgctgtctccttagctcgaattgctttggaaaatggcctgccctgcctgccctggaaggtgtctggtagg

SEQ ID NO: 95238 - DNA, 80 bp, synthetic construct
  misc_feature 1..80: note = Artificially Synthesized Probe
  source 1..80: mol_type = other DNA
accagaatcctcagagggaggccactgggcaagaatgaccttcgtctggttgtgactgaggaaagatacttccagcgcgt

SEQ ID NO: 95239 - DNA, 80 bp, synthetic construct; identical to SEQ ID NO: 34083
  misc_feature 1..80: note = Artificially Synthesized Probe
  source 1..80: mol_type = other DNA

SEQ ID NO: 95240 - DNA, 80 bp, synthetic construct
  misc_feature 1..80: note = Artificially Synthesized Probe
  source 1..80: mol_type = other DNA
attatatgtcttcctaaaagttgcaggggctaaaaccttgagagagacaaaccacatctgaaaatccagctgcaaaatcc

SEQ ID NO: 95241 - DNA, 80 bp, synthetic construct; identical to SEQ ID NO: 34030
  misc_feature 1..80: note = Artificially Synthesized Probe
  source 1..80: mol_type = other DNA

SEQ ID NO: 95242 - DNA, 80 bp, synthetic construct
  misc_feature 1..80: note = Artificially Synthesized Probe
  source 1..80: mol_type = other DNA
cagctactttaagtagaaatctggctgcttcccctttactagttttggttaataaattcacgttcttcctaccagacctt

SEQ ID NO: 95243 - DNA, 80 bp, synthetic construct; identical to SEQ ID NO: 34084
  misc_feature 1..80: note = Artificially Synthesized Probe
  source 1..80: mol_type = other DNA

SEQ ID NO: 95244 - DNA, 80 bp, synthetic construct
  misc_feature 1..80: note = Artificially Synthesized Probe
  source 1..80: mol_type = other DNA
tgctcggaagctgcgagctgctcagctctgggactgccaccgagtggatggagagctgaggcaaagatggagaaatggtc

SEQ ID NO: 95245 - DNA, 80 bp, synthetic construct
  misc_feature 1..80: note = Artificially Synthesized Probe
  source 1..80: mol_type = other DNA
ttgacaccttaaggtgacaagatcactgtgagaagacacacgtgtgtcattgagtaaaacggatagtttttaagacattc

SEQ ID NO: 95246 - DNA, 80 bp, synthetic construct
  misc_feature 1..80: note = Artificially Synthesized Probe
  source 1..80: mol_type = other DNA
cacgtcaggtgggagacggcccacagctgcctcacgtctgttagggctccaggatgtgaaggccgagtggcagtaggcat

SEQ ID NO: 95247 - DNA, 80 bp, synthetic construct; identical to SEQ ID NO: 34085
  misc_feature 1..80: note = Artificially Synthesized Probe
  source 1..80: mol_type = other DNA

SEQ ID NO: 95248 - DNA, 80 bp, synthetic construct
  misc_feature 1..80: note = Artificially Synthesized Probe
  source 1..80: mol_type = other DNA
caacggtaaggatggccttgaggagaacattcagccccacacaggcagcaggcggcccggaaggcgcgcagacgctgaac

SEQ ID NO: 95249 - DNA, 80 bp, synthetic construct
  misc_feature 1..80: note = Artificially Synthesized Probe
  source 1..80: mol_type = other DNA
ccagcgcctgaaacgagacttggcatacagcagtgacttcgtacacatctgtggaatacatcccaggccctgtggccttt

SEQ ID NO: 95250 - DNA, 80 bp, synthetic construct
  misc_feature 1..80: note = Artificially Synthesized Probe
  source 1..80: mol_type = other DNA
acagtggactccaaggcgagaactttacccgttctttccaacgatccccgccgaagtcacaccccaacccatggatccca

SEQ ID NO: 95251 - DNA, 80 bp, synthetic construct; identical to SEQ ID NO: 34086
  misc_feature 1..80: note = Artificially Synthesized Probe
  source 1..80: mol_type = other DNA

SEQ ID NO: 95252 - DNA, 80 bp, synthetic construct
  misc_feature 1..80: note = Artificially Synthesized Probe
  source 1..80: mol_type = other DNA
tccacagtgacagaaggtcgctgagcaaaccgggagaagtggccctcaccctacattccacagtgacagaaggttgctga

SEQ ID NO: 95253 - DNA, 80 bp, synthetic construct
  misc_feature 1..80: note = Artificially Synthesized Probe
  source 1..80: mol_type = other DNA
ccatctcctgctaatttttgtatttttagtagagacggggttttgccatgttggccagtctggtctcaaactcctgacct

SEQ ID NO: 95254 - DNA, 80 bp, synthetic construct
  misc_feature 1..80: note = Artificially Synthesized Probe
  source 1..80: mol_type = other DNA
cagatcacttgaggtcaggagttcgagactagcctgaccaacatggcaaaaccccatttctactaaaaatacaaaaatca

SEQ ID NO: 95255 - DNA, 80 bp, synthetic construct
  misc_feature 1..80: note = Artificially Synthesized Probe
  source 1..80: mol_type = other DNA
ataaaataacataaaattcataatctattccacagcttgcaaagccctgcgcgatctaacacctgccttctctttcaagt

SEQ ID NO: 95256 - DNA, 80 bp, synthetic construct
  misc_feature 1..80: note = Artificially Synthesized Probe
  source 1..80: mol_type = other DNA
cccctactctctggccattcgaaatgcagctctcagcacaccctgtacttttccacactgcatttaccacatgtgcagtt

SEQ ID NO: 95257 - DNA, 80 bp, synthetic construct; identical to SEQ ID NO: 34087
  misc_feature 1..80: note = Artificially Synthesized Probe
  source 1..80: mol_type = other DNA

SEQ ID NO: 95258 - DNA, 80 bp, synthetic construct
  misc_feature 1..80: note = Artificially Synthesized Probe
  source 1..80: mol_type = other DNA
ctatgatcttaaacaagtcacttaacttagagagctttgaaaagcaggaactgtgacgcattcatcttcctgtccagagc

SEQ ID NO: 95259 - DNA, 80 bp, synthetic construct
  misc_feature 1..80: note = Artificially Synthesized Probe
  source 1..80: mol_type = other DNA
agctggcatgagtagaaattctgcaagtgaatgaacaactccaaagtctaggctgtttcttattccaaattcccccaaaa

SEQ ID NO: 95260 - DNA, 80 bp, synthetic construct
  misc_feature 1..80: note = Artificially Synthesized Probe
  source 1..80: mol_type = other DNA
ttgcaaggcctcacgtgcaacacaaatgcccagttcctgagacttcttcagagtctccaggaaaagggtgaaaaggcatt

SEQ ID NO: 95261 - DNA, 80 bp, synthetic construct
  misc_feature 1..80: note = Artificially Synthesized Probe
  source 1..80: mol_type = other DNA
tggtgttgggcgtctataatcccagctactcgggaggctgaggcaggagaatctcttgaacccgggaggcagaggctgca

SEQ ID NO: 95262 - DNA, 80 bp, synthetic construct; identical to SEQ ID NO: 34088
  misc_feature 1..80: note = Artificially Synthesized Probe
  source 1..80: mol_type = other DNA

SEQ ID NO: 95263 - DNA, 80 bp, synthetic construct
  misc_feature 1..80: note = Artificially Synthesized Probe
  source 1..80: mol_type = other DNA
ccacttcttgtcctctcattgcctcttgtccttagcaatgaagacacaaatcacttgcgtgtcaagcactgccaggccag

SEQ ID NO: 95264 - DNA, 80 bp, synthetic construct
  misc_feature 1..80: note = Artificially Synthesized Probe
  source 1..80: mol_type = other DNA
gctcccatagcccgcaccttacaccatcccagagaaatctggagctctgtcctgtgaccccagagcttcctcatcttccc

SEQ ID NO: 95265 - DNA, 80 bp, synthetic construct
  misc_feature 1..80: note = Artificially Synthesized Probe
  source 1..80: mol_type = other DNA
gaatacaccaagccagcccttgcaaacccacaggaagcacggggtggctttttagaggcacgaggatccttagatgaagg

SEQ ID NO: 95266 - DNA, 80 bp, synthetic construct
  misc_feature 1..80: note = Artificially Synthesized Probe
  source 1..80: mol_type = other DNA
cctgcaacctctgcctcccaggttcaagccattctcctacctcagcctcccgagtagctggaattacaggcgctcgccac

SEQ ID NO: 95267 - DNA, 80 bp, synthetic construct; identical to SEQ ID NO: 34089
  misc_feature 1..80: note = Artificially Synthesized Probe
  source 1..80: mol_type = other DNA

SEQ ID NO: 95268 - DNA, 80 bp, synthetic construct
  misc_feature 1..80: note = Artificially Synthesized Probe
  source 1..80: mol_type = other DNA
atcctttccttttgagtgtcctggagcacagtggggtttcccagaggggcagaggggtctgtggagagttttggtgtcct

SEQ ID NO: 95269 - DNA, 80 bp, synthetic construct
  misc_feature 1..80: note = Artificially Synthesized Probe
  source 1..80: mol_type = other DNA
tgatagtgctggagaccaaggcctatttcgacccagttgcctttccctgtggcatggaaccaggacggccaggcttcctt

SEQ ID NO: 95270 - DNA, 80 bp, synthetic construct; identical to SEQ ID NO: 34090
  misc_feature 1..80: note = Artificially Synthesized Probe
  source 1..80: mol_type = other DNA

SEQ ID NO: 95271 - DNA, 80 bp, synthetic construct
  misc_feature 1..80: note = Artificially Synthesized Probe
  source 1..80: mol_type = other DNA
gtgtgggtgccatctcccagccacgaccatctcctctcctggcccagctccacttggtccccttagcgacgcaaaggact

SEQ ID NO: 95272 - DNA, 80 bp, synthetic construct
  misc_feature 1..80: note = Artificially Synthesized Probe
  source 1..80: mol_type = other DNA
tccacatggagctgagtgtccagctggtacccagcacatttgggctcagctttaaatcacagatttggaaactcaagaac

SEQ ID NO: 95273 - DNA, 80 bp, synthetic construct
  misc_feature 1..80: note = Artificially Synthesized Probe
  source 1..80: mol_type = other DNA
agccccagcctcgctctgggagtcatgattcccgtggagactccttcaaccacatctgcagggcagggccgtgtggcggc

SEQ ID NO: 95274 - DNA, 80 bp, synthetic construct; identical to SEQ ID NO: 34091
  misc_feature 1..80: note = Artificially Synthesized Probe
  source 1..80: mol_type = other DNA

SEQ ID NO: 95275 - DNA, 80 bp, synthetic construct
  misc_feature 1..80: note = Artificially Synthesized Probe
  source 1..80: mol_type = other DNA
gggctgacagcccagagtctgggagatgtagcagtggccttgattgtagcagtaattcacagggcaggactggttctgac

SEQ ID NO: 95276 - DNA, 80 bp, synthetic construct
  misc_feature 1..80: note = Artificially Synthesized Probe
  source 1..80: mol_type = other DNA
cccagaaacacagaataaaacttggtcctgaagccagagggacagcctggaaagtgtggggaagaggacgggggcccccg

SEQ ID NO: 95277 - DNA, 80 bp, synthetic construct
  misc_feature 1..80: note = Artificially Synthesized Probe
  source 1..80: mol_type = other DNA
ccggccctctgcgccctggccgcctcctccgcaccaccctcccggccggcctgcccctctcctccttgtcgcttcccttg

SEQ ID NO: 95278 - DNA, 80 bp, synthetic construct
  misc_feature 1..80: note = Artificially Synthesized Probe
  source 1..80: mol_type = other DNA
acaagggtgtacatctttctccttgactctgttcctcttgctctggctctgcctgtctttctctctgcgagtaagcctgg

SEQ ID NO: 95279 - DNA, 80 bp, synthetic construct
  misc_feature 1..80: note = Artificially Synthesized Probe
  source 1..80: mol_type = other DNA
tttttattttattttatatttatttatttatttatttatttatttatttatttatttattttgagacagagtctcgctct

SEQ ID NO: 95280 - DNA, 80 bp, synthetic construct
  misc_feature 1..80: note = Artificially Synthesized Probe
  source 1..80: mol_type = other DNA
caccatgtcggccaggctggtctcgaactcctgacctcaggtgatctcctgccttggcctccgaaagtgctgggattaca

SEQ ID NO: 95281 - DNA, 80 bp, synthetic construct
  misc_feature 1..80: note = Artificially Synthesized Probe
  source 1..80: mol_type = other DNA
cgctgtctccctttcccctattctctctctctctctctctgtctccccggacctctttctctgacagctcccacctcccc

SEQ ID NO: 95282 - DNA, 80 bp, synthetic construct; identical to SEQ ID NO: 34092
  misc_feature 1..80: note = Artificially Synthesized Probe
  source 1..80: mol_type = other DNA

SEQ ID NO: 95283 - DNA, 80 bp, synthetic construct
  misc_feature 1..80: note = Artificially Synthesized Probe
  source 1..80: mol_type = other DNA
cccccttttccaggcgtttctctgcagggcaacccctttccccggccagacaggtattcttccacttttgtggagggact

SEQ ID NO: 95284 - DNA, 80 bp, synthetic construct; identical to SEQ ID NO: 34031
  misc_feature 1..80: note = Artificially Synthesized Probe
  source 1..80: mol_type = other DNA

SEQ ID NO: 95285 - DNA, 80 bp, synthetic construct
  misc_feature 1..80: note = Artificially Synthesized Probe
  source 1..80: mol_type = other DNA
ccagcttgcccggttctctggcggctgctgaagtctcctccccaaaccatcttcagtctttcgcccggggctccccccat

SEQ ID NO: 95286 - DNA, 80 bp, synthetic construct; identical to SEQ ID NO: 34025
  misc_feature 1..80: note = Artificially Synthesized Probe
  source 1..80: mol_type = other DNA

SEQ ID NO: 95287 - DNA, 80 bp, synthetic construct
  misc_feature 1..80: note = Artificially Synthesized Probe
  source 1..80: mol_type = other DNA
tagattgagcattctaaagatctgctggaaaaaggagagaaatggtttgcctttggctgtctacacccttgagctatcag

SEQ ID NO: 95288 - DNA, 80 bp, synthetic construct
  misc_feature 1..80: note = Artificially Synthesized Probe
  source 1..80: mol_type = other DNA
agtagcggccgaaggtgcccccgtcacacttgcagccagccacctggaggagggttgccgatcacgggcggccaggagac

SEQ ID NO: 95289 - DNA, 80 bp, synthetic construct; identical to SEQ ID NO: 34032
  misc_feature 1..80: note = Artificially Synthesized Probe
  source 1..80: mol_type = other DNA

SEQ ID NO: 95290 - DNA, 80 bp, synthetic construct
  misc_feature 1..80: note = Artificially Synthesized Probe
  source 1..80: mol_type = other DNA
gtatccatgtgtgtatccatgtgtgtatgtatcatgtatgtatccatgtagatatgtatcaatgtatgtatccatgtatg

SEQ ID NO: 95291 - DNA, 80 bp, synthetic construct
  misc_feature 1..80: note = Artificially Synthesized Probe
  source 1..80: mol_type = other DNA
gaaaactggattccttatttattttgagacagggtcccactcggttgcccaggctggagtgcaatgtcttgatcttggct

SEQ ID NO: 95292 - DNA, 80 bp, synthetic construct
  misc_feature 1..80: note = Artificially Synthesized Probe
  source 1..80: mol_type = other DNA
cagtgtctcgatctcggctcactgcaatgtccccctcccaagttaaagcaattcttgtgcctcagcctcccaaatacttg

SEQ ID NO: 95293 - DNA, 80 bp, synthetic construct; identical to SEQ ID NO: 34033
  misc_feature 1..80: note = Artificially Synthesized Probe
  source 1..80: mol_type = other DNA

SEQ ID NO: 95294 - DNA, 80 bp, synthetic construct
  misc_feature 1..80: note = Artificially Synthesized Probe
  source 1..80: mol_type = other DNA
ctactcccaagagtggatatttggggatctgtggaatagtatattgatttcaatctctttttcccattgtgtattttatg

SEQ ID NO: 95295 - DNA, 80 bp, synthetic construct
  misc_feature 1..80: note = Artificially Synthesized Probe
  source 1..80: mol_type = other DNA
cactttcctttctggctcttcctttacaaccaaaaataaaaataaaaaagcagataggacaagagtcgtggaattaggcc

SEQ ID NO: 95296 - DNA, 80 bp, synthetic construct
  misc_feature 1..80: note = Artificially Synthesized Probe
  source 1..80: mol_type = other DNA
ccccatctctactaaaaatacaaaattagccaggcgtggtggtgcgcacctgtaatcccagctactcaggaggctgaggc

SEQ ID NO: 95297 - DNA, 80 bp, synthetic construct
  misc_feature 1..80: note = Artificially Synthesized Probe
  source 1..80: mol_type = other DNA
agggagaaatgactgtggggtgcttctaggcagacaggactgtaagcggcctcagaaaaggtgtcctgtgtctgagcaag

SEQ ID NO: 95298 - DNA, 80 bp, synthetic construct; identical to SEQ ID NO: 34034
  misc_feature 1..80: note = Artificially Synthesized Probe
  source 1..80: mol_type = other DNA

SEQ ID NO: 95299 - DNA, 80 bp, synthetic construct
  misc_feature 1..80: note = Artificially Synthesized Probe
  source 1..80: mol_type = other DNA
tcttttcttttcttttcttttctttctttttgacatagagtctcactctgttgcccaggctggagtacaatggcgcaatc

SEQ ID NO: 95300 - DNA, 80 bp, synthetic construct
  misc_feature 1..80: note = Artificially Synthesized Probe
  source 1..80: mol_type = other DNA
gcccggctccctccctgcccgtccccgtccccccacccgtgccagcccccaggatgggtgccccgagcgcgtgccggacg

SEQ ID NO: 95301 - DNA, 80 bp, synthetic construct
  misc_feature 1..80: note = Artificially Synthesized Probe
  source 1..80: mol_type = other DNA
tgcagcgtttccttcgtgcctgtggacggctgcacctgccccgcgggcaccttcctcaatgacgcgggcgcctgtgtgcc

SEQ ID NO: 95302 - DNA, 80 bp, synthetic construct
  misc_feature 1..80: note = Artificially Synthesized Probe
  source 1..80: mol_type = other DNA
cccgagggttctgagacatgaggggccaggctggggagagtggggcagggtggacccagcacattctgaagagaaaattc

SEQ ID NO: 95303 - DNA, 80 bp, synthetic construct
  misc_feature 1..80: note = Artificially Synthesized Probe
  source 1..80: mol_type = other DNA
tgctgcccccctgtgtgtatttacccatgtgcctccaggggatttgggggctcccagcaaacacagcagcaggcaccgtc

SEQ ID NO: 95304 - DNA, 80 bp, synthetic construct
  misc_feature 1..80: note = Artificially Synthesized Probe
  source 1..80: mol_type = other DNA
ctctgcagaaaagcacaggtaagtgccacccctgccctgccctgccctgccccgccccgcatcaccccgcctggcctggc

SEQ ID NO: 95305 - DNA, 80 bp, synthetic construct; identical to SEQ ID NO: 34104
  misc_feature 1..80: note = Artificially Synthesized Probe
  source 1..80: mol_type = other DNA

SEQ ID NO: 95306 - DNA, 80 bp, synthetic construct
  misc_feature 1..80: note = Artificially Synthesized Probe
  source 1..80: mol_type = other DNA
ttccatgcttcagggaggggtgggcagggaaggggtcccagctttcccagctcccgagcccagggatctggtggtcctgg

SEQ ID NO: 95307 - DNA, 80 bp, synthetic construct
  misc_feature 1..80: note = Artificially Synthesized Probe
  source 1..80: mol_type = other DNA
gctgtgtctgtcccccggggctggtgtcggatgggagtgggggctgcattgccgaggaggactgcccctgtgtgcacaac

SEQ ID NO: 95308 - DNA, 80 bp, synthetic construct; identical to SEQ ID NO: 34094
  misc_feature 1..80: note = Artificially Synthesized Probe
  source 1..80: mol_type = other DNA

SEQ ID NO: 95309 - DNA, 80 bp, synthetic construct
  misc_feature 1..80: note = Artificially Synthesized Probe
  source 1..80: mol_type = other DNA
agctggccagggtgaggtggggccgtggcaggagagagagttgctaggaaagccatgggccgtcctgtgcgtcctctgga

SEQ ID NO: 95310 - DNA, 80 bp, synthetic construct
  misc_feature 1..80: note = Artificially Synthesized Probe
  source 1..80: mol_type = other DNA
ggaaggccgggagagcaggcccctgtgagcaggcaccattgtggccccttgcagcacctgcaggaaccggaggtgggagt

SEQ ID NO: 95311 - DNA, 80 bp, synthetic construct; identical to SEQ ID NO: 34105
  misc_feature 1..80: note = Artificially Synthesized Probe
  source 1..80: mol_type = other DNA

SEQ ID NO: 95312 - DNA, 80 bp, synthetic construct
  misc_feature 1..80: note = Artificially Synthesized Probe
  source 1..80: mol_type = other DNA
cagcagtgtcctggccccgggctgctgttccaagcagccacaaaccagggggcttagacaacagaaatgcattctcagtc

SEQ ID NO: 95313 - DNA, 80 bp, synthetic construct
  misc_feature 1..80: note = Artificially Synthesized Probe
  source 1..80: mol_type = other DNA
tttctcttctgtctcttgtaaggacactggtcattggatttagggcccccccccgcccccacgtagtccaggatgatctc

SEQ ID NO: 95314 - DNA, 80 bp, synthetic construct
  misc_feature 1..80: note = Artificially Synthesized Probe
  source 1..80: mol_type = other DNA
ctcccaggggataaagcagcgccgctggccgggatgctccctgcagatggcgggaggggctgaggaccgcagcgggtcag

SEQ ID NO: 95315 - DNA, 80 bp, synthetic construct; identical to SEQ ID NO: 34106
  misc_feature 1..80: note = Artificially Synthesized Probe
  source 1..80: mol_type = other DNA

SEQ ID NO: 95316 - DNA, 80 bp, synthetic construct
  misc_feature 1..80: note = Artificially Synthesized Probe
  source 1..80: mol_type = other DNA
tggggatcttcctggtcatcgagacccacgggatggccgtgtcctgggaccggaagaccagcgtgttcatccgactgcac

SEQ ID NO: 95317 - DNA, 80 bp, synthetic construct
  misc_feature 1..80: note = Artificially Synthesized Probe
  source 1..80: mol_type = other DNA
agaggattttgcagggaagcaggtgccacccagcggcccacccagggacccactgcacacctgtctcctacaagttcacc

SEQ ID NO: 95318 - DNA, 80 bp, synthetic construct; identical to SEQ ID NO: 34107
  misc_feature 1..80: note = Artificially Synthesized Probe
  source 1..80: mol_type = other DNA

SEQ ID NO: 95319 - DNA, 80 bp, synthetic construct
  misc_feature 1..80: note = Artificially Synthesized Probe
  source 1..80: mol_type = other DNA
ggggaggggttgcctgggttggggaggggctgtctggggcaggggaggagctgcctggggcgggggaggggctgtagggc

SEQ ID NO: 95320 - DNA, 80 bp, synthetic construct
  misc_feature 1..80: note = Artificially Synthesized Probe
  source 1..80: mol_type = other DNA
gtctggtggggatggcagttgcttccttcccgccgagaactgggtcttctgggcagacagcagcgctccaaggagggtct

SEQ ID NO: 95321 - DNA, 80 bp, synthetic construct
  misc_feature 1..80: note = Artificially Synthesized Probe
  source 1..80: mol_type = other DNA
aggggcagccctctatgtggcccctagccaccctcctctatgatccccagacctgcccagtcctcagcacaaactggaat

SEQ ID NO: 95322 - DNA, 80 bp, synthetic construct
  misc_feature 1..80: note = Artificially Synthesized Probe
  source 1..80: mol_type = other DNA
accagcctggtcaacatggcgaaaccccgtctctacaaaaaatacaaaaatagccgggtgtggtggtgtgtgcctgtaat

SEQ ID NO: 95323 - DNA, 80 bp, synthetic construct; identical to SEQ ID NO: 34108
  misc_feature 1..80: note = Artificially Synthesized Probe
  source 1..80: mol_type = other DNA

SEQ ID NO: 95324 - DNA, 80 bp, synthetic construct
  misc_feature 1..80: note = Artificially Synthesized Probe
  source 1..80: mol_type = other DNA
gaccccttggaaggtcctgtggcctgacaaagctgagcccaggttcagatggggcctgggaggggtgtgggctgcctgga

SEQ ID NO: 95325 - DNA, 80 bp, synthetic construct
  misc_feature 1..80: note = Artificially Synthesized Probe
  source 1..80: mol_type = other DNA
tggcatgttctgggctcaccccagtgatcaggggacgaggctgaccctcacagagcttccagaggaggcagaaaggcggt

SEQ ID NO: 95326 - DNA, 80 bp, synthetic construct
  misc_feature 1..80: note = Artificially Synthesized Probe
  source 1..80: mol_type = other DNA
tttgaaacctgtgggccacatgaccagatccacgtgatagaaagatccaaagagcacatgtgaaggcaggcagatgggca

SEQ ID NO: 95327 - DNA, 80 bp, synthetic construct; identical to SEQ ID NO: 34109
  misc_feature 1..80: note = Artificially Synthesized Probe
  source 1..80: mol_type = other DNA

SEQ ID NO: 95328 - DNA, 80 bp, synthetic construct
  misc_feature 1..80: note = Artificially Synthesized Probe
  source 1..80: mol_type = other DNA
cgtgtgcctgcgactcgggtggcgactgcgagtgtttctgcacggctgtggctgcctacgcccaggcctgccacgacgcg

SEQ ID NO: 95329 - DNA, 80 bp, synthetic construct
  misc_feature 1..80: note = Artificially Synthesized Probe
  source 1..80: mol_type = other DNA
gcctccatgtgagtgcacaagtttctatgcacagaggaagacctgtgcaaaaccaccagacaggttgccccagcatgaga

SEQ ID NO: 95330 - DNA, 80 bp, synthetic construct
  misc_feature 1..80: note = Artificially Synthesized Probe
  source 1..80: mol_type = other DNA
gtgagggctggtgggcgcctccttagcctctgccctctgtgccccagccttgttctgtgacttctacaacccacatgggg

SEQ ID NO: 95331 - DNA, 80 bp, synthetic construct
  misc_feature 1..80: note = Artificially Synthesized Probe
  source 1..80: mol_type = other DNA
gggaaaggcagtcaacctggatctctggaggcggcccctgtggtggttcccagatgtcagcaggacctggctggaaaagc

SEQ ID NO: 95332 - DNA, 80 bp, synthetic construct
  misc_feature 1..80: note = Artificially Synthesized Probe
  source 1..80: mol_type = other DNA
cggggatccccagggacgcggtgtaggctcccgtaaactgcacaatgcaagccttgagggcaggcccctgctggctggtg

SEQ ID NO: 95333 - DNA, 80 bp, synthetic construct; identical to SEQ ID NO: 34110
  misc_feature 1..80: note = Artificially Synthesized Probe
  source 1..80: mol_type = other DNA

SEQ ID NO: 95334 - DNA, 80 bp, synthetic construct
  misc_feature 1..80: note = Artificially Synthesized Probe
  source 1..80: mol_type = other DNA
gcgctcacagccttgagggtaaggaagggccggggggttagtgggccggtgaaggctggggccaggggctcggaggccct

SEQ ID NO: 95335 - DNA, 80 bp, synthetic construct
  misc_feature 1..80: note = Artificially Synthesized Probe
  source 1..80: mol_type = other DNA
tcctggaactccagccacaacgccattcaccttcaccaccgcctgggtcccccactccacgacaagtaagccctgcctgg

SEQ ID NO: 95336 - DNA, 80 bp, synthetic construct; identical to SEQ ID NO: 34111
  misc_feature 1..80: note = Artificially Synthesized Probe
  source 1..80: mol_type = other DNA

SEQ ID NO: 95337 - DNA, 80 bp, synthetic construct
  misc_feature 1..80: note = Artificially Synthesized Probe
  source 1..80: mol_type = other DNA
ccttgtgaggccaggactggaggatgctgagccaggacccctttcccatgccccttgcaggcccggccctcccggtctcc

SEQ ID NO: 95338 - DNA, 80 bp, synthetic construct
  misc_feature 1..80: note = Artificially Synthesized Probe
  source 1..80: mol_type = other DNA
agcttcccgacatgccgctggaggagctgggccagcaggtggactgtgaccgcatgcgggggctgatgtgcgccaacagc

SEQ ID NO: 95339 - DNA, 80 bp, synthetic construct
  misc_feature 1..80: note = Artificially Synthesized Probe
  source 1..80: mol_type = other DNA
aaaagaccaccctatgggtgaccccgagcatccggtcgacggcggccctcacctcgcagactgggtccagctcaggcccc

SEQ ID NO: 95340 - DNA, 80 bp, synthetic construct; identical to SEQ ID NO: 34112
  misc_feature 1..80: note = Artificially Synthesized Probe
  source 1..80: mol_type = other DNA

SEQ ID NO: 95341 - DNA, 80 bp, synthetic construct
  misc_feature 1..80: note = Artificially Synthesized Probe
  source 1..80: mol_type = other DNA
cccaggccctgttctcaacgccgcagcctacgagtagcccggggctgaccagggctcccccggccagcaccacagcagtc

SEQ ID NO: 95342 - DNA, 80 bp, synthetic construct
  misc_feature 1..80: note = Artificially Synthesized Probe
  source 1..80: mol_type = other DNA
caaactgggcagacaatggccgggggtcctcagagtcctgtgggttggagctgcctcctcccagcctccatggggttggt

SEQ ID NO: 95343 - DNA, 80 bp, synthetic construct
  misc_feature 1..80: note = Artificially Synthesized Probe
  source 1..80: mol_type = other DNA
ggagcttgggcacatggcgcccctcacagccacccacgctggccccaacaacaatggcaacctccagagctcgcccgaca

SEQ ID NO: 95344 - DNA, 80 bp, synthetic construct
  misc_feature 1..80: note = Artificially Synthesized Probe
  source 1..80: mol_type = other DNA
gtcaaccgaagtgtgagtggacagagtggtttgacgtggacttcccaacctcaggggttgcaggcggggacatggaaact

SEQ ID NO: 95345 - DNA, 80 bp, synthetic construct; identical to SEQ ID NO: 34113
  misc_feature 1..80: note = Artificially Synthesized Probe
  source 1..80: mol_type = other DNA

SEQ ID NO: 95346 - DNA, 80 bp, synthetic construct; identical to SEQ ID NO: 34117
  misc_feature 1..80: note = Artificially Synthesized Probe
  source 1..80: mol_type = other DNA

SEQ ID NO: 95347 - DNA, 80 bp, synthetic construct
  misc_feature 1..80: note = Artificially Synthesized Probe
  source 1..80: mol_type = other DNA
gaccaccacacccacggccaccatgtccacagccacaccctcctccactccagagactgcccacacctccacagtgctta

SEQ ID NO: 95348 - DNA, 80 bp, synthetic construct
  misc_feature 1..80: note = Artificially Synthesized Probe
  source 1..80: mol_type = other DNA
cctccagcccagggacggcactcacgcctccagtgtggatcagcacaaccaccacacccacaaccagaggctccacggtg

SEQ ID NO: 95349 - DNA, 80 bp, synthetic construct
  misc_feature 1..80: note = Artificially Synthesized Probe
  source 1..80: mol_type = other DNA
gctccaccaccaacccctcctcaactcctgggacaactcccatccccccagtgctgaccaccaccgccaccacacctgca

SEQ ID NO: 95350 - DNA, 80 bp, synthetic construct
  misc_feature 1..80: note = Artificially Synthesized Probe
  source 1..80: mol_type = other DNA
ccacccacatcacagagccttccacggtgacttcccacaccctagcagcaaccaccggtaccacccagcactcgactcca

SEQ ID NO: 95351 - DNA, 80 bp, synthetic construct
  misc_feature 1..80: note = Artificially Synthesized Probe
  source 1..80: mol_type = other DNA
cccccataaccacggtggtgaccatgggctgtgagccccagtgtgcctggtcagagtggctggactacagctaccccatg

SEQ ID NO: 95352 - DNA, 80 bp, synthetic construct; identical to SEQ ID NO: 34095
  misc_feature 1..80: note = Artificially Synthesized Probe
  source 1..80: mol_type = other DNA

SEQ ID NO: 95353 - DNA, 80 bp, synthetic construct
  misc_feature 1..80: note = Artificially Synthesized Probe
  source 1..80: mol_type = other DNA
gcctggtctgcaggaaccgtgagcaggtggggaagttcaagatgtgcttcaactatgaaatccgtgtgttctgctgcaac

SEQ ID NO: 95354 - DNA, 80 bp, synthetic construct; identical to SEQ ID NO: 34115
  misc_feature 1..80: note = Artificially Synthesized Probe
  source 1..80: mol_type = other DNA

SEQ ID NO: 95355 - DNA, 80 bp, synthetic construct
  misc_feature 1..80: note = Artificially Synthesized Probe
  source 1..80: mol_type = other DNA
ttctgctaagtcacgcctggaaggctccaagtgtgtcctcctaacaaagctggtctttgtccttctccaagggatgtgtg

SEQ ID NO: 95356 - DNA, 80 bp, synthetic construct
  misc_feature 1..80: note = Artificially Synthesized Probe
  source 1..80: mol_type = other DNA
ccctgggcaccacctggacccgcctatcacagaccaccacacccacggccaccatgtccacagccacaccctcctccact

SEQ ID NO: 95357 - DNA, 80 bp, synthetic construct
  misc_feature 1..80: note = Artificially Synthesized Probe
  source 1..80: mol_type = other DNA
cagggacggcacgcacgcttccagtgtggatcagcacaaccaccacacccacaaccagaggttccacggtgaccccctcc

SEQ ID NO: 95358 - DNA, 80 bp, synthetic construct; identical to SEQ ID NO: 34119
  misc_feature 1..80: note = Artificially Synthesized Probe
  source 1..80: mol_type = other DNA

SEQ ID NO: 95359 - DNA, 80 bp, synthetic construct
  misc_feature 1..80: note = Artificially Synthesized Probe
  source 1..80: mol_type = other DNA
tcacagagccttccacggggacttcccacaccccagcagcaaccaccggtaccacccagcactcgactccagccctgtcc

SEQ ID NO: 95360 - DNA, 80 bp, synthetic construct; identical to SEQ ID NO: 34116
  misc_feature 1..80: note = Artificially Synthesized Probe
  source 1..80: mol_type = other DNA

SEQ ID NO: 95361 - DNA, 80 bp, synthetic construct
  misc_feature 1..80: note = Artificially Synthesized Probe
  source 1..80: mol_type = other DNA
gcaggaaccgtgagcaggtggggaagttcaagatgtgcttcaactatgaaatccgtgtgttctgctgcaactacggccac

SEQ ID NO: 95362 - DNA, 80 bp, synthetic construct; identical to SEQ ID NO: 34121
  misc_feature 1..80: note = Artificially Synthesized Probe
  source 1..80: mol_type = other DNA

SEQ ID NO: 95363 - DNA, 80 bp, synthetic construct; identical to SEQ ID NO: 34120
  misc_feature 1..80: note = Artificially Synthesized Probe
  source 1..80: mol_type = other DNA

SEQ ID NO: 95364 - DNA, 80 bp, synthetic construct
  misc_feature 1..80: note = Artificially Synthesized Probe
  source 1..80: mol_type = other DNA
gccaccgtgacggtgcccaccggatccacggccaccgcctcctccacccgggcaactgctggcaccctcaaagtgctgac

SEQ ID NO: 95365 - DNA, 80 bp, synthetic construct
  misc_feature 1..80: note = Artificially Synthesized Probe
  source 1..80: mol_type = other DNA
cgcctatcacagaccaccacacccacggccaccatgtccacagccacaccctcctctactccagagactgtccacacctc

SEQ ID NO: 95366 - DNA, 80 bp, synthetic construct
  misc_feature 1..80: note = Artificially Synthesized Probe
  source 1..80: mol_type = other DNA
gcaggctttccatagcattgagcaggagcggaggcatctgcggctgacggttggggtggcctgagcggctggggaggagt

SEQ ID NO: 95367 - DNA, 80 bp, synthetic construct
  misc_feature 1..80: note = Artificially Synthesized Probe
  source 1..80: mol_type = other DNA
agccaccccctcctccagcccagggacggcactcacgcctccagtgtggatcagcacaaccaccacacccacaaccagag

SEQ ID NO: 95368 - DNA, 80 bp, synthetic construct
  misc_feature 1..80: note = Artificially Synthesized Probe
  source 1..80: mol_type = other DNA
cacagccaccggctccaccaccaacccctcctcaactccagggacaactcccatccccccagtgctgaccaccaccgcca

SEQ ID NO: 95369 - DNA, 80 bp, synthetic construct
  misc_feature 1..80: note = Artificially Synthesized Probe
  source 1..80: mol_type = other DNA
tgagtgtcctggatgggaccctacccgtccccaacacagggctctggggccccacgggctcacagtgtcaggaaactcag

SEQ ID NO: 95370 - DNA, 80 bp, synthetic construct; identical to SEQ ID NO: 34114
  misc_feature 1..80: note = Artificially Synthesized Probe
  source 1..80: mol_type = other DNA

SEQ ID NO: 95371 - DNA, 80 bp, synthetic construct
  misc_feature 1..80: note = Artificially Synthesized Probe
  source 1..80: mol_type = other DNA
ccccacatcggcccccataaccacggtggtgaccacgggctgtgagccccagtgtgcctggtcagagtggctggactaca

SEQ ID NO: 95372 - DNA, 80 bp, synthetic construct
  misc_feature 1..80: note = Artificially Synthesized Probe
  source 1..80: mol_type = other DNA
cctggactttggcctggtctgcaggaaccgtgagcaggtggggaagttcaagatgtgcttcaactatgaaatccgtgtgt

SEQ ID NO: 95373 - DNA, 80 bp, synthetic construct
  misc_feature 1..80: note = Artificially Synthesized Probe
  source 1..80: mol_type = other DNA
gaccacctggatcctcacagagccgagcactacagccaccgtgacggtgcccaccggatccacggccaccgcctcctcca

SEQ ID NO: 95374 - DNA, 80 bp, synthetic construct
  misc_feature 1..80: note = Artificially Synthesized Probe
  source 1..80: mol_type = other DNA
cccctcctcctccctgggcaccacctggacccgcctatcacagaccaccacacccacggccaccatgtccacagccacac

SEQ ID NO: 95375 - DNA, 80 bp, synthetic construct
  misc_feature 1..80: note = Artificially Synthesized Probe
  source 1..80: mol_type = other DNA
ctcctccagcccagggacggcacgcacgcctccagtgtggatcagcacaaccaccacacccacaaccagtggctccacgg

SEQ ID NO: 95376 - DNA, 80 bp, synthetic construct
  misc_feature 1..80: note = Artificially Synthesized Probe
  source 1..80: mol_type = other DNA
cggctccaccaccaacccctcctcaactccagggacaacacctatccccccagtgctgaccaccaccgccaccacacctg

SEQ ID NO: 95377 - DNA, 80 bp, synthetic construct
  misc_feature 1..80: note = Artificially Synthesized Probe
  source 1..80: mol_type = other DNA
caccacccacatcacagagccttccacggggacttcccacaccccagcagcaaccaccggtaccacccagcactcgactc

SEQ ID NO: 95378 - DNA, 80 bp, synthetic construct
  misc_feature 1..80: note = Artificially Synthesized Probe
  source 1..80: mol_type = other DNA
cttcccacagagacccagggccctgtggagccgagctgggagaatgcagggcacaccatggatggcggtatgtggccagg

SEQ ID NO: 95379 - DNA, 80 bp, synthetic construct
  misc_feature 1..80: note = Artificially Synthesized Probe
  source 1..80: mol_type = other DNA
ggcccccataaccacggtggtgaccacgggctgtgagccccagtgtgcctggtcagagtggctggactacagctacccca

SEQ ID NO: 95380 - DNA, 80 bp, synthetic construct
  misc_feature 1..80: note = Artificially Synthesized Probe
  source 1..80: mol_type = other DNA
tggcctggtctgcaggaaccgtgagcaggtggggaagttcaagatgtgcttcaactatgaaatccgtgtgttctgctgca

SEQ ID NO: 95381 - DNA, 80 bp, synthetic construct
  misc_feature 1..80: note = Artificially Synthesized Probe
  source 1..80: mol_type = other DNA
ccctcccaaagtgctgaccagcccggccaccacacccacagccaccagttccaaagccacttcctcctccagtccaagga

SEQ ID NO: 95382 - DNA, 80 bp, synthetic construct
  misc_feature 1..80: note = Artificially Synthesized Probe
  source 1..80: mol_type = other DNA
ccgtggccaccatgtccacaatccacccctcctccactccggagaccacccacacctccacagtgctgaccacgaaggcc

SEQ ID NO: 95383 - DNA, 80 bp, synthetic construct
  misc_feature 1..80: note = Artificially Synthesized Probe
  source 1..80: mol_type = other DNA
ccgtcctccaccccagggaccacctggatcctcacagagctgaccacaacagccactacgactgcgtccactggatccac

SEQ ID NO: 95384 - DNA, 80 bp, synthetic construct
  misc_feature 1..80: note = Artificially Synthesized Probe
  source 1..80: mol_type = other DNA
accagctccaaagccactccctcctccagtccagggactgcaactgcccttccagcactgagaagcacagccaccacacc

SEQ ID NO: 95385 - DNA, 80 bp, synthetic construct
  misc_feature 1..80: note = Artificially Synthesized Probe
  source 1..80: mol_type = other DNA
acaaccggggccaccggctctgtggccaccccctcctccaccccaggaacagctcacactaccaaagtgccgactaccac

SEQ ID NO: 95386 - DNA, 80 bp, synthetic construct
  misc_feature 1..80: note = Artificially Synthesized Probe
  source 1..80: mol_type = other DNA
gtgctgaccaccaccaccacaactgtggccactggttctatggcaacaccctcctctagcacacagaccagtggtactcc

SEQ ID NO: 95387 - DNA, 80 bp, synthetic construct
  misc_feature 1..80: note = Artificially Synthesized Probe
  source 1..80: mol_type = other DNA
actgcaaccacccttccagtgctgacaagcacagccacaaaatccacagctaccagctttacacccatcccctcctccac

SEQ ID NO: 95388 - DNA, 80 bp, synthetic construct
  misc_feature 1..80: note = Artificially Synthesized Probe
  source 1..80: mol_type = other DNA
tccactctggggacgacccggatcctcactgagctgaccacaacagccactacaactgcagccactggatccacggccac

SEQ ID NO: 95389 - DNA, 80 bp, synthetic construct
  misc_feature 1..80: note = Artificially Synthesized Probe
  source 1..80: mol_type = other DNA
agaggaaagtgcagagcagagagacatgcacacagaagcacacgcgtggacaggcacatgcgtgcccacacttacactgg

SEQ ID NO: 95390 - DNA, 80 bp, synthetic construct
  misc_feature 1..80: note = Artificially Synthesized Probe
  source 1..80: mol_type = other DNA
gcctccacggttcccagctcgtccaccgtggggaccacccgcacccctgcagtgctccccagcagcctgccaaccttcag

SEQ ID NO: 95391 - DNA, 80 bp, synthetic construct
  misc_feature 1..80: note = Artificially Synthesized Probe
  source 1..80: mol_type = other DNA
gccaacctgggtctgcctgtcctgggagccagtggctttctccctgctggtcatgtttgttccccactggcctcacttgg

SEQ ID NO: 95392 - DNA, 80 bp, synthetic construct; identical to SEQ ID NO: 34122
  misc_feature 1..80: note = Artificially Synthesized Probe
  source 1..80: mol_type = other DNA

SEQ ID NO: 95393 - DNA, 80 bp, synthetic construct
  misc_feature 1..80: note = Artificially Synthesized Probe
  source 1..80: mol_type = other DNA
tttgctctcccagaactctggcttacccatctctgggagtggcttatctttctatggtgttgttcttcacaggggaagtc

SEQ ID NO: 95394 - DNA, 80 bp, synthetic construct
  misc_feature 1..80: note = Artificially Synthesized Probe
  source 1..80: mol_type = other DNA
ggcttatctttctatggtgttgttcttcacaggggaagtcatctacaataagaccgaccgagccggctgccatttctacg

SEQ ID NO: 95395 - DNA, 80 bp, synthetic construct
  misc_feature 1..80: note = Artificially Synthesized Probe
  source 1..80: mol_type = other DNA
atctacaataagaccgaccgagccggctgccatttctacgcagtgtgcaatcagcactgtgacattgaccgcttccaggg

SEQ ID NO: 95396 - DNA, 80 bp, synthetic construct
  misc_feature 1..80: note = Artificially Synthesized Probe
  source 1..80: mol_type = other DNA
ccacagtccagctcccgaggcccgtctcagtgaccccgccgccagtatctccagttggaggaggcacacagggcctaggg

SEQ ID NO: 95397 - DNA, 80 bp, synthetic construct; identical to SEQ ID NO: 34123
  misc_feature 1..80: note = Artificially Synthesized Probe
  source 1..80: mol_type = other DNA

SEQ ID NO: 95398 - DNA, 80 bp, synthetic construct
  misc_feature 1..80: note = Artificially Synthesized Probe
  source 1..80: mol_type = other DNA
cacagtggggtgcagtggggaatggtggggcatggtggggcatggtggggtgcagtggggcatggtggggcatggtgggg

SEQ ID NO: 95399 - DNA, 80 bp, synthetic construct
  misc_feature 1..80: note = Artificially Synthesized Probe
  source 1..80: mol_type = other DNA
gaggctggtttgctgagcttctctgcacatcagcctgtgtggtttgaaagggaccctgcccaggggcttctggggccagg

SEQ ID NO: 95400 - DNA, 80 bp, synthetic construct
  misc_feature 1..80: note = Artificially Synthesized Probe
  source 1..80: mol_type = other DNA
ggggagcttatacaacagaaacccactctccgtcctggagctggaagtctgagatccaggcgggcaggggatagactccc

SEQ ID NO: 95401 - DNA, 80 bp, synthetic construct; identical to SEQ ID NO: 34124
  misc_feature 1..80: note = Artificially Synthesized Probe
  source 1..80: mol_type = other DNA

SEQ ID NO: 95402 - DNA, 80 bp, synthetic construct
  misc_feature 1..80: note = Artificially Synthesized Probe
  source 1..80: mol_type = other DNA
ttcaagatgcttcccttaatcccatctgcaaagacactttctcccggcaaagccacatgcggaggttctgggatagccat

SEQ ID NO: 95403 - DNA, 80 bp, synthetic construct; identical to SEQ ID NO: 34096
  misc_feature 1..80: note = Artificially Synthesized Probe
  source 1..80: mol_type = other DNA

SEQ ID NO: 95404 - DNA, 80 bp, synthetic construct
  misc_feature 1..80: note = Artificially Synthesized Probe
  source 1..80: mol_type = other DNA
ccgtccatctctgtcccgcaggcatctgcagcatgtggggcggctcccactattccacctttgacggcacctcttacacc

SEQ ID NO: 95405 - DNA, 80 bp, synthetic construct
  misc_feature 1..80: note = Artificially Synthesized Probe
  source 1..80: mol_type = other DNA
tcctcactgtcaccatggtgcatgggaaggaggagggcctggtgagtccaggctgcgggtggcacagtgttggcccagtc

SEQ ID NO: 95406 - DNA, 80 bp, synthetic construct
  misc_feature 1..80: note = Artificially Synthesized Probe
  source 1..80: mol_type = other DNA
gcccccagggaagatctgggctttggggtgggggatacacaggggggtctctgcacatggaggcagagccccaaagagaa

SEQ ID NO: 95407 - DNA, 80 bp, synthetic construct; identical to SEQ ID NO: 34125
  misc_feature 1..80: note = Artificially Synthesized Probe
  source 1..80: mol_type = other DNA

SEQ ID NO: 95408 - DNA, 80 bp, synthetic construct
  misc_feature 1..80: note = Artificially Synthesized Probe
  source 1..80: mol_type = other DNA
ccactcccaggcacctgcaccaacaaccagagggacgactgtctccagcgggacggaaccactgccgccagttgcaagga

SEQ ID NO: 95409 - DNA, 80 bp, synthetic construct
  misc_feature 1..80: note = Artificially Synthesized Probe
  source 1..80: mol_type = other DNA
gtcctcccctcgggggttgcaggccctggggcgcccccgcccgcccgcatgcacgcacgcacgcagctccctggggctgg

SEQ ID NO: 95410 - DNA, 80 bp, synthetic construct
  misc_feature 1..80: note = Artificially Synthesized Probe
  source 1..80: mol_type = other DNA
cccggggagtgtgcagtgactggcgaggtgcaaccggtggcctgtgcggtgagtgggggcggccccgggccccccagacc

SEQ ID NO: 95411 - DNA, 80 bp, synthetic construct
  misc_feature 1..80: note = Artificially Synthesized Probe
  source 1..80: mol_type = other DNA
cccgggccccccagacccctcggcctctctgagtgtcctgtgcggtgagtgggggcggccccgggccccccagacccctc

SEQ ID NO: 95412 - DNA, 80 bp, synthetic construct
  misc_feature 1..80: note = Artificially Synthesized Probe
  source 1..80: mol_type = other DNA
ggccccccagacccctcggcctctctgagtgtcctgtgcggtgagtgggggcggccccgggccccccagactcctcggcc

SEQ ID NO: 95413 - DNA, 80 bp, synthetic construct
  misc_feature 1..80: note = Artificially Synthesized Probe
  source 1..80: mol_type = other DNA
tacagggatggctggtgccttccctgccacccaggcctgcctgaccggtctgggggagcaggaggaggccagagggtgtc

SEQ ID NO: 95414 - DNA, 80 bp, synthetic construct
  misc_feature 1..80: note = Artificially Synthesized Probe
  source 1..80: mol_type = other DNA
agtcctccgtgtgggcggtctcctggtcactggccaccctgggggatggggacgggtcaggggtcttggagcaaaacaga

SEQ ID NO: 95415 - DNA, 80 bp, synthetic construct
  misc_feature 1..80: note = Artificially Synthesized Probe
  source 1..80: mol_type = other DNA
catccccgcccatacttagccccgcccacccccaccccagccccacccgtccccgcccccagccccgcccaccctgagcc

SEQ ID NO: 95416 - DNA, 80 bp, synthetic construct; identical to SEQ ID NO: 34126
  misc_feature 1..80: note = Artificially Synthesized Probe
  source 1..80: mol_type = other DNA

SEQ ID NO: 95417 - DNA, 80 bp, synthetic construct
  misc_feature 1..80: note = Artificially Synthesized Probe
  source 1..80: mol_type = other DNA
ccacggtcccctgaagccccacagggaggctctgtccttgagtgatcctgtgatggtccctcccctgagccctgcctccc

SEQ ID NO: 95418 - DNA, 80 bp, synthetic construct
  misc_feature 1..80: note = Artificially Synthesized Probe
  source 1..80: mol_type = other DNA
cgcctgcaaactcagcaccctccgtgatgccatgctgttttctttccagcctgcgtgggacccgatgggtttcctaaatt

SEQ ID NO: 95419 - DNA, 80 bp, synthetic construct
  misc_feature 1..80: note = Artificially Synthesized Probe
  source 1..80: mol_type = other DNA
actcgggtaccagcccgagggagggggtggctggacagatgcccagggttgacctgtgtctgtccaggagccctcaggga

SEQ ID NO: 95420 - DNA, 80 bp, synthetic construct
  misc_feature 1..80: note = Artificially Synthesized Probe
  source 1..80: mol_type = other DNA
cccgccgtgcaaccgtcccggcttcgtaaccgtgaccaggccccgggccgagaacccctgctgccccgagacggtgtgcg

SEQ ID NO: 95421 - DNA, 80 bp, synthetic construct; identical to SEQ ID NO: 34127
  misc_feature 1..80: note = Artificially Synthesized Probe
  source 1..80: mol_type = other DNA

SEQ ID NO: 95422 - DNA, 80 bp, synthetic construct
  misc_feature 1..80: note = Artificially Synthesized Probe
  source 1..80: mol_type = other DNA
ccagacagtggcctccatcctcccgcagtgtgcaacacaaccacctgcccccagagcctgcctgtgtgcccgccagggca

SEQ ID NO: 95423 - DNA, 80 bp, synthetic construct
  misc_feature 1..80: note = Artificially Synthesized Probe
  source 1..80: mol_type = other DNA
tagctccctttccttccaggacctcagctgtgttcgtacaatggcaccttctacggggtaagggcacagcagtgggtggg

SEQ ID NO: 95424 - DNA, 80 bp, synthetic construct; identical to SEQ ID NO: 34128
  misc_feature 1..80: note = Artificially Synthesized Probe
  source 1..80: mol_type = other DNA

SEQ ID NO: 95425 - DNA, 80 bp, synthetic construct
  misc_feature 1..80: note = Artificially Synthesized Probe
  source 1..80: mol_type = other DNA
caatgggcgggtgtgcagcacctggggtgacttccactacaagaccttcgacggcgacgtcttccgcttccctggccttt

SEQ ID NO: 95426 - DNA, 80 bp, synthetic construct
  misc_feature 1..80: note = Artificially Synthesized Probe
  source 1..80: mol_type = other DNA
gattccctgcccacctgtggtccctgtgtgcatcagctccctgcctgcctgggtccatgctcagccaggggtgcatctat

SEQ ID NO: 95427 - DNA, 80 bp, synthetic construct
  misc_feature 1..80: note = Artificially Synthesized Probe
  source 1..80: mol_type = other DNA
tctctggggacacccaggacccaacggtgcaatgtcaggaggatgcctgcaacaatactacctgtccccaggtgagaccc

SEQ ID NO: 95428 - DNA, 80 bp, synthetic construct
  misc_feature 1..80: note = Artificially Synthesized Probe
  source 1..80: mol_type = other DNA
aggcacctgcccccaggtgagacccgaggcacctgcccccaggtgagacctgagtcacctgcccccaggtgagccaccaa

SEQ ID NO: 95429 - DNA, 80 bp, synthetic construct; identical to SEQ ID NO: 34129
  misc_feature 1..80: note = Artificially Synthesized Probe
  source 1..80: mol_type = other DNA

SEQ ID NO: 95430 - DNA, 80 bp, synthetic construct
  misc_feature 1..80: note = Artificially Synthesized Probe
  source 1..80: mol_type = other DNA
ctggggtgtagacaggagggcaggctgggccggggcatgtgctggaggagagggttagggcctgacgcccctcatgtccc

SEQ ID NO: 95431 - DNA, 80 bp, synthetic construct
  misc_feature 1..80: note = Artificially Synthesized Probe
  source 1..80: mol_type = other DNA
ctgcacaagaggtaatccctactcagcttccacactcacccttgcatttcagctgaatgaaacctgggtcaacagccatg

SEQ ID NO: 95432 - DNA, 80 bp, synthetic construct
  misc_feature 1..80: note = Artificially Synthesized Probe
  source 1..80: mol_type = other DNA
tgggatgccctgcacagcagggaggccccacccctgctggggaggccccacccctgcctgggaagccccacccctgcctg

SEQ ID NO: 95433 - DNA, 80 bp, synthetic construct
  misc_feature 1..80: note = Artificially Synthesized Probe
  source 1..80: mol_type = other DNA
agggtaagtggaagccaccttcccacaccagccctccagctccagcccgtcgccacccatccattcctgcccagacatct

SEQ ID NO: 95434 - DNA, 80 bp, synthetic construct; identical to SEQ ID NO: 34130
  misc_feature 1..80: note = Artificially Synthesized Probe
  source 1..80: mol_type = other DNA

SEQ ID NO: 95435 - DNA, 80 bp, synthetic construct
  misc_feature 1..80: note = Artificially Synthesized Probe
  source 1..80: mol_type = other DNA
ccccctctccacgtccattggcagaaagcctggggccgctctcctagccaggccagggcccggctgagccgagccacatg

SEQ ID NO: 95436 - DNA, 80 bp, synthetic construct
  misc_feature 1..80: note = Artificially Synthesized Probe
  source 1..80: mol_type = other DNA
gcagcggtgagccggccaccctggggaggggcgagggccgggccacacagtgtgacctccccacacggccatgtctgacc

SEQ ID NO: 95437 - DNA, 80 bp, synthetic construct
  misc_feature 1..80: note = Artificially Synthesized Probe
  source 1..80: mol_type = other DNA
gggtcaagggctgcttagggtcagcaggattggaggagctggttcagacaggggaagtgcaggccacagaagacagagcc

SEQ ID NO: 95438 - DNA, 80 bp, synthetic construct
  misc_feature 1..80: note = Artificially Synthesized Probe
  source 1..80: mol_type = other DNA
ccaaggtggctgatgtgagggccaccctgcgtccacaggtactcagcagaggcccaggccatgcagcaccagtgcacctg

SEQ ID NO: 95439 - DNA, 80 bp, synthetic construct; identical to SEQ ID NO: 34131
  misc_feature 1..80: note = Artificially Synthesized Probe
  source 1..80: mol_type = other DNA

SEQ ID NO: 95440 - DNA, 80 bp, synthetic construct
  misc_feature 1..80: note = Artificially Synthesized Probe
  source 1..80: mol_type = other DNA
gagagcctgtggcccaccttggccttgcccctccctgatgtcactgggacgccctggaacaaactaagcatgtgcgggcc

SEQ ID NO: 95441 - DNA, 80 bp, synthetic construct
  misc_feature 1..80: note = Artificially Synthesized Probe
  source 1..80: mol_type = other DNA
agggctgaggtcgcaacggccaggtcagagaggggtcagcatcccaaagccccctctgctcaacccagcccagttttgca

SEQ ID NO: 95442 - DNA, 80 bp, synthetic construct; identical to SEQ ID NO: 34097
  misc_feature 1..80: note = Artificially Synthesized Probe
  source 1..80: mol_type = other DNA

SEQ ID NO: 95443 - DNA, 80 bp, synthetic construct
  misc_feature 1..80: note = Artificially Synthesized Probe
  source 1..80: mol_type = other DNA
gtggggacttcaacggcctcccggccttcaacgagttctatgcccacagtgagtgccacctgggtgagggggcggtgacc

SEQ ID NO: 95444 - DNA, 80 bp, synthetic construct
  misc_feature 1..80: note = Artificially Synthesized Probe
  source 1..80: mol_type = other DNA
tggcctgggctcaggaagtgggagcccatatcttgtccccaggagcccctcagagccaccacacccctgctttcttcccg

SEQ ID NO: 95445 - DNA, 80 bp, synthetic construct
  misc_feature 1..80: note = Artificially Synthesized Probe
  source 1..80: mol_type = other DNA
cagggggagctgggccgaggtctgaggaatgttcccagctggtggagagatggtgccattggagggaggccgggcagcca

SEQ ID NO: 95446 - DNA, 80 bp, synthetic construct
  misc_feature 1..80: note = Artificially Synthesized Probe
  source 1..80: mol_type = other DNA
caggcatcagagtgagcaggggcaggcttagcgtggacccctgtccaggaccggctctacccttcacgacctccctgggg

SEQ ID NO: 95447 - DNA, 80 bp, synthetic construct; identical to SEQ ID NO: 34098
  misc_feature 1..80: note = Artificially Synthesized Probe
  source 1..80: mol_type = other DNA

SEQ ID NO: 95448 - DNA, 80 bp, synthetic construct
  misc_feature 1..80: note = Artificially Synthesized Probe
  source 1..80: mol_type = other DNA
ggtctgcacctttcttgggcgcttactccacgggcaggcacatccggagtaggggatccccggtcacgggtcactcccca

SEQ ID NO: 95449 - DNA, 80 bp, synthetic construct
  misc_feature 1..80: note = Artificially Synthesized Probe
  source 1..80: mol_type = other DNA
ctgtgctccccaggagggcatctgccaccgcaccctgctggggccggcctttgcggagtgccacgcactggtggacagca

SEQ ID NO: 95450 - DNA, 80 bp, synthetic construct
  misc_feature 1..80: note = Artificially Synthesized Probe
  source 1..80: mol_type = other DNA
gggattgtgccagagagaaggggcagggggagcgccttgggggccactgggggtggggaggcctgggggacaggggtgga

SEQ ID NO: 95451 - DNA, 80 bp, synthetic construct
  misc_feature 1..80: note = Artificially Synthesized Probe
  source 1..80: mol_type = other DNA
gcgtcagggccaccctggggcctagctctggcttctgtggacttgatggcatgtggaaggccgtggaaggcggctggggc

SEQ ID NO: 95452 - DNA, 80 bp, synthetic construct; identical to SEQ ID NO: 34099
  misc_feature 1..80: note = Artificially Synthesized Probe
  source 1..80: mol_type = other DNA

SEQ ID NO: 95453 - DNA, 80 bp, synthetic construct
  misc_feature 1..80: note = Artificially Synthesized Probe
  source 1..80: mol_type = other DNA
gggaaactgaggcccagaggtgcttggtgttcatccaagcgagtgcagctcagggcgggggcggtgtcctggagcaggaa

SEQ ID NO: 95454 - DNA, 80 bp, synthetic construct
  misc_feature 1..80: note = Artificially Synthesized Probe
  source 1..80: mol_type = other DNA
ccacggcggccgcacctacagcccgggcacctccttcaacaccacctgcagctcctggtacttatgagcccaccagcctc

SEQ ID NO: 95455 - DNA, 80 bp, synthetic construct
  misc_feature 1..80: note = Artificially Synthesized Probe
  source 1..80: mol_type = other DNA
gcctccctccccagcacctgctccggggggctatggcagtgccaggacctgccgtgccctggcacctgctctgtgcaggg

SEQ ID NO: 95456 - DNA, 80 bp, synthetic construct; identical to SEQ ID NO: 34100
  misc_feature 1..80: note = Artificially Synthesized Probe
  source 1..80: mol_type = other DNA

SEQ ID NO: 95457 - DNA, 80 bp, synthetic construct; identical to SEQ ID NO: 34093
  misc_feature 1..80: note = Artificially Synthesized Probe
  source 1..80: mol_type = other DNA

SEQ ID NO: 95458 - DNA, 80 bp, synthetic construct
  misc_feature 1..80: note = Artificially Synthesized Probe
  source 1..80: mol_type = other DNA
cgtgggtccttctccccagaaatgtgccgacagcagcttcaccgtgctggctgagctgcggaagtgcggcctgacggaca

SEQ ID NO: 95459 - DNA, 80 bp, synthetic construct
  misc_feature 1..80: note = Artificially Synthesized Probe
  source 1..80: mol_type = other DNA
agcccccaggccaggtccccctccagcccccaggtcaggtcccccctccagccctgaggtcaggtcctcccgggggggca

SEQ ID NO: 95460 - DNA, 80 bp, synthetic construct; identical to SEQ ID NO: 34101
  misc_feature 1..80: note = Artificially Synthesized Probe
  source 1..80: mol_type = other DNA

SEQ ID NO: 95461 - DNA, 80 bp, synthetic construct
  misc_feature 1..80: note = Artificially Synthesized Probe
  source 1..80: mol_type = other DNA
gggaccccacatccagctcgctcagccccactctctcagggagcccggtctccacctgagcccacttggcggccacaggc

SEQ ID NO: 95462 - DNA, 80 bp, synthetic construct
  misc_feature 1..80: note = Artificially Synthesized Probe
  source 1..80: mol_type = other DNA
accctgttcacaccctcgagcttcttcatcgtggtgcagacaggcctggggctgcagctgctggtgcagctggtgccact

SEQ ID NO: 95463 - DNA, 80 bp, synthetic construct
  misc_feature 1..80: note = Artificially Synthesized Probe
  source 1..80: mol_type = other DNA
ctgcccccagggcatggcggagatcctggtgccagcgcaggacaccagcattggaccagcggccccggaagcagccagct

SEQ ID NO: 95464 - DNA, 80 bp, synthetic construct
  misc_feature 1..80: note = Artificially Synthesized Probe
  source 1..80: mol_type = other DNA
tgtgtggtgcctggagggatggcaggggccaggagccaggtgggcccaacagtggccgctgacatcccccaaccctggcc

SEQ ID NO: 95465 - DNA, 80 bp, synthetic construct; identical to SEQ ID NO: 34102
  misc_feature 1..80: note = Artificially Synthesized Probe
  source 1..80: mol_type = other DNA

SEQ ID NO: 95466 - DNA, 80 bp, synthetic construct
  misc_feature 1..80: note = Artificially Synthesized Probe
  source 1..80: mol_type = other DNA
gtgtcaggggtgtgggcttcggggcagggcgtggagatgaggtcaggtcttccccacagagaactacgcccggcactggt

SEQ ID NO: 95467 - DNA, 80 bp, synthetic construct
  misc_feature 1..80: note = Artificially Synthesized Probe
  source 1..80: mol_type = other DNA
cccacctccgcagaactgcatgtttgacacctgcaactgtgagcggagcgaggactgcctgtgcgccgcgctgtcctcct

SEQ ID NO: 95468 - DNA, 80 bp, synthetic construct
  misc_feature 1..80: note = Artificially Synthesized Probe
  source 1..80: mol_type = other DNA
cccccagtggctcccagcctgggcccggggggagctgcgtctggctgcaaggtttgggggctggtttgaccagaatagcc

SEQ ID NO: 95469 - DNA, 80 bp, synthetic construct; identical to SEQ ID NO: 34103
  misc_feature 1..80: note = Artificially Synthesized Probe
  source 1..80: mol_type = other DNA

SEQ ID NO: 95470 - DNA, 80 bp, synthetic construct
  misc_feature 1..80: note = Artificially Synthesized Probe
  source 1..80: mol_type = other DNA
cacaaacagtcattagcagacaacccttttgcaacaaagtatgctttaaaatgtaaactgtggagccattttccttgcgt

SEQ ID NO: 95471 - DNA, 80 bp, synthetic construct; identical to SEQ ID NO: 34235
  misc_feature 1..80: note = Artificially Synthesized Probe
  source 1..80: mol_type = other DNA

SEQ ID NO: 95472 - DNA, 80 bp, synthetic construct
  misc_feature 1..80: note = Artificially Synthesized Probe
  source 1..80: mol_type = other DNA
attcctaaattttctgttgaggaaaccccatgacaacaaccaacacagcacatttccacttctattttgataaaaccaga

SEQ ID NO: 95473 - DNA, 80 bp, synthetic construct
  misc_feature 1..80: note = Artificially Synthesized Probe
  source 1..80: mol_type = other DNA
agattgtattgtgatcaggcatgttatctaaaaatctctagggacttcagcattgacagaataagaaggggaaagagaag

SEQ ID NO: 95474 - DNA, 80 bp, synthetic construct
  misc_feature 1..80: note = Artificially Synthesized Probe
  source 1..80: mol_type = other DNA
gatttctctttcttgggcttctttataggattctccaaaattgtttatttgacgtactgctcaacagtgaaaatcctttt

SEQ ID NO: 95475 - DNA, 80 bp, synthetic construct; identical to SEQ ID NO: 34236
  misc_feature 1..80: note = Artificially Synthesized Probe
  source 1..80: mol_type = other DNA

SEQ ID NO: 95476 - DNA, 80 bp, synthetic construct
  misc_feature 1..80: note = Artificially Synthesized Probe
  source 1..80: mol_type = other DNA
ttgcattagagactttgggtttaattactgtctttataattaatttcaatttgtgctacgaatttcgcaggttttcatct

SEQ ID NO: 95477 - DNA, 80 bp, synthetic construct
  misc_feature 1..80: note = Artificially Synthesized Probe
  source 1..80: mol_type = other DNA
tattaataataaataatacttaatatgatataactaattataagctatataattatatattatagtatataacttatata

SEQ ID NO: 95478 - DNA, 80 bp, synthetic construct
  misc_feature 1..80: note = Artificially Synthesized Probe
  source 1..80: mol_type = other DNA
accatttagaatttgatcagaatgatgctaagtttatacaattaacttagggcacagagctatatttacattactgagta

SEQ ID NO: 95479 - DNA, 80 bp, synthetic construct
  misc_feature 1..80: note = Artificially Synthesized Probe
  source 1..80: mol_type = other DNA
ctgggttaaaatctcctatgtagcttggtatattttctttatgtttgaatgtttcatctatgcatcatttacaaaatgta

SEQ ID NO: 95480 - DNA, 80 bp, synthetic construct
  misc_feature 1..80: note = Artificially Synthesized Probe
  source 1..80: mol_type = other DNA
tagttattacaggaggctagaatgtccataaaacatagagatgcaattaattcccttgttccttattttaataaaactgc

SEQ ID NO: 95481 - DNA, 80 bp, synthetic construct; identical to SEQ ID NO: 34237
  misc_feature 1..80: note = Artificially Synthesized Probe
  source 1..80: mol_type = other DNA

SEQ ID NO: 95482 - DNA, 80 bp, synthetic construct
  misc_feature 1..80: note = Artificially Synthesized Probe
  source 1..80: mol_type = other DNA
ggtctcgaactcctgacctcaggtgattcacctgcctcggtctcccaaagtgctgagattacaggcgtgagccaccgcgc

SEQ ID NO: 95483 - DNA, 80 bp, synthetic construct
  misc_feature 1..80: note = Artificially Synthesized Probe
  source 1..80: mol_type = other DNA
ttttgatattcatccacattgctacatgtaacagtggtttgttccttttcattgcagcttttatttgtgtggttgagatg

SEQ ID NO: 95484 - DNA, 80 bp, synthetic construct; identical to SEQ ID NO: 34238
  misc_feature 1..80: note = Artificially Synthesized Probe
  source 1..80: mol_type = other DNA

SEQ ID NO: 95485 - DNA, 80 bp, synthetic construct
  misc_feature 1..80: note = Artificially Synthesized Probe
  source 1..80: mol_type = other DNA
catttcattttattatatttatatacaacaaccgctttacagtattctattagatttttgattgatagtctatggttcct

SEQ ID NO: 95486 - DNA, 80 bp, synthetic construct
  misc_feature 1..80: note = Artificially Synthesized Probe
  source 1..80: mol_type = other DNA
tattaactttccagcatttatgtcccagatcagtttacatgcctgagccacagatgttctttctaatcttgaaaataatt

SEQ ID NO: 95487 - DNA, 80 bp, synthetic construct
  misc_feature 1..80: note = Artificially Synthesized Probe
  source 1..80: mol_type = other DNA
tgttatttaaataagtagttttattgggaaaatgttattttttaaaatcctcatcatcaaatattttgttcccattgaag

SEQ ID NO: 95488 - DNA, 80 bp, synthetic construct
  misc_feature 1..80: note = Artificially Synthesized Probe
  source 1..80: mol_type = other DNA
tcatatatttatgttcaatcctttctgctcttaaatgagtattagctatttggtccaatagtttaatagtgatgcgtcaa

SEQ ID NO: 95489 - DNA, 80 bp, synthetic construct; identical to SEQ ID NO: 34239
  misc_feature 1..80: note = Artificially Synthesized Probe
  source 1..80: mol_type = other DNA

SEQ ID NO: 95490 - DNA, 80 bp, synthetic construct
  misc_feature 1..80: note = Artificially Synthesized Probe
  source 1..80: mol_type = other DNA
acaaatatttattgatctccttctgggctccaagtactacactgagcatttgggatatattaatgaacataataaacaac

SEQ ID NO: 95491 - DNA, 80 bp, synthetic construct
  misc_feature 1..80: note = Artificially Synthesized Probe
  source 1..80: mol_type = other DNA
cttgtgataattttacttttgggtttgagtccatatttttaaataattaagtttcatgattgtcatatctttttagggct

SEQ ID NO: 95492 - DNA, 80 bp, synthetic construct
  misc_feature 1..80: note = Artificially Synthesized Probe
  source 1..80: mol_type = other DNA
cacacttgttctttgaaactttacctgaaattatcaaccgtatttgtattgttcaattatattttatttgcatatgctca

SEQ ID NO: 95493 - DNA, 80 bp, synthetic construct; identical to SEQ ID NO: 34240
  misc_feature 1..80: note = Artificially Synthesized Probe
  source 1..80: mol_type = other DNA

SEQ ID NO: 95494 - DNA, 80 bp, synthetic construct
  misc_feature 1..80: note = Artificially Synthesized Probe
  source 1..80: mol_type = other DNA
ctgacttttgttcctttgtaaggaacattttcctctctccagattgtagaaagattatttctttaattgttgagattcaa

SEQ ID NO: 95495 - DNA, 80 bp, synthetic construct
  misc_feature 1..80: note = Artificially Synthesized Probe
  source 1..80: mol_type = other DNA
atgtgctctggttctcttgctaagaaacactattatttgattttgaacttcttacttgctccaccttatcagttatttca

SEQ ID NO: 95496 - DNA, 80 bp, synthetic construct
  misc_feature 1..80: note = Artificially Synthesized Probe
  source 1..80: mol_type = other DNA
ctattttctgtagttacttccatgttcaaattatcctactttttagtctatagttcatcttgatttgttttttcttgtga

SEQ ID NO: 95497 - DNA, 80 bp, synthetic construct; identical to SEQ ID NO: 34241
  misc_feature 1..80: note = Artificially Synthesized Probe
  source 1..80: mol_type = other DNA

SEQ ID NO: 95498 - DNA, 80 bp, synthetic construct
  misc_feature 1..80: note = Artificially Synthesized Probe
  source 1..80: mol_type = other DNA
actcaattagcacatattggcaagttaggaaagtaggagtgtgggaataagtatgaaaaaagacaccattgtggcatata

SEQ ID NO: 95499 - DNA, 80 bp, synthetic construct
  misc_feature 1..80: note = Artificially Synthesized Probe
  source 1..80: mol_type = other DNA
ccaggtttttcctatgcagtttgtcctattttctatcaggcttaaacaaatactaatctgcaaaattccaagtagtccaa

SEQ ID NO: 95500 - DNA, 80 bp, synthetic construct
  misc_feature 1..80: note = Artificially Synthesized Probe
  source 1..80: mol_type = other DNA
agatgaacataacagcttcatattcaaacagataatactttggctttctcagatggaagcacgcagagcaatgggacagg

SEQ ID NO: 95501 - DNA, 80 bp, synthetic construct; identical to SEQ ID NO: 34242
  misc_feature 1..80: note = Artificially Synthesized Probe
  source 1..80: mol_type = other DNA

SEQ ID NO: 95502 - DNA, 80 bp, synthetic construct
  misc_feature 1..80: note = Artificially Synthesized Probe
  source 1..80: mol_type = other DNA
tcccttagactagcattaattgtgtttcacaacaaaacgagatagcatttcatctcacgggacagtacactagatttcat

SEQ ID NO: 95503 - DNA, 80 bp, synthetic construct; identical to SEQ ID NO: 34143
  misc_feature 1..80: note = Artificially Synthesized Probe
  source 1..80: mol_type = other DNA

SEQ ID NO: 95504 - DNA, 80 bp, synthetic construct
  misc_feature 1..80: note = Artificially Synthesized Probe
  source 1..80: mol_type = other DNA
catgtaatgattcatcaagttttgttctccatatactattttagagagtactgcttggcagtaaaggagctcttctgcgc

SEQ ID NO: 95505 - DNA, 80 bp, synthetic construct
  misc_feature 1..80: note = Artificially Synthesized Probe
  source 1..80: mol_type = other DNA
tgccagactgccacatctaggtaacacagagttctcccaagactttggaggttaagagaaatttactattttgaagaaac

SEQ ID NO: 95506 - DNA, 80 bp, synthetic construct
  misc_feature 1..80: note = Artificially Synthesized Probe
  source 1..80: mol_type = other DNA
gcacttttaattactgcttgacattttagattctttcatagggaatcttatgagagcttgtaacattttctggagtgtgt

SEQ ID NO: 95507 - DNA, 80 bp, synthetic construct; identical to SEQ ID NO: 34243
  misc_feature 1..80: note = Artificially Synthesized Probe
  source 1..80: mol_type = other DNA

SEQ ID NO: 95508 - DNA, 80 bp, synthetic construct
  misc_feature 1..80: note = Artificially Synthesized Probe
  source 1..80: mol_type = other DNA
ttgtgtttgtgcccttgaaaccttatgtgtatgtaattggattcatgcatgtgtgtttacacttatatttcctgatgccc

SEQ ID NO: 95509 - DNA, 80 bp, synthetic construct
  misc_feature 1..80: note = Artificially Synthesized Probe
  source 1..80: mol_type = other DNA
ttttagtctgttttatttcttatatggctataagtaagccaaatttaaaatgtcaccttttgattttatattcttgattc

SEQ ID NO: 95510 - DNA, 80 bp, synthetic construct
  misc_feature 1..80: note = Artificially Synthesized Probe
  source 1..80: mol_type = other DNA
tttaaaaaggtcatcacaaaaatctctgggaaagaattcaagaaggttgcttgaaaagggatgtcgtacaaaataacttg

SEQ ID NO: 95511 - DNA, 80 bp, synthetic construct; identical to SEQ ID NO: 34244
  misc_feature 1..80: note = Artificially Synthesized Probe
  source 1..80: mol_type = other DNA

SEQ ID NO: 95512 - DNA, 80 bp, synthetic construct
  misc_feature 1..80: note = Artificially Synthesized Probe
  source 1..80: mol_type = other DNA
tttgaattgattactgtgctctttgttatccatcgattgctcactcatccattcaaacattcattgagggtttgctgtgt

SEQ ID NO: 95513 - DNA, 80 bp, synthetic construct
  misc_feature 1..80: note = Artificially Synthesized Probe
  source 1..80: mol_type = other DNA
gatacatgtaagaaaatgagctcctaatgtcatgaactaaccatttaaactgaaagtagggcagggaatatctgaaagta

SEQ ID NO: 95514 - DNA, 80 bp, synthetic construct
  misc_feature 1..80: note = Artificially Synthesized Probe
  source 1..80: mol_type = other DNA
ggaatttttgaattttatttattttttagtagtaaccattaataaggttttaacataatcatttaaccatagatgcttct

SEQ ID NO: 95515 - DNA, 80 bp, synthetic construct
  misc_feature 1..80: note = Artificially Synthesized Probe
  source 1..80: mol_type = other DNA
aagtattttccaaagagtgtcttgatttctgagtaaactctaaagaatatcaccagctcatttggaggggtcacaaaaga

SEQ ID NO: 95516 - DNA, 80 bp, synthetic construct; identical to SEQ ID NO: 34245
  misc_feature 1..80: note = Artificially Synthesized Probe
  source 1..80: mol_type = other DNA

SEQ ID NO: 95517 - DNA, 80 bp, synthetic construct
  misc_feature 1..80: note = Artificially Synthesized Probe
  source 1..80: mol_type = other DNA
ctttgctctttctatacatatacatggagaataaaggacccaatgaatgtacccaaatccaaactgactagtgtgataca

SEQ ID NO: 95518 - DNA, 80 bp, synthetic construct
  misc_feature 1..80: note = Artificially Synthesized Probe
  source 1..80: mol_type = other DNA
ctgattctggctctgtcttcagagccagaatgttatacctgatgcatttctgttattactaatgtttcttaaaaaattcc

SEQ ID NO: 95519 - DNA, 80 bp, synthetic construct
  misc_feature 1..80: note = Artificially Synthesized Probe
  source 1..80: mol_type = other DNA
gatttgactttttgttaacatttaaatgaatacatgctttgtgtcccagaccatttttccataatgatcagctactattt

SEQ ID NO: 95520 - DNA, 80 bp, synthetic construct; identical to SEQ ID NO: 34246
  misc_feature 1..80: note = Artificially Synthesized Probe
  source 1..80: mol_type = other DNA

SEQ ID NO: 95521 - DNA, 80 bp, synthetic construct
  misc_feature 1..80: note = Artificially Synthesized Probe
  source 1..80: mol_type = other DNA
tttctttgatttatttataatctgtatgatagtccttaaaatatttggagacaggcactcaatctctctgtagtcttctc

SEQ ID NO: 95522 - DNA, 80 bp, synthetic construct
  misc_feature 1..80: note = Artificially Synthesized Probe
  source 1..80: mol_type = other DNA
acaaagcacagaacatgatctgatcagaattgcaatgcaaccatattttctgtgataaggccttgttcttttatgagtat

SEQ ID NO: 95523 - DNA, 80 bp, synthetic construct
  misc_feature 1..80: note = Artificially Synthesized Probe
  source 1..80: mol_type = other DNA
tgtactttacatgtttagttactatgttctatgaggcatagtgatccaagacacttttctttttatatgaagctctttac

SEQ ID NO: 95524 - DNA, 80 bp, synthetic construct; identical to SEQ ID NO: 34247
  misc_feature 1..80: note = Artificially Synthesized Probe
  source 1..80: mol_type = other DNA

SEQ ID NO: 95525 - DNA, 80 bp, synthetic construct
  misc_feature 1..80: note = Artificially Synthesized Probe
  source 1..80: mol_type = other DNA
atgttttctccactgctaagtgaaagtcagacaccaattctttctacacatcgcagtgctctatttattcttcatttctg

SEQ ID NO: 95526 - DNA, 80 bp, synthetic construct
  misc_feature 1..80: note = Artificially Synthesized Probe
  source 1..80: mol_type = other DNA
tttttaatattccatagtgtgttaaaattgcaatggtatttcaccaccatttatgctattgttttttataactcacccct

SEQ ID NO: 95527 - DNA, 80 bp, synthetic construct
  misc_feature 1..80: note = Artificially Synthesized Probe
  source 1..80: mol_type = other DNA
cctagcgaattagccaagactccacccatcacagccccttcacatgtatcctgaagttattttctgattcaattgttatt

SEQ ID NO: 95528 - DNA, 80 bp, synthetic construct
  misc_feature 1..80: note = Artificially Synthesized Probe
  source 1..80: mol_type = other DNA
gtatggaactcctgagtgacatttctttgggtggtttatagatgtgatttcactcttttctagcttctagtgttggaagc

SEQ ID NO: 95529 - DNA, 80 bp, synthetic construct; identical to SEQ ID NO: 34248
  misc_feature 1..80: note = Artificially Synthesized Probe
  source 1..80: mol_type = other DNA

SEQ ID NO: 95530 - DNA, 80 bp, synthetic construct
  misc_feature 1..80: note = Artificially Synthesized Probe
  source 1..80: mol_type = other DNA
gaaacttctaggtgcacttttagaaaggcatcacatctgcttagttcagatcttggtatatgctattacttctttataga

SEQ ID NO: 95531 - DNA, 80 bp, synthetic construct
  misc_feature 1..80: note = Artificially Synthesized Probe
  source 1..80: mol_type = other DNA
ttggttcactgcaagctccgcctcccgggttcacgccatcctcttgcctcagcctcccgagtagctgggactacaggcgc

SEQ ID NO: 95532 - DNA, 80 bp, synthetic construct
  misc_feature 1..80: note = Artificially Synthesized Probe
  source 1..80: mol_type = other DNA
ttccttagtctgttcaggttgctataacaaaatgccacagactgggtggcttatacacagaaatttatttctcacagttc

SEQ ID NO: 95533 - DNA, 80 bp, synthetic construct; identical to SEQ ID NO: 34249
  misc_feature 1..80: note = Artificially Synthesized Probe
  source 1..80: mol_type = other DNA

SEQ ID NO: 95534 - DNA, 80 bp, synthetic construct
  misc_feature 1..80: note = Artificially Synthesized Probe
  source 1..80: mol_type = other DNA
catttattcacttgtgtctcatgacaagcaaagacttctcatgttcaccacagtgttctggatacctaacagtcactatt

SEQ ID NO: 95535 - DNA, 80 bp, synthetic construct
  misc_feature 1..80: note = Artificially Synthesized Probe
  source 1..80: mol_type = other DNA
ttcaaagtgatcctttagacccaaagagatcattgatgtagttcaagggaagatcagatcaaatcagaagcagtcatcaa

SEQ ID NO: 95536 - DNA, 80 bp, synthetic construct
  misc_feature 1..80: note = Artificially Synthesized Probe
  source 1..80: mol_type = other DNA
ttagaaaaactaaccttatatttaccagtgaaattacactaccaactttactaattacattatattccctcacatgttat

SEQ ID NO: 95537 - DNA, 80 bp, synthetic construct; identical to SEQ ID NO: 34250
  misc_feature 1..80: note = Artificially Synthesized Probe
  source 1..80: mol_type = other DNA

SEQ ID NO: 95538 - DNA, 80 bp, synthetic construct; identical to SEQ ID NO: 34144
  misc_feature 1..80: note = Artificially Synthesized Probe
  source 1..80: mol_type = other DNA

SEQ ID NO: 95539 - DNA, 80 bp, synthetic construct
  misc_feature 1..80: note = Artificially Synthesized Probe
  source 1..80: mol_type = other DNA
cgcaggcttcagaatcacttgcttagccattggtactcagggcataatcactgggtccacttcatgtatgactaagaagt

SEQ ID NO: 95540 - DNA, 80 bp, synthetic construct
  misc_feature 1..80: note = Artificially Synthesized Probe
  source 1..80: mol_type = other DNA
tgctaatatttcgtttaggatcttctaaacttaggttgtataatctatgtatgctcttttcttctgtgctaacattgcca

SEQ ID NO: 95541 - DNA, 80 bp, synthetic construct
  misc_feature 1..80: note = Artificially Synthesized Probe
  source 1..80: mol_type = other DNA
tgtgatgacttaaaaatctagtttcctgcctatggtaatatttatattttctaatgcttcaaatttggggattaatatgt

SEQ ID NO: 95542 - DNA, 80 bp, synthetic construct; identical to SEQ ID NO: 34251
  misc_feature 1..80: note = Artificially Synthesized Probe
  source 1..80: mol_type = other DNA

SEQ ID NO: 95543 - DNA, 80 bp, synthetic construct
  misc_feature 1..80: note = Artificially Synthesized Probe
  source 1..80: mol_type = other DNA
ctttatctttgagcacaactttggctaaataaaatacacactattaagaggcttgtgtctaatctataactatagttact

SEQ ID NO: 95544 - DNA, 80 bp, synthetic construct
  misc_feature 1..80: note = Artificially Synthesized Probe
  source 1..80: mol_type = other DNA
aggtttattctctatttttgggtacaaaggtcattcttagctattaaaacattgttgctgattattttaaaatactctgt

SEQ ID NO: 95545 - DNA, 80 bp, synthetic construct
  misc_feature 1..80: note = Artificially Synthesized Probe
  source 1..80: mol_type = other DNA
cacatcggccttttaaattgaagtttgacaggagttcagtttttagatgaattaacttctcatttgtctcctaatatttt

SEQ ID NO: 95546 - DNA, 80 bp, synthetic construct; identical to SEQ ID NO: 34252
  misc_feature 1..80: note = Artificially Synthesized Probe
  source 1..80: mol_type = other DNA

SEQ ID NO: 95547 - DNA, 80 bp, synthetic construct
  misc_feature 1..80: note = Artificially Synthesized Probe
  source 1..80: mol_type = other DNA
aatgaatgaaataattattctttacttacagcattcccaccaatgacgtcctcaaagccaagtgtggacattccaaatct

SEQ ID NO: 95548 - DNA, 80 bp, synthetic construct
  misc_feature 1..80: note = Artificially Synthesized Probe
  source 1..80: mol_type = other DNA
aacagtttgtattgtgtagataaatgaaggtggtatctgtatatagatgcaaaatgtatctttagattttctggttcact

SEQ ID NO: 95549 - DNA, 80 bp, synthetic construct
  misc_feature 1..80: note = Artificially Synthesized Probe
  source 1..80: mol_type = other DNA
tctagtttcagctaaccatgtgtagtaatattttaaagccttgtgttttatggagttggtatgacgtgaggaatatatat

SEQ ID NO: 95550 - DNA, 80 bp, synthetic construct
  misc_feature 1..80: note = Artificially Synthesized Probe
  source 1..80: mol_type = other DNA
ctcaggctggagtgcagtggtgcgatctcagctcactgcagcctccacctcctgggttcaagcgattatagtacttcagc

SEQ ID NO: 95551 - DNA, 80 bp, synthetic construct
  misc_feature 1..80: note = Artificially Synthesized Probe
  source 1..80: mol_type = other DNA
tgtttcacaaaaggtaaaatctaaacaataatttggaggaaaatggctattcctgctccttgtcttctcctcaggcctgt

SEQ ID NO: 95552 - DNA, 80 bp, synthetic construct; identical to SEQ ID NO: 34253
  misc_feature 1..80: note = Artificially Synthesized Probe
  source 1..80: mol_type = other DNA

SEQ ID NO: 95553 - DNA, 80 bp, synthetic construct
  misc_feature 1..80: note = Artificially Synthesized Probe
  source 1..80: mol_type = other DNA
ggtgtttcaagcaaggtaaagttacctatggaaaaaaaaactccattgaaatatgttatgtctgaaaagctaccaaacta

SEQ ID NO: 95554 - DNA, 80 bp, synthetic construct
  misc_feature 1..80: note = Artificially Synthesized Probe
  source 1..80: mol_type = other DNA
ttatatagtattaatacaatattatatatgtattatatggtaataatatactatataaaatagtttttatcaagttagtt

SEQ ID NO: 95555 - DNA, 80 bp, synthetic construct
  misc_feature 1..80: note = Artificially Synthesized Probe
  source 1..80: mol_type = other DNA
aactgtagtcctagctactcgggagtctgaggcagaagaattgcttgaagccggaagacagaggttgcagtgagccaaga

SEQ ID NO: 95556 - DNA, 80 bp, synthetic construct; identical to SEQ ID NO: 34254
  misc_feature 1..80: note = Artificially Synthesized Probe
  source 1..80: mol_type = other DNA

SEQ ID NO: 95557 - DNA, 80 bp, synthetic construct
  misc_feature 1..80: note = Artificially Synthesized Probe
  source 1..80: mol_type = other DNA
aaacagaaaaggaataaaaaggcaaaaatttataaaaaatgagctcaagaaaggagtatgtattagggccaatattagcc

SEQ ID NO: 95558 - DNA, 80 bp, synthetic construct
  misc_feature 1..80: note = Artificially Synthesized Probe
  source 1..80: mol_type = other DNA
catggtggccctggcgtagaggttacatgaatagtgaaaatctcacacaaacatgtcttggaaaccaaaatttgcaaggc

SEQ ID NO: 95559 - DNA, 80 bp, synthetic construct
  misc_feature 1..80: note = Artificially Synthesized Probe
  source 1..80: mol_type = other DNA
cgaggtcaggagattgagaccatcctggctaacacagtgaaaccctgtctctactaaaaatacaaaaaattagccaggtg

SEQ ID NO: 95560 - DNA, 80 bp, synthetic construct; identical to SEQ ID NO: 34255
  misc_feature 1..80: note = Artificially Synthesized Probe
  source 1..80: mol_type = other DNA

SEQ ID NO: 95561 - DNA, 80 bp, synthetic construct
  misc_feature 1..80: note = Artificially Synthesized Probe
  source 1..80: mol_type = other DNA
cagccttttacacaggggaggtgggaggatatgtataaatgtgggtaggtataaagatatgatgtccatgatctttggtt

SEQ ID NO: 95562 - DNA, 80 bp, synthetic construct
  misc_feature 1..80: note = Artificially Synthesized Probe
  source 1..80: mol_type = other DNA
gtgtgagccaccatgcccagctgtatttcttttttaaatctgtcttgtcatttggtgggtactttcgaccttaatattcc

SEQ ID NO: 95563 - DNA, 80 bp, synthetic construct
  misc_feature 1..80: note = Artificially Synthesized Probe
  source 1..80: mol_type = other DNA
agggaggcagccctcatggcagaatttgacaaccctaacattgtgaagctattaggtatgaaaatacaagtgaggatatg

SEQ ID NO: 95564 - DNA, 80 bp, synthetic construct
  misc_feature 1..80: note = Artificially Synthesized Probe
  source 1..80: mol_type = other DNA
tatcccaaccctataggacattcatggcttaatggattatccctctttaaattcatcacttcaatttgtctctgtctttg

SEQ ID NO: 95565 - DNA, 80 bp, synthetic construct; identical to SEQ ID NO: 34256
  misc_feature 1..80: note = Artificially Synthesized Probe
  source 1..80: mol_type = other DNA

SEQ ID NO: 95566 - DNA, 80 bp, synthetic construct
  misc_feature 1..80: note = Artificially Synthesized Probe
  source 1..80: mol_type = other DNA
gagtttgacaccagcctggcgaacaaggtgaaatcccatctctactaaaaatagaaaaattagctgggtgtggtggtgtg

SEQ ID NO: 95567 - DNA, 80 bp, synthetic construct
  misc_feature 1..80: note = Artificially Synthesized Probe
  source 1..80: mol_type = other DNA
tccatctttaaaaaaggaagaaaaaaaaaatctgtgctctcatagagcatacattcactctatatgaggagacagataat

SEQ ID NO: 95568 - DNA, 80 bp, synthetic construct; identical to SEQ ID NO: 34257
  misc_feature 1..80: note = Artificially Synthesized Probe
  source 1..80: mol_type = other DNA

SEQ ID NO: 95569 - DNA, 80 bp, synthetic construct
  misc_feature 1..80: note = Artificially Synthesized Probe
  source 1..80: mol_type = other DNA
cagccaagacatgacatgacacaactcacattttttcagatcttctctggctgctttcttgagcattgcatgaagggaag

SEQ ID NO: 95570 - DNA, 80 bp, synthetic construct
  misc_feature 1..80: note = Artificially Synthesized Probe
  source 1..80: mol_type = other DNA
atgtgcaaaaaagggaaaagtcaaagatagtatcgaagtatttggctgtgcagatgagtgaatggaggtgccattggctg

SEQ ID NO: 95571 - DNA, 80 bp, synthetic construct
  misc_feature 1..80: note = Artificially Synthesized Probe
  source 1..80: mol_type = other DNA
gcctggccaacatggtgaaaccccatctctactaaaaatacaaaaattagccgggtgtggtggcacacgcttgtaatccc

SEQ ID NO: 95572 - DNA, 80 bp, synthetic construct; identical to SEQ ID NO: 34258
  misc_feature 1..80: note = Artificially Synthesized Probe
  source 1..80: mol_type = other DNA

SEQ ID NO: 95573 - DNA, 80 bp, synthetic construct
  misc_feature 1..80: note = Artificially Synthesized Probe
  source 1..80: mol_type = other DNA
catgtctgtatttctttgtattatgttctgtatattataatgatccttatgatatatatatcatatatatgatatatata

SEQ ID NO: 95574 - DNA, 80 bp, synthetic construct
  misc_feature 1..80: note = Artificially Synthesized Probe
  source 1..80: mol_type = other DNA
actaaaaacgagcaaccaatgaaatagaagtaaatcaagagagtgtggtgtcctggatgtcaaatgaagtattttaaata

SEQ ID NO: 95575 - DNA, 80 bp, synthetic construct
  misc_feature 1..80: note = Artificially Synthesized Probe
  source 1..80: mol_type = other DNA
agagaaaatctggagaaaaagtataaacaacttgttttgccataaaggtgaaccaaggaacatggatagagctgaagggg

SEQ ID NO: 95576 - DNA, 80 bp, synthetic construct
  misc_feature 1..80: note = Artificially Synthesized Probe
  source 1..80: mol_type = other DNA
attggcctttgtaaagagaatgctcagatcaaccatagtaataagagagaattggctggagattgtagccagtctcttct

SEQ ID NO: 95577 - DNA, 80 bp, synthetic construct
  misc_feature 1..80: note = Artificially Synthesized Probe
  source 1..80: mol_type = other DNA
attggcaagaacattaaaagcttacttgaaattagagattacacatttaacatgagactggtcagcatggttgtgtattt

SEQ ID NO: 95578 - DNA, 80 bp, synthetic construct; identical to SEQ ID NO: 34259
  misc_feature 1..80: note = Artificially Synthesized Probe
  source 1..80: mol_type = other DNA

SEQ ID NO: 95579 - DNA, 80 bp, synthetic construct
  misc_feature 1..80: note = Artificially Synthesized Probe
  source 1..80: mol_type = other DNA
cgagccgaagcagggcgaggcattgcctcacctgggaagcgcaaggggtcagggagttccctttctgagtcaaagaaagg

SEQ ID NO: 95580 - DNA, 80 bp, synthetic construct
  misc_feature 1..80: note = Artificially Synthesized Probe
  source 1..80: mol_type = other DNA
caaactgcaaggcggcaacggggctgggggaggggcgcccgccattgcccaggcttgcttaggtaaacaaagcagccagg

SEQ ID NO: 95581 - DNA, 80 bp, synthetic construct
  misc_feature 1..80: note = Artificially Synthesized Probe
  source 1..80: mol_type = other DNA
cagcacgcagctggagatctgagaacgggcagactgcctcctcaagtgggtccctgacccctgacccccgagcagcctaa

SEQ ID NO: 95582 - DNA, 80 bp, synthetic construct
  misc_feature 1..80: note = Artificially Synthesized Probe
  source 1..80: mol_type = other DNA
aagtagataaaaccacaaagatggggaaaaaacagaacagaaaaactggaaactctaaaacgcagagcgcctctcctcct

SEQ ID NO: 95583 - DNA, 80 bp, synthetic construct
  misc_feature 1..80: note = Artificially Synthesized Probe
  source 1..80: mol_type = other DNA
aagaatgtataactagaataaccaatacagagaagtgcttaaaggagctgatggagctgaaaaccaaggctcgagaacta

SEQ ID NO: 95584 - DNA, 80 bp, synthetic construct
  misc_feature 1..80: note = Artificially Synthesized Probe
  source 1..80: mol_type = other DNA
gttataatatatattataaaaattattataatatatattataacaatccttataatatatattataatgattattctgtt

SEQ ID NO: 95585 - DNA, 80 bp, synthetic construct; identical to SEQ ID NO: 34967
  misc_feature 1..80: note = Artificially Synthesized Probe
  source 1..80: mol_type = other DNA

SEQ ID NO: 95586 - DNA, 80 bp, synthetic construct
  misc_feature 1..80: note = Artificially Synthesized Probe
  source 1..80: mol_type = other DNA
ccagagagaaaggtcgggttaccctcaaaggaaagcccatcagactaacagcggatctctcggcagaaaccctacaagcc

SEQ ID NO: 95587 - DNA, 80 bp, synthetic construct; identical to SEQ ID NO: 34261
  misc_feature 1..80: note = Artificially Synthesized Probe
  source 1..80: mol_type = other DNA

SEQ ID NO: 95588 - DNA, 80 bp, synthetic construct
  misc_feature 1..80: note = Artificially Synthesized Probe
  source 1..80: mol_type = other DNA
aagacccatcagtgtgctgtattcaggaaacccatctcatgtgcagagacacacataggctcaaaataaaaggatggagg

SEQ ID NO: 95589 - DNA, 80 bp, synthetic construct
  misc_feature 1..80: note = Artificially Synthesized Probe
  source 1..80: mol_type = other DNA
tttatgcacccaatacaggagcacccagattcataaagcaagtcctgagtgacctacaaagagacttagactcccacaca

SEQ ID NO: 95590 - DNA, 80 bp, synthetic construct
  misc_feature 1..80: note = Artificially Synthesized Probe
  source 1..80: mol_type = other DNA
tttcagcaccacaccacacctattccaaaattgaccacatagttggaagtaaagctctcctcagcaaatgtaaaagaaca

SEQ ID NO: 95591 - DNA, 80 bp, synthetic construct
  misc_feature 1..80: note = Artificially Synthesized Probe
  source 1..80: mol_type = other DNA
ttgaaaccaacgagaacaaagacaccacataccagaatctctgggacgcattcaaagcagtgtgtagagggaaatttata

SEQ ID NO: 95592 - DNA, 80 bp, synthetic construct
  misc_feature 1..80: note = Artificially Synthesized Probe
  source 1..80: mol_type = other DNA
aaacccttcaaaaaatcaatgaatccaggagctggttttttgaaaggatcaacaaaattgatagaccgctagcaagacta

SEQ ID NO: 95593 - DNA, 80 bp, synthetic construct; identical to SEQ ID NO: 34969
  misc_feature 1..80: note = Artificially Synthesized Probe
  source 1..80: mol_type = other DNA

SEQ ID NO: 95594 - DNA, 80 bp, synthetic construct
  misc_feature 1..80: note = Artificially Synthesized Probe
  source 1..80: mol_type = other DNA
tcattctgataccaaagccgggcagagacacaaccaaaaaagagaattttagaccaatatccttgatgaacattgatgca

SEQ ID NO: 95595 - DNA, 80 bp, synthetic construct; identical to SEQ ID NO: 34145
  misc_feature 1..80: note = Artificially Synthesized Probe
  source 1..80: mol_type = other DNA

SEQ ID NO: 95596 - DNA, 80 bp, synthetic construct
  misc_feature 1..80: note = Artificially Synthesized Probe
  source 1..80: mol_type = other DNA
acatgattatctcaatagatgcagaaaaagcctttgacaaaattcaacaacccttcatgctaaaaactctcaataaatta

SEQ ID NO: 95597 - DNA, 80 bp, synthetic construct
  misc_feature 1..80: note = Artificially Synthesized Probe
  source 1..80: mol_type = other DNA
ttctggccagggcaatcaggcaggagaaggaaataaagggtattcaattaggaaaagaggaagtcaaattgtccctgttt

SEQ ID NO: 95598 - DNA, 80 bp, synthetic construct; identical to SEQ ID NO: 34263
  misc_feature 1..80: note = Artificially Synthesized Probe
  source 1..80: mol_type = other DNA

SEQ ID NO: 95599 - DNA, 80 bp, synthetic construct
  misc_feature 1..80: note = Artificially Synthesized Probe
  source 1..80: mol_type = other DNA
tgactttcttcacagaattggaaaaaactactttaaagttcatatggaaccaaaaaagagcccgcatcgccaagtcaatc

SEQ ID NO: 95600 - DNA, 80 bp, synthetic construct
  misc_feature 1..80: note = Artificially Synthesized Probe
  source 1..80: mol_type = other DNA
atctgatctttgacaaacctgagaaaaacaagcaatggggaaaggattccctatttaataaatggtgctgggaaaactgg

SEQ ID NO: 95601 - DNA, 80 bp, synthetic construct; identical to SEQ ID NO: 34264
  misc_feature 1..80: note = Artificially Synthesized Probe
  source 1..80: mol_type = other DNA

SEQ ID NO: 95602 - DNA, 80 bp, synthetic construct; identical to SEQ ID NO: 34971
  misc_feature 1..80: note = Artificially Synthesized Probe
  source 1..80: mol_type = other DNA

SEQ ID NO: 95603 - DNA, 80 bp, synthetic construct
  misc_feature 1..80: note = Artificially Synthesized Probe
  source 1..80: mol_type = other DNA
ggaagtcagtgtggcgattcctcagggatctagaactagaaataccatttgacccagccatcccattactgggtatatac

SEQ ID NO: 95604 - DNA, 80 bp, synthetic construct
  misc_feature 1..80: note = Artificially Synthesized Probe
  source 1..80: mol_type = other DNA
ccataaaaaatgatgagttcatgtcctttgtagggacatggatgaaattggaaaccatcattctcagtaaactatcgcaa

SEQ ID NO: 95605 - DNA, 80 bp, synthetic construct
  misc_feature 1..80: note = Artificially Synthesized Probe
  source 1..80: mol_type = other DNA
cgttagtgggtgcagcgcaccagcatggcacatgtatacatatgtaactaacctgcacaatgtgcacatgtaccctaaaa

SEQ ID NO: 95606 - DNA, 80 bp, synthetic construct
  misc_feature 1..80: note = Artificially Synthesized Probe
  source 1..80: mol_type = other DNA
aaaagacaaaataacattagcaagggagatatggggcaagtaaaacgctcccactcaccattttttttcactctcagcag

SEQ ID NO: 95607 - DNA, 80 bp, synthetic construct; identical to SEQ ID NO: 34265
  misc_feature 1..80: note = Artificially Synthesized Probe
  source 1..80: mol_type = other DNA

SEQ ID NO: 95608 - DNA, 80 bp, synthetic construct
  misc_feature 1..80: note = Artificially Synthesized Probe
  source 1..80: mol_type = other DNA
gtgattagctgaagttgggcagaggtctaaggaaaggaagtaaagtaatttagtggtcaggatattggaaggaatctaga

SEQ ID NO: 95609 - DNA, 80 bp, synthetic construct
  misc_feature 1..80: note = Artificially Synthesized Probe
  source 1..80: mol_type = other DNA
catttattcattcttcatcacacaaaaatctgaatctggcttctgccccctaccctccttatttactttctcaaatagta

SEQ ID NO: 95610 - DNA, 80 bp, synthetic construct; identical to SEQ ID NO: 34266
  misc_feature 1..80: note = Artificially Synthesized Probe
  source 1..80: mol_type = other DNA

SEQ ID NO: 95611 - DNA, 80 bp, synthetic construct
  misc_feature 1..80: note = Artificially Synthesized Probe
  source 1..80: mol_type = other DNA
ctcatagtttcttgtaagttaatcccagtgaaataagatgacaatagtggaagaaaggggaattgggaaaatccataaaa

SEQ ID NO: 95612 - DNA, 80 bp, synthetic construct
  misc_feature 1..80: note = Artificially Synthesized Probe
  source 1..80: mol_type = other DNA
aaatatgcagaattttagaatgggagtaggcattgaatattatagactcttacggaatattctggcagtggagcaaacag

SEQ ID NO: 95613 - DNA, 80 bp, synthetic construct
  misc_feature 1..80: note = Artificially Synthesized Probe
  source 1..80: mol_type = other DNA
catgcatccacctatgcattaattcatccatccacccatcaacatatattgaaaacccatagtgagccatgtgtagtatt

SEQ ID NO: 95614 - DNA, 80 bp, synthetic construct
  misc_feature 1..80: note = Artificially Synthesized Probe
  source 1..80: mol_type = other DNA
tacacatgtatatataattgttcataataatcacaaagtagaaatcttttgtatagtattttctttatcagagtggaaaa

SEQ ID NO: 95615 - DNA, 80 bp, synthetic construct; identical to SEQ ID NO: 34267
  misc_feature 1..80: note = Artificially Synthesized Probe
  source 1..80: mol_type = other DNA

SEQ ID NO: 95616 - DNA, 80 bp, synthetic construct
  misc_feature 1..80: note = Artificially Synthesized Probe
  source 1..80: mol_type = other DNA
cactgactatttcacttctaaatgtcaatcatactacttatttggctttgatgtataccttgccctttaactgaagggac

SEQ ID NO: 95617 - DNA, 80 bp, synthetic construct
  misc_feature 1..80: note = Artificially Synthesized Probe
  source 1..80: mol_type = other DNA
ccatcttatctaatattccaagttctccagtttccctctcaaatatatcaagactttaagatttgaaaatgatcttctgg

SEQ ID NO: 95618 - DNA, 80 bp, synthetic construct
  misc_feature 1..80: note = Artificially Synthesized Probe
  source 1..80: mol_type = other DNA
catccttcatagaagtaaacagaaacagacagcaattacattacatactcagagcaagcatccattcataaattaactca

SEQ ID NO: 95619 - DNA, 80 bp, synthetic construct
  misc_feature 1..80: note = Artificially Synthesized Probe
  source 1..80: mol_type = other DNA
gtcaaatgattataaaataggatggtaggttctctgtgaaaggatgacagtaggaaaatctaacagttactggaaggatc

SEQ ID NO: 95620 - DNA, 80 bp, synthetic construct
  misc_feature 1..80: note = Artificially Synthesized Probe
  source 1..80: mol_type = other DNA
accatgtacttatatgcaccatgaacttgatgcaccatgtacgatgtacttatgacaagtgcccaggacaacagcgctct

SEQ ID NO: 95621 - DNA, 80 bp, synthetic construct; identical to SEQ ID NO: 34268
  misc_feature 1..80: note = Artificially Synthesized Probe
  source 1..80: mol_type = other DNA

SEQ ID NO: 95622 - DNA, 80 bp, synthetic construct
  misc_feature 1..80: note = Artificially Synthesized Probe
  source 1..80: mol_type = other DNA
cccctctcctgtgctgagcagctttgcattgccaggcaggtggcagctggcatggcttacctctcagaacgtaagtttgt

SEQ ID NO: 95623 - DNA, 80 bp, synthetic construct
  misc_feature 1..80: note = Artificially Synthesized Probe
  source 1..80: mol_type = other DNA
tataaccgctacactacagagtctgatgtgtgggcctatggcgtggtcctctgggagatcttctcctatggcctgcagcc

SEQ ID NO: 95624 - DNA, 80 bp, synthetic construct
  misc_feature 1..80: note = Artificially Synthesized Probe
  source 1..80: mol_type = other DNA
ctggaacgcatgtgtgagagggcagagggaactgtgagtgtctaaggttgaagacgttcaaataaaatgctgcagtttcc

SEQ ID NO: 95625 - DNA, 80 bp, synthetic construct; identical to SEQ ID NO: 34269
  misc_feature 1..80: note = Artificially Synthesized Probe
  source 1..80: mol_type = other DNA

SEQ ID NO: 95626 - DNA, 80 bp, synthetic construct
  misc_feature 1..80: note = Artificially Synthesized Probe
  source 1..80: mol_type = other DNA
agctttgagatctaattcacataccgtgcgctttacccattaaagtgtacaattcacaaagtggtgtctcttcattttct

SEQ ID NO: 95627 - DNA, 80 bp, synthetic construct
  misc_feature 1..80: note = Artificially Synthesized Probe
  source 1..80: mol_type = other DNA
aggtgaagtacagaaaactaaaaagaaggaaaagccactcattctgtctccccccaaagacgagtcttagtgttttatta

SEQ ID NO: 95628 - DNA, 80 bp, synthetic construct
  misc_feature 1..80: note = Artificially Synthesized Probe
  source 1..80: mol_type = other DNA
tgagttcccttttctgtcctgtgcccctccttttttcctttctgtgcatttgtcatgaattaagtctgcttattttattc

SEQ ID NO: 95629 - DNA, 80 bp, synthetic construct
  misc_feature 1..80: note = Artificially Synthesized Probe
  source 1..80: mol_type = other DNA
catgtaataaacactctggcagaaataataacattttaaataccattgtagattgatatgtatatgccttttgcaaagta

SEQ ID NO: 95630 - DNA, 80 bp, synthetic construct; identical to SEQ ID NO: 34270
  misc_feature 1..80: note = Artificially Synthesized Probe
  source 1..80: mol_type = other DNA

SEQ ID NO: 95631 - DNA, 80 bp, synthetic construct
  misc_feature 1..80: note = Artificially Synthesized Probe
  source 1..80: mol_type = other DNA
tagcaggaacccaaattctcctgaaaacgaacagggaagagaaaataacagtctactctataccagcttatcttaattca

SEQ ID NO: 95632 - DNA, 80 bp, synthetic construct
  misc_feature 1..80: note = Artificially Synthesized Probe
  source 1..80: mol_type = other DNA
aggcaaccaagacaaaaatgtagaaattttcctagactttgccctctctttcatcatcagttttctattagttttacttc

SEQ ID NO: 95633 - DNA, 80 bp, synthetic construct; identical to SEQ ID NO: 34271
  misc_feature 1..80: note = Artificially Synthesized Probe
  source 1..80: mol_type = other DNA

SEQ ID NO: 95634 - DNA, 80 bp, synthetic construct
  misc_feature 1..80: note = Artificially Synthesized Probe
  source 1..80: mol_type = other DNA
acttgagcatagatatccatggcttattttagatggttcatgtatgctctgcaaaattcaaagacagcttcgggctttct

SEQ ID NO: 95635 - DNA, 80 bp, synthetic construct
  misc_feature 1..80: note = Artificially Synthesized Probe
  source 1..80: mol_type = other DNA
ttctgaggcctttaaatatatgaacttaaacctcacaacatccctgtaatgttggtactatcattatatacattttagtt

SEQ ID NO: 95636 - DNA, 80 bp, synthetic construct
  misc_feature 1..80: note = Artificially Synthesized Probe
  source 1..80: mol_type = other DNA
ccaaaagaggccgaattctcaaccactatactgtagagcctctgtacatgatagaagcaataactgaacctcagtaactc

SEQ ID NO: 95637 - DNA, 80 bp, synthetic construct; identical to SEQ ID NO: 34146
  misc_feature 1..80: note = Artificially Synthesized Probe
  source 1..80: mol_type = other DNA

SEQ ID NO: 95638 - DNA, 80 bp, synthetic construct
  misc_feature 1..80: note = Artificially Synthesized Probe
  source 1..80: mol_type = other DNA
ttttcatgagttctaattacattttcaagttaagatcactgacttattccctaagtgctcgatctaatgttctgaatcac

SEQ ID NO: 95639 - DNA, 80 bp, synthetic construct; identical to SEQ ID NO: 34272
  misc_feature 1..80: note = Artificially Synthesized Probe
  source 1..80: mol_type = other DNA

SEQ ID NO: 95640 - DNA, 80 bp, synthetic construct
  misc_feature 1..80: note = Artificially Synthesized Probe
  source 1..80: mol_type = other DNA
cttctaaaaacccaattttggaataatattctattttattcatatactgtaatttagctaatcaatcttgtatttttgaa

SEQ ID NO: 95641 - DNA, 80 bp, synthetic construct
  misc_feature 1..80: note = Artificially Synthesized Probe
  source 1..80: mol_type = other DNA
ctgcagaaatattactgccacttctacattgtacaagagatctcatagccctaaacatttgctttcatagataattttct

SEQ ID NO: 95642 - DNA, 80 bp, synthetic construct; identical to SEQ ID NO: 34273
  misc_feature 1..80: note = Artificially Synthesized Probe
  source 1..80: mol_type = other DNA

SEQ ID NO: 95643 - DNA, 80 bp, synthetic construct
  misc_feature 1..80: note = Artificially Synthesized Probe
  source 1..80: mol_type = other DNA
aaatgaaaaaacaccaaccagaggtaattaacattaacatcataatattcttccaggctttttcagatagacaggtaggt

SEQ ID NO: 95644 - DNA, 80 bp, synthetic construct
  misc_feature 1..80: note = Artificially Synthesized Probe
  source 1..80: mol_type = other DNA
acattaattttgatggttgaatagtattatacagatttatcgtaattgacataactattctactgttagacatttggttt

SEQ ID NO: 95645 - DNA, 80 bp, synthetic construct
  misc_feature 1..80: note = Artificially Synthesized Probe
  source 1..80: mol_type = other DNA
attaccttcctgaattattttattaacatgtacctctcctagtcagataagacagcccatttatttcagtctcaccaata

SEQ ID NO: 95646 - DNA, 80 bp, synthetic construct
  misc_feature 1..80: note = Artificially Synthesized Probe
  source 1..80: mol_type = other DNA
tacttgattggtgatttgcctcctactattatttttctactgggtatatctttttcttgttgctttgtaagagcacttta

SEQ ID NO: 95647 - DNA, 80 bp, synthetic construct; identical to SEQ ID NO: 34274
  misc_feature 1..80: note = Artificially Synthesized Probe
  source 1..80: mol_type = other DNA

SEQ ID NO: 95648 - DNA, 80 bp, synthetic construct
  misc_feature 1..80: note = Artificially Synthesized Probe
  source 1..80: mol_type = other DNA
tcattttcatctctgttagagttttgtattggcattagcatttgtattagcattgtattaggaaaaactcaggagttttt

SEQ ID NO: 95649 - DNA, 80 bp, synthetic construct
  misc_feature 1..80: note = Artificially Synthesized Probe
  source 1..80: mol_type = other DNA
ttggaagtagaaacaacattctttacataagctcttcctttcttttggcaaatttctactctggggaaacagaattctca

SEQ ID NO: 95650 - DNA, 80 bp, synthetic construct
  misc_feature 1..80: note = Artificially Synthesized Probe
  source 1..80: mol_type = other DNA
cttccttttcatctctagtcccagcctaagtgctaaccacttcacccatttatagtgttagttcttctggtgattaccag

SEQ ID NO: 95651 - DNA, 80 bp, synthetic construct; identical to SEQ ID NO: 34275
  misc_feature 1..80: note = Artificially Synthesized Probe
  source 1..80: mol_type = other DNA

SEQ ID NO: 95652 - DNA, 80 bp, synthetic construct
  misc_feature 1..80: note = Artificially Synthesized Probe
  source 1..80: mol_type = other DNA
tgttctggaacaaattaagatttaggtgctttgactagattgattctaaacatcaaaaaacaaaaataaaatatctgcaa

SEQ ID NO: 95653 - DNA, 80 bp, synthetic construct
  misc_feature 1..80: note = Artificially Synthesized Probe
  source 1..80: mol_type = other DNA
agtggaatcctacccccagcctgagatttcctggactagaaataaaattctcattaagtaagtattccacattttaattt

SEQ ID NO: 95654 - DNA, 80 bp, synthetic construct
  misc_feature 1..80: note = Artificially Synthesized Probe
  source 1..80: mol_type = other DNA
tttctaatgaatactttaaggcatctacagataaaagagactctagatcttttcaaacagctaataatagtcagaaagac

SEQ ID NO: 95655 - DNA, 80 bp, synthetic construct
  misc_feature 1..80: note = Artificially Synthesized Probe
  source 1..80: mol_type = other DNA
attacacactttaagttattttaaaatgtacaactaagttattgttgactatagtcactctgttgtcttatcaaatagta

SEQ ID NO: 95656 - DNA, 80 bp, synthetic construct
  misc_feature 1..80: note = Artificially Synthesized Probe
  source 1..80: mol_type = other DNA
atgcaatgtttgtctttctgtgcctggctaatttcatttaacataatgatctccagttccatccatgtctttgcaaatga

SEQ ID NO: 95657 - DNA, 80 bp, synthetic construct; identical to SEQ ID NO: 34147
  misc_feature 1..80: note = Artificially Synthesized Probe
  source 1..80: mol_type = other DNA

SEQ ID NO: 95658 - DNA, 80 bp, synthetic construct
  misc_feature 1..80: note = Artificially Synthesized Probe
  source 1..80: mol_type = other DNA
agtttttatttgcatttctctgatgatcagtgatgttgagcactttttcatatgcctgtttgccatctgcatgtcttctt

SEQ ID NO: 95659 - DNA, 80 bp, synthetic construct
  misc_feature 1..80: note = Artificially Synthesized Probe
  source 1..80: mol_type = other DNA
gtttattgtatcctttgctgtgcagaaggccttttaacttgatgtgatcccatttgtccatttttgttttggttgcctat

SEQ ID NO: 95660 - DNA, 80 bp, synthetic construct
  misc_feature 1..80: note = Artificially Synthesized Probe
  source 1..80: mol_type = other DNA
tattcttctgtacatggatatccagttttccacacatcatttactgaagagactgtctttttcccagtgtatgttcttgg

SEQ ID NO: 95661 - DNA, 80 bp, synthetic construct; identical to SEQ ID NO: 34148
  misc_feature 1..80: note = Artificially Synthesized Probe
  source 1..80: mol_type = other DNA

SEQ ID NO: 95662 - DNA, 80 bp, synthetic construct
  misc_feature 1..80: note = Artificially Synthesized Probe
  source 1..80: mol_type = other DNA
tcttacagttttcattatagagatctttcacttctttgattaattcctagctatttaattttatgtgtggctattgtaaa

SEQ ID NO: 95663 - DNA, 80 bp, synthetic construct
  misc_feature 1..80: note = Artificially Synthesized Probe
  source 1..80: mol_type = other DNA
tcatttgtaaacaaagataattcttcccttccaatttggatggcccttaatatctttctcttgtctgattgctctaggta

SEQ ID NO: 95664 - DNA, 80 bp, synthetic construct
  misc_feature 1..80: note = Artificially Synthesized Probe
  source 1..80: mol_type = other DNA
attttttgagggtttttatcacaaagggatgctgaatttttatcaaatgctttttcagcatatattgaaataatcgtatg

SEQ ID NO: 95665 - DNA, 80 bp, synthetic construct; identical to SEQ ID NO: 34133
  misc_feature 1..80: note = Artificially Synthesized Probe
  source 1..80: mol_type = other DNA

SEQ ID NO: 95666 - DNA, 80 bp, synthetic construct; identical to SEQ ID NO: 34149
  misc_feature 1..80: note = Artificially Synthesized Probe
  source 1..80: mol_type = other DNA

SEQ ID NO: 95667 - DNA, 80 bp, synthetic construct
  misc_feature 1..80: note = Artificially Synthesized Probe
  source 1..80: mol_type = other DNA
attcagctaagttctctgtcctgcataacaaggatccccctttcttcttttcccagtagcatgctcctcatttccactca

SEQ ID NO: 95668 - DNA, 80 bp, synthetic construct
  misc_feature 1..80: note = Artificially Synthesized Probe
  source 1..80: mol_type = other DNA
cctcaggagcagaatcattaacacacgtatttctattaacagtctctttgaggaaatacaggctttttctagcatgcttt

SEQ ID NO: 95669 - DNA, 80 bp, synthetic construct; identical to SEQ ID NO: 34150
  misc_feature 1..80: note = Artificially Synthesized Probe
  source 1..80: mol_type = other DNA

SEQ ID NO: 95670 - DNA, 80 bp, synthetic construct
  misc_feature 1..80: note = Artificially Synthesized Probe
  source 1..80: mol_type = other DNA
ctctctcttccatcttttaaggatacttattatcacacagggaccattcgaatagtccagaacactccattttaagattc

SEQ ID NO: 95671 - DNA, 80 bp, synthetic construct
  misc_feature 1..80: note = Artificially Synthesized Probe
  source 1..80: mol_type = other DNA
ctttctactgccctaattcccttctcaacaaatggtttgcatataattaaataggtaatatatgtaaagcatatattttt

SEQ ID NO: 95672 - DNA, 80 bp, synthetic construct
  misc_feature 1..80: note = Artificially Synthesized Probe
  source 1..80: mol_type = other DNA
atacatatgcatgttctttatctattaatagctgctacttcccagaacttattgggagaagacacctatgtcttggtttt

SEQ ID NO: 95673 - DNA, 80 bp, synthetic construct
  misc_feature 1..80: note = Artificially Synthesized Probe
  source 1..80: mol_type = other DNA
ttcagaagtcactcaagtttcctctcacctttattctacttcctcattaacaagtcatcggtttgatacattaatcatgg

SEQ ID NO: 95674 - DNA, 80 bp, synthetic construct
  misc_feature 1..80: note = Artificially Synthesized Probe
  source 1..80: mol_type = other DNA
tagtggcatagagataacaaagccaaacaccctgacttttaaataaactaaccagatcattcacccaatttcatttctta

SEQ ID NO: 95675 - DNA, 80 bp, synthetic construct; identical to SEQ ID NO: 34151
  misc_feature 1..80: note = Artificially Synthesized Probe
  source 1..80: mol_type = other DNA

SEQ ID NO: 95676 - DNA, 80 bp, synthetic construct
  misc_feature 1..80: note = Artificially Synthesized Probe
  source 1..80: mol_type = other DNA
agctgggactacaggtgcgtgccaccaagctcagctaatttttctattttcagaatatacagggtttcactatgttggac

SEQ ID NO: 95677 - DNA, 80 bp, synthetic construct
  misc_feature 1..80: note = Artificially Synthesized Probe
  source 1..80: mol_type = other DNA
aagttcaagttcaagcacaaccctgaggccaattaatcccacacctcttatgcctgctatcaaccactaccctaaggcaa

SEQ ID NO: 95678 - DNA, 80 bp, synthetic construct
  misc_feature 1..80: note = Artificially Synthesized Probe
  source 1..80: mol_type = other DNA
acttttgccttatttcaaatttgatattcttctgagtgattttctgcttcagtggaagctgttctattttctccacttca

SEQ ID NO: 95679 - DNA, 80 bp, synthetic construct; identical to SEQ ID NO: 34152
  misc_feature 1..80: note = Artificially Synthesized Probe
  source 1..80: mol_type = other DNA

SEQ ID NO: 95680 - DNA, 80 bp, synthetic construct
  misc_feature 1..80: note = Artificially Synthesized Probe
  source 1..80: mol_type = other DNA
ttaatctctatgtacacacgtatgtagtcgttaaggtaagtctgccactgtgaggaaaggtagtttcattttattttttt

SEQ ID NO: 95681 - DNA, 80 bp, synthetic construct
  misc_feature 1..80: note = Artificially Synthesized Probe
  source 1..80: mol_type = other DNA
cacccccgacaggccccgtgtgtgctgtttccccccatgtgttcatgtgttcccatcgttagctcccacttctaagtgag

SEQ ID NO: 95682 - DNA, 80 bp, synthetic construct
  misc_feature 1..80: note = Artificially Synthesized Probe
  source 1..80: mol_type = other DNA
ttaatgggcatttaggttgtttgtgttaactgttttattgtttttttgttatatatatttatatataaatatatgtaaac

SEQ ID NO: 95683 - DNA, 80 bp, synthetic construct
  misc_feature 1..80: note = Artificially Synthesized Probe
  source 1..80: mol_type = other DNA
agttttataatttatttatataaactacataaataaactatatatttatataaaatataaataaactatatatttatata

SEQ ID NO: 95684 - DNA, 80 bp, synthetic construct
  misc_feature 1..80: note = Artificially Synthesized Probe
  source 1..80: mol_type = other DNA
atataaatatatataaatacatatttatatatatgtaaaaaatataaaaatatgtgaaaaatacatatttatatataata

SEQ ID NO: 95685 - DNA, 80 bp, synthetic construct
  misc_feature 1..80: note = Artificially Synthesized Probe
  source 1..80: mol_type = other DNA
ctacataatatataacatattatatattttagtatatatattatatattagtatatattagtaatataccatataatata

SEQ ID NO: 95686 - DNA, 80 bp, synthetic construct
  misc_feature 1..80: note = Artificially Synthesized Probe
  source 1..80: mol_type = other DNA
gttctgagaataactaatatcatgaaagcataatccttaaaattttaaatgttgaagggtgaggaatacattggtagaaa

SEQ ID NO: 95687 - DNA, 80 bp, synthetic construct
  misc_feature 1..80: note = Artificially Synthesized Probe
  source 1..80: mol_type = other DNA
atataaatatgtaactatatatttatatataactatatatttaaatataaatatatatttaaatataaattatataaata

SEQ ID NO: 95688 - DNA, 80 bp, synthetic construct
  misc_feature 1..80: note = Artificially Synthesized Probe
  source 1..80: mol_type = other DNA
atgtaagtataaatatataaatatatattatataagtataaatatagaaatatatattatataagtataaatatagaaat

SEQ ID NO: 95689 - DNA, 80 bp, synthetic construct
  misc_feature 1..80: note = Artificially Synthesized Probe
  source 1..80: mol_type = other DNA
aagtataaatatagaaatatatatttaaatataagtatatatatatttaaatataagtatatacataaatatatatattt

SEQ ID NO: 95690 - DNA, 80 bp, synthetic construct
  misc_feature 1..80: note = Artificially Synthesized Probe
  source 1..80: mol_type = other DNA
atatatttaaatataagtatatatataaatatatatatttaaatataagtatatatataaatatatatatttaaatataa

SEQ ID NO: 95691 - DNA, 80 bp, synthetic construct
  misc_feature 1..80: note = Artificially Synthesized Probe
  source 1..80: mol_type = other DNA
gtatatatataaatatatatatttaaatataagtatatatataaatatatataaatataagtatatatataaatatatat

SEQ ID NO: 95692 - DNA, 80 bp, synthetic construct; identical to SEQ ID NO: 34153
  misc_feature 1..80: note = Artificially Synthesized Probe
  source 1..80: mol_type = other DNA

SEQ ID NO: 95693 - DNA, 80 bp, synthetic construct
  misc_feature 1..80: note = Artificially Synthesized Probe
  source 1..80: mol_type = other DNA
catggacattttttggtacagccttgtcagatgagcaaaacagtttcccatactcatgatttgcctccaagtagagtttg

SEQ ID NO: 95694 - DNA, 80 bp, synthetic construct
  misc_feature 1..80: note = Artificially Synthesized Probe
  source 1..80: mol_type = other DNA
tttatttccttccatacttagttctttcttctacctggtgatgtatcatcaaacactgccttaccagcatctttaaatct

SEQ ID NO: 95695 - DNA, 80 bp, synthetic construct
  misc_feature 1..80: note = Artificially Synthesized Probe
  source 1..80: mol_type = other DNA
tgtgttgttgtctttcctcattatttcttatcttttgttattttgctggaggaaatcattaggtacttttttcagagtgt

SEQ ID NO: 95696 - DNA, 80 bp, synthetic construct
  misc_feature 1..80: note = Artificially Synthesized Probe
  source 1..80: mol_type = other DNA
atttctttacaagtaaatctgatgtctctcttaaaaagtttaggatttttcttttttttctagagttcataaatttcaca

SEQ ID NO: 95697 - DNA, 80 bp, synthetic construct; identical to SEQ ID NO: 30253
  misc_feature 1..80: note = Artificially Synthesized Probe
  source 1..80: mol_type = other DNA

SEQ ID NO: 95698 - DNA, 80 bp, synthetic construct; identical to SEQ ID NO: 34154
  misc_feature 1..80: note = Artificially Synthesized Probe
  source 1..80: mol_type = other DNA

SEQ ID NO: 95699 - DNA, 80 bp, synthetic construct
  misc_feature 1..80: note = Artificially Synthesized Probe
  source 1..80: mol_type = other DNA
gcacccagcctaggtgggcctttttgatctaaagaccaaagctttttagaaaggtacattttctctattttttttctttt

SEQ ID NO: 95700 - DNA, 80 bp, synthetic construct
  misc_feature 1..80: note = Artificially Synthesized Probe
  source 1..80: mol_type = other DNA
ttaatttctaagaatttccttgatgtctctgttgtcataacaaactcacttgtatgatacaatattcacttaagcttcta

SEQ ID NO: 95701 - DNA, 80 bp, synthetic construct
  misc_feature 1..80: note = Artificially Synthesized Probe
  source 1..80: mol_type = other DNA
gttgtaaagtgtgtgtatatgagatatgaccaagactgatttatagtatggtgggcttgggttttacttgaagaagtaag

SEQ ID NO: 95702 - DNA, 80 bp, synthetic construct
  misc_feature 1..80: note = Artificially Synthesized Probe
  source 1..80: mol_type = other DNA
tacatggagtgttcagttaattaggataaaaagctggtgggaatagcatgactttatggaatactgatttggtacttact

SEQ ID NO: 95703 - DNA, 80 bp, synthetic construct
  misc_feature 1..80: note = Artificially Synthesized Probe
  source 1..80: mol_type = other DNA
aggatgaaacacattcaagtatttccttactttgtgacactacctttcttttgaatatttttgcatattctctctggccc

SEQ ID NO: 95704 - DNA, 80 bp, synthetic construct; identical to SEQ ID NO: 34155
  misc_feature 1..80: note = Artificially Synthesized Probe
  source 1..80: mol_type = other DNA

SEQ ID NO: 95705 - DNA, 80 bp, synthetic construct
  misc_feature 1..80: note = Artificially Synthesized Probe
  source 1..80: mol_type = other DNA
tcatgttcccttacagtggggatccatggctatgcgtcaataccctagtcattcctagttgactttacattcaatttccc

SEQ ID NO: 95706 - DNA, 80 bp, synthetic construct
  misc_feature 1..80: note = Artificially Synthesized Probe
  source 1..80: mol_type = other DNA
accatagagatcttgttcagggaacctatggaaggcatagataacactttatttgactgtcataggaatatcaagtgctc

SEQ ID NO: 95707 - DNA, 80 bp, synthetic construct; identical to SEQ ID NO: 34156
  misc_feature 1..80: note = Artificially Synthesized Probe
  source 1..80: mol_type = other DNA

SEQ ID NO: 95708 - DNA, 80 bp, synthetic construct
  misc_feature 1..80: note = Artificially Synthesized Probe
  source 1..80: mol_type = other DNA
aaaaaaaaaaaaattagccgggtgtggtggtgggcgcctgtagtcccagctactcgggaagctgaggcaggacaatggca

SEQ ID NO: 95709 - DNA, 80 bp, synthetic construct; identical to SEQ ID NO: 34134
  misc_feature 1..80: note = Artificially Synthesized Probe
  source 1..80: mol_type = other DNA

SEQ ID NO: 95710 - DNA, 80 bp, synthetic construct
  misc_feature 1..80: note = Artificially Synthesized Probe
  source 1..80: mol_type = other DNA
aacaccaaagcccccattcctctccctcacattgaagtagaagaaaacaaagtccatatttcatgcgttcctttgtcaaa

SEQ ID NO: 95711 - DNA, 80 bp, synthetic construct
  misc_feature 1..80: note = Artificially Synthesized Probe
  source 1..80: mol_type = other DNA
cctgaacttatcaattcttttgtatattagatttaataactttctttgaaagtttcatatttgagaataaaaattaactg

SEQ ID NO: 95712 - DNA, 80 bp, synthetic construct
  misc_feature 1..80: note = Artificially Synthesized Probe
  source 1..80: mol_type = other DNA
taatagtcaaattaagatggaagctaaagggaaaataggtcataatttctaactaggtaagaatatagttatatcaaaat

SEQ ID NO: 95713 - DNA, 80 bp, synthetic construct; identical to SEQ ID NO: 34157
  misc_feature 1..80: note = Artificially Synthesized Probe
  source 1..80: mol_type = other DNA

SEQ ID NO: 95714 - DNA, 80 bp, synthetic construct
  misc_feature 1..80: note = Artificially Synthesized Probe
  source 1..80: mol_type = other DNA
ccataaatgtgaaaataatagagggattaaaagcagtcctaccatgtactacaatgggtaatcccaaaccatcagtgtct

SEQ ID NO: 95715 - DNA, 80 bp, synthetic construct
  misc_feature 1..80: note = Artificially Synthesized Probe
  source 1..80: mol_type = other DNA
atttctgtttgcatatatgcaaactgcatggcatttcatttgggtctggctagggaaaaaagagatgggaaccaataatg

SEQ ID NO: 95716 - DNA, 80 bp, synthetic construct; identical to SEQ ID NO: 34158
  misc_feature 1..80: note = Artificially Synthesized Probe
  source 1..80: mol_type = other DNA

SEQ ID NO: 95717 - DNA, 80 bp, synthetic construct
  misc_feature 1..80: note = Artificially Synthesized Probe
  source 1..80: mol_type = other DNA
gtgtgtgcctataatcccagctactcaggaggctgaggcaggagaataacttgaacccgagaggcagaggttgcaagtga

SEQ ID NO: 95718 - DNA, 80 bp, synthetic construct
  misc_feature 1..80: note = Artificially Synthesized Probe
  source 1..80: mol_type = other DNA
ctttatatcacctaaaagattacagactatgtttttcatttaacaatgcatagtatattttaagaggaatacaaaggtgt

SEQ ID NO: 95719 - DNA, 80 bp, synthetic construct
  misc_feature 1..80: note = Artificially Synthesized Probe
  source 1..80: mol_type = other DNA
ttatgttactgaatttagggttcaaaacagaaaagacagatgtaatatttaaactccaaagagtaattttaatattatgt

SEQ ID NO: 95720 - DNA, 80 bp, synthetic construct
  misc_feature 1..80: note = Artificially Synthesized Probe
  source 1..80: mol_type = other DNA
taaggctactaatgcccaatgataaggggaagaatcattgtctttctgaatcatttcaactagtgatattttcaatgatg

SEQ ID NO: 95721 - DNA, 80 bp, synthetic construct; identical to SEQ ID NO: 34159
  misc_feature 1..80: note = Artificially Synthesized Probe
  source 1..80: mol_type = other DNA

SEQ ID NO: 95722 - DNA, 80 bp, synthetic construct
  misc_feature 1..80: note = Artificially Synthesized Probe
  source 1..80: mol_type = other DNA
aaaaataaactatacctcataggaccctggtgaagattaatttaggtactcttgcactatttcatttaatattgtatgtt

SEQ ID NO: 95723 - DNA, 80 bp, synthetic construct
  misc_feature 1..80: note = Artificially Synthesized Probe
  source 1..80: mol_type = other DNA
ttcttgaatctgggagcttgaggattcataacgtacaaaaggaagatgcaggacagtatcgatgtgtggcaaaaaacagc

SEQ ID NO: 95724 - DNA, 80 bp, synthetic construct
  misc_feature 1..80: note = Artificially Synthesized Probe
  source 1..80: mol_type = other DNA
ggagagaagagatgtgggcagcccacttccctcagttgttccagatattaggccataagttcaagcgtatgataacagaa

SEQ ID NO: 95725 - DNA, 80 bp, synthetic construct
  misc_feature 1..80: note = Artificially Synthesized Probe
  source 1..80: mol_type = other DNA
cttccctcatttaaagacttgggcataataattttaatctttttaatcatacagaacaactttaaaaagatgtgataagg

SEQ ID NO: 95726 - DNA, 80 bp, synthetic construct; identical to SEQ ID NO: 34160
  misc_feature 1..80: note = Artificially Synthesized Probe
  source 1..80: mol_type = other DNA

SEQ ID NO: 95727 - DNA, 80 bp, synthetic construct
  misc_feature 1..80: note = Artificially Synthesized Probe
  source 1..80: mol_type = other DNA
catttttggctcctagctttctcacctgttaagtggggtttgctctatttaatgaagttaggtgttgatagtgtttagca

SEQ ID NO: 95728 - DNA, 80 bp, synthetic construct
  misc_feature 1..80: note = Artificially Synthesized Probe
  source 1..80: mol_type = other DNA
agttcaatcaggaaaagacttgaagagttctccatattttactttgattctgtcctactttccttaggccaaaatctatc

SEQ ID NO: 95729 - DNA, 80 bp, synthetic construct
  misc_feature 1..80: note = Artificially Synthesized Probe
  source 1..80: mol_type = other DNA
gctcataaaattttcattaattcctcatggaaaataatgaggttggtgggaatagtggctgtcagaatataaaaatacat

SEQ ID NO: 95730 - DNA, 80 bp, synthetic construct; identical to SEQ ID NO: 34161
  misc_feature 1..80: note = Artificially Synthesized Probe
  source 1..80: mol_type = other DNA

SEQ ID NO: 95731 - DNA, 80 bp, synthetic construct
  misc_feature 1..80: note = Artificially Synthesized Probe
  source 1..80: mol_type = other DNA
accgaactccattagttggagttattatacagtttggttttgtgttaccatttaattttgtatcatgcctgtcagtaaca

SEQ ID NO: 95732 - DNA, 80 bp, synthetic construct
  misc_feature 1..80: note = Artificially Synthesized Probe
  source 1..80: mol_type = other DNA
cataagagttcatgtaagcagctctggatttgcttaatatgcacaaagaactatcaaaagtctcactttcaaaacacccg

SEQ ID NO: 95733 - DNA, 80 bp, synthetic construct
  misc_feature 1..80: note = Artificially Synthesized Probe
  source 1..80: mol_type = other DNA
gcacacatgcctatttctaccctcatcttagtccctattaaaatagccaaaatatgtgacatgcttagcacaattgctgg

SEQ ID NO: 95734 - DNA, 80 bp, synthetic construct
  misc_feature 1..80: note = Artificially Synthesized Probe
  source 1..80: mol_type = other DNA
gttgaggtattttcataagatataatgtagacgtgacctatttagaggtaaggctaactcaacctacaactcagaacaag

SEQ ID NO: 95735 - DNA, 80 bp, synthetic construct; identical to SEQ ID NO: 34162
  misc_feature 1..80: note = Artificially Synthesized Probe
  source 1..80: mol_type = other DNA

SEQ ID NO: 95736 - DNA, 80 bp, synthetic construct
  misc_feature 1..80: note = Artificially Synthesized Probe
  source 1..80: mol_type = other DNA
ctcagactgctggacctctgcaatggaaatgtaaaggtatcctatactttggtcttgccttaaaatgttcaaacggtgac

SEQ ID NO: 95737 - DNA, 80 bp, synthetic construct
  misc_feature 1..80: note = Artificially Synthesized Probe
  source 1..80: mol_type = other DNA
tgtggattatcttgtttaattctcactaaaagtctgtaacaagggccctatattctgccattttaggaaacagaggaata

SEQ ID NO: 95738 - DNA, 80 bp, synthetic construct; identical to SEQ ID NO: 34163
  misc_feature 1..80: note = Artificially Synthesized Probe
  source 1..80: mol_type = other DNA

SEQ ID NO: 95739 - DNA, 80 bp, synthetic construct
  misc_feature 1..80: note = Artificially Synthesized Probe
  source 1..80: mol_type = other DNA
gacactgagctcagagagaagaaaaatttgaacatacataagagaacaaaatactcaatgaaatgtggtgctggataatg

SEQ ID NO: 95740 - DNA, 80 bp, synthetic construct
  misc_feature 1..80: note = Artificially Synthesized Probe
  source 1..80: mol_type = other DNA
agagtctctcttttactttcagaagtatccaagcttccacgataaattatatggttactctccttagacaggaagacaga

SEQ ID NO: 95741 - DNA, 80 bp, synthetic construct
  misc_feature 1..80: note = Artificially Synthesized Probe
  source 1..80: mol_type = other DNA
agaaattagggttatcttttgaaaacacttttgttaaagggtcagggaagggggtgaggatgaagtgagttctaaaatag

SEQ ID NO: 95742 - DNA, 80 bp, synthetic construct
  misc_feature 1..80: note = Artificially Synthesized Probe
  source 1..80: mol_type = other DNA
ctaagtcatgactgacacagctgtcattgaaatccaggacacacagtcctggatgaatattttatattgacatgcattga

SEQ ID NO: 95743 - DNA, 80 bp, synthetic construct
  misc_feature 1..80: note = Artificially Synthesized Probe
  source 1..80: mol_type = other DNA
aaatagcagaaagctaaattcaaaggcaagacataaatgttggagttttgtcaggaaggaaaatagggcaaaggatttga

SEQ ID NO: 95744 - DNA, 80 bp, synthetic construct; identical to SEQ ID NO: 34164
  misc_feature 1..80: note = Artificially Synthesized Probe
  source 1..80: mol_type = other DNA

SEQ ID NO: 95745 - DNA, 80 bp, synthetic construct
  misc_feature 1..80: note = Artificially Synthesized Probe
  source 1..80: mol_type = other DNA
attttattttattttattttattttattttattttattttattttattttattttattttattttattttattttatttt

SEQ ID NO: 95746 - DNA, 80 bp, synthetic construct
  misc_feature 1..80: note = Artificially Synthesized Probe
  source 1..80: mol_type = other DNA
tgagctaccatgcccagccatacctatgatttaatatccaaatatgaaatatcctcggatatgagcctaggattaaacac

SEQ ID NO: 95747 - DNA, 80 bp, synthetic construct
  misc_feature 1..80: note = Artificially Synthesized Probe
  source 1..80: mol_type = other DNA
caggaactgcaaaaaccataagctcaatgagctggtttcttattgttctaaaggtaatgggacaggtgctcatctccata

SEQ ID NO: 95748 - DNA, 80 bp, synthetic construct; identical to SEQ ID NO: 34165
  misc_feature 1..80: note = Artificially Synthesized Probe
  source 1..80: mol_type = other DNA

SEQ ID NO: 95749 - DNA, 80 bp, synthetic construct
  misc_feature 1..80: note = Artificially Synthesized Probe
  source 1..80: mol_type = other DNA
gcgacatggcaaaactccatctctacaaaaaatataaaaattagccaggtgtggtggtacatgcctctagtctcaactat

SEQ ID NO: 95750 - DNA, 80 bp, synthetic construct
  misc_feature 1..80: note = Artificially Synthesized Probe
  source 1..80: mol_type = other DNA
caggccaaaaaacccacacacacacaaaacattggttccaggccaaaaatttaacaagaaaaaaaagctaaaagaagaag

SEQ ID NO: 95751 - DNA, 80 bp, synthetic construct; identical to SEQ ID NO: 34166
  misc_feature 1..80: note = Artificially Synthesized Probe
  source 1..80: mol_type = other DNA

SEQ ID NO: 95752 - DNA, 80 bp, synthetic construct; identical to SEQ ID NO: 34135
  misc_feature 1..80: note = Artificially Synthesized Probe
  source 1..80: mol_type = other DNA

SEQ ID NO: 95753 - DNA, 80 bp, synthetic construct
  misc_feature 1..80: note = Artificially Synthesized Probe
  source 1..80: mol_type = other DNA
gaaggctgagacaaaaggatctcttaaacccaggaggcagaggttgcagtgagccaagattgcaccactacactccagcc

SEQ ID NO: 95754 - DNA, 80 bp, synthetic construct
  misc_feature 1..80: note = Artificially Synthesized Probe
  source 1..80: mol_type = other DNA
agataattcagccattagaaatcagctcttcagaatttagaattcagtgcagaaagattttgaaagcatagaaaagatga

SEQ ID NO: 95755 - DNA, 80 bp, synthetic construct
  misc_feature 1..80: note = Artificially Synthesized Probe
  source 1..80: mol_type = other DNA
cttcaagtacgtgaagcataccaagtcccaatcggtaaaaatgaagagcagagaaataagcatttcacacccagtcaaat

SEQ ID NO: 95756 - DNA, 80 bp, synthetic construct
  misc_feature 1..80: note = Artificially Synthesized Probe
  source 1..80: mol_type = other DNA
caatttggtatagccgcatgaaggtttatgaaaaataaaaatcaaactttaaaatgtatatagatttgtctcagcaattt

SEQ ID NO: 95757 - DNA, 80 bp, synthetic construct; identical to SEQ ID NO: 34167
  misc_feature 1..80: note = Artificially Synthesized Probe
  source 1..80: mol_type = other DNA

SEQ ID NO: 95758 - DNA, 80 bp, synthetic construct
  misc_feature 1..80: note = Artificially Synthesized Probe
  source 1..80: mol_type = other DNA
ggtactgttctaagtgctttagaatattaattcattatcaatataatatgttcataagtgaaaaagtaagtaaagaacag

SEQ ID NO: 95759 - DNA, 80 bp, synthetic construct
  misc_feature 1..80: note = Artificially Synthesized Probe
  source 1..80: mol_type = other DNA
gaccagcctggccaacatggtgaaaccccatctctactaaaaatacaaaaaattatctgggcatggtggcaggcacctga

SEQ ID NO: 95760 - DNA, 80 bp, synthetic construct
  misc_feature 1..80: note = Artificially Synthesized Probe
  source 1..80: mol_type = other DNA
taacttctattttatactttatgtaggcctatactttttgcatctttataaagagaactttataattaggaagaattaat

SEQ ID NO: 95761 - DNA, 80 bp, synthetic construct; identical to SEQ ID NO: 34168
  misc_feature 1..80: note = Artificially Synthesized Probe
  source 1..80: mol_type = other DNA

SEQ ID NO: 95762 - DNA, 80 bp, synthetic construct
  misc_feature 1..80: note = Artificially Synthesized Probe
  source 1..80: mol_type = other DNA
agaacagcagctgctgctgaagtctccactcatctgactcttcttttctatgtatagatggaaatctgaaatttatgatt

SEQ ID NO: 95763 - DNA, 80 bp, synthetic construct
  misc_feature 1..80: note = Artificially Synthesized Probe
  source 1..80: mol_type = other DNA
cagatggctggattaattcaggattggcactttccagggtcagtacagctaaagaactagagagtaaaggagttggagtt

SEQ ID NO: 95764 - DNA, 80 bp, synthetic construct
  misc_feature 1..80: note = Artificially Synthesized Probe
  source 1..80: mol_type = other DNA
aaacaaagggaagttcctataggaaagggaagcaccgctaggtaagaactatttaggtatactgatttgacattgacagg

SEQ ID NO: 95765 - DNA, 80 bp, synthetic construct
  misc_feature 1..80: note = Artificially Synthesized Probe
  source 1..80: mol_type = other DNA
cacggcaggatgtgaccagggaacatcttattgtctgatgtcaccagagaaatctacatatcatatttcatacattctaa

SEQ ID NO: 95766 - DNA, 80 bp, synthetic construct; identical to SEQ ID NO: 34169
  misc_feature 1..80: note = Artificially Synthesized Probe
  source 1..80: mol_type = other DNA

SEQ ID NO: 95767 - DNA, 80 bp, synthetic construct
  misc_feature 1..80: note = Artificially Synthesized Probe
  source 1..80: mol_type = other DNA
tcattttattaggttgaaatagagactaagtggcttttcagggccatatagaggaaattatcttttaagagacaattttg

SEQ ID NO: 95768 - DNA, 80 bp, synthetic construct
  misc_feature 1..80: note = Artificially Synthesized Probe
  source 1..80: mol_type = other DNA
atgctgatttgaatggcagggctggaattttcagtgagggtttgctatcatgattgcttgggacaacttttgaaattctg

SEQ ID NO: 95769 - DNA, 80 bp, synthetic construct
  misc_feature 1..80: note = Artificially Synthesized Probe
  source 1..80: mol_type = other DNA
acttgaggtcaggagttagagaccagcctgggcaacatggtgaagccacgtctctactaaaaatacaaaaattagccggg

SEQ ID NO: 95770 - DNA, 80 bp, synthetic construct; identical to SEQ ID NO: 34170
  misc_feature 1..80: note = Artificially Synthesized Probe
  source 1..80: mol_type = other DNA

SEQ ID NO: 95771 - DNA, 80 bp, synthetic construct
  misc_feature 1..80: note = Artificially Synthesized Probe
  source 1..80: mol_type = other DNA
cagaccatacaaatcaaatcttttaaggtgataacataattactgttttttatagctggggggtgtctttgttataagat

SEQ ID NO: 95772 - DNA, 80 bp, synthetic construct
  misc_feature 1..80: note = Artificially Synthesized Probe
  source 1..80: mol_type = other DNA
atactgctttgtatatagaaactggctgaatgtagtgtacttgagacccaaattaaaatagatggatgctggagtgtatc

SEQ ID NO: 95773 - DNA, 80 bp, synthetic construct
  misc_feature 1..80: note = Artificially Synthesized Probe
  source 1..80: mol_type = other DNA
agagccagggagggtctagaagcagaacaaaaagaagagagtccttctgggtacagggttattgtagggctccttcatgt

SEQ ID NO: 95774 - DNA, 80 bp, synthetic construct; identical to SEQ ID NO: 34171
  misc_feature 1..80: note = Artificially Synthesized Probe
  source 1..80: mol_type = other DNA

SEQ ID NO: 95775 - DNA, 80 bp, synthetic construct
  misc_feature 1..80: note = Artificially Synthesized Probe
  source 1..80: mol_type = other DNA
attttccaagtcagagccctaattttactaaaatagaaaggagcaaatacaccttgtttctttatgtacccaatcattgg

SEQ ID NO: 95776 - DNA, 80 bp, synthetic construct
  misc_feature 1..80: note = Artificially Synthesized Probe
  source 1..80: mol_type = other DNA
agcattgtcttcaaaattttagacttctggctgccttctttcctagagatcaaatttacttgttgcatctacaaaagtgg

SEQ ID NO: 95777 - DNA, 80 bp, synthetic construct
  misc_feature 1..80: note = Artificially Synthesized Probe
  source 1..80: mol_type = other DNA
tcccggcatcagtcctaattgtttgatgccactaacaggtttgatttgctgtcatgagtacattgtgcatttgaaaacca

SEQ ID NO: 95778 - DNA, 80 bp, synthetic construct
  misc_feature 1..80: note = Artificially Synthesized Probe
  source 1..80: mol_type = other DNA
aaaagttctataaggctttcagagaagaatggtaaagtggtcctttagttgaacagttgtcactgcatttctctaagaaa

SEQ ID NO: 95779 - DNA, 80 bp, synthetic construct
  misc_feature 1..80: note = Artificially Synthesized Probe
  source 1..80: mol_type = other DNA
gttatcgtgacctgaaatacatatactctaattggagtgagtttttaatatcagttttcagatattaaaatgagatgcat

SEQ ID NO: 95780 - DNA, 80 bp, synthetic construct; identical to SEQ ID NO: 34172
  misc_feature 1..80: note = Artificially Synthesized Probe
  source 1..80: mol_type = other DNA

SEQ ID NO: 95781 - DNA, 80 bp, synthetic construct
  misc_feature 1..80: note = Artificially Synthesized Probe
  source 1..80: mol_type = other DNA
ttcttgagtccaaatcctggttctaccacctatcacatgtgtaacttccagtaggttacttatctctttgtgcttcagtt

SEQ ID NO: 95782 - DNA, 80 bp, synthetic construct
  misc_feature 1..80: note = Artificially Synthesized Probe
  source 1..80: mol_type = other DNA
gcaacagaagcagtgatttacgcacttgtgcagacaattatagctcccttttccatgtgtcatctttatctctgaggtac

SEQ ID NO: 95783 - DNA, 80 bp, synthetic construct
  misc_feature 1..80: note = Artificially Synthesized Probe
  source 1..80: mol_type = other DNA
actaggggcagtggctcacgcctgtaatcccagccctttgggaggctgaggcaggaggattgcttgaggccaggagttcg

SEQ ID NO: 95784 - DNA, 80 bp, synthetic construct
  misc_feature 1..80: note = Artificially Synthesized Probe
  source 1..80: mol_type = other DNA
gtcaagcttttcttcgggtccagaaaaggattgtgttcattttcatgtatttgttattcatgtagtccttggattgagag

SEQ ID NO: 95785 - DNA, 80 bp, synthetic construct; identical to SEQ ID NO: 34173
  misc_feature 1..80: note = Artificially Synthesized Probe
  source 1..80: mol_type = other DNA

SEQ ID NO: 95786 - DNA, 80 bp, synthetic construct
  misc_feature 1..80: note = Artificially Synthesized Probe
  source 1..80: mol_type = other DNA
cagagttcttaaaatggactcagatagcatattcacagtgtctatgcagtagctctttgataagtatttgctgttgttgg

SEQ ID NO: 95787 - DNA, 80 bp, synthetic construct
  misc_feature 1..80: note = Artificially Synthesized Probe
  source 1..80: mol_type = other DNA
gtacctgcattcttgttacttgttagagattataactttggtgtggcttcaccgtgacaagtgataaagggaagcttatc

SEQ ID NO: 95788 - DNA, 80 bp, synthetic construct; identical to SEQ ID NO: 34174
  misc_feature 1..80: note = Artificially Synthesized Probe
  source 1..80: mol_type = other DNA

SEQ ID NO: 95789 - DNA, 80 bp, synthetic construct
  misc_feature 1..80: note = Artificially Synthesized Probe
  source 1..80: mol_type = other DNA
acaggaagggggacatcacacaccggagcctgttgtggggtcgggggagaggggagggatagatagcattaggagatata

SEQ ID NO: 95790 - DNA, 80 bp, synthetic construct
  misc_feature 1..80: note = Artificially Synthesized Probe
  source 1..80: mol_type = other DNA
agaggagcttcctgccagcctggggaagccatagcctgcacatgatctgtcccttttagtgaactaaggttgacttgatg

SEQ ID NO: 95791 - DNA, 80 bp, synthetic construct
  misc_feature 1..80: note = Artificially Synthesized Probe
  source 1..80: mol_type = other DNA
tgcagacgaaatcttatggagaaatttccttggacttacatccttagcctcagcacagcaaattaatagaagcttgcaga

SEQ ID NO: 95792 - DNA, 80 bp, synthetic construct
  misc_feature 1..80: note = Artificially Synthesized Probe
  source 1..80: mol_type = other DNA
ggctaaatctaataaggccatactcactttgtcgtcaagaatctttgagattctttttaatcaaaagtggggagactata

SEQ ID NO: 95793 - DNA, 80 bp, synthetic construct; identical to SEQ ID NO: 34175
  misc_feature 1..80: note = Artificially Synthesized Probe
  source 1..80: mol_type = other DNA

SEQ ID NO: 95794 - DNA, 80 bp, synthetic construct; identical to SEQ ID NO: 34136
  misc_feature 1..80: note = Artificially Synthesized Probe
  source 1..80: mol_type = other DNA

SEQ ID NO: 95795 - DNA, 80 bp, synthetic construct
  misc_feature 1..80: note = Artificially Synthesized Probe
  source 1..80: mol_type = other DNA
tgggttggggagaagggtctctgctgagaaactgacattttatccattcctatagtaagtactgtgtactttattttctt

SEQ ID NO: 95796 - DNA, 80 bp, synthetic construct
  misc_feature 1..80: note = Artificially Synthesized Probe
  source 1..80: mol_type = other DNA
tctatggaaagagaaagaaataactaagttgacggattcatggaacttctcctccaagtggttctcaaatgccagtgcac

SEQ ID NO: 95797 - DNA, 80 bp, synthetic construct; identical to SEQ ID NO: 34176
  misc_feature 1..80: note = Artificially Synthesized Probe
  source 1..80: mol_type = other DNA

SEQ ID NO: 95798 - DNA, 80 bp, synthetic construct
  misc_feature 1..80: note = Artificially Synthesized Probe
  source 1..80: mol_type = other DNA
acgaaagagagatgtggttcatttcttgaaaagtgttcaaattcagtgaggaagatggatatgcaaacaagtaaaatgca

SEQ ID NO: 95799 - DNA, 80 bp, synthetic construct
  misc_feature 1..80: note = Artificially Synthesized Probe
  source 1..80: mol_type = other DNA
aaagaaaatagaggaaaaaattcagatttaccatgcaagcacagcctgacactgactcataaccagggagtaaaagaagg

SEQ ID NO: 95800 - DNA, 80 bp, synthetic construct
  misc_feature 1..80: note = Artificially Synthesized Probe
  source 1..80: mol_type = other DNA
ggctgaagtgcagtggtgcaatctctgctcactgcaacctccgcctcccaggttcaagcgattcttatgcttcagcctcc

SEQ ID NO: 95801 - DNA, 80 bp, synthetic construct; identical to SEQ ID NO: 34177
  misc_feature 1..80: note = Artificially Synthesized Probe
  source 1..80: mol_type = other DNA

SEQ ID NO: 95802 - DNA, 80 bp, synthetic construct
  misc_feature 1..80: note = Artificially Synthesized Probe
  source 1..80: mol_type = other DNA
aaaacaaaaatcttattcttaatagacctcagctcgtttaacgcatgtcagagtgcaggcatcttccagagcttagatca

SEQ ID NO: 95803 - DNA, 80 bp, synthetic construct
  misc_feature 1..80: note = Artificially Synthesized Probe
  source 1..80: mol_type = other DNA
ttcagctctatcacttcctatttttgtgatatgtagacaagttgtgcaaccatttttagtccccatttctggtctgcaag

SEQ ID NO: 95804 - DNA, 80 bp, synthetic construct
  misc_feature 1..80: note = Artificially Synthesized Probe
  source 1..80: mol_type = other DNA
aaaaaggtaaactaagaaatacttctttgtcctggtaattaagcagtttagcatctcctcccatcaaaaacagaaaatga

SEQ ID NO: 95805 - DNA, 80 bp, synthetic construct
  misc_feature 1..80: note = Artificially Synthesized Probe
  source 1..80: mol_type = other DNA
cctaagactgaaacaaaaacaagtaaactttgtgtagctcttgtctgatttacatggtaaacatttcttgctcgtaccca

SEQ ID NO: 95806 - DNA, 80 bp, synthetic construct
  misc_feature 1..80: note = Artificially Synthesized Probe
  source 1..80: mol_type = other DNA
atgttttctaaaggagcttgccttctgactccttcagagttggagccacagtgggtaaacctcttcaggcattgccctgc

SEQ ID NO: 95807 - DNA, 80 bp, synthetic construct; identical to SEQ ID NO: 34178
  misc_feature 1..80: note = Artificially Synthesized Probe
  source 1..80: mol_type = other DNA

SEQ ID NO: 95808 - DNA, 80 bp, synthetic construct
  misc_feature 1..80: note = Artificially Synthesized Probe
  source 1..80: mol_type = other DNA
gtcgaaagaatttctctctctacagagtgatttctctgtctcaaataattcagtttatgaaaggagttaaggatatgctt

SEQ ID NO: 95809 - DNA, 80 bp, synthetic construct
  misc_feature 1..80: note = Artificially Synthesized Probe
  source 1..80: mol_type = other DNA
tggagaaagaaaaagaactagaagacctggcttcaaaatttacctctagtacttcccagttatgagttagctgctatatt

SEQ ID NO: 95810 - DNA, 80 bp, synthetic construct; identical to SEQ ID NO: 34179
  misc_feature 1..80: note = Artificially Synthesized Probe
  source 1..80: mol_type = other DNA

SEQ ID NO: 95811 - DNA, 80 bp, synthetic construct
  misc_feature 1..80: note = Artificially Synthesized Probe
  source 1..80: mol_type = other DNA
agtgccatttcattaaattgcagcactattcacaatagcaaagacttggaaccaacctaaaagcccatcaatgatagact

SEQ ID NO: 95812 - DNA, 80 bp, synthetic construct
  misc_feature 1..80: note = Artificially Synthesized Probe
  source 1..80: mol_type = other DNA
aagtgggagctgaacgatgagaacacatggacacatggggggaacaatacacactggggcctgttggaggctgggagtgg

SEQ ID NO: 95813 - DNA, 80 bp, synthetic construct
  misc_feature 1..80: note = Artificially Synthesized Probe
  source 1..80: mol_type = other DNA
gtcaaacttcacacaagactgttatgtcactgaatcttatgggaaggtgttaacttaataaagttcttagtaacaccttc

SEQ ID NO: 95814 - DNA, 80 bp, synthetic construct
  misc_feature 1..80: note = Artificially Synthesized Probe
  source 1..80: mol_type = other DNA
aaaaaaaagaaaaaagaaaatattagcttggtgcaaaagaaataatggcaaaaactgcaattactttttttgcactaacc

SEQ ID NO: 95815 - DNA, 80 bp, synthetic construct
  misc_feature 1..80: note = Artificially Synthesized Probe
  source 1..80: mol_type = other DNA
ttctcacaaagtaatagaaagctcaggaaattaatatttgagaagtaaatttagaggcaaggataacttaaactgagaag

SEQ ID NO: 95816 - DNA, 80 bp, synthetic construct; identical to SEQ ID NO: 34180
  misc_feature 1..80: note = Artificially Synthesized Probe
  source 1..80: mol_type = other DNA

SEQ ID NO: 95817 - DNA, 80 bp, synthetic construct
  misc_feature 1..80: note = Artificially Synthesized Probe
  source 1..80: mol_type = other DNA
attgttgtaattcctcctctgcagattgcatttttaacctttggatgatgttcctcttcatcccttttttataatacctt

SEQ ID NO: 95818 - DNA, 80 bp, synthetic construct
  misc_feature 1..80: note = Artificially Synthesized Probe
  source 1..80: mol_type = other DNA
ttatcaaggtctattttgtttatgcgaatgtcaaatttcagggtggtctaagtggatgatgacaaccttttcgcatcagg

SEQ ID NO: 95819 - DNA, 80 bp, synthetic construct
  misc_feature 1..80: note = Artificially Synthesized Probe
  source 1..80: mol_type = other DNA
caaaagactttatttttagtagataagtgtaggtctttgtatttattctgaaaatttatttctattattctttagacgat

SEQ ID NO: 95820 - DNA, 80 bp, synthetic construct
  misc_feature 1..80: note = Artificially Synthesized Probe
  source 1..80: mol_type = other DNA
gattacttttacattttaatatacatatatgatgctataattctaacagtttaagatcatgtaggatcttctccagtctc

SEQ ID NO: 95821 - DNA, 80 bp, synthetic construct; identical to SEQ ID NO: 34181
  misc_feature 1..80: note = Artificially Synthesized Probe
  source 1..80: mol_type = other DNA

SEQ ID NO: 95822 - DNA, 80 bp, synthetic construct
  misc_feature 1..80: note = Artificially Synthesized Probe
  source 1..80: mol_type = other DNA
ccctcagtgttgtcctatgtcttcttacatcaattgatgagaagtgttctgtcattgtaactataattctttggtaggta

SEQ ID NO: 95823 - DNA, 80 bp, synthetic construct
  misc_feature 1..80: note = Artificially Synthesized Probe
  source 1..80: mol_type = other DNA
caggaagtacagagtgactttcccaggccaatgtatggattatgtttgcagtaaagatgttggccacttctgcagtcatc

SEQ ID NO: 95824 - DNA, 80 bp, synthetic construct; identical to SEQ ID NO: 34137
  misc_feature 1..80: note = Artificially Synthesized Probe
  source 1..80: mol_type = other DNA

SEQ ID NO: 95825 - DNA, 80 bp, synthetic construct; identical to SEQ ID NO: 34182
  misc_feature 1..80: note = Artificially Synthesized Probe
  source 1..80: mol_type = other DNA

SEQ ID NO: 95826 - DNA, 80 bp, synthetic construct
  misc_feature 1..80: note = Artificially Synthesized Probe
  source 1..80: mol_type = other DNA
cacaagcagaagaaagaacttcagagcttgaagacaaggcttgaactaaccaaatccatcaaagacaaagaaaaaataat

SEQ ID NO: 95827 - DNA, 80 bp, synthetic construct
  misc_feature 1..80: note = Artificially Synthesized Probe
  source 1..80: mol_type = other DNA
tagacatccgaatacaagaagctcaaagaacacctgggaaattcattgcaaaaaaatcattgcctagacacatagttatc

SEQ ID NO: 95828 - DNA, 80 bp, synthetic construct
  misc_feature 1..80: note = Artificially Synthesized Probe
  source 1..80: mol_type = other DNA
aaagcaattatcagccaagaattttgtatccagtaaaactaagcttcataaatgaaggaaagatacagtctttccagaca

SEQ ID NO: 95829 - DNA, 80 bp, synthetic construct
  misc_feature 1..80: note = Artificially Synthesized Probe
  source 1..80: mol_type = other DNA
acaaggtattcaggcaacaaatagcacaatgaatagaatagtacctctcatctcaatactaacgtggaatgtaaatggcc

SEQ ID NO: 95830 - DNA, 80 bp, synthetic construct; identical to SEQ ID NO: 34183
  misc_feature 1..80: note = Artificially Synthesized Probe
  source 1..80: mol_type = other DNA

SEQ ID NO: 95831 - DNA, 80 bp, synthetic construct
  misc_feature 1..80: note = Artificially Synthesized Probe
  source 1..80: mol_type = other DNA
atagcactagacagatcatcaggacagaaagtcaacaaataaacaatggaattaaactataccctacaacaaatggacct

SEQ ID NO: 95832 - DNA, 80 bp, synthetic construct
  misc_feature 1..80: note = Artificially Synthesized Probe
  source 1..80: mol_type = other DNA
agtgaaataaaactggaaatcaactccaaaaggaaccctcaaaaccatgaaaatacatggaaattaaatgacctgctcct

SEQ ID NO: 95833 - DNA, 80 bp, synthetic construct; identical to SEQ ID NO: 34184
  misc_feature 1..80: note = Artificially Synthesized Probe
  source 1..80: mol_type = other DNA

SEQ ID NO: 95834 - DNA, 80 bp, synthetic construct
  misc_feature 1..80: note = Artificially Synthesized Probe
  source 1..80: mol_type = other DNA
gctttattagaaatgaaatggaaggtattacaactgatatcacagaaatatgaaacattattcaaggctaatatgaacac

SEQ ID NO: 95835 - DNA, 80 bp, synthetic construct
  misc_feature 1..80: note = Artificially Synthesized Probe
  source 1..80: mol_type = other DNA
gctatttttacttagcactaaagcatgagcatattctatattattagtaatcttccaaacgtcatgtgtggtgactaaat

SEQ ID NO: 95836 - DNA, 80 bp, synthetic construct
  misc_feature 1..80: note = Artificially Synthesized Probe
  source 1..80: mol_type = other DNA
caggaccagacagattcatagctgaattgtatcagacattcaaagaagaattggtaccaatcctattgacactattccac

SEQ ID NO: 95837 - DNA, 80 bp, synthetic construct
  misc_feature 1..80: note = Artificially Synthesized Probe
  source 1..80: mol_type = other DNA
ccaacaacataccaaaaatataatctaccatgatcaagtgggtttcataccagggatgcagggatggtttaacatatgta

SEQ ID NO: 95838 - DNA, 80 bp, synthetic construct; identical to SEQ ID NO: 34185
  misc_feature 1..80: note = Artificially Synthesized Probe
  source 1..80: mol_type = other DNA

SEQ ID NO: 95839 - DNA, 80 bp, synthetic construct
  misc_feature 1..80: note = Artificially Synthesized Probe
  source 1..80: mol_type = other DNA
aagactcatccaaaaaactcttagaactggtagatgaattcagcaaagtttcaggatacaaaattaatgtacacaaatca

SEQ ID NO: 95840 - DNA, 80 bp, synthetic construct
  misc_feature 1..80: note = Artificially Synthesized Probe
  source 1..80: mol_type = other DNA
aatcatagatggcacaaagaaatggaaacacatcccgtgctcatagataggtagaatcaatattgtgaaaatgaccatac

SEQ ID NO: 95841 - DNA, 80 bp, synthetic construct
  misc_feature 1..80: note = Artificially Synthesized Probe
  source 1..80: mol_type = other DNA
ttacccaacttcaaaccatactacaacgccacagacaccaaaacagcatggtactggtataaaaatgggcacagagatca

SEQ ID NO: 95842 - DNA, 80 bp, synthetic construct; identical to SEQ ID NO: 34186
  misc_feature 1..80: note = Artificially Synthesized Probe
  source 1..80: mol_type = other DNA

SEQ ID NO: 95843 - DNA, 80 bp, synthetic construct
  misc_feature 1..80: note = Artificially Synthesized Probe
  source 1..80: mol_type = other DNA
cagatcacttaaggtcaggagttgaagaccagcctggccaatatggtgaaaccccatctctactaaaaatacaaaaatta

SEQ ID NO: 95844 - DNA, 80 bp, synthetic construct
  misc_feature 1..80: note = Artificially Synthesized Probe
  source 1..80: mol_type = other DNA
aaacatgggacttaattaaactaaaaagcttctgtacagcaaaagaaataatcagcagagttaacagacaacccccagag

SEQ ID NO: 95845 - DNA, 80 bp, synthetic construct
  misc_feature 1..80: note = Artificially Synthesized Probe
  source 1..80: mol_type = other DNA
aaaatgctccacatcactaattatcagggaaatgcaaatcaaaaccacaacgtgatatcaccttactcctgcaagaatgg

SEQ ID NO: 95846 - DNA, 80 bp, synthetic construct
  misc_feature 1..80: note = Artificially Synthesized Probe
  source 1..80: mol_type = other DNA
taatgagcactgagttgggaaatagcatgtgtagtagcatccttcatatattatttctaccacacagacacattacagat

SEQ ID NO: 95847 - DNA, 80 bp, synthetic construct; identical to SEQ ID NO: 34187
  misc_feature 1..80: note = Artificially Synthesized Probe
  source 1..80: mol_type = other DNA

SEQ ID NO: 95848 - DNA, 80 bp, synthetic construct
  misc_feature 1..80: note = Artificially Synthesized Probe
  source 1..80: mol_type = other DNA
tacataccatggaatactacttatccataaaaaggaatgaaataatggcattcacagcaacctggttggaattggagatc

SEQ ID NO: 95849 - DNA, 80 bp, synthetic construct
  misc_feature 1..80: note = Artificially Synthesized Probe
  source 1..80: mol_type = other DNA
ctatatattacgtacagtttaccctgctcaggtgatgggtgcaccaaaatctcagaaatgaaaaaattttaaaaactaca

SEQ ID NO: 95850 - DNA, 80 bp, synthetic construct
  misc_feature 1..80: note = Artificially Synthesized Probe
  source 1..80: mol_type = other DNA
ttgcttgcttaaacttcataagtgattcaatgaatttcgagttttaaaagccaccactttaactgatctggggtttcatg

SEQ ID NO: 95851 - DNA, 80 bp, synthetic construct; identical to SEQ ID NO: 34188
  misc_feature 1..80: note = Artificially Synthesized Probe
  source 1..80: mol_type = other DNA

SEQ ID NO: 95852 - DNA, 80 bp, synthetic construct
  misc_feature 1..80: note = Artificially Synthesized Probe
  source 1..80: mol_type = other DNA
atttaaggttcttaaactccttttgaacttctttgttttcttccagagtaaattaatcccccagttactgaattcattaa

SEQ ID NO: 95853 - DNA, 80 bp, synthetic construct
  misc_feature 1..80: note = Artificially Synthesized Probe
  source 1..80: mol_type = other DNA
ttgggggttgccctctacttccttcattcatataagatatttcagggagcaattttaggactctattctgtaatgttttg

SEQ ID NO: 95854 - DNA, 80 bp, synthetic construct
  misc_feature 1..80: note = Artificially Synthesized Probe
  source 1..80: mol_type = other DNA
ttctagagaaatcaaacttcaagcccctttctctgtttatagaattggaactcagcagtgactacttatctgttgtgttt

SEQ ID NO: 95855 - DNA, 80 bp, synthetic construct
  misc_feature 1..80: note = Artificially Synthesized Probe
  source 1..80: mol_type = other DNA
tgctataattattatatatcatcatataaattctatccagctgaatatataaaaataaaaatttatattattgtttgaaa

SEQ ID NO: 95856 - DNA, 80 bp, synthetic construct; identical to SEQ ID NO: 34189
  misc_feature 1..80: note = Artificially Synthesized Probe
  source 1..80: mol_type = other DNA

SEQ ID NO: 95857 - DNA, 80 bp, synthetic construct
  misc_feature 1..80: note = Artificially Synthesized Probe
  source 1..80: mol_type = other DNA
aagtggctcttgcaaacctgcggaagacaaaacttgtgtgcctcaatcttctcccacttgactacgattaatagaattta

SEQ ID NO: 95858 - DNA, 80 bp, synthetic construct
  misc_feature 1..80: note = Artificially Synthesized Probe
  source 1..80: mol_type = other DNA
gtttcattcttgttaggtggatagaagtgggaaaagggtcttatagatagtaagtataaagagattggttttggtttgat

SEQ ID NO: 95859 - DNA, 80 bp, synthetic construct
  misc_feature 1..80: note = Artificially Synthesized Probe
  source 1..80: mol_type = other DNA
tccaataagagcagtcattgattattctaaataccctattggacagttccaacaaaataggatgaaaatgccccactaat

SEQ ID NO: 95860 - DNA, 80 bp, synthetic construct
  misc_feature 1..80: note = Artificially Synthesized Probe
  source 1..80: mol_type = other DNA
agcagcaacaaaagtctgatactaatcccagtttaattctagccctaacctccctaaagaagattacaaatcaatttgga

SEQ ID NO: 95861 - DNA, 80 bp, synthetic construct; identical to SEQ ID NO: 34190
  misc_feature 1..80: note = Artificially Synthesized Probe
  source 1..80: mol_type = other DNA

SEQ ID NO: 95862 - DNA, 80 bp, synthetic construct
  misc_feature 1..80: note = Artificially Synthesized Probe
  source 1..80: mol_type = other DNA
actgaaactataatttctggtagaacttctaagcttcctcccaggaaaatgacaaatcttagacattctttcatgtcttg

SEQ ID NO: 95863 - DNA, 80 bp, synthetic construct
  misc_feature 1..80: note = Artificially Synthesized Probe
  source 1..80: mol_type = other DNA
acgctcaaagtagagttcaagtatagtcctgtatagatcatggagtgaaactgaaacgagactcagaattgacctgcagt

SEQ ID NO: 95864 - DNA, 80 bp, synthetic construct
  misc_feature 1..80: note = Artificially Synthesized Probe
  source 1..80: mol_type = other DNA
ctataaaaacaccatggccatcccaaccactctaagttacttggctgataaaggaaatagaaaaagagagagagggagag

SEQ ID NO: 95865 - DNA, 80 bp, synthetic construct
  misc_feature 1..80: note = Artificially Synthesized Probe
  source 1..80: mol_type = other DNA
ttgaggtatgtgatacagacagggaatctgcagtttcctaatgtccagatgaccagttttaaatatgaaagaaactaata

SEQ ID NO: 95866 - DNA, 80 bp, synthetic construct; identical to SEQ ID NO: 34191
  misc_feature 1..80: note = Artificially Synthesized Probe
  source 1..80: mol_type = other DNA

SEQ ID NO: 95867 - DNA, 80 bp, synthetic construct
  misc_feature 1..80: note = Artificially Synthesized Probe
  source 1..80: mol_type = other DNA
gggaggaagtgaagggtttcactatttatttatgacaaatattcaacactcacaattctctccaatcagaagttctttga

SEQ ID NO: 95868 - DNA, 80 bp, synthetic construct; identical to SEQ ID NO: 34138
  misc_feature 1..80: note = Artificially Synthesized Probe
  source 1..80: mol_type = other DNA

SEQ ID NO: 95869 - DNA, 80 bp, synthetic construct
  misc_feature 1..80: note = Artificially Synthesized Probe
  source 1..80: mol_type = other DNA
cccatgatgcggttgctggcggaacatttccactgcatgttcaggtccacaaactcaggctggataatatcaattatgtt

SEQ ID NO: 95870 - DNA, 80 bp, synthetic construct
  misc_feature 1..80: note = Artificially Synthesized Probe
  source 1..80: mol_type = other DNA
tattactaactctaagaaaggttcaaatttacatgaacaaataaaacttcaggaaagaaaactagagttccacttgggga

SEQ ID NO: 95871 - DNA, 80 bp, synthetic construct; identical to SEQ ID NO: 34192
  misc_feature 1..80: note = Artificially Synthesized Probe
  source 1..80: mol_type = other DNA

SEQ ID NO: 95872 - DNA, 80 bp, synthetic construct
  misc_feature 1..80: note = Artificially Synthesized Probe
  source 1..80: mol_type = other DNA
agtaggcactctgtagccttgaaagaaagggtaactgtcaacattagaataaaaattcatgaaagagctacattgttagg

SEQ ID NO: 95873 - DNA, 80 bp, synthetic construct
  misc_feature 1..80: note = Artificially Synthesized Probe
  source 1..80: mol_type = other DNA
tgcacaactgatgtttctgtggtcaaagatttcccttttcatgatgtgttgttttgtttgcgtgtttattgtgtgtgttt

SEQ ID NO: 95874 - DNA, 80 bp, synthetic construct
  misc_feature 1..80: note = Artificially Synthesized Probe
  source 1..80: mol_type = other DNA
ttgaccttataaacagctctaagtgccatttttaaagaaataacaaacaatgtatggggaatattaagtcacagcactta

SEQ ID NO: 95875 - DNA, 80 bp, synthetic construct; identical to SEQ ID NO: 34193
  misc_feature 1..80: note = Artificially Synthesized Probe
  source 1..80: mol_type = other DNA

SEQ ID NO: 95876 - DNA, 80 bp, synthetic construct
  misc_feature 1..80: note = Artificially Synthesized Probe
  source 1..80: mol_type = other DNA
gtagtggaatatgtttagaggaaaatagctggaaattaaatttgtatgggaaaaattctactttttccccaacagttttc

SEQ ID NO: 95877 - DNA, 80 bp, synthetic construct
  misc_feature 1..80: note = Artificially Synthesized Probe
  source 1..80: mol_type = other DNA
tttgggggatgaaatttgtgagttctcatgtaatagagttgactgtaggaattaatctcaaactggtattatttaaaaca

SEQ ID NO: 95878 - DNA, 80 bp, synthetic construct
  misc_feature 1..80: note = Artificially Synthesized Probe
  source 1..80: mol_type = other DNA
tcatgtaacctaaaaacccttttcaaaggaagctagaaaataacaaaagaggaagggaaaataaaatccatgggagctcc

SEQ ID NO: 95879 - DNA, 80 bp, synthetic construct; identical to SEQ ID NO: 34194
  misc_feature 1..80: note = Artificially Synthesized Probe
  source 1..80: mol_type = other DNA

SEQ ID NO: 95880 - DNA, 80 bp, synthetic construct
  misc_feature 1..80: note = Artificially Synthesized Probe
  source 1..80: mol_type = other DNA
cacacccagcctgagataaaatattaacggtataatacatttgaatgtaataaagacaaggaaaacaatcaaacagcctg

SEQ ID NO: 95881 - DNA, 80 bp, synthetic construct
  misc_feature 1..80: note = Artificially Synthesized Probe
  source 1..80: mol_type = other DNA
tttagaattgctggcttcttgagcccaattttgaatataggattctccacttgcagttagcctgcaagtctgctcaagag

SEQ ID NO: 95882 - DNA, 80 bp, synthetic construct
  misc_feature 1..80: note = Artificially Synthesized Probe
  source 1..80: mol_type = other DNA
tgtacagaaagaggggtttgatgatttttttgtttaaaaatccatatcaaaacagttataaatgctttccaacttactaa

SEQ ID NO: 95883 - DNA, 80 bp, synthetic construct; identical to SEQ ID NO: 34195
  misc_feature 1..80: note = Artificially Synthesized Probe
  source 1..80: mol_type = other DNA

SEQ ID NO: 95884 - DNA, 80 bp, synthetic construct
  misc_feature 1..80: note = Artificially Synthesized Probe
  source 1..80: mol_type = other DNA
ggtaaatttgagtattatgcaattgctcagatagagttgggtaaaaacatatcagctttattgctgataaggctggaatg

SEQ ID NO: 95885 - DNA, 80 bp, synthetic construct
  misc_feature 1..80: note = Artificially Synthesized Probe
  source 1..80: mol_type = other DNA
acctggtaaacttacttacacacatcaaccctatatccttcttagatgcaagagagctgggagactgatagctcagaata

SEQ ID NO: 95886 - DNA, 80 bp, synthetic construct
  misc_feature 1..80: note = Artificially Synthesized Probe
  source 1..80: mol_type = other DNA
agatagatatatagattgtatcagtcagctcatgttaaaaagcaaagcaaaccttgcccttgtgatgcttacattctaga

SEQ ID NO: 95887 - DNA, 80 bp, synthetic construct
  misc_feature 1..80: note = Artificially Synthesized Probe
  source 1..80: mol_type = other DNA
ctatgataaggaaacatttgagtagaaacccagaagacatctgctatctcctttgagaagggaggaagactgggaggaag

SEQ ID NO: 95888 - DNA, 80 bp, synthetic construct; identical to SEQ ID NO: 34196
  misc_feature 1..80: note = Artificially Synthesized Probe
  source 1..80: mol_type = other DNA

SEQ ID NO: 95889 - DNA, 80 bp, synthetic construct
  misc_feature 1..80: note = Artificially Synthesized Probe
  source 1..80: mol_type = other DNA
actatgcttagttgtgttgtgcaatgtggataatcagaggtttcacaataagcccaaatgatattccaaatataataaca

SEQ ID NO: 95890 - DNA, 80 bp, synthetic construct
  misc_feature 1..80: note = Artificially Synthesized Probe
  source 1..80: mol_type = other DNA
agaaggctttcattcaaaaggcgtttttgattcaaaaagttcaagggtatagtcaatgttactagaacagttttctagca

SEQ ID NO: 95891 - DNA, 80 bp, synthetic construct; identical to SEQ ID NO: 34197
  misc_feature 1..80: note = Artificially Synthesized Probe
  source 1..80: mol_type = other DNA

SEQ ID NO: 95892 - DNA, 80 bp, synthetic construct
  misc_feature 1..80: note = Artificially Synthesized Probe
  source 1..80: mol_type = other DNA
ggttaagtgacttgcagagtcggtaagtgatggagctgggatgtgaattcaagtcctgtgccacattgcctctttttttt

SEQ ID NO: 95893 - DNA, 80 bp, synthetic construct
  misc_feature 1..80: note = Artificially Synthesized Probe
  source 1..80: mol_type = other DNA
aatgctaatgattttccctgttaaatatctgggtttgattgaattgcatctccatagtgttctttgaaatgttcctcaac

SEQ ID NO: 95894 - DNA, 80 bp, synthetic construct
  misc_feature 1..80: note = Artificially Synthesized Probe
  source 1..80: mol_type = other DNA
tttaataatctctttttgccttgaagacagcaccttccttgcatttcttttctcctggttttgggacccacatttctata

SEQ ID NO: 95895 - DNA, 80 bp, synthetic construct
  misc_feature 1..80: note = Artificially Synthesized Probe
  source 1..80: mol_type = other DNA
cctgttctatcattgtcctgcgtatctccttatgtagcacatgtggtctcccatactttagtttagaatccaatattcac

SEQ ID NO: 95896 - DNA, 80 bp, synthetic construct; identical to SEQ ID NO: 34198
  misc_feature 1..80: note = Artificially Synthesized Probe
  source 1..80: mol_type = other DNA

SEQ ID NO: 95897 - DNA, 80 bp, synthetic construct
  misc_feature 1..80: note = Artificially Synthesized Probe
  source 1..80: mol_type = other DNA
aatttcttcctacatcaaaataacctcctcttacttaatcagtggggattcagggtcagaaaggaatagaaattactcat

SEQ ID NO: 95898 - DNA, 80 bp, synthetic construct
  misc_feature 1..80: note = Artificially Synthesized Probe
  source 1..80: mol_type = other DNA
ctggtcaggaactctgcctgaaacaatacagcagtcaacgaaaggcaaggcttttggcttcaaacaatctaatgggaaag

SEQ ID NO: 95899 - DNA, 80 bp, synthetic construct
  misc_feature 1..80: note = Artificially Synthesized Probe
  source 1..80: mol_type = other DNA
gacttgaatgattcaaggaacctactacttgaggatctgggggatgagtggtctaggcagaggaagaacaagggcaagtt

SEQ ID NO: 95900 - DNA, 80 bp, synthetic construct
  misc_feature 1..80: note = Artificially Synthesized Probe
  source 1..80: mol_type = other DNA
taaaagaccaccctagcttgaccatttcctgcaggagcgtcactcaccacttctgtcttcctaacagtttttgccaggat

SEQ ID NO: 95901 - DNA, 80 bp, synthetic construct; identical to SEQ ID NO: 34199
  misc_feature 1..80: note = Artificially Synthesized Probe
  source 1..80: mol_type = other DNA

SEQ ID NO: 95902 - DNA, 80 bp, synthetic construct
  misc_feature 1..80: note = Artificially Synthesized Probe
  source 1..80: mol_type = other DNA
ttcattaaactcatcaccgaaagattagttccctgctagaggctactttgatggaaagtaatccggagttagaatcagtg

SEQ ID NO: 95903 - DNA, 80 bp, synthetic construct
  misc_feature 1..80: note = Artificially Synthesized Probe
  source 1..80: mol_type = other DNA
gctaattttttgtatttttagtagagatggggtttcaccctgttagccaggatggtctcgatctcctgacctcgtgatcc

SEQ ID NO: 95904 - DNA, 80 bp, synthetic construct
  misc_feature 1..80: note = Artificially Synthesized Probe
  source 1..80: mol_type = other DNA
aacactattctaggccctgtggatacaggagtaaacaaaacaggcaaagttctctgccctcaaagagcttaccttctcat

SEQ ID NO: 95905 - DNA, 80 bp, synthetic construct; identical to SEQ ID NO: 34200
  misc_feature 1..80: note = Artificially Synthesized Probe
  source 1..80: mol_type = other DNA

SEQ ID NO: 95906 - DNA, 80 bp, synthetic construct
  misc_feature 1..80: note = Artificially Synthesized Probe
  source 1..80: mol_type = other DNA
agaagaataaaatcctgttatttgcaacaacatggatggaaccgcaggacattatgttaagtgaaataaaccagacacag

SEQ ID NO: 95907 - DNA, 80 bp, synthetic construct
  misc_feature 1..80: note = Artificially Synthesized Probe
  source 1..80: mol_type = other DNA
ttcgttcatgggtacataagttagaaggaacaatattgagtgcttagtagctttattagtcagttctcgcatcgcgataa

SEQ ID NO: 95908 - DNA, 80 bp, synthetic construct
  misc_feature 1..80: note = Artificially Synthesized Probe
  source 1..80: mol_type = other DNA
ccagagcaggaaggagaggaaaggtgccacacacgtttaaacaaccagatctcacaattcactcactcactatcatgaga

SEQ ID NO: 95909 - DNA, 80 bp, synthetic construct
  misc_feature 1..80: note = Artificially Synthesized Probe
  source 1..80: mol_type = other DNA
atacatagttcacgatattgaactacatagcacaatacaatatttaagtatttcaaaatatcaagaagagtggaattgga

SEQ ID NO: 95910 - DNA, 80 bp, synthetic construct; identical to SEQ ID NO: 34201
  misc_feature 1..80: note = Artificially Synthesized Probe
  source 1..80: mol_type = other DNA

SEQ ID NO: 95911 - DNA, 80 bp, synthetic construct
  misc_feature 1..80: note = Artificially Synthesized Probe
  source 1..80: mol_type = other DNA
agaggcaggcattgtggatcctataggccgtgtggtcatttagacaactttgcttttatttgagtgagatgaggtgccac

SEQ ID NO: 95912 - DNA, 80 bp, synthetic construct
  misc_feature 1..80: note = Artificially Synthesized Probe
  source 1..80: mol_type = other DNA
actattttgaggtctagatgaaggtattttcctccaaagagaattttgcttgtttctgccagggacaagaggttactgct

SEQ ID NO: 95913 - DNA, 80 bp, synthetic construct
  misc_feature 1..80: note = Artificially Synthesized Probe
  source 1..80: mol_type = other DNA
tcttattagactcttaagggcatgaagttttgatttatctcctgactccctaaggccatccaaaggaaagttcaaatttt

SEQ ID NO: 95914 - DNA, 80 bp, synthetic construct; identical to SEQ ID NO: 34202
  misc_feature 1..80: note = Artificially Synthesized Probe
  source 1..80: mol_type = other DNA

SEQ ID NO: 95915 - DNA, 80 bp, synthetic construct
  misc_feature 1..80: note = Artificially Synthesized Probe
  source 1..80: mol_type = other DNA
cagcggtgcggtctcggctcactgcaatctccacctcctgggttcaagtgattctcctgcctcagcctcccgagtagctg

SEQ ID NO: 95916 - DNA, 80 bp, synthetic construct
  misc_feature 1..80: note = Artificially Synthesized Probe
  source 1..80: mol_type = other DNA
tttttgatgtcatttttcactttaaattgcaaagtttcccttatattgaaccattctttcatttctgaatacattgcttt

SEQ ID NO: 95917 - DNA, 80 bp, synthetic construct
  misc_feature 1..80: note = Artificially Synthesized Probe
  source 1..80: mol_type = other DNA
acatagtttcctttgatacagagcttgaggtgagaaagttgagatgcaagtctttcttatactccaagacattttcctct

SEQ ID NO: 95918 - DNA, 80 bp, synthetic construct; identical to SEQ ID NO: 34203
  misc_feature 1..80: note = Artificially Synthesized Probe
  source 1..80: mol_type = other DNA

SEQ ID NO: 95919 - DNA, 80 bp, synthetic construct
  misc_feature 1..80: note = Artificially Synthesized Probe
  source 1..80: mol_type = other DNA
catgactttgtagggaaaatgtatccattctcctctcagtaaacctcttcttttgtgctaggtttcagctacttagttga

SEQ ID NO: 95920 - DNA, 80 bp, synthetic construct
  misc_feature 1..80: note = Artificially Synthesized Probe
  source 1..80: mol_type = other DNA
tcttttaggatttcaggtccataaacaagggttaaacatgtgagctaagattattattactgtaactctgatgttaatga

SEQ ID NO: 95921 - DNA, 80 bp, synthetic construct
  misc_feature 1..80: note = Artificially Synthesized Probe
  source 1..80: mol_type = other DNA
agtcatttaagtgtctagtcctaagtaataaccaaagcatccaatggcattcacagttcctcccttctcagggatatttc

SEQ ID NO: 95922 - DNA, 80 bp, synthetic construct
  misc_feature 1..80: note = Artificially Synthesized Probe
  source 1..80: mol_type = other DNA
acttgtaagttggctttataccttctgtgcctgccagatatttaaaactgactcttaccctcatagacctattcatgatt

SEQ ID NO: 95923 - DNA, 80 bp, synthetic construct; identical to SEQ ID NO: 34204
  misc_feature 1..80: note = Artificially Synthesized Probe
  source 1..80: mol_type = other DNA

SEQ ID NO: 95924 - DNA, 80 bp, synthetic construct
  misc_feature 1..80: note = Artificially Synthesized Probe
  source 1..80: mol_type = other DNA
ttatgattatggcttattgcaggaaaaggatatagattaaaatcatcaaagaggcatcagttttcctcttctagtgaagt

SEQ ID NO: 95925 - DNA, 80 bp, synthetic construct
  misc_feature 1..80: note = Artificially Synthesized Probe
  source 1..80: mol_type = other DNA
agcccctccaaaggtcaaactaatacaacgtggcctaggattccaagtattcactatcattcacattattatcataaacc

SEQ ID NO: 95926 - DNA, 80 bp, synthetic construct; identical to SEQ ID NO: 34139
  misc_feature 1..80: note = Artificially Synthesized Probe
  source 1..80: mol_type = other DNA

SEQ ID NO: 95927 - DNA, 80 bp, synthetic construct; identical to SEQ ID NO: 34205
  misc_feature 1..80: note = Artificially Synthesized Probe
  source 1..80: mol_type = other DNA

SEQ ID NO: 95928 - DNA, 80 bp, synthetic construct
  misc_feature 1..80: note = Artificially Synthesized Probe
  source 1..80: mol_type = other DNA
ttatcatattacaatatattaatggtaccatttggagatcaaagaagtgtcccaaatcgggacactttaatatccacatc

SEQ ID NO: 95929 - DNA, 80 bp, synthetic construct
  misc_feature 1..80: note = Artificially Synthesized Probe
  source 1..80: mol_type = other DNA
gcacattccttcatggacttgaactatttcatgtcttcatgactttctcttctccaggattacattagtatttagggctg

SEQ ID NO: 95930 - DNA, 80 bp, synthetic construct
  misc_feature 1..80: note = Artificially Synthesized Probe
  source 1..80: mol_type = other DNA
tcctggcttgcagatggcttcacatggttatctccctgtattctcacagggctttctctccttgtgtgtgcacttctggt

SEQ ID NO: 95931 - DNA, 80 bp, synthetic construct
  misc_feature 1..80: note = Artificially Synthesized Probe
  source 1..80: mol_type = other DNA
gcaaaataaaaactaaaaaacagatagccttaaagcaggaagttaccctgtcactagggcttggcatactgtaggcttta

SEQ ID NO: 95932 - DNA, 80 bp, synthetic construct; identical to SEQ ID NO: 34206
  misc_feature 1..80: note = Artificially Synthesized Probe
  source 1..80: mol_type = other DNA

SEQ ID NO: 95933 - DNA, 80 bp, synthetic construct; identical to SEQ ID NO: 34132
  misc_feature 1..80: note = Artificially Synthesized Probe
  source 1..80: mol_type = other DNA

SEQ ID NO: 95934 - DNA, 80 bp, synthetic construct
  misc_feature 1..80: note = Artificially Synthesized Probe
  source 1..80: mol_type = other DNA
aatatggtgactacagctaacaacactgtattgcgcacttgaaatttgctaagagggtagatcctaagtgttctcaaaac

SEQ ID NO: 95935 - DNA, 80 bp, synthetic construct
  misc_feature 1..80: note = Artificially Synthesized Probe
  source 1..80: mol_type = other DNA
agtctaaatttttttaaaggagtttcaaaaactaatgctttgctctatacttgtacctggccccacccttgtctctctaa

SEQ ID NO: 95936 - DNA, 80 bp, synthetic construct
  misc_feature 1..80: note = Artificially Synthesized Probe
  source 1..80: mol_type = other DNA
tgccaaattctatggctaccccaataacaaagaatgtcttatggcaatggcaccctccaagtcatataattcatttatta

SEQ ID NO: 95937 - DNA, 80 bp, synthetic construct
  misc_feature 1..80: note = Artificially Synthesized Probe
  source 1..80: mol_type = other DNA
tatgaattataagtttgcctccattgcattttgaaaattaacacttctttggcattctatctgctacaatttttttctat

SEQ ID NO: 95938 - DNA, 80 bp, synthetic construct; identical to SEQ ID NO: 34207
  misc_feature 1..80: note = Artificially Synthesized Probe
  source 1..80: mol_type = other DNA

SEQ ID NO: 95939 - DNA, 80 bp, synthetic construct
  misc_feature 1..80: note = Artificially Synthesized Probe
  source 1..80: mol_type = other DNA
gcctgttctttacctctctaagaacgtttcaagtgtcatttaaaatttgattcttatttgtcaatgtgttttttggctcc

SEQ ID NO: 95940 - DNA, 80 bp, synthetic construct
  misc_feature 1..80: note = Artificially Synthesized Probe
  source 1..80: mol_type = other DNA
ctaacacggtgaaaacctcgtatctactaaaaatacaaaaaatttagtcaggcgtggtggcacatgtctgtagtcccagc

SEQ ID NO: 95941 - DNA, 80 bp, synthetic construct
  misc_feature 1..80: note = Artificially Synthesized Probe
  source 1..80: mol_type = other DNA
atttgtctatgtaaaaatagtaataaagaaaatggaaaggtatatactttttaaatttctagtattttcaaaagattcat

SEQ ID NO: 95942 - DNA, 80 bp, synthetic construct; identical to SEQ ID NO: 34208
  misc_feature 1..80: note = Artificially Synthesized Probe
  source 1..80: mol_type = other DNA

SEQ ID NO: 95943 - DNA, 80 bp, synthetic construct
  misc_feature 1..80: note = Artificially Synthesized Probe
  source 1..80: mol_type = other DNA
gaggagaacacagagaatcctatagtcctgatatcatttttggtggaatgaacaaagacgaacgcagagctgggagatat

SEQ ID NO: 95944 - DNA, 80 bp, synthetic construct
  misc_feature 1..80: note = Artificially Synthesized Probe
  source 1..80: mol_type = other DNA
tcatagcaagggataagtgctcttagcattttgctattcattctttcagtctctttctctcatatatgtgtgtgtgtata

SEQ ID NO: 95945 - DNA, 80 bp, synthetic construct
  misc_feature 1..80: note = Artificially Synthesized Probe
  source 1..80: mol_type = other DNA
cagttagagccaaagagcaggagaaagtccagcaacgtgtcccaaagtgattagaaactatcttgctttcctcctatgga

SEQ ID NO: 95946 - DNA, 80 bp, synthetic construct
  misc_feature 1..80: note = Artificially Synthesized Probe
  source 1..80: mol_type = other DNA
tatttatagttataccagtaatatctctgttattttggcatgcaactaaaaaatatagaaaaatttcatgtccctcttgc

SEQ ID NO: 95947 - DNA, 80 bp, synthetic construct; identical to SEQ ID NO: 34209
  misc_feature 1..80: note = Artificially Synthesized Probe
  source 1..80: mol_type = other DNA

SEQ ID NO: 95948 - DNA, 80 bp, synthetic construct
  misc_feature 1..80: note = Artificially Synthesized Probe
  source 1..80: mol_type = other DNA
cctactgggcaacatccttttttttttttttatttttttccccaagatggagtcttgctctgtcatgaggctggagtgca

SEQ ID NO: 95949 - DNA, 80 bp, synthetic construct
  misc_feature 1..80: note = Artificially Synthesized Probe
  source 1..80: mol_type = other DNA
gtcttgatctcctaacctcgtgatctgcctgccttggtcttccaaagcgctgggattacaggcatgagccactgcacccg

SEQ ID NO: 95950 - DNA, 80 bp, synthetic construct
  misc_feature 1..80: note = Artificially Synthesized Probe
  source 1..80: mol_type = other DNA
caagaccgcattagtaatgtattaatgatacattaagaagtactccacaggtctataactgctcaatcaccttcaaagag

SEQ ID NO: 95951 - DNA, 80 bp, synthetic construct
  misc_feature 1..80: note = Artificially Synthesized Probe
  source 1..80: mol_type = other DNA
tactatagtcaagcaaattaacaagtccatctcctcacatagttacagctaacttagaaagacagaacatcacacccaga

SEQ ID NO: 95952 - DNA, 80 bp, synthetic construct; identical to SEQ ID NO: 34210
  misc_feature 1..80: note = Artificially Synthesized Probe
  source 1..80: mol_type = other DNA

SEQ ID NO: 95953 - DNA, 80 bp, synthetic construct
  misc_feature 1..80: note = Artificially Synthesized Probe
  source 1..80: mol_type = other DNA
gggggaaaagcattcaggagtcactttgtactcaagcatgaacctcctaaagtgttggtctctttgctgaactatttcaa

SEQ ID NO: 95954 - DNA, 80 bp, synthetic construct
  misc_feature 1..80: note = Artificially Synthesized Probe
  source 1..80: mol_type = other DNA
catgaaaacagtgggacttagggcaacatttggggagattccttgcttcaaagttgtctctaaggcattgcacattccta

SEQ ID NO: 95955 - DNA, 80 bp, synthetic construct
  misc_feature 1..80: note = Artificially Synthesized Probe
  source 1..80: mol_type = other DNA
attgttgctttgtattaaaattcaagggagtccaaatattttcagtccccttgatctaactgggatactcatacaatgag

SEQ ID NO: 95956 - DNA, 80 bp, synthetic construct; identical to SEQ ID NO: 34140
  misc_feature 1..80: note = Artificially Synthesized Probe
  source 1..80: mol_type = other DNA

SEQ ID NO: 95957 - DNA, 80 bp, synthetic construct; identical to SEQ ID NO: 34211
  misc_feature 1..80: note = Artificially Synthesized Probe
  source 1..80: mol_type = other DNA

SEQ ID NO: 95958 - DNA, 80 bp, synthetic construct
  misc_feature 1..80: note = Artificially Synthesized Probe
  source 1..80: mol_type = other DNA
ctggctagtcaaactgtgaaaatcctttctcatgcaacacaataaaataattggctccaaaatgtctcattctcagcctc

SEQ ID NO: 95959 - DNA, 80 bp, synthetic construct
  misc_feature 1..80: note = Artificially Synthesized Probe
  source 1..80: mol_type = other DNA
ccctgatataagcagcgttaattaaagattagttattgaaaaggtggtattgtgctcaagaaaacagtgaaaaaagaacc

SEQ ID NO: 95960 - DNA, 80 bp, synthetic construct; identical to SEQ ID NO: 34212
  misc_feature 1..80: note = Artificially Synthesized Probe
  source 1..80: mol_type = other DNA

SEQ ID NO: 95961 - DNA, 80 bp, synthetic construct
  misc_feature 1..80: note = Artificially Synthesized Probe
  source 1..80: mol_type = other DNA
gaactatttcaacacctggatgaagtccaggagaagagaggtcaggcagtttaaaaactgcttctgtttcctactaagga

SEQ ID NO: 95962 - DNA, 80 bp, synthetic construct
  misc_feature 1..80: note = Artificially Synthesized Probe
  source 1..80: mol_type = other DNA
acctctcatacttaactgtcatctgtaggacactgaagacatatatcagaggatccacaccgtatataattcatgccttg

SEQ ID NO: 95963 - DNA, 80 bp, synthetic construct
  misc_feature 1..80: note = Artificially Synthesized Probe
  source 1..80: mol_type = other DNA
atcggcagattgaaaaggtggtagttggttcagaatagccttatgcgtaccttggatggttgttgttggttcccacctgg

SEQ ID NO: 95964 - DNA, 80 bp, synthetic construct
  misc_feature 1..80: note = Artificially Synthesized Probe
  source 1..80: mol_type = other DNA
tttctgctcattcattccaaaacacatcacaaggctaatctagattcaaattatggaggaaaatgctacttcttgaggga

SEQ ID NO: 95965 - DNA, 80 bp, synthetic construct; identical to SEQ ID NO: 34213
  misc_feature 1..80: note = Artificially Synthesized Probe
  source 1..80: mol_type = other DNA

SEQ ID NO: 95966 - DNA, 80 bp, synthetic construct
  misc_feature 1..80: note = Artificially Synthesized Probe
  source 1..80: mol_type = other DNA
cctgcattagtttgctgaagagaatggcttccagctctatccatgtccctgcaaaggacataatctcattcctttttatg

SEQ ID NO: 95967 - DNA, 80 bp, synthetic construct
  misc_feature 1..80: note = Artificially Synthesized Probe
  source 1..80: mol_type = other DNA
gttgttccaggagaggggagagttgatactattctacaatatcgagcattggagaaaatctcccttttcttttatctctt

SEQ ID NO: 95968 - DNA, 80 bp, synthetic construct
  misc_feature 1..80: note = Artificially Synthesized Probe
  source 1..80: mol_type = other DNA
ggtaacagcttccaggaactcacttcttccttccttcttgtttttcttatcttttttccttttctccatttctctttcct

SEQ ID NO: 95969 - DNA, 80 bp, synthetic construct; identical to SEQ ID NO: 34214
  misc_feature 1..80: note = Artificially Synthesized Probe
  source 1..80: mol_type = other DNA

SEQ ID NO: 95970 - DNA, 80 bp, synthetic construct
  misc_feature 1..80: note = Artificially Synthesized Probe
  source 1..80: mol_type = other DNA
tttaaaatgtaaatgtcccaaaggcttctgagaacatttatagaattcctagagatggaaataatccctgtatcaggaaa

SEQ ID NO: 95971 - DNA, 80 bp, synthetic construct
  misc_feature 1..80: note = Artificially Synthesized Probe
  source 1..80: mol_type = other DNA
gctgtttcttattacagtgccacctctttgatcttccctgatggggaactttccagtaatgtctgtgatttgtaatatga

SEQ ID NO: 95972 - DNA, 80 bp, synthetic construct
  misc_feature 1..80: note = Artificially Synthesized Probe
  source 1..80: mol_type = other DNA
gatatctctgcctaccatgtcttcagacaccatatcagttattctagcatttccacaggtgggaaattatttctcccaga

SEQ ID NO: 95973 - DNA, 80 bp, synthetic construct; identical to SEQ ID NO: 34215
  misc_feature 1..80: note = Artificially Synthesized Probe
  source 1..80: mol_type = other DNA

SEQ ID NO: 95974 - DNA, 80 bp, synthetic construct
  misc_feature 1..80: note = Artificially Synthesized Probe
  source 1..80: mol_type = other DNA
ggaaaagaggtatcattggagcagaagatgtggatatgagatgactaggttgaagtcaaacctttcaaacctgttcaaaa

SEQ ID NO: 95975 - DNA, 80 bp, synthetic construct
  misc_feature 1..80: note = Artificially Synthesized Probe
  source 1..80: mol_type = other DNA
aataagtgcaatagatatatcctctagcaaattaacagatgctgaggtgttaggaggttgagaagtgcggcaagctgtca

SEQ ID NO: 95976 - DNA, 80 bp, synthetic construct
  misc_feature 1..80: note = Artificially Synthesized Probe
  source 1..80: mol_type = other DNA
cttgaaaatggcagtgggctagaaggatgagttcagatgtgtctgattttgaaaggtgcccaggacaagcaataatatat

SEQ ID NO: 95977 - DNA, 80 bp, synthetic construct
  misc_feature 1..80: note = Artificially Synthesized Probe
  source 1..80: mol_type = other DNA
atcaagacctactgttaaataaacatatatttataaaaatctatcaatatatatttatataacatatatgtatgtatgtg

SEQ ID NO: 95978 - DNA, 80 bp, synthetic construct
  misc_feature 1..80: note = Artificially Synthesized Probe
  source 1..80: mol_type = other DNA
tgaggaaagagaagcatttaaataagaagctctctcttcagctgcctaccagcaaaggggaaaaacctacctctctgcat

SEQ ID NO: 95979 - DNA, 80 bp, synthetic construct; identical to SEQ ID NO: 34216
  misc_feature 1..80: note = Artificially Synthesized Probe
  source 1..80: mol_type = other DNA

SEQ ID NO: 95980 - DNA, 80 bp, synthetic construct
  misc_feature 1..80: note = Artificially Synthesized Probe
  source 1..80: mol_type = other DNA
tctgcagctgaacttgtgattttatctcttggcttggttagggcccaggggacctccctggctggcttagcctgtttgag

SEQ ID NO: 95981 - DNA, 80 bp, synthetic construct
  misc_feature 1..80: note = Artificially Synthesized Probe
  source 1..80: mol_type = other DNA
tcctcacagggcctgaagcaacttctagatcactttcaaggcatacagaattcaggagagatttgggcttgctaactcag

SEQ ID NO: 95982 - DNA, 80 bp, synthetic construct
  misc_feature 1..80: note = Artificially Synthesized Probe
  source 1..80: mol_type = other DNA
aactccatctgcttttggctttttccttaattgatcaatacacctctattctaggatttgcattcagaaaagggatctat

SEQ ID NO: 95983 - DNA, 80 bp, synthetic construct; identical to SEQ ID NO: 34217
  misc_feature 1..80: note = Artificially Synthesized Probe
  source 1..80: mol_type = other DNA

SEQ ID NO: 95984 - DNA, 80 bp, synthetic construct
  misc_feature 1..80: note = Artificially Synthesized Probe
  source 1..80: mol_type = other DNA
ggtagaaagagcctaaaggtctgagacaggcagtataggaaggccatgtcctagggtgtagggagaggtcatcttagata

SEQ ID NO: 95985 - DNA, 80 bp, synthetic construct
  misc_feature 1..80: note = Artificially Synthesized Probe
  source 1..80: mol_type = other DNA
tgagtgcctatgaagagcagttatctctgtaggaataatggttgtgtagactagaaccagctatgacttttcatgagctt

SEQ ID NO: 95986 - DNA, 80 bp, synthetic construct
  misc_feature 1..80: note = Artificially Synthesized Probe
  source 1..80: mol_type = other DNA
aactgggacctgggactttgctcttctgaaccacaaaggcaacaattaaatctgaccatatacagaatcatagtgctgca

SEQ ID NO: 95987 - DNA, 80 bp, synthetic construct; identical to SEQ ID NO: 34218
  misc_feature 1..80: note = Artificially Synthesized Probe
  source 1..80: mol_type = other DNA

SEQ ID NO: 95988 - DNA, 80 bp, synthetic construct
  misc_feature 1..80: note = Artificially Synthesized Probe
  source 1..80: mol_type = other DNA
ctcaattatctcctgtctttctccaatgtcctacatttttgcttctactaggtgcttccagtcagcatttaaacccactc

SEQ ID NO: 95989 - DNA, 80 bp, synthetic construct
  misc_feature 1..80: note = Artificially Synthesized Probe
  source 1..80: mol_type = other DNA
tgaataagacttctgaactcccatgagacaacttccattttctcttcctctttgacctgctcttgtgagttagacctgct

SEQ ID NO: 95990 - DNA, 80 bp, synthetic construct
  misc_feature 1..80: note = Artificially Synthesized Probe
  source 1..80: mol_type = other DNA
tgctccccagatctcccagaactcaagtatggtatctgctttctccatttctgcttttggcccctctctcggcatccgat

SEQ ID NO: 95991 - DNA, 80 bp, synthetic construct
  misc_feature 1..80: note = Artificially Synthesized Probe
  source 1..80: mol_type = other DNA
tcctcgtgtttccctttgaaatttctactccatctgtttatttgctcttcccagcaggaaaactggaaatggaaaaagct

SEQ ID NO: 95992 - DNA, 80 bp, synthetic construct
  misc_feature 1..80: note = Artificially Synthesized Probe
  source 1..80: mol_type = other DNA
tttacatttactgttagtcatcaaaaggagtcagaaaaacttttggaacctctccctatgaaccaggaagttgcatttcc

SEQ ID NO: 95993 - DNA, 80 bp, synthetic construct; identical to SEQ ID NO: 34219
  misc_feature 1..80: note = Artificially Synthesized Probe
  source 1..80: mol_type = other DNA

SEQ ID NO: 95994 - DNA, 80 bp, synthetic construct
  misc_feature 1..80: note = Artificially Synthesized Probe
  source 1..80: mol_type = other DNA
ctactaaaaaatacaaaaattagccaggtatggtgacgcatgcctgtaatcccagctacttgggaggccgaggcatgaga

SEQ ID NO: 95995 - DNA, 80 bp, synthetic construct
  misc_feature 1..80: note = Artificially Synthesized Probe
  source 1..80: mol_type = other DNA
ccattctcaatggcaccaacaggtccttcatcagagagtgcagtccatggttctatccatgtttatccagtctcagagta

SEQ ID NO: 95996 - DNA, 80 bp, synthetic construct; identical to SEQ ID NO: 34220
  misc_feature 1..80: note = Artificially Synthesized Probe
  source 1..80: mol_type = other DNA

SEQ ID NO: 95997 - DNA, 80 bp, synthetic construct
  misc_feature 1..80: note = Artificially Synthesized Probe
  source 1..80: mol_type = other DNA
aattcttgagacttggtaacagagcagtagcacgtaatttgctttaccactcagtgcttcaaccatcataggtaaagagt

SEQ ID NO: 95998 - DNA, 80 bp, synthetic construct
  misc_feature 1..80: note = Artificially Synthesized Probe
  source 1..80: mol_type = other DNA
agccagtagccacattaaattgctaccagatgttctgcagttaggcataaaaggtaagcatccttttacaatcaggcagc

SEQ ID NO: 95999 - DNA, 80 bp, synthetic construct; identical to SEQ ID NO: 34141
  misc_feature 1..80: note = Artificially Synthesized Probe
  source 1..80: mol_type = other DNA

SEQ ID NO: 96000 - DNA, 80 bp, synthetic construct
  misc_feature 1..80: note = Artificially Synthesized Probe
  source 1..80: mol_type = other DNA
agcttaaagcactttatagttgcaaggttcttggaccccttcctcatctcctagccatacacccccacaaaaataaaaga

SEQ ID NO: 96001 - DNA, 80 bp, synthetic construct; identical to SEQ ID NO: 34221
  misc_feature 1..80: note = Artificially Synthesized Probe
  source 1..80: mol_type = other DNA

SEQ ID NO: 96002 - DNA, 80 bp, synthetic construct
  misc_feature 1..80: note = Artificially Synthesized Probe
  source 1..80: mol_type = other DNA
catagcctttggtcattttaattaagagactcttgcaggcctctagcccggttcactaaaatttaaattctctctaattt

SEQ ID NO: 96003 - DNA, 80 bp, synthetic construct
  misc_feature 1..80: note = Artificially Synthesized Probe
  source 1..80: mol_type = other DNA
tatctcgcagttggagtcctgcaaatgttagagacatcttgatgtttccttcatagtcactccagagtctgttagttctt

SEQ ID NO: 96004 - DNA, 80 bp, synthetic construct
  misc_feature 1..80: note = Artificially Synthesized Probe
  source 1..80: mol_type = other DNA
gcattgtagattgcagaacaactatgaatcactcataaagagaggtaacaaagacctgaggctatatgtgtaaccagtgt

SEQ ID NO: 96005 - DNA, 80 bp, synthetic construct
  misc_feature 1..80: note = Artificially Synthesized Probe
  source 1..80: mol_type = other DNA
actttcaggcagattccataatttccaggtaatgtttagagattaaaaacccagcctgatctagtttaaaactctcctct

SEQ ID NO: 96006 - DNA, 80 bp, synthetic construct; identical to SEQ ID NO: 34222
  misc_feature 1..80: note = Artificially Synthesized Probe
  source 1..80: mol_type = other DNA

SEQ ID NO: 96007 - DNA, 80 bp, synthetic construct
  misc_feature 1..80: note = Artificially Synthesized Probe
  source 1..80: mol_type = other DNA
atatatatatatatgaatttatttaacacccacaactcaatgaaatggatacttttattatccccatttcacagatgagc

SEQ ID NO: 96008 - DNA, 80 bp, synthetic construct
  misc_feature 1..80: note = Artificially Synthesized Probe
  source 1..80: mol_type = other DNA
atttgggttctttggagggtccttcggaagactgtgtattgcacagtgccctgatgtgggagattctttactggttcaac

SEQ ID NO: 96009 - DNA, 80 bp, synthetic construct
  misc_feature 1..80: note = Artificially Synthesized Probe
  source 1..80: mol_type = other DNA
cacccatcttttataaatgtttgtgttttcttctaattggcttagggcaccagcctccctccgtcttcaggctttcacgg

SEQ ID NO: 96010 - DNA, 80 bp, synthetic construct
  misc_feature 1..80: note = Artificially Synthesized Probe
  source 1..80: mol_type = other DNA
tggtggggagttctattcctggaccctctcactctgccctcagattgttgcaattctttttagacagtaatattattaaa

SEQ ID NO: 96011 - DNA, 80 bp, synthetic construct; identical to SEQ ID NO: 34223
  misc_feature 1..80: note = Artificially Synthesized Probe
  source 1..80: mol_type = other DNA

SEQ ID NO: 96012 - DNA, 80 bp, synthetic construct
  misc_feature 1..80: note = Artificially Synthesized Probe
  source 1..80: mol_type = other DNA
ggcattccaactactggtggaaaaaataaataaatacaagggggtccatgctgtgagtagttgaaatgaaaatactggtg

SEQ ID NO: 96013 - DNA, 80 bp, synthetic construct
  misc_feature 1..80: note = Artificially Synthesized Probe
  source 1..80: mol_type = other DNA
atacagtggctcatgcctgtatcccagcactttgggaggctgaggcgggtggataatttgaggttgggagttcgagacta

SEQ ID NO: 96014 - DNA, 80 bp, synthetic construct; identical to SEQ ID NO: 34224
  misc_feature 1..80: note = Artificially Synthesized Probe
  source 1..80: mol_type = other DNA

SEQ ID NO: 96015 - DNA, 80 bp, synthetic construct
  misc_feature 1..80: note = Artificially Synthesized Probe
  source 1..80: mol_type = other DNA
tttttctttacaattttgaatttctgctaaaaatatttagtggaatgaaatttattccattaaaaaaacgaaccttttga

SEQ ID NO: 96016 - DNA, 80 bp, synthetic construct
  misc_feature 1..80: note = Artificially Synthesized Probe
  source 1..80: mol_type = other DNA
gggtccctcttttgatcaccattccatgttatttatcaagagatgtaattgataaaggttttattttgttttgttttgag

SEQ ID NO: 96017 - DNA, 80 bp, synthetic construct
  misc_feature 1..80: note = Artificially Synthesized Probe
  source 1..80: mol_type = other DNA
tgtaaagaaggagtttcaccatgttgctcagactggtcttgaattcctgggctcaaatgatcctcctgcctgggtctccc

SEQ ID NO: 96018 - DNA, 80 bp, synthetic construct; identical to SEQ ID NO: 34225
  misc_feature 1..80: note = Artificially Synthesized Probe
  source 1..80: mol_type = other DNA

SEQ ID NO: 96019 - DNA, 80 bp, synthetic construct
  misc_feature 1..80: note = Artificially Synthesized Probe
  source 1..80: mol_type = other DNA
caaagtatccctgtttgcagataacatgattctatatctagaaaaccccatagtctctgcccaaaagctccttgagctgt

SEQ ID NO: 96020 - DNA, 80 bp, synthetic construct
  misc_feature 1..80: note = Artificially Synthesized Probe
  source 1..80: mol_type = other DNA
actattatattccgactctactaatggttttcaagtagggaatggatagttaactctgttactgcctttttgactgtgat

SEQ ID NO: 96021 - DNA, 80 bp, synthetic construct
  misc_feature 1..80: note = Artificially Synthesized Probe
  source 1..80: mol_type = other DNA
gatctctgcaataagaattacaaaacactgctcaatgtgcttaaagcaatttatagattcaatgctactgctatcaaaca

SEQ ID NO: 96022 - DNA, 80 bp, synthetic construct
  misc_feature 1..80: note = Artificially Synthesized Probe
  source 1..80: mol_type = other DNA
aaacagcatggtactggtacaaaaacagacatatagaccactggaagagaatagagagctcagaaataaaaccacacact

SEQ ID NO: 96023 - DNA, 80 bp, synthetic construct; identical to SEQ ID NO: 34226
  misc_feature 1..80: note = Artificially Synthesized Probe
  source 1..80: mol_type = other DNA

SEQ ID NO: 96024 - DNA, 80 bp, synthetic construct
  misc_feature 1..80: note = Artificially Synthesized Probe
  source 1..80: mol_type = other DNA
tctaatatttcagaatctacagggaaattatacatacaaggaaaaaaacaaacaacctcatttaaaagtgagcaaaggac

SEQ ID NO: 96025 - DNA, 80 bp, synthetic construct
  misc_feature 1..80: note = Artificially Synthesized Probe
  source 1..80: mol_type = other DNA
gatgctgtctgagaccagcctggacaacatggcaaaacctcgtctctactagaaatccaaaagttagccaggtgtggtgg

SEQ ID NO: 96026 - DNA, 80 bp, synthetic construct
  misc_feature 1..80: note = Artificially Synthesized Probe
  source 1..80: mol_type = other DNA
gacactggcgaggttgctgagaaaagggaactcttatacactgctgctggtggtgtaaattagttcaaccactgtggaaa

SEQ ID NO: 96027 - DNA, 80 bp, synthetic construct
  misc_feature 1..80: note = Artificially Synthesized Probe
  source 1..80: mol_type = other DNA
tcaacctaaatgcctatcaatgacagattggacaaaggaaatgtggcacatatacaccatggaatactacgtggtcataa

SEQ ID NO: 96028 - DNA, 80 bp, synthetic construct; identical to SEQ ID NO: 34227
  misc_feature 1..80: note = Artificially Synthesized Probe
  source 1..80: mol_type = other DNA

SEQ ID NO: 96029 - DNA, 80 bp, synthetic construct
  misc_feature 1..80: note = Artificially Synthesized Probe
  source 1..80: mol_type = other DNA
tcatacactcaaagttataaaaaccttctagttaccaaccctcaccaatctcaaagagaatgattagaaatacaagctca

SEQ ID NO: 96030 - DNA, 80 bp, synthetic construct
  misc_feature 1..80: note = Artificially Synthesized Probe
  source 1..80: mol_type = other DNA
cagtgtattatgaaactgggactagcgtatttgaaatcagaaagactggaaagtctgtgatttgcaaagtgactaagggt

SEQ ID NO: 96031 - DNA, 80 bp, synthetic construct
  misc_feature 1..80: note = Artificially Synthesized Probe
  source 1..80: mol_type = other DNA
atgttttactgtttattttcgtaatgagggttgagaggacaggacgaagtaaccataaagcacttggtaaagagtgtgaa

SEQ ID NO: 96032 - DNA, 80 bp, synthetic construct
  misc_feature 1..80: note = Artificially Synthesized Probe
  source 1..80: mol_type = other DNA
ggctttacatcctgcttgacttacattagcattgttttattccaaagattgatttgagaagctttctatactttatattc

SEQ ID NO: 96033 - DNA, 80 bp, synthetic construct
  misc_feature 1..80: note = Artificially Synthesized Probe
  source 1..80: mol_type = other DNA
tttttacatccgtgagcatgggcagctacataatttgcagggctaggtgttccaaaaacggtaaggatttcaaggtaggg

SEQ ID NO: 96034 - DNA, 80 bp, synthetic construct; identical to SEQ ID NO: 34228
  misc_feature 1..80: note = Artificially Synthesized Probe
  source 1..80: mol_type = other DNA

SEQ ID NO: 96035 - DNA, 80 bp, synthetic construct
  misc_feature 1..80: note = Artificially Synthesized Probe
  source 1..80: mol_type = other DNA
cccgggggttcacgccattctcctgcctcagcctcccacgtagcgggattacaggcgcccgccacctcgcccggctaatt

SEQ ID NO: 96036 - DNA, 80 bp, synthetic construct
  misc_feature 1..80: note = Artificially Synthesized Probe
  source 1..80: mol_type = other DNA
gggtagctaatggagggaaattctgagcttagatattgccttggtggatgttacccatgattgactcagtttgaaaagaa

SEQ ID NO: 96037 - DNA, 80 bp, synthetic construct; identical to SEQ ID NO: 34229
  misc_feature 1..80: note = Artificially Synthesized Probe
  source 1..80: mol_type = other DNA

SEQ ID NO: 96038 - DNA, 80 bp, synthetic construct
  misc_feature 1..80: note = Artificially Synthesized Probe
  source 1..80: mol_type = other DNA
gacatgccatttattgagtgtttactatttgctgagcactgtaacattttagaaactttctaatttctaatccttttagt

SEQ ID NO: 96039 - DNA, 80 bp, synthetic construct
  misc_feature 1..80: note = Artificially Synthesized Probe
  source 1..80: mol_type = other DNA
acctaagaaagtttctttgaactggagagttcaagtggcttacacagccagtaaatgataaagttagaaatggaacccag

SEQ ID NO: 96040 - DNA, 80 bp, synthetic construct
  misc_feature 1..80: note = Artificially Synthesized Probe
  source 1..80: mol_type = other DNA
catagcctacgtttaaaaacaggcagcaggatacaaaattttggttagatagcaaaaataagttcaagagatttagagta

SEQ ID NO: 96041 - DNA, 80 bp, synthetic construct
  misc_feature 1..80: note = Artificially Synthesized Probe
  source 1..80: mol_type = other DNA
catcatgtggtacacaataaaaaaaacagttttttttaactaaaaacaccttttaaagttttactgttaaaaaggtctta

SEQ ID NO: 96042 - DNA, 80 bp, synthetic construct
  misc_feature 1..80: note = Artificially Synthesized Probe
  source 1..80: mol_type = other DNA
aaaaaagaaaaaattctgagtccattttttaatctaaatattgctttaataatttttattaacaattttggagctactgc

SEQ ID NO: 96043 - DNA, 80 bp, synthetic construct
  misc_feature 1..80: note = Artificially Synthesized Probe
  source 1..80: mol_type = other DNA
agaatagaaacagttcccgtttgctttgaaggttggaagtagcacagaatctgtcattacctttgttgggaatgttcaag

SEQ ID NO: 96044 - DNA, 80 bp, synthetic construct
  misc_feature 1..80: note = Artificially Synthesized Probe
  source 1..80: mol_type = other DNA
acctgtacccggctaatttttttatttttgtattttttgtagagatgcagtcttgccatgttgcccaggctggtctcaaa

SEQ ID NO: 96045 - DNA, 80 bp, synthetic construct
  misc_feature 1..80: note = Artificially Synthesized Probe
  source 1..80: mol_type = other DNA
ggaatgcccttgggacaaaatattatgtgttcaaagggagtagacatctccctcagagaaacttgaagataacattttaa

SEQ ID NO: 96046 - DNA, 80 bp, synthetic construct; identical to SEQ ID NO: 34230
  misc_feature 1..80: note = Artificially Synthesized Probe
  source 1..80: mol_type = other DNA

SEQ ID NO: 96047 - DNA, 80 bp, synthetic construct
  misc_feature 1..80: note = Artificially Synthesized Probe
  source 1..80: mol_type = other DNA
agagaaacacaactttagctggacatggaggggtcttgtcacttacaaaagacaacagaagacaccaatggaaattattt

SEQ ID NO: 96048 - DNA, 80 bp, synthetic construct
  misc_feature 1..80: note = Artificially Synthesized Probe
  source 1..80: mol_type = other DNA
tgatcactgtgtaaaattgaaggcttatatttctgcacaagaggagaggaaaaggaagtggttgaaacactgaaactata

SEQ ID NO: 96049 - DNA, 80 bp, synthetic construct
  misc_feature 1..80: note = Artificially Synthesized Probe
  source 1..80: mol_type = other DNA
ccaaagccaagtccttaattattccaggaacatcatagaaatgaaatgtagaaaactaataataatcatatactttgtat

SEQ ID NO: 96050 - DNA, 80 bp, synthetic construct
  misc_feature 1..80: note = Artificially Synthesized Probe
  source 1..80: mol_type = other DNA
ctgtaaaactaatgaggattcaatactagcagaaattcagacagaggggttcattattagttgattgttagtaatcctta

SEQ ID NO: 96051 - DNA, 80 bp, synthetic construct; identical to SEQ ID NO: 34231
  misc_feature 1..80: note = Artificially Synthesized Probe
  source 1..80: mol_type = other DNA

SEQ ID NO: 96052 - DNA, 80 bp, synthetic construct
  misc_feature 1..80: note = Artificially Synthesized Probe
  source 1..80: mol_type = other DNA
gggattaattcctttccttcccatcctaacagtcatggctgacacctatataacaatgacaggttaacaagagaagagca

SEQ ID NO: 96053 - DNA, 80 bp, synthetic construct
  misc_feature 1..80: note = Artificially Synthesized Probe
  source 1..80: mol_type = other DNA
cccagattcaagtgattctcctgcctcagcccctcgagtagctgggattacagatgtccgccaccacgcccggctaattt

SEQ ID NO: 96054 - DNA, 80 bp, synthetic construct; identical to SEQ ID NO: 34232
  misc_feature 1..80: note = Artificially Synthesized Probe
  source 1..80: mol_type = other DNA

SEQ ID NO: 96055 - DNA, 80 bp, synthetic construct; identical to SEQ ID NO: 34142
  misc_feature 1..80: note = Artificially Synthesized Probe
  source 1..80: mol_type = other DNA

SEQ ID NO: 96056 - DNA, 80 bp, synthetic construct
  misc_feature 1..80: note = Artificially Synthesized Probe
  source 1..80: mol_type = other DNA
gaaaagctgggggtgggtagagtaaatgtttaggttttatggctggccttgaggaaaaggcgttctggtgtctgatctga

SEQ ID NO: 96057 - DNA, 80 bp, synthetic construct
  misc_feature 1..80: note = Artificially Synthesized Probe
  source 1..80: mol_type = other DNA
ttctctgggggttttctcacctttaccttgagaaagtttttgtggagttttgtgctttcttattcaaggccttcatttta

SEQ ID NO: 96058 - DNA, 80 bp, synthetic construct
  misc_feature 1..80: note = Artificially Synthesized Probe
  source 1..80: mol_type = other DNA
ttccaatgaatttgctttaaagacctgccagtggtggtttgtaattatagtattaattttttaaattcaattggggtcac

SEQ ID NO: 96059 - DNA, 80 bp, synthetic construct
  misc_feature 1..80: note = Artificially Synthesized Probe
  source 1..80: mol_type = other DNA
tctgatagaacacataagaatatactgagaccatcacagtgcctacacataataagtattcaatatatgtttgtcaggtg

SEQ ID NO: 96060 - DNA, 80 bp, synthetic construct; identical to SEQ ID NO: 34233
  misc_feature 1..80: note = Artificially Synthesized Probe
  source 1..80: mol_type = other DNA

SEQ ID NO: 96061 - DNA, 80 bp, synthetic construct
  misc_feature 1..80: note = Artificially Synthesized Probe
  source 1..80: mol_type = other DNA
gggagaatctgagtgtggaaggtgttgcaaagatgtatatgttgtcaaaaattaaggtaaactatcataacacataaata

SEQ ID NO: 96062 - DNA, 80 bp, synthetic construct
  misc_feature 1..80: note = Artificially Synthesized Probe
  source 1..80: mol_type = other DNA
aaaatacccaaatctattcagtccttcatagttcccaaagctttccacatctatcgtcacatttggccttctcaatagcc

SEQ ID NO: 96063 - DNA, 80 bp, synthetic construct
  misc_feature 1..80: note = Artificially Synthesized Probe
  source 1..80: mol_type = other DNA
catgtgattagaaatgttgttcatttcttctttcagtaaaccacagaaagataacaaaggctactgcgcccagtacagag

SEQ ID NO: 96064 - DNA, 80 bp, synthetic construct; identical to SEQ ID NO: 34234
  misc_feature 1..80: note = Artificially Synthesized Probe
  source 1..80: mol_type = other DNA

SEQ ID NO: 96065 - DNA, 80 bp, synthetic construct
  misc_feature 1..80: note = Artificially Synthesized Probe
  source 1..80: mol_type = other DNA
gaagtgggtggatcacttgaggtcaggagtttaacaccagcctgtccaacatggtgaaaccccgtctctactaaacatac

SEQ ID NO: 96066 - DNA, 80 bp, synthetic construct
  misc_feature 1..80: note = Artificially Synthesized Probe
  source 1..80: mol_type = other DNA
ttttcatgggcatttgaaaatatgtgtcatctatcagggcttacagttgatgtgcatatctgtttaattaattttactaa

SEQ ID NO: 96067 - DNA, 80 bp, synthetic construct
  misc_feature 1..80: note = Artificially Synthesized Probe
  source 1..80: mol_type = other DNA
aataggaggtaattaatcagacaatatttctaccatataaatcactaaagataacctaaaatacaagtacttagaacctc

SEQ ID NO: 96068 - DNA, 80 bp, synthetic construct
  misc_feature 1..80: note = Artificially Synthesized Probe
  source 1..80: mol_type = other DNA
tttgtcaataaatgagatcatgccaagcatctctgaatgttattttaaagtacattccatccaaaattctaagttctgat

SEQ ID NO: 96069 - DNA, 80 bp, synthetic construct
  misc_feature 1..80: note = Artificially Synthesized Probe
  source 1..80: mol_type = other DNA
ggggcggagcggctcgagcagcggcgggctggcaggcggtcgtccggccggggacccggcccgggaccggcggcgcgcgg

SEQ ID NO: 96070 - DNA, 80 bp, synthetic construct
  misc_feature 1..80: note = Artificially Synthesized Probe
  source 1..80: mol_type = other DNA
ttcttttttttttttttttttttcttttgagatggaatttcgctcttgttgcccaggctggagtgcaatggcgcaatctc

SEQ ID NO: 96071 - DNA, 80 bp, synthetic construct; identical to SEQ ID NO: 34384
  misc_feature 1..80: note = Artificially Synthesized Probe
  source 1..80: mol_type = other DNA

SEQ ID NO: 96072 - DNA, 80 bp, synthetic construct
  misc_feature 1..80: note = Artificially Synthesized Probe
  source 1..80: mol_type = other DNA
ctgggattacaggcgtgagccactgcaccctgcctaattttgtatttttagtagagacggagttactccatgttagtcag

SEQ ID NO: 96073 - DNA, 80 bp, synthetic construct
  misc_feature 1..80: note = Artificially Synthesized Probe
  source 1..80: mol_type = other DNA
ataagtcactgagcttccatttgaaacagaaagacccagaaccaagcagcatttggtggctgcttttctggacacagaat

SEQ ID NO: 96074 - DNA, 80 bp, synthetic construct; identical to SEQ ID NO: 34385
  misc_feature 1..80: note = Artificially Synthesized Probe
  source 1..80: mol_type = other DNA

SEQ ID NO: 96075 - DNA, 80 bp, synthetic construct
  misc_feature 1..80: note = Artificially Synthesized Probe
  source 1..80: mol_type = other DNA
tgtaatcccagcactttgggagaccaaggcgggcggatcacttgaggtcgggcgtttgagacccgcctggccaacatggt

SEQ ID NO: 96076 - DNA, 80 bp, synthetic construct; identical to SEQ ID NO: 34286
  misc_feature 1..80: note = Artificially Synthesized Probe
  source 1..80: mol_type = other DNA

SEQ ID NO: 96077 - DNA, 80 bp, synthetic construct
  misc_feature 1..80: note = Artificially Synthesized Probe
  source 1..80: mol_type = other DNA
ggtgagccaagatcgcaccactgcactccagcctgggtgacagagcaagactctgtctcaaaaaaaagtttttggaatca

SEQ ID NO: 96078 - DNA, 80 bp, synthetic construct
  misc_feature 1..80: note = Artificially Synthesized Probe
  source 1..80: mol_type = other DNA
tcattgtgtgggttgcatttttgttttgttttgttttgcttgagaccaggctattgtgcagtggtgtaatcacagctcac

SEQ ID NO: 96079 - DNA, 80 bp, synthetic construct
  misc_feature 1..80: note = Artificially Synthesized Probe
  source 1..80: mol_type = other DNA
atcttcccacctcagcctcccaaagtgatgggactacaggcatgagccaccacacccagtcctcttttttttttttcttg

SEQ ID NO: 96080 - DNA, 80 bp, synthetic construct; identical to SEQ ID NO: 34386
  misc_feature 1..80: note = Artificially Synthesized Probe
  source 1..80: mol_type = other DNA

SEQ ID NO: 96081 - DNA, 80 bp, synthetic construct
  misc_feature 1..80: note = Artificially Synthesized Probe
  source 1..80: mol_type = other DNA
ggctgcgggtgggccaaagtcatgggcctcattccaagccgtggccgctgcactgaccaccctgggtgtgaaggccactc

SEQ ID NO: 96082 - DNA, 80 bp, synthetic construct
  misc_feature 1..80: note = Artificially Synthesized Probe
  source 1..80: mol_type = other DNA
tgtgctttgaacgactgccagcaggatgcggtagcacgcacctgcaatcccagcgctttgggaggccaaagccggaggat

SEQ ID NO: 96083 - DNA, 80 bp, synthetic construct; identical to SEQ ID NO: 34387
  misc_feature 1..80: note = Artificially Synthesized Probe
  source 1..80: mol_type = other DNA

SEQ ID NO: 96084 - DNA, 80 bp, synthetic construct
  misc_feature 1..80: note = Artificially Synthesized Probe
  source 1..80: mol_type = other DNA
cagcacttgggggaggcatacgtgggcaggtcacttgaggatgggaattcaagaccagcctggccaacatggtgaaaccc

SEQ ID NO: 96085 - DNA, 80 bp, synthetic construct
  misc_feature 1..80: note = Artificially Synthesized Probe
  source 1..80: mol_type = other DNA
ctctgtaaaaaaaaaaaaaaaaaaaaactagggtttctcaacctcagcactgtgccagatcattctctggggtgggcacc

SEQ ID NO: 96086 - DNA, 80 bp, synthetic construct
  misc_feature 1..80: note = Artificially Synthesized Probe
  source 1..80: mol_type = other DNA
gttcaaactgtggctcttgtattcaaattaattcctccaaaggccttaatgaagccaacaaggagattgacatctggcca

SEQ ID NO: 96087 - DNA, 80 bp, synthetic construct
  misc_feature 1..80: note = Artificially Synthesized Probe
  source 1..80: mol_type = other DNA
aggccttaatgaagccaacaaggagattgacatctggccacaaaatcatggagagagactaatttgctcctcccacagag

SEQ ID NO: 96088 - DNA, 80 bp, synthetic construct
  misc_feature 1..80: note = Artificially Synthesized Probe
  source 1..80: mol_type = other DNA
gtgcccctgcatcaaaccacacggggctcccctgtcggacttgcatgaaaatctaaccacatttgcagggccctggaaga

SEQ ID NO: 96089 - DNA, 80 bp, synthetic construct; identical to SEQ ID NO: 34388
  misc_feature 1..80: note = Artificially Synthesized Probe
  source 1..80: mol_type = other DNA

SEQ ID NO: 96090 - DNA, 80 bp, synthetic construct
  misc_feature 1..80: note = Artificially Synthesized Probe
  source 1..80: mol_type = other DNA
ccagctactcaggaggctgaggcaggagaatcgcttgaacctggaaagtggaggttgcagtgagctgagatcgcaccact

SEQ ID NO: 96091 - DNA, 80 bp, synthetic construct
  misc_feature 1..80: note = Artificially Synthesized Probe
  source 1..80: mol_type = other DNA
caggagttcaagacctccctgaccaacatgatgaaaccccatctctactaaaaatacaaaaattagccgggcatggtggt

SEQ ID NO: 96092 - DNA, 80 bp, synthetic construct
  misc_feature 1..80: note = Artificially Synthesized Probe
  source 1..80: mol_type = other DNA
aaaggctcttaaatatgagaactttttcagtgatccaaatgaaaaggatcgaataaagtggaatgaccagatggaaataa

SEQ ID NO: 96093 - DNA, 80 bp, synthetic construct
  misc_feature 1..80: note = Artificially Synthesized Probe
  source 1..80: mol_type = other DNA
accatgcccagctaactttttgtatttttagcagagatgagtttcgccatgttggccaggctggtctcgaactcctgacc

SEQ ID NO: 96094 - DNA, 80 bp, synthetic construct; identical to SEQ ID NO: 34389
  misc_feature 1..80: note = Artificially Synthesized Probe
  source 1..80: mol_type = other DNA

SEQ ID NO: 96095 - DNA, 80 bp, synthetic construct
  misc_feature 1..80: note = Artificially Synthesized Probe
  source 1..80: mol_type = other DNA
gacccccgtagccttctccagtccctcagtcggctccagaaaccccgcgccttcatcctgtgagtcccccaccaaggccc

SEQ ID NO: 96096 - DNA, 80 bp, synthetic construct
  misc_feature 1..80: note = Artificially Synthesized Probe
  source 1..80: mol_type = other DNA
actgtggcccaggcacagccggcttcccagcacacggggcagcttcccaggagcactccttcttcgaggcatctaatttt

SEQ ID NO: 96097 - DNA, 80 bp, synthetic construct
  misc_feature 1..80: note = Artificially Synthesized Probe
  source 1..80: mol_type = other DNA
cataagccagtcaggagagcccagaaggtgcataaaccggtttgggatcccgactgttagcacactgtgggattgagtag

SEQ ID NO: 96098 - DNA, 80 bp, synthetic construct; identical to SEQ ID NO: 34390
  misc_feature 1..80: note = Artificially Synthesized Probe
  source 1..80: mol_type = other DNA

SEQ ID NO: 96099 - DNA, 80 bp, synthetic construct
  misc_feature 1..80: note = Artificially Synthesized Probe
  source 1..80: mol_type = other DNA
gcactgtacaggcctcagcaaccatttgccctgagcgccgccccacaggttcctatccccagcttccccaccttggcccg

SEQ ID NO: 96100 - DNA, 80 bp, synthetic construct
  misc_feature 1..80: note = Artificially Synthesized Probe
  source 1..80: mol_type = other DNA
attttttgtatttttagtagagatggggtttcaccatgttggccaggctagtcttgaactcttgacctcaggtgatccgt

SEQ ID NO: 96101 - DNA, 80 bp, synthetic construct
  misc_feature 1..80: note = Artificially Synthesized Probe
  source 1..80: mol_type = other DNA
caatcctcctgcctcaacctccagagtagctggaactacaggtgcgcattaccacacctgtctaattttattgtttgtag

SEQ ID NO: 96102 - DNA, 80 bp, synthetic construct
  misc_feature 1..80: note = Artificially Synthesized Probe
  source 1..80: mol_type = other DNA
tgaggcagagtctcactctgtcgccaggctggagtgcagtggctcaatcttggctcactgcaacctccacctcccgggtt

SEQ ID NO: 96103 - DNA, 80 bp, synthetic construct; identical to SEQ ID NO: 34391
  misc_feature 1..80: note = Artificially Synthesized Probe
  source 1..80: mol_type = other DNA

SEQ ID NO: 96104 - DNA, 80 bp, synthetic construct
  misc_feature 1..80: note = Artificially Synthesized Probe
  source 1..80: mol_type = other DNA
cttatttatttattttcccccttggtctgcaagattccataaggtgtctgagaacacaggagctatccccttccttacct

SEQ ID NO: 96105 - DNA, 80 bp, synthetic construct
  misc_feature 1..80: note = Artificially Synthesized Probe
  source 1..80: mol_type = other DNA
agcagttctcctgcctcagtctcttgagtagctgggattacaggcacccgccaccacacctggctaatttttgtattttt

SEQ ID NO: 96106 - DNA, 80 bp, synthetic construct
  misc_feature 1..80: note = Artificially Synthesized Probe
  source 1..80: mol_type = other DNA
ggagctcccacccaggccccattttggttattttgcagggcaagtccctgccctgccagcagagggttccagaagggcct

SEQ ID NO: 96107 - DNA, 80 bp, synthetic construct; identical to SEQ ID NO: 34392
  misc_feature 1..80: note = Artificially Synthesized Probe
  source 1..80: mol_type = other DNA

SEQ ID NO: 96108 - DNA, 80 bp, synthetic construct
  misc_feature 1..80: note = Artificially Synthesized Probe
  source 1..80: mol_type = other DNA
aacccgccaggcgtggcttgctgaactaacccaaatcccgacactgtgttccttttgttcacaaaaccatttttaatatt

SEQ ID NO: 96109 - DNA, 80 bp, synthetic construct
  misc_feature 1..80: note = Artificially Synthesized Probe
  source 1..80: mol_type = other DNA
cctccctccaagaaaaaaaaaatgttctcgtgttgagatgatttagagctgtctctttatgggtttcccagaagcagggt

SEQ ID NO: 96110 - DNA, 80 bp, synthetic construct
  misc_feature 1..80: note = Artificially Synthesized Probe
  source 1..80: mol_type = other DNA
gtaattctaacactttgggaagctgaggcgggcagatcgcttgaggccaggagttcaagaccagcctggccaacatggag

SEQ ID NO: 96111 - DNA, 80 bp, synthetic construct
  misc_feature 1..80: note = Artificially Synthesized Probe
  source 1..80: mol_type = other DNA
gctcatcctgccccaacgtaatgggacccttccgtttaacacccccatcttcagtccctggctactgggctgcttccaga

SEQ ID NO: 96112 - DNA, 80 bp, synthetic construct; identical to SEQ ID NO: 34393
  misc_feature 1..80: note = Artificially Synthesized Probe
  source 1..80: mol_type = other DNA

SEQ ID NO: 96113 - DNA, 80 bp, synthetic construct
  misc_feature 1..80: note = Artificially Synthesized Probe
  source 1..80: mol_type = other DNA
ggcccacatcaatagtgtggtcctgagaccaaacctaagagctgctgcccgggcactcgctgcggggacgctgttctgcc

SEQ ID NO: 96114 - DNA, 80 bp, synthetic construct
  misc_feature 1..80: note = Artificially Synthesized Probe
  source 1..80: mol_type = other DNA
cctgcacaagaagaaaaagccaccaagcatcagcgcccagttccaggtaggtggagcaggagaggcagaaggtggcggtc

SEQ ID NO: 96115 - DNA, 80 bp, synthetic construct
  misc_feature 1..80: note = Artificially Synthesized Probe
  source 1..80: mol_type = other DNA
ttgctaacacggtgaaaccccacctctactaaaaatacaaaaattagccgggcgtagtggcgggtgcctgtagtcccagc

SEQ ID NO: 96116 - DNA, 80 bp, synthetic construct
  misc_feature 1..80: note = Artificially Synthesized Probe
  source 1..80: mol_type = other DNA
tgtaatctcagctccttgggaggctgaggcaggagaattgcttgaacctgggaggcggaggctgtagtgagccaagatca

SEQ ID NO: 96117 - DNA, 80 bp, synthetic construct
  misc_feature 1..80: note = Artificially Synthesized Probe
  source 1..80: mol_type = other DNA
ttccacctgaggcaaaaacaagcactggtggccctgggaccatggggaccacataactccctcgagggtttccagggata

SEQ ID NO: 96118 - DNA, 80 bp, synthetic construct
  misc_feature 1..80: note = Artificially Synthesized Probe
  source 1..80: mol_type = other DNA
tttctctttcccttaacagacatcccttaacaagctcttggaggcactggggaaggcggagcccttctttatccgctgca

SEQ ID NO: 96119 - DNA, 80 bp, synthetic construct
  misc_feature 1..80: note = Artificially Synthesized Probe
  source 1..80: mol_type = other DNA
attagcagtgaggatggtccaagtggccatttaagagcagggacatcatctggaacatggagaggcccagagaaggtttg

SEQ ID NO: 96120 - DNA, 80 bp, synthetic construct; identical to SEQ ID NO: 34395
  misc_feature 1..80: note = Artificially Synthesized Probe
  source 1..80: mol_type = other DNA

SEQ ID NO: 96121 - DNA, 80 bp, synthetic construct; identical to SEQ ID NO: 34287
  misc_feature 1..80: note = Artificially Synthesized Probe
  source 1..80: mol_type = other DNA

SEQ ID NO: 96122 - DNA, 80 bp, synthetic construct
  misc_feature 1..80: note = Artificially Synthesized Probe
  source 1..80: mol_type = other DNA
ctgtgataaaacccattttgtgcactggagggtggcagcatccctggcctccacatccacccccagtcatgacaaccctc

SEQ ID NO: 96123 - DNA, 80 bp, synthetic construct
  misc_feature 1..80: note = Artificially Synthesized Probe
  source 1..80: mol_type = other DNA
ctgggattacaggtgcccaccacgccaagctaatttttgtatttttagtagagacggggtttcaccatgttggccaggct

SEQ ID NO: 96124 - DNA, 80 bp, synthetic construct
  misc_feature 1..80: note = Artificially Synthesized Probe
  source 1..80: mol_type = other DNA
aggcttaaagcccactgaggcagctgcatttccagcctcttctctcccctggcaggaagcatctccctgtgtccccatca

SEQ ID NO: 96125 - DNA, 80 bp, synthetic construct; identical to SEQ ID NO: 34396
  misc_feature 1..80: note = Artificially Synthesized Probe
  source 1..80: mol_type = other DNA

SEQ ID NO: 96126 - DNA, 80 bp, synthetic construct
  misc_feature 1..80: note = Artificially Synthesized Probe
  source 1..80: mol_type = other DNA
aaaaaataaatttaaatgactagagatggagtctcactatgttgcccaggctggtctcgaactcctggcctcaactgatc

SEQ ID NO: 96127 - DNA, 80 bp, synthetic construct
  misc_feature 1..80: note = Artificially Synthesized Probe
  source 1..80: mol_type = other DNA
ggtcgcatggggaagtgccctcatctcacagttcccaggcctgagccagcaacagacttgggcatcctgtcaggtcaagg

SEQ ID NO: 96128 - DNA, 80 bp, synthetic construct
  misc_feature 1..80: note = Artificially Synthesized Probe
  source 1..80: mol_type = other DNA
tatacctggacacacctgttccgtggcaaaggcaatcaccctcttccaaagagagctccttgctggagtgtaaactcagc

SEQ ID NO: 96129 - DNA, 80 bp, synthetic construct
  misc_feature 1..80: note = Artificially Synthesized Probe
  source 1..80: mol_type = other DNA
gcctgtattcctagctactgaggaggctgaggcaggaggatcccttgaatccaggaggcagaggttgcagtgagccaaga

SEQ ID NO: 96130 - DNA, 80 bp, synthetic construct; identical to SEQ ID NO: 34397
  misc_feature 1..80: note = Artificially Synthesized Probe
  source 1..80: mol_type = other DNA

SEQ ID NO: 96131 - DNA, 80 bp, synthetic construct
  misc_feature 1..80: note = Artificially Synthesized Probe
  source 1..80: mol_type = other DNA
gcaggaggatcaattgagcctaggagtttgagaccagcctggacaacatagtgagaccccatctctgcaaaaaatttaaa

SEQ ID NO: 96132 - DNA, 80 bp, synthetic construct
  misc_feature 1..80: note = Artificially Synthesized Probe
  source 1..80: mol_type = other DNA
gagcactgaaggaacatttgttaaccatatgttgaaagaaggcagcctcctctgaaacatcagcacagatcacagggagg

SEQ ID NO: 96133 - DNA, 80 bp, synthetic construct
  misc_feature 1..80: note = Artificially Synthesized Probe
  source 1..80: mol_type = other DNA
atggtggggcacacctgtaacctcagctacttgggaggctgaggcaggagaattgcttgaacccgggagatggaggttgc

SEQ ID NO: 96134 - DNA, 80 bp, synthetic construct; identical to SEQ ID NO: 34398
  misc_feature 1..80: note = Artificially Synthesized Probe
  source 1..80: mol_type = other DNA

SEQ ID NO: 96135 - DNA, 80 bp, synthetic construct
  misc_feature 1..80: note = Artificially Synthesized Probe
  source 1..80: mol_type = other DNA
atgcaatgtacttccagctacttgcggggctgaggcaggaggattgcttgagtctgggaggttgaaggtgcagtaagcca

SEQ ID NO: 96136 - DNA, 80 bp, synthetic construct
  misc_feature 1..80: note = Artificially Synthesized Probe
  source 1..80: mol_type = other DNA
cttgtatctgcagtggtctttcttaagattacagactgttggctgggcgcagtggctcatgcttgtaatcccagcacttt

SEQ ID NO: 96137 - DNA, 80 bp, synthetic construct
  misc_feature 1..80: note = Artificially Synthesized Probe
  source 1..80: mol_type = other DNA
gtgaacccgggaggaggagcttgcagtgagccaagattgtgccactgcagcccagcctgggcggcaaaacaagactccgt

SEQ ID NO: 96138 - DNA, 80 bp, synthetic construct
  misc_feature 1..80: note = Artificially Synthesized Probe
  source 1..80: mol_type = other DNA
cttgctctgtcgcccaggctggagtacagtggtgtgatctcggctcactccaacctccatctcccgggttcaagtgattc

SEQ ID NO: 96139 - DNA, 80 bp, synthetic construct; identical to SEQ ID NO: 34399
  misc_feature 1..80: note = Artificially Synthesized Probe
  source 1..80: mol_type = other DNA

SEQ ID NO: 96140 - DNA, 80 bp, synthetic construct
  misc_feature 1..80: note = Artificially Synthesized Probe
  source 1..80: mol_type = other DNA
aggctggattacaatggcgcaatcttggctcactgcaacctccgcctcccaggttcaagtgattctcctgcctcagcctc

SEQ ID NO: 96141 - DNA, 80 bp, synthetic construct
  misc_feature 1..80: note = Artificially Synthesized Probe
  source 1..80: mol_type = other DNA
gcccagactatttctgaaagcctgaaattttagatttgtcattaccattcctgtcaaacccagcttcaccttaaccaggg

SEQ ID NO: 96142 - DNA, 80 bp, synthetic construct
  misc_feature 1..80: note = Artificially Synthesized Probe
  source 1..80: mol_type = other DNA
agatagacaagaggaactaccagatcgggaagaccaaggtcagcgctcctgcccctcggggcactacaaacccacaccct

SEQ ID NO: 96143 - DNA, 80 bp, synthetic construct
  misc_feature 1..80: note = Artificially Synthesized Probe
  source 1..80: mol_type = other DNA
ggggaatgtcttggggaagacaagggacaaactgaacacgttcagaagaacacattcaactccccatgggtgagcgtgga

SEQ ID NO: 96144 - DNA, 80 bp, synthetic construct; identical to SEQ ID NO: 34400
  misc_feature 1..80: note = Artificially Synthesized Probe
  source 1..80: mol_type = other DNA

SEQ ID NO: 96145 - DNA, 80 bp, synthetic construct
  misc_feature 1..80: note = Artificially Synthesized Probe
  source 1..80: mol_type = other DNA
aaggcctcacctggtgtaaaaaattcccttccagccaagcgaggtggcatgcacgcagagtcccagctacttgaaaggct

SEQ ID NO: 96146 - DNA, 80 bp, synthetic construct
  misc_feature 1..80: note = Artificially Synthesized Probe
  source 1..80: mol_type = other DNA
agccctgattgcaccactgcacttcagcctgggtgaccgagcgagatctcatttcttttttcttttttgtttttattttt

SEQ ID NO: 96147 - DNA, 80 bp, synthetic construct; identical to SEQ ID NO: 34401
  misc_feature 1..80: note = Artificially Synthesized Probe
  source 1..80: mol_type = other DNA

SEQ ID NO: 96148 - DNA, 80 bp, synthetic construct
  misc_feature 1..80: note = Artificially Synthesized Probe
  source 1..80: mol_type = other DNA
gttgggagttcgagaccagcctggccaacatggtgaaaccctgtctgtactaaaaatacaaaaattagccaggcctggtg

SEQ ID NO: 96149 - DNA, 80 bp, synthetic construct
  misc_feature 1..80: note = Artificially Synthesized Probe
  source 1..80: mol_type = other DNA
aaagccctggttggtcagcacaccagcctaggtctcactctggagtgggctatgcagacctcccaggcacagagatggtg

SEQ ID NO: 96150 - DNA, 80 bp, synthetic construct
  misc_feature 1..80: note = Artificially Synthesized Probe
  source 1..80: mol_type = other DNA
cctgcagatgaagcgggccgccgtcaccatccaggcctgctggcggtcctaccgggtccggagggcgctggagaggacgc

SEQ ID NO: 96151 - DNA, 80 bp, synthetic construct; identical to SEQ ID NO: 34402
  misc_feature 1..80: note = Artificially Synthesized Probe
  source 1..80: mol_type = other DNA

SEQ ID NO: 96152 - DNA, 80 bp, synthetic construct
  misc_feature 1..80: note = Artificially Synthesized Probe
  source 1..80: mol_type = other DNA
cacctggattcagggttggaggggctgcctggaccagcccaacactcacatggagctggggcatccaccgggcacagaga

SEQ ID NO: 96153 - DNA, 80 bp, synthetic construct
  misc_feature 1..80: note = Artificially Synthesized Probe
  source 1..80: mol_type = other DNA
ctcaaggtgttctgcactgggcaactggattcatgtcctggggcttccataactaagtacctatcctgggtggctgagga

SEQ ID NO: 96154 - DNA, 80 bp, synthetic construct
  misc_feature 1..80: note = Artificially Synthesized Probe
  source 1..80: mol_type = other DNA
gcaaaagcctcctaggccaggtgcaatggctcatgcctgtaatcccaacactttgggaggcctagatgggaagatcgctt

SEQ ID NO: 96155 - DNA, 80 bp, synthetic construct
  misc_feature 1..80: note = Artificially Synthesized Probe
  source 1..80: mol_type = other DNA
gagctatgatcacaccactgcactccagcctaagtgacagagccagacactgtctctaaaagcaaaacaggctgggcata

SEQ ID NO: 96156 - DNA, 80 bp, synthetic construct
  misc_feature 1..80: note = Artificially Synthesized Probe
  source 1..80: mol_type = other DNA
ctagggaggctgagacacaagaatcacttgaacccgggaggcagaggtcgcagcaagccaagatcgtgccactgcattcc

SEQ ID NO: 96157 - DNA, 80 bp, synthetic construct; identical to SEQ ID NO: 34403
  misc_feature 1..80: note = Artificially Synthesized Probe
  source 1..80: mol_type = other DNA

SEQ ID NO: 96158 - DNA, 80 bp, synthetic construct
  misc_feature 1..80: note = Artificially Synthesized Probe
  source 1..80: mol_type = other DNA
tttcctcactccagcttcagccagatgatctcggagaagcagaaggcagaagagaaggagagggaagccctggaagccgc

SEQ ID NO: 96159 - DNA, 80 bp, synthetic construct
  misc_feature 1..80: note = Artificially Synthesized Probe
  source 1..80: mol_type = other DNA
gaggccccaagcccagagaagactctcccaccccagaaaaccgtggcggctgaaagtcacgagaaagtccccagcagccg

SEQ ID NO: 96160 - DNA, 80 bp, synthetic construct; identical to SEQ ID NO: 34404
  misc_feature 1..80: note = Artificially Synthesized Probe
  source 1..80: mol_type = other DNA

SEQ ID NO: 96161 - DNA, 80 bp, synthetic construct
  misc_feature 1..80: note = Artificially Synthesized Probe
  source 1..80: mol_type = other DNA
tgtggcagcccaagggttcaggaaaagcccgacagccccggaggctccacgcagatccagcggtacctggacgccgagcg

SEQ ID NO: 96162 - DNA, 80 bp, synthetic construct
  misc_feature 1..80: note = Artificially Synthesized Probe
  source 1..80: mol_type = other DNA
caccagggtccaggccaggtgggcaaggccaggggcagtgccacacatcctggaaacacatgtgtaatcatgcccagtgg

SEQ ID NO: 96163 - DNA, 80 bp, synthetic construct
  misc_feature 1..80: note = Artificially Synthesized Probe
  source 1..80: mol_type = other DNA
cctcaggtcaaggtccctgctgcccagaaatcttgggccttggtttctaattggtgaacaggactaactgcactcctcgg

SEQ ID NO: 96164 - DNA, 80 bp, synthetic construct; identical to SEQ ID NO: 34288
  misc_feature 1..80: note = Artificially Synthesized Probe
  source 1..80: mol_type = other DNA

SEQ ID NO: 96165 - DNA, 80 bp, synthetic construct
  misc_feature 1..80: note = Artificially Synthesized Probe
  source 1..80: mol_type = other DNA
ttaagggatggcttctctgcctctttgtctgaggtgggagcccgtggggacactttccagccagagagtcccaactcggt

SEQ ID NO: 96166 - DNA, 80 bp, synthetic construct
  misc_feature 1..80: note = Artificially Synthesized Probe
  source 1..80: mol_type = other DNA
gctcgtattgggggccagatcattctctgcggtgggggctgtcctgtgtatcataagatgttgagcagcatccctggcct

SEQ ID NO: 96167 - DNA, 80 bp, synthetic construct; identical to SEQ ID NO: 34405
  misc_feature 1..80: note = Artificially Synthesized Probe
  source 1..80: mol_type = other DNA

SEQ ID NO: 96168 - DNA, 80 bp, synthetic construct
  misc_feature 1..80: note = Artificially Synthesized Probe
  source 1..80: mol_type = other DNA
aagagtttgagaggagttcgagaccagcctggccaacatagtgaaaccctgtctctactaaaaatacaaaaattagctgg

SEQ ID NO: 96169 - DNA, 80 bp, synthetic construct
  misc_feature 1..80: note = Artificially Synthesized Probe
  source 1..80: mol_type = other DNA
gagattatggatagaaggaagatagatgccgacgatagatggatggaaggaagataggtaggtagagacaatgaatggag

SEQ ID NO: 96170 - DNA, 80 bp, synthetic construct; identical to SEQ ID NO: 34406
  misc_feature 1..80: note = Artificially Synthesized Probe
  source 1..80: mol_type = other DNA

SEQ ID NO: 96171 - DNA, 80 bp, synthetic construct
  misc_feature 1..80: note = Artificially Synthesized Probe
  source 1..80: mol_type = other DNA
cccgtctctactaaaaataccaaaaattagctggatgtgttggcgcatgcctctaatcccagctactcgggaggctgagg

SEQ ID NO: 96172 - DNA, 80 bp, synthetic construct
  misc_feature 1..80: note = Artificially Synthesized Probe
  source 1..80: mol_type = other DNA
atgacagatgaagagatggatggaaggcagataaagaggatggatgggtggaagatagagacaatgagtcaatgagtaga

SEQ ID NO: 96173 - DNA, 80 bp, synthetic construct
  misc_feature 1..80: note = Artificially Synthesized Probe
  source 1..80: mol_type = other DNA
tttcctaccctccacactcaacatctggggctggctcactctctggggtggagaccattctctgtagggtattgagtagc

SEQ ID NO: 96174 - DNA, 80 bp, synthetic construct; identical to SEQ ID NO: 34407
  misc_feature 1..80: note = Artificially Synthesized Probe
  source 1..80: mol_type = other DNA

SEQ ID NO: 96175 - DNA, 80 bp, synthetic construct
  misc_feature 1..80: note = Artificially Synthesized Probe
  source 1..80: mol_type = other DNA
tactcaggaggctgaggcgagagaatcgcttgaacgcagtggcagggtagaggttgtagtgagcctcgcgagaccaggcc

SEQ ID NO: 96176 - DNA, 80 bp, synthetic construct
  misc_feature 1..80: note = Artificially Synthesized Probe
  source 1..80: mol_type = other DNA
agcctgcagcagaaaccacggacggagagcgaagtgcgaaaaagccagctgtccagaagaagaagccaggcgacgcatcc

SEQ ID NO: 96177 - DNA, 80 bp, synthetic construct
  misc_feature 1..80: note = Artificially Synthesized Probe
  source 1..80: mol_type = other DNA
cccaggaggtggaggttgcagtgagccgagatcgcaccaccgcactccagcctgggcaacagagcaagagtccatctcaa

SEQ ID NO: 96178 - DNA, 80 bp, synthetic construct
  misc_feature 1..80: note = Artificially Synthesized Probe
  source 1..80: mol_type = other DNA
aaaggcatttgctcagtagaaactgaatggggaggccaggcagtggctcacgcctataatcccagcactttgggatgccg

SEQ ID NO: 96179 - DNA, 80 bp, synthetic construct
  misc_feature 1..80: note = Artificially Synthesized Probe
  source 1..80: mol_type = other DNA
gaggtggaggttgcagtgagctgagatcatgccactgcactccagcctgggtgacagagggagactccgtctcaaaaaaa

SEQ ID NO: 96180 - DNA, 80 bp, synthetic construct; identical to SEQ ID NO: 34408
  misc_feature 1..80: note = Artificially Synthesized Probe
  source 1..80: mol_type = other DNA

SEQ ID NO: 96181 - DNA, 80 bp, synthetic construct
  misc_feature 1..80: note = Artificially Synthesized Probe
  source 1..80: mol_type = other DNA
gcagtgaactgtgatcataccactgcactccagcctgggcaagagaatgacactctgtctcaaaaaaactttttttttaa

SEQ ID NO: 96182 - DNA, 80 bp, synthetic construct
  misc_feature 1..80: note = Artificially Synthesized Probe
  source 1..80: mol_type = other DNA
caaaaagaaaagaaaatggagtccccctgtggcttctgtttggtatccttctttcttcacataactcccctgccagtaca

SEQ ID NO: 96183 - DNA, 80 bp, synthetic construct
  misc_feature 1..80: note = Artificially Synthesized Probe
  source 1..80: mol_type = other DNA
tcctgcctcagcctcccaagtagctgggagtacaggtgtgcaccaccatgcccagctaatttttttttctttttttttct

SEQ ID NO: 96184 - DNA, 80 bp, synthetic construct; identical to SEQ ID NO: 34409
  misc_feature 1..80: note = Artificially Synthesized Probe
  source 1..80: mol_type = other DNA

SEQ ID NO: 96185 - DNA, 80 bp, synthetic construct
  misc_feature 1..80: note = Artificially Synthesized Probe
  source 1..80: mol_type = other DNA
ccatcacgccctgctatttttttgtatttgtaatagagacagggttttgccatgttggccaggctggtctcaaactcctg

SEQ ID NO: 96186 - DNA, 80 bp, synthetic construct
  misc_feature 1..80: note = Artificially Synthesized Probe
  source 1..80: mol_type = other DNA
cttaaaagaagccacgtactttctcctgcagatccacgtttaagaggctttttctgcataaaaccaaggataaaaaatac

SEQ ID NO: 96187 - DNA, 80 bp, synthetic construct
  misc_feature 1..80: note = Artificially Synthesized Probe
  source 1..80: mol_type = other DNA
ggccttgagttggctgtgggccaagccctaggcacagagccaggggtttctggccctggataaaggcgtgccataggagg

SEQ ID NO: 96188 - DNA, 80 bp, synthetic construct
  misc_feature 1..80: note = Artificially Synthesized Probe
  source 1..80: mol_type = other DNA
catgtctcttttccttttataaggacgccagtctttggatttggggcccacccttgtccagtacaacctgatcttaactg

SEQ ID NO: 96189 - DNA, 80 bp, synthetic construct; identical to SEQ ID NO: 34410
  misc_feature 1..80: note = Artificially Synthesized Probe
  source 1..80: mol_type = other DNA

SEQ ID NO: 96190 - DNA, 80 bp, synthetic construct
  misc_feature 1..80: note = Artificially Synthesized Probe
  source 1..80: mol_type = other DNA
tcatcccagcactctgggaggctgagacaggagaatcacttgggcccagcagttcaaaaccagcctgggcaacagagaga

SEQ ID NO: 96191 - DNA, 80 bp, synthetic construct
  misc_feature 1..80: note = Artificially Synthesized Probe
  source 1..80: mol_type = other DNA
gaccctggctcaaaaaaaataataatgcatatttggtctcaaagcaaagattgatgaagcactgtgtgcaacagaagtgg

SEQ ID NO: 96192 - DNA, 80 bp, synthetic construct
  misc_feature 1..80: note = Artificially Synthesized Probe
  source 1..80: mol_type = other DNA
atcttgaaattaccaggccattccaggcatccccatcctaaggtatggctgggtgttgagcccctgtgtggggcagcagg

SEQ ID NO: 96193 - DNA, 80 bp, synthetic construct; identical to SEQ ID NO: 34411
  misc_feature 1..80: note = Artificially Synthesized Probe
  source 1..80: mol_type = other DNA

SEQ ID NO: 96194 - DNA, 80 bp, synthetic construct
  misc_feature 1..80: note = Artificially Synthesized Probe
  source 1..80: mol_type = other DNA
cccagaagacgcccattgagagcttgtttatcgaagccaccgagaagttcaggagcaacatcaaaacgatgtactctgtc

SEQ ID NO: 96195 - DNA, 80 bp, synthetic construct
  misc_feature 1..80: note = Artificially Synthesized Probe
  source 1..80: mol_type = other DNA
tcgtcagcaacctggccactgagcgtggccagaaggacaccaacctggtcctcaacctcttccagtcactgctagatgag

SEQ ID NO: 96196 - DNA, 80 bp, synthetic construct; identical to SEQ ID NO: 34412
  misc_feature 1..80: note = Artificially Synthesized Probe
  source 1..80: mol_type = other DNA

SEQ ID NO: 96197 - DNA, 80 bp, synthetic construct
  misc_feature 1..80: note = Artificially Synthesized Probe
  source 1..80: mol_type = other DNA
ttgtgccacacctacctcctggtggggagccctgcaccctccccaacagagcctcacttctgggtctggggtgtctgaat

SEQ ID NO: 96198 - DNA, 80 bp, synthetic construct
  misc_feature 1..80: note = Artificially Synthesized Probe
  source 1..80: mol_type = other DNA
cctccttgtgttcctcacagcagagcaaagctcagaagaagaagcggaagcaggagcgtgctgtgagtaggctgcacata

SEQ ID NO: 96199 - DNA, 80 bp, synthetic construct
  misc_feature 1..80: note = Artificially Synthesized Probe
  source 1..80: mol_type = other DNA
gctccccgaggagtttcccatccctgctctgtcccacccctaggacctggccccttagcagggcctgggccaccaatgat

SEQ ID NO: 96200 - DNA, 80 bp, synthetic construct
  misc_feature 1..80: note = Artificially Synthesized Probe
  source 1..80: mol_type = other DNA
gagatcccatgggtcgtcatccaccagtggctggggagggctgccttcccctttccctgcccagcgccttcctctggcct

SEQ ID NO: 96201 - DNA, 80 bp, synthetic construct; identical to SEQ ID NO: 34413
  misc_feature 1..80: note = Artificially Synthesized Probe
  source 1..80: mol_type = other DNA

SEQ ID NO: 96202 - DNA, 80 bp, synthetic construct
  misc_feature 1..80: note = Artificially Synthesized Probe
  source 1..80: mol_type = other DNA
ggcgaaggttgcagtgagtcgagatcgcgccactgcaccctaacctgggcaacagagcaagactctgtctcaaaaaaaaa

SEQ ID NO: 96203 - DNA, 80 bp, synthetic construct
  misc_feature 1..80: note = Artificially Synthesized Probe
  source 1..80: mol_type = other DNA
ctgcagcctcctctcctcgtgggccctgcctctctgtctctgtacacgctgctccaccgcctgaaccatcggcccctcct

SEQ ID NO: 96204 - DNA, 80 bp, synthetic construct
  misc_feature 1..80: note = Artificially Synthesized Probe
  source 1..80: mol_type = other DNA
tcaagagggcctctcctacatgtgtttttctgccagaaccatttgggccagggtcttttcagcccagaaggcagccccac

SEQ ID NO: 96205 - DNA, 80 bp, synthetic construct; identical to SEQ ID NO: 34414
  misc_feature 1..80: note = Artificially Synthesized Probe
  source 1..80: mol_type = other DNA

SEQ ID NO: 96206 - DNA, 80 bp, synthetic construct
  misc_feature 1..80: note = Artificially Synthesized Probe
  source 1..80: mol_type = other DNA
cagcctcctctctcaggagtcagggcacaggttcctgcagtgtgggtttagaagttggcaggccaggcacagtggctcac

SEQ ID NO: 96207 - DNA, 80 bp, synthetic construct
  misc_feature 1..80: note = Artificially Synthesized Probe
  source 1..80: mol_type = other DNA
gaggatcacctgggcctgggaggtcaaggctccagtgagctatgatagtgccactgcactctagcctgggtgacagagtg

SEQ ID NO: 96208 - DNA, 80 bp, synthetic construct
  misc_feature 1..80: note = Artificially Synthesized Probe
  source 1..80: mol_type = other DNA
tcgctactaaaaatacaaaattagccaggcgtggtggcgcacacctgtaatcccagctactcgggaggccgaggcaggag

SEQ ID NO: 96209 - DNA, 80 bp, synthetic construct
  misc_feature 1..80: note = Artificially Synthesized Probe
  source 1..80: mol_type = other DNA
ccccagcaccctctgtgactcccaccctgtggacctcctagtgtgcaagatgacctgccacaagaagtgcgtgcacaaga

SEQ ID NO: 96210 - DNA, 80 bp, synthetic construct
  misc_feature 1..80: note = Artificially Synthesized Probe
  source 1..80: mol_type = other DNA
gtgcagtggcgccatcacggctcactgcagcctcgacctcccaggcttaagtgattctcccacctcagcctcctgagtac

SEQ ID NO: 96211 - DNA, 80 bp, synthetic construct; identical to SEQ ID NO: 34415
  misc_feature 1..80: note = Artificially Synthesized Probe
  source 1..80: mol_type = other DNA

SEQ ID NO: 96212 - DNA, 80 bp, synthetic construct
  misc_feature 1..80: note = Artificially Synthesized Probe
  source 1..80: mol_type = other DNA
gttatagctctctccccacgaaggaccacccatgccttgggtggcctacaaaggaagcccctgcccagtggctgccatgc

SEQ ID NO: 96213 - DNA, 80 bp, synthetic construct
  misc_feature 1..80: note = Artificially Synthesized Probe
  source 1..80: mol_type = other DNA
ccaaccccggcactgcagggcgagccaggcgttgagcctggccacttcggcgtgtgcgtagacagcctgaccagcgacaa

SEQ ID NO: 96214 - DNA, 80 bp, synthetic construct
  misc_feature 1..80: note = Artificially Synthesized Probe
  source 1..80: mol_type = other DNA
ccaggccccaggcacagccgtcctgccagtgcgccgctcaccagacccaccccacccaccccacagaccccgcagcagtc

SEQ ID NO: 96215 - DNA, 80 bp, synthetic construct; identical to SEQ ID NO: 34416
  misc_feature 1..80: note = Artificially Synthesized Probe
  source 1..80: mol_type = other DNA

SEQ ID NO: 96216 - DNA, 80 bp, synthetic construct
  misc_feature 1..80: note = Artificially Synthesized Probe
  source 1..80: mol_type = other DNA
aaccccactgcctgcagagctgccggagaagcaggagcagctggctgccatctatgccgtcctggagcaccttccagaag

SEQ ID NO: 96217 - DNA, 80 bp, synthetic construct
  misc_feature 1..80: note = Artificially Synthesized Probe
  source 1..80: mol_type = other DNA
accactgttgggggttctgggagggggccaggctgctgggccgcccgggtcccttgaggtacctctctgtgctgcggaag

SEQ ID NO: 96218 - DNA, 80 bp, synthetic construct; identical to SEQ ID NO: 34417
  misc_feature 1..80: note = Artificially Synthesized Probe
  source 1..80: mol_type = other DNA

SEQ ID NO: 96219 - DNA, 80 bp, synthetic construct
  misc_feature 1..80: note = Artificially Synthesized Probe
  source 1..80: mol_type = other DNA
agctactttgggaggccaaggcaagaggatcacttgaggccaggagttcgagaccagcctgggcaacatagcaagaccct

SEQ ID NO: 96220 - DNA, 80 bp, synthetic construct
  misc_feature 1..80: note = Artificially Synthesized Probe
  source 1..80: mol_type = other DNA
tcccagcactttgggagggcgaggtgggtggatcacttgaagccaggagtttgagaccagcctgaccaacatggtgagac

SEQ ID NO: 96221 - DNA, 80 bp, synthetic construct; identical to SEQ ID NO: 34289
  misc_feature 1..80: note = Artificially Synthesized Probe
  source 1..80: mol_type = other DNA

SEQ ID NO: 96222 - DNA, 80 bp, synthetic construct
  misc_feature 1..80: note = Artificially Synthesized Probe
  source 1..80: mol_type = other DNA
tagccgggcgtggtggcgcatgcctgtaatcccagctacttgggaggctgaggcaggagaatcacttgaatccaggaggc

SEQ ID NO: 96223 - DNA, 80 bp, synthetic construct
  misc_feature 1..80: note = Artificially Synthesized Probe
  source 1..80: mol_type = other DNA
agatcgcaccactgcactccagctgggcaacagagtgagactccgtctcaaaaagaaaatttaaaaaaataaaaaatata

SEQ ID NO: 96224 - DNA, 80 bp, synthetic construct; identical to SEQ ID NO: 34418
  misc_feature 1..80: note = Artificially Synthesized Probe
  source 1..80: mol_type = other DNA

SEQ ID NO: 96225 - DNA, 80 bp, synthetic construct
  misc_feature 1..80: note = Artificially Synthesized Probe
  source 1..80: mol_type = other DNA
ccaccacgcccggctaattttttgtatttttagtagagacgaggtttcactatgttagccaggatgttctcgatctcctg

SEQ ID NO: 96226 - DNA, 80 bp, synthetic construct
  misc_feature 1..80: note = Artificially Synthesized Probe
  source 1..80: mol_type = other DNA
agctcacccaacctgagtccctctggtactgaccactccagactgagtccctctggtactgaccactccggactgagtcc

SEQ ID NO: 96227 - DNA, 80 bp, synthetic construct
  misc_feature 1..80: note = Artificially Synthesized Probe
  source 1..80: mol_type = other DNA
gaccactccaagctgggtccctctgatactgaccactccaggctgagttcctcccaataatgaccactccaagctgagtc

SEQ ID NO: 96228 - DNA, 80 bp, synthetic construct; identical to SEQ ID NO: 34419
  misc_feature 1..80: note = Artificially Synthesized Probe
  source 1..80: mol_type = other DNA

SEQ ID NO: 96229 - DNA, 80 bp, synthetic construct
  misc_feature 1..80: note = Artificially Synthesized Probe
  source 1..80: mol_type = other DNA
ggggcggtaactgagtcacttcctcccgtgggccttctctgtaggtgcgtggagatgctgatcaaggagcagatgaggaa

SEQ ID NO: 96230 - DNA, 80 bp, synthetic construct
  misc_feature 1..80: note = Artificially Synthesized Probe
  source 1..80: mol_type = other DNA
gtggctttgttgctgggaaggctggtgagtggggtcttggtgggcggggccttgggtgggcaggacctcccatgccgagg

SEQ ID NO: 96231 - DNA, 80 bp, synthetic construct; identical to SEQ ID NO: 34420
  misc_feature 1..80: note = Artificially Synthesized Probe
  source 1..80: mol_type = other DNA

SEQ ID NO: 96232 - DNA, 80 bp, synthetic construct
  misc_feature 1..80: note = Artificially Synthesized Probe
  source 1..80: mol_type = other DNA
ttcgtgtgtgtgtgtccatctttcccatactgcccatgagcgtttcttctaaaaaaaaaaaaaatcctcaacaggatcag

SEQ ID NO: 96233 - DNA, 80 bp, synthetic construct
  misc_feature 1..80: note = Artificially Synthesized Probe
  source 1..80: mol_type = other DNA
ggatgtatccccagctcatgcctgtgtctgtcttggcccgtgtggtcaccctgtgttcatctctctcccagccatggcct

SEQ ID NO: 96234 - DNA, 80 bp, synthetic construct
  misc_feature 1..80: note = Artificially Synthesized Probe
  source 1..80: mol_type = other DNA
tgctggggaggccccttgcctgctgaccttctgtgctcaggacgactaatcggccacatgaccaccactctgtcccatgg

SEQ ID NO: 96235 - DNA, 80 bp, synthetic construct
  misc_feature 1..80: note = Artificially Synthesized Probe
  source 1..80: mol_type = other DNA
caggaggaggagctggaggtgctgctggaggaggaggcagccggcggcgatgaggaccgggaaaaggagattctcattga

SEQ ID NO: 96236 - DNA, 80 bp, synthetic construct
  misc_feature 1..80: note = Artificially Synthesized Probe
  source 1..80: mol_type = other DNA
tttttttttttttttttttttgagacggcgtctcgctctgtcgcccagctggagtgcagtggtgctatctcggctcactg

SEQ ID NO: 96237 - DNA, 80 bp, synthetic construct
  misc_feature 1..80: note = Artificially Synthesized Probe
  source 1..80: mol_type = other DNA
ccacccaccttggcctcccaaagtgttgggattacaggcgtgagccaccgcactcggcctttatttctgagacagggtct

SEQ ID NO: 96238 - DNA, 80 bp, synthetic construct
  misc_feature 1..80: note = Artificially Synthesized Probe
  source 1..80: mol_type = other DNA
acagggtccgcctatgttgcccaggctgggttcaaactcctgggctcaagcaatcctcctgcttggggtggggggaggtt

SEQ ID NO: 96239 - DNA, 80 bp, synthetic construct
  misc_feature 1..80: note = Artificially Synthesized Probe
  source 1..80: mol_type = other DNA
aacctggactcggagacgtcggccagcaccgagagcctgctggaggagcgggccgggcggggggcctcggaaggtcagta

SEQ ID NO: 96240 - DNA, 80 bp, synthetic construct
  misc_feature 1..80: note = Artificially Synthesized Probe
  source 1..80: mol_type = other DNA
tcccttagcttgagaatgatttcatcctataaacatgtggcttcaaattatggccttatataaacgaaacggctacgcca

SEQ ID NO: 96241 - DNA, 80 bp, synthetic construct
  misc_feature 1..80: note = Artificially Synthesized Probe
  source 1..80: mol_type = other DNA
cccctccccaccgtggccgcccctccacgacgaaggccgtcgtccttcgtaacggtcagagtgaagaccccccggcggac

SEQ ID NO: 96242 - DNA, 80 bp, synthetic construct; identical to SEQ ID NO: 34422
  misc_feature 1..80: note = Artificially Synthesized Probe
  source 1..80: mol_type = other DNA

SEQ ID NO: 96243 - DNA, 80 bp, synthetic construct
  misc_feature 1..80: note = Artificially Synthesized Probe
  source 1..80: mol_type = other DNA
ctcaagagtgacgtgaggtgggcaccggccccaagtgcagagtcaaggcagggagaggccggctggagccaggccccctc

SEQ ID NO: 96244 - DNA, 80 bp, synthetic construct
  misc_feature 1..80: note = Artificially Synthesized Probe
  source 1..80: mol_type = other DNA
ttttatatgtgtatgtacaaagttttctattaacgctgcccgtctcccttataacctggacgtgagctgtcagagcagaa

SEQ ID NO: 96245 - DNA, 80 bp, synthetic construct; identical to SEQ ID NO: 34423
  misc_feature 1..80: note = Artificially Synthesized Probe
  source 1..80: mol_type = other DNA

SEQ ID NO: 96246 - DNA, 80 bp, synthetic construct
  misc_feature 1..80: note = Artificially Synthesized Probe
  source 1..80: mol_type = other DNA
ataggtcaacagggacaacctggggatctctggagcagggccctcctctctcaggcttggcccactcccccagacacctg

SEQ ID NO: 96247 - DNA, 80 bp, synthetic construct
  misc_feature 1..80: note = Artificially Synthesized Probe
  source 1..80: mol_type = other DNA
cagaatatgggtggaacactgtcctcaaagttctgtcttgatcctccaccaaacagggagctcccagcagagcctcactt

SEQ ID NO: 96248 - DNA, 80 bp, synthetic construct
  misc_feature 1..80: note = Artificially Synthesized Probe
  source 1..80: mol_type = other DNA
catcggatgggagtcgtgggaactggctggctggtattggttggggcaccgtgaagaacccaagttcagacagcacatgc

SEQ ID NO: 96249 - DNA, 80 bp, synthetic construct
  misc_feature 1..80: note = Artificially Synthesized Probe
  source 1..80: mol_type = other DNA
tgttgtgggtttttttcttgaaacacggtctcgctctgtcacccaggctggagtgcagtggcgcgatctcggcccactgc

SEQ ID NO: 96250 - DNA, 80 bp, synthetic construct; identical to SEQ ID NO: 34424
  misc_feature 1..80: note = Artificially Synthesized Probe
  source 1..80: mol_type = other DNA

SEQ ID NO: 96251 - DNA, 80 bp, synthetic construct
  misc_feature 1..80: note = Artificially Synthesized Probe
  source 1..80: mol_type = other DNA
ttgtcatgcctttccttgcacctcctttctatgagaacacaaggaaaaggccctgaattgagattggcattttttcagag

SEQ ID NO: 96252 - DNA, 80 bp, synthetic construct
  misc_feature 1..80: note = Artificially Synthesized Probe
  source 1..80: mol_type = other DNA
catccacctcctgggttcaagcgattctcctgcctcagtctcccaagtagctgggattacaggcacccaccatcacgccc

SEQ ID NO: 96253 - DNA, 80 bp, synthetic construct
  misc_feature 1..80: note = Artificially Synthesized Probe
  source 1..80: mol_type = other DNA
tgagccaccgcacctacccgtctatgatatttttcaaggacatcaggcccactggtgtaaccaaggtgcagatgacctaa

SEQ ID NO: 96254 - DNA, 80 bp, synthetic construct
  misc_feature 1..80: note = Artificially Synthesized Probe
  source 1..80: mol_type = other DNA
ctttgtgcagggtgcttttgattggcattcatttctcccctttcccaactgtagggatctttatctgggatctgccagaa

SEQ ID NO: 96255 - DNA, 80 bp, synthetic construct; identical to SEQ ID NO: 34290
  misc_feature 1..80: note = Artificially Synthesized Probe
  source 1..80: mol_type = other DNA

SEQ ID NO: 96256 - DNA, 80 bp, synthetic construct
  misc_feature 1..80: note = Artificially Synthesized Probe
  source 1..80: mol_type = other DNA
atttgtctgttctggcattctggacatttctataaatggagtcacaccccatatggtctttcgtgtctgacttctctcac

SEQ ID NO: 96257 - DNA, 80 bp, synthetic construct
  misc_feature 1..80: note = Artificially Synthesized Probe
  source 1..80: mol_type = other DNA
cagcctctgcctcccaggcccaagccatcttcccacctcagcctcctgagtagctgggattacaggcacacaccaccaca

SEQ ID NO: 96258 - DNA, 80 bp, synthetic construct; identical to SEQ ID NO: 34291
  misc_feature 1..80: note = Artificially Synthesized Probe
  source 1..80: mol_type = other DNA

SEQ ID NO: 96259 - DNA, 80 bp, synthetic construct
  misc_feature 1..80: note = Artificially Synthesized Probe
  source 1..80: mol_type = other DNA
gagtcaggtggtagagcgggtgtgttagccttggggtattttggtgagacaattcggtttaaggaaggaaacacgttttc

SEQ ID NO: 96260 - DNA, 80 bp, synthetic construct
  misc_feature 1..80: note = Artificially Synthesized Probe
  source 1..80: mol_type = other DNA
gaaccagggtattttccaagggcaggtttcacatccacttggggcagggatcttaagccacagtaagactaatttccagg

SEQ ID NO: 96261 - DNA, 80 bp, synthetic construct
  misc_feature 1..80: note = Artificially Synthesized Probe
  source 1..80: mol_type = other DNA
ggctccccaatccagggagggaaggattctttcacaaaaggcatgaaaacagttgcttccatgtttggaagcagttttgt

SEQ ID NO: 96262 - DNA, 80 bp, synthetic construct
  misc_feature 1..80: note = Artificially Synthesized Probe
  source 1..80: mol_type = other DNA
cgcccagctaattttttaattttttatagagatggcgtcttgtggccaggcacagtggctcacacctgtaatcccagcac

SEQ ID NO: 96263 - DNA, 80 bp, synthetic construct; identical to SEQ ID NO: 34292
  misc_feature 1..80: note = Artificially Synthesized Probe
  source 1..80: mol_type = other DNA

SEQ ID NO: 96264 - DNA, 80 bp, synthetic construct
  misc_feature 1..80: note = Artificially Synthesized Probe
  source 1..80: mol_type = other DNA
cctgtgaccgtccccttcagccccatctctgagagtggggtttcctgagagtctgcccttctgccccgcacaccaggggc

SEQ ID NO: 96265 - DNA, 80 bp, synthetic construct
  misc_feature 1..80: note = Artificially Synthesized Probe
  source 1..80: mol_type = other DNA
tcagtgggtggcagaggctgccgggagcagaagaaagagcccatccttgggttctcctggcttctcgctcagagctgctc

SEQ ID NO: 96266 - DNA, 80 bp, synthetic construct
  misc_feature 1..80: note = Artificially Synthesized Probe
  source 1..80: mol_type = other DNA
catgcagtgacagcccacagtcatgcctcctgcaaacattgaactgtaggcttgcactggcctacagaacaggaccggga

SEQ ID NO: 96267 - DNA, 80 bp, synthetic construct
  misc_feature 1..80: note = Artificially Synthesized Probe
  source 1..80: mol_type = other DNA
ctcgctgtgtgcacatacacaggtgtacgcatgtatgtaggcatgaacatgtgggtggacatgtgcatgcaagtgttttg

SEQ ID NO: 96268 - DNA, 80 bp, synthetic construct; identical to SEQ ID NO: 34293
  misc_feature 1..80: note = Artificially Synthesized Probe
  source 1..80: mol_type = other DNA

SEQ ID NO: 96269 - DNA, 80 bp, synthetic construct
  misc_feature 1..80: note = Artificially Synthesized Probe
  source 1..80: mol_type = other DNA
aagcgcttgcacatatgttttttcatacctgtgtccttgtatgcatgtgcatgcatgtgagtgtgtatacaagcatatga

SEQ ID NO: 96270 - DNA, 80 bp, synthetic construct
  misc_feature 1..80: note = Artificially Synthesized Probe
  source 1..80: mol_type = other DNA
gaagtgtgtgtattcacatgtgtttcctctgtgtacatgcaagcacatggaagtacatatgccagtgcacacacacattc

SEQ ID NO: 96271 - DNA, 80 bp, synthetic construct
  misc_feature 1..80: note = Artificially Synthesized Probe
  source 1..80: mol_type = other DNA
accaacatggtgaaaccctgtctcaaccaaaaatacaaaaaattagctgggcgtggtggtgcacgcctgtaatcccaact

SEQ ID NO: 96272 - DNA, 80 bp, synthetic construct; identical to SEQ ID NO: 34294
  misc_feature 1..80: note = Artificially Synthesized Probe
  source 1..80: mol_type = other DNA

SEQ ID NO: 96273 - DNA, 80 bp, synthetic construct
  misc_feature 1..80: note = Artificially Synthesized Probe
  source 1..80: mol_type = other DNA
aaagataaactcctggggaaatgggatcttttaaatccatgtaatttttaaagcagtttttttgcggggggtgggggggg

SEQ ID NO: 96274 - DNA, 80 bp, synthetic construct
  misc_feature 1..80: note = Artificially Synthesized Probe
  source 1..80: mol_type = other DNA
tatttatttatttatttatttatttatttatttactttgtagagttacctagttgtgtggcccaggctggtgtcaaattc

SEQ ID NO: 96275 - DNA, 80 bp, synthetic construct
  misc_feature 1..80: note = Artificially Synthesized Probe
  source 1..80: mol_type = other DNA
ctcggcacactgcaatctccacctcccgagttcaagggattctcctgcctcagcctcccgagtagctgggattacaggca

SEQ ID NO: 96276 - DNA, 80 bp, synthetic construct; identical to SEQ ID NO: 34277
  misc_feature 1..80: note = Artificially Synthesized Probe
  source 1..80: mol_type = other DNA

SEQ ID NO: 96277 - DNA, 80 bp, synthetic construct; identical to SEQ ID NO: 34295
  misc_feature 1..80: note = Artificially Synthesized Probe
  source 1..80: mol_type = other DNA

SEQ ID NO: 96278 - DNA, 80 bp, synthetic construct
  misc_feature 1..80: note = Artificially Synthesized Probe
  source 1..80: mol_type = other DNA
tacagtataggctctttttaaaacttaattaaggaaaagtcacaaaaggtaaaattcaccatctaaagtgtgtaatttgg

SEQ ID NO: 96279 - DNA, 80 bp, synthetic construct
  misc_feature 1..80: note = Artificially Synthesized Probe
  source 1..80: mol_type = other DNA
aaatacaaaaattaggcaggcgtggtggcatgtgcctgtagtcccagctgctcaggaggctgaggtgagaggtttgcttg

SEQ ID NO: 96280 - DNA, 80 bp, synthetic construct
  misc_feature 1..80: note = Artificially Synthesized Probe
  source 1..80: mol_type = other DNA
tgaagtcaggagttccagaccagcctggccaacatggcgaaactctgtctctaccaaaaatagaaaaattagctcggtgt

SEQ ID NO: 96281 - DNA, 80 bp, synthetic construct; identical to SEQ ID NO: 34296
  misc_feature 1..80: note = Artificially Synthesized Probe
  source 1..80: mol_type = other DNA

SEQ ID NO: 96282 - DNA, 80 bp, synthetic construct
  misc_feature 1..80: note = Artificially Synthesized Probe
  source 1..80: mol_type = other DNA
gcttttttgcgtctggcttctctcagcttcatgtttttggggttcatccatgttgtagcacggagcagtggttccttcct

SEQ ID NO: 96283 - DNA, 80 bp, synthetic construct
  misc_feature 1..80: note = Artificially Synthesized Probe
  source 1..80: mol_type = other DNA
tgggtctatacctgggagcagaattgctacgtctgtatgtagttatgtaatctcttttgtcaggcttcttcttttttttg

SEQ ID NO: 96284 - DNA, 80 bp, synthetic construct
  misc_feature 1..80: note = Artificially Synthesized Probe
  source 1..80: mol_type = other DNA
acatgcgcccccccaccacgcctggcgaatttttttttggttttgtatttttagtagagaaggggtttcaccgtgttagc

SEQ ID NO: 96285 - DNA, 80 bp, synthetic construct; identical to SEQ ID NO: 34297
  misc_feature 1..80: note = Artificially Synthesized Probe
  source 1..80: mol_type = other DNA

SEQ ID NO: 96286 - DNA, 80 bp, synthetic construct
  misc_feature 1..80: note = Artificially Synthesized Probe
  source 1..80: mol_type = other DNA
gagaggggaattgcagggtcacgtgctaggtatgtgttttaacattgaaagaaactgctgaagtgttttctaaagcagat

SEQ ID NO: 96287 - DNA, 80 bp, synthetic construct
  misc_feature 1..80: note = Artificially Synthesized Probe
  source 1..80: mol_type = other DNA
aaaaattagctgggcatggtggtacagtcagaggatcacttgagcccaggaggtcgaggctgcagtgagctgagatcatg

SEQ ID NO: 96288 - DNA, 80 bp, synthetic construct
  misc_feature 1..80: note = Artificially Synthesized Probe
  source 1..80: mol_type = other DNA
aatagaaaattgcggtgttgaaggtgcttttgcacattgcacctattcccaaagctttggaaactgcaaatttctggaaa

SEQ ID NO: 96289 - DNA, 80 bp, synthetic construct
  misc_feature 1..80: note = Artificially Synthesized Probe
  source 1..80: mol_type = other DNA
gttggttttttttttttttttggagacggagtctcgctctgtcgcccaggctggagtgcagtggcatgatctcagctcac

SEQ ID NO: 96290 - DNA, 80 bp, synthetic construct; identical to SEQ ID NO: 34298
  misc_feature 1..80: note = Artificially Synthesized Probe
  source 1..80: mol_type = other DNA

SEQ ID NO: 96291 - DNA, 80 bp, synthetic construct
  misc_feature 1..80: note = Artificially Synthesized Probe
  source 1..80: mol_type = other DNA
atggtggtgggcccctgtaatcccagctactcaggaggctgaggcagtagagttggttcagcccaacaggcggaggttgc

SEQ ID NO: 96292 - DNA, 80 bp, synthetic construct
  misc_feature 1..80: note = Artificially Synthesized Probe
  source 1..80: mol_type = other DNA
agctttatctcatgacctggaggaacatacaaatgcactgacatatcaaggaaagaattaggttttacagctaaatggat

SEQ ID NO: 96293 - DNA, 80 bp, synthetic construct
  misc_feature 1..80: note = Artificially Synthesized Probe
  source 1..80: mol_type = other DNA
tgcctcggcctcataagttatcgtttctttcagcctcagcccttctaacacttctgcaggaattctcagagcctctagtg

SEQ ID NO: 96294 - DNA, 80 bp, synthetic construct; identical to SEQ ID NO: 34299
  misc_feature 1..80: note = Artificially Synthesized Probe
  source 1..80: mol_type = other DNA

SEQ ID NO: 96295 - DNA, 80 bp, synthetic construct
  misc_feature 1..80: note = Artificially Synthesized Probe
  source 1..80: mol_type = other DNA
cagaatgcagtggcatgattgcggctcgctacaaccttcacctcccagattcaagcgattctcctgcctcagcctcccaa

SEQ ID NO: 96296 - DNA, 80 bp, synthetic construct
  misc_feature 1..80: note = Artificially Synthesized Probe
  source 1..80: mol_type = other DNA
accgcgcctggtcttagaacccctcttagatattcctactcccctaatgtcttctcttgtcctttaggataatcactcct

SEQ ID NO: 96297 - DNA, 80 bp, synthetic construct; identical to SEQ ID NO: 34300
  misc_feature 1..80: note = Artificially Synthesized Probe
  source 1..80: mol_type = other DNA

SEQ ID NO: 96298 - DNA, 80 bp, synthetic construct
  misc_feature 1..80: note = Artificially Synthesized Probe
  source 1..80: mol_type = other DNA
ttaacttgctgcttcccattcctcatctcttccaaatggtgtgtcttgggtgggcctagatttcagttaggcaagggttg

SEQ ID NO: 96299 - DNA, 80 bp, synthetic construct
  misc_feature 1..80: note = Artificially Synthesized Probe
  source 1..80: mol_type = other DNA
ctacttgtgaggcagaggtgagaggatcacatgagcccagggagatcaagtctgcagtgagccgtgatcatgccaatgca

SEQ ID NO: 96300 - DNA, 80 bp, synthetic construct
  misc_feature 1..80: note = Artificially Synthesized Probe
  source 1..80: mol_type = other DNA
gtcaagagattgagaccatcctggccaacatggtgaaaccccgtctctactaaaaatacaaaaattagttgggcatggtg

SEQ ID NO: 96301 - DNA, 80 bp, synthetic construct
  misc_feature 1..80: note = Artificially Synthesized Probe
  source 1..80: mol_type = other DNA
ttttggggagctaaacaatctatatacgtggacataacagagcagaatagttattggggactgcagaaggtgatgggggg

SEQ ID NO: 96302 - DNA, 80 bp, synthetic construct; identical to SEQ ID NO: 34301
  misc_feature 1..80: note = Artificially Synthesized Probe
  source 1..80: mol_type = other DNA

SEQ ID NO: 96303 - DNA, 80 bp, synthetic construct
  misc_feature 1..80: note = Artificially Synthesized Probe
  source 1..80: mol_type = other DNA
tggctaacatggtgaaactccatctctactaaaaatacaaaaaaaaattagccaggcgcggtggcgggcgcctgttgtct

SEQ ID NO: 96304 - DNA, 80 bp, synthetic construct
  misc_feature 1..80: note = Artificially Synthesized Probe
  source 1..80: mol_type = other DNA
ttgctggggatgaggtggaagcgagacggtgaaggagaaagtggatggggatggagctggtgagggagttcgagggcgtg

SEQ ID NO: 96305 - DNA, 80 bp, synthetic construct
  misc_feature 1..80: note = Artificially Synthesized Probe
  source 1..80: mol_type = other DNA
aatcccagcactttgggaggccgaggaggatggatcacctgaggtcaggagttcgagaccagcctggccaacatagtgaa

SEQ ID NO: 96306 - DNA, 80 bp, synthetic construct
  misc_feature 1..80: note = Artificially Synthesized Probe
  source 1..80: mol_type = other DNA
acaaagagcgaaactccatctcaaaaaaaaaaaagcccagacttcaccactacacgatatatgtgtataagaaacctgca

SEQ ID NO: 96307 - DNA, 80 bp, synthetic construct
  misc_feature 1..80: note = Artificially Synthesized Probe
  source 1..80: mol_type = other DNA
gcatgcctatagtcccagctactcaggaggctgaggcagaagaattgcttgaacccaggcagcagaggttgcagtgagcc

SEQ ID NO: 96308 - DNA, 80 bp, synthetic construct; identical to SEQ ID NO: 34302
  misc_feature 1..80: note = Artificially Synthesized Probe
  source 1..80: mol_type = other DNA

SEQ ID NO: 96309 - DNA, 80 bp, synthetic construct
  misc_feature 1..80: note = Artificially Synthesized Probe
  source 1..80: mol_type = other DNA
cccggacttcatcttcctaggttgggtttcaaggaccctggagttttgggaatcccaaatttcaggacaggttcagtctt

SEQ ID NO: 96310 - DNA, 80 bp, synthetic construct
  misc_feature 1..80: note = Artificially Synthesized Probe
  source 1..80: mol_type = other DNA
gaggccaaggtgggtggatcacaaggtcaggagttcaagaccagcctgaccaatatggagaaaccctgtctccactaaaa

SEQ ID NO: 96311 - DNA, 80 bp, synthetic construct
  misc_feature 1..80: note = Artificially Synthesized Probe
  source 1..80: mol_type = other DNA
tgggcttcaggattgagaggctgcctctggatggggtgggatgggggctgggatggagcaaactcaggggaagggtcagg

SEQ ID NO: 96312 - DNA, 80 bp, synthetic construct
  misc_feature 1..80: note = Artificially Synthesized Probe
  source 1..80: mol_type = other DNA
tgaggagctgggaccacaggcgagcaccactatgcctttattttttgtagagacggggtctcgctatgttgcccaggctg

SEQ ID NO: 96313 - DNA, 80 bp, synthetic construct; identical to SEQ ID NO: 34303
  misc_feature 1..80: note = Artificially Synthesized Probe
  source 1..80: mol_type = other DNA

SEQ ID NO: 96314 - DNA, 80 bp, synthetic construct
  misc_feature 1..80: note = Artificially Synthesized Probe
  source 1..80: mol_type = other DNA
acccccagctgtccaccaccgagagccaggcctcgtgccgcgtgactgccaccaaggacagcaccacctcggacgtcatc

SEQ ID NO: 96315 - DNA, 80 bp, synthetic construct
  misc_feature 1..80: note = Artificially Synthesized Probe
  source 1..80: mol_type = other DNA
aggatggctactacttcctgctgcaggagcgcaacgcagatggaaccatcaagtacgtgcatatgcagctggtggcgcag

SEQ ID NO: 96316 - DNA, 80 bp, synthetic construct; identical to SEQ ID NO: 34304
  misc_feature 1..80: note = Artificially Synthesized Probe
  source 1..80: mol_type = other DNA

SEQ ID NO: 96317 - DNA, 80 bp, synthetic construct
  misc_feature 1..80: note = Artificially Synthesized Probe
  source 1..80: mol_type = other DNA
agggctacgccagcggcgtcgagaggaccatcctgggtgctggccctgtgctggaggtgagcggggaagctggtcggtct

SEQ ID NO: 96318 - DNA, 80 bp, synthetic construct
  misc_feature 1..80: note = Artificially Synthesized Probe
  source 1..80: mol_type = other DNA
aaaaaaaaataattagccaggcaggcatagtagtgctcacctgtagtcccagctgctcaggaggctgaggcaggaggatc

SEQ ID NO: 96319 - DNA, 80 bp, synthetic construct
  misc_feature 1..80: note = Artificially Synthesized Probe
  source 1..80: mol_type = other DNA
tgaggcaagaggatcgcttgagcccaggaattcaacatcagcctggtcaacacagcaaggccccctctctacaaaaaaaa

SEQ ID NO: 96320 - DNA, 80 bp, synthetic construct; identical to SEQ ID NO: 34305
  misc_feature 1..80: note = Artificially Synthesized Probe
  source 1..80: mol_type = other DNA

SEQ ID NO: 96321 - DNA, 80 bp, synthetic construct; identical to SEQ ID NO: 34278
  misc_feature 1..80: note = Artificially Synthesized Probe
  source 1..80: mol_type = other DNA

SEQ ID NO: 96322 - DNA, 80 bp, synthetic construct
  misc_feature 1..80: note = Artificially Synthesized Probe
  source 1..80: mol_type = other DNA
caggaaactttattgtgattttcatgcatcagaatgtgctaggcagagtaagctggcttaggattggcttgtttgaatta

SEQ ID NO: 96323 - DNA, 80 bp, synthetic construct
  misc_feature 1..80: note = Artificially Synthesized Probe
  source 1..80: mol_type = other DNA
cccaaaccatctctaggaactggctagaatcaatctaggaattgggaagggccgtctccctggggtcagccaggccccag

SEQ ID NO: 96324 - DNA, 80 bp, synthetic construct
  misc_feature 1..80: note = Artificially Synthesized Probe
  source 1..80: mol_type = other DNA
cctggccaacatgatgaaacctcgtttctactaaaaatataaaaattagccaggcatgatggtgtgtgcctgtaatccca

SEQ ID NO: 96325 - DNA, 80 bp, synthetic construct; identical to SEQ ID NO: 34306
  misc_feature 1..80: note = Artificially Synthesized Probe
  source 1..80: mol_type = other DNA

SEQ ID NO: 96326 - DNA, 80 bp, synthetic construct
  misc_feature 1..80: note = Artificially Synthesized Probe
  source 1..80: mol_type = other DNA
ctctgcccactgttcattgccctgatcagccaaaccccacaggagccctcgatgtgccactgtgggtgagtcttgtggcc

SEQ ID NO: 96327 - DNA, 80 bp, synthetic construct
  misc_feature 1..80: note = Artificially Synthesized Probe
  source 1..80: mol_type = other DNA
tttttcatttttattttattttttgtagagatgggggtctcactgtattccccaggctggtctcgaactcctggatgcca

SEQ ID NO: 96328 - DNA, 80 bp, synthetic construct
  misc_feature 1..80: note = Artificially Synthesized Probe
  source 1..80: mol_type = other DNA
cccctcccacgcccaggttctcacattatttatattttgcattcgtgtggtgtgttggttgcacctgactcaactctacg

SEQ ID NO: 96329 - DNA, 80 bp, synthetic construct; identical to SEQ ID NO: 34307
  misc_feature 1..80: note = Artificially Synthesized Probe
  source 1..80: mol_type = other DNA

SEQ ID NO: 96330 - DNA, 80 bp, synthetic construct
  misc_feature 1..80: note = Artificially Synthesized Probe
  source 1..80: mol_type = other DNA
caagaccctgtctctaccaaaaaaaaaaaaaaaaaaaaaaaaaattagccaggtgtggtggtgtttgcctgtggtccccc

SEQ ID NO: 96331 - DNA, 80 bp, synthetic construct
  misc_feature 1..80: note = Artificially Synthesized Probe
  source 1..80: mol_type = other DNA
gagctcatttcttttgctgaattgtagctcattatatgaatgtgtcagtttcttcacacgtaggatcctgagagccccct

SEQ ID NO: 96332 - DNA, 80 bp, synthetic construct
  misc_feature 1..80: note = Artificially Synthesized Probe
  source 1..80: mol_type = other DNA
taagcagtgcctaggaatacatttcagttcctcttcctctctgaggtcatcagtaagacattaattggggtcatacaact

SEQ ID NO: 96333 - DNA, 80 bp, synthetic construct
  misc_feature 1..80: note = Artificially Synthesized Probe
  source 1..80: mol_type = other DNA
ctgtacagggcatcccagctctctcattctgccaaccggcagtgcgagggtccttgttcttatcttcctgatacagaaac

SEQ ID NO: 96334 - DNA, 80 bp, synthetic construct
  misc_feature 1..80: note = Artificially Synthesized Probe
  source 1..80: mol_type = other DNA
ctgtgcaagtaacacagagattcattgtcattgtttacatcagcttttaataaaactgctgagcaatttcaccatagaat

SEQ ID NO: 96335 - DNA, 80 bp, synthetic construct; identical to SEQ ID NO: 34308
  misc_feature 1..80: note = Artificially Synthesized Probe
  source 1..80: mol_type = other DNA

SEQ ID NO: 96336 - DNA, 80 bp, synthetic construct
  misc_feature 1..80: note = Artificially Synthesized Probe
  source 1..80: mol_type = other DNA
tgatataggtgctgggctatgtggtggccaaagtcaacacaaaattctccccaggtagaactcggggaagactctgggtg

SEQ ID NO: 96337 - DNA, 80 bp, synthetic construct
  misc_feature 1..80: note = Artificially Synthesized Probe
  source 1..80: mol_type = other DNA
caggccaaaacatcagtgcctggcatccacacccgagataaaacagtgatcttgaaaattcagcatgtgtggcacacacc

SEQ ID NO: 96338 - DNA, 80 bp, synthetic construct
  misc_feature 1..80: note = Artificially Synthesized Probe
  source 1..80: mol_type = other DNA
ggaggccaaggcaggtggatcacctgaggtcaagagttcgagaccagcctggcaaacatggtgaaaccccgtctctacta

SEQ ID NO: 96339 - DNA, 80 bp, synthetic construct; identical to SEQ ID NO: 34309
  misc_feature 1..80: note = Artificially Synthesized Probe
  source 1..80: mol_type = other DNA

SEQ ID NO: 96340 - DNA, 80 bp, synthetic construct
  misc_feature 1..80: note = Artificially Synthesized Probe
  source 1..80: mol_type = other DNA
tgaatgaatgagagggtagatccaacatttaccatgtcagacattttgccaaatgggactaggcaggtgggtaaatgcct

SEQ ID NO: 96341 - DNA, 80 bp, synthetic construct
  misc_feature 1..80: note = Artificially Synthesized Probe
  source 1..80: mol_type = other DNA
cagcgccatctcactaggaccctccagggcgtggacaagtttcctgttgctaagtgttaggggcaagggagtctccaaca

SEQ ID NO: 96342 - DNA, 80 bp, synthetic construct; identical to SEQ ID NO: 34310
  misc_feature 1..80: note = Artificially Synthesized Probe
  source 1..80: mol_type = other DNA

SEQ ID NO: 96343 - DNA, 80 bp, synthetic construct
  misc_feature 1..80: note = Artificially Synthesized Probe
  source 1..80: mol_type = other DNA
tacagccccacctggtctgcttcaagtcctacctggcccctggcaagtcccacttggtgacatcttgtgcctgggtcctt

SEQ ID NO: 96344 - DNA, 80 bp, synthetic construct
  misc_feature 1..80: note = Artificially Synthesized Probe
  source 1..80: mol_type = other DNA
ctgcttggggcctcagcagcgggggctggcgaggccagttttctccagcggttctaagccgctcgagggtggtgcccacg

SEQ ID NO: 96345 - DNA, 80 bp, synthetic construct
  misc_feature 1..80: note = Artificially Synthesized Probe
  source 1..80: mol_type = other DNA
gtgtccctggctgtcacccatgagatgccagtagtattccatcccctccaaggggtaacaactgaaaatgactccagcca

SEQ ID NO: 96346 - DNA, 80 bp, synthetic construct
  misc_feature 1..80: note = Artificially Synthesized Probe
  source 1..80: mol_type = other DNA
ctgctgacattcagggccggatcgttctctggggagggagtcatcctgtgcattgaaggacattgagcagcatccctggc

SEQ ID NO: 96347 - DNA, 80 bp, synthetic construct; identical to SEQ ID NO: 34311
  misc_feature 1..80: note = Artificially Synthesized Probe
  source 1..80: mol_type = other DNA

SEQ ID NO: 96348 - DNA, 80 bp, synthetic construct
  misc_feature 1..80: note = Artificially Synthesized Probe
  source 1..80: mol_type = other DNA
caccaccgtgcccggctaatgtttgtatttttagtagagacgggtttcaccatagtggccaggctggtctcaaactcctg

SEQ ID NO: 96349 - DNA, 80 bp, synthetic construct
  misc_feature 1..80: note = Artificially Synthesized Probe
  source 1..80: mol_type = other DNA
tgtctccgggctggagtgcagtggcgcgatctcggctcactgcaagttctgcctcccgggttcgtgccattctcctgcct

SEQ ID NO: 96350 - DNA, 80 bp, synthetic construct
  misc_feature 1..80: note = Artificially Synthesized Probe
  source 1..80: mol_type = other DNA
agcatgagccactgcgcccggccatcattttctaataagaggaataagacctcaggcccactgggtatcagggtttgggc

SEQ ID NO: 96351 - DNA, 80 bp, synthetic construct
  misc_feature 1..80: note = Artificially Synthesized Probe
  source 1..80: mol_type = other DNA
tctctcacagttctggaggccagaagttgaaaatcaaggtgtgggcagggctgggtccctctggaggctctgagggagaa

SEQ ID NO: 96352 - DNA, 80 bp, synthetic construct; identical to SEQ ID NO: 34312
  misc_feature 1..80: note = Artificially Synthesized Probe
  source 1..80: mol_type = other DNA

SEQ ID NO: 96353 - DNA, 80 bp, synthetic construct
  misc_feature 1..80: note = Artificially Synthesized Probe
  source 1..80: mol_type = other DNA
tgcagaaagccggagatcagcacaactcgctgcatcgattggggattttttctcagctccccgaaaggagaagttgagct

SEQ ID NO: 96354 - DNA, 80 bp, synthetic construct
  misc_feature 1..80: note = Artificially Synthesized Probe
  source 1..80: mol_type = other DNA
tcacctttcaccaagtctaggggctgcagaagccatgagtctccccatcttccacatggcctctagcctcccagtgcagg

SEQ ID NO: 96355 - DNA, 80 bp, synthetic construct
  misc_feature 1..80: note = Artificially Synthesized Probe
  source 1..80: mol_type = other DNA
agggggccaaaggctggggttcccttcatctgtcctgaactgtagcaagtgcagctggcagctggcagcgtgcatggggt

SEQ ID NO: 96356 - DNA, 80 bp, synthetic construct
  misc_feature 1..80: note = Artificially Synthesized Probe
  source 1..80: mol_type = other DNA
cagagaccaggaactgaatcctgccatccagtcagttcttaatcaggagggagcgggtcttgataaaaaggaggaaccgt

SEQ ID NO: 96357 - DNA, 80 bp, synthetic construct; identical to SEQ ID NO: 34313
  misc_feature 1..80: note = Artificially Synthesized Probe
  source 1..80: mol_type = other DNA

SEQ ID NO: 96358 - DNA, 80 bp, synthetic construct
  misc_feature 1..80: note = Artificially Synthesized Probe
  source 1..80: mol_type = other DNA
gtcagcactggggtaggtcacctagaccacagtgccattatccacttcgacctctgccctcaaggacacctgcctgggcc

SEQ ID NO: 96359 - DNA, 80 bp, synthetic construct
  misc_feature 1..80: note = Artificially Synthesized Probe
  source 1..80: mol_type = other DNA
gcaagggtggcagagatagaagtttctggaaccaggtgtgtgtcaactctcatgcctctgaagttgaggttcctgtttaa

SEQ ID NO: 96360 - DNA, 80 bp, synthetic construct
  misc_feature 1..80: note = Artificially Synthesized Probe
  source 1..80: mol_type = other DNA
agcctcaaattcctggcctcaagtgatcctcccacctcagcctctcaagcagctgagaatacaggtgcacaccaccaccc

SEQ ID NO: 96361 - DNA, 80 bp, synthetic construct; identical to SEQ ID NO: 34314
  misc_feature 1..80: note = Artificially Synthesized Probe
  source 1..80: mol_type = other DNA

SEQ ID NO: 96362 - DNA, 80 bp, synthetic construct
  misc_feature 1..80: note = Artificially Synthesized Probe
  source 1..80: mol_type = other DNA
atcatattccacggtatggatggaggatggaccataatttgtttctctgcccaccagttgtatcagcatttcattccttt

SEQ ID NO: 96363 - DNA, 80 bp, synthetic construct
  misc_feature 1..80: note = Artificially Synthesized Probe
  source 1..80: mol_type = other DNA
gcagtcctctccagcaggctgcttcgggcgtgctaatggctggagccaccgagggacaccaggtgggaccaggagccggg

SEQ ID NO: 96364 - DNA, 80 bp, synthetic construct
  misc_feature 1..80: note = Artificially Synthesized Probe
  source 1..80: mol_type = other DNA
gccctggactcgggcaggagcgtttgcacgtggcttcccaagtgcgacagagagggagtcctgggagcaaccccagccgc

SEQ ID NO: 96365 - DNA, 80 bp, synthetic construct; identical to SEQ ID NO: 34279
  misc_feature 1..80: note = Artificially Synthesized Probe
  source 1..80: mol_type = other DNA

SEQ ID NO: 96366 - DNA, 80 bp, synthetic construct; identical to SEQ ID NO: 34315
  misc_feature 1..80: note = Artificially Synthesized Probe
  source 1..80: mol_type = other DNA

SEQ ID NO: 96367 - DNA, 80 bp, synthetic construct
  misc_feature 1..80: note = Artificially Synthesized Probe
  source 1..80: mol_type = other DNA
atgagattcagggcataggccacagaccggaggaggctcagggtcaggacggggccaaggcctcagaaggcagaagtcac

SEQ ID NO: 96368 - DNA, 80 bp, synthetic construct
  misc_feature 1..80: note = Artificially Synthesized Probe
  source 1..80: mol_type = other DNA
gaccacttgtcactttgctgggctgagggagaaggaaggtggggcgtcagtgggcagcagggtgggcagcaagcttgggc

SEQ ID NO: 96369 - DNA, 80 bp, synthetic construct
  misc_feature 1..80: note = Artificially Synthesized Probe
  source 1..80: mol_type = other DNA
ggctctcaggagtttcccccctgctcgccctgcgagcggtcaagactcaggctagcccaggccatccgaaaggctaaaca

SEQ ID NO: 96370 - DNA, 80 bp, synthetic construct; identical to SEQ ID NO: 34316
  misc_feature 1..80: note = Artificially Synthesized Probe
  source 1..80: mol_type = other DNA

SEQ ID NO: 96371 - DNA, 80 bp, synthetic construct
  misc_feature 1..80: note = Artificially Synthesized Probe
  source 1..80: mol_type = other DNA
tcagaaacccttggggacagaggccaggcttcctggtccaacccaagttcccaacccctgccctgttgatatgtgggctg

SEQ ID NO: 96372 - DNA, 80 bp, synthetic construct
  misc_feature 1..80: note = Artificially Synthesized Probe
  source 1..80: mol_type = other DNA
ccagttgagaactgctgttttaggccaactgtatgacaagatagatttcattgtaacagatggtctctgcctaaatattt

SEQ ID NO: 96373 - DNA, 80 bp, synthetic construct
  misc_feature 1..80: note = Artificially Synthesized Probe
  source 1..80: mol_type = other DNA
cctctcactcattgcccacccagagcccaggggacggtcactgctcacccacgatcaggcatgtcctcgtgtcaccgatg

SEQ ID NO: 96374 - DNA, 80 bp, synthetic construct; identical to SEQ ID NO: 34317
  misc_feature 1..80: note = Artificially Synthesized Probe
  source 1..80: mol_type = other DNA

SEQ ID NO: 96375 - DNA, 80 bp, synthetic construct
  misc_feature 1..80: note = Artificially Synthesized Probe
  source 1..80: mol_type = other DNA
gaaccactgccgggaaacaggatcagcggccagagattccccactttggcagaaccatgacacgtttcattatctctttt

SEQ ID NO: 96376 - DNA, 80 bp, synthetic construct
  misc_feature 1..80: note = Artificially Synthesized Probe
  source 1..80: mol_type = other DNA
ctctggggccacgggactgacggtcccttctgggtgctgcccccacaccccacccaccagccctttgtgtgcccggcatc

SEQ ID NO: 96377 - DNA, 80 bp, synthetic construct
  misc_feature 1..80: note = Artificially Synthesized Probe
  source 1..80: mol_type = other DNA
cctgtcgcccaagctgaggtgcagtggtccagtcatagttcactgcagcctcaacctcctaggctcaagtgagcctcctg

SEQ ID NO: 96378 - DNA, 80 bp, synthetic construct
  misc_feature 1..80: note = Artificially Synthesized Probe
  source 1..80: mol_type = other DNA
ctatctctacaaataaagttttattggtgcataaccatgcccatgcatttacatatcatccctggcatctttggcaccat

SEQ ID NO: 96379 - DNA, 80 bp, synthetic construct; identical to SEQ ID NO: 34318
  misc_feature 1..80: note = Artificially Synthesized Probe
  source 1..80: mol_type = other DNA

SEQ ID NO: 96380 - DNA, 80 bp, synthetic construct
  misc_feature 1..80: note = Artificially Synthesized Probe
  source 1..80: mol_type = other DNA
caacacctggctaatttttgtatttttagtagaaatggggattcaccatgttggcctggctggtctcaaactcctgacct

SEQ ID NO: 96381 - DNA, 80 bp, synthetic construct
  misc_feature 1..80: note = Artificially Synthesized Probe
  source 1..80: mol_type = other DNA
gctggaatctctgcatttgtatccgtgccatagacatacatacgtattcataaacatccatttccccacacagagtcata

SEQ ID NO: 96382 - DNA, 80 bp, synthetic construct
  misc_feature 1..80: note = Artificially Synthesized Probe
  source 1..80: mol_type = other DNA
tccttgccttgaaccccctcacagggctgaacatcagcaggccccatctcttgaagggtttccagctgcctcctgggctc

SEQ ID NO: 96383 - DNA, 80 bp, synthetic construct; identical to SEQ ID NO: 34319
  misc_feature 1..80: note = Artificially Synthesized Probe
  source 1..80: mol_type = other DNA

SEQ ID NO: 96384 - DNA, 80 bp, synthetic construct
  misc_feature 1..80: note = Artificially Synthesized Probe
  source 1..80: mol_type = other DNA
gtggtcattgtgacccggcagcattcccagccctggtgccttttccccagctctggagacaaaccagcaggcctgggtgt

SEQ ID NO: 96385 - DNA, 80 bp, synthetic construct
  misc_feature 1..80: note = Artificially Synthesized Probe
  source 1..80: mol_type = other DNA
gtgccctacagctgagtgctgaggctggaggctgcattgacccccaggtagaaggggcaccccaccgccacccccaaatc

SEQ ID NO: 96386 - DNA, 80 bp, synthetic construct; identical to SEQ ID NO: 34320
  misc_feature 1..80: note = Artificially Synthesized Probe
  source 1..80: mol_type = other DNA

SEQ ID NO: 96387 - DNA, 80 bp, synthetic construct
  misc_feature 1..80: note = Artificially Synthesized Probe
  source 1..80: mol_type = other DNA
tatccaggatagatccgatttctgcaggcctcgccctgggcagctcagtccccaatgtcacagtgcagttgccacctaag

SEQ ID NO: 96388 - DNA, 80 bp, synthetic construct
  misc_feature 1..80: note = Artificially Synthesized Probe
  source 1..80: mol_type = other DNA
cagagccccgttccctttcaatttctatcgtggctgggaaagagcctcagagattaggcatgtttcagaaatgcagctga

SEQ ID NO: 96389 - DNA, 80 bp, synthetic construct
  misc_feature 1..80: note = Artificially Synthesized Probe
  source 1..80: mol_type = other DNA
gaaagaaagggatgacttagcagtggtcaggcaccagcacccaacaccttccctagagggggttctctgtaaatcccgga

SEQ ID NO: 96390 - DNA, 80 bp, synthetic construct
  misc_feature 1..80: note = Artificially Synthesized Probe
  source 1..80: mol_type = other DNA
agcctggccaacatggtgaaaccccatctctactaaaaatacaaaaattagccaagcgtggtggcaggcgcctgtaatcc

SEQ ID NO: 96391 - DNA, 80 bp, synthetic construct
  misc_feature 1..80: note = Artificially Synthesized Probe
  source 1..80: mol_type = other DNA
ttagcgggtatgtgaactgaggttcttgcctggagctgattctgccatcggttgatgtttggcaactgctggagacattt

SEQ ID NO: 96392 - DNA, 80 bp, synthetic construct; identical to SEQ ID NO: 34321
  misc_feature 1..80: note = Artificially Synthesized Probe
  source 1..80: mol_type = other DNA

SEQ ID NO: 96393 - DNA, 80 bp, synthetic construct
  misc_feature 1..80: note = Artificially Synthesized Probe
  source 1..80: mol_type = other DNA
gcttgagcataggagttcgagaccagcatgacaacatagcgagagcctgtctctatattttttaaaattttttaaaatga

SEQ ID NO: 96394 - DNA, 80 bp, synthetic construct
  misc_feature 1..80: note = Artificially Synthesized Probe
  source 1..80: mol_type = other DNA
agtgattctcctgcctcagcctcccaaatagctgggactacaggcgtgcgccatcacgcccacctgatttttgtattttt

SEQ ID NO: 96395 - DNA, 80 bp, synthetic construct; identical to SEQ ID NO: 34322
  misc_feature 1..80: note = Artificially Synthesized Probe
  source 1..80: mol_type = other DNA

SEQ ID NO: 96396 - DNA, 80 bp, synthetic construct
  misc_feature 1..80: note = Artificially Synthesized Probe
  source 1..80: mol_type = other DNA
tttaccagctccaggagttcagaggaatggccaggaagcaagatgtgggggtttgagtgcaggcttggctgcctgcatgc

SEQ ID NO: 96397 - DNA, 80 bp, synthetic construct
  misc_feature 1..80: note = Artificially Synthesized Probe
  source 1..80: mol_type = other DNA
cacagcaccactgggagattcagagcacagatccaggatgacgggcaagcatggggtgtggctcccactgccttgcaccc

SEQ ID NO: 96398 - DNA, 80 bp, synthetic construct
  misc_feature 1..80: note = Artificially Synthesized Probe
  source 1..80: mol_type = other DNA
gcctgagtgcgctcccatccttactctggaactgccacgtaaagaaaagcagagatgccccgtggttcatacctgtaatc

SEQ ID NO: 96399 - DNA, 80 bp, synthetic construct
  misc_feature 1..80: note = Artificially Synthesized Probe
  source 1..80: mol_type = other DNA
cccgggttcatgccattcttctgcctcagcctcccaagtatctgggactacaggcaccaccaccatggccggctaatttt

SEQ ID NO: 96400 - DNA, 80 bp, synthetic construct
  misc_feature 1..80: note = Artificially Synthesized Probe
  source 1..80: mol_type = other DNA
cacagggctgtatgtgcaagagaaggagccccgctaggggtgtttcatgactgttgttgctgggtgcctgagtttgctag

SEQ ID NO: 96401 - DNA, 80 bp, synthetic construct; identical to SEQ ID NO: 34323
  misc_feature 1..80: note = Artificially Synthesized Probe
  source 1..80: mol_type = other DNA

SEQ ID NO: 96402 - DNA, 80 bp, synthetic construct
  misc_feature 1..80: note = Artificially Synthesized Probe
  source 1..80: mol_type = other DNA
cccagacccaaggaggatgccacacagtataccattcagcgttggagtgagcgcccaagacaggctgggcagccaccgct

SEQ ID NO: 96403 - DNA, 80 bp, synthetic construct
  misc_feature 1..80: note = Artificially Synthesized Probe
  source 1..80: mol_type = other DNA
gtgagaccccatctctacaaaaaataaaaatattagccaggcatgtgcctgtaaccccagctactcaggaggctgaggca

SEQ ID NO: 96404 - DNA, 80 bp, synthetic construct; identical to SEQ ID NO: 34324
  misc_feature 1..80: note = Artificially Synthesized Probe
  source 1..80: mol_type = other DNA

SEQ ID NO: 96405 - DNA, 80 bp, synthetic construct
  misc_feature 1..80: note = Artificially Synthesized Probe
  source 1..80: mol_type = other DNA
tttcttgttgttgtttttcaagacagagtctggctctatcgcccaggctggagtgcaatggtgtgatctcaactcactgc

SEQ ID NO: 96406 - DNA, 80 bp, synthetic construct
  misc_feature 1..80: note = Artificially Synthesized Probe
  source 1..80: mol_type = other DNA
atccacccatcttggcctcccaaaaggctgggattccagacgtcagccacggcgcctggcctgttgtttttaacacaccc

SEQ ID NO: 96407 - DNA, 80 bp, synthetic construct
  misc_feature 1..80: note = Artificially Synthesized Probe
  source 1..80: mol_type = other DNA
cttacagcagatatgtattccaaatatatatatatatatatatccaagagctgccgccacaggatgacgggttgctgacc

SEQ ID NO: 96408 - DNA, 80 bp, synthetic construct; identical to SEQ ID NO: 34325
  misc_feature 1..80: note = Artificially Synthesized Probe
  source 1..80: mol_type = other DNA

SEQ ID NO: 96409 - DNA, 80 bp, synthetic construct
  misc_feature 1..80: note = Artificially Synthesized Probe
  source 1..80: mol_type = other DNA
ctaaaaatatgacaattggcccggcacagtgctgcgtgcctgtagttccagctactctggaggctgagccaggagaatca

SEQ ID NO: 96410 - DNA, 80 bp, synthetic construct
  misc_feature 1..80: note = Artificially Synthesized Probe
  source 1..80: mol_type = other DNA
caagtccctgtggtttggagattgtgtggggaagcaaacgtcatctcaagatgaaacctttccaaatgagctgaacactt

SEQ ID NO: 96411 - DNA, 80 bp, synthetic construct; identical to SEQ ID NO: 34280
  misc_feature 1..80: note = Artificially Synthesized Probe
  source 1..80: mol_type = other DNA

SEQ ID NO: 96412 - DNA, 80 bp, synthetic construct
  misc_feature 1..80: note = Artificially Synthesized Probe
  source 1..80: mol_type = other DNA
ggcgcagtggctcaggcctgtaatcccagcactttgggagtaagaggggggcagatcacctgaggtcaggagttcgagac

SEQ ID NO: 96413 - DNA, 80 bp, synthetic construct
  misc_feature 1..80: note = Artificially Synthesized Probe
  source 1..80: mol_type = other DNA
gtgagactctgcctcaaaaaaacaggtgatctggagaatcactcccctcatacctccttaagtctacatggaacagtctc

SEQ ID NO: 96414 - DNA, 80 bp, synthetic construct; identical to SEQ ID NO: 34326
  misc_feature 1..80: note = Artificially Synthesized Probe
  source 1..80: mol_type = other DNA

SEQ ID NO: 96415 - DNA, 80 bp, synthetic construct
  misc_feature 1..80: note = Artificially Synthesized Probe
  source 1..80: mol_type = other DNA
aaaattaaacaggcgtggtggtgcaaggtggtgctactcaagaggttgaggtgggagggccgcaggacccaggaattgga

SEQ ID NO: 96416 - DNA, 80 bp, synthetic construct
  misc_feature 1..80: note = Artificially Synthesized Probe
  source 1..80: mol_type = other DNA
aagtatataaagcaagttctgttccttgctttatacacaagacacacctaaatcaaagggcttcaggaagttaaaaacaa

SEQ ID NO: 96417 - DNA, 80 bp, synthetic construct; identical to SEQ ID NO: 34327
  misc_feature 1..80: note = Artificially Synthesized Probe
  source 1..80: mol_type = other DNA

SEQ ID NO: 96418 - DNA, 80 bp, synthetic construct
  misc_feature 1..80: note = Artificially Synthesized Probe
  source 1..80: mol_type = other DNA
gcgattctcctgcctcaacctctgaaatagctgggattacaggcgcacgccatcacacctggctaatttttgtattttta

SEQ ID NO: 96419 - DNA, 80 bp, synthetic construct
  misc_feature 1..80: note = Artificially Synthesized Probe
  source 1..80: mol_type = other DNA
acacacacacagcttggttgagtagatagaaaataggcaaggatgttaagacgcccaaaccacatgcttaaggcagacat

SEQ ID NO: 96420 - DNA, 80 bp, synthetic construct
  misc_feature 1..80: note = Artificially Synthesized Probe
  source 1..80: mol_type = other DNA
gtgcggttgaggggaaggggtgcgagaccgatctggggacgtctgcccgcgcgattgaaggaagggtgtctgagaagagg

SEQ ID NO: 96421 - DNA, 80 bp, synthetic construct
  misc_feature 1..80: note = Artificially Synthesized Probe
  source 1..80: mol_type = other DNA
ctcaagtgatcctcccacctcagcctcccaagcagctaggattacaggcacttaccaccatcaagtctggctaatttttg

SEQ ID NO: 96422 - DNA, 80 bp, synthetic construct; identical to SEQ ID NO: 34328
  misc_feature 1..80: note = Artificially Synthesized Probe
  source 1..80: mol_type = other DNA

SEQ ID NO: 96423 - DNA, 80 bp, synthetic construct
  misc_feature 1..80: note = Artificially Synthesized Probe
  source 1..80: mol_type = other DNA
aacttcgtggaacttttttttaaagtaaacttatattgagcaactcttagatgaagagatacaaacacagctgggcgtgg

SEQ ID NO: 96424 - DNA, 80 bp, synthetic construct
  misc_feature 1..80: note = Artificially Synthesized Probe
  source 1..80: mol_type = other DNA
gtttaagaccagcctggacaacatagcaagatcccatctctacaaaaaaatactaaaattagctagacatgatggtgaat

SEQ ID NO: 96425 - DNA, 80 bp, synthetic construct
  misc_feature 1..80: note = Artificially Synthesized Probe
  source 1..80: mol_type = other DNA
aggcaagagaattgctcaaatctgggaggcagaggttgcagtgagccgagatcgcgccactgcactccagcctgggcaac

SEQ ID NO: 96426 - DNA, 80 bp, synthetic construct
  misc_feature 1..80: note = Artificially Synthesized Probe
  source 1..80: mol_type = other DNA
agatccacaaataggaaagaacggaagtaaatgaattcatgtcctatctcaagctgagaaaaaagaacaaagtaaccccc

SEQ ID NO: 96427 - DNA, 80 bp, synthetic construct
  misc_feature 1..80: note = Artificially Synthesized Probe
  source 1..80: mol_type = other DNA
atacaaaaacttagccgggcgtggtggcacatgcctgtggtcccagctacttggagggctgagggtggagaatcacttga

SEQ ID NO: 96428 - DNA, 80 bp, synthetic construct; identical to SEQ ID NO: 34329
  misc_feature 1..80: note = Artificially Synthesized Probe
  source 1..80: mol_type = other DNA

SEQ ID NO: 96429 - DNA, 80 bp, synthetic construct
  misc_feature 1..80: note = Artificially Synthesized Probe
  source 1..80: mol_type = other DNA
gtccttgctgcgtttcagtgtttgctgtaatgccatctgcgtctgtggctgacagttggtgtctcttgtgaactgggaca

SEQ ID NO: 96430 - DNA, 80 bp, synthetic construct
  misc_feature 1..80: note = Artificially Synthesized Probe
  source 1..80: mol_type = other DNA
acttcctcctctgcgaataggggagccatgaggttggggtgactcttccacttcctgcccccacatccgcaggccaactg

SEQ ID NO: 96431 - DNA, 80 bp, synthetic construct; identical to SEQ ID NO: 34330
  misc_feature 1..80: note = Artificially Synthesized Probe
  source 1..80: mol_type = other DNA

SEQ ID NO: 96432 - DNA, 80 bp, synthetic construct
  misc_feature 1..80: note = Artificially Synthesized Probe
  source 1..80: mol_type = other DNA
ccagggtgacactcacctcctgccgacccatcctgctggaaccatgtcggggatccccggaaaaccccatttaacagagg

SEQ ID NO: 96433 - DNA, 80 bp, synthetic construct
  misc_feature 1..80: note = Artificially Synthesized Probe
  source 1..80: mol_type = other DNA
tgccaggaaaacgtcatttgctgctgctgaaaattgaatttcacatcaatttcagccatcaagagatcttttgacttttt

SEQ ID NO: 96434 - DNA, 80 bp, synthetic construct
  misc_feature 1..80: note = Artificially Synthesized Probe
  source 1..80: mol_type = other DNA
cccggctaatttttgtgcttttaatagagacggggtttcaccatattggccaggctggtctcgaactcctgaccttgtga

SEQ ID NO: 96435 - DNA, 80 bp, synthetic construct
  misc_feature 1..80: note = Artificially Synthesized Probe
  source 1..80: mol_type = other DNA
actctgaagttctgaggtttaggatttcaatatgtgaatatttctttgtggaggggagtggtggacacagctcagcccat

SEQ ID NO: 96436 - DNA, 80 bp, synthetic construct
  misc_feature 1..80: note = Artificially Synthesized Probe
  source 1..80: mol_type = other DNA
ttttttttcagatggagtctcactctgtcgcccaggctggagtgcagtggcacaatcttggatcactgcaacctttgcct

SEQ ID NO: 96437 - DNA, 80 bp, synthetic construct; identical to SEQ ID NO: 34331
  misc_feature 1..80: note = Artificially Synthesized Probe
  source 1..80: mol_type = other DNA

SEQ ID NO: 96438 - DNA, 80 bp, synthetic construct
  misc_feature 1..80: note = Artificially Synthesized Probe
  source 1..80: mol_type = other DNA
gactacaggtgcccaccaccacacccggctaatttcttttgtattttggtagagacggagtttcaccatgttggccaggc

SEQ ID NO: 96439 - DNA, 80 bp, synthetic construct
  misc_feature 1..80: note = Artificially Synthesized Probe
  source 1..80: mol_type = other DNA
tagaacgtaggctgtacagtaataggtggctggccacactttgcagacccccggtagagatcactggtaccaggagggtg

SEQ ID NO: 96440 - DNA, 80 bp, synthetic construct; identical to SEQ ID NO: 34332
  misc_feature 1..80: note = Artificially Synthesized Probe
  source 1..80: mol_type = other DNA

SEQ ID NO: 96441 - DNA, 80 bp, synthetic construct
  misc_feature 1..80: note = Artificially Synthesized Probe
  source 1..80: mol_type = other DNA
cgaggcaggagaatcacttgagcccaggagttcaaggccaccctgggcaacatagcaagaccctatctatactgaaaaaa

SEQ ID NO: 96442 - DNA, 80 bp, synthetic construct
  misc_feature 1..80: note = Artificially Synthesized Probe
  source 1..80: mol_type = other DNA
ccttgtctcactaaaagaaatagcctgcagccccatgaggacctgggggtttatttccctggcatttccgtgaagcacag

SEQ ID NO: 96443 - DNA, 80 bp, synthetic construct
  misc_feature 1..80: note = Artificially Synthesized Probe
  source 1..80: mol_type = other DNA
ttgagccaccggcgctcagggtcacagctctcgtctgggtctgactgctgtcagtgtccccaggtgggcgtcacctactc

SEQ ID NO: 96444 - DNA, 80 bp, synthetic construct; identical to SEQ ID NO: 34333
  misc_feature 1..80: note = Artificially Synthesized Probe
  source 1..80: mol_type = other DNA

SEQ ID NO: 96445 - DNA, 80 bp, synthetic construct
  misc_feature 1..80: note = Artificially Synthesized Probe
  source 1..80: mol_type = other DNA
gtggaggcttcacccagaggtggtgttgcagagggaggaagaaacagcatcaagggaccgggcatggtggctcacacctg

SEQ ID NO: 96446 - DNA, 80 bp, synthetic construct
  misc_feature 1..80: note = Artificially Synthesized Probe
  source 1..80: mol_type = other DNA
cttggtggcgggctcctgtagttgcagctactctggaggctgagacaggagaatcactcgagcccgggaggtggaggctg

SEQ ID NO: 96447 - DNA, 80 bp, synthetic construct
  misc_feature 1..80: note = Artificially Synthesized Probe
  source 1..80: mol_type = other DNA
ctcagcctcccgagtagctgggactacaggcgtgcgccaccacgcccagctactttttgtatttttagtagagatgggct

SEQ ID NO: 96448 - DNA, 80 bp, synthetic construct
  misc_feature 1..80: note = Artificially Synthesized Probe
  source 1..80: mol_type = other DNA
acacctgagctgtggctaaacgtaaccaaacgtgtcagggcaggtgggcagggcatgggccaggaggggagccacggacg

SEQ ID NO: 96449 - DNA, 80 bp, synthetic construct
  misc_feature 1..80: note = Artificially Synthesized Probe
  source 1..80: mol_type = other DNA
accacaggtcatgatatgtcatagtctctgttctccctaaaatgttttagggagaatggtttttttggttttttggtttg

SEQ ID NO: 96450 - DNA, 80 bp, synthetic construct; identical to SEQ ID NO: 34334
  misc_feature 1..80: note = Artificially Synthesized Probe
  source 1..80: mol_type = other DNA

SEQ ID NO: 96451 - DNA, 80 bp, synthetic construct
  misc_feature 1..80: note = Artificially Synthesized Probe
  source 1..80: mol_type = other DNA
aatttttgaccaggcacagtggctcacacctgtaatcccagcactttgggaggctgaggcgggtgaatcacttgaggact

SEQ ID NO: 96452 - DNA, 80 bp, synthetic construct
  misc_feature 1..80: note = Artificially Synthesized Probe
  source 1..80: mol_type = other DNA
cctggctaacacagtgaaaccctgtctctactaaaaaaaatacaaaaaattagccgggcgtggtggtgggcgcctgtagt

SEQ ID NO: 96453 - DNA, 80 bp, synthetic construct
  misc_feature 1..80: note = Artificially Synthesized Probe
  source 1..80: mol_type = other DNA
tactccccactactcaggaggctgaggcaggaggatcgcttgaacctggggggcggaggttgcagtgagccactgcattc

SEQ ID NO: 96454 - DNA, 80 bp, synthetic construct; identical to SEQ ID NO: 34335
  misc_feature 1..80: note = Artificially Synthesized Probe
  source 1..80: mol_type = other DNA

SEQ ID NO: 96455 - DNA, 80 bp, synthetic construct
  misc_feature 1..80: note = Artificially Synthesized Probe
  source 1..80: mol_type = other DNA
ctccttggttataaagtcccgcttgcccaagccatattcagatttgagcccaatcattctcccccactggaaggccccat

SEQ ID NO: 96456 - DNA, 80 bp, synthetic construct
  misc_feature 1..80: note = Artificially Synthesized Probe
  source 1..80: mol_type = other DNA
cctcagcttcccaagtagctgggactacaggcgcacgccaccatgcccggctaatttttgtatttttcgtagagacaggg

SEQ ID NO: 96457 - DNA, 80 bp, synthetic construct
  misc_feature 1..80: note = Artificially Synthesized Probe
  source 1..80: mol_type = other DNA
cttctctaactttctcaattcaagaaacctttttaaattgcccagaagaaaaatctcaaaggcaggggcgtttggaaggc

SEQ ID NO: 96458 - DNA, 80 bp, synthetic construct; identical to SEQ ID NO: 34336
  misc_feature 1..80: note = Artificially Synthesized Probe
  source 1..80: mol_type = other DNA

SEQ ID NO: 96459 - DNA, 80 bp, synthetic construct; identical to SEQ ID NO: 34281
  misc_feature 1..80: note = Artificially Synthesized Probe
  source 1..80: mol_type = other DNA

SEQ ID NO: 96460 - DNA, 80 bp, synthetic construct
  misc_feature 1..80: note = Artificially Synthesized Probe
  source 1..80: mol_type = other DNA
tgatcctcccatttcagccccctgagtagctgggactagaggcatgcatcaccacgcctggctatttttttcttttttgt

SEQ ID NO: 96461 - DNA, 80 bp, synthetic construct
  misc_feature 1..80: note = Artificially Synthesized Probe
  source 1..80: mol_type = other DNA
ttttttttttttttttttttttgagacagagtcttgctctgtcacccaggctggagtgcagtggtgcaatcttgactcac

SEQ ID NO: 96462 - DNA, 80 bp, synthetic construct; identical to SEQ ID NO: 34337
  misc_feature 1..80: note = Artificially Synthesized Probe
  source 1..80: mol_type = other DNA

SEQ ID NO: 96463 - DNA, 80 bp, synthetic construct
  misc_feature 1..80: note = Artificially Synthesized Probe
  source 1..80: mol_type = other DNA
gggactacaggcgccaccaccacgcccagctaatttttgtatttttagtagagatggggttttaccatgttggccaggct

SEQ ID NO: 96464 - DNA, 80 bp, synthetic construct
  misc_feature 1..80: note = Artificially Synthesized Probe
  source 1..80: mol_type = other DNA
cagtggcatgatctcggctcactgcaagctccacctcccaggttcgtgccattcccctgcctcaacctcccgagtagctg

SEQ ID NO: 96465 - DNA, 80 bp, synthetic construct
  misc_feature 1..80: note = Artificially Synthesized Probe
  source 1..80: mol_type = other DNA
ggcctattttatttctaattgatgaaagttgtatatattcatgatgtgcaacatgacattttgaaatacgtatacattgt

SEQ ID NO: 96466 - DNA, 80 bp, synthetic construct
  misc_feature 1..80: note = Artificially Synthesized Probe
  source 1..80: mol_type = other DNA
caccatgttatacaatagatcgcttgaatttattcctcctctctaattgaaatttatatcctttgaccagcatctcccca

SEQ ID NO: 96467 - DNA, 80 bp, synthetic construct; identical to SEQ ID NO: 34338
  misc_feature 1..80: note = Artificially Synthesized Probe
  source 1..80: mol_type = other DNA

SEQ ID NO: 96468 - DNA, 80 bp, synthetic construct
  misc_feature 1..80: note = Artificially Synthesized Probe
  source 1..80: mol_type = other DNA
accatctcggctcactgcaagctccgcctcccaggttcacaccattctcctgcctcagcctcccgagtagctgagactat

SEQ ID NO: 96469 - DNA, 80 bp, synthetic construct
  misc_feature 1..80: note = Artificially Synthesized Probe
  source 1..80: mol_type = other DNA
gctttctacttctgtgagtttttttttggactgggggtacatgtgtagtttgttacagggatatattgggtaatggttag

SEQ ID NO: 96470 - DNA, 80 bp, synthetic construct
  misc_feature 1..80: note = Artificially Synthesized Probe
  source 1..80: mol_type = other DNA
aacatgatgaaacccagtctctactaaaaatacaaaaattagctgggtgtagtggcacacacctgtaatcccagctgctt

SEQ ID NO: 96471 - DNA, 80 bp, synthetic construct
  misc_feature 1..80: note = Artificially Synthesized Probe
  source 1..80: mol_type = other DNA
ttattaacatagtatccctcagcttcatccatgttgttgcaaatgacaggatctctttgttttttttttcgttttgtttg

SEQ ID NO: 96472 - DNA, 80 bp, synthetic construct; identical to SEQ ID NO: 34339
  misc_feature 1..80: note = Artificially Synthesized Probe
  source 1..80: mol_type = other DNA

SEQ ID NO: 96473 - DNA, 80 bp, synthetic construct
  misc_feature 1..80: note = Artificially Synthesized Probe
  source 1..80: mol_type = other DNA
gagacggagtcttgctttgttgctcaggtcggagtgcagtagcacgatctcggctcactgcaacctccacctcctgggtt

SEQ ID NO: 96474 - DNA, 80 bp, synthetic construct
  misc_feature 1..80: note = Artificially Synthesized Probe
  source 1..80: mol_type = other DNA
ccaaagtgctaggattacaggagtgagccactgaacccagcctattcattcatctgttgatgcacacgtcttggctattg

SEQ ID NO: 96475 - DNA, 80 bp, synthetic construct; identical to SEQ ID NO: 34340
  misc_feature 1..80: note = Artificially Synthesized Probe
  source 1..80: mol_type = other DNA

SEQ ID NO: 96476 - DNA, 80 bp, synthetic construct
  misc_feature 1..80: note = Artificially Synthesized Probe
  source 1..80: mol_type = other DNA
cagattatatcgcatagttgttgacaccggggtcccacttcctcccttctgtccaccctggaccccacatgatactccag

SEQ ID NO: 96477 - DNA, 80 bp, synthetic construct
  misc_feature 1..80: note = Artificially Synthesized Probe
  source 1..80: mol_type = other DNA
tagcaccaaccggatatttttagatgggctttgaaaagtcgcagtgtgctgagaccgcataccagacgcgtgaggtcacc

SEQ ID NO: 96478 - DNA, 80 bp, synthetic construct
  misc_feature 1..80: note = Artificially Synthesized Probe
  source 1..80: mol_type = other DNA
gtgatattagaagtcactgcagagacttgtcccctgggtttaaagtgagcactgtggctctttaaggtacaaatgtacat

SEQ ID NO: 96479 - DNA, 80 bp, synthetic construct; identical to SEQ ID NO: 34341
  misc_feature 1..80: note = Artificially Synthesized Probe
  source 1..80: mol_type = other DNA

SEQ ID NO: 96480 - DNA, 80 bp, synthetic construct
  misc_feature 1..80: note = Artificially Synthesized Probe
  source 1..80: mol_type = other DNA
aaaaaaaaagaggcgaggacccagcccagggcggagtgggtcccatgggattttacaggggatgtgttgagggccaggtc

SEQ ID NO: 96481 - DNA, 80 bp, synthetic construct
  misc_feature 1..80: note = Artificially Synthesized Probe
  source 1..80: mol_type = other DNA
cgtgagcatccaaggagacgagtcagtgcctcgagactgggggtttcactccaaataacaacaaaaaacagttctccagc

SEQ ID NO: 96482 - DNA, 80 bp, synthetic construct
  misc_feature 1..80: note = Artificially Synthesized Probe
  source 1..80: mol_type = other DNA
agccctgcaaccccttttatttctgtctgtgtacatcaatgctccgcagccggggtgatttgccgatctctggggacatt

SEQ ID NO: 96483 - DNA, 80 bp, synthetic construct
  misc_feature 1..80: note = Artificially Synthesized Probe
  source 1..80: mol_type = other DNA
ccgcccaccgaccagccccctgggtttcatcagaccctccagagactgtttcaaagttcaacaggtcagaccgggcccag

SEQ ID NO: 96484 - DNA, 80 bp, synthetic construct
  misc_feature 1..80: note = Artificially Synthesized Probe
  source 1..80: mol_type = other DNA
cactttgggaagccgaggcgggcagatcacctgaggtcagaagttcaagaccagcctgaccaacatggagaaaccccgtc

SEQ ID NO: 96485 - DNA, 80 bp, synthetic construct; identical to SEQ ID NO: 34342
  misc_feature 1..80: note = Artificially Synthesized Probe
  source 1..80: mol_type = other DNA

SEQ ID NO: 96486 - DNA, 80 bp, synthetic construct
  misc_feature 1..80: note = Artificially Synthesized Probe
  source 1..80: mol_type = other DNA
ccaccaaaagcacccggctacttcccagacccccttctctgtagaggaccaggtcatctctctctggggccccctcctta

SEQ ID NO: 96487 - DNA, 80 bp, synthetic construct
  misc_feature 1..80: note = Artificially Synthesized Probe
  source 1..80: mol_type = other DNA
ctgtccgggcttcaagctctgcccgaggctttgcagctgaatggagccttctccaagggagtatctgggcctcccatggt

SEQ ID NO: 96488 - DNA, 80 bp, synthetic construct
  misc_feature 1..80: note = Artificially Synthesized Probe
  source 1..80: mol_type = other DNA
gctttttttttttttaatactttaagttctgggatacatgtgcagaacgtgcagtttcgttacataggtatacacatgcc

SEQ ID NO: 96489 - DNA, 80 bp, synthetic construct; identical to SEQ ID NO: 34343
  misc_feature 1..80: note = Artificially Synthesized Probe
  source 1..80: mol_type = other DNA

SEQ ID NO: 96490 - DNA, 80 bp, synthetic construct
  misc_feature 1..80: note = Artificially Synthesized Probe
  source 1..80: mol_type = other DNA
gcagaatgatttataatcctttgggtatatgcccagtaaagggattgctgcatacctggctaattttttaaattttttct

SEQ ID NO: 96491 - DNA, 80 bp, synthetic construct; identical to SEQ ID NO: 34282
  misc_feature 1..80: note = Artificially Synthesized Probe
  source 1..80: mol_type = other DNA

SEQ ID NO: 96492 - DNA, 80 bp, synthetic construct
  misc_feature 1..80: note = Artificially Synthesized Probe
  source 1..80: mol_type = other DNA
acaaaagcctccactcagtggtcagccagtgtcttaatctgttcgggctactgtcacagaatatggttacgcattgctta

SEQ ID NO: 96493 - DNA, 80 bp, synthetic construct; identical to SEQ ID NO: 34344
  misc_feature 1..80: note = Artificially Synthesized Probe
  source 1..80: mol_type = other DNA

SEQ ID NO: 96494 - DNA, 80 bp, synthetic construct
  misc_feature 1..80: note = Artificially Synthesized Probe
  source 1..80: mol_type = other DNA
agttactctggaggctgaggcaggaggatagcctgaacctgggaggtggaggttgcagtgagctgagattatgccactgc

SEQ ID NO: 96495 - DNA, 80 bp, synthetic construct
  misc_feature 1..80: note = Artificially Synthesized Probe
  source 1..80: mol_type = other DNA
agttgtaacacaatggtaaatatttgtgtatctaaacataggccaggcctggtggctcattcctgtaatcctagcacttt

SEQ ID NO: 96496 - DNA, 80 bp, synthetic construct
  misc_feature 1..80: note = Artificially Synthesized Probe
  source 1..80: mol_type = other DNA
tgagaggccaaagtatgcagattgcttgagcccaggagtttgagactggcctgggcaacacagtgaaacctcttctctac

SEQ ID NO: 96497 - DNA, 80 bp, synthetic construct; identical to SEQ ID NO: 34345
  misc_feature 1..80: note = Artificially Synthesized Probe
  source 1..80: mol_type = other DNA

SEQ ID NO: 96498 - DNA, 80 bp, synthetic construct
  misc_feature 1..80: note = Artificially Synthesized Probe
  source 1..80: mol_type = other DNA
ggtgagctgagatcgcgccattgcaccccagcctgggcaacaagagtgaaactctgtctcaaaaaaaaaagaaaaaatga

SEQ ID NO: 96499 - DNA, 80 bp, synthetic construct
  misc_feature 1..80: note = Artificially Synthesized Probe
  source 1..80: mol_type = other DNA
atggtcattgctgtgcagtgcatgactgtaccatgtagaccaggtggctgaaacaacaaatatattctcacagttctgaa

SEQ ID NO: 96500 - DNA, 80 bp, synthetic construct
  misc_feature 1..80: note = Artificially Synthesized Probe
  source 1..80: mol_type = other DNA
ggccccatgtaagtgacctcatcacctcccaaagacctcacctcctcaacctatcaccttagggttagatttcttttttt

SEQ ID NO: 96501 - DNA, 80 bp, synthetic construct; identical to SEQ ID NO: 34346
  misc_feature 1..80: note = Artificially Synthesized Probe
  source 1..80: mol_type = other DNA

SEQ ID NO: 96502 - DNA, 80 bp, synthetic construct
  misc_feature 1..80: note = Artificially Synthesized Probe
  source 1..80: mol_type = other DNA
ggaggccgaggcaaggagatcacttggggtcaggagttcgagaccagcctggccaacatggtaaaaccccatctctacta

SEQ ID NO: 96503 - DNA, 80 bp, synthetic construct
  misc_feature 1..80: note = Artificially Synthesized Probe
  source 1..80: mol_type = other DNA
cctggggactcgcttatgggggaagtgggagacctgagagcttccccagtcagccgtgccctgggtcttctgcctgcgag

SEQ ID NO: 96504 - DNA, 80 bp, synthetic construct
  misc_feature 1..80: note = Artificially Synthesized Probe
  source 1..80: mol_type = other DNA
tcagaaaaaaaaaaaaaaattgtgtgagggacacagacatgaagtccataacaaccagtatccatccccctgtggaatga

SEQ ID NO: 96505 - DNA, 80 bp, synthetic construct
  misc_feature 1..80: note = Artificially Synthesized Probe
  source 1..80: mol_type = other DNA
ggcccagcctctcaaatgggagcatcactgctgccaaactttccacgtgtgactgcagggcgtgccccctgcccctgtgc

SEQ ID NO: 96506 - DNA, 80 bp, synthetic construct
  misc_feature 1..80: note = Artificially Synthesized Probe
  source 1..80: mol_type = other DNA
aaagagcccccaccttccgccagccaccacctcttctcagcttctctgtcctgccccaggcaccttccctgcctcaagtt

SEQ ID NO: 96507 - DNA, 80 bp, synthetic construct; identical to SEQ ID NO: 34347
  misc_feature 1..80: note = Artificially Synthesized Probe
  source 1..80: mol_type = other DNA

SEQ ID NO: 96508 - DNA, 80 bp, synthetic construct
  misc_feature 1..80: note = Artificially Synthesized Probe
  source 1..80: mol_type = other DNA
gcctgggcaacttagagagatgcggtctctacaaaaaattttaaaaattagccaagcatggtggcatgcacctgtggtcc

SEQ ID NO: 96509 - DNA, 80 bp, synthetic construct
  misc_feature 1..80: note = Artificially Synthesized Probe
  source 1..80: mol_type = other DNA
aagaaaaaagaagcggcaaccagacacaacaggccataagtgtatgacctcattgacctgagatacccagaacaggcaaa

SEQ ID NO: 96510 - DNA, 80 bp, synthetic construct
  misc_feature 1..80: note = Artificially Synthesized Probe
  source 1..80: mol_type = other DNA
gaattgtacactttaagaaggttaattgtatgtcatgttttacgccaatttttttttaattgctctgtgaacccacttat

SEQ ID NO: 96511 - DNA, 80 bp, synthetic construct; identical to SEQ ID NO: 34348
  misc_feature 1..80: note = Artificially Synthesized Probe
  source 1..80: mol_type = other DNA

SEQ ID NO: 96512 - DNA, 80 bp, synthetic construct
  misc_feature 1..80: note = Artificially Synthesized Probe
  source 1..80: mol_type = other DNA
cagggtgtggcttaccctatcagatgaatggttacaactgaaaagaattcaggcaattgccatttttaatgtcagagact

SEQ ID NO: 96513 - DNA, 80 bp, synthetic construct
  misc_feature 1..80: note = Artificially Synthesized Probe
  source 1..80: mol_type = other DNA
aaccccgtctctactaaaaatgtaaaagttagccaggcgtggtggtgcacacctgtaatcccagctacccgggaaggtga

SEQ ID NO: 96514 - DNA, 80 bp, synthetic construct; identical to SEQ ID NO: 34349
  misc_feature 1..80: note = Artificially Synthesized Probe
  source 1..80: mol_type = other DNA

SEQ ID NO: 96515 - DNA, 80 bp, synthetic construct
  misc_feature 1..80: note = Artificially Synthesized Probe
  source 1..80: mol_type = other DNA
gggcaggagggtgacatttgagattttgattcccagggtatgggtactcacgtggggctttaatttcctggtgaatgtgc

SEQ ID NO: 96516 - DNA, 80 bp, synthetic construct
  misc_feature 1..80: note = Artificially Synthesized Probe
  source 1..80: mol_type = other DNA
taaatggtgagaacacatggacacacagaggggaagagcagacagtggggcctcctggagggtgggaggagggagaggag

SEQ ID NO: 96517 - DNA, 80 bp, synthetic construct
  misc_feature 1..80: note = Artificially Synthesized Probe
  source 1..80: mol_type = other DNA
atggtggcacacgcctgtattcccagctatttgggaggctgaggcaggagaatcgcttgaacctgggaggtggaggttgc

SEQ ID NO: 96518 - DNA, 80 bp, synthetic construct
  misc_feature 1..80: note = Artificially Synthesized Probe
  source 1..80: mol_type = other DNA
acctacttaacaaacctgcgtgtgtaccccaaaaccttaaaagttaaggctaggcatggtggtgcatgcctgtggtcgca

SEQ ID NO: 96519 - DNA, 80 bp, synthetic construct; identical to SEQ ID NO: 34350
  misc_feature 1..80: note = Artificially Synthesized Probe
  source 1..80: mol_type = other DNA

SEQ ID NO: 96520 - DNA, 80 bp, synthetic construct
  misc_feature 1..80: note = Artificially Synthesized Probe
  source 1..80: mol_type = other DNA
tggcaaaaccccatctctacaaaaaattagccaggcgtggtggtgcatgcctgtggtcccagctgctcaggaggctgaga

SEQ ID NO: 96521 - DNA, 80 bp, synthetic construct
  misc_feature 1..80: note = Artificially Synthesized Probe
  source 1..80: mol_type = other DNA
aaatgggctactctctgcttactgggtagccctactttgcaggaacagttaaagaaaaaataagagaccaggggtggtgg

SEQ ID NO: 96522 - DNA, 80 bp, synthetic construct
  misc_feature 1..80: note = Artificially Synthesized Probe
  source 1..80: mol_type = other DNA
cgggaggctgagccaggagaaccgcttgaactcgggagacagtgcttgcagtgagctgagattgcgcccctgcactccag

SEQ ID NO: 96523 - DNA, 80 bp, synthetic construct
  misc_feature 1..80: note = Artificially Synthesized Probe
  source 1..80: mol_type = other DNA
ttgggtaggcacaagaacaagagaggcggagaaagtgtgatcgtacttatttggcccataggtgccgtggaaactggttc

SEQ ID NO: 96524 - DNA, 80 bp, synthetic construct
  misc_feature 1..80: note = Artificially Synthesized Probe
  source 1..80: mol_type = other DNA
accccgtctctactaaaatacaaaaattagccagcatggtagcgcacatctgtagtcccagctactcaggaggctgaggc

SEQ ID NO: 96525 - DNA, 80 bp, synthetic construct; identical to SEQ ID NO: 34351
  misc_feature 1..80: note = Artificially Synthesized Probe
  source 1..80: mol_type = other DNA

SEQ ID NO: 96526 - DNA, 80 bp, synthetic construct
  misc_feature 1..80: note = Artificially Synthesized Probe
  source 1..80: mol_type = other DNA
tggctgtgtggatgtttatgctttgtatgggagagcgagtgtgatttttaggtctttgaggtgaaggtctggaacagtag

SEQ ID NO: 96527 - DNA, 80 bp, synthetic construct
  misc_feature 1..80: note = Artificially Synthesized Probe
  source 1..80: mol_type = other DNA
cctttgccaaacatgtgctcctttagccagaaaatgacaggtacagagctgcaaagtgaggtggtcgtgcatggaaatac

SEQ ID NO: 96528 - DNA, 80 bp, synthetic construct
  misc_feature 1..80: note = Artificially Synthesized Probe
  source 1..80: mol_type = other DNA
cgtagatggatagacagatttatggatggatggatggatgaattcatgcatggatggctgaatggatggatagatgaatt

SEQ ID NO: 96529 - DNA, 80 bp, synthetic construct; identical to SEQ ID NO: 34352
  misc_feature 1..80: note = Artificially Synthesized Probe
  source 1..80: mol_type = other DNA

SEQ ID NO: 96530 - DNA, 80 bp, synthetic construct
  misc_feature 1..80: note = Artificially Synthesized Probe
  source 1..80: mol_type = other DNA
cttgggtggatggatttacaagtgaatggatagaatcataggtaggtggacgaataaatgagtagatttgtgggtgtgtg

SEQ ID NO: 96531 - DNA, 80 bp, synthetic construct
  misc_feature 1..80: note = Artificially Synthesized Probe
  source 1..80: mol_type = other DNA
catgggtaaattggatggaattggatgggcttgatcagtggatccatggatccattgatgggtggatgagtacttagatg

SEQ ID NO: 96532 - DNA, 80 bp, synthetic construct
  misc_feature 1..80: note = Artificially Synthesized Probe
  source 1..80: mol_type = other DNA
gatacaaacaggcatattgttctcctgaaccttccgcctctagcttcatttctttttcccagtgcccaggctccagtagg

SEQ ID NO: 96533 - DNA, 80 bp, synthetic construct; identical to SEQ ID NO: 34353
  misc_feature 1..80: note = Artificially Synthesized Probe
  source 1..80: mol_type = other DNA

SEQ ID NO: 96534 - DNA, 80 bp, synthetic construct
  misc_feature 1..80: note = Artificially Synthesized Probe
  source 1..80: mol_type = other DNA
aaaaatacaaaaattagctgggcatgatggcaggcgcctgtaatcccagctactcaggaggctgaagcaggagaatcgct

SEQ ID NO: 96535 - DNA, 80 bp, synthetic construct
  misc_feature 1..80: note = Artificially Synthesized Probe
  source 1..80: mol_type = other DNA
agccaagtgagcgtggggttggaaccatgctaacatgtcaagtgcccgtgggtcctcgaggaggctgaaagtgtgtgaat

SEQ ID NO: 96536 - DNA, 80 bp, synthetic construct
  misc_feature 1..80: note = Artificially Synthesized Probe
  source 1..80: mol_type = other DNA
gtgatccagaaattacaagtgtgagccactgcgcccagacactatgtttaattttttttttttttttttttttttttttt

SEQ ID NO: 96537 - DNA, 80 bp, synthetic construct; identical to SEQ ID NO: 34276
  misc_feature 1..80: note = Artificially Synthesized Probe
  source 1..80: mol_type = other DNA

SEQ ID NO: 96538 - DNA, 80 bp, synthetic construct
  misc_feature 1..80: note = Artificially Synthesized Probe
  source 1..80: mol_type = other DNA
agtagagatggggtttctcaatgttggtcaggctggtctcgaactcccgacctcaggtgatctgcccgccttggtctccc

SEQ ID NO: 96539 - DNA, 80 bp, synthetic construct; identical to SEQ ID NO: 34354
  misc_feature 1..80: note = Artificially Synthesized Probe
  source 1..80: mol_type = other DNA

SEQ ID NO: 96540 - DNA, 80 bp, synthetic construct
  misc_feature 1..80: note = Artificially Synthesized Probe
  source 1..80: mol_type = other DNA
tcctaggagggactgccataacagtgtacgacaaaccgtatggctgaagcaacaggaattattctcttatcatcccagag

SEQ ID NO: 96541 - DNA, 80 bp, synthetic construct
  misc_feature 1..80: note = Artificially Synthesized Probe
  source 1..80: mol_type = other DNA
ttttatttttttattttttggagacggaatctcaccctgtcgcccaggctggagtgcagtggtactatctctgctcactg

SEQ ID NO: 96542 - DNA, 80 bp, synthetic construct
  misc_feature 1..80: note = Artificially Synthesized Probe
  source 1..80: mol_type = other DNA
gatccgcctgcctcggcctccccaagtgctgggattacaggtgtgagccaccacgcccgaccccctcttctaaggacatt

SEQ ID NO: 96543 - DNA, 80 bp, synthetic construct; identical to SEQ ID NO: 34355
  misc_feature 1..80: note = Artificially Synthesized Probe
  source 1..80: mol_type = other DNA

SEQ ID NO: 96544 - DNA, 80 bp, synthetic construct
  misc_feature 1..80: note = Artificially Synthesized Probe
  source 1..80: mol_type = other DNA
tccccaggttccaggagacataacttccagggcccaccattggaccagacaccagaagggctggcctggcccagcccata

SEQ ID NO: 96545 - DNA, 80 bp, synthetic construct; identical to SEQ ID NO: 34283
  misc_feature 1..80: note = Artificially Synthesized Probe
  source 1..80: mol_type = other DNA

SEQ ID NO: 96546 - DNA, 80 bp, synthetic construct
  misc_feature 1..80: note = Artificially Synthesized Probe
  source 1..80: mol_type = other DNA
ggccatcctcgccccagggagggaggtgcacttcctatcccaagaatggccgcagcgatcacacaaagagccggctcaga

SEQ ID NO: 96547 - DNA, 80 bp, synthetic construct
  misc_feature 1..80: note = Artificially Synthesized Probe
  source 1..80: mol_type = other DNA
ggtccctataagaccccttttttaggcccaggccttgaaaatgattggggaagggaaggggccatcatctgtcaagcgac

SEQ ID NO: 96548 - DNA, 80 bp, synthetic construct; identical to SEQ ID NO: 34356
  misc_feature 1..80: note = Artificially Synthesized Probe
  source 1..80: mol_type = other DNA

SEQ ID NO: 96549 - DNA, 80 bp, synthetic construct
  misc_feature 1..80: note = Artificially Synthesized Probe
  source 1..80: mol_type = other DNA
gccaggtgtggtggctcatgcctataatcccagctactcgggaagctgaggcaggagaatcacttgaacatgggaggcag

SEQ ID NO: 96550 - DNA, 80 bp, synthetic construct
  misc_feature 1..80: note = Artificially Synthesized Probe
  source 1..80: mol_type = other DNA
tgggcaccagctgtgtctcctgcataacaggatgggctcagatgagggtgatctggaggccccagtgagctcacatgtct

SEQ ID NO: 96551 - DNA, 80 bp, synthetic construct; identical to SEQ ID NO: 34357
  misc_feature 1..80: note = Artificially Synthesized Probe
  source 1..80: mol_type = other DNA

SEQ ID NO: 96552 - DNA, 80 bp, synthetic construct
  misc_feature 1..80: note = Artificially Synthesized Probe
  source 1..80: mol_type = other DNA
ggtcccacatgatgccaggtgcctcctgagggacctctgagaacttaatttggaggaaacactttaactgcttggcacag

SEQ ID NO: 96553 - DNA, 80 bp, synthetic construct
  misc_feature 1..80: note = Artificially Synthesized Probe
  source 1..80: mol_type = other DNA
aaacctgtctctactaaaaatacaaaaattaactgggcgtggtggtgggcgcctgtaatctcagctactggaaggctgag

SEQ ID NO: 96554 - DNA, 80 bp, synthetic construct
  misc_feature 1..80: note = Artificially Synthesized Probe
  source 1..80: mol_type = other DNA
atgataaataaacggcagaacaccagaccatatggatacaaccaagtattgctgggtatcacagacccctgtgcttccaa

SEQ ID NO: 96555 - DNA, 80 bp, synthetic construct
  misc_feature 1..80: note = Artificially Synthesized Probe
  source 1..80: mol_type = other DNA
gatttaaagcatatcttctcagctgcagcattggtgacattgggggcagatcattctcttgggtagcagctgccgtctgc

SEQ ID NO: 96556 - DNA, 80 bp, synthetic construct
  misc_feature 1..80: note = Artificially Synthesized Probe
  source 1..80: mol_type = other DNA
caacacccaataagaaaaccacaaaagacgtcaatgtatacttcatcagagaagagctatgaatggccagcaagcacatg

SEQ ID NO: 96557 - DNA, 80 bp, synthetic construct; identical to SEQ ID NO: 34358
  misc_feature 1..80: note = Artificially Synthesized Probe
  source 1..80: mol_type = other DNA

SEQ ID NO: 96558 - DNA, 80 bp, synthetic construct
  misc_feature 1..80: note = Artificially Synthesized Probe
  source 1..80: mol_type = other DNA
gttcgagaccagcctgaccaacatggagaaaccccgtctctactaaaaatacaaaattagccaggcatggtggcacatgc

SEQ ID NO: 96559 - DNA, 80 bp, synthetic construct
  misc_feature 1..80: note = Artificially Synthesized Probe
  source 1..80: mol_type = other DNA
ctcacccactagggtggctagaataaaaaagacagtgaataacaaatattggccagggatggtggctcatgcctgtaatc

SEQ ID NO: 96560 - DNA, 80 bp, synthetic construct
  misc_feature 1..80: note = Artificially Synthesized Probe
  source 1..80: mol_type = other DNA
ccgaggcaagagaatcgcttgaacccaggaggcagaggttgcagtgagccgagattgtgccgttgtactccagcctgaac

SEQ ID NO: 96561 - DNA, 80 bp, synthetic construct
  misc_feature 1..80: note = Artificially Synthesized Probe
  source 1..80: mol_type = other DNA
gagaggtaggagaatgttttcccaggaatctctgaatgccacgccatgtctacgtttcctcctacagaggagagaagcaa

SEQ ID NO: 96562 - DNA, 80 bp, synthetic construct; identical to SEQ ID NO: 34359
  misc_feature 1..80: note = Artificially Synthesized Probe
  source 1..80: mol_type = other DNA

SEQ ID NO: 96563 - DNA, 80 bp, synthetic construct
  misc_feature 1..80: note = Artificially Synthesized Probe
  source 1..80: mol_type = other DNA
gtttttgtttttgtttgtttgagtcagagtcttgctctgtcacccaggctagagtgcagtggtgtgatcccagctcactg

SEQ ID NO: 96564 - DNA, 80 bp, synthetic construct
  misc_feature 1..80: note = Artificially Synthesized Probe
  source 1..80: mol_type = other DNA
cacacctgtaatcccagcactttgggaggcctaagaggcaggatcacatgaacccaggagttcgagaccagcctgggcaa

SEQ ID NO: 96565 - DNA, 80 bp, synthetic construct
  misc_feature 1..80: note = Artificially Synthesized Probe
  source 1..80: mol_type = other DNA
ctccagcctgagtaacagagcaagaccgtatctcaaaaaaaaaaaaaaagaaaagaaagaaacatttctgattgacaaat

SEQ ID NO: 96566 - DNA, 80 bp, synthetic construct
  misc_feature 1..80: note = Artificially Synthesized Probe
  source 1..80: mol_type = other DNA
tgactcctaagtgactttgcgtctgtcatcatctgactgaccgaagtcctaggatgctgccctctttttttttttttttt

SEQ ID NO: 96567 - DNA, 80 bp, synthetic construct; identical to SEQ ID NO: 34360
  misc_feature 1..80: note = Artificially Synthesized Probe
  source 1..80: mol_type = other DNA

SEQ ID NO: 96568 - DNA, 80 bp, synthetic construct
  misc_feature 1..80: note = Artificially Synthesized Probe
  source 1..80: mol_type = other DNA
tcagaggcagcctgccctggcccccgaacccgctcccagaaggcagcattaaaagaacccattcattcccctggtcctgg

SEQ ID NO: 96569 - DNA, 80 bp, synthetic construct
  misc_feature 1..80: note = Artificially Synthesized Probe
  source 1..80: mol_type = other DNA
gacctgaagcatgactttgagaggctcaagcaggccatggagatggtgggcttcctccccgccaccaagaagcagtaagt

SEQ ID NO: 96570 - DNA, 80 bp, synthetic construct; identical to SEQ ID NO: 34361
  misc_feature 1..80: note = Artificially Synthesized Probe
  source 1..80: mol_type = other DNA

SEQ ID NO: 96571 - DNA, 80 bp, synthetic construct
  misc_feature 1..80: note = Artificially Synthesized Probe
  source 1..80: mol_type = other DNA
cgtggtagtatgcacctgtggtcccagctacttgtggggctgaggtgggaggatcacttgggcctgggaggacaaggctg

SEQ ID NO: 96572 - DNA, 80 bp, synthetic construct
  misc_feature 1..80: note = Artificially Synthesized Probe
  source 1..80: mol_type = other DNA
ttcaaggctgtaagtgagctaggattgtaccgcttcatttcagctcgggcaacagagtaagatcctgtctctaaaaatca

SEQ ID NO: 96573 - DNA, 80 bp, synthetic construct
  misc_feature 1..80: note = Artificially Synthesized Probe
  source 1..80: mol_type = other DNA
cctcagcctcccaagcagctgggactacaggcgcgtgccaccacacctggacaattttttgtagagatggggtttcctca

SEQ ID NO: 96574 - DNA, 80 bp, synthetic construct; identical to SEQ ID NO: 34362
  misc_feature 1..80: note = Artificially Synthesized Probe
  source 1..80: mol_type = other DNA

SEQ ID NO: 96575 - DNA, 80 bp, synthetic construct
  misc_feature 1..80: note = Artificially Synthesized Probe
  source 1..80: mol_type = other DNA
gccaaggcaggtggattgcctgagctcacgagttcaaggccaggctgggcaacatggcgaaaccctgtctctactaaaaa

SEQ ID NO: 96576 - DNA, 80 bp, synthetic construct
  misc_feature 1..80: note = Artificially Synthesized Probe
  source 1..80: mol_type = other DNA
gtggggttacaggcacccgctaccacgcccagctaatttttatatttttagtagagatggaatttcaccatgttggccag

SEQ ID NO: 96577 - DNA, 80 bp, synthetic construct
  misc_feature 1..80: note = Artificially Synthesized Probe
  source 1..80: mol_type = other DNA
aaaaaaaaaaaaaagatggcacctctgaatagccagtggactccatcctggacaacatagccagtgactggccagacaca

SEQ ID NO: 96578 - DNA, 80 bp, synthetic construct
  misc_feature 1..80: note = Artificially Synthesized Probe
  source 1..80: mol_type = other DNA
tcactagccaggcatggtggtacaaacctgtagtcccagctacctgagaggctgagataggaggctcaactgagcccggg

SEQ ID NO: 96579 - DNA, 80 bp, synthetic construct
  misc_feature 1..80: note = Artificially Synthesized Probe
  source 1..80: mol_type = other DNA
ttgaggccaggagtttgagaccagcctgggcaacatagcaagaccccatccctttaaaaatatgtttttaaattagccaa

SEQ ID NO: 96580 - DNA, 80 bp, synthetic construct; identical to SEQ ID NO: 34363
  misc_feature 1..80: note = Artificially Synthesized Probe
  source 1..80: mol_type = other DNA

SEQ ID NO: 96581 - DNA, 80 bp, synthetic construct
  misc_feature 1..80: note = Artificially Synthesized Probe
  source 1..80: mol_type = other DNA
gaagggttggaggtcgggccacccgaggtgctggacaccctgtcgcagcttctgaaggtactgattgccacctctgtccc

SEQ ID NO: 96582 - DNA, 80 bp, synthetic construct
  misc_feature 1..80: note = Artificially Synthesized Probe
  source 1..80: mol_type = other DNA
gcacctcctcctcccaccctcaagtgaaagcctctttaaaactacagctcaggggccgggtgcggtgtctcacctgtaat

SEQ ID NO: 96583 - DNA, 80 bp, synthetic construct
  misc_feature 1..80: note = Artificially Synthesized Probe
  source 1..80: mol_type = other DNA
ggcacgagaatcacttgaacctgggaggcagaggctgcagtgagccaagattgcgccactgcactccagtctgggcgaca

SEQ ID NO: 96584 - DNA, 80 bp, synthetic construct; identical to SEQ ID NO: 34364
  misc_feature 1..80: note = Artificially Synthesized Probe
  source 1..80: mol_type = other DNA

SEQ ID NO: 96585 - DNA, 80 bp, synthetic construct; identical to SEQ ID NO: 34284
  misc_feature 1..80: note = Artificially Synthesized Probe
  source 1..80: mol_type = other DNA

SEQ ID NO: 96586 - DNA, 80 bp, synthetic construct
  misc_feature 1..80: note = Artificially Synthesized Probe
  source 1..80: mol_type = other DNA
cctcctcctccaccggttctcagccaggggcagttctgcccctaggacacactgggcaatgtctggagaactttctggtt

SEQ ID NO: 96587 - DNA, 80 bp, synthetic construct
  misc_feature 1..80: note = Artificially Synthesized Probe
  source 1..80: mol_type = other DNA
taatccatttatgctttgcgttccattattggtacaggagccccagcttctgttgagttcttggggatatgtgagcatct

SEQ ID NO: 96588 - DNA, 80 bp, synthetic construct
  misc_feature 1..80: note = Artificially Synthesized Probe
  source 1..80: mol_type = other DNA
ccatctctactaaaaatacaaaaattaactgggcatggtggcaggtgcctgtagtcccagctattcgggaggctgagaca

SEQ ID NO: 96589 - DNA, 80 bp, synthetic construct; identical to SEQ ID NO: 34365
  misc_feature 1..80: note = Artificially Synthesized Probe
  source 1..80: mol_type = other DNA

SEQ ID NO: 96590 - DNA, 80 bp, synthetic construct
  misc_feature 1..80: note = Artificially Synthesized Probe
  source 1..80: mol_type = other DNA
gtacatcgcaggccaggtgcagcggctcacgcctataatcccagcactttgggaggcccaggcaggcagatcgcccaagg

SEQ ID NO: 96591 - DNA, 80 bp, synthetic construct
  misc_feature 1..80: note = Artificially Synthesized Probe
  source 1..80: mol_type = other DNA
caggattgtgccactgcactctagcctgggtgatagagtgagactctgtctcaaacaaacaaacaaacaaaaaccaaaaa

SEQ ID NO: 96592 - DNA, 80 bp, synthetic construct; identical to SEQ ID NO: 34366
  misc_feature 1..80: note = Artificially Synthesized Probe
  source 1..80: mol_type = other DNA

SEQ ID NO: 96593 - DNA, 80 bp, synthetic construct
  misc_feature 1..80: note = Artificially Synthesized Probe
  source 1..80: mol_type = other DNA
tgcaagctcaggtgtggcacaagccagcctgggaggcaaaccatgggcctcaggccagaacttgagccacatgcattcaa

SEQ ID NO: 96594 - DNA, 80 bp, synthetic construct
  misc_feature 1..80: note = Artificially Synthesized Probe
  source 1..80: mol_type = other DNA
agcagagcagttgcaacagagaacatcaggccccaaagccaaaaataatgactccttcatcccttccagaaaagaatttg

SEQ ID NO: 96595 - DNA, 80 bp, synthetic construct
  misc_feature 1..80: note = Artificially Synthesized Probe
  source 1..80: mol_type = other DNA
tctcaagagcaggatcacttgcagcttgtttaacaataggaaagtacctaatcacggcagggatttttagcccctcaccc

SEQ ID NO: 96596 - DNA, 80 bp, synthetic construct
  misc_feature 1..80: note = Artificially Synthesized Probe
  source 1..80: mol_type = other DNA
cagctactcaggaggctgaggccggaggatcacttgagcctgggaggttgaggctgcagtgagccaagatggtgccactg

SEQ ID NO: 96597 - DNA, 80 bp, synthetic construct; identical to SEQ ID NO: 34367
  misc_feature 1..80: note = Artificially Synthesized Probe
  source 1..80: mol_type = other DNA

SEQ ID NO: 96598 - DNA, 80 bp, synthetic construct
  misc_feature 1..80: note = Artificially Synthesized Probe
  source 1..80: mol_type = other DNA
actgcaacctctgcctcctgggttcaagtgattttcatgcctcagcctcctgagtagctgggattacaggtgtgcgccac

SEQ ID NO: 96599 - DNA, 80 bp, synthetic construct
  misc_feature 1..80: note = Artificially Synthesized Probe
  source 1..80: mol_type = other DNA
cctgagcagctgggattacaggcatgtgccaccacgcccggctacttttgtatttttagtagagacagggtttcaccatg

SEQ ID NO: 96600 - DNA, 80 bp, synthetic construct
  misc_feature 1..80: note = Artificially Synthesized Probe
  source 1..80: mol_type = other DNA
agtactgggatgacaggcgtgagccaccacgtccggccacaaaagagctttgatgcacacggtgacagccacatggtgca

SEQ ID NO: 96601 - DNA, 80 bp, synthetic construct; identical to SEQ ID NO: 34368
  misc_feature 1..80: note = Artificially Synthesized Probe
  source 1..80: mol_type = other DNA

SEQ ID NO: 96602 - DNA, 80 bp, synthetic construct
  misc_feature 1..80: note = Artificially Synthesized Probe
  source 1..80: mol_type = other DNA
gaccccgtctccacaataaaattaaaaattaaggccaggcacggtggctcacgcctgtaatcccagcactttgggaggcc

SEQ ID NO: 96603 - DNA, 80 bp, synthetic construct
  misc_feature 1..80: note = Artificially Synthesized Probe
  source 1..80: mol_type = other DNA
ggagggagaggttgcagtgagccaagactgtgtcactgtacttcagcctgggcgatagaacaagactccacctcaaaaat

SEQ ID NO: 96604 - DNA, 80 bp, synthetic construct
  misc_feature 1..80: note = Artificially Synthesized Probe
  source 1..80: mol_type = other DNA
tgcgctagtgcacttcagcctggataacagagtgagaccctgtgtcaaaaaaaaaaaaaaaaaaagtacaaagggccatc

SEQ ID NO: 96605 - DNA, 80 bp, synthetic construct
  misc_feature 1..80: note = Artificially Synthesized Probe
  source 1..80: mol_type = other DNA
taaaaatacaaaaattagccaggtatagtggcgcttgcctgtaatctcagctacttgggaggctgagacaggagaatctc

SEQ ID NO: 96606 - DNA, 80 bp, synthetic construct; identical to SEQ ID NO: 34369
  misc_feature 1..80: note = Artificially Synthesized Probe
  source 1..80: mol_type = other DNA

SEQ ID NO: 96607 - DNA, 80 bp, synthetic construct
  misc_feature 1..80: note = Artificially Synthesized Probe
  source 1..80: mol_type = other DNA
ctgggtccctctctgtggtgggaccctgagcaccacggggtgtggaccagcatttccagcctcaaccttcttcatgttgg

SEQ ID NO: 96608 - DNA, 80 bp, synthetic construct
  misc_feature 1..80: note = Artificially Synthesized Probe
  source 1..80: mol_type = other DNA
tacgaaattcaacaggcccagggcagaatgaaaacataaggccccttattcaaaaacgacagattctggcatgtacctgt

SEQ ID NO: 96609 - DNA, 80 bp, synthetic construct
  misc_feature 1..80: note = Artificially Synthesized Probe
  source 1..80: mol_type = other DNA
tgttctgccgagcaacagggactggggacctaacaggtcacagcctgtagagccaacccctctcatgaaggctggctccc

SEQ ID NO: 96610 - DNA, 80 bp, synthetic construct; identical to SEQ ID NO: 34370
  misc_feature 1..80: note = Artificially Synthesized Probe
  source 1..80: mol_type = other DNA

SEQ ID NO: 96611 - DNA, 80 bp, synthetic construct
  misc_feature 1..80: note = Artificially Synthesized Probe
  source 1..80: mol_type = other DNA
tcttgcaagccctgaactcaccccattccacttttttttttttttttttttttgagacagggtcttgctctgtcacccag

SEQ ID NO: 96612 - DNA, 80 bp, synthetic construct
  misc_feature 1..80: note = Artificially Synthesized Probe
  source 1..80: mol_type = other DNA
agtctcgaactcctgagctcaggcaatctgctcaccttggtctcccaaagtgttgggattacaggtgtaagccaccatgc

SEQ ID NO: 96613 - DNA, 80 bp, synthetic construct
  misc_feature 1..80: note = Artificially Synthesized Probe
  source 1..80: mol_type = other DNA
aaggctgagtaatattccattttctggatgtaccacattttgcttatccatccatccttcagtagacacttgggttgctt

SEQ ID NO: 96614 - DNA, 80 bp, synthetic construct
  misc_feature 1..80: note = Artificially Synthesized Probe
  source 1..80: mol_type = other DNA
tttccataacagctgcagcattttataaggaaatatcatgttgttgcacacccagcccaaagggaaaatagcatgagcta

SEQ ID NO: 96615 - DNA, 80 bp, synthetic construct; identical to SEQ ID NO: 34371
  misc_feature 1..80: note = Artificially Synthesized Probe
  source 1..80: mol_type = other DNA

SEQ ID NO: 96616 - DNA, 80 bp, synthetic construct
  misc_feature 1..80: note = Artificially Synthesized Probe
  source 1..80: mol_type = other DNA
tcccgagtagctgggactacaggtgcatgccaccatgcccagctaattttttgtatttttagtagagatagggtttcacc

SEQ ID NO: 96617 - DNA, 80 bp, synthetic construct
  misc_feature 1..80: note = Artificially Synthesized Probe
  source 1..80: mol_type = other DNA
taaatagtcaaccatccttattcatgtcttctccttcacgttgatgattctgatgggaaaatgaaactgacaggcttatg

SEQ ID NO: 96618 - DNA, 80 bp, synthetic construct; identical to SEQ ID NO: 34372
  misc_feature 1..80: note = Artificially Synthesized Probe
  source 1..80: mol_type = other DNA

SEQ ID NO: 96619 - DNA, 80 bp, synthetic construct
  misc_feature 1..80: note = Artificially Synthesized Probe
  source 1..80: mol_type = other DNA
aaaaatacaaaaaaaaaaaaaaagaaaaaaagaaaaacacacacacacacaaaattagccaggtatggtgtggtgcacct

SEQ ID NO: 96620 - DNA, 80 bp, synthetic construct
  misc_feature 1..80: note = Artificially Synthesized Probe
  source 1..80: mol_type = other DNA
gtcagttacacattaacgtgatcacattttagatacacagggttaaattaagtgtattattaaagttaattttgagccac

SEQ ID NO: 96621 - DNA, 80 bp, synthetic construct
  misc_feature 1..80: note = Artificially Synthesized Probe
  source 1..80: mol_type = other DNA
ttcacctttttttttactttttacatgtgattattagaaaatttgaggctgggcatggtggctcatgctaacaataccag

SEQ ID NO: 96622 - DNA, 80 bp, synthetic construct
  misc_feature 1..80: note = Artificially Synthesized Probe
  source 1..80: mol_type = other DNA
aaaaaatttgagatggagtttctgcgaaaaaaaatttttttattaaccaggcatatagtggcacatgcctgtagtcctag

SEQ ID NO: 96623 - DNA, 80 bp, synthetic construct
  misc_feature 1..80: note = Artificially Synthesized Probe
  source 1..80: mol_type = other DNA
aaaaaaagaaaatgtgaagattcctgttggacaacatagctctggaacaggggccagcaaaccacagcctgtgggtcaaa

SEQ ID NO: 96624 - DNA, 80 bp, synthetic construct; identical to SEQ ID NO: 34373
  misc_feature 1..80: note = Artificially Synthesized Probe
  source 1..80: mol_type = other DNA

SEQ ID NO: 96625 - DNA, 80 bp, synthetic construct
  misc_feature 1..80: note = Artificially Synthesized Probe
  source 1..80: mol_type = other DNA
tgaactcctaacttcaggtgatctgcccacctcagcctctcaaagtgctgggattacaggcgtgagccaccacgcccagc

SEQ ID NO: 96626 - DNA, 80 bp, synthetic construct
  misc_feature 1..80: note = Artificially Synthesized Probe
  source 1..80: mol_type = other DNA
tttttttttcactttgaagttcaggggtacatgtgcagatttgttacataggtaaacttgtgtcatgggggtttgttgta

SEQ ID NO: 96627 - DNA, 80 bp, synthetic construct
  misc_feature 1..80: note = Artificially Synthesized Probe
  source 1..80: mol_type = other DNA
gtccatgtgttctcatcatttggctccctcttataaataagaacatgcaatatttggttttctgttcctgcattagtatg

SEQ ID NO: 96628 - DNA, 80 bp, synthetic construct; identical to SEQ ID NO: 34374
  misc_feature 1..80: note = Artificially Synthesized Probe
  source 1..80: mol_type = other DNA

SEQ ID NO: 96629 - DNA, 80 bp, synthetic construct
  misc_feature 1..80: note = Artificially Synthesized Probe
  source 1..80: mol_type = other DNA
cagtccaaaagttttggatttttttttttttttttgagatggagtcttgctatattgcccgggctggtctcaaactcctg

SEQ ID NO: 96630 - DNA, 80 bp, synthetic construct
  misc_feature 1..80: note = Artificially Synthesized Probe
  source 1..80: mol_type = other DNA
cttggcctctcagttactttttatgtcagttacatgttaacatgatcacattttggatatatcatgttaaattaagtgta

SEQ ID NO: 96631 - DNA, 80 bp, synthetic construct; identical to SEQ ID NO: 34285
  misc_feature 1..80: note = Artificially Synthesized Probe
  source 1..80: mol_type = other DNA

SEQ ID NO: 96632 - DNA, 80 bp, synthetic construct; identical to SEQ ID NO: 34375
  misc_feature 1..80: note = Artificially Synthesized Probe
  source 1..80: mol_type = other DNA

SEQ ID NO: 96633 - DNA, 80 bp, synthetic construct
  misc_feature 1..80: note = Artificially Synthesized Probe
  source 1..80: mol_type = other DNA
cgacctgtatgcaatatatgttatgtagatattacatatctgggagataagaaacttaccgaccccgcgccacccctgca

SEQ ID NO: 96634 - DNA, 80 bp, synthetic construct
  misc_feature 1..80: note = Artificially Synthesized Probe
  source 1..80: mol_type = other DNA
gcatgggcactgggtcaggttctgcagcccccagagccttaccccaaatccagactttcccaagagcgcctttttatttt

SEQ ID NO: 96635 - DNA, 80 bp, synthetic construct
  misc_feature 1..80: note = Artificially Synthesized Probe
  source 1..80: mol_type = other DNA
ctacagggtcacaccaccatacccggctaatttttgtatttctttgtagcaacagggtttcgtcatgttttccaggctgg

SEQ ID NO: 96636 - DNA, 80 bp, synthetic construct; identical to SEQ ID NO: 34376
  misc_feature 1..80: note = Artificially Synthesized Probe
  source 1..80: mol_type = other DNA

SEQ ID NO: 96637 - DNA, 80 bp, synthetic construct
  misc_feature 1..80: note = Artificially Synthesized Probe
  source 1..80: mol_type = other DNA
gcaagagacaggattggcgagttgttacaaagggcagtgcagtgtgtggaattgggacccagatgctgctgggctctggt

SEQ ID NO: 96638 - DNA, 80 bp, synthetic construct
  misc_feature 1..80: note = Artificially Synthesized Probe
  source 1..80: mol_type = other DNA
caagccaggtgggctcttgagcccaggagatcaagaccagcctgggcaacacagaaagattccacctcggccaggcacag

SEQ ID NO: 96639 - DNA, 80 bp, synthetic construct
  misc_feature 1..80: note = Artificially Synthesized Probe
  source 1..80: mol_type = other DNA
ctcaggaggctgaggcaggaaaattgcttgaacctgggaggcggaggttgcagtgagcggagatcactccattgcactcc

SEQ ID NO: 96640 - DNA, 80 bp, synthetic construct
  misc_feature 1..80: note = Artificially Synthesized Probe
  source 1..80: mol_type = other DNA
ccagctacttgggaggctgaggcaggagaattgtttgaacccgggaggtggagttcttaaaaccacagtaatctattctc

SEQ ID NO: 96641 - DNA, 80 bp, synthetic construct; identical to SEQ ID NO: 34377
  misc_feature 1..80: note = Artificially Synthesized Probe
  source 1..80: mol_type = other DNA

SEQ ID NO: 96642 - DNA, 80 bp, synthetic construct
  misc_feature 1..80: note = Artificially Synthesized Probe
  source 1..80: mol_type = other DNA
agaccattgtcccccaccatccagttccgctctcaggtgatcagaaaatggaacgagctccctgtgtcctttgtagaaac

SEQ ID NO: 96643 - DNA, 80 bp, synthetic construct
  misc_feature 1..80: note = Artificially Synthesized Probe
  source 1..80: mol_type = other DNA
caggtgccttgccaccatgcccagctaatttttgtatttttagtagagatggggttttttcaccatgttggccaggctgc

SEQ ID NO: 96644 - DNA, 80 bp, synthetic construct
  misc_feature 1..80: note = Artificially Synthesized Probe
  source 1..80: mol_type = other DNA
ccattacacctgaccctgtcttctgtttttagaaggacaccatccatatggaactaggtcccacgctaatgacctcatct

SEQ ID NO: 96645 - DNA, 80 bp, synthetic construct; identical to SEQ ID NO: 34378
  misc_feature 1..80: note = Artificially Synthesized Probe
  source 1..80: mol_type = other DNA

SEQ ID NO: 96646 - DNA, 80 bp, synthetic construct
  misc_feature 1..80: note = Artificially Synthesized Probe
  source 1..80: mol_type = other DNA
tggctcccacctgtaattccaacactttgggaggccgaggtggaggatcatttgagaccaggagttaaagaccagcctgg

SEQ ID NO: 96647 - DNA, 80 bp, synthetic construct
  misc_feature 1..80: note = Artificially Synthesized Probe
  source 1..80: mol_type = other DNA
ccattgcattctagcctgggcaacagagcaagaccccagctctaaaaattaaaaaaaaaaaaaaaaaagtagagacggca

SEQ ID NO: 96648 - DNA, 80 bp, synthetic construct
  misc_feature 1..80: note = Artificially Synthesized Probe
  source 1..80: mol_type = other DNA
ttctgaaatactgtgctaaaatattacctatctcaatgactgagggttttgggggacactcaaggcagatgccttacact

SEQ ID NO: 96649 - DNA, 80 bp, synthetic construct; identical to SEQ ID NO: 34379
  misc_feature 1..80: note = Artificially Synthesized Probe
  source 1..80: mol_type = other DNA

SEQ ID NO: 96650 - DNA, 80 bp, synthetic construct
  misc_feature 1..80: note = Artificially Synthesized Probe
  source 1..80: mol_type = other DNA
cagaagtcacccaggcccaggattattcttaggagctgcctacgatgggtaacagatccagacctcccaggggacagact

SEQ ID NO: 96651 - DNA, 80 bp, synthetic construct
  misc_feature 1..80: note = Artificially Synthesized Probe
  source 1..80: mol_type = other DNA
agtcgtttgggaggctgaggcaggaggatcacttgaggccaggagttcaagaccagcctgggtaacatagcaagtcccct

SEQ ID NO: 96652 - DNA, 80 bp, synthetic construct
  misc_feature 1..80: note = Artificially Synthesized Probe
  source 1..80: mol_type = other DNA
ggatccaaggaagggacctcagggccggttgtggggccggaactgtgtttcaggagggagtgtgcatgcaccctcatgta

SEQ ID NO: 96653 - DNA, 80 bp, synthetic construct
  misc_feature 1..80: note = Artificially Synthesized Probe
  source 1..80: mol_type = other DNA
caaatatttttctgttttaaaaatcctgaagccttgagagcgtcacttcaccctcagcctccttgtaccaggctgcagct

SEQ ID NO: 96654 - DNA, 80 bp, synthetic construct
  misc_feature 1..80: note = Artificially Synthesized Probe
  source 1..80: mol_type = other DNA
ccacccctctgtgcacagagccctgtgccacttcactgctctgcccaccccatgcacccacccacctcgtgcaccagggg

SEQ ID NO: 96655 - DNA, 80 bp, synthetic construct
  misc_feature 1..80: note = Artificially Synthesized Probe
  source 1..80: mol_type = other DNA
cctaggcagctcagcagatgtggagaatgggaataaacttggggggtctttgggggaatcagtgggataggtgatagcta

SEQ ID NO: 96656 - DNA, 80 bp, synthetic construct; identical to SEQ ID NO: 34380
  misc_feature 1..80: note = Artificially Synthesized Probe
  source 1..80: mol_type = other DNA

SEQ ID NO: 96657 - DNA, 80 bp, synthetic construct
  misc_feature 1..80: note = Artificially Synthesized Probe
  source 1..80: mol_type = other DNA
catagttcaagaactgccatttgcacttaggatgggccccaccccaccgtcagcccttcctgcgccagcccggggtcttt

SEQ ID NO: 96658 - DNA, 80 bp, synthetic construct
  misc_feature 1..80: note = Artificially Synthesized Probe
  source 1..80: mol_type = other DNA
gacagctcctacgtgcgggagctcatcggcatggaccccgtggccgtgttccgctgggccgtgctccgggctgctatccg

SEQ ID NO: 96659 - DNA, 80 bp, synthetic construct; identical to SEQ ID NO: 34381
  misc_feature 1..80: note = Artificially Synthesized Probe
  source 1..80: mol_type = other DNA

SEQ ID NO: 96660 - DNA, 80 bp, synthetic construct
  misc_feature 1..80: note = Artificially Synthesized Probe
  source 1..80: mol_type = other DNA
tgcctcttgtttctctctctctgtcttgctctttttttttttttttttttttagagacagggtctctctctctctctctc

SEQ ID NO: 96661 - DNA, 80 bp, synthetic construct
  misc_feature 1..80: note = Artificially Synthesized Probe
  source 1..80: mol_type = other DNA
ataggctaatttttgtatttttagtagagacggggtttcgccctgttggccaggctggtctcgaactcctgacctcaagt

SEQ ID NO: 96662 - DNA, 80 bp, synthetic construct
  misc_feature 1..80: note = Artificially Synthesized Probe
  source 1..80: mol_type = other DNA
ggtgtgcctgatccactcaagacttgggccagccctatagagttgctgatagaaggatggcagaaagctatgtcctcatt

SEQ ID NO: 96663 - DNA, 80 bp, synthetic construct; identical to SEQ ID NO: 34382
  misc_feature 1..80: note = Artificially Synthesized Probe
  source 1..80: mol_type = other DNA

SEQ ID NO: 96664 - DNA, 80 bp, synthetic construct
  misc_feature 1..80: note = Artificially Synthesized Probe
  source 1..80: mol_type = other DNA
gcctcagcctcctaagtagctgcgactacaggcacccgccaccacgcctggctaattgttttgtattttttagtagagat

SEQ ID NO: 96665 - DNA, 80 bp, synthetic construct
  misc_feature 1..80: note = Artificially Synthesized Probe
  source 1..80: mol_type = other DNA
aatcccagcactttgggaggctgacgcagacgatcgcttgaggtcgggttcaagagcagcctgaccaacatggtgaaagc

SEQ ID NO: 96666 - DNA, 80 bp, synthetic construct
  misc_feature 1..80: note = Artificially Synthesized Probe
  source 1..80: mol_type = other DNA
aaaaaaaaaaaaaaattgaaaaatttaccgaatgtggacttgcacctgtagtcccagctactccagaagctgaggtggga

SEQ ID NO: 96667 - DNA, 80 bp, synthetic construct
  misc_feature 1..80: note = Artificially Synthesized Probe
  source 1..80: mol_type = other DNA
gcaagactccgtctcagaaaataaataaataggccggacacggtggctcacgtctgtaatcccaacacttcgggagaccg

SEQ ID NO: 96668 - DNA, 80 bp, synthetic construct
  misc_feature 1..80: note = Artificially Synthesized Probe
  source 1..80: mol_type = other DNA
aggcagaggttgcagtgagccaagatcgcgccactgcactccagcccaggcgacagtgcaagactctgtctcaaaaaaat

SEQ ID NO: 96669 - DNA, 80 bp, synthetic construct; identical to SEQ ID NO: 34383
  misc_feature 1..80: note = Artificially Synthesized Probe
  source 1..80: mol_type = other DNA

SEQ ID NO: 96670 - DNA, 80 bp, synthetic construct
  misc_feature 1..80: note = Artificially Synthesized Probe
  source 1..80: mol_type = other DNA
tgggaggccaaggtgggcagatcacctgaggtcaggagttcaagaccagcctggccaatatggcaaaaccccgtctctac

SEQ ID NO: 96671 - DNA, 80 bp, synthetic construct
  misc_feature 1..80: note = Artificially Synthesized Probe
  source 1..80: mol_type = other DNA
taaataaataaaatgggttaaaataattgcagcctccataggaggccatccccaccaccatccactctgtgtctccggca

SEQ ID NO: 96672 - DNA, 80 bp, synthetic construct
  misc_feature 1..80: note = Artificially Synthesized Probe
  source 1..80: mol_type = other DNA
gagccactagattagtctgtgagggaaggagatgcctcttccttcccttcaatagtgggttaaacccagctggcaccctc

SEQ ID NO: 96673 - DNA, 80 bp, synthetic construct
  misc_feature 1..80: note = Artificially Synthesized Probe
  source 1..80: mol_type = other DNA
ttaacatttcaatgttttaaaatatacttgtggtactaatgaaacatccaattccttttgttatattcctgttttcaaaa

SEQ ID NO: 96674 - DNA, 80 bp, synthetic construct
  misc_feature 1..80: note = Artificially Synthesized Probe
  source 1..80: mol_type = other DNA
ttgctctgtcacccaggcaggctggagtgcagtggcacaatctcagcacactgcaaactccacctcccaggttcaagtga

SEQ ID NO: 96675 - DNA, 80 bp, synthetic construct; identical to SEQ ID NO: 34436
  misc_feature 1..80: note = Artificially Synthesized Probe
  source 1..80: mol_type = other DNA

SEQ ID NO: 96676 - DNA, 80 bp, synthetic construct
  misc_feature 1..80: note = Artificially Synthesized Probe
  source 1..80: mol_type = other DNA
gtcccagctactcaggaggctgaggcagaagaatcgcttgaacccgtgagatggaggttgcagtgagccaaaatcatgcc

SEQ ID NO: 96677 - DNA, 80 bp, synthetic construct
  misc_feature 1..80: note = Artificially Synthesized Probe
  source 1..80: mol_type = other DNA
cacaagaaactgggagccaaagagattaaaccaggaacacaaatattcctagcttccaaatgtagaaaactgaaattcag

SEQ ID NO: 96678 - DNA, 80 bp, synthetic construct
  misc_feature 1..80: note = Artificially Synthesized Probe
  source 1..80: mol_type = other DNA
ctcaaactcctgagctcaagtgatctgcctacctcagcctcccaaagtgctgggattacaggcatgagccaccacacctg

SEQ ID NO: 96679 - DNA, 80 bp, synthetic construct; identical to SEQ ID NO: 34437
  misc_feature 1..80: note = Artificially Synthesized Probe
  source 1..80: mol_type = other DNA

SEQ ID NO: 96680 - DNA, 80 bp, synthetic construct; identical to SEQ ID NO: 34426
  misc_feature 1..80: note = Artificially Synthesized Probe
  source 1..80: mol_type = other DNA

SEQ ID NO: 96681 - DNA, 80 bp, synthetic construct
  misc_feature 1..80: note = Artificially Synthesized Probe
  source 1..80: mol_type = other DNA
ctcccgggtccatgccgttctcctgcctcagcctcccgagtagctgggactacaggcacctgccaccacacccggctttt

SEQ ID NO: 96682 - DNA, 80 bp, synthetic construct
  misc_feature 1..80: note = Artificially Synthesized Probe
  source 1..80: mol_type = other DNA
ttttaattggattacttttactttaccaaaaaattagttgatttgtttgatcactgaattgaccagttgtcttgatattt

SEQ ID NO: 96683 - DNA, 80 bp, synthetic construct
  misc_feature 1..80: note = Artificially Synthesized Probe
  source 1..80: mol_type = other DNA
ggactgtgttttccactttgtatctcccactgtgctaagcacagtgaaacgcaaaatacacactacttaatcaattagtt

SEQ ID NO: 96684 - DNA, 80 bp, synthetic construct; identical to SEQ ID NO: 34438
  misc_feature 1..80: note = Artificially Synthesized Probe
  source 1..80: mol_type = other DNA

SEQ ID NO: 96685 - DNA, 80 bp, synthetic construct
  misc_feature 1..80: note = Artificially Synthesized Probe
  source 1..80: mol_type = other DNA
atgaaccaccatcaattccaagtctagctaattttcataaataatacttgttgaatagtcccattaattctgggcttctt

SEQ ID NO: 96686 - DNA, 80 bp, synthetic construct
  misc_feature 1..80: note = Artificially Synthesized Probe
  source 1..80: mol_type = other DNA
atgtaaacattcttactttgttttaatttcaagcaacacaactcagaacatgcgcgactgcaagttcctacatcacaagt

SEQ ID NO: 96687 - DNA, 80 bp, synthetic construct
  misc_feature 1..80: note = Artificially Synthesized Probe
  source 1..80: mol_type = other DNA
aaattttgacgttcatcatcaaaactatcacaggggaattttttaatgttttggtcaaataagccaggatcatgcttcta

SEQ ID NO: 96688 - DNA, 80 bp, synthetic construct; identical to SEQ ID NO: 34439
  misc_feature 1..80: note = Artificially Synthesized Probe
  source 1..80: mol_type = other DNA

SEQ ID NO: 96689 - DNA, 80 bp, synthetic construct
  misc_feature 1..80: note = Artificially Synthesized Probe
  source 1..80: mol_type = other DNA
tgaccaacatagtgaaaccccatctctactaaaaatacaaaattagccaggcgtagtggcacatgcctgtaatcccagct

SEQ ID NO: 96690 - DNA, 80 bp, synthetic construct
  misc_feature 1..80: note = Artificially Synthesized Probe
  source 1..80: mol_type = other DNA
ttatttatctttgagacagactctcactctgtcatccaggctggagtgcagcgacgcgatctcggctcactgcaacctcc

SEQ ID NO: 96691 - DNA, 80 bp, synthetic construct
  misc_feature 1..80: note = Artificially Synthesized Probe
  source 1..80: mol_type = other DNA
ataggcaaatgtattttgaatcaatttatctgatattttcaatgaaaacaggattagtgtgaaaacaatttataggacta

SEQ ID NO: 96692 - DNA, 80 bp, synthetic construct
  misc_feature 1..80: note = Artificially Synthesized Probe
  source 1..80: mol_type = other DNA
cgcatagttgttaccaaaatattcttgtagaagtagatcaacctcaaggggagatgtgaatgatcaggatgcaatccagg

SEQ ID NO: 96693 - DNA, 80 bp, synthetic construct; identical to SEQ ID NO: 34440
  misc_feature 1..80: note = Artificially Synthesized Probe
  source 1..80: mol_type = other DNA

SEQ ID NO: 96694 - DNA, 80 bp, synthetic construct
  misc_feature 1..80: note = Artificially Synthesized Probe
  source 1..80: mol_type = other DNA
ttttataagtgaagctatcagaacaatataatttttaaagtacaatgcccttttttttttttttgagacagggtcttgct

SEQ ID NO: 96695 - DNA, 80 bp, synthetic construct
  misc_feature 1..80: note = Artificially Synthesized Probe
  source 1..80: mol_type = other DNA
aggcgatccactcaccttggcttcccaaagtgctgggattacaggcgtgagccactgtgcccagccttaaagtataatgt

SEQ ID NO: 96696 - DNA, 80 bp, synthetic construct
  misc_feature 1..80: note = Artificially Synthesized Probe
  source 1..80: mol_type = other DNA
attccttatgaactcaagttagtgttaaagctttggattccactgttaacagtttatgtaaaaacacttaacaaattgcc

SEQ ID NO: 96697 - DNA, 80 bp, synthetic construct
  misc_feature 1..80: note = Artificially Synthesized Probe
  source 1..80: mol_type = other DNA
aaattaatgttctaaatatagaaattaagagttcataaagagactgaggttgcatgtaaaagagttatggtttgagacag

SEQ ID NO: 96698 - DNA, 80 bp, synthetic construct; identical to SEQ ID NO: 34441
  misc_feature 1..80: note = Artificially Synthesized Probe
  source 1..80: mol_type = other DNA

SEQ ID NO: 96699 - DNA, 80 bp, synthetic construct
  misc_feature 1..80: note = Artificially Synthesized Probe
  source 1..80: mol_type = other DNA
caccttcactgtgcagctggatgtccttggtaagcctccaaagagacccttgagaattccttaaaatccagaagtattga

SEQ ID NO: 96700 - DNA, 80 bp, synthetic construct
  misc_feature 1..80: note = Artificially Synthesized Probe
  source 1..80: mol_type = other DNA
catacatatatagatatgtgaaggaaagtcagtgaaactagaatgacagatctatcaccaaagcttttctggaaagaaaa

SEQ ID NO: 96701 - DNA, 80 bp, synthetic construct
  misc_feature 1..80: note = Artificially Synthesized Probe
  source 1..80: mol_type = other DNA
cagtattacagaattatcataatctgtcaaacgttaaatacatagtttaaaagtgaagagtaggctgggtatagtgactc

SEQ ID NO: 96702 - DNA, 80 bp, synthetic construct
  misc_feature 1..80: note = Artificially Synthesized Probe
  source 1..80: mol_type = other DNA
ggcccactacagagctaagtaggaggaatggcacctgtcttttcttggtaaggtatagactagtttcatatgtgtcttat

SEQ ID NO: 96703 - DNA, 80 bp, synthetic construct; identical to SEQ ID NO: 34442
  misc_feature 1..80: note = Artificially Synthesized Probe
  source 1..80: mol_type = other DNA

SEQ ID NO: 96704 - DNA, 80 bp, synthetic construct
  misc_feature 1..80: note = Artificially Synthesized Probe
  source 1..80: mol_type = other DNA
tagaaaacaggtatggctacatttatgtctcaaatctgtcttaagtagagcagttcttataaaactggtgtctggttttt

SEQ ID NO: 96705 - DNA, 80 bp, synthetic construct
  misc_feature 1..80: note = Artificially Synthesized Probe
  source 1..80: mol_type = other DNA
aatattctaaaataaaaaaaaaatcagaaatccaaaacacttctggtcccaagcatttcagataatggatactcaaccca

SEQ ID NO: 96706 - DNA, 80 bp, synthetic construct
  misc_feature 1..80: note = Artificially Synthesized Probe
  source 1..80: mol_type = other DNA
gattattcaataatataccaaagggcctcaatctcaggggaaaaactagtgggctggaaattttcaaaaacacatacaat

SEQ ID NO: 96707 - DNA, 80 bp, synthetic construct; identical to SEQ ID NO: 34443
  misc_feature 1..80: note = Artificially Synthesized Probe
  source 1..80: mol_type = other DNA

SEQ ID NO: 96708 - DNA, 80 bp, synthetic construct
  misc_feature 1..80: note = Artificially Synthesized Probe
  source 1..80: mol_type = other DNA
aatttgaacccaagctgtctgatactctttccatcactcatgctgcctccctgtagatgagatgataaagaatataactt

SEQ ID NO: 96709 - DNA, 80 bp, synthetic construct
  misc_feature 1..80: note = Artificially Synthesized Probe
  source 1..80: mol_type = other DNA
ggtgtggtgcacacctgtaatcccagctactcaggaggctgtggcaggagacttccttgaacctgggaggcggaggttgc

SEQ ID NO: 96710 - DNA, 80 bp, synthetic construct
  misc_feature 1..80: note = Artificially Synthesized Probe
  source 1..80: mol_type = other DNA
attagagtttagaattctgaatggtataacaaaatagtactgcatgtcttttttactgagtttctttctgttgctgttgc

SEQ ID NO: 96711 - DNA, 80 bp, synthetic construct; identical to SEQ ID NO: 34444
  misc_feature 1..80: note = Artificially Synthesized Probe
  source 1..80: mol_type = other DNA

SEQ ID NO: 96712 - DNA, 80 bp, synthetic construct
  misc_feature 1..80: note = Artificially Synthesized Probe
  source 1..80: mol_type = other DNA
actaaacaaataataaaaagtaaaactctagataattaaaagaacatcaagaccaacaactaggaagtataatctaaaaa

SEQ ID NO: 96713 - DNA, 80 bp, synthetic construct
  misc_feature 1..80: note = Artificially Synthesized Probe
  source 1..80: mol_type = other DNA
aaacttcagtaagccagattccactaatcagaaatgtaaggcataaagtagactaggatttatctttttatcaacgatga

SEQ ID NO: 96714 - DNA, 80 bp, synthetic construct
  misc_feature 1..80: note = Artificially Synthesized Probe
  source 1..80: mol_type = other DNA
ccctatacatacgcataaatacaaacacagacacacccgagtgaatgacagggaccatcaggggacagattgaagagcag

SEQ ID NO: 96715 - DNA, 80 bp, synthetic construct
  misc_feature 1..80: note = Artificially Synthesized Probe
  source 1..80: mol_type = other DNA
tactttcatttcttaaaaatttttatttcagcttatatcaagataacactggaagagttactttactgataaaagatgta

SEQ ID NO: 96716 - DNA, 80 bp, synthetic construct; identical to SEQ ID NO: 34445
  misc_feature 1..80: note = Artificially Synthesized Probe
  source 1..80: mol_type = other DNA

SEQ ID NO: 96717 - DNA, 80 bp, synthetic construct
  misc_feature 1..80: note = Artificially Synthesized Probe
  source 1..80: mol_type = other DNA
aaaggtttgaatgtaaaacaagcttttaacccagaaggagaatttcagcgtttggcagctcaatctggactctatgaaag

SEQ ID NO: 96718 - DNA, 80 bp, synthetic construct
  misc_feature 1..80: note = Artificially Synthesized Probe
  source 1..80: mol_type = other DNA
ttatttatcctttgactcttgcacattctatgtacccctccgatttgtgaagcctacaggaaatctgggtatatggattt

SEQ ID NO: 96719 - DNA, 80 bp, synthetic construct
  misc_feature 1..80: note = Artificially Synthesized Probe
  source 1..80: mol_type = other DNA
acccgttttctcttgtaggaatactaacatggtatagattatctgagtgttccacagttgtatgtcaaaagaaaataaaa

SEQ ID NO: 96720 - DNA, 80 bp, synthetic construct; identical to SEQ ID NO: 34427
  misc_feature 1..80: note = Artificially Synthesized Probe
  source 1..80: mol_type = other DNA

SEQ ID NO: 96721 - DNA, 80 bp, synthetic construct; identical to SEQ ID NO: 34425
  misc_feature 1..80: note = Artificially Synthesized Probe
  source 1..80: mol_type = other DNA

SEQ ID NO: 96722 - DNA, 80 bp, synthetic construct
  misc_feature 1..80: note = Artificially Synthesized Probe
  source 1..80: mol_type = other DNA
aggcgtggtggcttatatgtgtagtccttactctggagggtgcagtggaaggatcgcttgtgcccaggagttggaggggc

SEQ ID NO: 96723 - DNA, 80 bp, synthetic construct
  misc_feature 1..80: note = Artificially Synthesized Probe
  source 1..80: mol_type = other DNA
taagcaaatattgtaacaattattttctccttttgaaggaacaatattcttcaagagaaggtcactctaccaaagccagg

SEQ ID NO: 96724 - DNA, 80 bp, synthetic construct
  misc_feature 1..80: note = Artificially Synthesized Probe
  source 1..80: mol_type = other DNA
ttccatataccaactaagcatgtttaactacgaacgtccaaaacacttcatccagtcccaaaacccatgtggctccagat

SEQ ID NO: 96725 - DNA, 80 bp, synthetic construct
  misc_feature 1..80: note = Artificially Synthesized Probe
  source 1..80: mol_type = other DNA
cttctccccagcagcatgctggctccaacccaggccaaagggttacaaccacctataaccagtccccagccagcttcctc

SEQ ID NO: 96726 - DNA, 80 bp, synthetic construct; identical to SEQ ID NO: 34428
  misc_feature 1..80: note = Artificially Synthesized Probe
  source 1..80: mol_type = other DNA

SEQ ID NO: 96727 - DNA, 80 bp, synthetic construct
  misc_feature 1..80: note = Artificially Synthesized Probe
  source 1..80: mol_type = other DNA
ttagttctaagctaagctcctcatgctgtaaatttaattcctctggttctgggcttggctaagatgaacacctgtctgct

SEQ ID NO: 96728 - DNA, 80 bp, synthetic construct
  misc_feature 1..80: note = Artificially Synthesized Probe
  source 1..80: mol_type = other DNA
cctggaatgtatacattttccttactgtgatcagaagaaggaaggcctgaatagatgaaggcttatgaccttacggtttc

SEQ ID NO: 96729 - DNA, 80 bp, synthetic construct; identical to SEQ ID NO: 34429
  misc_feature 1..80: note = Artificially Synthesized Probe
  source 1..80: mol_type = other DNA

SEQ ID NO: 96730 - DNA, 80 bp, synthetic construct
  misc_feature 1..80: note = Artificially Synthesized Probe
  source 1..80: mol_type = other DNA
caactttggaaatctagttgaactgcctatagcaattcaacttgcaaaaaaaaaccttttcaatattttaaaaaataaaa

SEQ ID NO: 96731 - DNA, 80 bp, synthetic construct
  misc_feature 1..80: note = Artificially Synthesized Probe
  source 1..80: mol_type = other DNA
gccctttctttctcttccctcccaaattccctttataatatatagatctttcttggttatatttacccagatgatcattt

SEQ ID NO: 96732 - DNA, 80 bp, synthetic construct
  misc_feature 1..80: note = Artificially Synthesized Probe
  source 1..80: mol_type = other DNA
caaaaacataataagaaataaagcctaggaggtccccaaaccagagatcaaagatccactttagctgttccattttcagc

SEQ ID NO: 96733 - DNA, 80 bp, synthetic construct
  misc_feature 1..80: note = Artificially Synthesized Probe
  source 1..80: mol_type = other DNA
aatagtactttatttataaaaatctttgaaattcatttaacattatttggaataaaatgaccctgtcatataacagaatc

SEQ ID NO: 96734 - DNA, 80 bp, synthetic construct
  misc_feature 1..80: note = Artificially Synthesized Probe
  source 1..80: mol_type = other DNA
ccttggattctgacctagagaaatttgaaagctttatttagattttcatcaataggaagctcttaggcaaacattttacc

SEQ ID NO: 96735 - DNA, 80 bp, synthetic construct; identical to SEQ ID NO: 34430
  misc_feature 1..80: note = Artificially Synthesized Probe
  source 1..80: mol_type = other DNA

SEQ ID NO: 96736 - DNA, 80 bp, synthetic construct
  misc_feature 1..80: note = Artificially Synthesized Probe
  source 1..80: mol_type = other DNA
tgacttataaagatgataagctagcatttttaaaaaaaaaaaaaacagtaggctaggccaggtgtggctcacacctgtaa

SEQ ID NO: 96737 - DNA, 80 bp, synthetic construct
  misc_feature 1..80: note = Artificially Synthesized Probe
  source 1..80: mol_type = other DNA
acctgggaggctgaggcatgagaatcgcttaaacccgggagacatagagagaggcagaggttgcagtgagccaagtccat

SEQ ID NO: 96738 - DNA, 80 bp, synthetic construct
  misc_feature 1..80: note = Artificially Synthesized Probe
  source 1..80: mol_type = other DNA
aaaaaatcgctattttaaaaaacattttgtttggctattaactgaacaaatcagactttaaaaatttatatagacaacca

SEQ ID NO: 96739 - DNA, 80 bp, synthetic construct; identical to SEQ ID NO: 34431
  misc_feature 1..80: note = Artificially Synthesized Probe
  source 1..80: mol_type = other DNA

SEQ ID NO: 96740 - DNA, 80 bp, synthetic construct
  misc_feature 1..80: note = Artificially Synthesized Probe
  source 1..80: mol_type = other DNA
tggtaaaatactcattgagggcagtggctagtttcctcacattaaatagattaataaagattagtccctgcaggccgggt

SEQ ID NO: 96741 - DNA, 80 bp, synthetic construct
  misc_feature 1..80: note = Artificially Synthesized Probe
  source 1..80: mol_type = other DNA
tgtaatcccagctacttgggaggctgagacaggagaatcacctgaacccgggaggcagaggttgcagtgagccgagatcg

SEQ ID NO: 96742 - DNA, 80 bp, synthetic construct
  misc_feature 1..80: note = Artificially Synthesized Probe
  source 1..80: mol_type = other DNA
acagatctaaaaatacaggactctctaaataccaccctatcctctatcagaatcaacaagggaaatacgggaggggcaag

SEQ ID NO: 96743 - DNA, 80 bp, synthetic construct
  misc_feature 1..80: note = Artificially Synthesized Probe
  source 1..80: mol_type = other DNA
tgttatatagtgccatacttggattttctagaatatgaaattaataggaattggaaattacaggaaagtcaatgactgtg

SEQ ID NO: 96744 - DNA, 80 bp, synthetic construct
  misc_feature 1..80: note = Artificially Synthesized Probe
  source 1..80: mol_type = other DNA
atgtaggccaatatcaacatgtacaagacagttgccattctgaaaatatatgtaaagaaaaaaagagaactgtttctgga

SEQ ID NO: 96745 - DNA, 80 bp, synthetic construct; identical to SEQ ID NO: 34432
  misc_feature 1..80: note = Artificially Synthesized Probe
  source 1..80: mol_type = other DNA

SEQ ID NO: 96746 - DNA, 80 bp, synthetic construct
  misc_feature 1..80: note = Artificially Synthesized Probe
  source 1..80: mol_type = other DNA
ataagtgggagctaaacattgggtacatatgaacacaaagatgaaaacaataaacactggagatcccgaaagcagggaaa

SEQ ID NO: 96747 - DNA, 80 bp, synthetic construct
  misc_feature 1..80: note = Artificially Synthesized Probe
  source 1..80: mol_type = other DNA
taaagaaattactcataagattggaagagctctcaagctgccactaactagacttactctcacattccttagggaatatc

SEQ ID NO: 96748 - DNA, 80 bp, synthetic construct
  misc_feature 1..80: note = Artificially Synthesized Probe
  source 1..80: mol_type = other DNA
gtagtactaagtggtaaactcaacatatctaaaggtaatttgcaaaatgaggccaagaccttctttttaaaaatcttttc

SEQ ID NO: 96749 - DNA, 80 bp, synthetic construct; identical to SEQ ID NO: 34433
  misc_feature 1..80: note = Artificially Synthesized Probe
  source 1..80: mol_type = other DNA

SEQ ID NO: 96750 - DNA, 80 bp, synthetic construct
  misc_feature 1..80: note = Artificially Synthesized Probe
  source 1..80: mol_type = other DNA
gaatgaagcaaatgaaaaatgtatctgaatggtttaatgaaatttttctgttattaaatattaccctctcataaaatatg

SEQ ID NO: 96751 - DNA, 80 bp, synthetic construct
  misc_feature 1..80: note = Artificially Synthesized Probe
  source 1..80: mol_type = other DNA
atgcctttaatacaaatacatttagcctatcagttggactgctctcaatcagaagttagtacaatcaaatattcagtgct

SEQ ID NO: 96752 - DNA, 80 bp, synthetic construct
  misc_feature 1..80: note = Artificially Synthesized Probe
  source 1..80: mol_type = other DNA
aattagccaggtgtggtggcatgcacctgtagttccagctacttaggaggctgagaaaggagaattgcttgaacccagga

SEQ ID NO: 96753 - DNA, 80 bp, synthetic construct; identical to SEQ ID NO: 34434
  misc_feature 1..80: note = Artificially Synthesized Probe
  source 1..80: mol_type = other DNA

SEQ ID NO: 96754 - DNA, 80 bp, synthetic construct
  misc_feature 1..80: note = Artificially Synthesized Probe
  source 1..80: mol_type = other DNA
aatcccagcacttggggaggccgaggcgggtggatcacaaggtcaggagatcaagaccatcctggctgacacagtgaaac

SEQ ID NO: 96755 - DNA, 80 bp, synthetic construct
  misc_feature 1..80: note = Artificially Synthesized Probe
  source 1..80: mol_type = other DNA
gaaatagactttttttttagatctactcaaggccctccttcaggatgtttttccccaacaatttaaatgcctaaagtagt

SEQ ID NO: 96756 - DNA, 80 bp, synthetic construct
  misc_feature 1..80: note = Artificially Synthesized Probe
  source 1..80: mol_type = other DNA
gggcgacggagtaagactccgtctcaaaaaaaaaaaaaaaaaaaaaaaatagaatctatcattcaatagatagaactatg

SEQ ID NO: 96757 - DNA, 80 bp, synthetic construct; identical to SEQ ID NO: 34435
  misc_feature 1..80: note = Artificially Synthesized Probe
  source 1..80: mol_type = other DNA

SEQ ID NO: 96758 - DNA, 80 bp, synthetic construct
  misc_feature 1..80: note = Artificially Synthesized Probe
  source 1..80: mol_type = other DNA
cacattttaccccattttctggtagttctaatacctggatacacaacgtcacaaaatcaaaacacaagaagtctaatggt

SEQ ID NO: 96759 - DNA, 80 bp, synthetic construct
  misc_feature 1..80: note = Artificially Synthesized Probe
  source 1..80: mol_type = other DNA
gacccgcctcccggggagagctcgcccgcccctccctcccggctggccgcggggcggtctgcagaccctttggccgtgcc

SEQ ID NO: 96760 - DNA, 80 bp, synthetic construct
  misc_feature 1..80: note = Artificially Synthesized Probe
  source 1..80: mol_type = other DNA
acagggctactggggctggggcaccgaggcctccctctcatctctgaacctcatctgctaaagctgtgcctgccctaccc

SEQ ID NO: 96761 - DNA, 80 bp, synthetic construct
  misc_feature 1..80: note = Artificially Synthesized Probe
  source 1..80: mol_type = other DNA
cactggccaactcccacccagatgactgccccaggagagggagggaaggcagggaaggcagtgtcttcaaaggctagtag

SEQ ID NO: 96762 - DNA, 80 bp, synthetic construct
  misc_feature 1..80: note = Artificially Synthesized Probe
  source 1..80: mol_type = other DNA
ctcacatctctgacaccagccctagtcagagctggggagtcaaggctggggaattccctcctcccggagaaaagaggctc

SEQ ID NO: 96763 - DNA, 80 bp, synthetic construct
  misc_feature 1..80: note = Artificially Synthesized Probe
  source 1..80: mol_type = other DNA
actcggctgtggggtggggagcaggcatctaaggggtttccagcttcctgtccccgagcggccttgtccgctccacgcac

SEQ ID NO: 96764 - DNA, 80 bp, synthetic construct; identical to SEQ ID NO: 34553
  misc_feature 1..80: note = Artificially Synthesized Probe
  source 1..80: mol_type = other DNA

SEQ ID NO: 96765 - DNA, 80 bp, synthetic construct
  misc_feature 1..80: note = Artificially Synthesized Probe
  source 1..80: mol_type = other DNA
cctcttcccctcccttcccgtctgggttccctcttccctcctccctccctccttccctccctctctgtcttcttgttaac

SEQ ID NO: 96766 - DNA, 80 bp, synthetic construct
  misc_feature 1..80: note = Artificially Synthesized Probe
  source 1..80: mol_type = other DNA
gtctgcagtcaggcctgtgatcagtcgaattagaaacgatcagaggtgtctggatagagactggggatggcgttcttttc

SEQ ID NO: 96767 - DNA, 80 bp, synthetic construct
  misc_feature 1..80: note = Artificially Synthesized Probe
  source 1..80: mol_type = other DNA
cttcccatcttggccaggaaagcctctctcttcccacaaggagcgcaggcctgcccctcccacctgccttaggtgacctg

SEQ ID NO: 96768 - DNA, 80 bp, synthetic construct; identical to SEQ ID NO: 34554
  misc_feature 1..80: note = Artificially Synthesized Probe
  source 1..80: mol_type = other DNA

SEQ ID NO: 96769 - DNA, 80 bp, synthetic construct
  misc_feature 1..80: note = Artificially Synthesized Probe
  source 1..80: mol_type = other DNA
cacgaggcagatgctgttggttcctggttcacgggccctcccggcttcttttccctgcgtggaagctgggacccacacca

SEQ ID NO: 96770 - DNA, 80 bp, synthetic construct; identical to SEQ ID NO: 34456
  misc_feature 1..80: note = Artificially Synthesized Probe
  source 1..80: mol_type = other DNA

SEQ ID NO: 96771 - DNA, 80 bp, synthetic construct
  misc_feature 1..80: note = Artificially Synthesized Probe
  source 1..80: mol_type = other DNA
agactgttaccctcgagggccataggccttatggcattagtgatggccacagagaatgccaacttctgtgctttggactt

SEQ ID NO: 96772 - DNA, 80 bp, synthetic construct; identical to SEQ ID NO: 34555
  misc_feature 1..80: note = Artificially Synthesized Probe
  source 1..80: mol_type = other DNA

SEQ ID NO: 96773 - DNA, 80 bp, synthetic construct
  misc_feature 1..80: note = Artificially Synthesized Probe
  source 1..80: mol_type = other DNA
agtactccaggcaccgaaggtaagaggacccttggatctcacggagattcctgggcggtagatttggagcccctgcccac

SEQ ID NO: 96774 - DNA, 80 bp, synthetic construct
  misc_feature 1..80: note = Artificially Synthesized Probe
  source 1..80: mol_type = other DNA
acttcccactctagcatggaggtccgtgtggccatgggcgtgccatgtgggcgaagacagaccatctgaccccctagtgc

SEQ ID NO: 96775 - DNA, 80 bp, synthetic construct
  misc_feature 1..80: note = Artificially Synthesized Probe
  source 1..80: mol_type = other DNA
gagctgccccctggccaagaagaggaagctggagggcgctgaggctgagcacctggtgtccaagaggaagtcacaccccc

SEQ ID NO: 96776 - DNA, 80 bp, synthetic construct
  misc_feature 1..80: note = Artificially Synthesized Probe
  source 1..80: mol_type = other DNA
aggtgctttgtcgctctttcttccccgaataaagggcgcttagtgtggccctggagaattgcagcctgtgagcggggagg

SEQ ID NO: 96777 - DNA, 80 bp, synthetic construct; identical to SEQ ID NO: 34556
  misc_feature 1..80: note = Artificially Synthesized Probe
  source 1..80: mol_type = other DNA

SEQ ID NO: 96778 - DNA, 80 bp, synthetic construct
  misc_feature 1..80: note = Artificially Synthesized Probe
  source 1..80: mol_type = other DNA
gaggtactcacaggcagatgctgaggaaacacctcaggttgagcttcaggtgattgaggaccagatggagcctctgaaga

SEQ ID NO: 96779 - DNA, 80 bp, synthetic construct
  misc_feature 1..80: note = Artificially Synthesized Probe
  source 1..80: mol_type = other DNA
cccgccctgagtttggaagcttccaggtgctctctggaggcacaatcccagagggcttcactgaggaggtgtcactgtgc

SEQ ID NO: 96780 - DNA, 80 bp, synthetic construct
  misc_feature 1..80: note = Artificially Synthesized Probe
  source 1..80: mol_type = other DNA
cccctgagagccctggcagatctgtagagacctggggtcagatgaggcccaaggtccactccccccaccatccccaccac

SEQ ID NO: 96781 - DNA, 80 bp, synthetic construct; identical to SEQ ID NO: 34557
  misc_feature 1..80: note = Artificially Synthesized Probe
  source 1..80: mol_type = other DNA

SEQ ID NO: 96782 - DNA, 80 bp, synthetic construct
  misc_feature 1..80: note = Artificially Synthesized Probe
  source 1..80: mol_type = other DNA
tttgttttgagagagtctcactctgttgcccaggctggagtgcaggggcacgatcttgatttactgcaatctcctcctcc

SEQ ID NO: 96783 - DNA, 80 bp, synthetic construct
  misc_feature 1..80: note = Artificially Synthesized Probe
  source 1..80: mol_type = other DNA
caggcatgagccaccgagcccattcttatttactgattttcaattatgaaacaattattattatttttttaaaatctgac

SEQ ID NO: 96784 - DNA, 80 bp, synthetic construct
  misc_feature 1..80: note = Artificially Synthesized Probe
  source 1..80: mol_type = other DNA
tctggattcaggcagaagggttgacagaaaggtccataccaaatccccacttctggagtttcatgtttccccttggctcc

SEQ ID NO: 96785 - DNA, 80 bp, synthetic construct; identical to SEQ ID NO: 34558
  misc_feature 1..80: note = Artificially Synthesized Probe
  source 1..80: mol_type = other DNA

SEQ ID NO: 96786 - DNA, 80 bp, synthetic construct
  misc_feature 1..80: note = Artificially Synthesized Probe
  source 1..80: mol_type = other DNA
ccaccgagcgctcccaggacctgtgtccccagtccctggaggatgcagccagtgaggagtccagcaagcagaaaggcatc

SEQ ID NO: 96787 - DNA, 80 bp, synthetic construct
  misc_feature 1..80: note = Artificially Synthesized Probe
  source 1..80: mol_type = other DNA
ctcctgatgtgatctttcaggaagacacctctcacacctctgcccagaaggcccctgagctccggggcccagaatcaccc

SEQ ID NO: 96788 - DNA, 80 bp, synthetic construct
  misc_feature 1..80: note = Artificially Synthesized Probe
  source 1..80: mol_type = other DNA
aggctgaacaggtgcgcacagtctgcgagccgggctgcccgcctgccgagcagagccagctgggcctgggagagccaggg

SEQ ID NO: 96789 - DNA, 80 bp, synthetic construct; identical to SEQ ID NO: 34559
  misc_feature 1..80: note = Artificially Synthesized Probe
  source 1..80: mol_type = other DNA

SEQ ID NO: 96790 - DNA, 80 bp, synthetic construct
  misc_feature 1..80: note = Artificially Synthesized Probe
  source 1..80: mol_type = other DNA
ggggagggggttattcaggtgtgtcagtgcgtgtggacacacatgtggctgggcgggagtgtgtgtatgtcctgtgacat

SEQ ID NO: 96791 - DNA, 80 bp, synthetic construct
  misc_feature 1..80: note = Artificially Synthesized Probe
  source 1..80: mol_type = other DNA
gtggcagggattgtgctatgacagaacccgctgtttcctacagccatgctgggtcatcctgatcctctcgtggggtggag

SEQ ID NO: 96792 - DNA, 80 bp, synthetic construct
  misc_feature 1..80: note = Artificially Synthesized Probe
  source 1..80: mol_type = other DNA
agggctgcttggaggggcctggggctgggctgacgtggttggggagcagctgggaagcagctgatgtggttggggagcag

SEQ ID NO: 96793 - DNA, 80 bp, synthetic construct
  misc_feature 1..80: note = Artificially Synthesized Probe
  source 1..80: mol_type = other DNA
gccaggggctgctccctcagtgagccatgccagggaggccaggccttggacaggtcagctttgacccagccggcctggtg

SEQ ID NO: 96794 - DNA, 80 bp, synthetic construct
  misc_feature 1..80: note = Artificially Synthesized Probe
  source 1..80: mol_type = other DNA
ggaagagttagctgagaccagggagggagcagataaggagagagaactgggatgggagatgactcaggtgctggagccac

SEQ ID NO: 96795 - DNA, 80 bp, synthetic construct; identical to SEQ ID NO: 34560
  misc_feature 1..80: note = Artificially Synthesized Probe
  source 1..80: mol_type = other DNA

SEQ ID NO: 96796 - DNA, 80 bp, synthetic construct
  misc_feature 1..80: note = Artificially Synthesized Probe
  source 1..80: mol_type = other DNA
gcctggctgtggtgtgcttgggccgcacagatcagcgcagaatttggtgggacacatatgaggaacacagacaccaagtg

SEQ ID NO: 96797 - DNA, 80 bp, synthetic construct
  misc_feature 1..80: note = Artificially Synthesized Probe
  source 1..80: mol_type = other DNA
agtgcccagctgggctgtgagtgtctgtgcaacgtgaacgtgcggttctggttctgagggactgatgttggggcacagat

SEQ ID NO: 96798 - DNA, 80 bp, synthetic construct
  misc_feature 1..80: note = Artificially Synthesized Probe
  source 1..80: mol_type = other DNA
ctttggagccccctcctgggaccctcctgctctgaggtgggagttctgagtttggctctgtgacctctgcaccctcccaa

SEQ ID NO: 96799 - DNA, 80 bp, synthetic construct; identical to SEQ ID NO: 34561
  misc_feature 1..80: note = Artificially Synthesized Probe
  source 1..80: mol_type = other DNA

SEQ ID NO: 96800 - DNA, 80 bp, synthetic construct
  misc_feature 1..80: note = Artificially Synthesized Probe
  source 1..80: mol_type = other DNA
aggaaagaggactccagcggccgtctgggttgttctccttaaaacgctgcacaaactgctatttgggattgtcagggcag

SEQ ID NO: 96801 - DNA, 80 bp, synthetic construct
  misc_feature 1..80: note = Artificially Synthesized Probe
  source 1..80: mol_type = other DNA
caccacccagcttcctggctctaactgatgtgacttgtgtgttttagatccttcaagagctgagaagcgtgagatcaagt

SEQ ID NO: 96802 - DNA, 80 bp, synthetic construct
  misc_feature 1..80: note = Artificially Synthesized Probe
  source 1..80: mol_type = other DNA
ggcttttgactcgcctgttggctcctggcctggagacaaccctgtaggccggcagtccgtgtccctccacaggaggaccg

SEQ ID NO: 96803 - DNA, 80 bp, synthetic construct
  misc_feature 1..80: note = Artificially Synthesized Probe
  source 1..80: mol_type = other DNA
tttgggtggtgtctatggggaggcgtggcctgcccagggccataaccttcccctttggtttgtccagatgctcatcctta

SEQ ID NO: 96804 - DNA, 80 bp, synthetic construct; identical to SEQ ID NO: 34562
  misc_feature 1..80: note = Artificially Synthesized Probe
  source 1..80: mol_type = other DNA

SEQ ID NO: 96805 - DNA, 80 bp, synthetic construct
  misc_feature 1..80: note = Artificially Synthesized Probe
  source 1..80: mol_type = other DNA
gctcttgggggctggagctgccctgcgttgctgtgtcccccacctgcctaccaagcagcagcctttggacaaggctcctg

SEQ ID NO: 96806 - DNA, 80 bp, synthetic construct
  misc_feature 1..80: note = Artificially Synthesized Probe
  source 1..80: mol_type = other DNA
ccccactcctggctgcacaggccagggtcacgtgaacagcaaccgcaacacgcacagaaggtacttggactgagctgggc

SEQ ID NO: 96807 - DNA, 80 bp, synthetic construct
  misc_feature 1..80: note = Artificially Synthesized Probe
  source 1..80: mol_type = other DNA
gtgagcccgtgacctgggacggggctctggcctgcctggggctccctgtgtgctacccttctcccagcctgccgccctga

SEQ ID NO: 96808 - DNA, 80 bp, synthetic construct; identical to SEQ ID NO: 34563
  misc_feature 1..80: note = Artificially Synthesized Probe
  source 1..80: mol_type = other DNA

SEQ ID NO: 96809 - DNA, 80 bp, synthetic construct
  misc_feature 1..80: note = Artificially Synthesized Probe
  source 1..80: mol_type = other DNA
ccctcgaggtgtagttgttgactggtcttctatggtgaggggggactactcctccagccttaccctaagtgccatgggtg

SEQ ID NO: 96810 - DNA, 80 bp, synthetic construct
  misc_feature 1..80: note = Artificially Synthesized Probe
  source 1..80: mol_type = other DNA
tttattctgacagatgaagctgctgcctccgtgtcttagactgagtactttcctgggcctgtgtcatccagggtcagtgc

SEQ ID NO: 96811 - DNA, 80 bp, synthetic construct; identical to SEQ ID NO: 34564
  misc_feature 1..80: note = Artificially Synthesized Probe
  source 1..80: mol_type = other DNA

SEQ ID NO: 96812 - DNA, 80 bp, synthetic construct
  misc_feature 1..80: note = Artificially Synthesized Probe
  source 1..80: mol_type = other DNA
gacaggacaggcatggaggggaaggctcagaaacccctcctcttccttcctctagtttgtctgggtgtcccattgctgcc

SEQ ID NO: 96813 - DNA, 80 bp, synthetic construct; identical to SEQ ID NO: 34457
  misc_feature 1..80: note = Artificially Synthesized Probe
  source 1..80: mol_type = other DNA

SEQ ID NO: 96814 - DNA, 80 bp, synthetic construct
  misc_feature 1..80: note = Artificially Synthesized Probe
  source 1..80: mol_type = other DNA
caggctgtatgtgcatgtgtgtgagtgcatgtgtgtgagtgtacgtgcatgtgagtgtacgtgcatgtgagtgtgcacat

SEQ ID NO: 96815 - DNA, 80 bp, synthetic construct
  misc_feature 1..80: note = Artificially Synthesized Probe
  source 1..80: mol_type = other DNA
tgtgaccacttgaggccccttggggattcatttgtggagatgctggtcctgtctggaaagagcagactgcaccagccaag

SEQ ID NO: 96816 - DNA, 80 bp, synthetic construct
  misc_feature 1..80: note = Artificially Synthesized Probe
  source 1..80: mol_type = other DNA
gtgtgtgtgaacatgtgggagcgtgtgtgtgcatgttcacacgcctgtttgtgtttgcatatgtgcgggtatgtttacat

SEQ ID NO: 96817 - DNA, 80 bp, synthetic construct; identical to SEQ ID NO: 34565
  misc_feature 1..80: note = Artificially Synthesized Probe
  source 1..80: mol_type = other DNA

SEQ ID NO: 96818 - DNA, 80 bp, synthetic construct
  misc_feature 1..80: note = Artificially Synthesized Probe
  source 1..80: mol_type = other DNA
ctgtcgaagaggacacttccactgctcctgtcttcacctgcagacaccctgctccccactcccgtgaggaactagaactc

SEQ ID NO: 96819 - DNA, 80 bp, synthetic construct
  misc_feature 1..80: note = Artificially Synthesized Probe
  source 1..80: mol_type = other DNA
acataattggcaaagttccagccagatgatcttcgctgctcaccttggctgtgtcatgcccaggcccttccctggtctgc

SEQ ID NO: 96820 - DNA, 80 bp, synthetic construct
  misc_feature 1..80: note = Artificially Synthesized Probe
  source 1..80: mol_type = other DNA
aatggtttgaagctgcttttttcctctatcttatttgctgttccctccagcttcctgtcagttgctaattcaatcctttc

SEQ ID NO: 96821 - DNA, 80 bp, synthetic construct; identical to SEQ ID NO: 34566
  misc_feature 1..80: note = Artificially Synthesized Probe
  source 1..80: mol_type = other DNA

SEQ ID NO: 96822 - DNA, 80 bp, synthetic construct
  misc_feature 1..80: note = Artificially Synthesized Probe
  source 1..80: mol_type = other DNA
ggctttgcaaagcttcgttggcattgtggacaataagtgtacagattctgactgaagccttggtcaaggaagccatcaac

SEQ ID NO: 96823 - DNA, 80 bp, synthetic construct
  misc_feature 1..80: note = Artificially Synthesized Probe
  source 1..80: mol_type = other DNA
gtctcaagtgatcctcccacctcagcctcccgagtacctaggaatacagatgtgccatcatacctgcctattttttttgc

SEQ ID NO: 96824 - DNA, 80 bp, synthetic construct; identical to SEQ ID NO: 34567
  misc_feature 1..80: note = Artificially Synthesized Probe
  source 1..80: mol_type = other DNA

SEQ ID NO: 96825 - DNA, 80 bp, synthetic construct
  misc_feature 1..80: note = Artificially Synthesized Probe
  source 1..80: mol_type = other DNA
gcagtacacacacacacacgcacatacacacctgctcacagattccagcacacacagaccttagcacacacatacacaca

SEQ ID NO: 96826 - DNA, 80 bp, synthetic construct
  misc_feature 1..80: note = Artificially Synthesized Probe
  source 1..80: mol_type = other DNA
ttaagttctcgtagcacccagcaccttggaggctgtcattgtcagctccttcttaattccactgattgtacactttccag

SEQ ID NO: 96827 - DNA, 80 bp, synthetic construct
  misc_feature 1..80: note = Artificially Synthesized Probe
  source 1..80: mol_type = other DNA
tcttcgtgccatcttttgtgcatgtaaaatcctgaagtattccaagagcattagtggcagtgaactgaatgcttgcagta

SEQ ID NO: 96828 - DNA, 80 bp, synthetic construct
  misc_feature 1..80: note = Artificially Synthesized Probe
  source 1..80: mol_type = other DNA
gccctgaggccactcctcagaaatgcacctgatacaactagcgtctcctgtagattcctcagcttcctccttgctgggga

SEQ ID NO: 96829 - DNA, 80 bp, synthetic construct; identical to SEQ ID NO: 34568
  misc_feature 1..80: note = Artificially Synthesized Probe
  source 1..80: mol_type = other DNA

SEQ ID NO: 96830 - DNA, 80 bp, synthetic construct
  misc_feature 1..80: note = Artificially Synthesized Probe
  source 1..80: mol_type = other DNA
ttggggagggtggcacgggatccccaggtcccatctcactggctgtgcatccctgtactgcaccccaggcccatgtgctt

SEQ ID NO: 96831 - DNA, 80 bp, synthetic construct
  misc_feature 1..80: note = Artificially Synthesized Probe
  source 1..80: mol_type = other DNA
ccaaagattcagaccagcgaaacctcacctaaagcctttcaatgtaagttggggagaattgttcttgtttctcttctgtg

SEQ ID NO: 96832 - DNA, 80 bp, synthetic construct
  misc_feature 1..80: note = Artificially Synthesized Probe
  source 1..80: mol_type = other DNA
tcactcctgctgccaccttcatgttcaccattaacatttatgtgtctcctagttatttgtgaaacaaaacccagatccgt

SEQ ID NO: 96833 - DNA, 80 bp, synthetic construct
  misc_feature 1..80: note = Artificially Synthesized Probe
  source 1..80: mol_type = other DNA
ctcctgctacctgtttaatcccagtgcagccggctgtccatttcccagccctgcctctggggagggtcagactgtgggct

SEQ ID NO: 96834 - DNA, 80 bp, synthetic construct; identical to SEQ ID NO: 34569
  misc_feature 1..80: note = Artificially Synthesized Probe
  source 1..80: mol_type = other DNA

SEQ ID NO: 96835 - DNA, 80 bp, synthetic construct
  misc_feature 1..80: note = Artificially Synthesized Probe
  source 1..80: mol_type = other DNA
gacgagtttcctacatgagaataataaaagtactgattgatgcggctgccagtggggtgtgagcctctcttcctaacttt

SEQ ID NO: 96836 - DNA, 80 bp, synthetic construct
  misc_feature 1..80: note = Artificially Synthesized Probe
  source 1..80: mol_type = other DNA
agaacatcgtgcatgagagtgattttgcagctacagtacaattgctagaaaagataacattctgtgccttcatttgtcat

SEQ ID NO: 96837 - DNA, 80 bp, synthetic construct
  misc_feature 1..80: note = Artificially Synthesized Probe
  source 1..80: mol_type = other DNA
tctcttgagctgattgctgtgagacgaactgggctggggaaggctgggtggcggtgtgggaccaggccctgctggagagg

SEQ ID NO: 96838 - DNA, 80 bp, synthetic construct
  misc_feature 1..80: note = Artificially Synthesized Probe
  source 1..80: mol_type = other DNA
tttcgaggacactcagcccctgaagcatccatgtgttgaggagcagaggcctcctgcccatagccatggaaggaagactt

SEQ ID NO: 96839 - DNA, 80 bp, synthetic construct
  misc_feature 1..80: note = Artificially Synthesized Probe
  source 1..80: mol_type = other DNA
ctgatagacaagttatttttgtttgaaatatcagggctgctggaatgtcttggaggcttttactccttttgcccaaattt

SEQ ID NO: 96840 - DNA, 80 bp, synthetic construct; identical to SEQ ID NO: 34570
  misc_feature 1..80: note = Artificially Synthesized Probe
  source 1..80: mol_type = other DNA

SEQ ID NO: 96841 - DNA, 80 bp, synthetic construct
  misc_feature 1..80: note = Artificially Synthesized Probe
  source 1..80: mol_type = other DNA
gaacctcagcacgaagccacaggacctccccagcaaggttagtacatctgccacagagcctttcttgggagaggtgagtt

SEQ ID NO: 96842 - DNA, 80 bp, synthetic construct
  misc_feature 1..80: note = Artificially Synthesized Probe
  source 1..80: mol_type = other DNA
tgagtgaagggggaccaagggctgcgaacacaagttcccacgtgttaggttgtgtgcacaccatgcgcccgcgtgtctcc

SEQ ID NO: 96843 - DNA, 80 bp, synthetic construct
  misc_feature 1..80: note = Artificially Synthesized Probe
  source 1..80: mol_type = other DNA
gctcagaggacctagtcttacccgtgtttatgacatgtcctgagggactggtttttgtgctgttgggaggcaagaggaat

SEQ ID NO: 96844 - DNA, 80 bp, synthetic construct; identical to SEQ ID NO: 34571
  misc_feature 1..80: note = Artificially Synthesized Probe
  source 1..80: mol_type = other DNA

SEQ ID NO: 96845 - DNA, 80 bp, synthetic construct
  misc_feature 1..80: note = Artificially Synthesized Probe
  source 1..80: mol_type = other DNA
gcctcccagcgccacagcagcaccagcgcccccagcagctccatgacctctccccagtccagccaggcctcccgccagga

SEQ ID NO: 96846 - DNA, 80 bp, synthetic construct
  misc_feature 1..80: note = Artificially Synthesized Probe
  source 1..80: mol_type = other DNA
gaggctgttgtgatattggcttttcaaggaagcttctcctcacaggcttctggaagagcctcggggagccatcccttttc

SEQ ID NO: 96847 - DNA, 80 bp, synthetic construct
  misc_feature 1..80: note = Artificially Synthesized Probe
  source 1..80: mol_type = other DNA
aggcatggggaggagaaaggcatcgttcagatcccaggagttgattggggaaaagctcaggtttcttgggttttgagcct

SEQ ID NO: 96848 - DNA, 80 bp, synthetic construct; identical to SEQ ID NO: 34572
  misc_feature 1..80: note = Artificially Synthesized Probe
  source 1..80: mol_type = other DNA

SEQ ID NO: 96849 - DNA, 80 bp, synthetic construct
  misc_feature 1..80: note = Artificially Synthesized Probe
  source 1..80: mol_type = other DNA
agaccctcaaggaggaatgaggggggtggggctaggcccctatgaagggtgggggctggatcaggcccctatgaagggta

SEQ ID NO: 96850 - DNA, 80 bp, synthetic construct; identical to SEQ ID NO: 34458
  misc_feature 1..80: note = Artificially Synthesized Probe
  source 1..80: mol_type = other DNA

SEQ ID NO: 96851 - DNA, 80 bp, synthetic construct
  misc_feature 1..80: note = Artificially Synthesized Probe
  source 1..80: mol_type = other DNA
ctcaggtcaccccatttcatagacgagcagcctgggaacccacaacgaggtccaattatccgaagactgttattatgctg

SEQ ID NO: 96852 - DNA, 80 bp, synthetic construct
  misc_feature 1..80: note = Artificially Synthesized Probe
  source 1..80: mol_type = other DNA
ttacagcatcctgcagaatgttggccttctgacccttcctggacccctggcccctccgtgggagggactacgccctgctt

SEQ ID NO: 96853 - DNA, 80 bp, synthetic construct; identical to SEQ ID NO: 34573
  misc_feature 1..80: note = Artificially Synthesized Probe
  source 1..80: mol_type = other DNA

SEQ ID NO: 96854 - DNA, 80 bp, synthetic construct
  misc_feature 1..80: note = Artificially Synthesized Probe
  source 1..80: mol_type = other DNA
ttctgtgttttgctggggggagttaagtcttcctcccttatccagaagataggagactccgggagatgcttctgtggaca

SEQ ID NO: 96855 - DNA, 80 bp, synthetic construct
  misc_feature 1..80: note = Artificially Synthesized Probe
  source 1..80: mol_type = other DNA
tttgaggagcggaagtatccgggggaagtcaccctgaccaactttaagctgaagtttctctccaaggacataaagaagga

SEQ ID NO: 96856 - DNA, 80 bp, synthetic construct; identical to SEQ ID NO: 34574
  misc_feature 1..80: note = Artificially Synthesized Probe
  source 1..80: mol_type = other DNA

SEQ ID NO: 96857 - DNA, 80 bp, synthetic construct
  misc_feature 1..80: note = Artificially Synthesized Probe
  source 1..80: mol_type = other DNA
aaggcctggaatgtactgccttagggctcaccaccctcaactctgtcagcctggctggcccagaggctgcgtgtctgagc

SEQ ID NO: 96858 - DNA, 80 bp, synthetic construct
  misc_feature 1..80: note = Artificially Synthesized Probe
  source 1..80: mol_type = other DNA
agagtacatttctggggtccctcttctccccaacctgaacccctcttgtaccctcacacttgtagcttgccctcctggga

SEQ ID NO: 96859 - DNA, 80 bp, synthetic construct
  misc_feature 1..80: note = Artificially Synthesized Probe
  source 1..80: mol_type = other DNA
actttaagctcaactttaatttggttactttttcttcttgagttaagttgtgtgggagaaacttccagcctgagaggcac

SEQ ID NO: 96860 - DNA, 80 bp, synthetic construct
  misc_feature 1..80: note = Artificially Synthesized Probe
  source 1..80: mol_type = other DNA
ctccggtctgacactctttttcctttgtccagctgtcccacccctggctgtgacggcagcggccacatcaccgggaacta

SEQ ID NO: 96861 - DNA, 80 bp, synthetic construct
  misc_feature 1..80: note = Artificially Synthesized Probe
  source 1..80: mol_type = other DNA
ctcgggagggtcactgggcaagcatctaggaggagccagcagctgcagggctggaagggccatggcccacgcctttctgt

SEQ ID NO: 96862 - DNA, 80 bp, synthetic construct; identical to SEQ ID NO: 34575
  misc_feature 1..80: note = Artificially Synthesized Probe
  source 1..80: mol_type = other DNA

SEQ ID NO: 96863 - DNA, 80 bp, synthetic construct
  misc_feature 1..80: note = Artificially Synthesized Probe
  source 1..80: mol_type = other DNA
ctctgagctctgctgtttgcctctccgctgggggctaggggtcgctgcaggctcctgcgctgctcttgacccatccccca

SEQ ID NO: 96864 - DNA, 80 bp, synthetic construct
  misc_feature 1..80: note = Artificially Synthesized Probe
  source 1..80: mol_type = other DNA
tgataatgaagagaaagctccttcccctcccctctcctgtcacgctccagctgcttctgccttggccctgatgccctccc

SEQ ID NO: 96865 - DNA, 80 bp, synthetic construct
  misc_feature 1..80: note = Artificially Synthesized Probe
  source 1..80: mol_type = other DNA
tcagtgtcctcctggggctggagtcagggactgttactgcctttggttttcatgcctccagttgtgctgtgactcctcag

SEQ ID NO: 96866 - DNA, 80 bp, synthetic construct; identical to SEQ ID NO: 34576
  misc_feature 1..80: note = Artificially Synthesized Probe
  source 1..80: mol_type = other DNA

SEQ ID NO: 96867 - DNA, 80 bp, synthetic construct
  misc_feature 1..80: note = Artificially Synthesized Probe
  source 1..80: mol_type = other DNA
gggtgcagcatctaagtttccttcctggaagttaatagcttcaacataagcattttctgaggctgagatcaccacagcag

SEQ ID NO: 96868 - DNA, 80 bp, synthetic construct
  misc_feature 1..80: note = Artificially Synthesized Probe
  source 1..80: mol_type = other DNA
gccatctttcttgcattcctttttccttttccaattctgctttcttttccgtgattagtctccatggtttttcccatttg

SEQ ID NO: 96869 - DNA, 80 bp, synthetic construct; identical to SEQ ID NO: 34577
  misc_feature 1..80: note = Artificially Synthesized Probe
  source 1..80: mol_type = other DNA

SEQ ID NO: 96870 - DNA, 80 bp, synthetic construct
  misc_feature 1..80: note = Artificially Synthesized Probe
  source 1..80: mol_type = other DNA
accactgcatgagcttgggacgatggtggtctccccccgccacgtgtcctggtgtaccaacctccttgctctctgccacc

SEQ ID NO: 96871 - DNA, 80 bp, synthetic construct
  misc_feature 1..80: note = Artificially Synthesized Probe
  source 1..80: mol_type = other DNA
cagcgacagtcagatgatgtgtgttctgtgttttaagtgaatcccaagggcgttcactcttccctcccatgtgtctgatg

SEQ ID NO: 96872 - DNA, 80 bp, synthetic construct
  misc_feature 1..80: note = Artificially Synthesized Probe
  source 1..80: mol_type = other DNA
cctgtccacagcacggggatggggcttagagaggtgagacctggtgtgtattgccaaggtagagggtgcccctcagacac

SEQ ID NO: 96873 - DNA, 80 bp, synthetic construct
  misc_feature 1..80: note = Artificially Synthesized Probe
  source 1..80: mol_type = other DNA
gtatcctctgtctccaaatccccgttctctgcacagagctagacattttgctgcaccggcgaggactggagtggagtcac

SEQ ID NO: 96874 - DNA, 80 bp, synthetic construct; identical to SEQ ID NO: 34578
  misc_feature 1..80: note = Artificially Synthesized Probe
  source 1..80: mol_type = other DNA

SEQ ID NO: 96875 - DNA, 80 bp, synthetic construct
  misc_feature 1..80: note = Artificially Synthesized Probe
  source 1..80: mol_type = other DNA
agctgctgtgggtctgtcactctggccacctgagtggccacttgcccaccgcactgaacctgagctctacctgatgcttt

SEQ ID NO: 96876 - DNA, 80 bp, synthetic construct
  misc_feature 1..80: note = Artificially Synthesized Probe
  source 1..80: mol_type = other DNA
gggcaccccaaaaaaactcctaggggccgaagagaaggttgcaagaggtggggccagccctgctgtgccgccacagccct

SEQ ID NO: 96877 - DNA, 80 bp, synthetic construct
  misc_feature 1..80: note = Artificially Synthesized Probe
  source 1..80: mol_type = other DNA
tgcctttgagcagcaggtgatctggacacaagcactgaactcttgcctggctcctgcagggtcaggggtcaggaggggtg

SEQ ID NO: 96878 - DNA, 80 bp, synthetic construct; identical to SEQ ID NO: 34579
  misc_feature 1..80: note = Artificially Synthesized Probe
  source 1..80: mol_type = other DNA

SEQ ID NO: 96879 - DNA, 80 bp, synthetic construct
  misc_feature 1..80: note = Artificially Synthesized Probe
  source 1..80: mol_type = other DNA
gaagatgaactggtcttaggctgtgcttcaagttatggctcagatatgctctgaatgcctttagtccagaccggacccta

SEQ ID NO: 96880 - DNA, 80 bp, synthetic construct
  misc_feature 1..80: note = Artificially Synthesized Probe
  source 1..80: mol_type = other DNA
caaagcactgaacccctgagatgatcgcatcagacccctgttgctggcagtcggcagccggggtgaacatcggcgatgct

SEQ ID NO: 96881 - DNA, 80 bp, synthetic construct
  misc_feature 1..80: note = Artificially Synthesized Probe
  source 1..80: mol_type = other DNA
ctgcttccctctgcaggtgccccacgcccggctgtgacggctctggccacatcacagggaactacgcttcacaccggagg

SEQ ID NO: 96882 - DNA, 80 bp, synthetic construct; identical to SEQ ID NO: 34580
  misc_feature 1..80: note = Artificially Synthesized Probe
  source 1..80: mol_type = other DNA

SEQ ID NO: 96883 - DNA, 80 bp, synthetic construct
  misc_feature 1..80: note = Artificially Synthesized Probe
  source 1..80: mol_type = other DNA
agctgcggttccagcactaaggtggccttttttcctctttcgaaatcagcttgtccggctgccctcgtgcaaagaaaagt

SEQ ID NO: 96884 - DNA, 80 bp, synthetic construct
  misc_feature 1..80: note = Artificially Synthesized Probe
  source 1..80: mol_type = other DNA
cagactgggctgggacctggcaggggttggggtggtacctctgtccagggcttgtggatgggactcttttgctactgcct

SEQ ID NO: 96885 - DNA, 80 bp, synthetic construct
  misc_feature 1..80: note = Artificially Synthesized Probe
  source 1..80: mol_type = other DNA
ggtcacctaactgaccaacgccaactttcgtttctttcatttttatggaagctctcatacgctacacgttgatacctgtg

SEQ ID NO: 96886 - DNA, 80 bp, synthetic construct
  misc_feature 1..80: note = Artificially Synthesized Probe
  source 1..80: mol_type = other DNA
tttgtctggcaggaaaggtgagatgcaggagtcaaggaggagaaggtggttagaacaatgttgaagctccaaatcccatg

SEQ ID NO: 96887 - DNA, 80 bp, synthetic construct
  misc_feature 1..80: note = Artificially Synthesized Probe
  source 1..80: mol_type = other DNA
agaaggtggttagaacaatgttgaagctccaaatcccatgtgtccatccacccacacacctgtgcagagagctggtagat

SEQ ID NO: 96888 - DNA, 80 bp, synthetic construct; identical to SEQ ID NO: 34581
  misc_feature 1..80: note = Artificially Synthesized Probe
  source 1..80: mol_type = other DNA

SEQ ID NO: 96889 - DNA, 80 bp, synthetic construct
  misc_feature 1..80: note = Artificially Synthesized Probe
  source 1..80: mol_type = other DNA
tgatggctctggacaccttgttgcccagggttaggggccggctcggtcgggacggggccctactatgcccgcaggaagca

SEQ ID NO: 96890 - DNA, 80 bp, synthetic construct
  misc_feature 1..80: note = Artificially Synthesized Probe
  source 1..80: mol_type = other DNA
tccttcagacggggatgggcccaccagctgtttggtgtaataggctgtggcttgtttatttatttaatttttacaataaa

SEQ ID NO: 96891 - DNA, 80 bp, synthetic construct
  misc_feature 1..80: note = Artificially Synthesized Probe
  source 1..80: mol_type = other DNA
tcctgctggcagggatattataagtgaatcgtgctgcatttgcaaatgattaaaatcaagatcagcatttttcaaattaa

SEQ ID NO: 96892 - DNA, 80 bp, synthetic construct; identical to SEQ ID NO: 34582
  misc_feature 1..80: note = Artificially Synthesized Probe
  source 1..80: mol_type = other DNA

SEQ ID NO: 96893 - DNA, 80 bp, synthetic construct
  misc_feature 1..80: note = Artificially Synthesized Probe
  source 1..80: mol_type = other DNA
tggtggtaaatccctttgccacagctttataactggtcataaaagtcttgcggaggttccagcatgggagtcaagaggtg

SEQ ID NO: 96894 - DNA, 80 bp, synthetic construct
  misc_feature 1..80: note = Artificially Synthesized Probe
  source 1..80: mol_type = other DNA
caccgccccagcacctctcaacatgatgtccctgacagcttgaaagtctccacaccaggttttgtgagaaagagaacata

SEQ ID NO: 96895 - DNA, 80 bp, synthetic construct
  misc_feature 1..80: note = Artificially Synthesized Probe
  source 1..80: mol_type = other DNA
gaggcgggtggatcacctgaggtcaggagttcgagaccagcccggccaacatggtgaaacctcatctctactaaaaatac

SEQ ID NO: 96896 - DNA, 80 bp, synthetic construct; identical to SEQ ID NO: 34459
  misc_feature 1..80: note = Artificially Synthesized Probe
  source 1..80: mol_type = other DNA

SEQ ID NO: 96897 - DNA, 80 bp, synthetic construct; identical to SEQ ID NO: 34583
  misc_feature 1..80: note = Artificially Synthesized Probe
  source 1..80: mol_type = other DNA

SEQ ID NO: 96898 - DNA, 80 bp, synthetic construct
  misc_feature 1..80: note = Artificially Synthesized Probe
  source 1..80: mol_type = other DNA
ctcggactggctcagggaatgtcctaaaagtttctgagggccaggtgggtgggatgagtaacaaagggaaaagaaccaag

SEQ ID NO: 96899 - DNA, 80 bp, synthetic construct
  misc_feature 1..80: note = Artificially Synthesized Probe
  source 1..80: mol_type = other DNA
ctgtccaggccttgttgaccttccactgggcagcgcagccctgagccgcctctcacccctacggcgggagcctctgcccc

SEQ ID NO: 96900 - DNA, 80 bp, synthetic construct
  misc_feature 1..80: note = Artificially Synthesized Probe
  source 1..80: mol_type = other DNA
aggtaatcagcacacagggagtgtgtgacaaacggtaatttggatgagtttcatttatgaagagataagaatgagccttg

SEQ ID NO: 96901 - DNA, 80 bp, synthetic construct; identical to SEQ ID NO: 34584
  misc_feature 1..80: note = Artificially Synthesized Probe
  source 1..80: mol_type = other DNA

SEQ ID NO: 96902 - DNA, 80 bp, synthetic construct
  misc_feature 1..80: note = Artificially Synthesized Probe
  source 1..80: mol_type = other DNA
ctgcgttcttccttctagaacatagatctcagtggtggcaaagctgcaacatctatgggcattgccccctgattgcactg

SEQ ID NO: 96903 - DNA, 80 bp, synthetic construct
  misc_feature 1..80: note = Artificially Synthesized Probe
  source 1..80: mol_type = other DNA
ctccacattgctgagtgacacacaagtgactccagcagcaaggcttggagggaacctgagagcagcccccaggcccaggg

SEQ ID NO: 96904 - DNA, 80 bp, synthetic construct
  misc_feature 1..80: note = Artificially Synthesized Probe
  source 1..80: mol_type = other DNA
tgcctcactcagaagccctttaacggctctgagttgggctccccttgtgtctggcttgagagagtctccaggcttctcct

SEQ ID NO: 96905 - DNA, 80 bp, synthetic construct; identical to SEQ ID NO: 34585
  misc_feature 1..80: note = Artificially Synthesized Probe
  source 1..80: mol_type = other DNA

SEQ ID NO: 96906 - DNA, 80 bp, synthetic construct
  misc_feature 1..80: note = Artificially Synthesized Probe
  source 1..80: mol_type = other DNA
gggctccgtgtgaccagagttgctcaagggaaaggccaggccacatgggtagcggatgggggaggctagcgggtctgttg

SEQ ID NO: 96907 - DNA, 80 bp, synthetic construct
  misc_feature 1..80: note = Artificially Synthesized Probe
  source 1..80: mol_type = other DNA
ctgacaacttctcaggaaaagtttgtctcctacaccttatgccctgtccctcccattcataccttctcaggaaaagtttg

SEQ ID NO: 96908 - DNA, 80 bp, synthetic construct
  misc_feature 1..80: note = Artificially Synthesized Probe
  source 1..80: mol_type = other DNA
gggatggcaggtggaggaggcttttaccaggagaggcagcactggcaggagcaggtttttaaagtcttgaggttgtcata

SEQ ID NO: 96909 - DNA, 80 bp, synthetic construct
  misc_feature 1..80: note = Artificially Synthesized Probe
  source 1..80: mol_type = other DNA
cagagccgaaggaccttgcttcaccagccccacttcctgtctgtgtcctatggtgacaatgagtgcctggtcccatcaga

SEQ ID NO: 96910 - DNA, 80 bp, synthetic construct
  misc_feature 1..80: note = Artificially Synthesized Probe
  source 1..80: mol_type = other DNA
cccttcccctatccctccccctttccttctttcccctcccttccccttcccctcccctctccttccttcctctcccctct

SEQ ID NO: 96911 - DNA, 80 bp, synthetic construct; identical to SEQ ID NO: 34586
  misc_feature 1..80: note = Artificially Synthesized Probe
  source 1..80: mol_type = other DNA

SEQ ID NO: 96912 - DNA, 80 bp, synthetic construct
  misc_feature 1..80: note = Artificially Synthesized Probe
  source 1..80: mol_type = other DNA
gcagagtaggtgggacagcctgtaaacaaataaatacgtaaattacttagtatggtgaatggtggtgcgtgtgctgggca

SEQ ID NO: 96913 - DNA, 80 bp, synthetic construct
  misc_feature 1..80: note = Artificially Synthesized Probe
  source 1..80: mol_type = other DNA
gagggagcaaaagagatgaggtagaaagttctaagccagggcttatctggctgcccgctggcaaggactcagctttcact

SEQ ID NO: 96914 - DNA, 80 bp, synthetic construct; identical to SEQ ID NO: 34587
  misc_feature 1..80: note = Artificially Synthesized Probe
  source 1..80: mol_type = other DNA

SEQ ID NO: 96915 - DNA, 80 bp, synthetic construct
  misc_feature 1..80: note = Artificially Synthesized Probe
  source 1..80: mol_type = other DNA
ccccagagggagccctgctgagagcaacggtgccctggccccccgagtatcaggcagggtcagctatggctgtgccagat

SEQ ID NO: 96916 - DNA, 80 bp, synthetic construct
  misc_feature 1..80: note = Artificially Synthesized Probe
  source 1..80: mol_type = other DNA
ccgtggtgggtgaccctgggctggccgtggtgggtgaccctgggctggccgtggtgggtgaccctgggctggctgtggta

SEQ ID NO: 96917 - DNA, 80 bp, synthetic construct
  misc_feature 1..80: note = Artificially Synthesized Probe
  source 1..80: mol_type = other DNA
gtgggtgaccctgggctggccgtggtgggtgaccctgggatggccgtggtgggtgacactgggctggtggtggtgggtga

SEQ ID NO: 96918 - DNA, 80 bp, synthetic construct
  misc_feature 1..80: note = Artificially Synthesized Probe
  source 1..80: mol_type = other DNA
gtgggtgaccctgggatggccgtggtgggtgaccctgggatggtcatgatgggtgaccctgggctggctgagtgaccctg

SEQ ID NO: 96919 - DNA, 80 bp, synthetic construct
  misc_feature 1..80: note = Artificially Synthesized Probe
  source 1..80: mol_type = other DNA
aggtgaggtgaggtgtgaggtggtatacgtggccttgcggggcagttttccttgcctgtgacctcagcctatatccagct

SEQ ID NO: 96920 - DNA, 80 bp, synthetic construct
  misc_feature 1..80: note = Artificially Synthesized Probe
  source 1..80: mol_type = other DNA
tgaccctgggctggccgtggtgggtgaccctgggatggccgttgtgggtgacactgggctggtggtggtgggtgaccctt

SEQ ID NO: 96921 - DNA, 80 bp, synthetic construct; identical to SEQ ID NO: 34588
  misc_feature 1..80: note = Artificially Synthesized Probe
  source 1..80: mol_type = other DNA

SEQ ID NO: 96922 - DNA, 80 bp, synthetic construct
  misc_feature 1..80: note = Artificially Synthesized Probe
  source 1..80: mol_type = other DNA
ctgggctggctgtggtgggtgacactgggctggctgtggtgggtgaccctgggctggccgtggtgggtgacgctgggatg

SEQ ID NO: 96923 - DNA, 80 bp, synthetic construct
  misc_feature 1..80: note = Artificially Synthesized Probe
  source 1..80: mol_type = other DNA
ctgggatggtcgcggtgggtgaccctgggctggccgtggtgggtgaccctgggatggccgtggtgggtgaccctgggctg

SEQ ID NO: 96924 - DNA, 80 bp, synthetic construct
  misc_feature 1..80: note = Artificially Synthesized Probe
  source 1..80: mol_type = other DNA
cggggctggccgcggtgggtgaccctgggatggccgcggtgggtgaccctgggctggccgcggtgggtgaccctgggatg

SEQ ID NO: 96925 - DNA, 80 bp, synthetic construct; identical to SEQ ID NO: 34589
  misc_feature 1..80: note = Artificially Synthesized Probe
  source 1..80: mol_type = other DNA

SEQ ID NO: 96926 - DNA, 80 bp, synthetic construct
  misc_feature 1..80: note = Artificially Synthesized Probe
  source 1..80: mol_type = other DNA
aatgagtcacggcagaggcagatcccttcacctaagctgacagcctttcggaccttggctctgaagctcttgacacctgt

SEQ ID NO: 96927 - DNA, 80 bp, synthetic construct; identical to SEQ ID NO: 34590
  misc_feature 1..80: note = Artificially Synthesized Probe
  source 1..80: mol_type = other DNA

SEQ ID NO: 96928 - DNA, 80 bp, synthetic construct
  misc_feature 1..80: note = Artificially Synthesized Probe
  source 1..80: mol_type = other DNA
cagttctagaaagcaggcttccccacagcactttggcccaggcctgcctgaggcccaaagccacaactgaggtttctctc

SEQ ID NO: 96929 - DNA, 80 bp, synthetic construct
  misc_feature 1..80: note = Artificially Synthesized Probe
  source 1..80: mol_type = other DNA
gcaggctctgtggtcaccatagctttcggtacccaagggggtagacagaggtttgaatctaggactgggcagctccctca

SEQ ID NO: 96930 - DNA, 80 bp, synthetic construct
  misc_feature 1..80: note = Artificially Synthesized Probe
  source 1..80: mol_type = other DNA
aacattcgtcttggggacagtgaggcatccgtcggcactcatcaaggttgctgtcagggctgagctgacggacagcgcag

SEQ ID NO: 96931 - DNA, 80 bp, synthetic construct
  misc_feature 1..80: note = Artificially Synthesized Probe
  source 1..80: mol_type = other DNA
gattagcagcactgtttctcttactctcattagaatgagtagtcctgtcaagaccagcggtcccattaggattaccagtc

SEQ ID NO: 96932 - DNA, 80 bp, synthetic construct; identical to SEQ ID NO: 34591
  misc_feature 1..80: note = Artificially Synthesized Probe
  source 1..80: mol_type = other DNA

SEQ ID NO: 96933 - DNA, 80 bp, synthetic construct
  misc_feature 1..80: note = Artificially Synthesized Probe
  source 1..80: mol_type = other DNA
cctgatttccctaaaatgagcatttgtaatcagaaaaaaaaaagcagtaaagatcttattttgaaaataagagcatgccc

SEQ ID NO: 96934 - DNA, 80 bp, synthetic construct
  misc_feature 1..80: note = Artificially Synthesized Probe
  source 1..80: mol_type = other DNA
ccaaggcagcaaaaaatgagtaacatcctccagccccacgtgtctcattactctgctcttgtctctactggcaaacaggc

SEQ ID NO: 96935 - DNA, 80 bp, synthetic construct
  misc_feature 1..80: note = Artificially Synthesized Probe
  source 1..80: mol_type = other DNA
cacatgtcgatgttgcatccccccaggttcataggcagtgacgacagagaaggagtgatggccctcccggcggagccatc

SEQ ID NO: 96936 - DNA, 80 bp, synthetic construct; identical to SEQ ID NO: 34592
  misc_feature 1..80: note = Artificially Synthesized Probe
  source 1..80: mol_type = other DNA

SEQ ID NO: 96937 - DNA, 80 bp, synthetic construct
  misc_feature 1..80: note = Artificially Synthesized Probe
  source 1..80: mol_type = other DNA
tgtgtcacccacactgtctttctgtgagtttagcctctgcccccgtggctccctgcagatgtgcagtcaggctgggggct

SEQ ID NO: 96938 - DNA, 80 bp, synthetic construct
  misc_feature 1..80: note = Artificially Synthesized Probe
  source 1..80: mol_type = other DNA
aaggcagtctgacactccacgggggggtgcagtgatttccatcttacagatagaagcaggaaacatggtgaagctaagac

SEQ ID NO: 96939 - DNA, 80 bp, synthetic construct
  misc_feature 1..80: note = Artificially Synthesized Probe
  source 1..80: mol_type = other DNA
cacgagcccccttcctggcttccctggagtcagcccatgtctccagagggcccttgcctttctctcctctgccagcccct

SEQ ID NO: 96940 - DNA, 80 bp, synthetic construct
  misc_feature 1..80: note = Artificially Synthesized Probe
  source 1..80: mol_type = other DNA
tgcttgcagctgtggtgccaacaattctcacgccgcgctgtcgtctttttggcttctggaattttgagccaattcgggct

SEQ ID NO: 96941 - DNA, 80 bp, synthetic construct; identical to SEQ ID NO: 34593
  misc_feature 1..80: note = Artificially Synthesized Probe
  source 1..80: mol_type = other DNA

SEQ ID NO: 96942 - DNA, 80 bp, synthetic construct
  misc_feature 1..80: note = Artificially Synthesized Probe
  source 1..80: mol_type = other DNA
ggtcctgccctaggggccctgtgcccttgtggagattctctccaccccgaatggcccgggctgttggctgtggtgggttt

SEQ ID NO: 96943 - DNA, 80 bp, synthetic construct
  misc_feature 1..80: note = Artificially Synthesized Probe
  source 1..80: mol_type = other DNA
ggtttgatgctcccacatcaggctctgcggtgtggggcccactgcatggacggagcttgctaacctggttctgttctcta

SEQ ID NO: 96944 - DNA, 80 bp, synthetic construct
  misc_feature 1..80: note = Artificially Synthesized Probe
  source 1..80: mol_type = other DNA
accacaccgtttacctccctcgccctgccccgcaccgtggggatgcccaactcacagtgacttcccgtttggggcccggt

SEQ ID NO: 96945 - DNA, 80 bp, synthetic construct; identical to SEQ ID NO: 34594
  misc_feature 1..80: note = Artificially Synthesized Probe
  source 1..80: mol_type = other DNA

SEQ ID NO: 96946 - DNA, 80 bp, synthetic construct
  misc_feature 1..80: note = Artificially Synthesized Probe
  source 1..80: mol_type = other DNA
gttttctgttttcatttaattcagttttgtgttaagggtggaacaaagctctgttctagagggaaagttaggaataggcc

SEQ ID NO: 96947 - DNA, 80 bp, synthetic construct
  misc_feature 1..80: note = Artificially Synthesized Probe
  source 1..80: mol_type = other DNA
ctgcagcctttagaccctgggtctgggatccacgtctagggaccactctggcttctgtgcatccacccaggcccccgacc

SEQ ID NO: 96948 - DNA, 80 bp, synthetic construct
  misc_feature 1..80: note = Artificially Synthesized Probe
  source 1..80: mol_type = other DNA
attttaatttaatgtgttaaaaacacaatgtccctaccgtgtaaatagaatccaagtcaattgtgactgcaattccaagt

SEQ ID NO: 96949 - DNA, 80 bp, synthetic construct; identical to SEQ ID NO: 34460
  misc_feature 1..80: note = Artificially Synthesized Probe
  source 1..80: mol_type = other DNA

SEQ ID NO: 96950 - DNA, 80 bp, synthetic construct
  misc_feature 1..80: note = Artificially Synthesized Probe
  source 1..80: mol_type = other DNA
tttatactatttcaactagaccccacaccagggcaccctaagaggggaaaaaagtgaattcaaagcaaaaataactattt

SEQ ID NO: 96951 - DNA, 80 bp, synthetic construct; identical to SEQ ID NO: 34595
  misc_feature 1..80: note = Artificially Synthesized Probe
  source 1..80: mol_type = other DNA

SEQ ID NO: 96952 - DNA, 80 bp, synthetic construct
  misc_feature 1..80: note = Artificially Synthesized Probe
  source 1..80: mol_type = other DNA
acagcaaatggaattctgtatttattattatttaagtgtagcgcagatgtgtgtgcttgggcgtgtttctcgtgtcgcgt

SEQ ID NO: 96953 - DNA, 80 bp, synthetic construct
  misc_feature 1..80: note = Artificially Synthesized Probe
  source 1..80: mol_type = other DNA
gtgaccctccttcctcaggaagcgcgttgaacccacagcactccgtggtgtgtttgcagggtgatttcctaataaaagtc

SEQ ID NO: 96954 - DNA, 80 bp, synthetic construct; identical to SEQ ID NO: 34447
  misc_feature 1..80: note = Artificially Synthesized Probe
  source 1..80: mol_type = other DNA

SEQ ID NO: 96955 - DNA, 80 bp, synthetic construct
  misc_feature 1..80: note = Artificially Synthesized Probe
  source 1..80: mol_type = other DNA
tcttggaggagagcaaagtccagacaagcctagggacgggacagaggaggtggacagaggtggacagaggtgtgggaggc

SEQ ID NO: 96956 - DNA, 80 bp, synthetic construct
  misc_feature 1..80: note = Artificially Synthesized Probe
  source 1..80: mol_type = other DNA
gccagcgctgtgtctgtgctgtgcgtcttttgagctttgtctccagccctggaccctggggctcctccttctcgggcctc

SEQ ID NO: 96957 - DNA, 80 bp, synthetic construct; identical to SEQ ID NO: 34461
  misc_feature 1..80: note = Artificially Synthesized Probe
  source 1..80: mol_type = other DNA

SEQ ID NO: 96958 - DNA, 80 bp, synthetic construct
  misc_feature 1..80: note = Artificially Synthesized Probe
  source 1..80: mol_type = other DNA
ctacccgggggacatatgagaaagtgttccctccaggagaagctgtgctgggcatgagggcactctgatgtgtgtgtggg

SEQ ID NO: 96959 - DNA, 80 bp, synthetic construct
  misc_feature 1..80: note = Artificially Synthesized Probe
  source 1..80: mol_type = other DNA
aagctgtgtggggcatgagggcaccctgatgttgggggcggtctctgggcaaagctgtgcggggcatgagggcaccctga

SEQ ID NO: 96960 - DNA, 80 bp, synthetic construct
  misc_feature 1..80: note = Artificially Synthesized Probe
  source 1..80: mol_type = other DNA
gtgtctgggcaaagctgtgcggggcatgagggcaccctgatgtggggggggttgtctgggcaaagctgtgcggggcatga

SEQ ID NO: 96961 - DNA, 80 bp, synthetic construct
  misc_feature 1..80: note = Artificially Synthesized Probe
  source 1..80: mol_type = other DNA
ggcgggggggggcctgggcgaagctgtgcggggcatgagggcaccctgatgttggggggggtgtctgggcaaagctgtgc

SEQ ID NO: 96962 - DNA, 80 bp, synthetic construct; identical to SEQ ID NO: 34462
  misc_feature 1..80: note = Artificially Synthesized Probe
  source 1..80: mol_type = other DNA

SEQ ID NO: 96963 - DNA, 80 bp, synthetic construct
  misc_feature 1..80: note = Artificially Synthesized Probe
  source 1..80: mol_type = other DNA
ctgtgcggggcatgagggtaccctgatgttggggggggtgtctgggcaaagctgtgcggggcatgagggcaccctgatgt

SEQ ID NO: 96964 - DNA, 80 bp, synthetic construct
  misc_feature 1..80: note = Artificially Synthesized Probe
  source 1..80: mol_type = other DNA
caaagctgtgcggggcatgagggtaccctgatgttggggggggtgtctgggcaaagctgcgcggggcatgagggcaccct

SEQ ID NO: 96965 - DNA, 80 bp, synthetic construct
  misc_feature 1..80: note = Artificially Synthesized Probe
  source 1..80: mol_type = other DNA
acagattgatcagagctctgggtcatgaggactgaaaccaacccagaacactcacacctcactgccaggctggaatgcca

SEQ ID NO: 96966 - DNA, 80 bp, synthetic construct
  misc_feature 1..80: note = Artificially Synthesized Probe
  source 1..80: mol_type = other DNA
ggtggggggtgtctgggcaaagctgtgcagggcatgagggcaccctgatgtggcgggggggcctgggcaaagctgtgcgg

SEQ ID NO: 96967 - DNA, 80 bp, synthetic construct
  misc_feature 1..80: note = Artificially Synthesized Probe
  source 1..80: mol_type = other DNA
ggcaccctgatgtggtggggagggcctgggcaaagctgtgtggggcatgagggcaccctgatgtcgggaggggggcaggc

SEQ ID NO: 96968 - DNA, 80 bp, synthetic construct; identical to SEQ ID NO: 34463
  misc_feature 1..80: note = Artificially Synthesized Probe
  source 1..80: mol_type = other DNA

SEQ ID NO: 96969 - DNA, 80 bp, synthetic construct
  misc_feature 1..80: note = Artificially Synthesized Probe
  source 1..80: mol_type = other DNA
atgtggggagctcacactctcaccagggagacctcatacctgctgcttatcacctgggagatgttttctgcccacagagg

SEQ ID NO: 96970 - DNA, 80 bp, synthetic construct
  misc_feature 1..80: note = Artificially Synthesized Probe
  source 1..80: mol_type = other DNA
ctgctccactgtccaaactgtgctcataggtatgtggcctggggactgttgccgtggaaccgggtaaagagccctgtgga

SEQ ID NO: 96971 - DNA, 80 bp, synthetic construct; identical to SEQ ID NO: 34464
  misc_feature 1..80: note = Artificially Synthesized Probe
  source 1..80: mol_type = other DNA

SEQ ID NO: 96972 - DNA, 80 bp, synthetic construct
  misc_feature 1..80: note = Artificially Synthesized Probe
  source 1..80: mol_type = other DNA
tcccggaggtagagagagagagagagagagagagagagagagtgtgtgtgtgtgtgtgtgtgtgtgtgtgtgtgtgtgcg

SEQ ID NO: 96973 - DNA, 80 bp, synthetic construct
  misc_feature 1..80: note = Artificially Synthesized Probe
  source 1..80: mol_type = other DNA
cctgtggctcctggctgagccaggttctgtgcgacgcggaccaaccctgacccccagtggccagttccgagaactgctgc

SEQ ID NO: 96974 - DNA, 80 bp, synthetic construct
  misc_feature 1..80: note = Artificially Synthesized Probe
  source 1..80: mol_type = other DNA
gtggcagtattgagaggtggggcctttaagaggtgattgggtcacaagagctctgccctcatgaatagattaatttattt

SEQ ID NO: 96975 - DNA, 80 bp, synthetic construct; identical to SEQ ID NO: 34465
  misc_feature 1..80: note = Artificially Synthesized Probe
  source 1..80: mol_type = other DNA

SEQ ID NO: 96976 - DNA, 80 bp, synthetic construct
  misc_feature 1..80: note = Artificially Synthesized Probe
  source 1..80: mol_type = other DNA
cagctcctgctggctgattacaagcccctggccacaccccgggagagagagttccaggtgccagcctgtccaagtgatgg

SEQ ID NO: 96977 - DNA, 80 bp, synthetic construct
  misc_feature 1..80: note = Artificially Synthesized Probe
  source 1..80: mol_type = other DNA
caattttacacagcaaattaaaccccagggtaaatgtgtgtacctggattccaatagtaggtaaagattcttaatggtga

SEQ ID NO: 96978 - DNA, 80 bp, synthetic construct
  misc_feature 1..80: note = Artificially Synthesized Probe
  source 1..80: mol_type = other DNA
actggagctggttccacccccatgcccaggctctgatgtgcttggtctgggctggggcctgggcaccagtgttgtcctag

SEQ ID NO: 96979 - DNA, 80 bp, synthetic construct
  misc_feature 1..80: note = Artificially Synthesized Probe
  source 1..80: mol_type = other DNA
ggggaggcctcagggagcgtgcactcatggcgggaggtgtctcatggtaagagaagaggcgagagagaggggcgatgcca

SEQ ID NO: 96980 - DNA, 80 bp, synthetic construct; identical to SEQ ID NO: 34466
  misc_feature 1..80: note = Artificially Synthesized Probe
  source 1..80: mol_type = other DNA

SEQ ID NO: 96981 - DNA, 80 bp, synthetic construct
  misc_feature 1..80: note = Artificially Synthesized Probe
  source 1..80: mol_type = other DNA
actaaaaatacaaaaaatgtagccaggcgtggtggcacacacctgtaattccagctactcaggaggctgaggcacgagaa

SEQ ID NO: 96982 - DNA, 80 bp, synthetic construct
  misc_feature 1..80: note = Artificially Synthesized Probe
  source 1..80: mol_type = other DNA
ggtatttgcatcaagatagacagatcaatagaacaaattagagataccagaaatagacccacaaatatgagcaagtgatt

SEQ ID NO: 96983 - DNA, 80 bp, synthetic construct
  misc_feature 1..80: note = Artificially Synthesized Probe
  source 1..80: mol_type = other DNA
taaaattataaaacttctataagaggacatagaagaaaacctttgcaaacttagatcaggcaaaacattattagatagga

SEQ ID NO: 96984 - DNA, 80 bp, synthetic construct; identical to SEQ ID NO: 34467
  misc_feature 1..80: note = Artificially Synthesized Probe
  source 1..80: mol_type = other DNA

SEQ ID NO: 96985 - DNA, 80 bp, synthetic construct
  misc_feature 1..80: note = Artificially Synthesized Probe
  source 1..80: mol_type = other DNA
tggagaacacagttttgagtttccttagaaagcctggagaacacagtttcgagaggtgctgagaaagcctggagaacacg

SEQ ID NO: 96986 - DNA, 80 bp, synthetic construct
  misc_feature 1..80: note = Artificially Synthesized Probe
  source 1..80: mol_type = other DNA
agcctggagaacacagtttcgagtttcctgagaaagcctggagaacagtttcgagaggtcctgagaaagcctggagaaca

SEQ ID NO: 96987 - DNA, 80 bp, synthetic construct
  misc_feature 1..80: note = Artificially Synthesized Probe
  source 1..80: mol_type = other DNA
accgtcagacacagcaggggggcacaggggagcacaggccatggtgaggactgtcggccacagcaggggagcacaggcca

SEQ ID NO: 96988 - DNA, 80 bp, synthetic construct
  misc_feature 1..80: note = Artificially Synthesized Probe
  source 1..80: mol_type = other DNA
aagcctggagaacacggttttgagaggtcctgagaaagcctggagaacatggtttcgagaggttctgggaaagcctggag

SEQ ID NO: 96989 - DNA, 80 bp, synthetic construct; identical to SEQ ID NO: 34468
  misc_feature 1..80: note = Artificially Synthesized Probe
  source 1..80: mol_type = other DNA

SEQ ID NO: 96990 - DNA, 80 bp, synthetic construct
  misc_feature 1..80: note = Artificially Synthesized Probe
  source 1..80: mol_type = other DNA
gggaaagcctggagaacacagtttcaagaggtcctgggaaagcctggagaacacagtttcgagtttcctgagaaagcctg

SEQ ID NO: 96991 - DNA, 80 bp, synthetic construct
  misc_feature 1..80: note = Artificially Synthesized Probe
  source 1..80: mol_type = other DNA
ctgagaaagtgtgcccccagcagtcagattatactttggtttcatagttttcagagaggcaggagttacaggcaaagaca

SEQ ID NO: 96992 - DNA, 80 bp, synthetic construct
  misc_feature 1..80: note = Artificially Synthesized Probe
  source 1..80: mol_type = other DNA
tttgagttaagatataagcttcttaacccataggggtgtgtgacttaactcctgtctggcacagccttaggtcctgttta

SEQ ID NO: 96993 - DNA, 80 bp, synthetic construct; identical to SEQ ID NO: 34469
  misc_feature 1..80: note = Artificially Synthesized Probe
  source 1..80: mol_type = other DNA

SEQ ID NO: 96994 - DNA, 80 bp, synthetic construct
  misc_feature 1..80: note = Artificially Synthesized Probe
  source 1..80: mol_type = other DNA
atttttttgtattttcagtagagatgaggtttcactgtgttagccaggatggtctcgatttcctgacctcatgatccacc

SEQ ID NO: 96995 - DNA, 80 bp, synthetic construct
  misc_feature 1..80: note = Artificially Synthesized Probe
  source 1..80: mol_type = other DNA
acagctttatactcaaatactacaccatcttgattactacagctttatactcaaataccacaccgtcttgattaccacag

SEQ ID NO: 96996 - DNA, 80 bp, synthetic construct; identical to SEQ ID NO: 34471
  misc_feature 1..80: note = Artificially Synthesized Probe
  source 1..80: mol_type = other DNA

SEQ ID NO: 96997 - DNA, 80 bp, synthetic construct; identical to SEQ ID NO: 34470
  misc_feature 1..80: note = Artificially Synthesized Probe
  source 1..80: mol_type = other DNA

SEQ ID NO: 96998 - DNA, 80 bp, synthetic construct
  misc_feature 1..80: note = Artificially Synthesized Probe
  source 1..80: mol_type = other DNA
tagctttatactcaaatactacactgtctgattactacagctttatactcaaataccacactgtcttgattaccacagct

SEQ ID NO: 96999 - DNA, 80 bp, synthetic construct
  misc_feature 1..80: note = Artificially Synthesized Probe
  source 1..80: mol_type = other DNA
cggccacagcaggggggcacaggggagcacaggccatggtgaggactgtcggccacagcaggggggtacaggggagcaca

SEQ ID NO: 97000 - DNA, 80 bp, synthetic construct
  misc_feature 1..80: note = Artificially Synthesized Probe
  source 1..80: mol_type = other DNA
ataccacaccgtcttgattaccacagctttatactcaaatactacactgtcttgattactacagctttatactcaaatac

SEQ ID NO: 97001 - DNA, 80 bp, synthetic construct
  misc_feature 1..80: note = Artificially Synthesized Probe
  source 1..80: mol_type = other DNA
aactgggggcagggtgggagacctcggccctgagggctgtaggggctcttgcctgggcgctccttaagctcccccgcccc

SEQ ID NO: 97002 - DNA, 80 bp, synthetic construct
  misc_feature 1..80: note = Artificially Synthesized Probe
  source 1..80: mol_type = other DNA
ctgattactacagctttatactcaaataccacactgtcttgattaccacagctttatactcaaatactacactgtctgat

SEQ ID NO: 97003 - DNA, 80 bp, synthetic construct
  misc_feature 1..80: note = Artificially Synthesized Probe
  source 1..80: mol_type = other DNA
ctgtatactcaaataccacactgtcttgattaccacagctttatactcaaataccacactgtcttgattactatagcttt

SEQ ID NO: 97004 - DNA, 80 bp, synthetic construct
  misc_feature 1..80: note = Artificially Synthesized Probe
  source 1..80: mol_type = other DNA
atactacactgtcttgattaacacagctttatactcaaatactacactgtcttgattaccacagctttatactcaaatac

SEQ ID NO: 97005 - DNA, 80 bp, synthetic construct
  misc_feature 1..80: note = Artificially Synthesized Probe
  source 1..80: mol_type = other DNA
cttgattaccacagctttatactcaaataccacactgtcttgattaccacagctttatactcaaataccacactgtcttg

SEQ ID NO: 97006 - DNA, 80 bp, synthetic construct
  misc_feature 1..80: note = Artificially Synthesized Probe
  source 1..80: mol_type = other DNA
agctttatactcaaatactacactgtcttgattactatagctttatactcaaataccacactgtcttgattactatagct

SEQ ID NO: 97007 - DNA, 80 bp, synthetic construct; identical to SEQ ID NO: 34472
  misc_feature 1..80: note = Artificially Synthesized Probe
  source 1..80: mol_type = other DNA

SEQ ID NO: 97008 - DNA, 80 bp, synthetic construct
  misc_feature 1..80: note = Artificially Synthesized Probe
  source 1..80: mol_type = other DNA
gtcttgattactatagctttatactctgttttgaggtcaggtagtgtcagtccctctaacttcatttttcaaagttgtta

SEQ ID NO: 97009 - DNA, 80 bp, synthetic construct
  misc_feature 1..80: note = Artificially Synthesized Probe
  source 1..80: mol_type = other DNA
ggcatatggagttttctgatgcatgaacacagcataactcctatttacatctttaatttctctcagcagttttacggttt

SEQ ID NO: 97010 - DNA, 80 bp, synthetic construct
  misc_feature 1..80: note = Artificially Synthesized Probe
  source 1..80: mol_type = other DNA
agatttttgtgtattgattttgtatcctgaaactttgctgaagttgcttattagttctagtagcttttttgtggattata

SEQ ID NO: 97011 - DNA, 80 bp, synthetic construct; identical to SEQ ID NO: 34448
  misc_feature 1..80: note = Artificially Synthesized Probe
  source 1..80: mol_type = other DNA

SEQ ID NO: 97012 - DNA, 80 bp, synthetic construct; identical to SEQ ID NO: 34473
  misc_feature 1..80: note = Artificially Synthesized Probe
  source 1..80: mol_type = other DNA

SEQ ID NO: 97013 - DNA, 80 bp, synthetic construct
  misc_feature 1..80: note = Artificially Synthesized Probe
  source 1..80: mol_type = other DNA
ttaatataacgaatcacactgattttgttaaactaaccttgcattctggaataaactctgcttggtcatattatagtatt

SEQ ID NO: 97014 - DNA, 80 bp, synthetic construct
  misc_feature 1..80: note = Artificially Synthesized Probe
  source 1..80: mol_type = other DNA
cttggcctcaatgaatgagttgggagacagtccctcttcttcagtttcctcaaagagttctgtgaaattggcattctttt

SEQ ID NO: 97015 - DNA, 80 bp, synthetic construct
  misc_feature 1..80: note = Artificially Synthesized Probe
  source 1..80: mol_type = other DNA
tttttagtagagacggggtctcgccatgttgcccaggctggtcttgaactccccacactccagggatgacaccttcactc

SEQ ID NO: 97016 - DNA, 80 bp, synthetic construct; identical to SEQ ID NO: 34474
  misc_feature 1..80: note = Artificially Synthesized Probe
  source 1..80: mol_type = other DNA

SEQ ID NO: 97017 - DNA, 80 bp, synthetic construct
  misc_feature 1..80: note = Artificially Synthesized Probe
  source 1..80: mol_type = other DNA
ggggagcatcccaggggcttggggacacttggtggccaaaggttggagagggtggaggatgctcagccagagccggagca

SEQ ID NO: 97018 - DNA, 80 bp, synthetic construct
  misc_feature 1..80: note = Artificially Synthesized Probe
  source 1..80: mol_type = other DNA
aactgggctcctaacgctcaacaggcttcttcattcattattgttgggggttgagttgtgtctcctaaaagatatgttgg

SEQ ID NO: 97019 - DNA, 80 bp, synthetic construct
  misc_feature 1..80: note = Artificially Synthesized Probe
  source 1..80: mol_type = other DNA
cgcctgtagtcccagctactcgggaggctgaggctgaagaatcacttgaacacgggaggcgggggttgcagtgaaccgtg

SEQ ID NO: 97020 - DNA, 80 bp, synthetic construct; identical to SEQ ID NO: 34475
  misc_feature 1..80: note = Artificially Synthesized Probe
  source 1..80: mol_type = other DNA

SEQ ID NO: 97021 - DNA, 80 bp, synthetic construct
  misc_feature 1..80: note = Artificially Synthesized Probe
  source 1..80: mol_type = other DNA
tcccctcccgaccactgtcattagggatcctgagtcccagagccttccaaggggcttgtccatctgtctgtctctcgtgg

SEQ ID NO: 97022 - DNA, 80 bp, synthetic construct
  misc_feature 1..80: note = Artificially Synthesized Probe
  source 1..80: mol_type = other DNA
tttaagccagtctgtggtcctttattatggagccctaagagaccatgcagtgtgcgtggaaggggctgctccagacagag

SEQ ID NO: 97023 - DNA, 80 bp, synthetic construct
  misc_feature 1..80: note = Artificially Synthesized Probe
  source 1..80: mol_type = other DNA
ggaaaaggttaaagcacacattttgaagacgaaactatgaccctcaggccagaggttttatttaacttgtgttggtttta

SEQ ID NO: 97024 - DNA, 80 bp, synthetic construct
  misc_feature 1..80: note = Artificially Synthesized Probe
  source 1..80: mol_type = other DNA
gtggaagactatgctggatgttaaaggtggaattttggtgcatttgtcctggaccactgacgctttcttgttcagcacaa

SEQ ID NO: 97025 - DNA, 80 bp, synthetic construct
  misc_feature 1..80: note = Artificially Synthesized Probe
  source 1..80: mol_type = other DNA
gtatccaggcgtgtgcgtgtgtgagtagaggcactggagtatccaggcgtgtgcgtgtgtgagtagaggcactggagtat

SEQ ID NO: 97026 - DNA, 80 bp, synthetic construct; identical to SEQ ID NO: 34476
  misc_feature 1..80: note = Artificially Synthesized Probe
  source 1..80: mol_type = other DNA

SEQ ID NO: 97027 - DNA, 80 bp, synthetic construct
  misc_feature 1..80: note = Artificially Synthesized Probe
  source 1..80: mol_type = other DNA
ctgggctgggcatgagacaaaatgaggatagctgctgggctgtggatagttgttcacaggggtgcaggctgttgtaggtg

SEQ ID NO: 97028 - DNA, 80 bp, synthetic construct; identical to SEQ ID NO: 34477
  misc_feature 1..80: note = Artificially Synthesized Probe
  source 1..80: mol_type = other DNA

SEQ ID NO: 97029 - DNA, 80 bp, synthetic construct
  misc_feature 1..80: note = Artificially Synthesized Probe
  source 1..80: mol_type = other DNA
agaccccctcactgtccaccctcatgtcctatagagaccccctcactgtccaccctcatgtcctatagagaccccctcac

SEQ ID NO: 97030 - DNA, 80 bp, synthetic construct
  misc_feature 1..80: note = Artificially Synthesized Probe
  source 1..80: mol_type = other DNA
cccctcactgtccaccctcatgtcctatagagaccccctcactgtccactctcatgtcctatagagaccccctcactgtc

SEQ ID NO: 97031 - DNA, 80 bp, synthetic construct
  misc_feature 1..80: note = Artificially Synthesized Probe
  source 1..80: mol_type = other DNA
ctcactgtccaccctcatggcctgtagagaccccctcactgtccaccctcatggcctatgagaccccctcactgtccacc

SEQ ID NO: 97032 - DNA, 80 bp, synthetic construct
  misc_feature 1..80: note = Artificially Synthesized Probe
  source 1..80: mol_type = other DNA
tgcgtggagaggacagcactgggatgtgaacaggccgggcgtcccctgaaagagacagccggaactgggtgggggtgggc

SEQ ID NO: 97033 - DNA, 80 bp, synthetic construct
  misc_feature 1..80: note = Artificially Synthesized Probe
  source 1..80: mol_type = other DNA
tgtccaccctcatgtcctatagagaccccctcactgtccaccctcatggcctgtagagaccccctcactgtccgccctca

SEQ ID NO: 97034 - DNA, 80 bp, synthetic construct
  misc_feature 1..80: note = Artificially Synthesized Probe
  source 1..80: mol_type = other DNA
accctcatgtcctatgagacccctcactgtccaccctcatgtcctatgagaccccctcactgtccaccctcatgtcctat

SEQ ID NO: 97035 - DNA, 80 bp, synthetic construct
  misc_feature 1..80: note = Artificially Synthesized Probe
  source 1..80: mol_type = other DNA
tcctatagagaccccctcactgtccaccctcatgtccaaagagaccccctcactgtccaccctcatggcctgtagagacc

SEQ ID NO: 97036 - DNA, 80 bp, synthetic construct
  misc_feature 1..80: note = Artificially Synthesized Probe
  source 1..80: mol_type = other DNA
gtagagaccccctcactgtccaccctcatgtcctatagagaccccctcactgtccaccctcatgtccaaagagaccccct

SEQ ID NO: 97037 - DNA, 80 bp, synthetic construct
  misc_feature 1..80: note = Artificially Synthesized Probe
  source 1..80: mol_type = other DNA
gagaccccctcactgtccaccctcatggcctgtagagaccccctcactgtccaccctcatggcctgtagagaccccctca

SEQ ID NO: 97038 - DNA, 80 bp, synthetic construct
  misc_feature 1..80: note = Artificially Synthesized Probe
  source 1..80: mol_type = other DNA
aactttcagacccggccctcccccaaggcagctcagggaggggctggacactcggttatttatgtatttacttattttta

SEQ ID NO: 97039 - DNA, 80 bp, synthetic construct
  misc_feature 1..80: note = Artificially Synthesized Probe
  source 1..80: mol_type = other DNA
gtctccagactgcgtctgcctcctcgtgcaccagagggtggcagtaactgttcatgtttgccccatccaggggtttttac

SEQ ID NO: 97040 - DNA, 80 bp, synthetic construct; identical to SEQ ID NO: 34479
  misc_feature 1..80: note = Artificially Synthesized Probe
  source 1..80: mol_type = other DNA

SEQ ID NO: 97041 - DNA, 80 bp, synthetic construct
  misc_feature 1..80: note = Artificially Synthesized Probe
  source 1..80: mol_type = other DNA
gcaggtttgttacatatgtatacatgtgccgtgttggtgtgctgcacccattaactcatcatttagcattaggtgtatct

SEQ ID NO: 97042 - DNA, 80 bp, synthetic construct
  misc_feature 1..80: note = Artificially Synthesized Probe
  source 1..80: mol_type = other DNA
cacacgctccctcagttttgtgcatcacaaacgcacacgctccctcagttttgtgcgtcacacacacgctccctcagttt

SEQ ID NO: 97043 - DNA, 80 bp, synthetic construct
  misc_feature 1..80: note = Artificially Synthesized Probe
  source 1..80: mol_type = other DNA
agttatggacatcacaaacacacacgctccctcagttttgtgcttcacaaacacacacgctccctcagttatggacatca

SEQ ID NO: 97044 - DNA, 80 bp, synthetic construct
  misc_feature 1..80: note = Artificially Synthesized Probe
  source 1..80: mol_type = other DNA
tgatgggggtggtggtgggggtgatggtgggggtggtggtgggggtgggggggggtgggcctgatgggggtgtgggcatg

SEQ ID NO: 97045 - DNA, 80 bp, synthetic construct
  misc_feature 1..80: note = Artificially Synthesized Probe
  source 1..80: mol_type = other DNA
cttcacaaacacacacgctccctcagttatggacatcacaaacacacacgctccctcagttttgtgcgtcacaaacacag

SEQ ID NO: 97046 - DNA, 80 bp, synthetic construct; identical to SEQ ID NO: 34480
  misc_feature 1..80: note = Artificially Synthesized Probe
  source 1..80: mol_type = other DNA

SEQ ID NO: 97047 - DNA, 80 bp, synthetic construct
  misc_feature 1..80: note = Artificially Synthesized Probe
  source 1..80: mol_type = other DNA
tatgtgcgtcacaaacacgctccctcagttttgtgtgtcacaaacacacacgctccctcagttttgtgcatcacaaacac

SEQ ID NO: 97048 - DNA, 80 bp, synthetic construct
  misc_feature 1..80: note = Artificially Synthesized Probe
  source 1..80: mol_type = other DNA
cacacgctccctcagtttcgtgcatcccaaagacgattcctcagttttgtgcatcacaaacacatatgctccctcagttt

SEQ ID NO: 97049 - DNA, 80 bp, synthetic construct
  misc_feature 1..80: note = Artificially Synthesized Probe
  source 1..80: mol_type = other DNA
cagttttgcgcatcacaaacacacacgctccctcagttgtcaggggactttgcactgtgcctttgcatgaaacaccatgg

SEQ ID NO: 97050 - DNA, 80 bp, synthetic construct; identical to SEQ ID NO: 34481
  misc_feature 1..80: note = Artificially Synthesized Probe
  source 1..80: mol_type = other DNA

SEQ ID NO: 97051 - DNA, 80 bp, synthetic construct
  misc_feature 1..80: note = Artificially Synthesized Probe
  source 1..80: mol_type = other DNA
tcctaatgtgtgtgttgtgaagtctctcgttctttctttttaaaaatttattatctttaattttttaaaatgtagagaca

SEQ ID NO: 97052 - DNA, 80 bp, synthetic construct
  misc_feature 1..80: note = Artificially Synthesized Probe
  source 1..80: mol_type = other DNA
ccttgacccatttttcttattgtgttgttggattttgtcttattgatttgtacggggcgtttacatattaaggaacttac

SEQ ID NO: 97053 - DNA, 80 bp, synthetic construct
  misc_feature 1..80: note = Artificially Synthesized Probe
  source 1..80: mol_type = other DNA
ccacctcccctggtttgttatttgacttttgtctttgcttaaggagttttgccatagagaattttctttttattacatga

SEQ ID NO: 97054 - DNA, 80 bp, synthetic construct; identical to SEQ ID NO: 34482
  misc_feature 1..80: note = Artificially Synthesized Probe
  source 1..80: mol_type = other DNA

SEQ ID NO: 97055 - DNA, 80 bp, synthetic construct; identical to SEQ ID NO: 34449
  misc_feature 1..80: note = Artificially Synthesized Probe
  source 1..80: mol_type = other DNA

SEQ ID NO: 97056 - DNA, 80 bp, synthetic construct
  misc_feature 1..80: note = Artificially Synthesized Probe
  source 1..80: mol_type = other DNA
gagggctggggaagcaaacacccactcccagttggctccctgcaggccagtcccacccagcagcccggagtcaggcagcc

SEQ ID NO: 97057 - DNA, 80 bp, synthetic construct
  misc_feature 1..80: note = Artificially Synthesized Probe
  source 1..80: mol_type = other DNA
ccgacttgggggatgggcacttccagaagctccccagggcacctggactcagcccccaggggtgcagtgtgcggttgggt

SEQ ID NO: 97058 - DNA, 80 bp, synthetic construct
  misc_feature 1..80: note = Artificially Synthesized Probe
  source 1..80: mol_type = other DNA
tggggagctctatggacctctcaatgtcagcgttttggggtaagggtgggggtcaggtgatgctgggatagatggggcag

SEQ ID NO: 97059 - DNA, 80 bp, synthetic construct; identical to SEQ ID NO: 34483
  misc_feature 1..80: note = Artificially Synthesized Probe
  source 1..80: mol_type = other DNA

SEQ ID NO: 97060 - DNA, 80 bp, synthetic construct
  misc_feature 1..80: note = Artificially Synthesized Probe
  source 1..80: mol_type = other DNA
ggcagaggcctcattatcaaataaggacagcggagagattcgtgctgagccacatgcgctgtcctgcactcacccattct

SEQ ID NO: 97061 - DNA, 80 bp, synthetic construct
  misc_feature 1..80: note = Artificially Synthesized Probe
  source 1..80: mol_type = other DNA
gccattatcctgcctcagcctcccgagtagctgggactacaggcacctgccatcatgcctggctaatttttttttgtatt

SEQ ID NO: 97062 - DNA, 80 bp, synthetic construct
  misc_feature 1..80: note = Artificially Synthesized Probe
  source 1..80: mol_type = other DNA
aaacaatattaaatcataaaatcagtataagaaagtctaaaacattgcagattttcctgaggtcaacttaaacacttaaa

SEQ ID NO: 97063 - DNA, 80 bp, synthetic construct
  misc_feature 1..80: note = Artificially Synthesized Probe
  source 1..80: mol_type = other DNA
gggactctgctgttgggggagcgggcagggcatgtgcagtgtggggtgtggcattcagagggagtggcctccacagccct

SEQ ID NO: 97064 - DNA, 80 bp, synthetic construct; identical to SEQ ID NO: 34484
  misc_feature 1..80: note = Artificially Synthesized Probe
  source 1..80: mol_type = other DNA

SEQ ID NO: 97065 - DNA, 80 bp, synthetic construct
  misc_feature 1..80: note = Artificially Synthesized Probe
  source 1..80: mol_type = other DNA
ctggtttgcccaggtgaaggggtttccaggactctccgttttaaaaccagcacaatctgggccaactgggacacactggt

SEQ ID NO: 97066 - DNA, 80 bp, synthetic construct
  misc_feature 1..80: note = Artificially Synthesized Probe
  source 1..80: mol_type = other DNA
cctccaggcagcgctgggatttgggccccgagacctcgtgtttctctgacccagggaagaagcctctgtccactctgggc

SEQ ID NO: 97067 - DNA, 80 bp, synthetic construct
  misc_feature 1..80: note = Artificially Synthesized Probe
  source 1..80: mol_type = other DNA
cgggcagcacgaagcccaggaccaacgtgtagacacggctggccttgaaccagacctgctcgggccacgggaagctcagc

SEQ ID NO: 97068 - DNA, 80 bp, synthetic construct; identical to SEQ ID NO: 34485
  misc_feature 1..80: note = Artificially Synthesized Probe
  source 1..80: mol_type = other DNA

SEQ ID NO: 97069 - DNA, 80 bp, synthetic construct
  misc_feature 1..80: note = Artificially Synthesized Probe
  source 1..80: mol_type = other DNA
ccagggctgggggcccacctgtgactcacgggctgggtcaagatgctagctggatttcaaggcagtggctctccccacac

SEQ ID NO: 97070 - DNA, 80 bp, synthetic construct
  misc_feature 1..80: note = Artificially Synthesized Probe
  source 1..80: mol_type = other DNA
gccgccctggaagaggaaagaagaaagtgagagcgactaaggggctctggggtgtgtgagtgggttggtgcaaggtggaa

SEQ ID NO: 97071 - DNA, 80 bp, synthetic construct
  misc_feature 1..80: note = Artificially Synthesized Probe
  source 1..80: mol_type = other DNA
tcctgctctttggacttaacacactcaggagtctgttgttaaaaaacaaaccaaaggctctcttagcctcgaccccatca

SEQ ID NO: 97072 - DNA, 80 bp, synthetic construct; identical to SEQ ID NO: 34486
  misc_feature 1..80: note = Artificially Synthesized Probe
  source 1..80: mol_type = other DNA

SEQ ID NO: 97073 - DNA, 80 bp, synthetic construct
  misc_feature 1..80: note = Artificially Synthesized Probe
  source 1..80: mol_type = other DNA
ctatgccccccccgccacttaaagtgctgtgaagctgttgcagggagggccccgggtcccaggaggaggccaggggaccc

SEQ ID NO: 97074 - DNA, 80 bp, synthetic construct
  misc_feature 1..80: note = Artificially Synthesized Probe
  source 1..80: mol_type = other DNA
gccatagctgattattcattgacggtaatgctacacagggattaaaatcagtcaacttgaataaaccttaagaataaggc

SEQ ID NO: 97075 - DNA, 80 bp, synthetic construct
  misc_feature 1..80: note = Artificially Synthesized Probe
  source 1..80: mol_type = other DNA
tctgtagtcccagctactcgcgaggctgaggcaggagaatggcgtgaacctggcaggcggagcttgccgtgagccgagat

SEQ ID NO: 97076 - DNA, 80 bp, synthetic construct
  misc_feature 1..80: note = Artificially Synthesized Probe
  source 1..80: mol_type = other DNA
aggctgcagtgagctatgactgtgtcactgcactccagcctgggtgacagagcgagactccatctctttaaaaaaagttg

SEQ ID NO: 97077 - DNA, 80 bp, synthetic construct; identical to SEQ ID NO: 34487
  misc_feature 1..80: note = Artificially Synthesized Probe
  source 1..80: mol_type = other DNA

SEQ ID NO: 97078 - DNA, 80 bp, synthetic construct
  misc_feature 1..80: note = Artificially Synthesized Probe
  source 1..80: mol_type = other DNA
ccaggtatcggtccacgctcatcacggctaggaagtagatgctggagaagatgttgtagtggtcgacggccagcaccagc

SEQ ID NO: 97079 - DNA, 80 bp, synthetic construct
  misc_feature 1..80: note = Artificially Synthesized Probe
  source 1..80: mol_type = other DNA
cagaagggtgggagagccacaggggctggaagcggggtggtacttccaggaacctgaagcccaggtgaggacaggtgctt

SEQ ID NO: 97080 - DNA, 80 bp, synthetic construct
  misc_feature 1..80: note = Artificially Synthesized Probe
  source 1..80: mol_type = other DNA
ctggctcactcgcggagagctgtttcctgtggctcaacaagtttataataaacacagttaaacttttatttatggcacag

SEQ ID NO: 97081 - DNA, 80 bp, synthetic construct
  misc_feature 1..80: note = Artificially Synthesized Probe
  source 1..80: mol_type = other DNA
ctggcctgactcctggcaggtaggccccctctccagtccgcccaggctttggtaggtgtgcctgcccaggctaggctctg

SEQ ID NO: 97082 - DNA, 80 bp, synthetic construct; identical to SEQ ID NO: 34488
  misc_feature 1..80: note = Artificially Synthesized Probe
  source 1..80: mol_type = other DNA

SEQ ID NO: 97083 - DNA, 80 bp, synthetic construct
  misc_feature 1..80: note = Artificially Synthesized Probe
  source 1..80: mol_type = other DNA
catggccacctccacacaggtcatggtgtgagtcgcctccccccatgttccctctgcagagctggctccaggatgagcct

SEQ ID NO: 97084 - DNA, 80 bp, synthetic construct
  misc_feature 1..80: note = Artificially Synthesized Probe
  source 1..80: mol_type = other DNA
ttagcggacatgtgtgtgagtgagaatgctcatgtgagtgcatgcatgtttaggtgagtgggcatgtacatctacgtgtg

SEQ ID NO: 97085 - DNA, 80 bp, synthetic construct
  misc_feature 1..80: note = Artificially Synthesized Probe
  source 1..80: mol_type = other DNA
tatgtgtaagtggtatatgcatgtgtgtacatgtaggtttttgtgaatatacaagtgtatatgtgcacataagcagtgtg

SEQ ID NO: 97086 - DNA, 80 bp, synthetic construct; identical to SEQ ID NO: 34489
  misc_feature 1..80: note = Artificially Synthesized Probe
  source 1..80: mol_type = other DNA

SEQ ID NO: 97087 - DNA, 80 bp, synthetic construct
  misc_feature 1..80: note = Artificially Synthesized Probe
  source 1..80: mol_type = other DNA
aagttgtgtacatgtaagtaatgcatgtgtgtgtgcatgtgttcaagtgatttgtgtgtgcatatgctacacatgtgtgc

SEQ ID NO: 97088 - DNA, 80 bp, synthetic construct
  misc_feature 1..80: note = Artificially Synthesized Probe
  source 1..80: mol_type = other DNA
ctctcccgctctcctgcttctcttctgaggtcagtcacagacctggacatccggcttgtggggagtattgagttgcagtg

SEQ ID NO: 97089 - DNA, 80 bp, synthetic construct
  misc_feature 1..80: note = Artificially Synthesized Probe
  source 1..80: mol_type = other DNA
ccgtgttgccagtcagccccacagcacagatcccggagtacacggcgggcaggagcacatagaggaacggcagtggctcg

SEQ ID NO: 97090 - DNA, 80 bp, synthetic construct; identical to SEQ ID NO: 34490
  misc_feature 1..80: note = Artificially Synthesized Probe
  source 1..80: mol_type = other DNA

SEQ ID NO: 97091 - DNA, 80 bp, synthetic construct
  misc_feature 1..80: note = Artificially Synthesized Probe
  source 1..80: mol_type = other DNA
ttcttcagtacagtgaaattagctgagcagttcctctgggcagagcctctgctaacattcctttgaagcctccctccatg

SEQ ID NO: 97092 - DNA, 80 bp, synthetic construct
  misc_feature 1..80: note = Artificially Synthesized Probe
  source 1..80: mol_type = other DNA
ccaatggattgtgtgtgtcgtgacagatgtcagctgggaggaaaagacactgggcccctcctgcacaggggccttatttc

SEQ ID NO: 97093 - DNA, 80 bp, synthetic construct
  misc_feature 1..80: note = Artificially Synthesized Probe
  source 1..80: mol_type = other DNA
atcagggcagcaaaggtgctgcaaaaccagcaagaccaacaggactgtacaagaccggtgttccacggcgacaccttgtg

SEQ ID NO: 97094 - DNA, 80 bp, synthetic construct; identical to SEQ ID NO: 34491
  misc_feature 1..80: note = Artificially Synthesized Probe
  source 1..80: mol_type = other DNA

SEQ ID NO: 97095 - DNA, 80 bp, synthetic construct
  misc_feature 1..80: note = Artificially Synthesized Probe
  source 1..80: mol_type = other DNA
accaagcactgtgcgcaccgctgttagccccaggacccccagtgtcagcactggtggggctggtgtttgtggagtgtgtc

SEQ ID NO: 97096 - DNA, 80 bp, synthetic construct
  misc_feature 1..80: note = Artificially Synthesized Probe
  source 1..80: mol_type = other DNA
cctaaatctgagagggggcttggctgggcctggggtcaggggacaaacagccaccctggctgaggccctgggcagctgag

SEQ ID NO: 97097 - DNA, 80 bp, synthetic construct
  misc_feature 1..80: note = Artificially Synthesized Probe
  source 1..80: mol_type = other DNA
atgctgaatacactcatgccccctcccccaacctccctcaccgaacctgacagctgctgcggggagtgcctttctctgct

SEQ ID NO: 97098 - DNA, 80 bp, synthetic construct
  misc_feature 1..80: note = Artificially Synthesized Probe
  source 1..80: mol_type = other DNA
ccccaggcctgggcctgctctaaggagagaagggatgggtgctggttggaggctcagcccctgagtgagggtgagggtac

SEQ ID NO: 97099 - DNA, 80 bp, synthetic construct; identical to SEQ ID NO: 34492
  misc_feature 1..80: note = Artificially Synthesized Probe
  source 1..80: mol_type = other DNA

SEQ ID NO: 97100 - DNA, 80 bp, synthetic construct; identical to SEQ ID NO: 34450
  misc_feature 1..80: note = Artificially Synthesized Probe
  source 1..80: mol_type = other DNA

SEQ ID NO: 97101 - DNA, 80 bp, synthetic construct
  misc_feature 1..80: note = Artificially Synthesized Probe
  source 1..80: mol_type = other DNA
ccctactcccccagcttctcaaagaaggtctgttttctgagcctcctctgtgatgcccccaccagccgcagcctccctca

SEQ ID NO: 97102 - DNA, 80 bp, synthetic construct
  misc_feature 1..80: note = Artificially Synthesized Probe
  source 1..80: mol_type = other DNA
ttgtgcaattccagcttcaacaagggtcaccagaacagctctgagcaattccagcttcaacaagggtcaccagaattgct

SEQ ID NO: 97103 - DNA, 80 bp, synthetic construct; identical to SEQ ID NO: 34493
  misc_feature 1..80: note = Artificially Synthesized Probe
  source 1..80: mol_type = other DNA

SEQ ID NO: 97104 - DNA, 80 bp, synthetic construct
  misc_feature 1..80: note = Artificially Synthesized Probe
  source 1..80: mol_type = other DNA
ggggaagccaagggtgtccatgaaaagagtcaaactctgtaaagtatttgaagagatttatcctgaaccaaatacgagtg

SEQ ID NO: 97105 - DNA, 80 bp, synthetic construct
  misc_feature 1..80: note = Artificially Synthesized Probe
  source 1..80: mol_type = other DNA
gtgggcttccaggccataggtagataagacacaaacagctgcattcttttgggtctttgatcagtgtttcactgaacaca

SEQ ID NO: 97106 - DNA, 80 bp, synthetic construct
  misc_feature 1..80: note = Artificially Synthesized Probe
  source 1..80: mol_type = other DNA
tgtcccgcacctgtgaagggaagctatccatttacgttgccagggtgaaattcagcagaacagttttagggcaaagatct

SEQ ID NO: 97107 - DNA, 80 bp, synthetic construct; identical to SEQ ID NO: 34494
  misc_feature 1..80: note = Artificially Synthesized Probe
  source 1..80: mol_type = other DNA

SEQ ID NO: 97108 - DNA, 80 bp, synthetic construct
  misc_feature 1..80: note = Artificially Synthesized Probe
  source 1..80: mol_type = other DNA
gaagacattcagcttaatcaaaacctcttttctgaccctttgtgccagccttcctggagggggctccccaaagaagggtc

SEQ ID NO: 97109 - DNA, 80 bp, synthetic construct
  misc_feature 1..80: note = Artificially Synthesized Probe
  source 1..80: mol_type = other DNA
atttcctatataatggccccacatggcaggctaaatgtggaaaaccaccaaatagaggcagaaatataaagacactttgg

SEQ ID NO: 97110 - DNA, 80 bp, synthetic construct
  misc_feature 1..80: note = Artificially Synthesized Probe
  source 1..80: mol_type = other DNA
acgcttgacctgagacttcccccttatcatggtcaaagtgagggtgtccctgctggagcccctgcaaaggcccgagggag

SEQ ID NO: 97111 - DNA, 80 bp, synthetic construct
  misc_feature 1..80: note = Artificially Synthesized Probe
  source 1..80: mol_type = other DNA
actgatgggggctggtctagagggctctctcctaggtgaggggctagacctgaagctcttgtgcttcctcagccctagtc

SEQ ID NO: 97112 - DNA, 80 bp, synthetic construct
  misc_feature 1..80: note = Artificially Synthesized Probe
  source 1..80: mol_type = other DNA
agagagcagctgctggccaccctcctgggaagagatgtggatccgtccctgccccagcaacccgcagatgcacgggctgc

SEQ ID NO: 97113 - DNA, 80 bp, synthetic construct; identical to SEQ ID NO: 34495
  misc_feature 1..80: note = Artificially Synthesized Probe
  source 1..80: mol_type = other DNA

SEQ ID NO: 97114 - DNA, 80 bp, synthetic construct
  misc_feature 1..80: note = Artificially Synthesized Probe
  source 1..80: mol_type = other DNA
gtacacagaggcacgcacacgcacacacagatgtgtacacagagaggtacgcacacgtacacacagatgtgtacacagag

SEQ ID NO: 97115 - DNA, 80 bp, synthetic construct
  misc_feature 1..80: note = Artificially Synthesized Probe
  source 1..80: mol_type = other DNA
agatgtgtacacagagatgcacacatgcacacagaaatgggcatgcacatgcacacagatgtacacacatggatgttcac

SEQ ID NO: 97116 - DNA, 80 bp, synthetic construct
  misc_feature 1..80: note = Artificially Synthesized Probe
  source 1..80: mol_type = other DNA
ttgtctcctcaaggggctccggggcaccgtaacagcgtgcagagcgcagtcaggctgccgtgctgctgctttgcgaggtg

SEQ ID NO: 97117 - DNA, 80 bp, synthetic construct; identical to SEQ ID NO: 34496
  misc_feature 1..80: note = Artificially Synthesized Probe
  source 1..80: mol_type = other DNA

SEQ ID NO: 97118 - DNA, 80 bp, synthetic construct
  misc_feature 1..80: note = Artificially Synthesized Probe
  source 1..80: mol_type = other DNA
agctggtggtcagtgatgggcggactagtcctgaggtcctaagactggagtgtctggatgatcagtgtgacctctcagag

SEQ ID NO: 97119 - DNA, 80 bp, synthetic construct
  misc_feature 1..80: note = Artificially Synthesized Probe
  source 1..80: mol_type = other DNA
tgagaaaagctcagtctagacatctgggcctaggccccaagaagagtggggatcaggccttcatgggtggtgttggagag

SEQ ID NO: 97120 - DNA, 80 bp, synthetic construct
  misc_feature 1..80: note = Artificially Synthesized Probe
  source 1..80: mol_type = other DNA
ggaagagacggctcacctctttgagctttctggcaaagtcaagggtgctgagtgctgtgtcagggccatccaaaggtcct

SEQ ID NO: 97121 - DNA, 80 bp, synthetic construct
  misc_feature 1..80: note = Artificially Synthesized Probe
  source 1..80: mol_type = other DNA
gcccaggtcaacttgtcctgggcagaggatgggttcagaagagaacatcggctgtgtatcctttgtatcttccagaggta

SEQ ID NO: 97122 - DNA, 80 bp, synthetic construct; identical to SEQ ID NO: 34497
  misc_feature 1..80: note = Artificially Synthesized Probe
  source 1..80: mol_type = other DNA

SEQ ID NO: 97123 - DNA, 80 bp, synthetic construct
  misc_feature 1..80: note = Artificially Synthesized Probe
  source 1..80: mol_type = other DNA
aatgtctgggatcgtctgtgatttggaaaccggtggcagaatgttcccgcgtttctggtcctcatcagtcaggtaggttg

SEQ ID NO: 97124 - DNA, 80 bp, synthetic construct
  misc_feature 1..80: note = Artificially Synthesized Probe
  source 1..80: mol_type = other DNA
ctgacctgtccagtgcttcgagtccagaagttggtagccttggtgtgttcctggttttggccagtacaggcagtcgcagg

SEQ ID NO: 97125 - DNA, 80 bp, synthetic construct
  misc_feature 1..80: note = Artificially Synthesized Probe
  source 1..80: mol_type = other DNA
cttgtgtgtgtgtgtttggtccgctgtgtacctggtgtgcacacattgcctgtcacgtgggtctctgttggaagctcttg

SEQ ID NO: 97126 - DNA, 80 bp, synthetic construct; identical to SEQ ID NO: 34498
  misc_feature 1..80: note = Artificially Synthesized Probe
  source 1..80: mol_type = other DNA

SEQ ID NO: 97127 - DNA, 80 bp, synthetic construct
  misc_feature 1..80: note = Artificially Synthesized Probe
  source 1..80: mol_type = other DNA
ccaggcaggcccgtgctccaagcaccctgttcctcaggtgggacagcctcatcttctttttcctttttttttttttgaga

SEQ ID NO: 97128 - DNA, 80 bp, synthetic construct
  misc_feature 1..80: note = Artificially Synthesized Probe
  source 1..80: mol_type = other DNA
atacagggtttcaccatgtttgccaggatggtcttgaactcctgaccttgtgatccgcccgccttggcctcccaaagtgc

SEQ ID NO: 97129 - DNA, 80 bp, synthetic construct
  misc_feature 1..80: note = Artificially Synthesized Probe
  source 1..80: mol_type = other DNA
acacagctgtcaccccaggtcacctcctctgcctttctcccagcaccctgcatgctctggcctgggcagccccctccccc

SEQ ID NO: 97130 - DNA, 80 bp, synthetic construct
  misc_feature 1..80: note = Artificially Synthesized Probe
  source 1..80: mol_type = other DNA
cacaccttgctcggtttagtcgctgtctgagccttagttcctggtcataactgggctgtgcggggcttggggcctcatat

SEQ ID NO: 97131 - DNA, 80 bp, synthetic construct; identical to SEQ ID NO: 34499
  misc_feature 1..80: note = Artificially Synthesized Probe
  source 1..80: mol_type = other DNA

SEQ ID NO: 97132 - DNA, 80 bp, synthetic construct
  misc_feature 1..80: note = Artificially Synthesized Probe
  source 1..80: mol_type = other DNA
gtggggtctgaggtatgtggtgtgtgtgtgtttgtgtgtgtctgtgtgtgtgtgtggtgtctatatggtgtgtatgtctg

SEQ ID NO: 97133 - DNA, 80 bp, synthetic construct
  misc_feature 1..80: note = Artificially Synthesized Probe
  source 1..80: mol_type = other DNA
agggcctcccggggctcttggatttggagggcccacgctgctctggcctgggaaggtggggttatctggagggtatatta

SEQ ID NO: 97134 - DNA, 80 bp, synthetic construct
  misc_feature 1..80: note = Artificially Synthesized Probe
  source 1..80: mol_type = other DNA
gtgccatcccagctgccccaacactgtgtgccccggctctgctcctggaccccacgccgcgtgccccggctctgctcctg

SEQ ID NO: 97135 - DNA, 80 bp, synthetic construct
  misc_feature 1..80: note = Artificially Synthesized Probe
  source 1..80: mol_type = other DNA
gtggagcccggaaggcaggccccaccttcccctgagctgcagtagcgcctgcagtcggctgtcccagggtctcctcagca

SEQ ID NO: 97136 - DNA, 80 bp, synthetic construct; identical to SEQ ID NO: 34500
  misc_feature 1..80: note = Artificially Synthesized Probe
  source 1..80: mol_type = other DNA

SEQ ID NO: 97137 - DNA, 80 bp, synthetic construct
  misc_feature 1..80: note = Artificially Synthesized Probe
  source 1..80: mol_type = other DNA
tcaggggctggacccatagcttgagtggcagtggggacatccaacctggcttcctcagtggggtttggccatggaggtgc

SEQ ID NO: 97138 - DNA, 80 bp, synthetic construct
  misc_feature 1..80: note = Artificially Synthesized Probe
  source 1..80: mol_type = other DNA
ccccagagtgctgcatgtgaggatggggactgcctcactcaggaagccatcctgtcatcccagagtgtggtgttggcctc

SEQ ID NO: 97139 - DNA, 80 bp, synthetic construct
  misc_feature 1..80: note = Artificially Synthesized Probe
  source 1..80: mol_type = other DNA
ctggccagtgcctaccggttccaccaagctccattcttgggaatgcagggcccggacattcagtccagagactttccctc

SEQ ID NO: 97140 - DNA, 80 bp, synthetic construct; identical to SEQ ID NO: 34501
  misc_feature 1..80: note = Artificially Synthesized Probe
  source 1..80: mol_type = other DNA

SEQ ID NO: 97141 - DNA, 80 bp, synthetic construct
  misc_feature 1..80: note = Artificially Synthesized Probe
  source 1..80: mol_type = other DNA
cggccagtctgtgtcctcctctctttctctgtgttcctcacctctctgtccatctgtgtgtctgagccggcctggtttct

SEQ ID NO: 97142 - DNA, 80 bp, synthetic construct
  misc_feature 1..80: note = Artificially Synthesized Probe
  source 1..80: mol_type = other DNA
tatctctcctactggttcagctgctttttgcctttggctatcgttctgtgctggtaggaccaggacatcagggggtttcc

SEQ ID NO: 97143 - DNA, 80 bp, synthetic construct; identical to SEQ ID NO: 34502
  misc_feature 1..80: note = Artificially Synthesized Probe
  source 1..80: mol_type = other DNA

SEQ ID NO: 97144 - DNA, 80 bp, synthetic construct
  misc_feature 1..80: note = Artificially Synthesized Probe
  source 1..80: mol_type = other DNA
atcctgggctcagcatggagcctcctggcttccccaaaccacgcatggctgagcttgcagccttgttcagctgaccctgc

SEQ ID NO: 97145 - DNA, 80 bp, synthetic construct
  misc_feature 1..80: note = Artificially Synthesized Probe
  source 1..80: mol_type = other DNA
gtgactttgccttctcctgccggtgcccccagccctcagctgtctctcctctgtctttcctctgtccccacatcctttgt

SEQ ID NO: 97146 - DNA, 80 bp, synthetic construct; identical to SEQ ID NO: 34451
  misc_feature 1..80: note = Artificially Synthesized Probe
  source 1..80: mol_type = other DNA

SEQ ID NO: 97147 - DNA, 80 bp, synthetic construct
  misc_feature 1..80: note = Artificially Synthesized Probe
  source 1..80: mol_type = other DNA
caaccccctaggatgccgccttccaaggtcatggccctgggtcagggcagagcaggcagaggagccgtatgggcagacca

SEQ ID NO: 97148 - DNA, 80 bp, synthetic construct; identical to SEQ ID NO: 34503
  misc_feature 1..80: note = Artificially Synthesized Probe
  source 1..80: mol_type = other DNA

SEQ ID NO: 97149 - DNA, 80 bp, synthetic construct
  misc_feature 1..80: note = Artificially Synthesized Probe
  source 1..80: mol_type = other DNA
ttctgactcagcctggccaggttcccctggagctggccccctgagcacgtgttgagttggggtgggggagctggagggcc

SEQ ID NO: 97150 - DNA, 80 bp, synthetic construct
  misc_feature 1..80: note = Artificially Synthesized Probe
  source 1..80: mol_type = other DNA
taatcagtcttaattaactccatccgaagaacatattttccccaagggtagggagtcccagtcaggtggagcaagttgga

SEQ ID NO: 97151 - DNA, 80 bp, synthetic construct
  misc_feature 1..80: note = Artificially Synthesized Probe
  source 1..80: mol_type = other DNA
agaaaggtttggcaatctgccccaggtcacttcccctaagcacagacgtccttgtggacgaggagaagaggcagaactca

SEQ ID NO: 97152 - DNA, 80 bp, synthetic construct
  misc_feature 1..80: note = Artificially Synthesized Probe
  source 1..80: mol_type = other DNA
acctgccccacctgccccacccatccctgtgcccaacctgccccacctgcccctgtccccacctgttcctgtccctacct

SEQ ID NO: 97153 - DNA, 80 bp, synthetic construct; identical to SEQ ID NO: 34504
  misc_feature 1..80: note = Artificially Synthesized Probe
  source 1..80: mol_type = other DNA

SEQ ID NO: 97154 - DNA, 80 bp, synthetic construct
  misc_feature 1..80: note = Artificially Synthesized Probe
  source 1..80: mol_type = other DNA
ccacttgtctgtgtcccccacctgctccactggcccctgccaccacctgccccacctacccctttccccgacctgcccca

SEQ ID NO: 97155 - DNA, 80 bp, synthetic construct
  misc_feature 1..80: note = Artificially Synthesized Probe
  source 1..80: mol_type = other DNA
ccacctgtctcaccactgccatatgcccctcctggccccacctgtcctacctgtctcccctgcctccaacctgcccctct

SEQ ID NO: 97156 - DNA, 80 bp, synthetic construct; identical to SEQ ID NO: 34505
  misc_feature 1..80: note = Artificially Synthesized Probe
  source 1..80: mol_type = other DNA

SEQ ID NO: 97157 - DNA, 80 bp, synthetic construct
  misc_feature 1..80: note = Artificially Synthesized Probe
  source 1..80: mol_type = other DNA
gccataggcaacccaccttctttttttgtcttttgctaaaagaggaactcagcctaggcaagctgtgaaaggctgcagag

SEQ ID NO: 97158 - DNA, 80 bp, synthetic construct
  misc_feature 1..80: note = Artificially Synthesized Probe
  source 1..80: mol_type = other DNA
ctctctgtccctaccacatccagaccctcagcaacccgattcattcctgagggggtgtcccaactcgaatgcaattcgtc

SEQ ID NO: 97159 - DNA, 80 bp, synthetic construct
  misc_feature 1..80: note = Artificially Synthesized Probe
  source 1..80: mol_type = other DNA
tccatactccgggcctccccctcagtgctgccctggatgggagagactagcctggacttggccacgtgttggtagaggta

SEQ ID NO: 97160 - DNA, 80 bp, synthetic construct
  misc_feature 1..80: note = Artificially Synthesized Probe
  source 1..80: mol_type = other DNA
gttcatcgtttcaaagggcccctgtgggcagtgaaaggtcgtgggcccagttcgagggactaggaatcattctggaagag

SEQ ID NO: 97161 - DNA, 80 bp, synthetic construct
  misc_feature 1..80: note = Artificially Synthesized Probe
  source 1..80: mol_type = other DNA
gtcgagggattcttgacttctacagtttgcctccccctggcacctcccaccataccttgtgcctgggatctggtggtggg

SEQ ID NO: 97162 - DNA, 80 bp, synthetic construct; identical to SEQ ID NO: 34506
  misc_feature 1..80: note = Artificially Synthesized Probe
  source 1..80: mol_type = other DNA

SEQ ID NO: 97163 - DNA, 80 bp, synthetic construct
  misc_feature 1..80: note = Artificially Synthesized Probe
  source 1..80: mol_type = other DNA
cccagggccctgggacacaagtttgtgcagcaactttttccagcatgaagtgacgtgtgttcccagagagaaggtgcacc

SEQ ID NO: 97164 - DNA, 80 bp, synthetic construct
  misc_feature 1..80: note = Artificially Synthesized Probe
  source 1..80: mol_type = other DNA
gtgtgtccccccctcagagctcagtgctcttttctgggcagccaaggaggtgacagacatgctccctcctgaacaatggc

SEQ ID NO: 97165 - DNA, 80 bp, synthetic construct
  misc_feature 1..80: note = Artificially Synthesized Probe
  source 1..80: mol_type = other DNA
tgatttacctgcctggatctgcctggcaggccatatagctggtgggtgtcaggagcccttggcctggagcaaggctctgt

SEQ ID NO: 97166 - DNA, 80 bp, synthetic construct; identical to SEQ ID NO: 34507
  misc_feature 1..80: note = Artificially Synthesized Probe
  source 1..80: mol_type = other DNA

SEQ ID NO: 97167 - DNA, 80 bp, synthetic construct
  misc_feature 1..80: note = Artificially Synthesized Probe
  source 1..80: mol_type = other DNA
ccatctcggcctcacacaacggccctaattgtcgtctgcagcattaaggcaggcgcccatctgcggggaagctttcagaa

SEQ ID NO: 97168 - DNA, 80 bp, synthetic construct
  misc_feature 1..80: note = Artificially Synthesized Probe
  source 1..80: mol_type = other DNA
tggaatgtctgtgtgcagatttgcacaagtaattacactttatttgaaatgatcttaccagctaagcgatcattaagcct

SEQ ID NO: 97169 - DNA, 80 bp, synthetic construct
  misc_feature 1..80: note = Artificially Synthesized Probe
  source 1..80: mol_type = other DNA
cgcatctggacctgctttgcaggcaacgccacagctgacacgagcagtcgccagtctcagagccgctcctcagcggagac

SEQ ID NO: 97170 - DNA, 80 bp, synthetic construct; identical to SEQ ID NO: 34508
  misc_feature 1..80: note = Artificially Synthesized Probe
  source 1..80: mol_type = other DNA

SEQ ID NO: 97171 - DNA, 80 bp, synthetic construct
  misc_feature 1..80: note = Artificially Synthesized Probe
  source 1..80: mol_type = other DNA
tctcagcccggagcccagagttcagcgatagctgaatactggtgcgagctcagaagcttccgtgtgcggagaacaaagac

SEQ ID NO: 97172 - DNA, 80 bp, synthetic construct
  misc_feature 1..80: note = Artificially Synthesized Probe
  source 1..80: mol_type = other DNA
cttgacggggtcagctaaagacttcgaacctttactcatcaaagctcatcttcggaaactgctcatagcactttaacctc

SEQ ID NO: 97173 - DNA, 80 bp, synthetic construct
  misc_feature 1..80: note = Artificially Synthesized Probe
  source 1..80: mol_type = other DNA
aaggggaagtgagaaatgccgaaagacttacgttttcacaaatacaatttctattacctgaaaaaactgttgtgccccac

SEQ ID NO: 97174 - DNA, 80 bp, synthetic construct
  misc_feature 1..80: note = Artificially Synthesized Probe
  source 1..80: mol_type = other DNA
gtattcatcatggaacaatggcccgcaagcctgcccggagcctgcagcctgccgataagagtttaatagaatttctgaat

SEQ ID NO: 97175 - DNA, 80 bp, synthetic construct; identical to SEQ ID NO: 34509
  misc_feature 1..80: note = Artificially Synthesized Probe
  source 1..80: mol_type = other DNA

SEQ ID NO: 97176 - DNA, 80 bp, synthetic construct
  misc_feature 1..80: note = Artificially Synthesized Probe
  source 1..80: mol_type = other DNA
cacaaactgtatgttaaaaataagccactaagattttcaaaacatgctctcttagagaaagctgtgttcagttctgcctc

SEQ ID NO: 97177 - DNA, 80 bp, synthetic construct
  misc_feature 1..80: note = Artificially Synthesized Probe
  source 1..80: mol_type = other DNA
gcatctttgcaggcgtctcacattgagttttcacccttgtgtttcacagtttcatttctaacatcctgattatgataatg

SEQ ID NO: 97178 - DNA, 80 bp, synthetic construct; identical to SEQ ID NO: 34510
  misc_feature 1..80: note = Artificially Synthesized Probe
  source 1..80: mol_type = other DNA

SEQ ID NO: 97179 - DNA, 80 bp, synthetic construct
  misc_feature 1..80: note = Artificially Synthesized Probe
  source 1..80: mol_type = other DNA
gggaaagtgtgagaacagaaaaatgtcttttcctgatctattctttgtgtgcatgactctattttttggtctgtggctat

SEQ ID NO: 97180 - DNA, 80 bp, synthetic construct
  misc_feature 1..80: note = Artificially Synthesized Probe
  source 1..80: mol_type = other DNA
tgggactacaggcatgtgccaccatgcctggctaatttttgtgtttttttttgtagagacggggtttcaccatgttgccc

SEQ ID NO: 97181 - DNA, 80 bp, synthetic construct
  misc_feature 1..80: note = Artificially Synthesized Probe
  source 1..80: mol_type = other DNA
tttatgatggtagatcatattcctcaccaccaataaatattgtaaagtactttcgctgtagccatgctaacccggggcat

SEQ ID NO: 97182 - DNA, 80 bp, synthetic construct
  misc_feature 1..80: note = Artificially Synthesized Probe
  source 1..80: mol_type = other DNA
aaaactcaatcatgctgcacattgagtatgaatcagtgtggacaaacataggcaccttctgttggccgaggctcagagca

SEQ ID NO: 97183 - DNA, 80 bp, synthetic construct
  misc_feature 1..80: note = Artificially Synthesized Probe
  source 1..80: mol_type = other DNA
ccagcccgtgccaccgctgctaatgagagcagtcattaagtaaatgagacgtcgcctttagctggcttaggagttcgcac

SEQ ID NO: 97184 - DNA, 80 bp, synthetic construct; identical to SEQ ID NO: 34511
  misc_feature 1..80: note = Artificially Synthesized Probe
  source 1..80: mol_type = other DNA

SEQ ID NO: 97185 - DNA, 80 bp, synthetic construct
  misc_feature 1..80: note = Artificially Synthesized Probe
  source 1..80: mol_type = other DNA
cttctcctccctggcctgccgtgtgctgtttttctcctgtctctctgttgttcatgctcctctgagattccaggggacat

SEQ ID NO: 97186 - DNA, 80 bp, synthetic construct
  misc_feature 1..80: note = Artificially Synthesized Probe
  source 1..80: mol_type = other DNA
tctctgaagcagggtctcagagtctggggtgtgtcatgtgtgacccccacccaaggtactgaggagaggtgctcacgtga

SEQ ID NO: 97187 - DNA, 80 bp, synthetic construct; identical to SEQ ID NO: 34512
  misc_feature 1..80: note = Artificially Synthesized Probe
  source 1..80: mol_type = other DNA

SEQ ID NO: 97188 - DNA, 80 bp, synthetic construct
  misc_feature 1..80: note = Artificially Synthesized Probe
  source 1..80: mol_type = other DNA
agtcaccaagggctttgcttgtctcagcatcacctttgaatcagtggacaccattggctggtaaagttgggtgtttaatt

SEQ ID NO: 97189 - DNA, 80 bp, synthetic construct
  misc_feature 1..80: note = Artificially Synthesized Probe
  source 1..80: mol_type = other DNA
gagaggtcggtggagaattttgcccttgcagtttttttttttcttttaaatcacagaaaactgaggacacctctaacgcc

SEQ ID NO: 97190 - DNA, 80 bp, synthetic construct
  misc_feature 1..80: note = Artificially Synthesized Probe
  source 1..80: mol_type = other DNA
gggctgactgagggaggctcccctcggcccccagcctccctgccaccccgggctcccctcccattggtccttggctgtga

SEQ ID NO: 97191 - DNA, 80 bp, synthetic construct; identical to SEQ ID NO: 34513
  misc_feature 1..80: note = Artificially Synthesized Probe
  source 1..80: mol_type = other DNA

SEQ ID NO: 97192 - DNA, 80 bp, synthetic construct; identical to SEQ ID NO: 34452
  misc_feature 1..80: note = Artificially Synthesized Probe
  source 1..80: mol_type = other DNA

SEQ ID NO: 97193 - DNA, 80 bp, synthetic construct
  misc_feature 1..80: note = Artificially Synthesized Probe
  source 1..80: mol_type = other DNA
cctgaagagggcctggtagccctcttcagagacccgaggcaggggggctgcttctgtccaaagtgccactcgagggtttt

SEQ ID NO: 97194 - DNA, 80 bp, synthetic construct
  misc_feature 1..80: note = Artificially Synthesized Probe
  source 1..80: mol_type = other DNA
tggtgcatgagtggggaaacactctctgagatgaccccttctagccatgtgggatgcaaagttgctctggtctgggggtt

SEQ ID NO: 97195 - DNA, 80 bp, synthetic construct
  misc_feature 1..80: note = Artificially Synthesized Probe
  source 1..80: mol_type = other DNA
gtgggcgctctccctggtgctgctcagagactcactcccttcctctctggcctggggtcactgaatgtgcagacaatgac

SEQ ID NO: 97196 - DNA, 80 bp, synthetic construct; identical to SEQ ID NO: 34514
  misc_feature 1..80: note = Artificially Synthesized Probe
  source 1..80: mol_type = other DNA

SEQ ID NO: 97197 - DNA, 80 bp, synthetic construct
  misc_feature 1..80: note = Artificially Synthesized Probe
  source 1..80: mol_type = other DNA
ccgggaacaaccagaacactttggtcagcaccgggcctggagtagatgaggaggtagagaactgacccagctggtggaac

SEQ ID NO: 97198 - DNA, 80 bp, synthetic construct
  misc_feature 1..80: note = Artificially Synthesized Probe
  source 1..80: mol_type = other DNA
gatgctctgcctgtcccaatgctggaagacacatctcagagcccctcttttgttgcctgttctcttgtaggaacctgggc

SEQ ID NO: 97199 - DNA, 80 bp, synthetic construct
  misc_feature 1..80: note = Artificially Synthesized Probe
  source 1..80: mol_type = other DNA
aatgttgtggtgtgagtttacaggaaaatggtctttgggaaccagcatcattagattagtcagaccgagaaacgccgtgt

SEQ ID NO: 97200 - DNA, 80 bp, synthetic construct; identical to SEQ ID NO: 34515
  misc_feature 1..80: note = Artificially Synthesized Probe
  source 1..80: mol_type = other DNA

SEQ ID NO: 97201 - DNA, 80 bp, synthetic construct
  misc_feature 1..80: note = Artificially Synthesized Probe
  source 1..80: mol_type = other DNA
agattaatggatacttgcaagtggaaagtgtagtttgaaaatgtcttcctgtttctcttcagtgttactggaactaacca

SEQ ID NO: 97202 - DNA, 80 bp, synthetic construct
  misc_feature 1..80: note = Artificially Synthesized Probe
  source 1..80: mol_type = other DNA
gcaatgttattttaatcgggaacgaaagtaactcagcgtgctttaatctgccctggctgagtacatctgccttggccagg

SEQ ID NO: 97203 - DNA, 80 bp, synthetic construct
  misc_feature 1..80: note = Artificially Synthesized Probe
  source 1..80: mol_type = other DNA
agagagtgactttgtgctctggcaactgagtgtgtggtttgccctggggttgcttggagttgattggatatgttccctgt

SEQ ID NO: 97204 - DNA, 80 bp, synthetic construct
  misc_feature 1..80: note = Artificially Synthesized Probe
  source 1..80: mol_type = other DNA
gggggatctgtgggtgtgtctcgagggagcgtggggcttgtagccacagtttgtcacataagtggagcttgacgcccaca

SEQ ID NO: 97205 - DNA, 80 bp, synthetic construct
  misc_feature 1..80: note = Artificially Synthesized Probe
  source 1..80: mol_type = other DNA
ggtggaggcaccatatggcctgagctgctgacagatgagcctgctggccccacctctctctcacgcctggcttcacacct

SEQ ID NO: 97206 - DNA, 80 bp, synthetic construct; identical to SEQ ID NO: 34516
  misc_feature 1..80: note = Artificially Synthesized Probe
  source 1..80: mol_type = other DNA

SEQ ID NO: 97207 - DNA, 80 bp, synthetic construct
  misc_feature 1..80: note = Artificially Synthesized Probe
  source 1..80: mol_type = other DNA
agctagcttgtcaaagcgcttgggtctttacacctacagggtttttgggttctgaaaatcaaatggctttagcagtcctg

SEQ ID NO: 97208 - DNA, 80 bp, synthetic construct
  misc_feature 1..80: note = Artificially Synthesized Probe
  source 1..80: mol_type = other DNA
actgaatacttggttgtcagtcgctcgtcagcatgtgggattgtgctcaccctgcccttaccaaagttttgtttagggaa

SEQ ID NO: 97209 - DNA, 80 bp, synthetic construct; identical to SEQ ID NO: 34517
  misc_feature 1..80: note = Artificially Synthesized Probe
  source 1..80: mol_type = other DNA

SEQ ID NO: 97210 - DNA, 80 bp, synthetic construct
  misc_feature 1..80: note = Artificially Synthesized Probe
  source 1..80: mol_type = other DNA
gccctcgtgtctcttcctcacagcctgggacatatctagagcctgtccccagcataccctccaaccttattctccgtccc

SEQ ID NO: 97211 - DNA, 80 bp, synthetic construct
  misc_feature 1..80: note = Artificially Synthesized Probe
  source 1..80: mol_type = other DNA
ttacctttactctcacgtgtctcacatttgaaatcccgctctcgggatgcaatgtctctgctgtgacattgcatcagact

SEQ ID NO: 97212 - DNA, 80 bp, synthetic construct
  misc_feature 1..80: note = Artificially Synthesized Probe
  source 1..80: mol_type = other DNA
aggacacttgtgttgggaagaaaagctacttaaatgctcagttgagcagttctgaattattcctccactctgttccttct

SEQ ID NO: 97213 - DNA, 80 bp, synthetic construct; identical to SEQ ID NO: 34518
  misc_feature 1..80: note = Artificially Synthesized Probe
  source 1..80: mol_type = other DNA

SEQ ID NO: 97214 - DNA, 80 bp, synthetic construct
  misc_feature 1..80: note = Artificially Synthesized Probe
  source 1..80: mol_type = other DNA
agagagagagagagagacggagtcttgctctgttggcctggctggagtgcagtggcgccttcttggctgcaacctccgcc

SEQ ID NO: 97215 - DNA, 80 bp, synthetic construct
  misc_feature 1..80: note = Artificially Synthesized Probe
  source 1..80: mol_type = other DNA
tctgcctgcctccgcctcccaaagtgctggtattacaggtgtgagccactgtgcccggccaaatttacccaatttttaag

SEQ ID NO: 97216 - DNA, 80 bp, synthetic construct
  misc_feature 1..80: note = Artificially Synthesized Probe
  source 1..80: mol_type = other DNA
ttgaccagggtgtgggctgggccaggcggtcactggtcttggctggggagcggccgaccatggcctcagcaccgggcact

SEQ ID NO: 97217 - DNA, 80 bp, synthetic construct
  misc_feature 1..80: note = Artificially Synthesized Probe
  source 1..80: mol_type = other DNA
tcggggaatccgttccaggactctgggccctgcacctcttccctgtggagtgtcacccacaccggtggcctgggctttgt

SEQ ID NO: 97218 - DNA, 80 bp, synthetic construct
  misc_feature 1..80: note = Artificially Synthesized Probe
  source 1..80: mol_type = other DNA
acccaaaccctaactccctacacctctggcatctggaggaacccaaaccctaacccctaacctctggcatctggaggaac

SEQ ID NO: 97219 - DNA, 80 bp, synthetic construct; identical to SEQ ID NO: 34519
  misc_feature 1..80: note = Artificially Synthesized Probe
  source 1..80: mol_type = other DNA

SEQ ID NO: 97220 - DNA, 80 bp, synthetic construct
  misc_feature 1..80: note = Artificially Synthesized Probe
  source 1..80: mol_type = other DNA
gtaaagcgtttgtgttttccccaaatgtgttctgtgttggctctcgtgtactgaccactgtccatccaggctgggaaatt

SEQ ID NO: 97221 - DNA, 80 bp, synthetic construct
  misc_feature 1..80: note = Artificially Synthesized Probe
  source 1..80: mol_type = other DNA
tggagagcctgggattggagaaggaaaacagaactgttgtgaaagccaaaatccccaagggctttgaggcctggggatct

SEQ ID NO: 97222 - DNA, 80 bp, synthetic construct; identical to SEQ ID NO: 34520
  misc_feature 1..80: note = Artificially Synthesized Probe
  source 1..80: mol_type = other DNA

SEQ ID NO: 97223 - DNA, 80 bp, synthetic construct
  misc_feature 1..80: note = Artificially Synthesized Probe
  source 1..80: mol_type = other DNA
gtgcagtggcgtgatcttggctcactgcaacctccgcctactgggttcagcaattctcctgcctcggcctcctgcatgtg

SEQ ID NO: 97224 - DNA, 80 bp, synthetic construct
  misc_feature 1..80: note = Artificially Synthesized Probe
  source 1..80: mol_type = other DNA
ttaattcttatcttgcatctggaatacctgttggaccaggcctgtttccatcacagccccttcttattgcctttgtgttc

SEQ ID NO: 97225 - DNA, 80 bp, synthetic construct
  misc_feature 1..80: note = Artificially Synthesized Probe
  source 1..80: mol_type = other DNA
caagcagccctcggaggcagcagtcacagacagaggtgggctgttggacaggtgcggctgatagagtgggtgtcttttgt

SEQ ID NO: 97226 - DNA, 80 bp, synthetic construct; identical to SEQ ID NO: 34521
  misc_feature 1..80: note = Artificially Synthesized Probe
  source 1..80: mol_type = other DNA

SEQ ID NO: 97227 - DNA, 80 bp, synthetic construct
  misc_feature 1..80: note = Artificially Synthesized Probe
  source 1..80: mol_type = other DNA
tgctgggggcctctcccttccatgcattttgggaggggcccaggctagtgccggtgccttcctctgccccccagggctgg

SEQ ID NO: 97228 - DNA, 80 bp, synthetic construct
  misc_feature 1..80: note = Artificially Synthesized Probe
  source 1..80: mol_type = other DNA
tgtgtccatttcccctccctggcttctcctgcagcatctttccctgtagttgtgtccatttcccctccctggcttctcct

SEQ ID NO: 97229 - DNA, 80 bp, synthetic construct
  misc_feature 1..80: note = Artificially Synthesized Probe
  source 1..80: mol_type = other DNA
tcctagttgtgtccatttcccctccctggcttctcctgcagcatctttccctgtagttgtgtccatttcccctccctggc

SEQ ID NO: 97230 - DNA, 80 bp, synthetic construct
  misc_feature 1..80: note = Artificially Synthesized Probe
  source 1..80: mol_type = other DNA
tctttcctagttgtgtccatttcccctccctggcttctcctgcagcatctttccctgtagttgtgtccatttcccctccc

SEQ ID NO: 97231 - DNA, 80 bp, synthetic construct
  misc_feature 1..80: note = Artificially Synthesized Probe
  source 1..80: mol_type = other DNA
gagaccagcctgggcaacatagtgagaccccgtctttcaaaaaaaagaaaaatttgcctggcgtggtggcgcacgcatgt

SEQ ID NO: 97232 - DNA, 80 bp, synthetic construct
  misc_feature 1..80: note = Artificially Synthesized Probe
  source 1..80: mol_type = other DNA
tcctgcagcatctttccctgtagttgtgtccatttcccctccctggcgtctcctcctgcagcatctttccctgtagttgt

SEQ ID NO: 97233 - DNA, 80 bp, synthetic construct
  misc_feature 1..80: note = Artificially Synthesized Probe
  source 1..80: mol_type = other DNA
ccctggcttctcctgtagcatctttcctagttgtgtccatttcccctccctggcttctcctgcagcatctttccctgtag

SEQ ID NO: 97234 - DNA, 80 bp, synthetic construct
  misc_feature 1..80: note = Artificially Synthesized Probe
  source 1..80: mol_type = other DNA
ttcccctccctggcttctcctgcagcatctttccctgtagttgtgtccatttcccctccctggcttctcctgtagcatct

SEQ ID NO: 97235 - DNA, 80 bp, synthetic construct
  misc_feature 1..80: note = Artificially Synthesized Probe
  source 1..80: mol_type = other DNA
tagttgtgtccattccccctccctggcttctcctgcagcatctttccctgtagttgtgtccatttcccctccctggcttc

SEQ ID NO: 97236 - DNA, 80 bp, synthetic construct; identical to SEQ ID NO: 34522
  misc_feature 1..80: note = Artificially Synthesized Probe
  source 1..80: mol_type = other DNA

SEQ ID NO: 97237 - DNA, 80 bp, synthetic construct
  misc_feature 1..80: note = Artificially Synthesized Probe
  source 1..80: mol_type = other DNA
ttctcctgtagcatctttcctagttgtgtccatttcccctccctggcttctcctgtagcatctttcctagttgtgtccat

SEQ ID NO: 97238 - DNA, 80 bp, synthetic construct; identical to SEQ ID NO: 34523
  misc_feature 1..80: note = Artificially Synthesized Probe
  source 1..80: mol_type = other DNA

SEQ ID NO: 97239 - DNA, 80 bp, synthetic construct; identical to SEQ ID NO: 34453
  misc_feature 1..80: note = Artificially Synthesized Probe
  source 1..80: mol_type = other DNA

SEQ ID NO: 97240 - DNA, 80 bp, synthetic construct
  misc_feature 1..80: note = Artificially Synthesized Probe
  source 1..80: mol_type = other DNA
ttcccctccctggcttctcctgtagcatctttccctgtagttgtgtccattccccctccctggcgtctcctcctgcagca

SEQ ID NO: 97241 - DNA, 80 bp, synthetic construct
  misc_feature 1..80: note = Artificially Synthesized Probe
  source 1..80: mol_type = other DNA
tccctgtagttgtgtccatttcccctccctggcttctcctgcagcatctttccctgtagttgtgtccatttcccctccct

SEQ ID NO: 97242 - DNA, 80 bp, synthetic construct
  misc_feature 1..80: note = Artificially Synthesized Probe
  source 1..80: mol_type = other DNA
ccccagaaggaaaagctgtgtgtgtctgcgtggagcagtgtggagtggtttccttggtgccgcctgggttccgggcaccc

SEQ ID NO: 97243 - DNA, 80 bp, synthetic construct; identical to SEQ ID NO: 34524
  misc_feature 1..80: note = Artificially Synthesized Probe
  source 1..80: mol_type = other DNA

SEQ ID NO: 97244 - DNA, 80 bp, synthetic construct
  misc_feature 1..80: note = Artificially Synthesized Probe
  source 1..80: mol_type = other DNA
tctgtattattttctcagcagtgagctgctgttggagagattagaggacatggcttgcatttggcttttattgaatagag

SEQ ID NO: 97245 - DNA, 80 bp, synthetic construct
  misc_feature 1..80: note = Artificially Synthesized Probe
  source 1..80: mol_type = other DNA
ctggtctgcctttgcgccactcagcaagtcttcattttacttctctctggattccagagaggaaaaaaaaaaaggaaaga

SEQ ID NO: 97246 - DNA, 80 bp, synthetic construct
  misc_feature 1..80: note = Artificially Synthesized Probe
  source 1..80: mol_type = other DNA
cctctccagggtggggacaagagggcacccctctccaggggtggggacatgagggcacccctctccgggggcggggacaa

SEQ ID NO: 97247 - DNA, 80 bp, synthetic construct; identical to SEQ ID NO: 34525
  misc_feature 1..80: note = Artificially Synthesized Probe
  source 1..80: mol_type = other DNA

SEQ ID NO: 97248 - DNA, 80 bp, synthetic construct
  misc_feature 1..80: note = Artificially Synthesized Probe
  source 1..80: mol_type = other DNA
ctgcccagccagctttggaagcagacttggctgagcacatcatggacttcagggtcttccaggagcagtcctgggacaga

SEQ ID NO: 97249 - DNA, 80 bp, synthetic construct
  misc_feature 1..80: note = Artificially Synthesized Probe
  source 1..80: mol_type = other DNA
attttcaaaaatacattttgaaacaatctcaaagccacagaaacgtttcaagtaaagggccaagctgtttctcctgagcg

SEQ ID NO: 97250 - DNA, 80 bp, synthetic construct; identical to SEQ ID NO: 34526
  misc_feature 1..80: note = Artificially Synthesized Probe
  source 1..80: mol_type = other DNA

SEQ ID NO: 97251 - DNA, 80 bp, synthetic construct
  misc_feature 1..80: note = Artificially Synthesized Probe
  source 1..80: mol_type = other DNA
gagggcagtggggatgggggagactgccaggtgctgagctcaggaccccggggaggccggctggaggtgtcaggtcctcc

SEQ ID NO: 97252 - DNA, 80 bp, synthetic construct
  misc_feature 1..80: note = Artificially Synthesized Probe
  source 1..80: mol_type = other DNA
ccgttattcggtgagatacccttcaacgtgggagcactgagccgttattcggtgggatgcccttcaacgtgggagcactg

SEQ ID NO: 97253 - DNA, 80 bp, synthetic construct
  misc_feature 1..80: note = Artificially Synthesized Probe
  source 1..80: mol_type = other DNA
actgagccgttattcggtgggatacccttcaacgtgggagcactaagccgttattcagtgggatgcccttcaacgtggga

SEQ ID NO: 97254 - DNA, 80 bp, synthetic construct
  misc_feature 1..80: note = Artificially Synthesized Probe
  source 1..80: mol_type = other DNA
gggagcactgagccgttatttggtgagatacccttcaaggtgggagcactgagctgttattcagtgggatacccttcaac

SEQ ID NO: 97255 - DNA, 80 bp, synthetic construct
  misc_feature 1..80: note = Artificially Synthesized Probe
  source 1..80: mol_type = other DNA
ctgagtgggaggttctcccttcacctgatgctgatttgtcccttaactcataatgttgacttggtcactggattagatgg

SEQ ID NO: 97256 - DNA, 80 bp, synthetic construct; identical to SEQ ID NO: 34527
  misc_feature 1..80: note = Artificially Synthesized Probe
  source 1..80: mol_type = other DNA

SEQ ID NO: 97257 - DNA, 80 bp, synthetic construct
  misc_feature 1..80: note = Artificially Synthesized Probe
  source 1..80: mol_type = other DNA
tctagtggacatggctgggaagacgtatgtgtgtacacacacatactcacatgctacacacagttacacaatgctacaca

SEQ ID NO: 97258 - DNA, 80 bp, synthetic construct
  misc_feature 1..80: note = Artificially Synthesized Probe
  source 1..80: mol_type = other DNA
gttatacacacatgctacacacacagttacacatttgcacacagttacacactcacatgctacacacagttacacacata

SEQ ID NO: 97259 - DNA, 80 bp, synthetic construct
  misc_feature 1..80: note = Artificially Synthesized Probe
  source 1..80: mol_type = other DNA
cacagttatacatgctacacacacgctacacacagttacatgctacacagttacatgcatgctctatacagttatacaca

SEQ ID NO: 97260 - DNA, 80 bp, synthetic construct; identical to SEQ ID NO: 34528
  misc_feature 1..80: note = Artificially Synthesized Probe
  source 1..80: mol_type = other DNA

SEQ ID NO: 97261 - DNA, 80 bp, synthetic construct
  misc_feature 1..80: note = Artificially Synthesized Probe
  source 1..80: mol_type = other DNA
tggggagcctcactggccagttgcccaggactttggggttcacagggtgtgggccaggacaatccaagtataatgggctg

SEQ ID NO: 97262 - DNA, 80 bp, synthetic construct
  misc_feature 1..80: note = Artificially Synthesized Probe
  source 1..80: mol_type = other DNA
accaaacagtttaccagtgttatgtctcatacaagattttgtggtttgtttttcttgtagacagtgatcaccacccctgc

SEQ ID NO: 97263 - DNA, 80 bp, synthetic construct
  misc_feature 1..80: note = Artificially Synthesized Probe
  source 1..80: mol_type = other DNA
ttgttccagccagctgtgagcttgtgagagcatcgttctgtggaaatggtttccattttcagaaataaattggccttttc

SEQ ID NO: 97264 - DNA, 80 bp, synthetic construct; identical to SEQ ID NO: 34529
  misc_feature 1..80: note = Artificially Synthesized Probe
  source 1..80: mol_type = other DNA

SEQ ID NO: 97265 - DNA, 80 bp, synthetic construct
  misc_feature 1..80: note = Artificially Synthesized Probe
  source 1..80: mol_type = other DNA
ggaaaattttttttattatttaacttacacttttccttcccattttcttaattctctctttctggaactcccaaatcggg

SEQ ID NO: 97266 - DNA, 80 bp, synthetic construct
  misc_feature 1..80: note = Artificially Synthesized Probe
  source 1..80: mol_type = other DNA
ttacaatttatttccaagttggggaggatggacacaatggtattaagccttcccaaacaagtcctcctgtcactgtctgg

SEQ ID NO: 97267 - DNA, 80 bp, synthetic construct
  misc_feature 1..80: note = Artificially Synthesized Probe
  source 1..80: mol_type = other DNA
tcctgaaacactcatttgctcatccagtgcaggttcctcccacaggccaggaaaggtcccaggaacagccattattgagc

SEQ ID NO: 97268 - DNA, 80 bp, synthetic construct
  misc_feature 1..80: note = Artificially Synthesized Probe
  source 1..80: mol_type = other DNA
tggacctcaggggtgtccccttgggtgtcagaggctctttgggactagagggaggaatcctgggctgtggtcccccagga

SEQ ID NO: 97269 - DNA, 80 bp, synthetic construct; identical to SEQ ID NO: 34530
  misc_feature 1..80: note = Artificially Synthesized Probe
  source 1..80: mol_type = other DNA

SEQ ID NO: 97270 - DNA, 80 bp, synthetic construct
  misc_feature 1..80: note = Artificially Synthesized Probe
  source 1..80: mol_type = other DNA
ggggctgttgctgctgggttagctaccaggtgggattggccctggccatcggctcagctgcatggatagctgtggacaca

SEQ ID NO: 97271 - DNA, 80 bp, synthetic construct
  misc_feature 1..80: note = Artificially Synthesized Probe
  source 1..80: mol_type = other DNA
ctcactctgacctccgtggcctgtctcgtgtcactcgcatgacccatcctcctgttgtatccctggacccagccctccct

SEQ ID NO: 97272 - DNA, 80 bp, synthetic construct; identical to SEQ ID NO: 34531
  misc_feature 1..80: note = Artificially Synthesized Probe
  source 1..80: mol_type = other DNA

SEQ ID NO: 97273 - DNA, 80 bp, synthetic construct
  misc_feature 1..80: note = Artificially Synthesized Probe
  source 1..80: mol_type = other DNA
tactttctatctctacgaatttgcctgttctggccatttcacaaatatggaattgttcaatatgtggtcttttgtccctg

SEQ ID NO: 97274 - DNA, 80 bp, synthetic construct
  misc_feature 1..80: note = Artificially Synthesized Probe
  source 1..80: mol_type = other DNA
ccagtcagtgtgcatctgagcattttgtggggctgcgtgtgggggtcttgcagggacctgaaggagacccctagggcagg

SEQ ID NO: 97275 - DNA, 80 bp, synthetic construct
  misc_feature 1..80: note = Artificially Synthesized Probe
  source 1..80: mol_type = other DNA
aataaagctgctatgaatagttgtgtacaagcctttatgtgacatatgtttttatttctcttgggcaaatatctagagtg

SEQ ID NO: 97276 - DNA, 80 bp, synthetic construct
  misc_feature 1..80: note = Artificially Synthesized Probe
  source 1..80: mol_type = other DNA
caatggtatctgagtgtggttttgatttgcatttcctggattactagctgttgggcatctcttcatgtgcttattggcca

SEQ ID NO: 97277 - DNA, 80 bp, synthetic construct
  misc_feature 1..80: note = Artificially Synthesized Probe
  source 1..80: mol_type = other DNA
ttttcaccatattgatagtgttattcatttatttatttttgagacagagtcttgctctgtcacgcaggctagagtgcagt

SEQ ID NO: 97278 - DNA, 80 bp, synthetic construct; identical to SEQ ID NO: 34532
  misc_feature 1..80: note = Artificially Synthesized Probe
  source 1..80: mol_type = other DNA

SEQ ID NO: 97279 - DNA, 80 bp, synthetic construct
  misc_feature 1..80: note = Artificially Synthesized Probe
  source 1..80: mol_type = other DNA
tcggaaagatttaccgcggtgttttctaggagttttggttcttacatttacatatgtgatccagtgcgagctaatttttg

SEQ ID NO: 97280 - DNA, 80 bp, synthetic construct
  misc_feature 1..80: note = Artificially Synthesized Probe
  source 1..80: mol_type = other DNA
atagagggggttacttctggactctcaattatgtcccacttatccatatgcccgtcctgatgctagtaacacattgcctt

SEQ ID NO: 97281 - DNA, 80 bp, synthetic construct; identical to SEQ ID NO: 34533
  misc_feature 1..80: note = Artificially Synthesized Probe
  source 1..80: mol_type = other DNA

SEQ ID NO: 97282 - DNA, 80 bp, synthetic construct
  misc_feature 1..80: note = Artificially Synthesized Probe
  source 1..80: mol_type = other DNA
cgggtggccaggaggagcctgtacaggtgaccgacaaggtcaggggcgagtgtttgccacagaagggggtgaacagacac

SEQ ID NO: 97283 - DNA, 80 bp, synthetic construct
  misc_feature 1..80: note = Artificially Synthesized Probe
  source 1..80: mol_type = other DNA
ccaaagagactgtgtttttaaacatggatgcctcaagccagttgaagagttgggaagagtagttcaatattccagaagaa

SEQ ID NO: 97284 - DNA, 80 bp, synthetic construct
  misc_feature 1..80: note = Artificially Synthesized Probe
  source 1..80: mol_type = other DNA
tggagggaagagttgatattcctgggaactttcattgacagtgggaaggaggtgggtataaagtccagatggacaagctg

SEQ ID NO: 97285 - DNA, 80 bp, synthetic construct; identical to SEQ ID NO: 34534
  misc_feature 1..80: note = Artificially Synthesized Probe
  source 1..80: mol_type = other DNA

SEQ ID NO: 97286 - DNA, 80 bp, synthetic construct; identical to SEQ ID NO: 34454
  misc_feature 1..80: note = Artificially Synthesized Probe
  source 1..80: mol_type = other DNA

SEQ ID NO: 97287 - DNA, 80 bp, synthetic construct
  misc_feature 1..80: note = Artificially Synthesized Probe
  source 1..80: mol_type = other DNA
aggctaccgagccagcatgaaaacagccacggtcgcccgcagggggtcccccatggggttgtgcgtggagtggccacagt

SEQ ID NO: 97288 - DNA, 80 bp, synthetic construct
  misc_feature 1..80: note = Artificially Synthesized Probe
  source 1..80: mol_type = other DNA
tggaagcgtcctgtctggggcctgggtcaggctggtctccagtttgcagtgctgctgagttggaaaaagagggcttcatt

SEQ ID NO: 97289 - DNA, 80 bp, synthetic construct
  misc_feature 1..80: note = Artificially Synthesized Probe
  source 1..80: mol_type = other DNA
gagccccataaaagtgagtgtggggccaccatggggacagatgtgggggttaccttgagcaggcaggactccaggtgcaa

SEQ ID NO: 97290 - DNA, 80 bp, synthetic construct; identical to SEQ ID NO: 34535
  misc_feature 1..80: note = Artificially Synthesized Probe
  source 1..80: mol_type = other DNA

SEQ ID NO: 97291 - DNA, 80 bp, synthetic construct
  misc_feature 1..80: note = Artificially Synthesized Probe
  source 1..80: mol_type = other DNA
ggcagtgccctgtgtgagctttggggacccttgttcccaccacagagtgtccatggagcagcatgacttctggaagggcg

SEQ ID NO: 97292 - DNA, 80 bp, synthetic construct
  misc_feature 1..80: note = Artificially Synthesized Probe
  source 1..80: mol_type = other DNA
gtggagacttttcctgtagcccgtggccccggcatccatgtttccgtggagagttttcctgtagcacgtggctccggcat

SEQ ID NO: 97293 - DNA, 80 bp, synthetic construct
  misc_feature 1..80: note = Artificially Synthesized Probe
  source 1..80: mol_type = other DNA
gtggcacgtggccccggcatccacgtttccgtggagagttttcctgtagcccatggccccggcatccacgtttccgtgga

SEQ ID NO: 97294 - DNA, 80 bp, synthetic construct
  misc_feature 1..80: note = Artificially Synthesized Probe
  source 1..80: mol_type = other DNA
ggcatccacgtttccgtggagagttttcctgtggcacgtggccccggcatccacgtttctgtggagagttttcctgtggc

SEQ ID NO: 97295 - DNA, 80 bp, synthetic construct; identical to SEQ ID NO: 34536
  misc_feature 1..80: note = Artificially Synthesized Probe
  source 1..80: mol_type = other DNA

SEQ ID NO: 97296 - DNA, 80 bp, synthetic construct
  misc_feature 1..80: note = Artificially Synthesized Probe
  source 1..80: mol_type = other DNA
tttgtggttacttgtgtgctctgtacccaggggtatggtgcacaggtttcaccgggtgccattctgctcttttgcccaga

SEQ ID NO: 97297 - DNA, 80 bp, synthetic construct
  misc_feature 1..80: note = Artificially Synthesized Probe
  source 1..80: mol_type = other DNA
gccattaagaccagtgagagggccgggggcggtggctcatacctgtagtcccagcactttgggagaccaaggtgggcaga

SEQ ID NO: 97298 - DNA, 80 bp, synthetic construct
  misc_feature 1..80: note = Artificially Synthesized Probe
  source 1..80: mol_type = other DNA
atgtgggcaacgaagaattccacagggctgtatttccagactcccatgggtgggtgtgggtggagaagccccagtgagct

SEQ ID NO: 97299 - DNA, 80 bp, synthetic construct
  misc_feature 1..80: note = Artificially Synthesized Probe
  source 1..80: mol_type = other DNA
ccttccctccagctgtcagccagacatgccccagttgtcttgcatatatacatatgtaatggtaacaaggaattctgctt

SEQ ID NO: 97300 - DNA, 80 bp, synthetic construct; identical to SEQ ID NO: 34537
  misc_feature 1..80: note = Artificially Synthesized Probe
  source 1..80: mol_type = other DNA

SEQ ID NO: 97301 - DNA, 80 bp, synthetic construct
  misc_feature 1..80: note = Artificially Synthesized Probe
  source 1..80: mol_type = other DNA
ctagagatcttgggtgatagggaagctcccgcagctccctcctcactagtccaggcaccggagcctgcggtgggagccct

SEQ ID NO: 97302 - DNA, 80 bp, synthetic construct
  misc_feature 1..80: note = Artificially Synthesized Probe
  source 1..80: mol_type = other DNA
ggctgtctccttgactaccaaatctgctttcctctgtgtttatgctctggaaggtaatccgaagccctttaatgggatgg

SEQ ID NO: 97303 - DNA, 80 bp, synthetic construct; identical to SEQ ID NO: 34538
  misc_feature 1..80: note = Artificially Synthesized Probe
  source 1..80: mol_type = other DNA

SEQ ID NO: 97304 - DNA, 80 bp, synthetic construct
  misc_feature 1..80: note = Artificially Synthesized Probe
  source 1..80: mol_type = other DNA
gctcagacatgggaatttatgtgaggaattaaatattaactggaggcattgccctggagagaggcagaaacacagggtga

SEQ ID NO: 97305 - DNA, 80 bp, synthetic construct
  misc_feature 1..80: note = Artificially Synthesized Probe
  source 1..80: mol_type = other DNA
gtgcattcttttgaggggcagaaggatctggttgtaatgcgaataattactcattagtcagctcattttcaaagttggag

SEQ ID NO: 97306 - DNA, 80 bp, synthetic construct
  misc_feature 1..80: note = Artificially Synthesized Probe
  source 1..80: mol_type = other DNA
cttgttcctgaagcagccatggagccatgaccttgtctgtttctccggtggattccaggaaataggcattgaatatatga

SEQ ID NO: 97307 - DNA, 80 bp, synthetic construct
  misc_feature 1..80: note = Artificially Synthesized Probe
  source 1..80: mol_type = other DNA
tgagctgttaaatcagaggtggacacacggaggcaaggccagcagctgcaggacctcaagacacctgggcagacactgca

SEQ ID NO: 97308 - DNA, 80 bp, synthetic construct; identical to SEQ ID NO: 34539
  misc_feature 1..80: note = Artificially Synthesized Probe
  source 1..80: mol_type = other DNA

SEQ ID NO: 97309 - DNA, 80 bp, synthetic construct
  misc_feature 1..80: note = Artificially Synthesized Probe
  source 1..80: mol_type = other DNA
agcctggccaacatggcgaaaccccgtctgtactaaaaatacaaaaattagccgggcgtcatggtgggtgcctgtaatcc

SEQ ID NO: 97310 - DNA, 80 bp, synthetic construct
  misc_feature 1..80: note = Artificially Synthesized Probe
  source 1..80: mol_type = other DNA
agctatttgggggaggatcccagctaaggtgggaggatcacttgagcctgggaagtcaaggctgcagtgagctgagattg

SEQ ID NO: 97311 - DNA, 80 bp, synthetic construct
  misc_feature 1..80: note = Artificially Synthesized Probe
  source 1..80: mol_type = other DNA
tctttactaaaaacacaaaaattagccgggcatggtggcatgcgcctgtaatcccagctactggggaggctgaggcagga

SEQ ID NO: 97312 - DNA, 80 bp, synthetic construct
  misc_feature 1..80: note = Artificially Synthesized Probe
  source 1..80: mol_type = other DNA
ttgctttgaggtgtgaccacgtctgggctctgtgataggcctgagcaactgttctctattcaccctgcttttacctggcc

SEQ ID NO: 97313 - DNA, 80 bp, synthetic construct; identical to SEQ ID NO: 34540
  misc_feature 1..80: note = Artificially Synthesized Probe
  source 1..80: mol_type = other DNA

SEQ ID NO: 97314 - DNA, 80 bp, synthetic construct
  misc_feature 1..80: note = Artificially Synthesized Probe
  source 1..80: mol_type = other DNA
gggcatggctcaaggacagtgatggcgtagggtgtaggcaaggagggctatgcagttgtagtgggaacttcatttggggg

SEQ ID NO: 97315 - DNA, 80 bp, synthetic construct
  misc_feature 1..80: note = Artificially Synthesized Probe
  source 1..80: mol_type = other DNA
gggcacaaggaagagtcagtaatatggatcctgtctttatttaaggttttggtatcttgtttattaggggttttttgcat

SEQ ID NO: 97316 - DNA, 80 bp, synthetic construct
  misc_feature 1..80: note = Artificially Synthesized Probe
  source 1..80: mol_type = other DNA
agatcatgtgagcatgaacgttacttgacttgaggccaggggctctgcatgcagcgttatctacaaatgtctggtgccat

SEQ ID NO: 97317 - DNA, 80 bp, synthetic construct; identical to SEQ ID NO: 34541
  misc_feature 1..80: note = Artificially Synthesized Probe
  source 1..80: mol_type = other DNA

SEQ ID NO: 97318 - DNA, 80 bp, synthetic construct
  misc_feature 1..80: note = Artificially Synthesized Probe
  source 1..80: mol_type = other DNA
cacagcagcatcggggtcagccttccagaggctggcttcggacaggagatgggtggtgaggagccagcatgggagggcag

SEQ ID NO: 97319 - DNA, 80 bp, synthetic construct
  misc_feature 1..80: note = Artificially Synthesized Probe
  source 1..80: mol_type = other DNA
ccttcttgccaaatattcagagatatggaatcaaggaaaagatcagttgcatggccattcagccaacccttcttcctgcc

SEQ ID NO: 97320 - DNA, 80 bp, synthetic construct
  misc_feature 1..80: note = Artificially Synthesized Probe
  source 1..80: mol_type = other DNA
gcctatagtcccagctgcttgaaaggctgaggtgggagaatcgcttgagcccaggaggtcaagactgcagtgagccgaga

SEQ ID NO: 97321 - DNA, 80 bp, synthetic construct; identical to SEQ ID NO: 34542
  misc_feature 1..80: note = Artificially Synthesized Probe
  source 1..80: mol_type = other DNA

SEQ ID NO: 97322 - DNA, 80 bp, synthetic construct
  misc_feature 1..80: note = Artificially Synthesized Probe
  source 1..80: mol_type = other DNA
aggacagaactatctctgcaaggaaccaagggtactgtgatggctgccagtggggatcaggggtgagggcatatggttta

SEQ ID NO: 97323 - DNA, 80 bp, synthetic construct
  misc_feature 1..80: note = Artificially Synthesized Probe
  source 1..80: mol_type = other DNA
ggagcaacacaaatgcttgaatgctgctcttagatcgttgagtgggagcttggatcttccacaatactgtctgctgtaat

SEQ ID NO: 97324 - DNA, 80 bp, synthetic construct
  misc_feature 1..80: note = Artificially Synthesized Probe
  source 1..80: mol_type = other DNA
acagccagtttctggccacctcctcaccccccactcttcactggccccttccttctgggaagtggctgcctatggtccgc

SEQ ID NO: 97325 - DNA, 80 bp, synthetic construct
  misc_feature 1..80: note = Artificially Synthesized Probe
  source 1..80: mol_type = other DNA
gtcagaacacattttaaataaaataaaacactaccgtgtctccttctctggcccagcgctggggtgaatggcccccgtgg

SEQ ID NO: 97326 - DNA, 80 bp, synthetic construct; identical to SEQ ID NO: 34543
  misc_feature 1..80: note = Artificially Synthesized Probe
  source 1..80: mol_type = other DNA

SEQ ID NO: 97327 - DNA, 80 bp, synthetic construct
  misc_feature 1..80: note = Artificially Synthesized Probe
  source 1..80: mol_type = other DNA
ctacctggctctcaacccttagcagagctctctgtttcttgaactctcccctgagcactccctgcctccctggggtgatg

SEQ ID NO: 97328 - DNA, 80 bp, synthetic construct; identical to SEQ ID NO: 34446
  misc_feature 1..80: note = Artificially Synthesized Probe
  source 1..80: mol_type = other DNA

SEQ ID NO: 97329 - DNA, 80 bp, synthetic construct
  misc_feature 1..80: note = Artificially Synthesized Probe
  source 1..80: mol_type = other DNA
aagctgttcagctctgagggccctgtcctgggaggaagcatgaaaaaggaatgaaagaggcagagagagacagagaggga

SEQ ID NO: 97330 - DNA, 80 bp, synthetic construct; identical to SEQ ID NO: 34544
  misc_feature 1..80: note = Artificially Synthesized Probe
  source 1..80: mol_type = other DNA

SEQ ID NO: 97331 - DNA, 80 bp, synthetic construct
  misc_feature 1..80: note = Artificially Synthesized Probe
  source 1..80: mol_type = other DNA
gattctcctgcctcagcctcccaggtagctgggactacaggcggccgccaccacacccggctaatttttgtatttttagt

SEQ ID NO: 97332 - DNA, 80 bp, synthetic construct
  misc_feature 1..80: note = Artificially Synthesized Probe
  source 1..80: mol_type = other DNA
gcagatccctctaggtttcaagattgcttactgcattggcttgttttggttcctgagtttgtaaacacccaactcagggc

SEQ ID NO: 97333 - DNA, 80 bp, synthetic construct; identical to SEQ ID NO: 34455
  misc_feature 1..80: note = Artificially Synthesized Probe
  source 1..80: mol_type = other DNA

SEQ ID NO: 97334 - DNA, 80 bp, synthetic construct
  misc_feature 1..80: note = Artificially Synthesized Probe
  source 1..80: mol_type = other DNA
aggctggagtgcagtggtgcaatctcagctcactgcaacctccacctcctgggttcaagtgatcctcctgcctcagcctc

SEQ ID NO: 97335 - DNA, 80 bp, synthetic construct
  misc_feature 1..80: note = Artificially Synthesized Probe
  source 1..80: mol_type = other DNA
agccaccgtgcccagccagaaccatgtatattttcaaaagagcttacatgattaatcctgactttactaaacagaaatat

SEQ ID NO: 97336 - DNA, 80 bp, synthetic construct; identical to SEQ ID NO: 34545
  misc_feature 1..80: note = Artificially Synthesized Probe
  source 1..80: mol_type = other DNA

SEQ ID NO: 97337 - DNA, 80 bp, synthetic construct
  misc_feature 1..80: note = Artificially Synthesized Probe
  source 1..80: mol_type = other DNA
agtaaagtgtgttttaaaaatcaatgaaaaattgagaagtgtttaattttctttgcatcattgagctgccctttagggcc

SEQ ID NO: 97338 - DNA, 80 bp, synthetic construct
  misc_feature 1..80: note = Artificially Synthesized Probe
  source 1..80: mol_type = other DNA
tcacctctgaagtgctttgacttctttcgaaaagaaaagtgatgtaaatcaagcagtgctggttttgtccagatgctttc

SEQ ID NO: 97339 - DNA, 80 bp, synthetic construct
  misc_feature 1..80: note = Artificially Synthesized Probe
  source 1..80: mol_type = other DNA
tttttccctttaaaaatcaaagctacacgctcctaagagaacttctcgcttattgaccagtcaatgcagataaattgcaa

SEQ ID NO: 97340 - DNA, 80 bp, synthetic construct; identical to SEQ ID NO: 34546
  misc_feature 1..80: note = Artificially Synthesized Probe
  source 1..80: mol_type = other DNA

SEQ ID NO: 97341 - DNA, 80 bp, synthetic construct
  misc_feature 1..80: note = Artificially Synthesized Probe
  source 1..80: mol_type = other DNA
gacatttgaaggctcataaatgtaatgaagtccctgtgacacctgctcctctattcactttaaatgtgagccatttgtcc

SEQ ID NO: 97342 - DNA, 80 bp, synthetic construct
  misc_feature 1..80: note = Artificially Synthesized Probe
  source 1..80: mol_type = other DNA
catacatcattgtatgttagtgctgctgcatgggggaggttcaatttgcaaatttcatcttactaattgggggaattcct

SEQ ID NO: 97343 - DNA, 80 bp, synthetic construct
  misc_feature 1..80: note = Artificially Synthesized Probe
  source 1..80: mol_type = other DNA
tctgctacttctttccactcccctgctttccctttgactacctcacgcatagagccctggcagctctggtgtctgtggcc

SEQ ID NO: 97344 - DNA, 80 bp, synthetic construct
  misc_feature 1..80: note = Artificially Synthesized Probe
  source 1..80: mol_type = other DNA
gtcctcagccacctcccaaatacccgaacttaggccctgagtcattcatctgctgcacaaacacttgcccaggaggactg

SEQ ID NO: 97345 - DNA, 80 bp, synthetic construct; identical to SEQ ID NO: 34547
  misc_feature 1..80: note = Artificially Synthesized Probe
  source 1..80: mol_type = other DNA

SEQ ID NO: 97346 - DNA, 80 bp, synthetic construct
  misc_feature 1..80: note = Artificially Synthesized Probe
  source 1..80: mol_type = other DNA
cgataggctcaggcaaggcagccaggccctcgaggcctggagaacatatgggctggggccgctccaggttgcctgtttct

SEQ ID NO: 97347 - DNA, 80 bp, synthetic construct
  misc_feature 1..80: note = Artificially Synthesized Probe
  source 1..80: mol_type = other DNA
actaaaaaaatacaaaaaattagccgggcgtggtagcgggcgcctgtagtcccagctactcgggaggctgaggcaggaga

SEQ ID NO: 97348 - DNA, 80 bp, synthetic construct
  misc_feature 1..80: note = Artificially Synthesized Probe
  source 1..80: mol_type = other DNA
ctggggacacgttggggtcagaagccactggacgacccagcactgccgctggtggctgagtctgtggtgagcgacctgcc

SEQ ID NO: 97349 - DNA, 80 bp, synthetic construct; identical to SEQ ID NO: 34548
  misc_feature 1..80: note = Artificially Synthesized Probe
  source 1..80: mol_type = other DNA

SEQ ID NO: 97350 - DNA, 80 bp, synthetic construct
  misc_feature 1..80: note = Artificially Synthesized Probe
  source 1..80: mol_type = other DNA
ggctctgtactccagaggcactggctgggttttcttgttaacgtcgtggttttttgcttgcagatgagcttagaaaatga

SEQ ID NO: 97351 - DNA, 80 bp, synthetic construct
  misc_feature 1..80: note = Artificially Synthesized Probe
  source 1..80: mol_type = other DNA
gcctcattcatcctcagggctgctgagctttgaagctggcatctaagagggctgctgaggggcctttggcccagatgaac

SEQ ID NO: 97352 - DNA, 80 bp, synthetic construct
  misc_feature 1..80: note = Artificially Synthesized Probe
  source 1..80: mol_type = other DNA
aggaggttgttgggttgagctggaagtgcagtgggaggagaggaggctgactctgttaggatctgagccccaacccctgg

SEQ ID NO: 97353 - DNA, 80 bp, synthetic construct; identical to SEQ ID NO: 34549
  misc_feature 1..80: note = Artificially Synthesized Probe
  source 1..80: mol_type = other DNA

SEQ ID NO: 97354 - DNA, 80 bp, synthetic construct
  misc_feature 1..80: note = Artificially Synthesized Probe
  source 1..80: mol_type = other DNA
ggtctcactgagatttgcctccactcgtccttggcaaacctctcggctgtttaacttagtttatgctgttagggcaatga

SEQ ID NO: 97355 - DNA, 80 bp, synthetic construct
  misc_feature 1..80: note = Artificially Synthesized Probe
  source 1..80: mol_type = other DNA
atgtgcctgtgaccctggagatatcctaaatgtcccaaacggggtcttcttggattgaccaaacacccctggtgagcccc

SEQ ID NO: 97356 - DNA, 80 bp, synthetic construct
  misc_feature 1..80: note = Artificially Synthesized Probe
  source 1..80: mol_type = other DNA
ctgaaacccggagtgggtcggggaggctgggcgagtgggggcaaggcccctgggggaaagagggcccttgggaccaggtc

SEQ ID NO: 97357 - DNA, 80 bp, synthetic construct
  misc_feature 1..80: note = Artificially Synthesized Probe
  source 1..80: mol_type = other DNA
ctgtcactgcggtcccccaaaccgaaaacaagccgctctcttaccggaccctcacaagtgcttctgtgtcagatggttgg

SEQ ID NO: 97358 - DNA, 80 bp, synthetic construct; identical to SEQ ID NO: 34550
  misc_feature 1..80: note = Artificially Synthesized Probe
  source 1..80: mol_type = other DNA

SEQ ID NO: 97359 - DNA, 80 bp, synthetic construct
  misc_feature 1..80: note = Artificially Synthesized Probe
  source 1..80: mol_type = other DNA
aaggtcatggaagcactgcctggtgatgttattatcctgtttgtgaagtggggaaacggactcaggggttaaccttcatc

SEQ ID NO: 97360 - DNA, 80 bp, synthetic construct
  misc_feature 1..80: note = Artificially Synthesized Probe
  source 1..80: mol_type = other DNA
cggaagcacaggggtcggctccctggaagggagacattgcctgcttggccagcctgctgaagaagcggtgattgcgacgg

SEQ ID NO: 97361 - DNA, 80 bp, synthetic construct; identical to SEQ ID NO: 34551
  misc_feature 1..80: note = Artificially Synthesized Probe
  source 1..80: mol_type = other DNA

SEQ ID NO: 97362 - DNA, 80 bp, synthetic construct
  misc_feature 1..80: note = Artificially Synthesized Probe
  source 1..80: mol_type = other DNA
catatttggtaatagtgagacccttaaactttttaatggagaaactaggggaaatgtgttgacatctagtgttccaacaa

SEQ ID NO: 97363 - DNA, 80 bp, synthetic construct
  misc_feature 1..80: note = Artificially Synthesized Probe
  source 1..80: mol_type = other DNA
gcctgtggctcgtgctggctgactgcgtgccccagccatcgtgggagcatttacaccacagaaatggactgatgatgttc

SEQ ID NO: 97364 - DNA, 80 bp, synthetic construct
  misc_feature 1..80: note = Artificially Synthesized Probe
  source 1..80: mol_type = other DNA
gtgtgcagaccatggcactggatgagctcacagacacagagtcacctgtcgggaacccccgtgtgtcgggaacccccgcg

SEQ ID NO: 97365 - DNA, 80 bp, synthetic construct
  misc_feature 1..80: note = Artificially Synthesized Probe
  source 1..80: mol_type = other DNA
actttctctgtggatgacttaacactgcattggctcagaacttcacagcctgcagtgcccctaaccccagctcgcctccc

SEQ ID NO: 97366 - DNA, 80 bp, synthetic construct; identical to SEQ ID NO: 34552
  misc_feature 1..80: note = Artificially Synthesized Probe
  source 1..80: mol_type = other DNA

SEQ ID NO: 97367 - DNA, 80 bp, synthetic construct
  misc_feature 1..80: note = Artificially Synthesized Probe
  source 1..80: mol_type = other DNA
cagagagcttactcacaagggtagggactgtattatgaaactgtaacctaacttgttaaaccagattgtggtgctatttt

SEQ ID NO: 97368 - DNA, 80 bp, synthetic construct
  misc_feature 1..80: note = Artificially Synthesized Probe
  source 1..80: mol_type = other DNA
tagctgggcgtggtggtgtacacctgtaataccagctactcaggaggcagaggcaggagaatggcttgaacccaggaggt

SEQ ID NO: 97369 - DNA, 80 bp, synthetic construct; identical to SEQ ID NO: 34607
  misc_feature 1..80: note = Artificially Synthesized Probe
  source 1..80: mol_type = other DNA

SEQ ID NO: 97370 - DNA, 80 bp, synthetic construct
  misc_feature 1..80: note = Artificially Synthesized Probe
  source 1..80: mol_type = other DNA
agtttttcctggagagtgggtaggccaaagtctaacgattacaggaaaacgctaccaaacataatgaatcagaattaaaa

SEQ ID NO: 97371 - DNA, 80 bp, synthetic construct
  misc_feature 1..80: note = Artificially Synthesized Probe
  source 1..80: mol_type = other DNA
ccttaatataagcctactatgcaactcagactattcaggaatacgtttaatagcattaaggactgtttcagaagtaaatg

SEQ ID NO: 97372 - DNA, 80 bp, synthetic construct; identical to SEQ ID NO: 34608
  misc_feature 1..80: note = Artificially Synthesized Probe
  source 1..80: mol_type = other DNA

SEQ ID NO: 97373 - DNA, 80 bp, synthetic construct
  misc_feature 1..80: note = Artificially Synthesized Probe
  source 1..80: mol_type = other DNA
gaatgaaaattacagcctgaagatttccttcatttaacgctgcacaactgactcagaaaggctatcattttaagaacttt

SEQ ID NO: 97374 - DNA, 80 bp, synthetic construct
  misc_feature 1..80: note = Artificially Synthesized Probe
  source 1..80: mol_type = other DNA
agaagtatctcagcaccaccaacccataaacaagttatccgacctaggacgactctggggcccagtaggacacatttacc

SEQ ID NO: 97375 - DNA, 80 bp, synthetic construct; identical to SEQ ID NO: 34597
  misc_feature 1..80: note = Artificially Synthesized Probe
  source 1..80: mol_type = other DNA

SEQ ID NO: 97376 - DNA, 80 bp, synthetic construct
  misc_feature 1..80: note = Artificially Synthesized Probe
  source 1..80: mol_type = other DNA
gcccattccctgctgagttttcctatgtgaggtgggggttccacaggagagcttcttttgaggcgacaggcataacatag

SEQ ID NO: 97377 - DNA, 80 bp, synthetic construct; identical to SEQ ID NO: 34609
  misc_feature 1..80: note = Artificially Synthesized Probe
  source 1..80: mol_type = other DNA

SEQ ID NO: 97378 - DNA, 80 bp, synthetic construct
  misc_feature 1..80: note = Artificially Synthesized Probe
  source 1..80: mol_type = other DNA
gttagaaaaaaatcgtgagggtgtttggtgacaaccttccccaaagcacctgggaataagaggtaaatatgatgtgaccc

SEQ ID NO: 97379 - DNA, 80 bp, synthetic construct
  misc_feature 1..80: note = Artificially Synthesized Probe
  source 1..80: mol_type = other DNA
ggtgttttaagtccaacacttgcttgtcacagggagaacggtgttacaggttctaaggctgtgaccccttacccttttct

SEQ ID NO: 97380 - DNA, 80 bp, synthetic construct
  misc_feature 1..80: note = Artificially Synthesized Probe
  source 1..80: mol_type = other DNA
cccaggggcgagtaggaaccctgtggcccagtaaagcctccaactctccttaactctcagtccccggggcggcttagccc

SEQ ID NO: 97381 - DNA, 80 bp, synthetic construct; identical to SEQ ID NO: 34610
  misc_feature 1..80: note = Artificially Synthesized Probe
  source 1..80: mol_type = other DNA

SEQ ID NO: 97382 - DNA, 80 bp, synthetic construct
  misc_feature 1..80: note = Artificially Synthesized Probe
  source 1..80: mol_type = other DNA
aagaagacattaaatagcgaatgctagagactgcattcacaacattggagggtggaagtgacttaggctaaccagttatt

SEQ ID NO: 97383 - DNA, 80 bp, synthetic construct
  misc_feature 1..80: note = Artificially Synthesized Probe
  source 1..80: mol_type = other DNA
gttctgttcaatgactagagagactcaaacgatgtcaccagatgacagcaactcatgcgtgttaaactcttcgtaaaaca

SEQ ID NO: 97384 - DNA, 80 bp, synthetic construct
  misc_feature 1..80: note = Artificially Synthesized Probe
  source 1..80: mol_type = other DNA
aaggctgactccattctttggaggttttctggttggtccatcctcacactgcccttgaataaactctttaaatagattcc

SEQ ID NO: 97385 - DNA, 80 bp, synthetic construct
  misc_feature 1..80: note = Artificially Synthesized Probe
  source 1..80: mol_type = other DNA
tttttgagtcgctctgtcggccaggctagagtgcagtggcacgatctcggctcactgcaatctccgcctccagggctcaa

SEQ ID NO: 97386 - DNA, 80 bp, synthetic construct
  misc_feature 1..80: note = Artificially Synthesized Probe
  source 1..80: mol_type = other DNA
gcctaaagaagcaaggaacataatacaacatccaaagcaaagcctttccccaggctgagaaaagttcatacaagaataga

SEQ ID NO: 97387 - DNA, 80 bp, synthetic construct; identical to SEQ ID NO: 34611
  misc_feature 1..80: note = Artificially Synthesized Probe
  source 1..80: mol_type = other DNA

SEQ ID NO: 97388 - DNA, 80 bp, synthetic construct
  misc_feature 1..80: note = Artificially Synthesized Probe
  source 1..80: mol_type = other DNA
acgggctttctccatgttggccaggctggtctcctcctgacttcaggtgatccgcctgcctcggcctcccaaagtgctgg

SEQ ID NO: 97389 - DNA, 80 bp, synthetic construct
  misc_feature 1..80: note = Artificially Synthesized Probe
  source 1..80: mol_type = other DNA
ctcccatatcttcccacagccctacaaaagaactcaacaaatatttgctgtacctgaattagctaaaccagtcaacattt

SEQ ID NO: 97390 - DNA, 80 bp, synthetic construct
  misc_feature 1..80: note = Artificially Synthesized Probe
  source 1..80: mol_type = other DNA
gaccgtaggttatccgcctgcctcagcctcccaaagtgctgggattacaggtgtgagccactatgcctggcctgatttaa

SEQ ID NO: 97391 - DNA, 80 bp, synthetic construct; identical to SEQ ID NO: 34612
  misc_feature 1..80: note = Artificially Synthesized Probe
  source 1..80: mol_type = other DNA

SEQ ID NO: 97392 - DNA, 80 bp, synthetic construct
  misc_feature 1..80: note = Artificially Synthesized Probe
  source 1..80: mol_type = other DNA
tttaccaggaatgggaaattctgaaatcctcctcaaataggagaggcaatattgtggagtcattaaagacagactctgaa

SEQ ID NO: 97393 - DNA, 80 bp, synthetic construct
  misc_feature 1..80: note = Artificially Synthesized Probe
  source 1..80: mol_type = other DNA
cacacacacactcacactctaattggaaggaaaaagaaacagtctatctcataaaattatcccatgtaatctttacataa

SEQ ID NO: 97394 - DNA, 80 bp, synthetic construct; identical to SEQ ID NO: 34613
  misc_feature 1..80: note = Artificially Synthesized Probe
  source 1..80: mol_type = other DNA

SEQ ID NO: 97395 - DNA, 80 bp, synthetic construct
  misc_feature 1..80: note = Artificially Synthesized Probe
  source 1..80: mol_type = other DNA
acacaacaccacacccagttaatttttgtattttttgtagagacggggttttgccatgttgcccaggctggtcttgaact

SEQ ID NO: 97396 - DNA, 80 bp, synthetic construct
  misc_feature 1..80: note = Artificially Synthesized Probe
  source 1..80: mol_type = other DNA
gactgaattggcaaatcaagaaaaggggaagtcagtagtccttgggtatatttttgctgtctttaagaactaaacattgg

SEQ ID NO: 97397 - DNA, 80 bp, synthetic construct
  misc_feature 1..80: note = Artificially Synthesized Probe
  source 1..80: mol_type = other DNA
gccaccttagtagctgggattacaggagcgttaccaccatgccctgctatatatttttggtatttttagtagagatgggg

SEQ ID NO: 97398 - DNA, 80 bp, synthetic construct
  misc_feature 1..80: note = Artificially Synthesized Probe
  source 1..80: mol_type = other DNA
atatctgtagtcccagctactccagaagctgaggcacgaggatcccttgagcccaggagttaaggcacttcaatgctaga

SEQ ID NO: 97399 - DNA, 80 bp, synthetic construct
  misc_feature 1..80: note = Artificially Synthesized Probe
  source 1..80: mol_type = other DNA
ccccatctctactaaaaatacaaaaaattagctgggcatgatggcacgcacctgtaatcccagctactcacgaggctgag

SEQ ID NO: 97400 - DNA, 80 bp, synthetic construct; identical to SEQ ID NO: 34614
  misc_feature 1..80: note = Artificially Synthesized Probe
  source 1..80: mol_type = other DNA

SEQ ID NO: 97401 - DNA, 80 bp, synthetic construct
  misc_feature 1..80: note = Artificially Synthesized Probe
  source 1..80: mol_type = other DNA
atggtgaaaacctgtctctactaaaaatacaaaaaatcagctgggcgtggcggcgtgcacctgcagtcccagctactcgg

SEQ ID NO: 97402 - DNA, 80 bp, synthetic construct
  misc_feature 1..80: note = Artificially Synthesized Probe
  source 1..80: mol_type = other DNA
ttcctttttttgagacggagtttcactcttattgcccaggctggagtgcaatggtgcaatctcggctcactgcaacctct

SEQ ID NO: 97403 - DNA, 80 bp, synthetic construct; identical to SEQ ID NO: 34615
  misc_feature 1..80: note = Artificially Synthesized Probe
  source 1..80: mol_type = other DNA

SEQ ID NO: 97404 - DNA, 80 bp, synthetic construct
  misc_feature 1..80: note = Artificially Synthesized Probe
  source 1..80: mol_type = other DNA
gtaaaacagggcaagagaaatcggacatattagaacccatctcacaaaatcaaactttaaaaactgaagtacctagatac

SEQ ID NO: 97405 - DNA, 80 bp, synthetic construct
  misc_feature 1..80: note = Artificially Synthesized Probe
  source 1..80: mol_type = other DNA
tcttagtagctgggattacaggtgcccgccaccacacctggctaattttcttgtatttttagtggagaccgggtttcacc

SEQ ID NO: 97406 - DNA, 80 bp, synthetic construct
  misc_feature 1..80: note = Artificially Synthesized Probe
  source 1..80: mol_type = other DNA
aaaaaaaattagctgggcgtggtggcgggcacctgtagtctcagctatttgggaggctgaggcaggagaatggcatgagc

SEQ ID NO: 97407 - DNA, 80 bp, synthetic construct; identical to SEQ ID NO: 34616
  misc_feature 1..80: note = Artificially Synthesized Probe
  source 1..80: mol_type = other DNA

SEQ ID NO: 97408 - DNA, 80 bp, synthetic construct
  misc_feature 1..80: note = Artificially Synthesized Probe
  source 1..80: mol_type = other DNA
gttcagtgtatactgcttgggtgacaggtgcaccaaaatctcaaaaatcaccactagagaacttacttgtataaccaaaa

SEQ ID NO: 97409 - DNA, 80 bp, synthetic construct
  misc_feature 1..80: note = Artificially Synthesized Probe
  source 1..80: mol_type = other DNA
ctccttttatttctccttccaggaaccttgacactctccttggtcgtctcaggaaatcttacttttttttttgttttgtt

SEQ ID NO: 97410 - DNA, 80 bp, synthetic construct
  misc_feature 1..80: note = Artificially Synthesized Probe
  source 1..80: mol_type = other DNA
tgagccactgcacttggccaggaaatcttttcaacataaattatttctcaaggaaaatttactttgaggtttaagacaca

SEQ ID NO: 97411 - DNA, 80 bp, synthetic construct; identical to SEQ ID NO: 34596
  misc_feature 1..80: note = Artificially Synthesized Probe
  source 1..80: mol_type = other DNA

SEQ ID NO: 97412 - DNA, 80 bp, synthetic construct; identical to SEQ ID NO: 34598
  misc_feature 1..80: note = Artificially Synthesized Probe
  source 1..80: mol_type = other DNA

SEQ ID NO: 97413 - DNA, 80 bp, synthetic construct
  misc_feature 1..80: note = Artificially Synthesized Probe
  source 1..80: mol_type = other DNA
tggtactgattcatcactgtcagattctgttccagaccctaagatgagaaacaacttttactgctttatagtagaaatta

SEQ ID NO: 97414 - DNA, 80 bp, synthetic construct
  misc_feature 1..80: note = Artificially Synthesized Probe
  source 1..80: mol_type = other DNA
agagaaaagataattagcggttcttataggcaaatcaggagaattcaggtcactaaaactcttacaggcaaatcaggaga

SEQ ID NO: 97415 - DNA, 80 bp, synthetic construct
  misc_feature 1..80: note = Artificially Synthesized Probe
  source 1..80: mol_type = other DNA
aaagacccagccctaaccccagaaatgaggactaatcactagaaatagctgagcagtttaatatactgtaactgctttct

SEQ ID NO: 97416 - DNA, 80 bp, synthetic construct
  misc_feature 1..80: note = Artificially Synthesized Probe
  source 1..80: mol_type = other DNA
gcacaacaggttgggtggttttcccctcaacttttaaactgggttggaggaagtcaaaagcagacacgtacacatattca

SEQ ID NO: 97417 - DNA, 80 bp, synthetic construct
  misc_feature 1..80: note = Artificially Synthesized Probe
  source 1..80: mol_type = other DNA
tgaggaaaaaaagcatacacctgcaccattttcaggctaggaaaaacagatttctacatttttatgaaaagggagtccct

SEQ ID NO: 97418 - DNA, 80 bp, synthetic construct; identical to SEQ ID NO: 34599
  misc_feature 1..80: note = Artificially Synthesized Probe
  source 1..80: mol_type = other DNA

SEQ ID NO: 97419 - DNA, 80 bp, synthetic construct
  misc_feature 1..80: note = Artificially Synthesized Probe
  source 1..80: mol_type = other DNA
attggtgggtagcgcccaagaggggtgtggacgacagacacaccatgcacacggcaaaccaaggcaaatacccttgttgt

SEQ ID NO: 97420 - DNA, 80 bp, synthetic construct
  misc_feature 1..80: note = Artificially Synthesized Probe
  source 1..80: mol_type = other DNA
gggcaaggggtttagagggtgattccaacaccagcccaggagaggacggcagaaattgctgtttaggaggcagagtggga

SEQ ID NO: 97421 - DNA, 80 bp, synthetic construct; identical to SEQ ID NO: 34600
  misc_feature 1..80: note = Artificially Synthesized Probe
  source 1..80: mol_type = other DNA

SEQ ID NO: 97422 - DNA, 80 bp, synthetic construct
  misc_feature 1..80: note = Artificially Synthesized Probe
  source 1..80: mol_type = other DNA
cttctttcagagctgtggggcctttctttgctggaagccctttagatgcttgaggaacagtggcccccattttacatgtg

SEQ ID NO: 97423 - DNA, 80 bp, synthetic construct
  misc_feature 1..80: note = Artificially Synthesized Probe
  source 1..80: mol_type = other DNA
gaagtcacagctggtggaatgaggagctctttgggggatggggcccctttgtaagtggaaggagtcactgctgggggact

SEQ ID NO: 97424 - DNA, 80 bp, synthetic construct
  misc_feature 1..80: note = Artificially Synthesized Probe
  source 1..80: mol_type = other DNA
tgttggggcaatggggtcccttctggaggatggggtagctgggacctctttgggggaagaaggaatcacagctggcagag

SEQ ID NO: 97425 - DNA, 80 bp, synthetic construct
  misc_feature 1..80: note = Artificially Synthesized Probe
  source 1..80: mol_type = other DNA
atcgcatttacaatatcattactgttgttcttcagggctcggactgcctttgctctcgacacatttgcttgtgacatgac

SEQ ID NO: 97426 - DNA, 80 bp, synthetic construct; identical to SEQ ID NO: 34601
  misc_feature 1..80: note = Artificially Synthesized Probe
  source 1..80: mol_type = other DNA

SEQ ID NO: 97427 - DNA, 80 bp, synthetic construct
  misc_feature 1..80: note = Artificially Synthesized Probe
  source 1..80: mol_type = other DNA
gagggggttgcagctgggggagtggggccctctttggaggatggagtagttgggcctcctttagaggagggagttgtagc

SEQ ID NO: 97428 - DNA, 80 bp, synthetic construct
  misc_feature 1..80: note = Artificially Synthesized Probe
  source 1..80: mol_type = other DNA
gcctccttttggagagggaggagttacaactgcgggattgggggcccctttgtggggtggggtagctagacctcctttta

SEQ ID NO: 97429 - DNA, 80 bp, synthetic construct
  misc_feature 1..80: note = Artificially Synthesized Probe
  source 1..80: mol_type = other DNA
ttgcagctggggttgtgggggcccctttgggggatggggtagctagacctccttttggggagggaggagttgcagctggg

SEQ ID NO: 97430 - DNA, 80 bp, synthetic construct
  misc_feature 1..80: note = Artificially Synthesized Probe
  source 1..80: mol_type = other DNA
ccttttgggggtggggtagctagacctccttttggggagggaggagttgcagctggggttgtgggtgcccctttgtgggg

SEQ ID NO: 97431 - DNA, 80 bp, synthetic construct; identical to SEQ ID NO: 34602
  misc_feature 1..80: note = Artificially Synthesized Probe
  source 1..80: mol_type = other DNA

SEQ ID NO: 97432 - DNA, 80 bp, synthetic construct
  misc_feature 1..80: note = Artificially Synthesized Probe
  source 1..80: mol_type = other DNA
gaggagttgcagctgggggtgtgggggcccctttgggggatggagtagctggacctccttttggggagggaggagttgca

SEQ ID NO: 97433 - DNA, 80 bp, synthetic construct
  misc_feature 1..80: note = Artificially Synthesized Probe
  source 1..80: mol_type = other DNA
gaggaagaagtcatggatagagcaggagcctgtttgggtgctggagtagctggaccctctttggggaagggcagattcac

SEQ ID NO: 97434 - DNA, 80 bp, synthetic construct; identical to SEQ ID NO: 34603
  misc_feature 1..80: note = Artificially Synthesized Probe
  source 1..80: mol_type = other DNA

SEQ ID NO: 97435 - DNA, 80 bp, synthetic construct
  misc_feature 1..80: note = Artificially Synthesized Probe
  source 1..80: mol_type = other DNA
gcactctttgggagaggaagcaacaggtgccaatgctgaagtatgagaaataccatcaaccttttttgtacctggaggag

SEQ ID NO: 97436 - DNA, 80 bp, synthetic construct
  misc_feature 1..80: note = Artificially Synthesized Probe
  source 1..80: mol_type = other DNA
ctatacggcgagagttaaattatgaaagatttcctagtatacctcttcctcttcactctcctcttgtacagttggagtct

SEQ ID NO: 97437 - DNA, 80 bp, synthetic construct
  misc_feature 1..80: note = Artificially Synthesized Probe
  source 1..80: mol_type = other DNA
taccttccttaactgggtggtttttaggagctaaagagacagttccttctagaaaagggctggctgtagttgtataagtt

SEQ ID NO: 97438 - DNA, 80 bp, synthetic construct
  misc_feature 1..80: note = Artificially Synthesized Probe
  source 1..80: mol_type = other DNA
gaggagttaacacccagaggggaggtcatactgctggctggcttacctatagggagaggctccccaaggcttttctttgc

SEQ ID NO: 97439 - DNA, 80 bp, synthetic construct
  misc_feature 1..80: note = Artificially Synthesized Probe
  source 1..80: mol_type = other DNA
ttcaagagaggcaggtacagtttggaggtctttttgtgttggaaatttaaccaatactgaactggggagatttttgaggt

SEQ ID NO: 97440 - DNA, 80 bp, synthetic construct; identical to SEQ ID NO: 34604
  misc_feature 1..80: note = Artificially Synthesized Probe
  source 1..80: mol_type = other DNA

SEQ ID NO: 97441 - DNA, 80 bp, synthetic construct
  misc_feature 1..80: note = Artificially Synthesized Probe
  source 1..80: mol_type = other DNA
attaggagagcttttgagaatgagagaggttgtaggagataatgaaaaagaggtagctacatttaaggagccagaagggc

SEQ ID NO: 97442 - DNA, 80 bp, synthetic construct
  misc_feature 1..80: note = Artificially Synthesized Probe
  source 1..80: mol_type = other DNA
aatgatctacagaaatggtcttcactgtagggtctgacaaagcactaggacctgtttgacctaaaagttggacagaacca

SEQ ID NO: 97443 - DNA, 80 bp, synthetic construct
  misc_feature 1..80: note = Artificially Synthesized Probe
  source 1..80: mol_type = other DNA
ttcaggctgaggcttcctgggttttgtggagaaatcagaactgaggaaatggtggtatctttgacttgaggggaagcgat

SEQ ID NO: 97444 - DNA, 80 bp, synthetic construct; identical to SEQ ID NO: 34605
  misc_feature 1..80: note = Artificially Synthesized Probe
  source 1..80: mol_type = other DNA

SEQ ID NO: 97445 - DNA, 80 bp, synthetic construct
  misc_feature 1..80: note = Artificially Synthesized Probe
  source 1..80: mol_type = other DNA
gctaaggcagctggggagatgggaggccctattaggtttggtaggaaggttggggcttcaggggcagttcccaaaggtag

SEQ ID NO: 97446 - DNA, 80 bp, synthetic construct
  misc_feature 1..80: note = Artificially Synthesized Probe
  source 1..80: mol_type = other DNA
ctgccctaaggcagcagtgacactcaaggctgaagacataggtagcacagctggagaaaggcaaaaggagataaagaaag

SEQ ID NO: 97447 - DNA, 80 bp, synthetic construct
  misc_feature 1..80: note = Artificially Synthesized Probe
  source 1..80: mol_type = other DNA
tttcagtggtcaagtgagaagacattcccctcctaatttctcacacttccccaagttctaccaaagtaaaccaactattt

SEQ ID NO: 97448 - DNA, 80 bp, synthetic construct
  misc_feature 1..80: note = Artificially Synthesized Probe
  source 1..80: mol_type = other DNA
acaactctctgtaaacccattcaggtaacttattgtacagctttaaactgcttgccctcacagtagaaagagtagttgtt

SEQ ID NO: 97449 - DNA, 80 bp, synthetic construct; identical to SEQ ID NO: 34606
  misc_feature 1..80: note = Artificially Synthesized Probe
  source 1..80: mol_type = other DNA

SEQ ID NO: 97450 - DNA, 80 bp, synthetic construct
  misc_feature 1..80: note = Artificially Synthesized Probe
  source 1..80: mol_type = other DNA
gaggtgcacagcacaattcagttcttcctaaagttgaaacacttcagaatttaatatcaagtattaaagtcacttagctt

SEQ ID NO: 97451 - DNA, 80 bp, synthetic construct
  misc_feature 1..80: note = Artificially Synthesized Probe
  source 1..80: mol_type = other DNA
tagtagagacaggatttcaccatgttggccaggctggtctcgaactcctgacctcaagtgatctgcccacctcggcctcc

SEQ ID NO: 97452 - DNA, 80 bp, synthetic construct
  misc_feature 1..80: note = Artificially Synthesized Probe
  source 1..80: mol_type = other DNA
aagtgatcctaccagcctcctgagtagctggggactataggtgcacaccatcatacttggctaattttttatttttttag

SEQ ID NO: 97453 - DNA, 80 bp, synthetic construct; identical to SEQ ID NO: 34628
  misc_feature 1..80: note = Artificially Synthesized Probe
  source 1..80: mol_type = other DNA

SEQ ID NO: 97454 - DNA, 80 bp, synthetic construct
  misc_feature 1..80: note = Artificially Synthesized Probe
  source 1..80: mol_type = other DNA
atgactacagattagcagatttccttcctgctgagctgccagatctgtaagttgcaatgtaagaccagcctaaccaaaaa

SEQ ID NO: 97455 - DNA, 80 bp, synthetic construct
  misc_feature 1..80: note = Artificially Synthesized Probe
  source 1..80: mol_type = other DNA
gtacaatggcgcgatctcggctcacattgcaatctctgcctcccaggttcaggtaattctcctgcttcagcctctcaagt

SEQ ID NO: 97456 - DNA, 80 bp, synthetic construct; identical to SEQ ID NO: 34629
  misc_feature 1..80: note = Artificially Synthesized Probe
  source 1..80: mol_type = other DNA

SEQ ID NO: 97457 - DNA, 80 bp, synthetic construct
  misc_feature 1..80: note = Artificially Synthesized Probe
  source 1..80: mol_type = other DNA
atcgagaccatcctggctaacacggtgaaacgccgtctctactaaaaatacaaaaaattagctgggcgtggtggcaggca

SEQ ID NO: 97458 - DNA, 80 bp, synthetic construct
  misc_feature 1..80: note = Artificially Synthesized Probe
  source 1..80: mol_type = other DNA
tagtacttcatagagtgggtatgaagactgagttcatatttgtgaagtgcttaggatacttcctagtgtgtagtaaaggc

SEQ ID NO: 97459 - DNA, 80 bp, synthetic construct
  misc_feature 1..80: note = Artificially Synthesized Probe
  source 1..80: mol_type = other DNA
ttaaagtgccatccttacctagtttggaaggatcatactcagctgaaatttggatcaataatttctccatatggtggaag

SEQ ID NO: 97460 - DNA, 80 bp, synthetic construct; identical to SEQ ID NO: 34630
  misc_feature 1..80: note = Artificially Synthesized Probe
  source 1..80: mol_type = other DNA

SEQ ID NO: 97461 - DNA, 80 bp, synthetic construct; identical to SEQ ID NO: 34618
  misc_feature 1..80: note = Artificially Synthesized Probe
  source 1..80: mol_type = other DNA

SEQ ID NO: 97462 - DNA, 80 bp, synthetic construct
  misc_feature 1..80: note = Artificially Synthesized Probe
  source 1..80: mol_type = other DNA
cacgaggtcaggagtttgagaccagtctggccaacatagtgaaaccccgtctctactaaaaatacaaaaaaaaaattagc

SEQ ID NO: 97463 - DNA, 80 bp, synthetic construct
  misc_feature 1..80: note = Artificially Synthesized Probe
  source 1..80: mol_type = other DNA
aaaaaaaagaagagaaaagaaatatagcatctcttcaacaaacggttggggacaactggatttgcacatgcgaaagaatg

SEQ ID NO: 97464 - DNA, 80 bp, synthetic construct
  misc_feature 1..80: note = Artificially Synthesized Probe
  source 1..80: mol_type = other DNA
cttggatttggcaatggattcttagataggacaccaaaaggaccagcaataaaagaaaaaaacagataaattggacttcg

SEQ ID NO: 97465 - DNA, 80 bp, synthetic construct; identical to SEQ ID NO: 34631
  misc_feature 1..80: note = Artificially Synthesized Probe
  source 1..80: mol_type = other DNA

SEQ ID NO: 97466 - DNA, 80 bp, synthetic construct
  misc_feature 1..80: note = Artificially Synthesized Probe
  source 1..80: mol_type = other DNA
ggccaggcacggtggctcatgcctgtaatcccagcactttgggaggccgaggtgggtggatcacctgaggtcaggagttc

SEQ ID NO: 97467 - DNA, 80 bp, synthetic construct
  misc_feature 1..80: note = Artificially Synthesized Probe
  source 1..80: mol_type = other DNA
ccactgcactccagcctgggggacagagcgaggctccatctcaaaaaaaaaaaagaaagaaaaagaaaaaagaccagact

SEQ ID NO: 97468 - DNA, 80 bp, synthetic construct
  misc_feature 1..80: note = Artificially Synthesized Probe
  source 1..80: mol_type = other DNA
agcttgggcaatagagcaagacactgtctgaaaaacaacaatgaaaacaaaaacaggtcgggcactgtggctcatgcctg

SEQ ID NO: 97469 - DNA, 80 bp, synthetic construct
  misc_feature 1..80: note = Artificially Synthesized Probe
  source 1..80: mol_type = other DNA
gacaggagaattgcttgaacccgagaggtggaggttgcagtgagccaagatctcgccactgcactccagcctgggtgaca

SEQ ID NO: 97470 - DNA, 80 bp, synthetic construct; identical to SEQ ID NO: 34632
  misc_feature 1..80: note = Artificially Synthesized Probe
  source 1..80: mol_type = other DNA

SEQ ID NO: 97471 - DNA, 80 bp, synthetic construct
  misc_feature 1..80: note = Artificially Synthesized Probe
  source 1..80: mol_type = other DNA
acatgtgaaggaatgaaattccaatataggctacaacatgatgtaccttgaacagtatgcaaagtgaaataagccagaca

SEQ ID NO: 97472 - DNA, 80 bp, synthetic construct
  misc_feature 1..80: note = Artificially Synthesized Probe
  source 1..80: mol_type = other DNA
tctacaaggattaaggaacatctcttggcccacagaagattcatgtggatcctgtgttaaacccgtttcatccatgtatg

SEQ ID NO: 97473 - DNA, 80 bp, synthetic construct
  misc_feature 1..80: note = Artificially Synthesized Probe
  source 1..80: mol_type = other DNA
tgatctgggctcactgcaacctctgcctcccaggcttaagtgattctcatgcctcagcctcccgaatagctgggactaca

SEQ ID NO: 97474 - DNA, 80 bp, synthetic construct
  misc_feature 1..80: note = Artificially Synthesized Probe
  source 1..80: mol_type = other DNA
atttattgtttaattgggatgatgaaaaggttctggagatggatagtggtgatggttgtacaacatagtgaatgcttaat

SEQ ID NO: 97475 - DNA, 80 bp, synthetic construct; identical to SEQ ID NO: 34633
  misc_feature 1..80: note = Artificially Synthesized Probe
  source 1..80: mol_type = other DNA

SEQ ID NO: 97476 - DNA, 80 bp, synthetic construct
  misc_feature 1..80: note = Artificially Synthesized Probe
  source 1..80: mol_type = other DNA
atttcccagggactacaggcctttcttcctttaggcagctagggtgaaggtaatttctaagcatcatcttacatatagct

SEQ ID NO: 97477 - DNA, 80 bp, synthetic construct
  misc_feature 1..80: note = Artificially Synthesized Probe
  source 1..80: mol_type = other DNA
ttattttatatctgttctatcaatgagcatgcatgctttcatggcctcagaagttttcaaccacttaaagtaagaaaaag

SEQ ID NO: 97478 - DNA, 80 bp, synthetic construct
  misc_feature 1..80: note = Artificially Synthesized Probe
  source 1..80: mol_type = other DNA
gccttagacagctcaagagctgggcggatgctttctataaagcctctgctgtggtttaaatggagttcgatgcgctgtga

SEQ ID NO: 97479 - DNA, 80 bp, synthetic construct; identical to SEQ ID NO: 34634
  misc_feature 1..80: note = Artificially Synthesized Probe
  source 1..80: mol_type = other DNA

SEQ ID NO: 97480 - DNA, 80 bp, synthetic construct
  misc_feature 1..80: note = Artificially Synthesized Probe
  source 1..80: mol_type = other DNA
agtgttctcccttgaaggaattgcaaaacaaatggagaacacgcagcaacagtgttgctttgataagcagttttcagggc

SEQ ID NO: 97481 - DNA, 80 bp, synthetic construct
  misc_feature 1..80: note = Artificially Synthesized Probe
  source 1..80: mol_type = other DNA
tggagcaaatgagacacaattttgggccctgcttttgttgaagggaggctggagacatagttcaaaaaattgttgtaggc

SEQ ID NO: 97482 - DNA, 80 bp, synthetic construct
  misc_feature 1..80: note = Artificially Synthesized Probe
  source 1..80: mol_type = other DNA
gctgtaaatttgctcatcaagcacatggttagatcttcatcttcatcaacccctgcttctgcgagatcatcatcattaaa

SEQ ID NO: 97483 - DNA, 80 bp, synthetic construct
  misc_feature 1..80: note = Artificially Synthesized Probe
  source 1..80: mol_type = other DNA
ttagctggggtggattactcagggacctcaaaggtattggtgatgatttatttcttgagcttggtggtgagtatgcagga

SEQ ID NO: 97484 - DNA, 80 bp, synthetic construct; identical to SEQ ID NO: 34635
  misc_feature 1..80: note = Artificially Synthesized Probe
  source 1..80: mol_type = other DNA

SEQ ID NO: 97485 - DNA, 80 bp, synthetic construct
  misc_feature 1..80: note = Artificially Synthesized Probe
  source 1..80: mol_type = other DNA
ggccctgtttgtacggacagcaatcaataggcaggtccgggataagtggtttttttgaatcagttttcctatgacttgag

SEQ ID NO: 97486 - DNA, 80 bp, synthetic construct
  misc_feature 1..80: note = Artificially Synthesized Probe
  source 1..80: mol_type = other DNA
aagggagaggtagaaaaccagctggaacctgtttaacaggggacagcatccagatgcccacagaaaagctattttcttca

SEQ ID NO: 97487 - DNA, 80 bp, synthetic construct; identical to SEQ ID NO: 34636
  misc_feature 1..80: note = Artificially Synthesized Probe
  source 1..80: mol_type = other DNA

SEQ ID NO: 97488 - DNA, 80 bp, synthetic construct
  misc_feature 1..80: note = Artificially Synthesized Probe
  source 1..80: mol_type = other DNA
gccatccatgattcccacattgcaatcatctcataggttttggcacaaaatcggaatgtggaaagcatgtgtccaaagtg

SEQ ID NO: 97489 - DNA, 80 bp, synthetic construct
  misc_feature 1..80: note = Artificially Synthesized Probe
  source 1..80: mol_type = other DNA
ccaacatggcaaaaccctgtctctacaaaaaatacaaaaattagccaggtgtggtggcacatgcttgtggtcccagctac

SEQ ID NO: 97490 - DNA, 80 bp, synthetic construct
  misc_feature 1..80: note = Artificially Synthesized Probe
  source 1..80: mol_type = other DNA
agtttactgattggtgcttctaaggactggtttgcttgtacctgagacacgttgcctactatcagtttggtcctgcctgc

SEQ ID NO: 97491 - DNA, 80 bp, synthetic construct
  misc_feature 1..80: note = Artificially Synthesized Probe
  source 1..80: mol_type = other DNA
ttcaaagttcttacctggcactataggaccaactgctattgaatcttcaagattgctttcacttgtggtttcctttgaaa

SEQ ID NO: 97492 - DNA, 80 bp, synthetic construct; identical to SEQ ID NO: 34637
  misc_feature 1..80: note = Artificially Synthesized Probe
  source 1..80: mol_type = other DNA

SEQ ID NO: 97493 - DNA, 80 bp, synthetic construct
  misc_feature 1..80: note = Artificially Synthesized Probe
  source 1..80: mol_type = other DNA
tttttcaattcatatagaaaatgaatcacgtgaatagcaagttggtttttgtgtgtgttgggggtggggggatgacaaac

SEQ ID NO: 97494 - DNA, 80 bp, synthetic construct
  misc_feature 1..80: note = Artificially Synthesized Probe
  source 1..80: mol_type = other DNA
ttagctgaatcttttatttctgaatgattggagagaacggcagtatccatttctggagaatagttaagtacttagattga

SEQ ID NO: 97495 - DNA, 80 bp, synthetic construct
  misc_feature 1..80: note = Artificially Synthesized Probe
  source 1..80: mol_type = other DNA
tgggtttatgattttgttgggcacttgcttttgttaaagtaacatcttctcaacccctaaaaaggccaagtagcaaatcc

SEQ ID NO: 97496 - DNA, 80 bp, synthetic construct
  misc_feature 1..80: note = Artificially Synthesized Probe
  source 1..80: mol_type = other DNA
ctaggtattgtgcccgactggtttattgtgatttccccaatctgtacctagaacataacagatgtttagtagatgtttgt

SEQ ID NO: 97497 - DNA, 80 bp, synthetic construct; identical to SEQ ID NO: 34638
  misc_feature 1..80: note = Artificially Synthesized Probe
  source 1..80: mol_type = other DNA

SEQ ID NO: 97498 - DNA, 80 bp, synthetic construct
  misc_feature 1..80: note = Artificially Synthesized Probe
  source 1..80: mol_type = other DNA
ctaggcatcccaaagtgctgggatgataggtgtgagccgccaggcctggccttgtattaggtttttaaaaacactattag

SEQ ID NO: 97499 - DNA, 80 bp, synthetic construct
  misc_feature 1..80: note = Artificially Synthesized Probe
  source 1..80: mol_type = other DNA
gtaacggtaaaggatatcaagggaatttggtggaatgagtgcgtatatgacactcctccatgcaaccaacaaaaatgaac

SEQ ID NO: 97500 - DNA, 80 bp, synthetic construct; identical to SEQ ID NO: 34639
  misc_feature 1..80: note = Artificially Synthesized Probe
  source 1..80: mol_type = other DNA

SEQ ID NO: 97501 - DNA, 80 bp, synthetic construct
  misc_feature 1..80: note = Artificially Synthesized Probe
  source 1..80: mol_type = other DNA
agaagtttgagaccagcctggccaacatggcaaaaccctgtctctattaaaaagaaaattccaaaattaaccaggcagtg

SEQ ID NO: 97502 - DNA, 80 bp, synthetic construct
  misc_feature 1..80: note = Artificially Synthesized Probe
  source 1..80: mol_type = other DNA
gccaggcatggtggctcacgcctgtaatcccagcagttcgggaggctgaggcgggtggatcacttgaggtcaggagtttg

SEQ ID NO: 97503 - DNA, 80 bp, synthetic construct
  misc_feature 1..80: note = Artificially Synthesized Probe
  source 1..80: mol_type = other DNA
cattgcactctagcctgggcaacaggagtgaaactctgtctcaaaaacaaacaaacaaacaaacaaaaaactaaccaacc

SEQ ID NO: 97504 - DNA, 80 bp, synthetic construct; identical to SEQ ID NO: 34640
  misc_feature 1..80: note = Artificially Synthesized Probe
  source 1..80: mol_type = other DNA

SEQ ID NO: 97505 - DNA, 80 bp, synthetic construct
  misc_feature 1..80: note = Artificially Synthesized Probe
  source 1..80: mol_type = other DNA
taaaaactacttgccaatctcgtgaaactaggacgcaaataccctctaaactcaggtttgatgtatgcttgaagaacaag

SEQ ID NO: 97506 - DNA, 80 bp, synthetic construct; identical to SEQ ID NO: 34619
  misc_feature 1..80: note = Artificially Synthesized Probe
  source 1..80: mol_type = other DNA

SEQ ID NO: 97507 - DNA, 80 bp, synthetic construct
  misc_feature 1..80: note = Artificially Synthesized Probe
  source 1..80: mol_type = other DNA
caaggtctcactcttttgtccaggcttgagggtagtgacacgaccaaggatcaatgtagcctccaactcccaggctcaag

SEQ ID NO: 97508 - DNA, 80 bp, synthetic construct
  misc_feature 1..80: note = Artificially Synthesized Probe
  source 1..80: mol_type = other DNA
catttgtattgccttcaggtgacttggcgatgagtccagaaatagaagcatagcttcaggaaaacaacaagtagaacttt

SEQ ID NO: 97509 - DNA, 80 bp, synthetic construct; identical to SEQ ID NO: 34641
  misc_feature 1..80: note = Artificially Synthesized Probe
  source 1..80: mol_type = other DNA

SEQ ID NO: 97510 - DNA, 80 bp, synthetic construct
  misc_feature 1..80: note = Artificially Synthesized Probe
  source 1..80: mol_type = other DNA
gggcacctgtaatcctagctactcaggaggttgaggcaggagaatcacttgaacccgggaggcagaggttgcagtcagcc

SEQ ID NO: 97511 - DNA, 80 bp, synthetic construct
  misc_feature 1..80: note = Artificially Synthesized Probe
  source 1..80: mol_type = other DNA
gataagataactaagagggcaaatatgaaagacttttgccgttgtaaaaatgtacttaaattgtttaaagcaaagatata

SEQ ID NO: 97512 - DNA, 80 bp, synthetic construct
  misc_feature 1..80: note = Artificially Synthesized Probe
  source 1..80: mol_type = other DNA
ggctggagtgcagtggcacgatctcagctttctgcagcgtctgcttcctgggttcaagcaattctcgtgcctcagcctcc

SEQ ID NO: 97513 - DNA, 80 bp, synthetic construct; identical to SEQ ID NO: 34642
  misc_feature 1..80: note = Artificially Synthesized Probe
  source 1..80: mol_type = other DNA

SEQ ID NO: 97514 - DNA, 80 bp, synthetic construct
  misc_feature 1..80: note = Artificially Synthesized Probe
  source 1..80: mol_type = other DNA
ggaagtcaggaaaagaaaaagaaacaaagaagtgatgaaataaatagaaagcaaatggtaaaataggtttaaatccaacc

SEQ ID NO: 97515 - DNA, 80 bp, synthetic construct
  misc_feature 1..80: note = Artificially Synthesized Probe
  source 1..80: mol_type = other DNA
tcgagaccatcctggctaacacggtgaaaccccgtctctactaaaaatacaaaaaattagccaggtgtggtggcggggtg

SEQ ID NO: 97516 - DNA, 80 bp, synthetic construct
  misc_feature 1..80: note = Artificially Synthesized Probe
  source 1..80: mol_type = other DNA
caaggttatttgaaccagcctcctctcccaccactactgctagtaggaagtactcaatataattttgttttttgaaatgg

SEQ ID NO: 97517 - DNA, 80 bp, synthetic construct
  misc_feature 1..80: note = Artificially Synthesized Probe
  source 1..80: mol_type = other DNA
tggtggctcacacctccatctcaaaaaaaaagcaagacctgctgggttcagtggtccacacctgtaatcccagcactctg

SEQ ID NO: 97518 - DNA, 80 bp, synthetic construct
  misc_feature 1..80: note = Artificially Synthesized Probe
  source 1..80: mol_type = other DNA
tgagcctgggaagtccaggctgcagtgagtcaagactgcaccactgcactccagcgtaggcaacagagcgagtctgtctc

SEQ ID NO: 97519 - DNA, 80 bp, synthetic construct
  misc_feature 1..80: note = Artificially Synthesized Probe
  source 1..80: mol_type = other DNA
gacaagcaagaagacaatccatcccaccttctagtactcttgccctccagaggtagctccagttaatattttagtgctaa

SEQ ID NO: 97520 - DNA, 80 bp, synthetic construct; identical to SEQ ID NO: 34643
  misc_feature 1..80: note = Artificially Synthesized Probe
  source 1..80: mol_type = other DNA

SEQ ID NO: 97521 - DNA, 80 bp, synthetic construct
  misc_feature 1..80: note = Artificially Synthesized Probe
  source 1..80: mol_type = other DNA
cacagtacagtggcacaatcatagctcattgcaacctatactcctgagctcaagcgattctcctgcctctgcctcccagg

SEQ ID NO: 97522 - DNA, 80 bp, synthetic construct
  misc_feature 1..80: note = Artificially Synthesized Probe
  source 1..80: mol_type = other DNA
accatgcctgcttgggatatttaatatattctctggaatatgaaagaccaaagggcaaaaaaatagctaagacacactct

SEQ ID NO: 97523 - DNA, 80 bp, synthetic construct
  misc_feature 1..80: note = Artificially Synthesized Probe
  source 1..80: mol_type = other DNA
cccatctctactaaaaatacaaaattagctgggcgtggtggcacatgcctgtaatcccagctactcgggaggctgaggca

SEQ ID NO: 97524 - DNA, 80 bp, synthetic construct; identical to SEQ ID NO: 34644
  misc_feature 1..80: note = Artificially Synthesized Probe
  source 1..80: mol_type = other DNA

SEQ ID NO: 97525 - DNA, 80 bp, synthetic construct
  misc_feature 1..80: note = Artificially Synthesized Probe
  source 1..80: mol_type = other DNA
tttgcaacactctgaaaacgacccacgaggttaatcaacagtaaaataagttattatatattcataaaataatacactat

SEQ ID NO: 97526 - DNA, 80 bp, synthetic construct
  misc_feature 1..80: note = Artificially Synthesized Probe
  source 1..80: mol_type = other DNA
gtatatgtagttggtaaaaccacaaagagaagcaagggaataattaacccaaactgagcatcacatttacctctggattg

SEQ ID NO: 97527 - DNA, 80 bp, synthetic construct
  misc_feature 1..80: note = Artificially Synthesized Probe
  source 1..80: mol_type = other DNA
ttctcctgcctcagcctccctaatagctgggactacaggcgtgtgtcaccaggcccggttaaatttttctgttttttaac

SEQ ID NO: 97528 - DNA, 80 bp, synthetic construct
  misc_feature 1..80: note = Artificially Synthesized Probe
  source 1..80: mol_type = other DNA
cctgcctcagcctcccgagtagctgggactacaggcgcccgccaccatgcccagctaattttttgtatttttagtagaga

SEQ ID NO: 97529 - DNA, 80 bp, synthetic construct; identical to SEQ ID NO: 34645
  misc_feature 1..80: note = Artificially Synthesized Probe
  source 1..80: mol_type = other DNA

SEQ ID NO: 97530 - DNA, 80 bp, synthetic construct
  misc_feature 1..80: note = Artificially Synthesized Probe
  source 1..80: mol_type = other DNA
gaccccatctctacaaaaaaaaactttaaaaaattagtcgggcatggtgacacatgcttgtagtcctagctacttgggag

SEQ ID NO: 97531 - DNA, 80 bp, synthetic construct
  misc_feature 1..80: note = Artificially Synthesized Probe
  source 1..80: mol_type = other DNA
cactttgggaggctgaggcaggaggatcacttgaggtcaggagttcaagaccagcctggccaacatggtgaaaccccgtc

SEQ ID NO: 97532 - DNA, 80 bp, synthetic construct
  misc_feature 1..80: note = Artificially Synthesized Probe
  source 1..80: mol_type = other DNA
actccatctcaaaaacaacaacaacaaaacactaaaactaataataataataatagtataaaagggagttgatcgattcc

SEQ ID NO: 97533 - DNA, 80 bp, synthetic construct; identical to SEQ ID NO: 34646
  misc_feature 1..80: note = Artificially Synthesized Probe
  source 1..80: mol_type = other DNA

SEQ ID NO: 97534 - DNA, 80 bp, synthetic construct
  misc_feature 1..80: note = Artificially Synthesized Probe
  source 1..80: mol_type = other DNA
aacagatatttttctgaaagcttccagcacaggaaaaaaaaaaattttgtttgcagtaaaaggattgacaagcagaaagg

SEQ ID NO: 97535 - DNA, 80 bp, synthetic construct
  misc_feature 1..80: note = Artificially Synthesized Probe
  source 1..80: mol_type = other DNA
tctgtatatgcattatatgcaactaaaagtgtgtatttcttatgcagtctttcccagggaactccgatgaagtgttccaa

SEQ ID NO: 97536 - DNA, 80 bp, synthetic construct; identical to SEQ ID NO: 34647
  misc_feature 1..80: note = Artificially Synthesized Probe
  source 1..80: mol_type = other DNA

SEQ ID NO: 97537 - DNA, 80 bp, synthetic construct
  misc_feature 1..80: note = Artificially Synthesized Probe
  source 1..80: mol_type = other DNA
gctgaggcaggaagaattgcttgaacctgggaggcagagtctgcagtgagccgagatcatgccactgcactccagcctgg

SEQ ID NO: 97538 - DNA, 80 bp, synthetic construct
  misc_feature 1..80: note = Artificially Synthesized Probe
  source 1..80: mol_type = other DNA
atttatttcatttaaataaataaaattattaatacatgaattttatctcaagaaacaaaaataagcaatgtacataaaaa

SEQ ID NO: 97539 - DNA, 80 bp, synthetic construct
  misc_feature 1..80: note = Artificially Synthesized Probe
  source 1..80: mol_type = other DNA
cttcccaagtaggtgggattacaagcacgtgtcactgtgcccagcttaatataatattttgaaaatatctccttaaaaac

SEQ ID NO: 97540 - DNA, 80 bp, synthetic construct
  misc_feature 1..80: note = Artificially Synthesized Probe
  source 1..80: mol_type = other DNA
gggcgtgatggcaggtgcctgtagtcccagctactcgggaggctgaggcaggagaatggcatgaacccaggaggcggagg

SEQ ID NO: 97541 - DNA, 80 bp, synthetic construct; identical to SEQ ID NO: 34648
  misc_feature 1..80: note = Artificially Synthesized Probe
  source 1..80: mol_type = other DNA

SEQ ID NO: 97542 - DNA, 80 bp, synthetic construct
  misc_feature 1..80: note = Artificially Synthesized Probe
  source 1..80: mol_type = other DNA
gtttagcatttcctcaaaaagttaaaacaggccaggcgctgtggctcacgcttgtaattccagcactttgggaggccaag

SEQ ID NO: 97543 - DNA, 80 bp, synthetic construct
  misc_feature 1..80: note = Artificially Synthesized Probe
  source 1..80: mol_type = other DNA
ttgcagtgagctgagatcgcaccgctgcactccagcctgagtgacagagtgagactctgtgtgagaaaaaaaaaaaaaag

SEQ ID NO: 97544 - DNA, 80 bp, synthetic construct
  misc_feature 1..80: note = Artificially Synthesized Probe
  source 1..80: mol_type = other DNA
atagatgaatggataaataaaatgcagtgtatccatatggaatattacttggtctcaaaaggaaggaagtacttatgcaa

SEQ ID NO: 97545 - DNA, 80 bp, synthetic construct
  misc_feature 1..80: note = Artificially Synthesized Probe
  source 1..80: mol_type = other DNA
ggagagaggaggggggcctgcttgatggatacagagttttctttgggggcgatgaaagtgttttggaactagatagaggg

SEQ ID NO: 97546 - DNA, 80 bp, synthetic construct; identical to SEQ ID NO: 34649
  misc_feature 1..80: note = Artificially Synthesized Probe
  source 1..80: mol_type = other DNA

SEQ ID NO: 97547 - DNA, 80 bp, synthetic construct
  misc_feature 1..80: note = Artificially Synthesized Probe
  source 1..80: mol_type = other DNA
cctcaggaaaaaaaaataagctaacataccaacaggacagttattacttcctaaaaaaataaaaggatatacaggaaggg

SEQ ID NO: 97548 - DNA, 80 bp, synthetic construct
  misc_feature 1..80: note = Artificially Synthesized Probe
  source 1..80: mol_type = other DNA
atgaaagacatgaagactcatccttcatagcctgaatccgaggagtggataaagactcaatctaaagataaaataaggca

SEQ ID NO: 97549 - DNA, 80 bp, synthetic construct; identical to SEQ ID NO: 34620
  misc_feature 1..80: note = Artificially Synthesized Probe
  source 1..80: mol_type = other DNA

SEQ ID NO: 97550 - DNA, 80 bp, synthetic construct; identical to SEQ ID NO: 34650
  misc_feature 1..80: note = Artificially Synthesized Probe
  source 1..80: mol_type = other DNA

SEQ ID NO: 97551 - DNA, 80 bp, synthetic construct
  misc_feature 1..80: note = Artificially Synthesized Probe
  source 1..80: mol_type = other DNA
atgcacaccatccctctgccccattctcctttgatcaacaaacagattggcaaccagaatctggaattgaagctccatga

SEQ ID NO: 97552 - DNA, 80 bp, synthetic construct
  misc_feature 1..80: note = Artificially Synthesized Probe
  source 1..80: mol_type = other DNA
ctgtaatgccagctactcaggaggctgaggcacaagaatcgcttgaacccaggagacggaggttgcagtgaaccaagata

SEQ ID NO: 97553 - DNA, 80 bp, synthetic construct
  misc_feature 1..80: note = Artificially Synthesized Probe
  source 1..80: mol_type = other DNA
aatgaatgaatcagaaagaatatatttagagctcacggaaaaaaaataccagcaaatctagcagcccttatgtaagtgaa

SEQ ID NO: 97554 - DNA, 80 bp, synthetic construct; identical to SEQ ID NO: 34651
  misc_feature 1..80: note = Artificially Synthesized Probe
  source 1..80: mol_type = other DNA

SEQ ID NO: 97555 - DNA, 80 bp, synthetic construct
  misc_feature 1..80: note = Artificially Synthesized Probe
  source 1..80: mol_type = other DNA
aaacactctttccaaaggcttaagattgtgaggcagtcagattttttttttccaatggcacatgtctgttaggtagagtg

SEQ ID NO: 97556 - DNA, 80 bp, synthetic construct
  misc_feature 1..80: note = Artificially Synthesized Probe
  source 1..80: mol_type = other DNA
tttcaggcagagatttagctgacaggaaccagcccatcatttatagattgcagaggtgcttcctaatgaccagcagctaa

SEQ ID NO: 97557 - DNA, 80 bp, synthetic construct; identical to SEQ ID NO: 34652
  misc_feature 1..80: note = Artificially Synthesized Probe
  source 1..80: mol_type = other DNA

SEQ ID NO: 97558 - DNA, 80 bp, synthetic construct
  misc_feature 1..80: note = Artificially Synthesized Probe
  source 1..80: mol_type = other DNA
taaaaatacaagaatcagccggatatggtggtacatgcctgtaatcccagctactcgggaggctgaggcaggagaatcag

SEQ ID NO: 97559 - DNA, 80 bp, synthetic construct
  misc_feature 1..80: note = Artificially Synthesized Probe
  source 1..80: mol_type = other DNA
caagcgattctcctgcctcagcctcccaagtagctgggattacaggcacccgccaccatgcctggctaattctttgtatt

SEQ ID NO: 97560 - DNA, 80 bp, synthetic construct
  misc_feature 1..80: note = Artificially Synthesized Probe
  source 1..80: mol_type = other DNA
agtgtcctgtgacagtttctaggagcactttgtcaggggacaagaggtgaggagagtaatgtgtagaaagaaaagacatg

SEQ ID NO: 97561 - DNA, 80 bp, synthetic construct
  misc_feature 1..80: note = Artificially Synthesized Probe
  source 1..80: mol_type = other DNA
aatcccagcattttgggaggccaaggcaggaggattacttgagcccaggaggttgaggctgcagtgagccatgatctcgc

SEQ ID NO: 97562 - DNA, 80 bp, synthetic construct
  misc_feature 1..80: note = Artificially Synthesized Probe
  source 1..80: mol_type = other DNA
gagcattctgactagcatggtgaaaccctgtctctactaaaaatacaaaaaagtagctgggcgtggtggcaggcgcctgt

SEQ ID NO: 97563 - DNA, 80 bp, synthetic construct; identical to SEQ ID NO: 34653
  misc_feature 1..80: note = Artificially Synthesized Probe
  source 1..80: mol_type = other DNA

SEQ ID NO: 97564 - DNA, 80 bp, synthetic construct
  misc_feature 1..80: note = Artificially Synthesized Probe
  source 1..80: mol_type = other DNA
ctttagtcttttttttttctatatctttattgctgctgcacaaattaaagagaccagtaggctttgatattgcaagtatc

SEQ ID NO: 97565 - DNA, 80 bp, synthetic construct
  misc_feature 1..80: note = Artificially Synthesized Probe
  source 1..80: mol_type = other DNA
cctgatgccataggtaattctctctggacccaggaattcacaaaatgttctccctgagggaaattaaaattcaagttgtt

SEQ ID NO: 97566 - DNA, 80 bp, synthetic construct; identical to SEQ ID NO: 34654
  misc_feature 1..80: note = Artificially Synthesized Probe
  source 1..80: mol_type = other DNA

SEQ ID NO: 97567 - DNA, 80 bp, synthetic construct
  misc_feature 1..80: note = Artificially Synthesized Probe
  source 1..80: mol_type = other DNA
gctaattttttttttttttgtatttttagtagagatggggtttcaccatgttagccaggatggtctctatctcctgacct

SEQ ID NO: 97568 - DNA, 80 bp, synthetic construct
  misc_feature 1..80: note = Artificially Synthesized Probe
  source 1..80: mol_type = other DNA
actaaattacaagggacttcaaagagtgtagcaattatgtcttccccttttatagagaagggggtgtgacattcctaaag

SEQ ID NO: 97569 - DNA, 80 bp, synthetic construct
  misc_feature 1..80: note = Artificially Synthesized Probe
  source 1..80: mol_type = other DNA
ctgcgcccagcctgattgtttgacttatgaagtatatacctatctatgaacaagaactgaaggaactttaccccagaatg

SEQ ID NO: 97570 - DNA, 80 bp, synthetic construct
  misc_feature 1..80: note = Artificially Synthesized Probe
  source 1..80: mol_type = other DNA
tgtttatgcatactcaggaggaagccttctcagggtcactgtttccggaaactgaccttgaaaacagacctgcatttaaa

SEQ ID NO: 97571 - DNA, 80 bp, synthetic construct; identical to SEQ ID NO: 34655
  misc_feature 1..80: note = Artificially Synthesized Probe
  source 1..80: mol_type = other DNA

SEQ ID NO: 97572 - DNA, 80 bp, synthetic construct
  misc_feature 1..80: note = Artificially Synthesized Probe
  source 1..80: mol_type = other DNA
taaaggggaagactatcaggaaggcaagcagagcccgtcagaagccagccctggaaaaagaaaaaggctctaggtcagca

SEQ ID NO: 97573 - DNA, 80 bp, synthetic construct
  misc_feature 1..80: note = Artificially Synthesized Probe
  source 1..80: mol_type = other DNA
attaccgttatgtcaacaaatcccttgtagctttgaatatactgggtaatttcctctgaggatttcttactccgaagaaa

SEQ ID NO: 97574 - DNA, 80 bp, synthetic construct
  misc_feature 1..80: note = Artificially Synthesized Probe
  source 1..80: mol_type = other DNA
taaaattgccaaaaaatttaccacaaaacttaggagaattaccattattctcatataattatttgttatttctattagtg

SEQ ID NO: 97575 - DNA, 80 bp, synthetic construct; identical to SEQ ID NO: 34656
  misc_feature 1..80: note = Artificially Synthesized Probe
  source 1..80: mol_type = other DNA

SEQ ID NO: 97576 - DNA, 80 bp, synthetic construct
  misc_feature 1..80: note = Artificially Synthesized Probe
  source 1..80: mol_type = other DNA
tacactccagcctgggcaacagactgagacccagtctcaaaagtaaatacaaaaaatctttttaagataacaatatattt

SEQ ID NO: 97577 - DNA, 80 bp, synthetic construct
  misc_feature 1..80: note = Artificially Synthesized Probe
  source 1..80: mol_type = other DNA
aacacaggctgactagactttggaatgggtaccaagcagagttcttgttgtttggtttaggggtttttaaaaaaaaaaaa

SEQ ID NO: 97578 - DNA, 80 bp, synthetic construct
  misc_feature 1..80: note = Artificially Synthesized Probe
  source 1..80: mol_type = other DNA
ctactaaaagtacaaaaattagctgggtgtggtggcgggcgcctgtaatcccagctacttgggaggctgaggcaggagaa

SEQ ID NO: 97579 - DNA, 80 bp, synthetic construct
  misc_feature 1..80: note = Artificially Synthesized Probe
  source 1..80: mol_type = other DNA
gaataccatttaaaaacatattcctttcccataaaagagaagcagttttaaaattaacttttaaaatttcctccaattca

SEQ ID NO: 97580 - DNA, 80 bp, synthetic construct
  misc_feature 1..80: note = Artificially Synthesized Probe
  source 1..80: mol_type = other DNA
aatcccagctgcttgggaggctgaggcgggaggatcacttgaacctgggaagcagagtttgcagtgagtcatgattgtac

SEQ ID NO: 97581 - DNA, 80 bp, synthetic construct; identical to SEQ ID NO: 34657
  misc_feature 1..80: note = Artificially Synthesized Probe
  source 1..80: mol_type = other DNA

SEQ ID NO: 97582 - DNA, 80 bp, synthetic construct
  misc_feature 1..80: note = Artificially Synthesized Probe
  source 1..80: mol_type = other DNA
gtggttccctgtcctcatgatttatatggattgaggaggaactcagtaccttaaaaagttaccataaaatcatcttacat

SEQ ID NO: 97583 - DNA, 80 bp, synthetic construct
  misc_feature 1..80: note = Artificially Synthesized Probe
  source 1..80: mol_type = other DNA
tgaccatgtgcttatgacgacaaacaaatgaaaggcaaaacagtgggtcatctgtcatcctcacattatacatggtaatt

SEQ ID NO: 97584 - DNA, 80 bp, synthetic construct; identical to SEQ ID NO: 34658
  misc_feature 1..80: note = Artificially Synthesized Probe
  source 1..80: mol_type = other DNA

SEQ ID NO: 97585 - DNA, 80 bp, synthetic construct
  misc_feature 1..80: note = Artificially Synthesized Probe
  source 1..80: mol_type = other DNA
aacacctgcccaggaacagcatctccaccaatgaacacacaagaactctggctttgagccttcagaaccaaggaattctc

SEQ ID NO: 97586 - DNA, 80 bp, synthetic construct
  misc_feature 1..80: note = Artificially Synthesized Probe
  source 1..80: mol_type = other DNA
acatagctgtgattacacgtatgagctaccatgcccagctatgaactctgtttctaagcagcttatgtgaacttctccct

SEQ ID NO: 97587 - DNA, 80 bp, synthetic construct
  misc_feature 1..80: note = Artificially Synthesized Probe
  source 1..80: mol_type = other DNA
tacatatgagattcagacaaggtcagtcacctgcctagggtctggtagtcaggtagcagcagattcaagcctggctctat

SEQ ID NO: 97588 - DNA, 80 bp, synthetic construct; identical to SEQ ID NO: 34621
  misc_feature 1..80: note = Artificially Synthesized Probe
  source 1..80: mol_type = other DNA

SEQ ID NO: 97589 - DNA, 80 bp, synthetic construct; identical to SEQ ID NO: 34659
  misc_feature 1..80: note = Artificially Synthesized Probe
  source 1..80: mol_type = other DNA

SEQ ID NO: 97590 - DNA, 80 bp, synthetic construct
  misc_feature 1..80: note = Artificially Synthesized Probe
  source 1..80: mol_type = other DNA
ggtggctgttttgattcgtcagggagccagagtgactgtcaaatgatttcacaattctagcttcattcgtccctataact

SEQ ID NO: 97591 - DNA, 80 bp, synthetic construct
  misc_feature 1..80: note = Artificially Synthesized Probe
  source 1..80: mol_type = other DNA
aaatgtgaaaatccatcactacttcaccccctgacaaatccagatccagaagtatctacagtttggtttacatattttca

SEQ ID NO: 97592 - DNA, 80 bp, synthetic construct
  misc_feature 1..80: note = Artificially Synthesized Probe
  source 1..80: mol_type = other DNA
agtctcactctgttgcccaggctgctgtgcagtggagtgatcttggctcactgcaacctccgcctcccaggttcaagcaa

SEQ ID NO: 97593 - DNA, 80 bp, synthetic construct
  misc_feature 1..80: note = Artificially Synthesized Probe
  source 1..80: mol_type = other DNA
tcatcacttgaatgaactcctggcctcaagtgatttgcccgccttggcctcccaaagtgctgggatcacaggtgtgagcc

SEQ ID NO: 97594 - DNA, 80 bp, synthetic construct; identical to SEQ ID NO: 34660
  misc_feature 1..80: note = Artificially Synthesized Probe
  source 1..80: mol_type = other DNA

SEQ ID NO: 97595 - DNA, 80 bp, synthetic construct
  misc_feature 1..80: note = Artificially Synthesized Probe
  source 1..80: mol_type = other DNA
tttagtatccaaccaacaactttgcatgtagtaggtgtgtgacaaatatttgttaaagaaaatagaatctgaggctgggc

SEQ ID NO: 97596 - DNA, 80 bp, synthetic construct
  misc_feature 1..80: note = Artificially Synthesized Probe
  source 1..80: mol_type = other DNA
gacctgggtggggtgaggcaggagaatcgcttgaacccaggaggcagaggttgcagtgagccaagattgcaccgctgcac

SEQ ID NO: 97597 - DNA, 80 bp, synthetic construct
  misc_feature 1..80: note = Artificially Synthesized Probe
  source 1..80: mol_type = other DNA
cattctgccaaatctagagtagagggaattttacaggacagattacatggcttctttaacaaataagtgacaagaaaaaa

SEQ ID NO: 97598 - DNA, 80 bp, synthetic construct; identical to SEQ ID NO: 34661
  misc_feature 1..80: note = Artificially Synthesized Probe
  source 1..80: mol_type = other DNA

SEQ ID NO: 97599 - DNA, 80 bp, synthetic construct
  misc_feature 1..80: note = Artificially Synthesized Probe
  source 1..80: mol_type = other DNA
tactgagaaaatgtcttcagctatgtcctgaataggtatcttcagtaacattcaagagatatttctcattcccccacatg

SEQ ID NO: 97600 - DNA, 80 bp, synthetic construct
  misc_feature 1..80: note = Artificially Synthesized Probe
  source 1..80: mol_type = other DNA
caggcacaggtggctcatgcttgtaatcctagcactttgggaatccaaggtgggtggatcacttgaggccaggaatttca

SEQ ID NO: 97601 - DNA, 80 bp, synthetic construct
  misc_feature 1..80: note = Artificially Synthesized Probe
  source 1..80: mol_type = other DNA
ctgggcaacagggcgagactctgtctcaaataaaataaaataaaaatatagttattgttattatttccaggaaaaaaggt

SEQ ID NO: 97602 - DNA, 80 bp, synthetic construct; identical to SEQ ID NO: 34662
  misc_feature 1..80: note = Artificially Synthesized Probe
  source 1..80: mol_type = other DNA

SEQ ID NO: 97603 - DNA, 80 bp, synthetic construct
  misc_feature 1..80: note = Artificially Synthesized Probe
  source 1..80: mol_type = other DNA
agggtctcactctgtcacccaggctggagcacagtggcttgatcacggctcaatgcagccttgactacctgggctctagc

SEQ ID NO: 97604 - DNA, 80 bp, synthetic construct
  misc_feature 1..80: note = Artificially Synthesized Probe
  source 1..80: mol_type = other DNA
ccattcttctgcctcagcctcccaagtagctgggactacaggcacccgccaccgttcccggctaattttttgtattttta

SEQ ID NO: 97605 - DNA, 80 bp, synthetic construct
  misc_feature 1..80: note = Artificially Synthesized Probe
  source 1..80: mol_type = other DNA
tggtctcaaactcctgatttcaagcaatcctcctgccttggcctcccaaagtgctggggttacaggtgtgggccaccact

SEQ ID NO: 97606 - DNA, 80 bp, synthetic construct; identical to SEQ ID NO: 34663
  misc_feature 1..80: note = Artificially Synthesized Probe
  source 1..80: mol_type = other DNA

SEQ ID NO: 97607 - DNA, 80 bp, synthetic construct
  misc_feature 1..80: note = Artificially Synthesized Probe
  source 1..80: mol_type = other DNA
atcttggtggtgcacacctataatcccagctactcagaaggctgaggcaggagaatcacctgaaccagggagggagaatt

SEQ ID NO: 97608 - DNA, 80 bp, synthetic construct
  misc_feature 1..80: note = Artificially Synthesized Probe
  source 1..80: mol_type = other DNA
taaacatccaccacaggaaaaacactgtaccgtgtcctgtttacctatatatgaaggaaaatatttagattgcctggcag

SEQ ID NO: 97609 - DNA, 80 bp, synthetic construct
  misc_feature 1..80: note = Artificially Synthesized Probe
  source 1..80: mol_type = other DNA
ttacctatatatgaaggaaaatatttagattgcctggcagtggcaccagggggtatgtacacagagttgattgttttgtt

SEQ ID NO: 97610 - DNA, 80 bp, synthetic construct
  misc_feature 1..80: note = Artificially Synthesized Probe
  source 1..80: mol_type = other DNA
ccagagctggtatgttgctctttgagttctcagggtcaaagtgatagggaagccgactaacaccaggaccagctgaagta

SEQ ID NO: 97611 - DNA, 80 bp, synthetic construct
  misc_feature 1..80: note = Artificially Synthesized Probe
  source 1..80: mol_type = other DNA
actataggcaaacaatggcctctcagctgtccatcagaagaagctacagaaaagtaagttttctttattcagtcaacaaa

SEQ ID NO: 97612 - DNA, 80 bp, synthetic construct; identical to SEQ ID NO: 34664
  misc_feature 1..80: note = Artificially Synthesized Probe
  source 1..80: mol_type = other DNA

SEQ ID NO: 97613 - DNA, 80 bp, synthetic construct
  misc_feature 1..80: note = Artificially Synthesized Probe
  source 1..80: mol_type = other DNA
gttatttaatcttttcaggaccttaagaatacagccagtattttctaaggtccaagtttaaggagacgtaactttcttat

SEQ ID NO: 97614 - DNA, 80 bp, synthetic construct
  misc_feature 1..80: note = Artificially Synthesized Probe
  source 1..80: mol_type = other DNA
aataaaacctaaacttaaaacgccagagaaacacttcagagaataatttcaaggtacctgtaaagacaaagccagcctct

SEQ ID NO: 97615 - DNA, 80 bp, synthetic construct
  misc_feature 1..80: note = Artificially Synthesized Probe
  source 1..80: mol_type = other DNA
acccttatgtcgtacttggcaatgttaccaacatccttgttcaaaaggaacccacaatctggatgaaacctcttgtggtc

SEQ ID NO: 97616 - DNA, 80 bp, synthetic construct; identical to SEQ ID NO: 34665
  misc_feature 1..80: note = Artificially Synthesized Probe
  source 1..80: mol_type = other DNA

SEQ ID NO: 97617 - DNA, 80 bp, synthetic construct
  misc_feature 1..80: note = Artificially Synthesized Probe
  source 1..80: mol_type = other DNA
cagaggctttctgctgggtggccattttctgaaaaggaaaataaagcaggttgatcccttatagtaagatttttcttaga

SEQ ID NO: 97618 - DNA, 80 bp, synthetic construct
  misc_feature 1..80: note = Artificially Synthesized Probe
  source 1..80: mol_type = other DNA
tatttactaagcacctactatatatcaggtacagtgctagacattggggatctagcaaccaacaagacagacacccatct

SEQ ID NO: 97619 - DNA, 80 bp, synthetic construct
  misc_feature 1..80: note = Artificially Synthesized Probe
  source 1..80: mol_type = other DNA
tttgatcgaattactcagttttaaaaaatcattattttgtgttcatgttttaagtctcggtgctctggccgggcgcggtg

SEQ ID NO: 97620 - DNA, 80 bp, synthetic construct
  misc_feature 1..80: note = Artificially Synthesized Probe
  source 1..80: mol_type = other DNA
tcgggaggctgaggcaggagaatggcgtgaacccaggaggtggagcttgcagcgagccgagatcgcgccacggtactcca

SEQ ID NO: 97621 - DNA, 80 bp, synthetic construct; identical to SEQ ID NO: 34666
  misc_feature 1..80: note = Artificially Synthesized Probe
  source 1..80: mol_type = other DNA

SEQ ID NO: 97622 - DNA, 80 bp, synthetic construct
  misc_feature 1..80: note = Artificially Synthesized Probe
  source 1..80: mol_type = other DNA
agttctaaggaaggctttgacctaatgtagtgagaagaataaaacacaaataatttatagtaaatgaggatgagagagac

SEQ ID NO: 97623 - DNA, 80 bp, synthetic construct
  misc_feature 1..80: note = Artificially Synthesized Probe
  source 1..80: mol_type = other DNA
attttcgtgcctttttcctctgtcttgtagctagcaacttaattttggttgtttgggaatgtttctagtggctctagccc

SEQ ID NO: 97624 - DNA, 80 bp, synthetic construct
  misc_feature 1..80: note = Artificially Synthesized Probe
  source 1..80: mol_type = other DNA
ccaattgcggctaatttctgtatttttagtagacacaaggttttgccatgttggccagcttggtctccaactcctgacct

SEQ ID NO: 97625 - DNA, 80 bp, synthetic construct; identical to SEQ ID NO: 34667
  misc_feature 1..80: note = Artificially Synthesized Probe
  source 1..80: mol_type = other DNA

SEQ ID NO: 97626 - DNA, 80 bp, synthetic construct
  misc_feature 1..80: note = Artificially Synthesized Probe
  source 1..80: mol_type = other DNA
catctctacaaaaataaaaaaaattagccgggcatgatggtgggtgcctgtaatcccagctactcaggaggctgaggcgg

SEQ ID NO: 97627 - DNA, 80 bp, synthetic construct
  misc_feature 1..80: note = Artificially Synthesized Probe
  source 1..80: mol_type = other DNA
agcaataagcaagataatttaaatgtcctgtgggagcagcttaaatgtgcattggtggcctttccacacaaatgcaaatt

SEQ ID NO: 97628 - DNA, 80 bp, synthetic construct
  misc_feature 1..80: note = Artificially Synthesized Probe
  source 1..80: mol_type = other DNA
ctacaaaaaattttaaaaattagccagatgtgttggcacatgcctgtagtcccagctactcggggagcagaggcagaagg

SEQ ID NO: 97629 - DNA, 80 bp, synthetic construct
  misc_feature 1..80: note = Artificially Synthesized Probe
  source 1..80: mol_type = other DNA
cataattgaattatattgaaatataatccatcgggagcagtggctcatgcctgtaatctcagcactttaggaggccgagg

SEQ ID NO: 97630 - DNA, 80 bp, synthetic construct; identical to SEQ ID NO: 34668
  misc_feature 1..80: note = Artificially Synthesized Probe
  source 1..80: mol_type = other DNA

SEQ ID NO: 97631 - DNA, 80 bp, synthetic construct
  misc_feature 1..80: note = Artificially Synthesized Probe
  source 1..80: mol_type = other DNA
tccatctcaaaaaaagagaaagaaatataattcacacatcataaaattcacccatttaaaatgaacaactgagggtgcgg

SEQ ID NO: 97632 - DNA, 80 bp, synthetic construct
  misc_feature 1..80: note = Artificially Synthesized Probe
  source 1..80: mol_type = other DNA
gtagtcctaactacgtgggaggctgaggtggaaggatctcttgagcccaggaatatgaagctgcggggagctatgattgc

SEQ ID NO: 97633 - DNA, 80 bp, synthetic construct
  misc_feature 1..80: note = Artificially Synthesized Probe
  source 1..80: mol_type = other DNA
gctcacttcaagctccacctcccgggttcacaccattctcctgcctcagcctcccgagtagctgggactacaggtgcccg

SEQ ID NO: 97634 - DNA, 80 bp, synthetic construct
  misc_feature 1..80: note = Artificially Synthesized Probe
  source 1..80: mol_type = other DNA
tttttccagttttatttaggtataattgacaaaattatttatatttcagttgtacaacatggatgttcaacatgttttgg

SEQ ID NO: 97635 - DNA, 80 bp, synthetic construct; identical to SEQ ID NO: 34669
  misc_feature 1..80: note = Artificially Synthesized Probe
  source 1..80: mol_type = other DNA

SEQ ID NO: 97636 - DNA, 80 bp, synthetic construct
  misc_feature 1..80: note = Artificially Synthesized Probe
  source 1..80: mol_type = other DNA
gaacaacaaaaaaaggaagcgaaattcatccatgttgtattgttttagtacttcatattccttttcattgtcaaataata

SEQ ID NO: 97637 - DNA, 80 bp, synthetic construct
  misc_feature 1..80: note = Artificially Synthesized Probe
  source 1..80: mol_type = other DNA
ttttttttcttgagacagggtcttgctctgtcacctaggctggagtgcagtggcttgatcaccatccattgcagcctcaa

SEQ ID NO: 97638 - DNA, 80 bp, synthetic construct
  misc_feature 1..80: note = Artificially Synthesized Probe
  source 1..80: mol_type = other DNA
ctcccacctcagcctcctaaagtgctgggattacaggcctgagccaccacacctggcccatttttcactcttaaacttac

SEQ ID NO: 97639 - DNA, 80 bp, synthetic construct; identical to SEQ ID NO: 34670
  misc_feature 1..80: note = Artificially Synthesized Probe
  source 1..80: mol_type = other DNA

SEQ ID NO: 97640 - DNA, 80 bp, synthetic construct
  misc_feature 1..80: note = Artificially Synthesized Probe
  source 1..80: mol_type = other DNA
gctctgttcacccaggctggagtgcagtggcaaaattttgactcaccgcaacctctgcttcccaggttcaagcaattctc

SEQ ID NO: 97641 - DNA, 80 bp, synthetic construct
  misc_feature 1..80: note = Artificially Synthesized Probe
  source 1..80: mol_type = other DNA
gattacaggtgtgagccaccatgcccagccctttccttttttttttttttttttttataggagacaagggctcactctgt

SEQ ID NO: 97642 - DNA, 80 bp, synthetic construct
  misc_feature 1..80: note = Artificially Synthesized Probe
  source 1..80: mol_type = other DNA
ttcatcattcagcacaatttggagcaaaggaactagtaagtcttcaacaggctttcacttcatcctgctcccccagtagt

SEQ ID NO: 97643 - DNA, 80 bp, synthetic construct; identical to SEQ ID NO: 34671
  misc_feature 1..80: note = Artificially Synthesized Probe
  source 1..80: mol_type = other DNA

SEQ ID NO: 97644 - DNA, 80 bp, synthetic construct
  misc_feature 1..80: note = Artificially Synthesized Probe
  source 1..80: mol_type = other DNA
catgtatatccaacccagcagtggttctgcaggaagctctgtcagtccacaggcaacttcactcttgtgtagttccctgt

SEQ ID NO: 97645 - DNA, 80 bp, synthetic construct; identical to SEQ ID NO: 34622
  misc_feature 1..80: note = Artificially Synthesized Probe
  source 1..80: mol_type = other DNA

SEQ ID NO: 97646 - DNA, 80 bp, synthetic construct
  misc_feature 1..80: note = Artificially Synthesized Probe
  source 1..80: mol_type = other DNA
ttttttagttactttcatttttgccaaagcagcctaaccagccagggaactgtattcttggctgacttcctctgtgtctg

SEQ ID NO: 97647 - DNA, 80 bp, synthetic construct
  misc_feature 1..80: note = Artificially Synthesized Probe
  source 1..80: mol_type = other DNA
tccccacttttcatctttctcccaaacaaagccttagctatcatttaaattataaagtaaaaaactggggggccaggcgc

SEQ ID NO: 97648 - DNA, 80 bp, synthetic construct
  misc_feature 1..80: note = Artificially Synthesized Probe
  source 1..80: mol_type = other DNA
acaaattagccgggcgtggtggtgcatgcctgtaatcccagctactcgggtggctgaggcacaagaactgtttgaaccca

SEQ ID NO: 97649 - DNA, 80 bp, synthetic construct; identical to SEQ ID NO: 34672
  misc_feature 1..80: note = Artificially Synthesized Probe
  source 1..80: mol_type = other DNA

SEQ ID NO: 97650 - DNA, 80 bp, synthetic construct
  misc_feature 1..80: note = Artificially Synthesized Probe
  source 1..80: mol_type = other DNA
aagtaatgatcctattcacagtaccctcttcatcaattacacaggtttggatcattgaaaagacttagaagactccgcat

SEQ ID NO: 97651 - DNA, 80 bp, synthetic construct
  misc_feature 1..80: note = Artificially Synthesized Probe
  source 1..80: mol_type = other DNA
agctagatgatacatgcaagacaccttggtctcaagagaactgtaacctcatctgaggctcttttatactcctctgatca

SEQ ID NO: 97652 - DNA, 80 bp, synthetic construct
  misc_feature 1..80: note = Artificially Synthesized Probe
  source 1..80: mol_type = other DNA
caaaaagaaagaaagaagcaagaaacaggctgctccctggtctgtctcccaccccagcacaggactctattaatcactgg

SEQ ID NO: 97653 - DNA, 80 bp, synthetic construct
  misc_feature 1..80: note = Artificially Synthesized Probe
  source 1..80: mol_type = other DNA
tcaaatatatctggttctctttaactccaggctatgacacaagtgattacctctgtttgaaatgatgtctcaattcctcc

SEQ ID NO: 97654 - DNA, 80 bp, synthetic construct; identical to SEQ ID NO: 34673
  misc_feature 1..80: note = Artificially Synthesized Probe
  source 1..80: mol_type = other DNA

SEQ ID NO: 97655 - DNA, 80 bp, synthetic construct
  misc_feature 1..80: note = Artificially Synthesized Probe
  source 1..80: mol_type = other DNA
ttaggtgtggaagaaaagcacctttgccagggatagtaatttacttacctgaggtttatccacagttctagtctaataga

SEQ ID NO: 97656 - DNA, 80 bp, synthetic construct
  misc_feature 1..80: note = Artificially Synthesized Probe
  source 1..80: mol_type = other DNA
gtcagagactttaccagtaaatgctctaaggtcttgagtcaacaggatttaatcaggacccaaaaggagtaatgaaacct

SEQ ID NO: 97657 - DNA, 80 bp, synthetic construct; identical to SEQ ID NO: 34674
  misc_feature 1..80: note = Artificially Synthesized Probe
  source 1..80: mol_type = other DNA

SEQ ID NO: 97658 - DNA, 80 bp, synthetic construct
  misc_feature 1..80: note = Artificially Synthesized Probe
  source 1..80: mol_type = other DNA
cttctattatttatttgataacttcctactgtctgttactctctttttactcttttggtattcccactattcaggtgagt

SEQ ID NO: 97659 - DNA, 80 bp, synthetic construct
  misc_feature 1..80: note = Artificially Synthesized Probe
  source 1..80: mol_type = other DNA
gactacagacgtgtgctaccatgcacagctgattttatattttattttgtgtagagatgggggtctcaccttgttgccca

SEQ ID NO: 97660 - DNA, 80 bp, synthetic construct
  misc_feature 1..80: note = Artificially Synthesized Probe
  source 1..80: mol_type = other DNA
ttcttttctctgtgccttattttcatagtgtcaatttttttaaccagtgccatcttcctgaatctgctgtacgatactaa

SEQ ID NO: 97661 - DNA, 80 bp, synthetic construct; identical to SEQ ID NO: 34675
  misc_feature 1..80: note = Artificially Synthesized Probe
  source 1..80: mol_type = other DNA

SEQ ID NO: 97662 - DNA, 80 bp, synthetic construct
  misc_feature 1..80: note = Artificially Synthesized Probe
  source 1..80: mol_type = other DNA
aaaccctgtgtttactaaaaatacaaaattagccaggtgtggtggcgttcacctgtaatcctagctacttgggaggctga

SEQ ID NO: 97663 - DNA, 80 bp, synthetic construct
  misc_feature 1..80: note = Artificially Synthesized Probe
  source 1..80: mol_type = other DNA
gtgatcctctcatctcagccccacaatagctgggactacaggcatgcaccaccacacctggctaatttttgtatttctag

SEQ ID NO: 97664 - DNA, 80 bp, synthetic construct
  misc_feature 1..80: note = Artificially Synthesized Probe
  source 1..80: mol_type = other DNA
ttacttgtaaagacaaagctagcagccgaaaacttacttggaacgttccttggacataaaatcaccatttcttaaaagga

SEQ ID NO: 97665 - DNA, 80 bp, synthetic construct
  misc_feature 1..80: note = Artificially Synthesized Probe
  source 1..80: mol_type = other DNA
cttgtgtgtcaaatattctgatcatgaggtagagagagctgactgtcccgtgcacgggcttccaattagtccctcaattt

SEQ ID NO: 97666 - DNA, 80 bp, synthetic construct
  misc_feature 1..80: note = Artificially Synthesized Probe
  source 1..80: mol_type = other DNA
tccttgagctgcttccttcctgactactagtccatatagtttctactttccaagaatgtgttaaaatattctatgtgcta

SEQ ID NO: 97667 - DNA, 80 bp, synthetic construct; identical to SEQ ID NO: 34676
  misc_feature 1..80: note = Artificially Synthesized Probe
  source 1..80: mol_type = other DNA

SEQ ID NO: 97668 - DNA, 80 bp, synthetic construct
  misc_feature 1..80: note = Artificially Synthesized Probe
  source 1..80: mol_type = other DNA
gttcactacaaatcatgggtatctgcaaccccctcaggttcgataatttctttcttgggggttgggggagtttaggagca

SEQ ID NO: 97669 - DNA, 80 bp, synthetic construct
  misc_feature 1..80: note = Artificially Synthesized Probe
  source 1..80: mol_type = other DNA
aggtgtgacgtttacatagcacgcggggaaggttgggcgccccaccctaatcttactatgacaaagggcagagtgacctt

SEQ ID NO: 97670 - DNA, 80 bp, synthetic construct; identical to SEQ ID NO: 34677
  misc_feature 1..80: note = Artificially Synthesized Probe
  source 1..80: mol_type = other DNA

SEQ ID NO: 97671 - DNA, 80 bp, synthetic construct
  misc_feature 1..80: note = Artificially Synthesized Probe
  source 1..80: mol_type = other DNA
aaaggaaactggttcaaacatggccaatatgcccagcagcccgtgggtattggggggttctccatgttctccccagcaag

SEQ ID NO: 97672 - DNA, 80 bp, synthetic construct
  misc_feature 1..80: note = Artificially Synthesized Probe
  source 1..80: mol_type = other DNA
agagttgaggtccgcccctttactcacctttgcaatgaatgcaccttggaatcccagacgaagtccccaatatgaagtgg

SEQ ID NO: 97673 - DNA, 80 bp, synthetic construct
  misc_feature 1..80: note = Artificially Synthesized Probe
  source 1..80: mol_type = other DNA
aaatcccaggttcgatcgtttcttataatggctcacagaactcagaaactttacttatgtttactgctttattataaagg

SEQ ID NO: 97674 - DNA, 80 bp, synthetic construct
  misc_feature 1..80: note = Artificially Synthesized Probe
  source 1..80: mol_type = other DNA
tacttttctgtgtgtatattcatcttcagttttaaaaaggagtacttaggagagtatgtggccaggtgtctaaaacacca

SEQ ID NO: 97675 - DNA, 80 bp, synthetic construct; identical to SEQ ID NO: 34678
  misc_feature 1..80: note = Artificially Synthesized Probe
  source 1..80: mol_type = other DNA

SEQ ID NO: 97676 - DNA, 80 bp, synthetic construct
  misc_feature 1..80: note = Artificially Synthesized Probe
  source 1..80: mol_type = other DNA
tagaagctcttgtgtcaggaaccaagaccaagtattctaataaaagatgtttctatcacccctgtcactcaggaaattac

SEQ ID NO: 97677 - DNA, 80 bp, synthetic construct
  misc_feature 1..80: note = Artificially Synthesized Probe
  source 1..80: mol_type = other DNA
catctccatattacagataaggaaactcaagcacataggggttaaggttaaccagtgatctggctagtctgtacttttac

SEQ ID NO: 97678 - DNA, 80 bp, synthetic construct; identical to SEQ ID NO: 34623
  misc_feature 1..80: note = Artificially Synthesized Probe
  source 1..80: mol_type = other DNA

SEQ ID NO: 97679 - DNA, 80 bp, synthetic construct
  misc_feature 1..80: note = Artificially Synthesized Probe
  source 1..80: mol_type = other DNA
gatcagtttggccactcgataaattccatccccagtaggaaggatcaattcttccaggttactaagagaacctaaaatgt

SEQ ID NO: 97680 - DNA, 80 bp, synthetic construct
  misc_feature 1..80: note = Artificially Synthesized Probe
  source 1..80: mol_type = other DNA
tccaccacaccctaccaaccaatctctcctgcactaaagtccaggctgccaattaaatctccattcctcgtttagaatga

SEQ ID NO: 97681 - DNA, 80 bp, synthetic construct
  misc_feature 1..80: note = Artificially Synthesized Probe
  source 1..80: mol_type = other DNA
actccttcctagcatggcacacgatagatcatttgatcattagaaaggtaacttctgaggcctcacacatggaaatatat

SEQ ID NO: 97682 - DNA, 80 bp, synthetic construct; identical to SEQ ID NO: 34624
  misc_feature 1..80: note = Artificially Synthesized Probe
  source 1..80: mol_type = other DNA

SEQ ID NO: 97683 - DNA, 80 bp, synthetic construct
  misc_feature 1..80: note = Artificially Synthesized Probe
  source 1..80: mol_type = other DNA
ctctttctagcctcacctttcaatatttgtaagttccttttccaactgtgaggaaacgtggctctcattatactcactgt

SEQ ID NO: 97684 - DNA, 80 bp, synthetic construct
  misc_feature 1..80: note = Artificially Synthesized Probe
  source 1..80: mol_type = other DNA
gcccagcaaatttttgtattttttagtagagatggggtttcaccatgttggccaggctggtcttgaactcctgacctcag

SEQ ID NO: 97685 - DNA, 80 bp, synthetic construct
  misc_feature 1..80: note = Artificially Synthesized Probe
  source 1..80: mol_type = other DNA
cttggctcactgcaacctctgcctcccgggttcaagcaagtcttgcgtctcagccgccctagtggctgggactacaggca

SEQ ID NO: 97686 - DNA, 80 bp, synthetic construct
  misc_feature 1..80: note = Artificially Synthesized Probe
  source 1..80: mol_type = other DNA
agctgcctccaaggaagggaagaggaggatcctggcaatctttatgtacgcttatgtttgagaagcactttgaatagcac

SEQ ID NO: 97687 - DNA, 80 bp, synthetic construct; identical to SEQ ID NO: 34625
  misc_feature 1..80: note = Artificially Synthesized Probe
  source 1..80: mol_type = other DNA

SEQ ID NO: 97688 - DNA, 80 bp, synthetic construct
  misc_feature 1..80: note = Artificially Synthesized Probe
  source 1..80: mol_type = other DNA
ctagtaacctttgaaactatgaggtcttatatttggaacagatacctgacaattatattgcatagtgctataatgaccaa

SEQ ID NO: 97689 - DNA, 80 bp, synthetic construct
  misc_feature 1..80: note = Artificially Synthesized Probe
  source 1..80: mol_type = other DNA
atatgtactctaagaagtcattctgctttgaatgagatcaagtctgcaggtaaaactgtagtgaaggcatttggtgggta

SEQ ID NO: 97690 - DNA, 80 bp, synthetic construct
  misc_feature 1..80: note = Artificially Synthesized Probe
  source 1..80: mol_type = other DNA
gatgtttcctcatcaggaaattgctggccttcaagatttaatatcttcagagaaataaaatttggcaaactggcaactat

SEQ ID NO: 97691 - DNA, 80 bp, synthetic construct
  misc_feature 1..80: note = Artificially Synthesized Probe
  source 1..80: mol_type = other DNA
tagaaatgttgttaaaattctagaaatttcaaatccaactgagcgtaaaggtaaaaaagaaaattctggaaacacctata

SEQ ID NO: 97692 - DNA, 80 bp, synthetic construct; identical to SEQ ID NO: 34626
  misc_feature 1..80: note = Artificially Synthesized Probe
  source 1..80: mol_type = other DNA

SEQ ID NO: 97693 - DNA, 80 bp, synthetic construct
  misc_feature 1..80: note = Artificially Synthesized Probe
  source 1..80: mol_type = other DNA
tattataactcttaccaaatgggacggcttgaaaaaatgaatccgaaaacttaatttctgtgagtttcttacaggaaaca

SEQ ID NO: 97694 - DNA, 80 bp, synthetic construct
  misc_feature 1..80: note = Artificially Synthesized Probe
  source 1..80: mol_type = other DNA
ttattttgtttcaataatacttaattaaaaccaggtaccacgatctcatgatctaagaatcaggtcactgggcttgggtt

SEQ ID NO: 97695 - DNA, 80 bp, synthetic construct; identical to SEQ ID NO: 34627
  misc_feature 1..80: note = Artificially Synthesized Probe
  source 1..80: mol_type = other DNA

SEQ ID NO: 97696 - DNA, 80 bp, synthetic construct
  misc_feature 1..80: note = Artificially Synthesized Probe
  source 1..80: mol_type = other DNA
ggcaggcagctgtaatcccagctactcgggaggccgaggcaggagaatcgcttgaacccaggaggcagaggttgcagtga

SEQ ID NO: 97697 - DNA, 80 bp, synthetic construct
  misc_feature 1..80: note = Artificially Synthesized Probe
  source 1..80: mol_type = other DNA
tcacctgaggtcaggagtttgagactggcctggccaacatggtgaaaccccgtctctactaaaaatattaaaaaattagc

SEQ ID NO: 97698 - DNA, 80 bp, synthetic construct; identical to SEQ ID NO: 34617
  misc_feature 1..80: note = Artificially Synthesized Probe
  source 1..80: mol_type = other DNA

SEQ ID NO: 97699 - DNA, 80 bp, synthetic construct
  misc_feature 1..80: note = Artificially Synthesized Probe
  source 1..80: mol_type = other DNA
acataaaaggaatgacaactctgaagcaaaacctaaatttgttgcaaaatttgctgacaaatataactaccacctccagc

SEQ ID NO: 97700 - DNA, 80 bp, synthetic construct; identical to SEQ ID NO: 34679
  misc_feature 1..80: note = Artificially Synthesized Probe
  source 1..80: mol_type = other DNA

SEQ ID NO: 97701 - DNA, 80 bp, synthetic construct; identical to SEQ ID NO: 34680
  misc_feature 1..80: note = Artificially Synthesized Probe
  source 1..80: mol_type = other DNA

SEQ ID NO: 97702 - DNA, 80 bp, synthetic construct
  misc_feature 1..80: note = Artificially Synthesized Probe
  source 1..80: mol_type = other DNA
ctgctccccgccccgcctcagtcaaggacacctgtgctcaccttctgcttgggagctcctagggagccccaccacttact

SEQ ID NO: 97703 - DNA, 80 bp, synthetic construct
  misc_feature 1..80: note = Artificially Synthesized Probe
  source 1..80: mol_type = other DNA
caccaggcacacctcctccccgggaaactcactgggctgcagcagctcggaagaccttgcggatctcctgagcctgctgt

SEQ ID NO: 97704 - DNA, 80 bp, synthetic construct
  misc_feature 1..80: note = Artificially Synthesized Probe
  source 1..80: mol_type = other DNA
gctcacctccacacgctgtaggtgtccaggaggccctggaaggcccggggaaaagccaaggcataggccacaaaggctgc

SEQ ID NO: 97705 - DNA, 80 bp, synthetic construct; identical to SEQ ID NO: 34681
  misc_feature 1..80: note = Artificially Synthesized Probe
  source 1..80: mol_type = other DNA

SEQ ID NO: 97706 - DNA, 80 bp, synthetic construct
  misc_feature 1..80: note = Artificially Synthesized Probe
  source 1..80: mol_type = other DNA
ccggccaccggcacacctcgcagctggcccgctagcacgttgctgctgctgtcgaagcctggggaggaaggcggtgggat

SEQ ID NO: 97707 - DNA, 80 bp, synthetic construct
  misc_feature 1..80: note = Artificially Synthesized Probe
  source 1..80: mol_type = other DNA
gtcggctcagggacagctgggccaaggctctagactctgccagggatgggagcggctcacacagctgcagggaggaggta

SEQ ID NO: 97708 - DNA, 80 bp, synthetic construct
  misc_feature 1..80: note = Artificially Synthesized Probe
  source 1..80: mol_type = other DNA
tgcgatcaagcgaagccgcgctgcgttggtggccaccaggctgtggggagccaagagtcagggggtcccagggtgaggat

SEQ ID NO: 97709 - DNA, 80 bp, synthetic construct
  misc_feature 1..80: note = Artificially Synthesized Probe
  source 1..80: mol_type = other DNA
cccggcgctgggggcccatcccatgcccacgctccctgccagtggcccgcagcccacctggcgtagctgaccaggcagag

SEQ ID NO: 97710 - DNA, 80 bp, synthetic construct; identical to SEQ ID NO: 34682
  misc_feature 1..80: note = Artificially Synthesized Probe
  source 1..80: mol_type = other DNA

SEQ ID NO: 97711 - DNA, 80 bp, synthetic construct
  misc_feature 1..80: note = Artificially Synthesized Probe
  source 1..80: mol_type = other DNA
gacgggggactaccggcgtcccgcaggcggaaggcgcgcaggaagcgcacacagtcgcgcaagccggcggccaaggcgaa

SEQ ID NO: 97712 - DNA, 80 bp, synthetic construct
  misc_feature 1..80: note = Artificially Synthesized Probe
  source 1..80: mol_type = other DNA
ctgctcccgacgtccggactccgccccgccccgaccccgtgacgcgccccggcctatggcgcactccctgtggggcttat

SEQ ID NO: 97713 - DNA, 80 bp, synthetic construct
  misc_feature 1..80: note = Artificially Synthesized Probe
  source 1..80: mol_type = other DNA
ttggagcgcagcccggtcttggtcaccagaggtgcccccagtcgctcgtgtctctgccctttggccgggcaatgaggtgc

SEQ ID NO: 97714 - DNA, 80 bp, synthetic construct
  misc_feature 1..80: note = Artificially Synthesized Probe
  source 1..80: mol_type = other DNA
ggccacaccctcagctcctgcccagcctgtggcactggctcttctgctaactgcagcatgtccatgagtggagaccctgt

SEQ ID NO: 97715 - DNA, 80 bp, synthetic construct
  misc_feature 1..80: note = Artificially Synthesized Probe
  source 1..80: mol_type = other DNA
cccccacggccaccagctgcaggaagagggcgttgagctggctggtccttatcccccacccagcaccatccctcagacct

SEQ ID NO: 97716 - DNA, 80 bp, synthetic construct
  misc_feature 1..80: note = Artificially Synthesized Probe
  source 1..80: mol_type = other DNA
aagggggtggcactgccctgggtggggaaggaggtggcactgccctgggtggggaagggggtggcagtgccctgggtggg

SEQ ID NO: 97717 - DNA, 80 bp, synthetic construct
  misc_feature 1..80: note = Artificially Synthesized Probe
  source 1..80: mol_type = other DNA
caatttacttctgacctaaatgcttcagaaagtatcccagaaccttcaaagcttgaacccaaatactttcacttttagaa

SEQ ID NO: 97718 - DNA, 80 bp, synthetic construct
  misc_feature 1..80: note = Artificially Synthesized Probe
  source 1..80: mol_type = other DNA
atgagagaatagtaaagcctaaagtggtaagatgtaaaatattgagaatctactgagggacatatgagaattctttgtgc

SEQ ID NO: 97719 - DNA, 80 bp, synthetic construct
  misc_feature 1..80: note = Artificially Synthesized Probe
  source 1..80: mol_type = other DNA
aagaatgagatctctgagtcagatagatatgatccaaattttggtgctggttggtttgcaccaactttcagtttcctaat

SEQ ID NO: 97720 - DNA, 80 bp, synthetic construct
  misc_feature 1..80: note = Artificially Synthesized Probe
  source 1..80: mol_type = other DNA
attttaggcattaccaacttaaaagcaatggaagaagccatagaaggacaaaataacagatctgaatataaataacttct

SEQ ID NO: 97721 - DNA, 80 bp, synthetic construct
  misc_feature 1..80: note = Artificially Synthesized Probe
  source 1..80: mol_type = other DNA
aggcgtggtggcaggggcctgtagtcccagctactcgggaggctgaggtagcagaatggcatgaacccgggaggcagagc

SEQ ID NO: 97722 - DNA, 80 bp, synthetic construct
  misc_feature 1..80: note = Artificially Synthesized Probe
  source 1..80: mol_type = other DNA
tatttgtttccataaagtagaagggacaatgacaactatatacactggcaactaattctagaatataaggttctttaggg

SEQ ID NO: 97723 - DNA, 80 bp, synthetic construct; identical to SEQ ID NO: 34694
  misc_feature 1..80: note = Artificially Synthesized Probe
  source 1..80: mol_type = other DNA

SEQ ID NO: 97724 - DNA, 80 bp, synthetic construct
  misc_feature 1..80: note = Artificially Synthesized Probe
  source 1..80: mol_type = other DNA
ttgagaaaatctcaatttataattaagaagtttaaatatttttatatatgtatgcaatgagaaacactggaagaaaacat

SEQ ID NO: 97725 - DNA, 80 bp, synthetic construct
  misc_feature 1..80: note = Artificially Synthesized Probe
  source 1..80: mol_type = other DNA
tcacaacaaaggataaatctggaataaaaatatgaaaacatgtaacaatctgaaaatgttgaaagcaactgatgtactag

SEQ ID NO: 97726 - DNA, 80 bp, synthetic construct
  misc_feature 1..80: note = Artificially Synthesized Probe
  source 1..80: mol_type = other DNA
acaattctcaatatgtcagtttgctacataagaaagaaaacatttcagtgatttcatagtcatgtacacggctcacactt

SEQ ID NO: 97727 - DNA, 80 bp, synthetic construct; identical to SEQ ID NO: 34695
  misc_feature 1..80: note = Artificially Synthesized Probe
  source 1..80: mol_type = other DNA

SEQ ID NO: 97728 - DNA, 80 bp, synthetic construct
  misc_feature 1..80: note = Artificially Synthesized Probe
  source 1..80: mol_type = other DNA
taaaaatatatagccaggcgcggtggctcaggcctgtaatcccagcactttgggaggctgaagcgggtgcatcacctgag

SEQ ID NO: 97729 - DNA, 80 bp, synthetic construct
  misc_feature 1..80: note = Artificially Synthesized Probe
  source 1..80: mol_type = other DNA
agccgagatcgcgccattgctctccagcctgggcaatgagagtgaaactccgtctcaaaaaaaaaaaaaaaaaaaaaaaa

SEQ ID NO: 97730 - DNA, 80 bp, synthetic construct
  misc_feature 1..80: note = Artificially Synthesized Probe
  source 1..80: mol_type = other DNA
aaaagtcaactaaagctcttaaagtatatttcagtagctttcagtgtataaatttcttcatagcaacagaacatcagtca

SEQ ID NO: 97731 - DNA, 80 bp, synthetic construct; identical to SEQ ID NO: 34696
  misc_feature 1..80: note = Artificially Synthesized Probe
  source 1..80: mol_type = other DNA

SEQ ID NO: 97732 - DNA, 80 bp, synthetic construct
  misc_feature 1..80: note = Artificially Synthesized Probe
  source 1..80: mol_type = other DNA
gtattatttacatgtaatgatataaattctgccttcaaaatgaaagcaattttccagcaaaatgattacagtcataatac

SEQ ID NO: 97733 - DNA, 80 bp, synthetic construct
  misc_feature 1..80: note = Artificially Synthesized Probe
  source 1..80: mol_type = other DNA
atagcttaaacataatgtcattatttttagttttaccaacagcttatactattaaaaaagaaaagatgttattggtactg

SEQ ID NO: 97734 - DNA, 80 bp, synthetic construct
  misc_feature 1..80: note = Artificially Synthesized Probe
  source 1..80: mol_type = other DNA
tgatctcctgatactgcctaacacaattgctgcagattaactataaaataagctaaaatgttcaaatgttttccactgga

SEQ ID NO: 97735 - DNA, 80 bp, synthetic construct
  misc_feature 1..80: note = Artificially Synthesized Probe
  source 1..80: mol_type = other DNA
atcaaggtattttgcaaaagataaaaattgctccaagacaggtctagttatatgaactcttgatgactaagaaagaaaac

SEQ ID NO: 97736 - DNA, 80 bp, synthetic construct
  misc_feature 1..80: note = Artificially Synthesized Probe
  source 1..80: mol_type = other DNA
tatttctttgagtgatagcttgttatttgaagcctaatctaagacaattacagataaataattcaagttaaataatgcta

SEQ ID NO: 97737 - DNA, 80 bp, synthetic construct; identical to SEQ ID NO: 34697
  misc_feature 1..80: note = Artificially Synthesized Probe
  source 1..80: mol_type = other DNA

SEQ ID NO: 97738 - DNA, 80 bp, synthetic construct
  misc_feature 1..80: note = Artificially Synthesized Probe
  source 1..80: mol_type = other DNA
acagtagccagaagccctatgtggcaactgagctgctggaatgttgcaattgaaagtgagatgtgttgtgagtatgaaaa

SEQ ID NO: 97739 - DNA, 80 bp, synthetic construct
  misc_feature 1..80: note = Artificially Synthesized Probe
  source 1..80: mol_type = other DNA
acctgaggtttgaattgtattttaattggacaatgctatcctagaatacaatttcagataaaaatgctatattaaaaaat

SEQ ID NO: 97740 - DNA, 80 bp, synthetic construct
  misc_feature 1..80: note = Artificially Synthesized Probe
  source 1..80: mol_type = other DNA
cacaacacatctttccttcctattcttcactgactgaagtctgaatataagtttaagacgatcaaaatttaaaagggatg

SEQ ID NO: 97741 - DNA, 80 bp, synthetic construct; identical to SEQ ID NO: 34698
  misc_feature 1..80: note = Artificially Synthesized Probe
  source 1..80: mol_type = other DNA

SEQ ID NO: 97742 - DNA, 80 bp, synthetic construct
  misc_feature 1..80: note = Artificially Synthesized Probe
  source 1..80: mol_type = other DNA
gtcatttagaaaatatacatgctgattgctcactgtcagtcaaatacgctccctggcactgtcaaaaaagcagctaacaa

SEQ ID NO: 97743 - DNA, 80 bp, synthetic construct
  misc_feature 1..80: note = Artificially Synthesized Probe
  source 1..80: mol_type = other DNA
aagaaactatggagcagataaaacatttgtagaagaatggtgaacaggttttactaagaaggggcatttaattggttcaa

SEQ ID NO: 97744 - DNA, 80 bp, synthetic construct; identical to SEQ ID NO: 34699
  misc_feature 1..80: note = Artificially Synthesized Probe
  source 1..80: mol_type = other DNA

SEQ ID NO: 97745 - DNA, 80 bp, synthetic construct; identical to SEQ ID NO: 34684
  misc_feature 1..80: note = Artificially Synthesized Probe
  source 1..80: mol_type = other DNA

SEQ ID NO: 97746 - DNA, 80 bp, synthetic construct
  misc_feature 1..80: note = Artificially Synthesized Probe
  source 1..80: mol_type = other DNA
tattcagtagtaatgatttcaagaacatgatctgataacattctactctcacacttaaaactctaaaataaaatacagtc

SEQ ID NO: 97747 - DNA, 80 bp, synthetic construct
  misc_feature 1..80: note = Artificially Synthesized Probe
  source 1..80: mol_type = other DNA
cttggaccatgatattaaaaggtatactaaaagcatcacaaggccttccacattacttaaaaaaaaatgggggggcctgc

SEQ ID NO: 97748 - DNA, 80 bp, synthetic construct
  misc_feature 1..80: note = Artificially Synthesized Probe
  source 1..80: mol_type = other DNA
atagtgtataaatgtataaatgaatattctcttcaacagcatgttacctttacctcttagaagtacttattcctccttcc

SEQ ID NO: 97749 - DNA, 80 bp, synthetic construct; identical to SEQ ID NO: 34700
  misc_feature 1..80: note = Artificially Synthesized Probe
  source 1..80: mol_type = other DNA

SEQ ID NO: 97750 - DNA, 80 bp, synthetic construct
  misc_feature 1..80: note = Artificially Synthesized Probe
  source 1..80: mol_type = other DNA
atagttataaatctgtaacctttagatggaacaatttaaatctcatagaaaatgtaagccctggaatttgatctatatat

SEQ ID NO: 97751 - DNA, 80 bp, synthetic construct
  misc_feature 1..80: note = Artificially Synthesized Probe
  source 1..80: mol_type = other DNA
cagaattaactaaaccaaataggagcactggcggttacaaagagaaacttctgttcaataaagagagattgttccaacat

SEQ ID NO: 97752 - DNA, 80 bp, synthetic construct
  misc_feature 1..80: note = Artificially Synthesized Probe
  source 1..80: mol_type = other DNA
attctgctcctcccaggactccaaggttgtgctccaaatagcctaatccaaccagattaatcatttgttgttgttttggt

SEQ ID NO: 97753 - DNA, 80 bp, synthetic construct
  misc_feature 1..80: note = Artificially Synthesized Probe
  source 1..80: mol_type = other DNA
tttcttcacctggatgtgaaggtctatagcactaattctctctggcagccttgtgacctcaaacagtatcagctttagca

SEQ ID NO: 97754 - DNA, 80 bp, synthetic construct; identical to SEQ ID NO: 34701
  misc_feature 1..80: note = Artificially Synthesized Probe
  source 1..80: mol_type = other DNA

SEQ ID NO: 97755 - DNA, 80 bp, synthetic construct
  misc_feature 1..80: note = Artificially Synthesized Probe
  source 1..80: mol_type = other DNA
aatcttcccaagctccctgctttcaactttttgaatacccttgcattaaactcttctcaaaaacctaggttgagtacacc

SEQ ID NO: 97756 - DNA, 80 bp, synthetic construct
  misc_feature 1..80: note = Artificially Synthesized Probe
  source 1..80: mol_type = other DNA
aaaccccgtcgctgctagacacaaaaaaaattagtcgggtgtggtggcacatggctgtagtgccagctactggggacgct

SEQ ID NO: 97757 - DNA, 80 bp, synthetic construct
  misc_feature 1..80: note = Artificially Synthesized Probe
  source 1..80: mol_type = other DNA
caagatcatattttggcaaaacaaaacaaaaacaccttaaaattttttcatggaacagtaaaattgttattaataaaagg

SEQ ID NO: 97758 - DNA, 80 bp, synthetic construct
  misc_feature 1..80: note = Artificially Synthesized Probe
  source 1..80: mol_type = other DNA
acacaatatgagcattcctctgagaaaggtaaaaaagttactgtttcttaggtaatcagacaagcatgcaaggacatttc

SEQ ID NO: 97759 - DNA, 80 bp, synthetic construct; identical to SEQ ID NO: 34702
  misc_feature 1..80: note = Artificially Synthesized Probe
  source 1..80: mol_type = other DNA

SEQ ID NO: 97760 - DNA, 80 bp, synthetic construct
  misc_feature 1..80: note = Artificially Synthesized Probe
  source 1..80: mol_type = other DNA
aaatgcaaaagtccttgggtaaattcttatcattttagttcttaagggaaaggcaaaaagacctttgcctaaaacagaga

SEQ ID NO: 97761 - DNA, 80 bp, synthetic construct
  misc_feature 1..80: note = Artificially Synthesized Probe
  source 1..80: mol_type = other DNA
aacggactgtaggtaaccaatggtgaaggacgatcatgatttgaactaaaatggtatcaacggacatagtaaggagttga

SEQ ID NO: 97762 - DNA, 80 bp, synthetic construct; identical to SEQ ID NO: 34703
  misc_feature 1..80: note = Artificially Synthesized Probe
  source 1..80: mol_type = other DNA

SEQ ID NO: 97763 - DNA, 80 bp, synthetic construct
  misc_feature 1..80: note = Artificially Synthesized Probe
  source 1..80: mol_type = other DNA
ccaggattaatcactgggaaagaagagtcatcagaatttataaagatgaaggagaactaatgagagagaataagtaagag

SEQ ID NO: 97764 - DNA, 80 bp, synthetic construct
  misc_feature 1..80: note = Artificially Synthesized Probe
  source 1..80: mol_type = other DNA
aaggacatggaagaatgaaagacaggttggaataggaatagatttaggagtaagtgagtgtccaggaatataaggaaggt

SEQ ID NO: 97765 - DNA, 80 bp, synthetic construct
  misc_feature 1..80: note = Artificially Synthesized Probe
  source 1..80: mol_type = other DNA
ctacaaaaactaattattaaaaagatcatacttagtgtctaattattaacagcattgcccatgagatcaggaataagaca

SEQ ID NO: 97766 - DNA, 80 bp, synthetic construct
  misc_feature 1..80: note = Artificially Synthesized Probe
  source 1..80: mol_type = other DNA
atctacaaatgactagatttaatagaggaatagaaagattggtatataaaagttcaacataaatatcaattataatacta

SEQ ID NO: 97767 - DNA, 80 bp, synthetic construct
  misc_feature 1..80: note = Artificially Synthesized Probe
  source 1..80: mol_type = other DNA
aaaagaaaatctaaattaataaaagaatataccaagtatatgacttgaaagattcaatataggaaagatgtcaatataat

SEQ ID NO: 97768 - DNA, 80 bp, synthetic construct
  misc_feature 1..80: note = Artificially Synthesized Probe
  source 1..80: mol_type = other DNA
tacactcaaatatagaattggaagttctcacagagtttctactgcctaggaataactttgagtaggaggaaaaaagttat

SEQ ID NO: 97769 - DNA, 80 bp, synthetic construct
  misc_feature 1..80: note = Artificially Synthesized Probe
  source 1..80: mol_type = other DNA
tactgttggaatattacttagcaataaaaaggaatgaaaaaaaatatgctataacatggatgcacactgaaaacattatg

SEQ ID NO: 97770 - DNA, 80 bp, synthetic construct
  misc_feature 1..80: note = Artificially Synthesized Probe
  source 1..80: mol_type = other DNA
aacaaagaagataaaatattcattttccataattatatatgaaaatgtctaatcttattcaaaatctaggaaaagtgcaa

SEQ ID NO: 97771 - DNA, 80 bp, synthetic construct
  misc_feature 1..80: note = Artificially Synthesized Probe
  source 1..80: mol_type = other DNA
caagtaaacaaatgaaagcacatttaaaggggtaagtcctcacagaaatcctgtcacacacagtaatcttacaaaggcat

SEQ ID NO: 97772 - DNA, 80 bp, synthetic construct; identical to SEQ ID NO: 34704
  misc_feature 1..80: note = Artificially Synthesized Probe
  source 1..80: mol_type = other DNA

SEQ ID NO: 97773 - DNA, 80 bp, synthetic construct
  misc_feature 1..80: note = Artificially Synthesized Probe
  source 1..80: mol_type = other DNA
ctacattttgtttgtccattaatcaactgataacatttcaaatgtaaaacaattggaggtaaaattaaaactgcttcaaa

SEQ ID NO: 97774 - DNA, 80 bp, synthetic construct
  misc_feature 1..80: note = Artificially Synthesized Probe
  source 1..80: mol_type = other DNA
tgataagaggtttgagagtgctaataaagggcacaggtatttgtcattaaaaaaaaccacaacatgctggctggacgcag

SEQ ID NO: 97775 - DNA, 80 bp, synthetic construct
  misc_feature 1..80: note = Artificially Synthesized Probe
  source 1..80: mol_type = other DNA
attagctgggcgtggtggcaggcgcctgtagtcccagctactcgggaggctgaggcaggagaatggcgtgaacccggaag

SEQ ID NO: 97776 - DNA, 80 bp, synthetic construct; identical to SEQ ID NO: 34705
  misc_feature 1..80: note = Artificially Synthesized Probe
  source 1..80: mol_type = other DNA

SEQ ID NO: 97777 - DNA, 80 bp, synthetic construct
  misc_feature 1..80: note = Artificially Synthesized Probe
  source 1..80: mol_type = other DNA
cgcataattaaaaaataacacaaaacctaacaggtaaatccatgtatactaaatataaagatttttatcttaataaaaaa

SEQ ID NO: 97778 - DNA, 80 bp, synthetic construct
  misc_feature 1..80: note = Artificially Synthesized Probe
  source 1..80: mol_type = other DNA
ctaggcatggtggtacgcacctgtgatcccagatactagggaggcttaggcaggagaattgcttgattgaactcgggagg

SEQ ID NO: 97779 - DNA, 80 bp, synthetic construct
  misc_feature 1..80: note = Artificially Synthesized Probe
  source 1..80: mol_type = other DNA
atcctaattcatctgcttaagctcactatattcagccagcaaatgatctaagctatataagacaggtagttgtctattct

SEQ ID NO: 97780 - DNA, 80 bp, synthetic construct; identical to SEQ ID NO: 34706
  misc_feature 1..80: note = Artificially Synthesized Probe
  source 1..80: mol_type = other DNA

SEQ ID NO: 97781 - DNA, 80 bp, synthetic construct
  misc_feature 1..80: note = Artificially Synthesized Probe
  source 1..80: mol_type = other DNA
aagtgacaccttagaaagagagagtagaaataaaggggtactactatagaaaaacttaaatgatacttattgcttgaata

SEQ ID NO: 97782 - DNA, 80 bp, synthetic construct
  misc_feature 1..80: note = Artificially Synthesized Probe
  source 1..80: mol_type = other DNA
tataattagtgattgtcagctgtccaactgtgaggctacacaataaaaccatcaacacatcacctaccgtttcaagtaat

SEQ ID NO: 97783 - DNA, 80 bp, synthetic construct
  misc_feature 1..80: note = Artificially Synthesized Probe
  source 1..80: mol_type = other DNA
tatgtaatcatcacgtttattctaaacacagtgctccatttcagtattttattatgccaagagataaccatattcaaatc

SEQ ID NO: 97784 - DNA, 80 bp, synthetic construct; identical to SEQ ID NO: 34707
  misc_feature 1..80: note = Artificially Synthesized Probe
  source 1..80: mol_type = other DNA

SEQ ID NO: 97785 - DNA, 80 bp, synthetic construct
  misc_feature 1..80: note = Artificially Synthesized Probe
  source 1..80: mol_type = other DNA
aaaaattaaaaactggcatgctttaataatttttctttaaacatgtccttcaaccatatactcaaaagggcaatgtgact

SEQ ID NO: 97786 - DNA, 80 bp, synthetic construct
  misc_feature 1..80: note = Artificially Synthesized Probe
  source 1..80: mol_type = other DNA
tgtcacttatgtccaggtatgccctaagaaaagctcatgagagcaaagaaatgatttatgtaatattgaaatgaaaagtg

SEQ ID NO: 97787 - DNA, 80 bp, synthetic construct
  misc_feature 1..80: note = Artificially Synthesized Probe
  source 1..80: mol_type = other DNA
taaccagcaacactgatatatgaatatagtattctgaataatggaaatacatattccttcactgtatatgcttaatgtag

SEQ ID NO: 97788 - DNA, 80 bp, synthetic construct
  misc_feature 1..80: note = Artificially Synthesized Probe
  source 1..80: mol_type = other DNA
aagtaattcagacaatttggtaataaggaaaacttgaaaattattaaagcccgaaaggaatctgaagttattctaatttt

SEQ ID NO: 97789 - DNA, 80 bp, synthetic construct
  misc_feature 1..80: note = Artificially Synthesized Probe
  source 1..80: mol_type = other DNA
attattataaaaattgatagtttaatgaattacatatcagctagacaaaatatagtatccagaaataaagtacttcatta

SEQ ID NO: 97790 - DNA, 80 bp, synthetic construct; identical to SEQ ID NO: 34708
  misc_feature 1..80: note = Artificially Synthesized Probe
  source 1..80: mol_type = other DNA

SEQ ID NO: 97791 - DNA, 80 bp, synthetic construct
  misc_feature 1..80: note = Artificially Synthesized Probe
  source 1..80: mol_type = other DNA
accaaagttagtgattgagggaaaatggattcctaaacatgagcactgccaaaaagaaagactagaaatgcctcacagtg

SEQ ID NO: 97792 - DNA, 80 bp, synthetic construct; identical to SEQ ID NO: 34685
  misc_feature 1..80: note = Artificially Synthesized Probe
  source 1..80: mol_type = other DNA

SEQ ID NO: 97793 - DNA, 80 bp, synthetic construct
  misc_feature 1..80: note = Artificially Synthesized Probe
  source 1..80: mol_type = other DNA
aaacacagtggagccctattataaaaactgaaatattaatattattattccaaaatcttaacaagactctgctatccatg

SEQ ID NO: 97794 - DNA, 80 bp, synthetic construct
  misc_feature 1..80: note = Artificially Synthesized Probe
  source 1..80: mol_type = other DNA
tggtggacgtaatagtaaatagatggccatcttcgaagaggtacattttcaaacataattcaacaaacttaccaggaact

SEQ ID NO: 97795 - DNA, 80 bp, synthetic construct
  misc_feature 1..80: note = Artificially Synthesized Probe
  source 1..80: mol_type = other DNA
tcctgtctagaacgcatcagttcatctgcagaggatctaaatatatactccaggataaaccaaaaagcaagtactggtgt

SEQ ID NO: 97796 - DNA, 80 bp, synthetic construct; identical to SEQ ID NO: 34709
  misc_feature 1..80: note = Artificially Synthesized Probe
  source 1..80: mol_type = other DNA

SEQ ID NO: 97797 - DNA, 80 bp, synthetic construct
  misc_feature 1..80: note = Artificially Synthesized Probe
  source 1..80: mol_type = other DNA
agcatatttattatttctccagagctttttggcctttattgataaagaatgccacaacagtcttggcccacaaatacctg

SEQ ID NO: 97798 - DNA, 80 bp, synthetic construct
  misc_feature 1..80: note = Artificially Synthesized Probe
  source 1..80: mol_type = other DNA
actcatgtaatgtgatccatgaagttttattatttttgaggtacttttattatttagaattcaatatatcataaagatac

SEQ ID NO: 97799 - DNA, 80 bp, synthetic construct; identical to SEQ ID NO: 34710
  misc_feature 1..80: note = Artificially Synthesized Probe
  source 1..80: mol_type = other DNA

SEQ ID NO: 97800 - DNA, 80 bp, synthetic construct
  misc_feature 1..80: note = Artificially Synthesized Probe
  source 1..80: mol_type = other DNA
ttaatatcacagtttctatagtatttctctcactacaaaactcttcctaaataagtgatcatagcagaaattgacttcac

SEQ ID NO: 97801 - DNA, 80 bp, synthetic construct
  misc_feature 1..80: note = Artificially Synthesized Probe
  source 1..80: mol_type = other DNA
aaagggctaaaccatatgctacaatagacctcatgtgatatttccaacatgtgggttatcttagagttggtctatgatga

SEQ ID NO: 97802 - DNA, 80 bp, synthetic construct
  misc_feature 1..80: note = Artificially Synthesized Probe
  source 1..80: mol_type = other DNA
tccatgcagactgactgttccatattttgactaccctcgcctgcttttattcaatcttcacaatcctcagatagatgtta

SEQ ID NO: 97803 - DNA, 80 bp, synthetic construct
  misc_feature 1..80: note = Artificially Synthesized Probe
  source 1..80: mol_type = other DNA
caacaatctgaaatgttctgctcatggtcagccatgagcacaaagccttttaatctgttgtgcttaatcaattctttcat

SEQ ID NO: 97804 - DNA, 80 bp, synthetic construct
  misc_feature 1..80: note = Artificially Synthesized Probe
  source 1..80: mol_type = other DNA
gcaaattataaaaactattatactatcatattcataaatgaaggagagaactcaaagctaaattttcaaatatctggcca

SEQ ID NO: 97805 - DNA, 80 bp, synthetic construct; identical to SEQ ID NO: 34711
  misc_feature 1..80: note = Artificially Synthesized Probe
  source 1..80: mol_type = other DNA

SEQ ID NO: 97806 - DNA, 80 bp, synthetic construct
  misc_feature 1..80: note = Artificially Synthesized Probe
  source 1..80: mol_type = other DNA
tgaccaacaagtcaaaatcatttgtgacaggctccattgaatatatagtttgatggcattatttgaaggtagaattaact

SEQ ID NO: 97807 - DNA, 80 bp, synthetic construct
  misc_feature 1..80: note = Artificially Synthesized Probe
  source 1..80: mol_type = other DNA
tgtgatttatccaaatgtccattagttaattatattctctacaccttaaaagttccgctgtagccctctaccccccttca

SEQ ID NO: 97808 - DNA, 80 bp, synthetic construct; identical to SEQ ID NO: 34712
  misc_feature 1..80: note = Artificially Synthesized Probe
  source 1..80: mol_type = other DNA

SEQ ID NO: 97809 - DNA, 80 bp, synthetic construct
  misc_feature 1..80: note = Artificially Synthesized Probe
  source 1..80: mol_type = other DNA
cacgtatgatgaccgggttactgctcattatcactgttgttaaaaagaatgacgagaaagacgtgtgaaaagaatactac

SEQ ID NO: 97810 - DNA, 80 bp, synthetic construct
  misc_feature 1..80: note = Artificially Synthesized Probe
  source 1..80: mol_type = other DNA
ttgatactctacctttttatatttcatttgtttgcttgtcactctatttaatatcattctattagagcttaaaaagatac

SEQ ID NO: 97811 - DNA, 80 bp, synthetic construct
  misc_feature 1..80: note = Artificially Synthesized Probe
  source 1..80: mol_type = other DNA
caagcacaaattcatttctagagctagtaggacaaaaacaaaaatgatatggaaaatatatgatagcaagtattgttacc

SEQ ID NO: 97812 - DNA, 80 bp, synthetic construct; identical to SEQ ID NO: 34713
  misc_feature 1..80: note = Artificially Synthesized Probe
  source 1..80: mol_type = other DNA

SEQ ID NO: 97813 - DNA, 80 bp, synthetic construct
  misc_feature 1..80: note = Artificially Synthesized Probe
  source 1..80: mol_type = other DNA
caattcccagtgtgatttaaacagaacccttatatgttcccctagccaggtgtaccgcacatttaaaactaactcatata

SEQ ID NO: 97814 - DNA, 80 bp, synthetic construct
  misc_feature 1..80: note = Artificially Synthesized Probe
  source 1..80: mol_type = other DNA
atatcttcaactggttcactaaatttatcagataatataataaacaaagcaaaatctcaggacaaggacactaattattg

SEQ ID NO: 97815 - DNA, 80 bp, synthetic construct
  misc_feature 1..80: note = Artificially Synthesized Probe
  source 1..80: mol_type = other DNA
caggcccatgaaatatattatcttagattccttctaaatctttaactcttctttccaagttaccagtaatattaacaagt

SEQ ID NO: 97816 - DNA, 80 bp, synthetic construct
  misc_feature 1..80: note = Artificially Synthesized Probe
  source 1..80: mol_type = other DNA
agttgagaaaaaagcacctttgaaccgaaaagaaacatataataaaaactgactacattccaaaaaatagaaatgactct

SEQ ID NO: 97817 - DNA, 80 bp, synthetic construct; identical to SEQ ID NO: 34714
  misc_feature 1..80: note = Artificially Synthesized Probe
  source 1..80: mol_type = other DNA

SEQ ID NO: 97818 - DNA, 80 bp, synthetic construct
  misc_feature 1..80: note = Artificially Synthesized Probe
  source 1..80: mol_type = other DNA
tataatctttttcaaatagattggcaggcctttgaattataaactcaaaggtaatagtgatgtcacaagggagatatgca

SEQ ID NO: 97819 - DNA, 80 bp, synthetic construct; identical to SEQ ID NO: 34686
  misc_feature 1..80: note = Artificially Synthesized Probe
  source 1..80: mol_type = other DNA

SEQ ID NO: 97820 - DNA, 80 bp, synthetic construct
  misc_feature 1..80: note = Artificially Synthesized Probe
  source 1..80: mol_type = other DNA
tttcagttttaagacacatgcttgtttaggccacatctcttctaagaattggccccaacatttaaacttgataaccctat

SEQ ID NO: 97821 - DNA, 80 bp, synthetic construct
  misc_feature 1..80: note = Artificially Synthesized Probe
  source 1..80: mol_type = other DNA
tctttaggctttggcctcttaactccagaacatctttcatctctattatttccattgcactgctactgtctcaggtcatc

SEQ ID NO: 97822 - DNA, 80 bp, synthetic construct
  misc_feature 1..80: note = Artificially Synthesized Probe
  source 1..80: mol_type = other DNA
aaaaacgaaacactaaagttactaccatcctatgaaccttccaaaactggctgtaatctctgtctcaggcctaatatcat

SEQ ID NO: 97823 - DNA, 80 bp, synthetic construct
  misc_feature 1..80: note = Artificially Synthesized Probe
  source 1..80: mol_type = other DNA
cttgattcctgagactactgtttatacacttcatcagtttcctgagtattggaggatcaacagcagcattctccatttat

SEQ ID NO: 97824 - DNA, 80 bp, synthetic construct; identical to SEQ ID NO: 34687
  misc_feature 1..80: note = Artificially Synthesized Probe
  source 1..80: mol_type = other DNA

SEQ ID NO: 97825 - DNA, 80 bp, synthetic construct
  misc_feature 1..80: note = Artificially Synthesized Probe
  source 1..80: mol_type = other DNA
atcttaatttttaaaaaatattttattattttacatctaaaattaaaattttaatttaaaagacatcaaaataatcattt

SEQ ID NO: 97826 - DNA, 80 bp, synthetic construct
  misc_feature 1..80: note = Artificially Synthesized Probe
  source 1..80: mol_type = other DNA
aagttagcctattttgaccatcgaagtattcttatgactattttctaatcattctttcttgaatacaagtgcaagactat

SEQ ID NO: 97827 - DNA, 80 bp, synthetic construct
  misc_feature 1..80: note = Artificially Synthesized Probe
  source 1..80: mol_type = other DNA
ataagggctcaattcttattcatatgttccttgtccatttctgtcacatcccttaatagggaagatttcagagagcattt

SEQ ID NO: 97828 - DNA, 80 bp, synthetic construct; identical to SEQ ID NO: 34688
  misc_feature 1..80: note = Artificially Synthesized Probe
  source 1..80: mol_type = other DNA

SEQ ID NO: 97829 - DNA, 80 bp, synthetic construct
  misc_feature 1..80: note = Artificially Synthesized Probe
  source 1..80: mol_type = other DNA
tatatgggtatccaaaaattaactttcaaatttttggcaatttcaaattatttactcaatgtctgattttgtggaaaaaa

SEQ ID NO: 97830 - DNA, 80 bp, synthetic construct
  misc_feature 1..80: note = Artificially Synthesized Probe
  source 1..80: mol_type = other DNA
gtctccattttcaccccacacattatttaataaagctcagaaaaagtgacactgttttattttaattatttgttttgcag

SEQ ID NO: 97831 - DNA, 80 bp, synthetic construct
  misc_feature 1..80: note = Artificially Synthesized Probe
  source 1..80: mol_type = other DNA
ctaataaaatgaaaatataaaataatatataatatgcgtaatatacaataaagtatacttttaagaaatgtagctagatt

SEQ ID NO: 97832 - DNA, 80 bp, synthetic construct; identical to SEQ ID NO: 34683
  misc_feature 1..80: note = Artificially Synthesized Probe
  source 1..80: mol_type = other DNA

SEQ ID NO: 97833 - DNA, 80 bp, synthetic construct; identical to SEQ ID NO: 34689
  misc_feature 1..80: note = Artificially Synthesized Probe
  source 1..80: mol_type = other DNA

SEQ ID NO: 97834 - DNA, 80 bp, synthetic construct
  misc_feature 1..80: note = Artificially Synthesized Probe
  source 1..80: mol_type = other DNA
aattatcataaaatgaacacctgtataaacagttctttgaccaagaaattgaacactgacagtagcctgacagggaaacc

SEQ ID NO: 97835 - DNA, 80 bp, synthetic construct
  misc_feature 1..80: note = Artificially Synthesized Probe
  source 1..80: mol_type = other DNA
aagttaccaatggtttaacaaccagctcataaaattcctgaatatctaacaactgattgtgtccccatcctgccctgcat

SEQ ID NO: 97836 - DNA, 80 bp, synthetic construct
  misc_feature 1..80: note = Artificially Synthesized Probe
  source 1..80: mol_type = other DNA
acatctctgtacctaagatttgttttcttctttattgttagggtaagaataataatactgcttgtcataggatgtcttgt

SEQ ID NO: 97837 - DNA, 80 bp, synthetic construct; identical to SEQ ID NO: 34690
  misc_feature 1..80: note = Artificially Synthesized Probe
  source 1..80: mol_type = other DNA

SEQ ID NO: 97838 - DNA, 80 bp, synthetic construct
  misc_feature 1..80: note = Artificially Synthesized Probe
  source 1..80: mol_type = other DNA
gtaaaatttgggatggagtgatttctatgacggggaatagaaaagagatgtggccacgcatgagaatattcaggctcatt

SEQ ID NO: 97839 - DNA, 80 bp, synthetic construct
  misc_feature 1..80: note = Artificially Synthesized Probe
  source 1..80: mol_type = other DNA
tgcatgagtaagttcatgtttgtatgagcagagaaaaagcagcagaaggatatgcaagactggtaacattggctacctag

SEQ ID NO: 97840 - DNA, 80 bp, synthetic construct
  misc_feature 1..80: note = Artificially Synthesized Probe
  source 1..80: mol_type = other DNA
ctacttctcaaggtgagtgcctacacatgaacagttctacgaaaactagtgtagtgcacattatctttagagtgtcctta

SEQ ID NO: 97841 - DNA, 80 bp, synthetic construct
  misc_feature 1..80: note = Artificially Synthesized Probe
  source 1..80: mol_type = other DNA
tccactttcctgtcactttcacttaaaatatatgtactactggttctcttcctttccctctctttgatgtagctagagcc

SEQ ID NO: 97842 - DNA, 80 bp, synthetic construct; identical to SEQ ID NO: 34691
  misc_feature 1..80: note = Artificially Synthesized Probe
  source 1..80: mol_type = other DNA

SEQ ID NO: 97843 - DNA, 80 bp, synthetic construct
  misc_feature 1..80: note = Artificially Synthesized Probe
  source 1..80: mol_type = other DNA
tttcctaatagccctacaattcctggttcctactctaagattttttaaacaaacatattattcagtttttactttaaaag

SEQ ID NO: 97844 - DNA, 80 bp, synthetic construct
  misc_feature 1..80: note = Artificially Synthesized Probe
  source 1..80: mol_type = other DNA
agaagtttgaggctaggtcgagccatgtgactggaattgaaggtactgctgtgaactcatggttttaatatagataaatc

SEQ ID NO: 97845 - DNA, 80 bp, synthetic construct
  misc_feature 1..80: note = Artificially Synthesized Probe
  source 1..80: mol_type = other DNA
aaaaatggctaatttcagggctgggataaggaaagtgtaagaaaagtcaaaaacatcttgtttcagaaagtaagaaagta

SEQ ID NO: 97846 - DNA, 80 bp, synthetic construct; identical to SEQ ID NO: 34692
  misc_feature 1..80: note = Artificially Synthesized Probe
  source 1..80: mol_type = other DNA

SEQ ID NO: 97847 - DNA, 80 bp, synthetic construct
  misc_feature 1..80: note = Artificially Synthesized Probe
  source 1..80: mol_type = other DNA
gagtggagtagtaaaacaagttcttccttacagtagatatgccaacttaatcaatgtcttagaaaacatcatttgtcagt

SEQ ID NO: 97848 - DNA, 80 bp, synthetic construct
  misc_feature 1..80: note = Artificially Synthesized Probe
  source 1..80: mol_type = other DNA
cctggaagataataccttaatcaaatgtttaaagttgacatcacttgtaaaagcacaactcaacatcatgtgtctccttg

SEQ ID NO: 97849 - DNA, 80 bp, synthetic construct
  misc_feature 1..80: note = Artificially Synthesized Probe
  source 1..80: mol_type = other DNA
aatagtaaaaaactattctacattgaagaacattaaaagtaacaaggcaactaagcacaacatatggtcctcaacagact

SEQ ID NO: 97850 - DNA, 80 bp, synthetic construct; identical to SEQ ID NO: 34693
  misc_feature 1..80: note = Artificially Synthesized Probe
  source 1..80: mol_type = other DNA

SEQ ID NO: 97851 - DNA, 80 bp, synthetic construct
  misc_feature 1..80: note = Artificially Synthesized Probe
  source 1..80: mol_type = other DNA
tggaggccacccagtcatgggggacaccttcatccgtcacatcgccctgctgggctttgagaagcgcttcgtacccagcc

SEQ ID NO: 97852 - DNA, 80 bp, synthetic construct
  misc_feature 1..80: note = Artificially Synthesized Probe
  source 1..80: mol_type = other DNA
accatgcctggataatttttgtatttttagttgagacggggtttcaccaggttggccagactggtctcgaacttctgacc

SEQ ID NO: 97853 - DNA, 80 bp, synthetic construct
  misc_feature 1..80: note = Artificially Synthesized Probe
  source 1..80: mol_type = other DNA
acccaggctggagtgcagtaatgcaatctcagctcactgcaaccttagcctcctgggttcaagcaattctcctgcctcag

SEQ ID NO: 97854 - DNA, 80 bp, synthetic construct
  misc_feature 1..80: note = Artificially Synthesized Probe
  source 1..80: mol_type = other DNA
gtgggaaccaccttgcccagcctgtggctatcgtttaaacactgggaaggcctgcagcccccaggccgacagttagctgc

SEQ ID NO: 97855 - DNA, 80 bp, synthetic construct
  misc_feature 1..80: note = Artificially Synthesized Probe
  source 1..80: mol_type = other DNA
gtagggggcagagggccgaagtccagagtgtacccccagagtgggtgccagcaggagcttgccgagggatctgggatgga

SEQ ID NO: 97856 - DNA, 80 bp, synthetic construct
  misc_feature 1..80: note = Artificially Synthesized Probe
  source 1..80: mol_type = other DNA
gaccaggtgagccatacgtcgccatcaaggcctacactgctgtggagggggacgaggtgtccctgctcgagggtgaagct

SEQ ID NO: 97857 - DNA, 80 bp, synthetic construct
  misc_feature 1..80: note = Artificially Synthesized Probe
  source 1..80: mol_type = other DNA
ctgggcttagtttccatctcagtagcagggaggaatgagcccacccttgcctgtcttgtggggatccaatgtccttgtcc

SEQ ID NO: 97858 - DNA, 80 bp, synthetic construct
  misc_feature 1..80: note = Artificially Synthesized Probe
  source 1..80: mol_type = other DNA
tagtttttaaaatttttgtggagatgaggtttcactatgttgtccaggctaatcttgaactcctcggcttaagcaaccct

SEQ ID NO: 97859 - DNA, 80 bp, synthetic construct
  misc_feature 1..80: note = Artificially Synthesized Probe
  source 1..80: mol_type = other DNA
gacgatcatgtgaggtcaggagttcgagaccaccctggccaacatggcaaaaccctatctctactaaaaacacaaacatg

SEQ ID NO: 97860 - DNA, 80 bp, synthetic construct; identical to SEQ ID NO: 34718
  misc_feature 1..80: note = Artificially Synthesized Probe
  source 1..80: mol_type = other DNA

SEQ ID NO: 97861 - DNA, 80 bp, synthetic construct
  misc_feature 1..80: note = Artificially Synthesized Probe
  source 1..80: mol_type = other DNA
tcaggaggctgaggtgaaaggatcacttgaccccaggagttggaggctgcagtgagctatgactgcaccactgcacccca

SEQ ID NO: 97862 - DNA, 80 bp, synthetic construct; identical to SEQ ID NO: 34741
  misc_feature 1..80: note = Artificially Synthesized Probe
  source 1..80: mol_type = other DNA

SEQ ID NO: 97863 - DNA, 80 bp, synthetic construct
  misc_feature 1..80: note = Artificially Synthesized Probe
  source 1..80: mol_type = other DNA
ccaagactagtcttaaactcctggcctcaagagttcctcctgccttggcctcccaaagcactgggattacaggaatgagc

SEQ ID NO: 97864 - DNA, 80 bp, synthetic construct
  misc_feature 1..80: note = Artificially Synthesized Probe
  source 1..80: mol_type = other DNA
cacacactctgttaacccccatcctgtgtctctgataatcttcttgtgatcctcccaccagccaagaattgggttttatg

SEQ ID NO: 97865 - DNA, 80 bp, synthetic construct; identical to SEQ ID NO: 34717
  misc_feature 1..80: note = Artificially Synthesized Probe
  source 1..80: mol_type = other DNA

SEQ ID NO: 97866 - DNA, 80 bp, synthetic construct
  misc_feature 1..80: note = Artificially Synthesized Probe
  source 1..80: mol_type = other DNA
ggtgcatgcctgtaatcccagctacttgggaagctgagacaggagaattgcttgaacttgggaagcagaggttgcaatga

SEQ ID NO: 97867 - DNA, 80 bp, synthetic construct
  misc_feature 1..80: note = Artificially Synthesized Probe
  source 1..80: mol_type = other DNA
aaaagaaaaattggcaaatataatccgccaatgtcttcttttttctttacttttttcgggaggtagagataggggtcttg

SEQ ID NO: 97868 - DNA, 80 bp, synthetic construct
  misc_feature 1..80: note = Artificially Synthesized Probe
  source 1..80: mol_type = other DNA
acctccacccctgcctagactgtggaaggattgctggaagggtctcagttgcacagaccaggaaactgaggcccacagag

SEQ ID NO: 97869 - DNA, 80 bp, synthetic construct; identical to SEQ ID NO: 34728
  misc_feature 1..80: note = Artificially Synthesized Probe
  source 1..80: mol_type = other DNA

SEQ ID NO: 97870 - DNA, 80 bp, synthetic construct
  misc_feature 1..80: note = Artificially Synthesized Probe
  source 1..80: mol_type = other DNA
tgtacctgcaaaagtcagggcaagacgtgtcccaggcccaacgccagatcaagcggggggcgccgccccgcaggtaagcg

SEQ ID NO: 97871 - DNA, 80 bp, synthetic construct; identical to SEQ ID NO: 34716
  misc_feature 1..80: note = Artificially Synthesized Probe
  source 1..80: mol_type = other DNA

SEQ ID NO: 97872 - DNA, 80 bp, synthetic construct
  misc_feature 1..80: note = Artificially Synthesized Probe
  source 1..80: mol_type = other DNA
atctgagtccctgggggcaggggcgccctcgggctttgacgacgccccgtcccgctgggccaggtcgtccatccgcaacg

SEQ ID NO: 97873 - DNA, 80 bp, synthetic construct
  misc_feature 1..80: note = Artificially Synthesized Probe
  source 1..80: mol_type = other DNA
agccctagaggcggagtcagcgggagaggcggggccagaggtagggccagagtagcggggcgggaccagagggcggaatc

SEQ ID NO: 97874 - DNA, 80 bp, synthetic construct
  misc_feature 1..80: note = Artificially Synthesized Probe
  source 1..80: mol_type = other DNA
cgctgtgggcggggccagtgtgcggggcggggcgtctgactcggccccgctctctgcccgcagaggaggagcggcagacg

SEQ ID NO: 97875 - DNA, 80 bp, synthetic construct; identical to SEQ ID NO: 34715
  misc_feature 1..80: note = Artificially Synthesized Probe
  source 1..80: mol_type = other DNA

SEQ ID NO: 97876 - DNA, 80 bp, synthetic construct
  misc_feature 1..80: note = Artificially Synthesized Probe
  source 1..80: mol_type = other DNA
ttgtcctctgcagtgaaaacttttttcaggtctaggatccagtcaaggatcaatgtcatagcctttaaccttctttaatc

SEQ ID NO: 97877 - DNA, 80 bp, synthetic construct; identical to SEQ ID NO: 34731
  misc_feature 1..80: note = Artificially Synthesized Probe
  source 1..80: mol_type = other DNA

SEQ ID NO: 97878 - DNA, 80 bp, synthetic construct
  misc_feature 1..80: note = Artificially Synthesized Probe
  source 1..80: mol_type = other DNA
gccaccatgcccggctactttttgtatttttagtagagacagggtttcaccatgttagccaggctgatctcgaactcctg

SEQ ID NO: 97879 - DNA, 80 bp, synthetic construct
  misc_feature 1..80: note = Artificially Synthesized Probe
  source 1..80: mol_type = other DNA
atctacccctctgatccctgggaagacagttcccttggacccgccctgggccccagccctttactgtccccgcctgtgtc

SEQ ID NO: 97880 - DNA, 80 bp, synthetic construct; identical to SEQ ID NO: 34727
  misc_feature 1..80: note = Artificially Synthesized Probe
  source 1..80: mol_type = other DNA

SEQ ID NO: 97881 - DNA, 80 bp, synthetic construct
  misc_feature 1..80: note = Artificially Synthesized Probe
  source 1..80: mol_type = other DNA
tgcccatcaccactaccgggtaatttttgtgtttttagtagagacagggtttcaccatattggtcaggctggtcttgaac

SEQ ID NO: 97882 - DNA, 80 bp, synthetic construct
  misc_feature 1..80: note = Artificially Synthesized Probe
  source 1..80: mol_type = other DNA
gcagtggtgcaatcatagctcactaaagccttgacctccaagtctcaagcaattctcctgcctcacctggggccacaggt

SEQ ID NO: 97883 - DNA, 80 bp, synthetic construct; identical to SEQ ID NO: 34732
  misc_feature 1..80: note = Artificially Synthesized Probe
  source 1..80: mol_type = other DNA

SEQ ID NO: 97884 - DNA, 80 bp, synthetic construct
  misc_feature 1..80: note = Artificially Synthesized Probe
  source 1..80: mol_type = other DNA
atggggtcccccgactctggctttcccccaggtgtacatgttcctggtgaaatggcaggacctgtcggagaaggtggtct

SEQ ID NO: 97885 - DNA, 80 bp, synthetic construct
  misc_feature 1..80: note = Artificially Synthesized Probe
  source 1..80: mol_type = other DNA
ttaaaggggatttatttatttatataaatttttgtgacagggtcttgctctgtcaccactctgaacacctcatgttctct

SEQ ID NO: 97886 - DNA, 80 bp, synthetic construct; identical to SEQ ID NO: 34733
  misc_feature 1..80: note = Artificially Synthesized Probe
  source 1..80: mol_type = other DNA

SEQ ID NO: 97887 - DNA, 80 bp, synthetic construct
  misc_feature 1..80: note = Artificially Synthesized Probe
  source 1..80: mol_type = other DNA
taaaacagacaggatctcccagaaccttcctagaatggaaccattcttgtcgcttttgaaaaacaaagccaagttctaga

SEQ ID NO: 97888 - DNA, 80 bp, synthetic construct
  misc_feature 1..80: note = Artificially Synthesized Probe
  source 1..80: mol_type = other DNA
gtcacccaggctggggtgcagtggtgcaatcacggctcactgcagcctcaacctccagggctgaagcgattctcccatct

SEQ ID NO: 97889 - DNA, 80 bp, synthetic construct; identical to SEQ ID NO: 34725
  misc_feature 1..80: note = Artificially Synthesized Probe
  source 1..80: mol_type = other DNA

SEQ ID NO: 97890 - DNA, 80 bp, synthetic construct; identical to SEQ ID NO: 34734
  misc_feature 1..80: note = Artificially Synthesized Probe
  source 1..80: mol_type = other DNA

SEQ ID NO: 97891 - DNA, 80 bp, synthetic construct
  misc_feature 1..80: note = Artificially Synthesized Probe
  source 1..80: mol_type = other DNA
aactaaagctctctctctccccagctgcctgtagtgtcagttagagtcttatcctctccagtagggtgacaccatgacag

SEQ ID NO: 97892 - DNA, 80 bp, synthetic construct
  misc_feature 1..80: note = Artificially Synthesized Probe
  source 1..80: mol_type = other DNA
tgtatttttagtagagacggggtttcaccacgttggccaggctggtcttgaactcctgacctcaagtgatccacccacga

SEQ ID NO: 97893 - DNA, 80 bp, synthetic construct
  misc_feature 1..80: note = Artificially Synthesized Probe
  source 1..80: mol_type = other DNA
gtttagaaaaccttaaaagaaatgttccctattgaggcaggggcgatcaatccagagaacaggatcatcccccacctccc

SEQ ID NO: 97894 - DNA, 80 bp, synthetic construct
  misc_feature 1..80: note = Artificially Synthesized Probe
  source 1..80: mol_type = other DNA
acttaccgagtactgcagcacgctcatgagcctgcccaccaagatctcccgctgtccccacctcctcgacttcttcaagg

SEQ ID NO: 97895 - DNA, 80 bp, synthetic construct; identical to SEQ ID NO: 34724
  misc_feature 1..80: note = Artificially Synthesized Probe
  source 1..80: mol_type = other DNA

SEQ ID NO: 97896 - DNA, 80 bp, synthetic construct
  misc_feature 1..80: note = Artificially Synthesized Probe
  source 1..80: mol_type = other DNA
atgaagcattgggtgtcttgcggagccccccagaaggatgtggggttgatgcctctgctaagtgctgagcatgtctgggg

SEQ ID NO: 97897 - DNA, 80 bp, synthetic construct
  misc_feature 1..80: note = Artificially Synthesized Probe
  source 1..80: mol_type = other DNA
aagacagagacaagcagcattgctccggccagcacttattgacgcttgaaggtgtcccctggcccaaggaagggcagtta

SEQ ID NO: 97898 - DNA, 80 bp, synthetic construct
  misc_feature 1..80: note = Artificially Synthesized Probe
  source 1..80: mol_type = other DNA
tcacctgaggttgggagtttgagaccagcctggccaacatggtgaaaccccatctctaccaaaaatataaaaatttagtc

SEQ ID NO: 97899 - DNA, 80 bp, synthetic construct; identical to SEQ ID NO: 34723
  misc_feature 1..80: note = Artificially Synthesized Probe
  source 1..80: mol_type = other DNA

SEQ ID NO: 97900 - DNA, 80 bp, synthetic construct; identical to SEQ ID NO: 34736
  misc_feature 1..80: note = Artificially Synthesized Probe
  source 1..80: mol_type = other DNA

SEQ ID NO: 97901 - DNA, 80 bp, synthetic construct
  misc_feature 1..80: note = Artificially Synthesized Probe
  source 1..80: mol_type = other DNA
ctgaagaattgggtctttgggccgggtgcggttgctcatgcctgtaatcccagcagtttgggaggccgaggcaggtggat

SEQ ID NO: 97902 - DNA, 80 bp, synthetic construct
  misc_feature 1..80: note = Artificially Synthesized Probe
  source 1..80: mol_type = other DNA
gtgccaagacctttctcttttttgttatttttttgttttttgagacagagtcttgatctgttgcccaggccagagtgcag

SEQ ID NO: 97903 - DNA, 80 bp, synthetic construct
  misc_feature 1..80: note = Artificially Synthesized Probe
  source 1..80: mol_type = other DNA
agtgagccgagatcgtgccactgcactccagcctgggcagcagagccagactccatctcaaaaaaaaaaaaaaaaaaaaa

SEQ ID NO: 97904 - DNA, 80 bp, synthetic construct
  misc_feature 1..80: note = Artificially Synthesized Probe
  source 1..80: mol_type = other DNA
gcagggctgtggcagtttctaatacttattgcacagtcactgctaataacaataataataataatacctaacattaatgg

SEQ ID NO: 97905 - DNA, 80 bp, synthetic construct; identical to SEQ ID NO: 34722
  misc_feature 1..80: note = Artificially Synthesized Probe
  source 1..80: mol_type = other DNA

SEQ ID NO: 97906 - DNA, 80 bp, synthetic construct
  misc_feature 1..80: note = Artificially Synthesized Probe
  source 1..80: mol_type = other DNA
acctcttgaaacgtacttaagagtacctttctcttaatacacccacactgtaaggtactgggtggttaggacttcaacat

SEQ ID NO: 97907 - DNA, 80 bp, synthetic construct
  misc_feature 1..80: note = Artificially Synthesized Probe
  source 1..80: mol_type = other DNA
tgcaccttaaagttaggaaaaggtcaggcactgtggctcatgcctgtaatcccagcactttgggaggccgaggcggttga

SEQ ID NO: 97908 - DNA, 80 bp, synthetic construct
  misc_feature 1..80: note = Artificially Synthesized Probe
  source 1..80: mol_type = other DNA
gaggtggaggttgcaatgagccaagattgcaccactgcactccagtgacagagcgagactccatctcaaaaaaaaaaaaa

SEQ ID NO: 97909 - DNA, 80 bp, synthetic construct
  misc_feature 1..80: note = Artificially Synthesized Probe
  source 1..80: mol_type = other DNA
tgtggtggcatacgtctatggtcccagctattcgggaggctgaggcagggagattgcttgagcctaggagtccagggctg

SEQ ID NO: 97910 - DNA, 80 bp, synthetic construct; identical to SEQ ID NO: 34721
  misc_feature 1..80: note = Artificially Synthesized Probe
  source 1..80: mol_type = other DNA

SEQ ID NO: 97911 - DNA, 80 bp, synthetic construct
  misc_feature 1..80: note = Artificially Synthesized Probe
  source 1..80: mol_type = other DNA
agagcggtcagacctcccaccttacggggctccttcccctggtgctcaggaacccacagccacaagccccctgccaaggc

SEQ ID NO: 97912 - DNA, 80 bp, synthetic construct
  misc_feature 1..80: note = Artificially Synthesized Probe
  source 1..80: mol_type = other DNA
ttctgtctggatgggtatgggaccgtctgttcattatgaagtgggctcagagctgtgattctgtgagcatgtgtgcatgc

SEQ ID NO: 97913 - DNA, 80 bp, synthetic construct
  misc_feature 1..80: note = Artificially Synthesized Probe
  source 1..80: mol_type = other DNA
ccagactggtctcaaactcctgacctcaagtgatccacccacctgggcctcccaaagtgctgggattacaggcatgagcc

SEQ ID NO: 97914 - DNA, 80 bp, synthetic construct
  misc_feature 1..80: note = Artificially Synthesized Probe
  source 1..80: mol_type = other DNA
ctggcacaggttggtggttctgtcagatgaaagcaaagcgaggctggatcccagcgtccttcctcgagcccctggacagt

SEQ ID NO: 97915 - DNA, 80 bp, synthetic construct
  misc_feature 1..80: note = Artificially Synthesized Probe
  source 1..80: mol_type = other DNA
cagggctaagatctcatcgactctggcttgggggccctggcaggttgtgatgcccttggtctggacagggaaccaggagg

SEQ ID NO: 97916 - DNA, 80 bp, synthetic construct; identical to SEQ ID NO: 34739
  misc_feature 1..80: note = Artificially Synthesized Probe
  source 1..80: mol_type = other DNA

SEQ ID NO: 97917 - DNA, 80 bp, synthetic construct
  misc_feature 1..80: note = Artificially Synthesized Probe
  source 1..80: mol_type = other DNA
tccaagcaacatttattgagggtggcgggagccgcgctggacaggggtcggggctgccctcggcgtccagacgccaggct

SEQ ID NO: 97918 - DNA, 80 bp, synthetic construct
  misc_feature 1..80: note = Artificially Synthesized Probe
  source 1..80: mol_type = other DNA
ttgatcgcccctgcctcaatagggaacatttcttttaaggttttctaaacattaaaaagacaagaagacgtgaaggaata

SEQ ID NO: 97919 - DNA, 80 bp, synthetic construct
  misc_feature 1..80: note = Artificially Synthesized Probe
  source 1..80: mol_type = other DNA
ctggccaacgtggtgaaaccccgtctctactaaaaatacaaaaattagccgggagtggtggcacatgcctgtaatcccag

SEQ ID NO: 97920 - DNA, 80 bp, synthetic construct
  misc_feature 1..80: note = Artificially Synthesized Probe
  source 1..80: mol_type = other DNA
ttccttgattaacagaggcactgacctctctccctcccatgtgcaagtcaccagcaaatctttttgcttccaatccccaa

SEQ ID NO: 97921 - DNA, 80 bp, synthetic construct
  misc_feature 1..80: note = Artificially Synthesized Probe
  source 1..80: mol_type = other DNA
gtgcaggggctcaaacctgtaatcctagcaatttgggaagctgaggcgggaggatcacttgagtccaggagttagagacc

SEQ ID NO: 97922 - DNA, 80 bp, synthetic construct
  misc_feature 1..80: note = Artificially Synthesized Probe
  source 1..80: mol_type = other DNA
attgcaccactgcaccccagcctgggtgacagagcaagaccccatctcaaaagaaaagcaaatataaaaaaactgataac

SEQ ID NO: 97923 - DNA, 80 bp, synthetic construct
  misc_feature 1..80: note = Artificially Synthesized Probe
  source 1..80: mol_type = other DNA
ggaaggttctgggagatcctgtctgttttactttaaaatgagaatctggtgtttctgtgttttattgttttcagtaagac

SEQ ID NO: 97924 - DNA, 80 bp, synthetic construct
  misc_feature 1..80: note = Artificially Synthesized Probe
  source 1..80: mol_type = other DNA
ttagccacacatggtgatgcgcacctatagtcccagctactcaggaggctgaggcaggaggatcgcttgagccccagagg

SEQ ID NO: 97925 - DNA, 80 bp, synthetic construct; identical to SEQ ID NO: 34726
  misc_feature 1..80: note = Artificially Synthesized Probe
  source 1..80: mol_type = other DNA

SEQ ID NO: 97926 - DNA, 80 bp, synthetic construct
  misc_feature 1..80: note = Artificially Synthesized Probe
  source 1..80: mol_type = other DNA
agccccggggacccccgcttacctgcggggcggcgccccccgcttgatctggcgttgggcctgggacacgtcttgccccg

SEQ ID NO: 97927 - DNA, 80 bp, synthetic construct
  misc_feature 1..80: note = Artificially Synthesized Probe
  source 1..80: mol_type = other DNA
catgtacctgggggaaagccagagtcgggggaccccattcagcctccaaagaggctttgctgtgtgcacccaggatccca

SEQ ID NO: 97928 - DNA, 80 bp, synthetic construct
  misc_feature 1..80: note = Artificially Synthesized Probe
  source 1..80: mol_type = other DNA
catctgtaaattggagataaaagtaggacctaggctgggcacggtggctcacacctggaatcccagcactttttagtacc

SEQ ID NO: 97929 - DNA, 80 bp, synthetic construct
  misc_feature 1..80: note = Artificially Synthesized Probe
  source 1..80: mol_type = other DNA
gaggtcaaggctttagtgagctatgattgcaccactgcactccagcttgggtggggaggggaggggaagggaggggacag

SEQ ID NO: 97930 - DNA, 80 bp, synthetic construct
  misc_feature 1..80: note = Artificially Synthesized Probe
  source 1..80: mol_type = other DNA
ctaaaaacacaaaaattacccggtagtggtgatgggcacctgtgatcccagctacttgggaggctgggacaggagaattg

SEQ ID NO: 97931 - DNA, 80 bp, synthetic construct
  misc_feature 1..80: note = Artificially Synthesized Probe
  source 1..80: mol_type = other DNA
aacccaaactaagggacattctacaaggtaactggtctgctctctgcaaaacatcaaagttgcaaaagacaaagactgat

SEQ ID NO: 97932 - DNA, 80 bp, synthetic construct
  misc_feature 1..80: note = Artificially Synthesized Probe
  source 1..80: mol_type = other DNA
gtagccgggcatggtggcgcatgcctgtaatcccagctactcgggaggctgaggcacgagaattgcttgaacctgggagg

SEQ ID NO: 97933 - DNA, 80 bp, synthetic construct
  misc_feature 1..80: note = Artificially Synthesized Probe
  source 1..80: mol_type = other DNA
cgcacctgtattcccagctactcaggaggctgaggcaggagaatctcttgaacccaggaggcagaggttgcaatgagccg

SEQ ID NO: 97934 - DNA, 80 bp, synthetic construct
  misc_feature 1..80: note = Artificially Synthesized Probe
  source 1..80: mol_type = other DNA
tcactgcagaggacaagcaggataatcggggaaacctcagtaaagtctgtgggtggataatggtgttttgtccatgttaa

SEQ ID NO: 97935 - DNA, 80 bp, synthetic construct
  misc_feature 1..80: note = Artificially Synthesized Probe
  source 1..80: mol_type = other DNA
tgaaggtgagtgaaagactattggagtgactggtaccgttttgacacccagtagcctttctgtaaatttgaaatttcaaa

SEQ ID NO: 97936 - DNA, 80 bp, synthetic construct
  misc_feature 1..80: note = Artificially Synthesized Probe
  source 1..80: mol_type = other DNA
aaaattttaaaaactagccaggcatggtggtgtgcgcctgtagccccagctactcaaggggctgaggcaggaggatcact

SEQ ID NO: 97937 - DNA, 80 bp, synthetic construct
  misc_feature 1..80: note = Artificially Synthesized Probe
  source 1..80: mol_type = other DNA
aggttgcaaacaaccggacacctgcctctgtgggcctcagtttcctggtctgtgcaactgagacccttccagcaatcctt

SEQ ID NO: 97938 - DNA, 80 bp, synthetic construct
  misc_feature 1..80: note = Artificially Synthesized Probe
  source 1..80: mol_type = other DNA
tttgagaccagtctggccaacatggtgaaaccctgtctctactaaaaatacaaaaattagccaggcgtggtggtgggcac

SEQ ID NO: 97939 - DNA, 80 bp, synthetic construct; identical to SEQ ID NO: 34730
  misc_feature 1..80: note = Artificially Synthesized Probe
  source 1..80: mol_type = other DNA

SEQ ID NO: 97940 - DNA, 80 bp, synthetic construct
  misc_feature 1..80: note = Artificially Synthesized Probe
  source 1..80: mol_type = other DNA
agagagagctttagtttccaggcctccctcttgggagggccactctctgatagctgggctagtcagggaaggcttcctgg

SEQ ID NO: 97941 - DNA, 80 bp, synthetic construct; identical to SEQ ID NO: 34729
  misc_feature 1..80: note = Artificially Synthesized Probe
  source 1..80: mol_type = other DNA

SEQ ID NO: 97942 - DNA, 80 bp, synthetic construct
  misc_feature 1..80: note = Artificially Synthesized Probe
  source 1..80: mol_type = other DNA
cctccagtgctccctggcacttccaggctgcgccttaaatgcactggaaagaggaagtcgcttttgtcgcggtcgggaca

SEQ ID NO: 97943 - DNA, 80 bp, synthetic construct
  misc_feature 1..80: note = Artificially Synthesized Probe
  source 1..80: mol_type = other DNA
ttggagatcagcctgggtaacatagcaagacccctatctctacctcccgaaaaaattaaagaaaaaagaagacactggca

SEQ ID NO: 97944 - DNA, 80 bp, synthetic construct
  misc_feature 1..80: note = Artificially Synthesized Probe
  source 1..80: mol_type = other DNA
tggagtgcaatggcatgatgtcgactcattgcaacctctgcttcccaagttcaagcaattctcctgcctcagcttcccaa

SEQ ID NO: 97945 - DNA, 80 bp, synthetic construct
  misc_feature 1..80: note = Artificially Synthesized Probe
  source 1..80: mol_type = other DNA
caggcgtgagctccctgtccagccccaaatggtttttagtttcaggttttactctgggataaacctgtgatccatctgaa

SEQ ID NO: 97946 - DNA, 80 bp, synthetic construct
  misc_feature 1..80: note = Artificially Synthesized Probe
  source 1..80: mol_type = other DNA
aaaacaaaagaaaactttgcataatacaaggttcacataaaacccaattcttggctggtgggaggatcacaagaagatta

SEQ ID NO: 97947 - DNA, 80 bp, synthetic construct
  misc_feature 1..80: note = Artificially Synthesized Probe
  source 1..80: mol_type = other DNA
cggtttagagcgctgcgtctgccgctcctcctctgcgggcagagagcggggccgagtcagacgccccgccccgcacactg

SEQ ID NO: 97948 - DNA, 80 bp, synthetic construct
  misc_feature 1..80: note = Artificially Synthesized Probe
  source 1..80: mol_type = other DNA
tgtgacctagggctctgaagacgccagcaaaggcccagcatggaggctcattcctgtaatcccagtgctttgggaggcca

SEQ ID NO: 97949 - DNA, 80 bp, synthetic construct
  misc_feature 1..80: note = Artificially Synthesized Probe
  source 1..80: mol_type = other DNA
cgcttgagtgagcgatgattgtgctccagcctgggagtcagagcaagatcctgtctcaaaaaatgaaaaaattcgtaaaa

SEQ ID NO: 97950 - DNA, 80 bp, synthetic construct
  misc_feature 1..80: note = Artificially Synthesized Probe
  source 1..80: mol_type = other DNA
gaagcttttttttttttttttttttttttgagacagggtcttgctccattacccaggctggggtgcagtggtgcagtcat

SEQ ID NO: 97951 - DNA, 80 bp, synthetic construct
  misc_feature 1..80: note = Artificially Synthesized Probe
  source 1..80: mol_type = other DNA
cttgaacttgtagccttgagtgatcctcccacctcagcttcccaaagtgttgggattacaggcatgagacactgcacctg

SEQ ID NO: 97952 - DNA, 80 bp, synthetic construct
  misc_feature 1..80: note = Artificially Synthesized Probe
  source 1..80: mol_type = other DNA
ttgaagcgattctcttgtctcagactcccgagtagctgggattacaggctcccaccacaacacccggctcatgtttgtgt

SEQ ID NO: 97953 - DNA, 80 bp, synthetic construct
  misc_feature 1..80: note = Artificially Synthesized Probe
  source 1..80: mol_type = other DNA
tcaccatgttgccagagaaggaataataatagatggttgggaagagaccctaaatcacaaaggagaaatgcacccacttg

SEQ ID NO: 97954 - DNA, 80 bp, synthetic construct
  misc_feature 1..80: note = Artificially Synthesized Probe
  source 1..80: mol_type = other DNA
gggctgactcagatgggtgctctggatggagaggggccctcctacctgatgacccaccagccgtccaggagcttgtgaat

SEQ ID NO: 97955 - DNA, 80 bp, synthetic construct
  misc_feature 1..80: note = Artificially Synthesized Probe
  source 1..80: mol_type = other DNA
atcttctcctctctgcgcctgggcttcctccaggcactccagacccacccagggcccacagttccccctcttctgggtct

SEQ ID NO: 97956 - DNA, 80 bp, synthetic construct; identical to SEQ ID NO: 34719
  misc_feature 1..80: note = Artificially Synthesized Probe
  source 1..80: mol_type = other DNA

SEQ ID NO: 97957 - DNA, 80 bp, synthetic construct
  misc_feature 1..80: note = Artificially Synthesized Probe
  source 1..80: mol_type = other DNA
cctgaggtcaggagttcgagaccagcctggccaacatggcgaaaccccatctctactaaaaatacaaaaaattagcctgg

SEQ ID NO: 97958 - DNA, 80 bp, synthetic construct
  misc_feature 1..80: note = Artificially Synthesized Probe
  source 1..80: mol_type = other DNA
cccgcctctccctctgattccgccctctggtcccgccccgctactctggccctgcctctggccccgcctctcccgctgac

SEQ ID NO: 97959 - DNA, 80 bp, synthetic construct
  misc_feature 1..80: note = Artificially Synthesized Probe
  source 1..80: mol_type = other DNA
aaaaaagctgtaaatccacataaaagggtgaaatcactccattttaaaatgtgggtaaccaggccagggacagtggctca

SEQ ID NO: 97960 - DNA, 80 bp, synthetic construct
  misc_feature 1..80: note = Artificially Synthesized Probe
  source 1..80: mol_type = other DNA
ctacctggggaggctgaggctggagaatcacttgatcctgggaggcagaggttgcagtgagctgagatagcaccaccgca

SEQ ID NO: 97961 - DNA, 80 bp, synthetic construct; identical to SEQ ID NO: 34720
  misc_feature 1..80: note = Artificially Synthesized Probe
  source 1..80: mol_type = other DNA

SEQ ID NO: 97962 - DNA, 80 bp, synthetic construct
  misc_feature 1..80: note = Artificially Synthesized Probe
  source 1..80: mol_type = other DNA
aagccagcaaccagcccagactccaaagcagtcactcaatatccctgagccctgcctgcccctttctcccacacccctac

SEQ ID NO: 97963 - DNA, 80 bp, synthetic construct
  misc_feature 1..80: note = Artificially Synthesized Probe
  source 1..80: mol_type = other DNA
tgtgactgaggggcagggcccagcggctccctgcagccatcagggatggtgaggacacagggacacagacacactgatgt

SEQ ID NO: 97964 - DNA, 80 bp, synthetic construct
  misc_feature 1..80: note = Artificially Synthesized Probe
  source 1..80: mol_type = other DNA
gccccgccccggcctgccatgcacagatgcccacagccaccacagggtgcacactaagagagaaggcgacccacagtgtg

SEQ ID NO: 97965 - DNA, 80 bp, synthetic construct
  misc_feature 1..80: note = Artificially Synthesized Probe
  source 1..80: mol_type = other DNA
acgacctccaccacgtcccccgtggacagagccatctcggagcccgaggtcttctcgtagtcggcaatggcgcggtacgt

SEQ ID NO: 97966 - DNA, 80 bp, synthetic construct
  misc_feature 1..80: note = Artificially Synthesized Probe
  source 1..80: mol_type = other DNA
tcggcctcacacttcaaacatgtccttgttctcatctgatgaagttagtgagcctttcccaactttattttcttttttgg

SEQ ID NO: 97967 - DNA, 80 bp, synthetic construct; identical to SEQ ID NO: 34738
  misc_feature 1..80: note = Artificially Synthesized Probe
  source 1..80: mol_type = other DNA

SEQ ID NO: 97968 - DNA, 80 bp, synthetic construct
  misc_feature 1..80: note = Artificially Synthesized Probe
  source 1..80: mol_type = other DNA
tcaagtaattcacctgcctcagcctcccaagtagctgggactacaagcacccgccaccacacctggctaatttttgtatt

SEQ ID NO: 97969 - DNA, 80 bp, synthetic construct
  misc_feature 1..80: note = Artificially Synthesized Probe
  source 1..80: mol_type = other DNA
tacctgggattttgctaaaatgcctatcctgttcagtaggtccactgtgggacctgagtgtgcatttctgaccagccctt

SEQ ID NO: 97970 - DNA, 80 bp, synthetic construct
  misc_feature 1..80: note = Artificially Synthesized Probe
  source 1..80: mol_type = other DNA
gatggatgctgtgcgcgttgcggatggacgacctggcccagcgggacggggcgtcgtcaaagcccgagggcgcccctgcc

SEQ ID NO: 97971 - DNA, 80 bp, synthetic construct
  misc_feature 1..80: note = Artificially Synthesized Probe
  source 1..80: mol_type = other DNA
gttaaaatgaggtcagtagagtgggccctaacccaacaggcctcgtgtccttataagaagaagaaaaagccgggcacagt

SEQ ID NO: 97972 - DNA, 80 bp, synthetic construct
  misc_feature 1..80: note = Artificially Synthesized Probe
  source 1..80: mol_type = other DNA
tcccagctacttggaaggctgaggtgggaggatcgcttcagcccaggaggtcgaggctgtagtgagctatgatcacacca

SEQ ID NO: 97973 - DNA, 80 bp, synthetic construct
  misc_feature 1..80: note = Artificially Synthesized Probe
  source 1..80: mol_type = other DNA
tgccacagccctgcatcgcctctgaaggccacgctgccctccaaaacctgttcattcattcagccgcaaacactcccccg

SEQ ID NO: 97974 - DNA, 80 bp, synthetic construct
  misc_feature 1..80: note = Artificially Synthesized Probe
  source 1..80: mol_type = other DNA
tggcacgatctcggctcactgcaaactccgtcttccgggttcaagcaattctcctgcctcagcctcccaagtggctggga

SEQ ID NO: 97975 - DNA, 80 bp, synthetic construct
  misc_feature 1..80: note = Artificially Synthesized Probe
  source 1..80: mol_type = other DNA
cgcacccggcccaaagacccaattcttcagcagggtagctgtgagccctcccagcctgctcccagcccctgctccattcc

SEQ ID NO: 97976 - DNA, 80 bp, synthetic construct
  misc_feature 1..80: note = Artificially Synthesized Probe
  source 1..80: mol_type = other DNA
ttcccatggaggaagaagaggcactgggtagacctgcagaagaacttcccaagagaagagggacccgggaaagggaaggg

SEQ ID NO: 97977 - DNA, 80 bp, synthetic construct
  misc_feature 1..80: note = Artificially Synthesized Probe
  source 1..80: mol_type = other DNA
gaaaatgctcttgcgggctcccaggccatcttctttcttcttttcttttttttttcttagacagagtctcgctctgtcac

SEQ ID NO: 97978 - DNA, 80 bp, synthetic construct
  misc_feature 1..80: note = Artificially Synthesized Probe
  source 1..80: mol_type = other DNA
gggtttcaccatgttggccaggctggtctcaaactcccaacctcaggtgatctgcccacctcgaccttccaaagtgctgg

SEQ ID NO: 97979 - DNA, 80 bp, synthetic construct
  misc_feature 1..80: note = Artificially Synthesized Probe
  source 1..80: mol_type = other DNA
ttcaagcgtcaataagtgctggccggagcaatgctgcttgtctctgtcttggcagcctgggtgccttgacaaggggtaac

SEQ ID NO: 97980 - DNA, 80 bp, synthetic construct; identical to SEQ ID NO: 34735
  misc_feature 1..80: note = Artificially Synthesized Probe
  source 1..80: mol_type = other DNA

SEQ ID NO: 97981 - DNA, 80 bp, synthetic construct
  misc_feature 1..80: note = Artificially Synthesized Probe
  source 1..80: mol_type = other DNA
ccttcggtctgtcgtccccctctccggggagcccccctggactgcccatccccaaagcccccgggcatcgccgctttcct

SEQ ID NO: 97982 - DNA, 80 bp, synthetic construct
  misc_feature 1..80: note = Artificially Synthesized Probe
  source 1..80: mol_type = other DNA
cggggtcacaggggccggaggtggaatttgcctcctctttctggctgtgtggctctgggaaggtggctttccctctctga

SEQ ID NO: 97983 - DNA, 80 bp, synthetic construct
  misc_feature 1..80: note = Artificially Synthesized Probe
  source 1..80: mol_type = other DNA
gggagatcttggtgggcaggctcatgagcgtgctgcagtactcggtaagtgtgccctggtggttctcggcggcccgctgc

SEQ ID NO: 97984 - DNA, 80 bp, synthetic construct; identical to SEQ ID NO: 34746
  misc_feature 1..80: note = Artificially Synthesized Probe
  source 1..80: mol_type = other DNA

SEQ ID NO: 97985 - DNA, 80 bp, synthetic construct
  misc_feature 1..80: note = Artificially Synthesized Probe
  source 1..80: mol_type = other DNA
gaagacccagagaaacacctccccagttattccaaagagaaaagacaacagagcttggagtagaacatcccagctttctc

SEQ ID NO: 97986 - DNA, 80 bp, synthetic construct
  misc_feature 1..80: note = Artificially Synthesized Probe
  source 1..80: mol_type = other DNA
tcaccaggtcaggagatcgagaccatcctggccaacatggtgaaaccccgtctctactaaaaaaatacaaaaattagccg

SEQ ID NO: 97987 - DNA, 80 bp, synthetic construct
  misc_feature 1..80: note = Artificially Synthesized Probe
  source 1..80: mol_type = other DNA
atcatttttcaaattcttcctataccaactctcactctcaccctctgccatcattctccagccagttcagtagtaacttg

SEQ ID NO: 97988 - DNA, 80 bp, synthetic construct; identical to SEQ ID NO: 34747
  misc_feature 1..80: note = Artificially Synthesized Probe
  source 1..80: mol_type = other DNA

SEQ ID NO: 97989 - DNA, 80 bp, synthetic construct
  misc_feature 1..80: note = Artificially Synthesized Probe
  source 1..80: mol_type = other DNA
ccaccacgactggctaatttttgtattttcagtcgagacagggtttcaccatctggtctcaaactcctgacctcaagtga

SEQ ID NO: 97990 - DNA, 80 bp, synthetic construct; identical to SEQ ID NO: 34745
  misc_feature 1..80: note = Artificially Synthesized Probe
  source 1..80: mol_type = other DNA

SEQ ID NO: 97991 - DNA, 80 bp, synthetic construct
  misc_feature 1..80: note = Artificially Synthesized Probe
  source 1..80: mol_type = other DNA
tttaacccgtccatgttgatgaattaaaccaaatattaaaatccctgattaaattatctacttagggaaatttacaagtc

SEQ ID NO: 97992 - DNA, 80 bp, synthetic construct
  misc_feature 1..80: note = Artificially Synthesized Probe
  source 1..80: mol_type = other DNA
ctcctgcatttagttaataatatgcctgatagttaaggtctctcagttcattaaaaacagtttcggccgggtgcagtggc

SEQ ID NO: 97993 - DNA, 80 bp, synthetic construct
  misc_feature 1..80: note = Artificially Synthesized Probe
  source 1..80: mol_type = other DNA
gtggaagggaaagttcagagttgggggaatccggagagagtagatttggcatctggagaatggagaagaaaacacttgag

SEQ ID NO: 97994 - DNA, 80 bp, synthetic construct; identical to SEQ ID NO: 34748
  misc_feature 1..80: note = Artificially Synthesized Probe
  source 1..80: mol_type = other DNA

SEQ ID NO: 97995 - DNA, 80 bp, synthetic construct
  misc_feature 1..80: note = Artificially Synthesized Probe
  source 1..80: mol_type = other DNA
tactaaaaatacaaaaatggctgggcgcagtggctcaggcctgtaatccccgcactttaggaggccgaggcaggcagatc

SEQ ID NO: 97996 - DNA, 80 bp, synthetic construct
  misc_feature 1..80: note = Artificially Synthesized Probe
  source 1..80: mol_type = other DNA
agatcatgccactgcactccagcctaggtgacagagcaagactccgtctcaaaaaaaaaaaaaattagccaggtgtggtc

SEQ ID NO: 97997 - DNA, 80 bp, synthetic construct
  misc_feature 1..80: note = Artificially Synthesized Probe
  source 1..80: mol_type = other DNA
gaaatttatcatagatttacttggatctctcaaactaaaaagcctcacagtgggtgacacagagagactgtgaattgggg

SEQ ID NO: 97998 - DNA, 80 bp, synthetic construct; identical to SEQ ID NO: 34749
  misc_feature 1..80: note = Artificially Synthesized Probe
  source 1..80: mol_type = other DNA

SEQ ID NO: 97999 - DNA, 80 bp, synthetic construct
  misc_feature 1..80: note = Artificially Synthesized Probe
  source 1..80: mol_type = other DNA
gagagaggacagatgctgctggaggagatgtcagggtctctaggaggccaaggggccagcttgtggcaggctagctaagc

SEQ ID NO: 98000 - DNA, 80 bp, synthetic construct
  misc_feature 1..80: note = Artificially Synthesized Probe
  source 1..80: mol_type = other DNA
gttgcagtcccgaggctctcctcttcctggtctctgtcctccctcctcccactctcttactgcccctcccatcccgtcca

SEQ ID NO: 98001 - DNA, 80 bp, synthetic construct
  misc_feature 1..80: note = Artificially Synthesized Probe
  source 1..80: mol_type = other DNA
tggggaagaagtgcacacaggctcagggagggaaggggcctcagaggagcatccctgcctcccaaggacattgcctcttg

SEQ ID NO: 98002 - DNA, 80 bp, synthetic construct; identical to SEQ ID NO: 34750
  misc_feature 1..80: note = Artificially Synthesized Probe
  source 1..80: mol_type = other DNA

SEQ ID NO: 98003 - DNA, 80 bp, synthetic construct
  misc_feature 1..80: note = Artificially Synthesized Probe
  source 1..80: mol_type = other DNA
gcctcttccagctgtaaactggcattcagatgaagtggtaacttctagggatgaggttcaagaagagttcaaactttcct

SEQ ID NO: 98004 - DNA, 80 bp, synthetic construct
  misc_feature 1..80: note = Artificially Synthesized Probe
  source 1..80: mol_type = other DNA
caaaatgttcatttggaaagactaagaagtagtggacaagttggctgatcttttaaattggtcagggagggtcagttacc

SEQ ID NO: 98005 - DNA, 80 bp, synthetic construct
  misc_feature 1..80: note = Artificially Synthesized Probe
  source 1..80: mol_type = other DNA
aaaacctagagtcaaatgatactcattgaacacatacaggtcgcccattcatttcttcaccaaaaaattagcctgaccct

SEQ ID NO: 98006 - DNA, 80 bp, synthetic construct; identical to SEQ ID NO: 34752
  misc_feature 1..80: note = Artificially Synthesized Probe
  source 1..80: mol_type = other DNA

SEQ ID NO: 98007 - DNA, 80 bp, synthetic construct
  misc_feature 1..80: note = Artificially Synthesized Probe
  source 1..80: mol_type = other DNA
actcgggaggctgaggcaggagaatggtgtgaacccgggaggtggaccttgcagtgagccgaggtcgcaccactgcactc

SEQ ID NO: 98008 - DNA, 80 bp, synthetic construct
  misc_feature 1..80: note = Artificially Synthesized Probe
  source 1..80: mol_type = other DNA
aaccccgtctccactaaaaatacaaacatgagccgggcatggtggtgggtgcctgtaatcccagctactcgggagactga

SEQ ID NO: 98009 - DNA, 80 bp, synthetic construct
  misc_feature 1..80: note = Artificially Synthesized Probe
  source 1..80: mol_type = other DNA
tagtgctgccctgatccctgacaggaagagctggctaattttagataatctgtgccctgacactgaagtgtctaatcata

SEQ ID NO: 98010 - DNA, 80 bp, synthetic construct
  misc_feature 1..80: note = Artificially Synthesized Probe
  source 1..80: mol_type = other DNA
gccgaggcgggtggatcatgaggtcaggagatcgagaccatcctggctaacaaggtgaaaccccgtctctactaaaaata

SEQ ID NO: 98011 - DNA, 80 bp, synthetic construct; identical to SEQ ID NO: 34753
  misc_feature 1..80: note = Artificially Synthesized Probe
  source 1..80: mol_type = other DNA

SEQ ID NO: 98012 - DNA, 80 bp, synthetic construct
  misc_feature 1..80: note = Artificially Synthesized Probe
  source 1..80: mol_type = other DNA
gtggaggttgcagtgagccaagatcgcgccattgccctccagcctgggagacaagagcgagactctgtctcaaaaaaaaa

SEQ ID NO: 98013 - DNA, 80 bp, synthetic construct
  misc_feature 1..80: note = Artificially Synthesized Probe
  source 1..80: mol_type = other DNA
ccataaaacccgtgtggcacaggtttgagtaactggccagctacagatcactgatcttccccatagggatgcatactcct

SEQ ID NO: 98014 - DNA, 80 bp, synthetic construct
  misc_feature 1..80: note = Artificially Synthesized Probe
  source 1..80: mol_type = other DNA
tcagagtcaggatacctgggttctgtcttctacttggccactgatttacccttcacaagccaccctttttgaatgtggtc

SEQ ID NO: 98015 - DNA, 80 bp, synthetic construct; identical to SEQ ID NO: 34754
  misc_feature 1..80: note = Artificially Synthesized Probe
  source 1..80: mol_type = other DNA

SEQ ID NO: 98016 - DNA, 80 bp, synthetic construct
  misc_feature 1..80: note = Artificially Synthesized Probe
  source 1..80: mol_type = other DNA
ataacaacaaaaacaacggcagcagctaatatttaatgagttaaatatgcatcaagtcctgttctaagcactctagatat

SEQ ID NO: 98017 - DNA, 80 bp, synthetic construct
  misc_feature 1..80: note = Artificially Synthesized Probe
  source 1..80: mol_type = other DNA
cttttcacacacacaagcagggactcgacagccctgaggagtggcaccgtgctccagctcactcaaaaacacctctttct

SEQ ID NO: 98018 - DNA, 80 bp, synthetic construct
  misc_feature 1..80: note = Artificially Synthesized Probe
  source 1..80: mol_type = other DNA
tgaggctgaggcaggagaatgacgtgaatccgggaggcggagcttgcagtgagccgagatcgcaccactgcactccagcc

SEQ ID NO: 98019 - DNA, 80 bp, synthetic construct; identical to SEQ ID NO: 34755
  misc_feature 1..80: note = Artificially Synthesized Probe
  source 1..80: mol_type = other DNA

SEQ ID NO: 98020 - DNA, 80 bp, synthetic construct
  misc_feature 1..80: note = Artificially Synthesized Probe
  source 1..80: mol_type = other DNA
gaaagaacaggtgatgtgtataccaaggtcccacttgctcaggcaaaaagaggctgcagaaaattggttcatcaatggaa

SEQ ID NO: 98021 - DNA, 80 bp, synthetic construct
  misc_feature 1..80: note = Artificially Synthesized Probe
  source 1..80: mol_type = other DNA
ggctacgaccttgagcggcggcctccgggtccccacgtaagccgctacctctcaccagtgttcggcacctcccgatacca

SEQ ID NO: 98022 - DNA, 80 bp, synthetic construct
  misc_feature 1..80: note = Artificially Synthesized Probe
  source 1..80: mol_type = other DNA
cgtgcggaccgcgggcgaatgtcttttcccattggctaaggaggaacgccccgcctgtatgctgggtgggcgggaggatg

SEQ ID NO: 98023 - DNA, 80 bp, synthetic construct
  misc_feature 1..80: note = Artificially Synthesized Probe
  source 1..80: mol_type = other DNA
aacatgtgtccgctgcttccatactttaattgtttcttccagttcgatctttccctgaacagtgaggagagaggtcatca

SEQ ID NO: 98024 - DNA, 80 bp, synthetic construct; identical to SEQ ID NO: 34751
  misc_feature 1..80: note = Artificially Synthesized Probe
  source 1..80: mol_type = other DNA

SEQ ID NO: 98025 - DNA, 80 bp, synthetic construct
  misc_feature 1..80: note = Artificially Synthesized Probe
  source 1..80: mol_type = other DNA
ttatttgagacaaggtcttgctctgtggcccaggctgggtacagtggcacaatcacagctcactgtagcctctactttct

SEQ ID NO: 98026 - DNA, 80 bp, synthetic construct
  misc_feature 1..80: note = Artificially Synthesized Probe
  source 1..80: mol_type = other DNA
aagagatagagactgggccgggcgcggtggctgacgcctgtaatcccagcacttggggaggccgaggcgggtggatcacg

SEQ ID NO: 98027 - DNA, 80 bp, synthetic construct; identical to SEQ ID NO: 34767
  misc_feature 1..80: note = Artificially Synthesized Probe
  source 1..80: mol_type = other DNA

SEQ ID NO: 98028 - DNA, 80 bp, synthetic construct
  misc_feature 1..80: note = Artificially Synthesized Probe
  source 1..80: mol_type = other DNA
caagatcgtgccactgcactccagcctggcaacagagcgagactctgtctcaaaaaaaaaaaaaaaaaaaaacagaaaga

SEQ ID NO: 98029 - DNA, 80 bp, synthetic construct
  misc_feature 1..80: note = Artificially Synthesized Probe
  source 1..80: mol_type = other DNA
caggtgtggtagctcacgcctgtaatctcaacactttgggaggccgaggcggatggatcacctgaggtaaggagttcgag

SEQ ID NO: 98030 - DNA, 80 bp, synthetic construct
  misc_feature 1..80: note = Artificially Synthesized Probe
  source 1..80: mol_type = other DNA
cagcctggacaagagcaaaattccatgtgaaaaaaaaaaaaaaagagacagggtctcttgctctgtcacccaggctgcag

SEQ ID NO: 98031 - DNA, 80 bp, synthetic construct
  misc_feature 1..80: note = Artificially Synthesized Probe
  source 1..80: mol_type = other DNA
acctgtaatcccagcactttgggagtccaaggtggacggatcacttgaggtcaggagttcaagaccagcctggccaaaat

SEQ ID NO: 98032 - DNA, 80 bp, synthetic construct; identical to SEQ ID NO: 34768
  misc_feature 1..80: note = Artificially Synthesized Probe
  source 1..80: mol_type = other DNA

SEQ ID NO: 98033 - DNA, 80 bp, synthetic construct
  misc_feature 1..80: note = Artificially Synthesized Probe
  source 1..80: mol_type = other DNA
ggccagggcaggcggatcacctaggacaggagttcaagaccagcctaaccaacatggtgaaacccctacagaaaatacaa

SEQ ID NO: 98034 - DNA, 80 bp, synthetic construct
  misc_feature 1..80: note = Artificially Synthesized Probe
  source 1..80: mol_type = other DNA
aaaaaaaaaaaaaaattagctgggcatggtggtgggcacctgtaatcccagctactcgggaggctgaggcaggagaatcg

SEQ ID NO: 98035 - DNA, 80 bp, synthetic construct; identical to SEQ ID NO: 34757
  misc_feature 1..80: note = Artificially Synthesized Probe
  source 1..80: mol_type = other DNA

SEQ ID NO: 98036 - DNA, 80 bp, synthetic construct
  misc_feature 1..80: note = Artificially Synthesized Probe
  source 1..80: mol_type = other DNA
tcacgaggtcaggagatcgagaccatcccggctaaaacggtgaaaccccgtctctactaaaaaaatacaaaaaattagcc

SEQ ID NO: 98037 - DNA, 80 bp, synthetic construct; identical to SEQ ID NO: 34769
  misc_feature 1..80: note = Artificially Synthesized Probe
  source 1..80: mol_type = other DNA

SEQ ID NO: 98038 - DNA, 80 bp, synthetic construct
  misc_feature 1..80: note = Artificially Synthesized Probe
  source 1..80: mol_type = other DNA
cctgtaatcccagcactttgggaggccaaggtgggtggatgacaaggtcaggagtttgaggccagcctgaccaacatgaa

SEQ ID NO: 98039 - DNA, 80 bp, synthetic construct
  misc_feature 1..80: note = Artificially Synthesized Probe
  source 1..80: mol_type = other DNA
gagcaaaattccatctcaaaaaaaaaaaaaaaaaaatagagatgaggtcttgttatgttgctcagacgagtctctaactc

SEQ ID NO: 98040 - DNA, 80 bp, synthetic construct
  misc_feature 1..80: note = Artificially Synthesized Probe
  source 1..80: mol_type = other DNA
gctcactgcaagctccgcctcccgggttcacgccattctcctgcctcagcctcgcgagtagctgggactacaggcgcccg

SEQ ID NO: 98041 - DNA, 80 bp, synthetic construct; identical to SEQ ID NO: 34770
  misc_feature 1..80: note = Artificially Synthesized Probe
  source 1..80: mol_type = other DNA

SEQ ID NO: 98042 - DNA, 80 bp, synthetic construct
  misc_feature 1..80: note = Artificially Synthesized Probe
  source 1..80: mol_type = other DNA
agcctcctgaatagctgggattacaggcgggcgccaccatgcccggctaatttttgtttttgtttttgttttttcagtag

SEQ ID NO: 98043 - DNA, 80 bp, synthetic construct
  misc_feature 1..80: note = Artificially Synthesized Probe
  source 1..80: mol_type = other DNA
ctctgtcacccaggctggagtgcaatggcacgaccctggctcactgcaacctccgcctcccgggttcaagtgcttctcct

SEQ ID NO: 98044 - DNA, 80 bp, synthetic construct
  misc_feature 1..80: note = Artificially Synthesized Probe
  source 1..80: mol_type = other DNA
caagcaattctcttgcctcagtcactgggattacaggcgtgcgccaccacgcccagctaatttttgtatttttagtagag

SEQ ID NO: 98045 - DNA, 80 bp, synthetic construct
  misc_feature 1..80: note = Artificially Synthesized Probe
  source 1..80: mol_type = other DNA
aactcaggccaaacgataaagggttaactatgaaaaaaatatttgtaacatttatggaaaaaagactagtatcctaaaca

SEQ ID NO: 98046 - DNA, 80 bp, synthetic construct; identical to SEQ ID NO: 34771
  misc_feature 1..80: note = Artificially Synthesized Probe
  source 1..80: mol_type = other DNA

SEQ ID NO: 98047 - DNA, 80 bp, synthetic construct
  misc_feature 1..80: note = Artificially Synthesized Probe
  source 1..80: mol_type = other DNA
ttcatttttttttttctaccagtaaacagaaaatctaaactattaactggacaataccgccctgaggttgacggtgggtt

SEQ ID NO: 98048 - DNA, 80 bp, synthetic construct
  misc_feature 1..80: note = Artificially Synthesized Probe
  source 1..80: mol_type = other DNA
atttcaattatagagacgaagaaactgacgttccaaggctaatttacccgaggtcacacaggtagtgagtggcaaaattc

SEQ ID NO: 98049 - DNA, 80 bp, synthetic construct
  misc_feature 1..80: note = Artificially Synthesized Probe
  source 1..80: mol_type = other DNA
ttacctccccgagcctatagtgtaccttccgcccagaagccactttacccgtataggtccatctgcttttcccttccgat

SEQ ID NO: 98050 - DNA, 80 bp, synthetic construct; identical to SEQ ID NO: 34772
  misc_feature 1..80: note = Artificially Synthesized Probe
  source 1..80: mol_type = other DNA

SEQ ID NO: 98051 - DNA, 80 bp, synthetic construct
  misc_feature 1..80: note = Artificially Synthesized Probe
  source 1..80: mol_type = other DNA
gactaatttttgtatttttagtagagacggggtttcaccatgttagccgggatgatctcgatctcctgacctcgtgatcc

SEQ ID NO: 98052 - DNA, 80 bp, synthetic construct
  misc_feature 1..80: note = Artificially Synthesized Probe
  source 1..80: mol_type = other DNA
aggcctcaaaaggccgattctgctggaattgcccccatgaattcttgaggaccaccacgcacctggacagcagcccctcc

SEQ ID NO: 98053 - DNA, 80 bp, synthetic construct
  misc_feature 1..80: note = Artificially Synthesized Probe
  source 1..80: mol_type = other DNA
tcctgggttggagcaattctcctgcctcagcctcccaagtagctgggattacaggtgtgtgccaccacacccggataatt

SEQ ID NO: 98054 - DNA, 80 bp, synthetic construct; identical to SEQ ID NO: 34773
  misc_feature 1..80: note = Artificially Synthesized Probe
  source 1..80: mol_type = other DNA

SEQ ID NO: 98055 - DNA, 80 bp, synthetic construct
  misc_feature 1..80: note = Artificially Synthesized Probe
  source 1..80: mol_type = other DNA
tccatgttttctccttcactagtttccgcgccgcctcctcttcctcaaattcggcttggcttctctagactctacacttg

SEQ ID NO: 98056 - DNA, 80 bp, synthetic construct
  misc_feature 1..80: note = Artificially Synthesized Probe
  source 1..80: mol_type = other DNA
gcctgtaatcccagcactttgggaggccgaggcgggcggatcacaaggtcaggagatcgagaccatcctggctaacacgg

SEQ ID NO: 98057 - DNA, 80 bp, synthetic construct
  misc_feature 1..80: note = Artificially Synthesized Probe
  source 1..80: mol_type = other DNA
cgtttcccttccttcctacattagaaactgaactaaaagaaatgtcctattccttctactcttgaactttcaagtgtgcc

SEQ ID NO: 98058 - DNA, 80 bp, synthetic construct
  misc_feature 1..80: note = Artificially Synthesized Probe
  source 1..80: mol_type = other DNA
ccacagagccagactccgtctcagaaaaagaaaaaatcgaaatgtctttttgttgttgttttttaggaaatatccttgag

SEQ ID NO: 98059 - DNA, 80 bp, synthetic construct; identical to SEQ ID NO: 34774
  misc_feature 1..80: note = Artificially Synthesized Probe
  source 1..80: mol_type = other DNA

SEQ ID NO: 98060 - DNA, 80 bp, synthetic construct
  misc_feature 1..80: note = Artificially Synthesized Probe
  source 1..80: mol_type = other DNA
gatctcggctcactgcaacccccgcctcccgggttcaagtgattctcctgcctcagcctcctgagtagctgggattagag

SEQ ID NO: 98061 - DNA, 80 bp, synthetic construct
  misc_feature 1..80: note = Artificially Synthesized Probe
  source 1..80: mol_type = other DNA
ccaggctgtttgcttaagtataggaagccccatatgtatttattaccagtggagaaaggaaggctggaagaaagaaaaaa

SEQ ID NO: 98062 - DNA, 80 bp, synthetic construct; identical to SEQ ID NO: 34775
  misc_feature 1..80: note = Artificially Synthesized Probe
  source 1..80: mol_type = other DNA

SEQ ID NO: 98063 - DNA, 80 bp, synthetic construct
  misc_feature 1..80: note = Artificially Synthesized Probe
  source 1..80: mol_type = other DNA
ctactaaaaatacaaaaattagccaggggtggtggcgagcacccgtaatcccagctactcgggaggctgaggcaggagaa

SEQ ID NO: 98064 - DNA, 80 bp, synthetic construct
  misc_feature 1..80: note = Artificially Synthesized Probe
  source 1..80: mol_type = other DNA
aggggaccatctatctatttgtggacataaggctgacaaatgccataaatgataatatgacaaagggaacaaagtgaggg

SEQ ID NO: 98065 - DNA, 80 bp, synthetic construct
  misc_feature 1..80: note = Artificially Synthesized Probe
  source 1..80: mol_type = other DNA
ggcagtgacaaaagaggcagaagtgttgttcagccctggccaaccttagaaggtagcaggatcattttttgtttgtgtgt

SEQ ID NO: 98066 - DNA, 80 bp, synthetic construct; identical to SEQ ID NO: 34776
  misc_feature 1..80: note = Artificially Synthesized Probe
  source 1..80: mol_type = other DNA

SEQ ID NO: 98067 - DNA, 80 bp, synthetic construct
  misc_feature 1..80: note = Artificially Synthesized Probe
  source 1..80: mol_type = other DNA
agtgcagtggtgccatcttggctcactgcaacttccacctcccaggttcaagcgattctcccacctcagcttcctgagta

SEQ ID NO: 98068 - DNA, 80 bp, synthetic construct
  misc_feature 1..80: note = Artificially Synthesized Probe
  source 1..80: mol_type = other DNA
tcccaggttcaagcgattctcctgcctcagcctcctgagtagctgggactacaggggtgcgccaccacgcccagctaagt

SEQ ID NO: 98069 - DNA, 80 bp, synthetic construct
  misc_feature 1..80: note = Artificially Synthesized Probe
  source 1..80: mol_type = other DNA
tgtttgtttgagaccgaatctcactctgatgcccaagctggagtgcagtggcgtgatctcagctcactgcaacctccacc

SEQ ID NO: 98070 - DNA, 80 bp, synthetic construct
  misc_feature 1..80: note = Artificially Synthesized Probe
  source 1..80: mol_type = other DNA
cacccgccccggcctcccaaagtgctgggattacaggcgtgagccaccgtgcccagccaggagagctttttctttaattt

SEQ ID NO: 98071 - DNA, 80 bp, synthetic construct; identical to SEQ ID NO: 34777
  misc_feature 1..80: note = Artificially Synthesized Probe
  source 1..80: mol_type = other DNA

SEQ ID NO: 98072 - DNA, 80 bp, synthetic construct
  misc_feature 1..80: note = Artificially Synthesized Probe
  source 1..80: mol_type = other DNA
gtaagaaaacagatgttaagtaacatgctagtcacatgcttatcacagctgttgaagtagcagagctgggattcaaacca

SEQ ID NO: 98073 - DNA, 80 bp, synthetic construct
  misc_feature 1..80: note = Artificially Synthesized Probe
  source 1..80: mol_type = other DNA
cactccaggtgagggaacatgtatatgcaaaggcagggagttatgaaacagaccatgtgcccacagaaatggaagacttc

SEQ ID NO: 98074 - DNA, 80 bp, synthetic construct
  misc_feature 1..80: note = Artificially Synthesized Probe
  source 1..80: mol_type = other DNA
ttaactgggagtacaggggcatgccaccacgcccagctaatttttgtatttttagtagagacggggtttcaccatgtcgg

SEQ ID NO: 98075 - DNA, 80 bp, synthetic construct
  misc_feature 1..80: note = Artificially Synthesized Probe
  source 1..80: mol_type = other DNA
cttaccataccatgtctcttaagacttaccatgggcctgacgcagtggatcatgcctgtaatcccagcactttgggaggc

SEQ ID NO: 98076 - DNA, 80 bp, synthetic construct; identical to SEQ ID NO: 34778
  misc_feature 1..80: note = Artificially Synthesized Probe
  source 1..80: mol_type = other DNA

SEQ ID NO: 98077 - DNA, 80 bp, synthetic construct
  misc_feature 1..80: note = Artificially Synthesized Probe
  source 1..80: mol_type = other DNA
gtgagccgagatcacgctactgcacgccagcatgccagcctgggcgacagagcagaactccatctcaaaaaaaaaaaaaa

SEQ ID NO: 98078 - DNA, 80 bp, synthetic construct
  misc_feature 1..80: note = Artificially Synthesized Probe
  source 1..80: mol_type = other DNA
attttgtaaccatgtggacagaacctagagctgcctgcctgtgggtgagttgggacaccaaggattaaggcagagccaag

SEQ ID NO: 98079 - DNA, 80 bp, synthetic construct
  misc_feature 1..80: note = Artificially Synthesized Probe
  source 1..80: mol_type = other DNA
ccacaccctgcctaaataattatacagaagctctccaggatatattcctaaattttaaaaacacaaaaaacaggtacaga

SEQ ID NO: 98080 - DNA, 80 bp, synthetic construct
  misc_feature 1..80: note = Artificially Synthesized Probe
  source 1..80: mol_type = other DNA
aggcatcctaactgatacggctgtggaggaagaaaacagaacatgaagtcagcatgcaagaggcttatttttttttaaat

SEQ ID NO: 98081 - DNA, 80 bp, synthetic construct
  misc_feature 1..80: note = Artificially Synthesized Probe
  source 1..80: mol_type = other DNA
accatgcctggctaatttttgtagttttagtagagacggggttgcaccatgttggtcaggatggtctcgatctcttgacc

SEQ ID NO: 98082 - DNA, 80 bp, synthetic construct; identical to SEQ ID NO: 34779
  misc_feature 1..80: note = Artificially Synthesized Probe
  source 1..80: mol_type = other DNA

SEQ ID NO: 98083 - DNA, 80 bp, synthetic construct
  misc_feature 1..80: note = Artificially Synthesized Probe
  source 1..80: mol_type = other DNA
ggattacaggcataaaccaccttgcccggcccacattttttctttttatatgaaagagatatgttaaaaaggagccaggg

SEQ ID NO: 98084 - DNA, 80 bp, synthetic construct; identical to SEQ ID NO: 34758
  misc_feature 1..80: note = Artificially Synthesized Probe
  source 1..80: mol_type = other DNA

SEQ ID NO: 98085 - DNA, 80 bp, synthetic construct
  misc_feature 1..80: note = Artificially Synthesized Probe
  source 1..80: mol_type = other DNA
ataggcaaattcttctgtatgagctggatcagtaaacacgccaataaaatctatctccaggaagaatggaccatccactt

SEQ ID NO: 98086 - DNA, 80 bp, synthetic construct
  misc_feature 1..80: note = Artificially Synthesized Probe
  source 1..80: mol_type = other DNA
ctaggaatatagcctatgaaaatagttaaggatgtttacctcagagtttgttccgacagtagaaaactctgaaaacaatc

SEQ ID NO: 98087 - DNA, 80 bp, synthetic construct
  misc_feature 1..80: note = Artificially Synthesized Probe
  source 1..80: mol_type = other DNA
cctcctgagtaggtgggactaaaggcacatgccaccacactgggctaatttttgtatttttgtagagacagggttttgcc

SEQ ID NO: 98088 - DNA, 80 bp, synthetic construct; identical to SEQ ID NO: 34759
  misc_feature 1..80: note = Artificially Synthesized Probe
  source 1..80: mol_type = other DNA

SEQ ID NO: 98089 - DNA, 80 bp, synthetic construct
  misc_feature 1..80: note = Artificially Synthesized Probe
  source 1..80: mol_type = other DNA
gtctctactaaaaatacaaaaaattagccaggtgtagtggcaggtgcctgtagtcccagctactcaggaggctgaggcag

SEQ ID NO: 98090 - DNA, 80 bp, synthetic construct
  misc_feature 1..80: note = Artificially Synthesized Probe
  source 1..80: mol_type = other DNA
agcactttgggaggccgaggtgggcggatcatgaggccaggagttcaagaccatcctggctaacacggtgaaaccctgtc

SEQ ID NO: 98091 - DNA, 80 bp, synthetic construct
  misc_feature 1..80: note = Artificially Synthesized Probe
  source 1..80: mol_type = other DNA
tgcgagactctgtcttacaaaaataaaaataaaataaaataaaaatagtattttatcactggatagtggtagtacaagat

SEQ ID NO: 98092 - DNA, 80 bp, synthetic construct; identical to SEQ ID NO: 34760
  misc_feature 1..80: note = Artificially Synthesized Probe
  source 1..80: mol_type = other DNA

SEQ ID NO: 98093 - DNA, 80 bp, synthetic construct
  misc_feature 1..80: note = Artificially Synthesized Probe
  source 1..80: mol_type = other DNA
ggcgttgtggtacacgcctgtagtcccagcaggaggatctcttgaacctggaaggcaaaggttgccgtaagctggaatca

SEQ ID NO: 98094 - DNA, 80 bp, synthetic construct
  misc_feature 1..80: note = Artificially Synthesized Probe
  source 1..80: mol_type = other DNA
gttctatgaagaaagttataggatggtggtgttgaaataactggattagagggtccaactttagttacaggaatcaggaa

SEQ ID NO: 98095 - DNA, 80 bp, synthetic construct
  misc_feature 1..80: note = Artificially Synthesized Probe
  source 1..80: mol_type = other DNA
tgagatggaaatgaggttgttaaatctgacagaaaaggggctggtgtggaggaaggaggtaggaggagagatggaagatg

SEQ ID NO: 98096 - DNA, 80 bp, synthetic construct
  misc_feature 1..80: note = Artificially Synthesized Probe
  source 1..80: mol_type = other DNA
agtacagtggcgcgatcttggctcactgcaacttccacttctcaggttcaagcgattctcctgcctcagcctcctgagga

SEQ ID NO: 98097 - DNA, 80 bp, synthetic construct; identical to SEQ ID NO: 34756
  misc_feature 1..80: note = Artificially Synthesized Probe
  source 1..80: mol_type = other DNA

SEQ ID NO: 98098 - DNA, 80 bp, synthetic construct; identical to SEQ ID NO: 34761
  misc_feature 1..80: note = Artificially Synthesized Probe
  source 1..80: mol_type = other DNA

SEQ ID NO: 98099 - DNA, 80 bp, synthetic construct
  misc_feature 1..80: note = Artificially Synthesized Probe
  source 1..80: mol_type = other DNA
ttaccccttcattcggctctcattctctttcctgccaccatgtgaaggaggatgtgtttacttccccttctgccatgatt

SEQ ID NO: 98100 - DNA, 80 bp, synthetic construct
  misc_feature 1..80: note = Artificially Synthesized Probe
  source 1..80: mol_type = other DNA
atgcttacaagcatgtaaatgatgtcatctgaactatgcttcagaaagataactctggctgctgtggagccaggatttta

SEQ ID NO: 98101 - DNA, 80 bp, synthetic construct; identical to SEQ ID NO: 34762
  misc_feature 1..80: note = Artificially Synthesized Probe
  source 1..80: mol_type = other DNA

SEQ ID NO: 98102 - DNA, 80 bp, synthetic construct
  misc_feature 1..80: note = Artificially Synthesized Probe
  source 1..80: mol_type = other DNA
caccaccatgcccggctaatttttttttttttttttttttttttgagacgaagtctcccgcccagcctggagtgcagtgg

SEQ ID NO: 98103 - DNA, 80 bp, synthetic construct
  misc_feature 1..80: note = Artificially Synthesized Probe
  source 1..80: mol_type = other DNA
ggtctccatcatctcctgacctcgtgatccacccgcctcagcctcccaaagtgctgggattacaggcgtaagccaccgcg

SEQ ID NO: 98104 - DNA, 80 bp, synthetic construct
  misc_feature 1..80: note = Artificially Synthesized Probe
  source 1..80: mol_type = other DNA
caactaatttttttatttttagtagagacagagtttcaccatgttggccaggatggtctcgatctcttgacctcgtgatc

SEQ ID NO: 98105 - DNA, 80 bp, synthetic construct
  misc_feature 1..80: note = Artificially Synthesized Probe
  source 1..80: mol_type = other DNA
cctcccaaagtgctgggattacagacatgagccaccacgcctggcctaggacactacttttttttttttttttttttttt

SEQ ID NO: 98106 - DNA, 80 bp, synthetic construct; identical to SEQ ID NO: 34763
  misc_feature 1..80: note = Artificially Synthesized Probe
  source 1..80: mol_type = other DNA

SEQ ID NO: 98107 - DNA, 80 bp, synthetic construct
  misc_feature 1..80: note = Artificially Synthesized Probe
  source 1..80: mol_type = other DNA
gcagagatgtgcctgtgacttagcatggacctggccacatccatatcaaaaatattcactagttagtatgttaacattta

SEQ ID NO: 98108 - DNA, 80 bp, synthetic construct
  misc_feature 1..80: note = Artificially Synthesized Probe
  source 1..80: mol_type = other DNA
agccaagtgtggtggcaggcacctgtaattccagctactcaggagactgaggcaggagaaatgcttgaacccgggaggta

SEQ ID NO: 98109 - DNA, 80 bp, synthetic construct
  misc_feature 1..80: note = Artificially Synthesized Probe
  source 1..80: mol_type = other DNA
gagtctcatctcactctgttgcccaggctggagtacaatggcacgatcagagactaggtttcaccatgttggccaacctg

SEQ ID NO: 98110 - DNA, 80 bp, synthetic construct; identical to SEQ ID NO: 34764
  misc_feature 1..80: note = Artificially Synthesized Probe
  source 1..80: mol_type = other DNA

SEQ ID NO: 98111 - DNA, 80 bp, synthetic construct
  misc_feature 1..80: note = Artificially Synthesized Probe
  source 1..80: mol_type = other DNA
atcaacaggatgcactaaccatttttctgactttctgccccataagaaggcacataaacccagtgattattattttagca

SEQ ID NO: 98112 - DNA, 80 bp, synthetic construct
  misc_feature 1..80: note = Artificially Synthesized Probe
  source 1..80: mol_type = other DNA
tcttttcttttctttttttttttttgagacggagtcttgctctgtcacccaggctggagtgcagtggtgcaatctcagct

SEQ ID NO: 98113 - DNA, 80 bp, synthetic construct
  misc_feature 1..80: note = Artificially Synthesized Probe
  source 1..80: mol_type = other DNA
ctggtgatccgcccaccttggccacccaaagtgtggggattacaggcatgagccactgcgcccggccttttttttttttt

SEQ ID NO: 98114 - DNA, 80 bp, synthetic construct
  misc_feature 1..80: note = Artificially Synthesized Probe
  source 1..80: mol_type = other DNA
tgggaggccaagggtggggtggatcacctgaggtcaggagttcaagaccagcctggccaacatggtgaaaccctgtctct

SEQ ID NO: 98115 - DNA, 80 bp, synthetic construct; identical to SEQ ID NO: 34765
  misc_feature 1..80: note = Artificially Synthesized Probe
  source 1..80: mol_type = other DNA

SEQ ID NO: 98116 - DNA, 80 bp, synthetic construct
  misc_feature 1..80: note = Artificially Synthesized Probe
  source 1..80: mol_type = other DNA
cacacttgtgccaatagttacttatccccagacacaggtgaggtgccaaatataacatgccaggtgttttcatttacaga

SEQ ID NO: 98117 - DNA, 80 bp, synthetic construct
  misc_feature 1..80: note = Artificially Synthesized Probe
  source 1..80: mol_type = other DNA
gttccatatagcagtgcactttggttattcttgcccattttcaaaaacacttcacttctgcctccaatcgtcttatcaga

SEQ ID NO: 98118 - DNA, 80 bp, synthetic construct; identical to SEQ ID NO: 34766
  misc_feature 1..80: note = Artificially Synthesized Probe
  source 1..80: mol_type = other DNA

SEQ ID NO: 98119 - DNA, 80 bp, synthetic construct
  misc_feature 1..80: note = Artificially Synthesized Probe
  source 1..80: mol_type = other DNA
aagggaggggggaaaatagctaaagtaaaatgtaggcatgctaaaaaatgatccttctaaaattccttcaggatgggggt

SEQ ID NO: 98120 - DNA, 80 bp, synthetic construct
  misc_feature 1..80: note = Artificially Synthesized Probe
  source 1..80: mol_type = other DNA
acgcagcaatttgtgaaccaaagccatggtacaaaaaaatcaaaatgtaagtttcttcctgggctagcaagggccaccaa

SEQ ID NO: 98121 - DNA, 80 bp, synthetic construct
  misc_feature 1..80: note = Artificially Synthesized Probe
  source 1..80: mol_type = other DNA
agattcttcatgtttttatttctctcagaactttaaaatgtgaacattcgataatctagccagtctttacttccaggtaa

SEQ ID NO: 98122 - DNA, 80 bp, synthetic construct
  misc_feature 1..80: note = Artificially Synthesized Probe
  source 1..80: mol_type = other DNA
aatcatactgttttatccaaggattcaataacaaacaagactaaaaacagtatcatttgaatctaagtcctcaaggggga

SEQ ID NO: 98123 - DNA, 80 bp, synthetic construct
  misc_feature 1..80: note = Artificially Synthesized Probe
  source 1..80: mol_type = other DNA
taaataacatccaatgacaaatcccatagggacaagaacatgaacccagtggtcccgcacaatctgaagtaagttcacca

SEQ ID NO: 98124 - DNA, 80 bp, synthetic construct
  misc_feature 1..80: note = Artificially Synthesized Probe
  source 1..80: mol_type = other DNA
cacttgagattaggagttcgagaccagcctggccaacatggcaaaaccccatttctactaaaagcacaaaaattagccgg

SEQ ID NO: 98125 - DNA, 80 bp, synthetic construct; identical to SEQ ID NO: 34781
  misc_feature 1..80: note = Artificially Synthesized Probe
  source 1..80: mol_type = other DNA

SEQ ID NO: 98126 - DNA, 80 bp, synthetic construct
  misc_feature 1..80: note = Artificially Synthesized Probe
  source 1..80: mol_type = other DNA
aaattctacctgcaacagctgattgtttgcaccctcctcatgttgttttggaacttttttttgtaaaagagacaaggtct

SEQ ID NO: 98127 - DNA, 80 bp, synthetic construct
  misc_feature 1..80: note = Artificially Synthesized Probe
  source 1..80: mol_type = other DNA
acatatttagaacctctcacaatgcaaaaacaaatttaatacaattttgccagaaatggaattctttaggtaaagctgta

SEQ ID NO: 98128 - DNA, 80 bp, synthetic construct
  misc_feature 1..80: note = Artificially Synthesized Probe
  source 1..80: mol_type = other DNA
tttgtagcccaggctggagtgcagtggcacgatcttggctcactgcaaactccacctcctggcttcaagcgattatcctg

SEQ ID NO: 98129 - DNA, 80 bp, synthetic construct; identical to SEQ ID NO: 34782
  misc_feature 1..80: note = Artificially Synthesized Probe
  source 1..80: mol_type = other DNA

SEQ ID NO: 98130 - DNA, 80 bp, synthetic construct
  misc_feature 1..80: note = Artificially Synthesized Probe
  source 1..80: mol_type = other DNA
agaaaaaaaaaggcaaagggagaagaaaatttacttttatagagtgactactaggtggctcatgcctgtaaccacagcac

SEQ ID NO: 98131 - DNA, 80 bp, synthetic construct
  misc_feature 1..80: note = Artificially Synthesized Probe
  source 1..80: mol_type = other DNA
aagagacggaggttgcaatgacctgagatcacaccactgtactctagcctggacgacagagcgtgatgctgtctcaaaaa

SEQ ID NO: 98132 - DNA, 80 bp, synthetic construct
  misc_feature 1..80: note = Artificially Synthesized Probe
  source 1..80: mol_type = other DNA
tctggctgctattatagcccatgcctaagaaaccccttcctgaattgatgtttatggtacttaaaagcttttaaatgctg

SEQ ID NO: 98133 - DNA, 80 bp, synthetic construct; identical to SEQ ID NO: 34783
  misc_feature 1..80: note = Artificially Synthesized Probe
  source 1..80: mol_type = other DNA

SEQ ID NO: 98134 - DNA, 80 bp, synthetic construct
  misc_feature 1..80: note = Artificially Synthesized Probe
  source 1..80: mol_type = other DNA
tctcaaacttgtggccccaagtttcacatatgggggcattttggatttccaacattctgatcagggatactgaacctgta

SEQ ID NO: 98135 - DNA, 80 bp, synthetic construct
  misc_feature 1..80: note = Artificially Synthesized Probe
  source 1..80: mol_type = other DNA
gacatatgacaacatcctagaaagacaatacattattgccaacaaaagtgcttagcactaagctgtgctaggactatgta

SEQ ID NO: 98136 - DNA, 80 bp, synthetic construct
  misc_feature 1..80: note = Artificially Synthesized Probe
  source 1..80: mol_type = other DNA
ttcaagggattctcctacctcagcctcccaagtagctgggattacaggtatgcgccaccatgcccagctaattttgtatt

SEQ ID NO: 98137 - DNA, 80 bp, synthetic construct
  misc_feature 1..80: note = Artificially Synthesized Probe
  source 1..80: mol_type = other DNA
tgggactataggcaggtgccaccacgcccggctaatttttgtatttttaagtagagatggggtttcactgttggccgggc

SEQ ID NO: 98138 - DNA, 80 bp, synthetic construct; identical to SEQ ID NO: 34784
  misc_feature 1..80: note = Artificially Synthesized Probe
  source 1..80: mol_type = other DNA

SEQ ID NO: 98139 - DNA, 80 bp, synthetic construct
  misc_feature 1..80: note = Artificially Synthesized Probe
  source 1..80: mol_type = other DNA
ttacaggtgtgagccaccgcgcccggtcaatattttattttctattacaccgatccatttaaaaaatttacatattagat

SEQ ID NO: 98140 - DNA, 80 bp, synthetic construct
  misc_feature 1..80: note = Artificially Synthesized Probe
  source 1..80: mol_type = other DNA
ataaaaaagcaaagtaaaagggtaagcacatcatttaggcgcaacggtgtcggctcaagaggatttgcgatttggaagag

SEQ ID NO: 98141 - DNA, 80 bp, synthetic construct
  misc_feature 1..80: note = Artificially Synthesized Probe
  source 1..80: mol_type = other DNA
cgttttcctgttatgacagcctcagaaaaccctttccaaaagctccggcccggaaatcccatcctccacccgaagaaaac

SEQ ID NO: 98142 - DNA, 80 bp, synthetic construct
  misc_feature 1..80: note = Artificially Synthesized Probe
  source 1..80: mol_type = other DNA
gcctcagcgcctacagcgaccccgagaccaagggcaacagggaactcaacccgcgccagtggaagctgcgacctcgggac

SEQ ID NO: 98143 - DNA, 80 bp, synthetic construct; identical to SEQ ID NO: 34785
  misc_feature 1..80: note = Artificially Synthesized Probe
  source 1..80: mol_type = other DNA

SEQ ID NO: 98144 - DNA, 80 bp, synthetic construct; identical to SEQ ID NO: 34780
  misc_feature 1..80: note = Artificially Synthesized Probe
  source 1..80: mol_type = other DNA

SEQ ID NO: 98145 - DNA, 80 bp, synthetic construct
  misc_feature 1..80: note = Artificially Synthesized Probe
  source 1..80: mol_type = other DNA
caggtagtgctgctaagaacacagcacctagctgctgttattactatttatctcagctatagcatgtcttaagtaagata

SEQ ID NO: 98146 - DNA, 80 bp, synthetic construct
  misc_feature 1..80: note = Artificially Synthesized Probe
  source 1..80: mol_type = other DNA
aggtgctgtgaccgccctccgggttgtggctggtggccttcggtgtttcgggtttggcagttcactcaccaaggtgatct

SEQ ID NO: 98147 - DNA, 80 bp, synthetic construct
  misc_feature 1..80: note = Artificially Synthesized Probe
  source 1..80: mol_type = other DNA
gcctgtaaccttttacccagaattactacatgatttggagcccaagggttttccataactttttttctttttaattcgag

SEQ ID NO: 98148 - DNA, 80 bp, synthetic construct
  misc_feature 1..80: note = Artificially Synthesized Probe
  source 1..80: mol_type = other DNA
ttgccagaaatagaacttattacttgtgttttaaaacacaattttaggcccatgtgcaatggcttgtgcctgtaacctag

SEQ ID NO: 98149 - DNA, 80 bp, synthetic construct; identical to SEQ ID NO: 34797
  misc_feature 1..80: note = Artificially Synthesized Probe
  source 1..80: mol_type = other DNA

SEQ ID NO: 98150 - DNA, 80 bp, synthetic construct
  misc_feature 1..80: note = Artificially Synthesized Probe
  source 1..80: mol_type = other DNA
actaaaaatacaaaaaaattagctgggcatggtggcacacgcctgtaatcccagctactcgggaggttgaatcagaagaa

SEQ ID NO: 98151 - DNA, 80 bp, synthetic construct
  misc_feature 1..80: note = Artificially Synthesized Probe
  source 1..80: mol_type = other DNA
gatctacaaagaaaggaatataaacaaacatacacttttaaggttttgtgttaaaatgctgggtactacttgctagagct

SEQ ID NO: 98152 - DNA, 80 bp, synthetic construct
  misc_feature 1..80: note = Artificially Synthesized Probe
  source 1..80: mol_type = other DNA
atatttgcttcttgcacttggccctgtcctttctctttggccaaacacagtttaggccacagttacctcccaaccaggct

SEQ ID NO: 98153 - DNA, 80 bp, synthetic construct
  misc_feature 1..80: note = Artificially Synthesized Probe
  source 1..80: mol_type = other DNA
gatgcaggcagatcacttgaggtcaagagttacaaaccagcctgaccaacatggtgaaacactatctctactaaaaatac

SEQ ID NO: 98154 - DNA, 80 bp, synthetic construct
  misc_feature 1..80: note = Artificially Synthesized Probe
  source 1..80: mol_type = other DNA
actgttctgtccacattttggcagctggtggtgctttgttcactacaagtcccttaaaagctttatgggcttctcaagaa

SEQ ID NO: 98155 - DNA, 80 bp, synthetic construct; identical to SEQ ID NO: 34798
  misc_feature 1..80: note = Artificially Synthesized Probe
  source 1..80: mol_type = other DNA

SEQ ID NO: 98156 - DNA, 80 bp, synthetic construct
  misc_feature 1..80: note = Artificially Synthesized Probe
  source 1..80: mol_type = other DNA
aaatttgttactaagctgtgaattattaagcacacctcacaaaggcgagcatgaccttttccctggacacaacagaatga

SEQ ID NO: 98157 - DNA, 80 bp, synthetic construct
  misc_feature 1..80: note = Artificially Synthesized Probe
  source 1..80: mol_type = other DNA
tagccgggcgtggtggctcatgcctgttgtcccagctactcaggaggctgagggaggagaatcgcttgaacctaggaagt

SEQ ID NO: 98158 - DNA, 80 bp, synthetic construct
  misc_feature 1..80: note = Artificially Synthesized Probe
  source 1..80: mol_type = other DNA
ggagaccatcctggctaacacggtgaaaccctgtctctactaaaaattacaaaaatttagccgggcgtggtggcgggtgc

SEQ ID NO: 98159 - DNA, 80 bp, synthetic construct; identical to SEQ ID NO: 34799
  misc_feature 1..80: note = Artificially Synthesized Probe
  source 1..80: mol_type = other DNA

SEQ ID NO: 98160 - DNA, 80 bp, synthetic construct
  misc_feature 1..80: note = Artificially Synthesized Probe
  source 1..80: mol_type = other DNA
cctcattccgccagtttatcttgccacctcaatgaatcgctagctgtgtcaggaatccctacacaatccatttaaatgac

SEQ ID NO: 98161 - DNA, 80 bp, synthetic construct
  misc_feature 1..80: note = Artificially Synthesized Probe
  source 1..80: mol_type = other DNA
cgaactctttgctaaataaacatttaggtgaaacaaagcttccatttccaatcggcctaactctggtattagcgttggca

SEQ ID NO: 98162 - DNA, 80 bp, synthetic construct
  misc_feature 1..80: note = Artificially Synthesized Probe
  source 1..80: mol_type = other DNA
cacagaactatcaatcaagtaggaccagactgtgcccccagggaaggtcgcagatttaaggctgcgaggacaagggcaaa

SEQ ID NO: 98163 - DNA, 80 bp, synthetic construct; identical to SEQ ID NO: 34800
  misc_feature 1..80: note = Artificially Synthesized Probe
  source 1..80: mol_type = other DNA

SEQ ID NO: 98164 - DNA, 80 bp, synthetic construct
  misc_feature 1..80: note = Artificially Synthesized Probe
  source 1..80: mol_type = other DNA
cggggcgctgaaggtaaaggaggagccagcctgggctggctgcgcggccccgagcctacgtaggggatggggtgaggggg

SEQ ID NO: 98165 - DNA, 80 bp, synthetic construct
  misc_feature 1..80: note = Artificially Synthesized Probe
  source 1..80: mol_type = other DNA
gcccgaggcccaggccgaggctggcgtgccccgtgccgacgggcgctcccgagggctgcatgcctgggcggcagactcgg

SEQ ID NO: 98166 - DNA, 80 bp, synthetic construct
  misc_feature 1..80: note = Artificially Synthesized Probe
  source 1..80: mol_type = other DNA
gcgcccgccaccacgcctggctaattttttgtatttttcagtggagacggggtttcaccatgttagccaggatgttctgg

SEQ ID NO: 98167 - DNA, 80 bp, synthetic construct
  misc_feature 1..80: note = Artificially Synthesized Probe
  source 1..80: mol_type = other DNA
agaagccagctgacatgacctgacctgtgaaaaggagaagaagggctttcttttcggcaaataaaaagctaaggccaagg

SEQ ID NO: 98168 - DNA, 80 bp, synthetic construct; identical to SEQ ID NO: 34801
  misc_feature 1..80: note = Artificially Synthesized Probe
  source 1..80: mol_type = other DNA

SEQ ID NO: 98169 - DNA, 80 bp, synthetic construct
  misc_feature 1..80: note = Artificially Synthesized Probe
  source 1..80: mol_type = other DNA
acatattatatatattatatataaatatatattatatatatatttatataatatgtaaatatatattatatatttatata

SEQ ID NO: 98170 - DNA, 80 bp, synthetic construct
  misc_feature 1..80: note = Artificially Synthesized Probe
  source 1..80: mol_type = other DNA
ttgagacagagcctcactctgttgcccaggcccaggctggagtgcaatggcaccatctcaactccctgcaacttctgccc

SEQ ID NO: 98171 - DNA, 80 bp, synthetic construct
  misc_feature 1..80: note = Artificially Synthesized Probe
  source 1..80: mol_type = other DNA
aatcatgaacatacacgttttcatgtttatatgtgcacatacaggcacctctgttctgtatccagcatctagaacattgt

SEQ ID NO: 98172 - DNA, 80 bp, synthetic construct; identical to SEQ ID NO: 34802
  misc_feature 1..80: note = Artificially Synthesized Probe
  source 1..80: mol_type = other DNA

SEQ ID NO: 98173 - DNA, 80 bp, synthetic construct
  misc_feature 1..80: note = Artificially Synthesized Probe
  source 1..80: mol_type = other DNA
aaggtgggtggataacctgaggccaggaactcgagaccaacctgatcaacatggtgaaaccccgtctctactaaatacaa

SEQ ID NO: 98174 - DNA, 80 bp, synthetic construct
  misc_feature 1..80: note = Artificially Synthesized Probe
  source 1..80: mol_type = other DNA
aaaatacaaaaacattagccaggtgcggtggtgcacacctgtaattccagctacttgggaggctgaggcaagagaatcgc

SEQ ID NO: 98175 - DNA, 80 bp, synthetic construct
  misc_feature 1..80: note = Artificially Synthesized Probe
  source 1..80: mol_type = other DNA
aaatgcactggagaacgtctggttgaagttttattaaaccaaatattaatagtgattgtccttgaactcgggtgttttct

SEQ ID NO: 98176 - DNA, 80 bp, synthetic construct
  misc_feature 1..80: note = Artificially Synthesized Probe
  source 1..80: mol_type = other DNA
actttggttgtttttcttttttttttttttttcctgagacagtctcactctgttgtccaggctggagtgcagtggcgtga

SEQ ID NO: 98177 - DNA, 80 bp, synthetic construct; identical to SEQ ID NO: 34787
  misc_feature 1..80: note = Artificially Synthesized Probe
  source 1..80: mol_type = other DNA

SEQ ID NO: 98178 - DNA, 80 bp, synthetic construct; identical to SEQ ID NO: 34803
  misc_feature 1..80: note = Artificially Synthesized Probe
  source 1..80: mol_type = other DNA

SEQ ID NO: 98179 - DNA, 80 bp, synthetic construct
  misc_feature 1..80: note = Artificially Synthesized Probe
  source 1..80: mol_type = other DNA
ccttttttttgtatttttagtagagacggggttgtccaggctggtctcagaactcctgacctcaagtgatccgcccacct

SEQ ID NO: 98180 - DNA, 80 bp, synthetic construct
  misc_feature 1..80: note = Artificially Synthesized Probe
  source 1..80: mol_type = other DNA
gagaccaacctgggccacgtagccagatctcgtctctataaaaaataaaaaatattagccaggcatggtagtatgtgcct

SEQ ID NO: 98181 - DNA, 80 bp, synthetic construct; identical to SEQ ID NO: 34804
  misc_feature 1..80: note = Artificially Synthesized Probe
  source 1..80: mol_type = other DNA

SEQ ID NO: 98182 - DNA, 80 bp, synthetic construct
  misc_feature 1..80: note = Artificially Synthesized Probe
  source 1..80: mol_type = other DNA
aagaaaatagattagtcagccttcgaagcacgacagtgagttttactagctacgtaatttatgcttcttccttttcagca

SEQ ID NO: 98183 - DNA, 80 bp, synthetic construct
  misc_feature 1..80: note = Artificially Synthesized Probe
  source 1..80: mol_type = other DNA
tctgtggcatttagatggccccggcacagtgagcttgccagaaagccaccttactttccatcctctgatgctgagttgtt

SEQ ID NO: 98184 - DNA, 80 bp, synthetic construct
  misc_feature 1..80: note = Artificially Synthesized Probe
  source 1..80: mol_type = other DNA
ttcacaatgttagccaggatggtctcaatctcctgaccttgttatccacccgcctcggcctcccaaagtgttgggattac

SEQ ID NO: 98185 - DNA, 80 bp, synthetic construct
  misc_feature 1..80: note = Artificially Synthesized Probe
  source 1..80: mol_type = other DNA
tgggactacaggcgcccaccaccatgcccagctaattttttacatttttagtagaggtggggtttcaccatgttagccgg

SEQ ID NO: 98186 - DNA, 80 bp, synthetic construct; identical to SEQ ID NO: 34805
  misc_feature 1..80: note = Artificially Synthesized Probe
  source 1..80: mol_type = other DNA

SEQ ID NO: 98187 - DNA, 80 bp, synthetic construct
  misc_feature 1..80: note = Artificially Synthesized Probe
  source 1..80: mol_type = other DNA
atactgatatgatctttttcaagtcccagagttcagtagttgcctttttctctgcccatcttactgaagggcaacaattt

SEQ ID NO: 98188 - DNA, 80 bp, synthetic construct
  misc_feature 1..80: note = Artificially Synthesized Probe
  source 1..80: mol_type = other DNA
gtttttcaatcattgtttttttctcttcttccttttatgttatttgttttaagagaggggctctggctctctctcccagg

SEQ ID NO: 98189 - DNA, 80 bp, synthetic construct
  misc_feature 1..80: note = Artificially Synthesized Probe
  source 1..80: mol_type = other DNA
aaatagagtcttgctctgtcacccaggctgtagtacagaggcacaatcataggtcactgcagcctcgaccttccaagctc

SEQ ID NO: 98190 - DNA, 80 bp, synthetic construct; identical to SEQ ID NO: 34806
  misc_feature 1..80: note = Artificially Synthesized Probe
  source 1..80: mol_type = other DNA

SEQ ID NO: 98191 - DNA, 80 bp, synthetic construct
  misc_feature 1..80: note = Artificially Synthesized Probe
  source 1..80: mol_type = other DNA
gtgtgtgagtggaaacggagtgcttcattctgtggccatctgggttgtggtttggggaggggaacactgacctgggagcg

SEQ ID NO: 98192 - DNA, 80 bp, synthetic construct
  misc_feature 1..80: note = Artificially Synthesized Probe
  source 1..80: mol_type = other DNA
agagagctttcaggtgggaggacagttttcagaactaagctcatcaatacacagaacagttgtatcttgtttttttttga

SEQ ID NO: 98193 - DNA, 80 bp, synthetic construct
  misc_feature 1..80: note = Artificially Synthesized Probe
  source 1..80: mol_type = other DNA
ttttgttttgtttttgcgataaagtctcactctgtcgccaggctagagtgcagtggcacgatctcggctcactgcaacct

SEQ ID NO: 98194 - DNA, 80 bp, synthetic construct
  misc_feature 1..80: note = Artificially Synthesized Probe
  source 1..80: mol_type = other DNA
cgccttggcctcccaaagtgctgggattacaggcgtgagccactgcacccagccaattttttgtattttttagtagagac

SEQ ID NO: 98195 - DNA, 80 bp, synthetic construct; identical to SEQ ID NO: 34807
  misc_feature 1..80: note = Artificially Synthesized Probe
  source 1..80: mol_type = other DNA

SEQ ID NO: 98196 - DNA, 80 bp, synthetic construct
  misc_feature 1..80: note = Artificially Synthesized Probe
  source 1..80: mol_type = other DNA
tccatcctgggtgatagagtgagaccctgtctcgacaaaaataaatactgagtctgggtatggtggctcacacctgtaat

SEQ ID NO: 98197 - DNA, 80 bp, synthetic construct
  misc_feature 1..80: note = Artificially Synthesized Probe
  source 1..80: mol_type = other DNA
aggagaatcgcttggacccaggaggcagaggttgcaatgagctgagattgtgccattgcactgcttcttgggtgtcacag

SEQ ID NO: 98198 - DNA, 80 bp, synthetic construct
  misc_feature 1..80: note = Artificially Synthesized Probe
  source 1..80: mol_type = other DNA
acaaatgtctgtagcatgcatatcttccttgtagtcctagatatagatcaacaagctcataaaaactatggctttctttt

SEQ ID NO: 98199 - DNA, 80 bp, synthetic construct; identical to SEQ ID NO: 34808
  misc_feature 1..80: note = Artificially Synthesized Probe
  source 1..80: mol_type = other DNA

SEQ ID NO: 98200 - DNA, 80 bp, synthetic construct
  misc_feature 1..80: note = Artificially Synthesized Probe
  source 1..80: mol_type = other DNA
atgttcttggaggtgcaccttggggaaccgctgggctctctagcttgctgtttccttgaatccagtacccaggcctaatt

SEQ ID NO: 98201 - DNA, 80 bp, synthetic construct
  misc_feature 1..80: note = Artificially Synthesized Probe
  source 1..80: mol_type = other DNA
cacagtgtaaatagtggctcagtaaaaaaataggcacagtggctcacttctgtaatcccagcactttgggaggctgaggt

SEQ ID NO: 98202 - DNA, 80 bp, synthetic construct
  misc_feature 1..80: note = Artificially Synthesized Probe
  source 1..80: mol_type = other DNA
gaggtggaggttgcagtgagccaagatcacgccattgcactctagcctgacccaaaagagtgaaactccatctcaaaaaa

SEQ ID NO: 98203 - DNA, 80 bp, synthetic construct; identical to SEQ ID NO: 34809
  misc_feature 1..80: note = Artificially Synthesized Probe
  source 1..80: mol_type = other DNA

SEQ ID NO: 98204 - DNA, 80 bp, synthetic construct
  misc_feature 1..80: note = Artificially Synthesized Probe
  source 1..80: mol_type = other DNA
gtgcggtttatattttaatcactgtgctgtcttccttctgaaaattcttgattctcatgtgtttatttaaaaataaaatg

SEQ ID NO: 98205 - DNA, 80 bp, synthetic construct
  misc_feature 1..80: note = Artificially Synthesized Probe
  source 1..80: mol_type = other DNA
tcccagctattcgggaggctgaggcagcagaattgcttgaacctgggaggcagaggttgcggtgactggagatcgtgcca

SEQ ID NO: 98206 - DNA, 80 bp, synthetic construct
  misc_feature 1..80: note = Artificially Synthesized Probe
  source 1..80: mol_type = other DNA
tgtaatgtttaaatgcacctctgtttctgaatgtgccttgtttccaaagttagttttgtgatattttgacaagatgtgca

SEQ ID NO: 98207 - DNA, 80 bp, synthetic construct
  misc_feature 1..80: note = Artificially Synthesized Probe
  source 1..80: mol_type = other DNA
gaaatttgagttctattttgaggtgacagggaagcaacaaggcgaattcctgctttcactaattactagtacagtatttg

SEQ ID NO: 98208 - DNA, 80 bp, synthetic construct; identical to SEQ ID NO: 34810
  misc_feature 1..80: note = Artificially Synthesized Probe
  source 1..80: mol_type = other DNA

SEQ ID NO: 98209 - DNA, 80 bp, synthetic construct
  misc_feature 1..80: note = Artificially Synthesized Probe
  source 1..80: mol_type = other DNA
ttttgtatttttagtagagacggggtttcaccatgttggccaggctggtctcaaactcctgacctcaattgattctccta

SEQ ID NO: 98210 - DNA, 80 bp, synthetic construct
  misc_feature 1..80: note = Artificially Synthesized Probe
  source 1..80: mol_type = other DNA
aaaagtttgttcatgttcagtactaaagcagatgattttctgaacattttccatcctcagttggttgcttggtgggtttc

SEQ ID NO: 98211 - DNA, 80 bp, synthetic construct
  misc_feature 1..80: note = Artificially Synthesized Probe
  source 1..80: mol_type = other DNA
ctgagttttaagttgttttgttaaataacattcctctttatgccgtttcccagatgtagtggaaccaaaggagaggggca

SEQ ID NO: 98212 - DNA, 80 bp, synthetic construct; identical to SEQ ID NO: 34811
  misc_feature 1..80: note = Artificially Synthesized Probe
  source 1..80: mol_type = other DNA

SEQ ID NO: 98213 - DNA, 80 bp, synthetic construct
  misc_feature 1..80: note = Artificially Synthesized Probe
  source 1..80: mol_type = other DNA
gaaaaccagaggcctctcattcctttgaaaacagagccccccgagttacagtatcagcaaaagagaaaaccttgctgcag

SEQ ID NO: 98214 - DNA, 80 bp, synthetic construct
  misc_feature 1..80: note = Artificially Synthesized Probe
  source 1..80: mol_type = other DNA
atgaaccgggggccgtggctcacatgaagtcagcagttcgagagcagcctgaccaatatggtgaaaccccgtttctacta

SEQ ID NO: 98215 - DNA, 80 bp, synthetic construct
  misc_feature 1..80: note = Artificially Synthesized Probe
  source 1..80: mol_type = other DNA
cagggaaaatgcgagaccaaaaaccacaatgcccagatctcaagtagatgaagagtttttgaagcaaagtttaaaggaaa

SEQ ID NO: 98216 - DNA, 80 bp, synthetic construct
  misc_feature 1..80: note = Artificially Synthesized Probe
  source 1..80: mol_type = other DNA
gcccagcgcctgctgtgttggcagaagaggccagagcagaggggcagctgcaagccagtcctcctggggcggcagagggg

SEQ ID NO: 98217 - DNA, 80 bp, synthetic construct; identical to SEQ ID NO: 34812
  misc_feature 1..80: note = Artificially Synthesized Probe
  source 1..80: mol_type = other DNA

SEQ ID NO: 98218 - DNA, 80 bp, synthetic construct
  misc_feature 1..80: note = Artificially Synthesized Probe
  source 1..80: mol_type = other DNA
aattagtcaaattctgtactagaaatatggcctgtaacgctgtctcagccaggcagaaaagtatgtcttaattatggaca

SEQ ID NO: 98219 - DNA, 80 bp, synthetic construct
  misc_feature 1..80: note = Artificially Synthesized Probe
  source 1..80: mol_type = other DNA
agtagctgagattacaggcgcaggccaccacacctggctaattttttttgtatttttagtagagatggggtttcaccgtg

SEQ ID NO: 98220 - DNA, 80 bp, synthetic construct
  misc_feature 1..80: note = Artificially Synthesized Probe
  source 1..80: mol_type = other DNA
ggtgcaatcttggctcactgcaacctctgcctcccaggttcaagccattctcctgcctcagcctcctgagtagctgggat

SEQ ID NO: 98221 - DNA, 80 bp, synthetic construct; identical to SEQ ID NO: 34813
  misc_feature 1..80: note = Artificially Synthesized Probe
  source 1..80: mol_type = other DNA

SEQ ID NO: 98222 - DNA, 80 bp, synthetic construct; identical to SEQ ID NO: 34788
  misc_feature 1..80: note = Artificially Synthesized Probe
  source 1..80: mol_type = other DNA

SEQ ID NO: 98223 - DNA, 80 bp, synthetic construct
  misc_feature 1..80: note = Artificially Synthesized Probe
  source 1..80: mol_type = other DNA
gctttcagcatcctgtgcacagggcagattcatagttcaggaattaaagcagtaagtgttgtacaggtcagccgctgcat

SEQ ID NO: 98224 - DNA, 80 bp, synthetic construct
  misc_feature 1..80: note = Artificially Synthesized Probe
  source 1..80: mol_type = other DNA
acaatggcgcaatcttggctcactgtaacctccgcctcctgggttcaagtgattctccagcctcagcctccaaagtagct

SEQ ID NO: 98225 - DNA, 80 bp, synthetic construct
  misc_feature 1..80: note = Artificially Synthesized Probe
  source 1..80: mol_type = other DNA
cctagcgtgtggaggcttttaaagggcaacagtatttattcctatgatgttaccatttttttttttttttttggagatgg

SEQ ID NO: 98226 - DNA, 80 bp, synthetic construct
  misc_feature 1..80: note = Artificially Synthesized Probe
  source 1..80: mol_type = other DNA
agacagcgttttgccatgttggtcaggttggtctcgaactcctgaccgcgggtgatccacctgcctctgcctcccaaagt

SEQ ID NO: 98227 - DNA, 80 bp, synthetic construct; identical to SEQ ID NO: 34814
  misc_feature 1..80: note = Artificially Synthesized Probe
  source 1..80: mol_type = other DNA

SEQ ID NO: 98228 - DNA, 80 bp, synthetic construct
  misc_feature 1..80: note = Artificially Synthesized Probe
  source 1..80: mol_type = other DNA
gctcgaaaatggagacgaataacacaactcgcaggataaaaacagaattgggagttttcagactgcaaacctttctgaag

SEQ ID NO: 98229 - DNA, 80 bp, synthetic construct
  misc_feature 1..80: note = Artificially Synthesized Probe
  source 1..80: mol_type = other DNA
ttttgtaacccacgtcttggtcagttatcaccctccctatagtaactaaaatagtacgttctgctttgaaggtgtcccta

SEQ ID NO: 98230 - DNA, 80 bp, synthetic construct; identical to SEQ ID NO: 34815
  misc_feature 1..80: note = Artificially Synthesized Probe
  source 1..80: mol_type = other DNA

SEQ ID NO: 98231 - DNA, 80 bp, synthetic construct
  misc_feature 1..80: note = Artificially Synthesized Probe
  source 1..80: mol_type = other DNA
atcagagattcagaaggctcctttagtttaagcttttcaaaaaaaattttttatttgacagacgtgctctgtcccacagg

SEQ ID NO: 98232 - DNA, 80 bp, synthetic construct
  misc_feature 1..80: note = Artificially Synthesized Probe
  source 1..80: mol_type = other DNA
aaaaattagctgggcttggtggcatgcacctgtaatcccagctactcagaaggctgaggcaggagaatcactagaaccca

SEQ ID NO: 98233 - DNA, 80 bp, synthetic construct
  misc_feature 1..80: note = Artificially Synthesized Probe
  source 1..80: mol_type = other DNA
tttttttttttttttttttttgagacagagtctaactttgtcaccaggctggagtgcagtgatgcagtctcaggtcattg

SEQ ID NO: 98234 - DNA, 80 bp, synthetic construct
  misc_feature 1..80: note = Artificially Synthesized Probe
  source 1..80: mol_type = other DNA
aatctgcccgcctcagcctctcaaagtgctaggattacaggtgtgagccactgctactggcccctgctaattttttattc

SEQ ID NO: 98235 - DNA, 80 bp, synthetic construct; identical to SEQ ID NO: 34816
  misc_feature 1..80: note = Artificially Synthesized Probe
  source 1..80: mol_type = other DNA

SEQ ID NO: 98236 - DNA, 80 bp, synthetic construct
  misc_feature 1..80: note = Artificially Synthesized Probe
  source 1..80: mol_type = other DNA
tggtggcagacgcctgtaatcccagctacttgggagactgaggcaggagaatcacttgaagctgggaggtggaggtttgc

SEQ ID NO: 98237 - DNA, 80 bp, synthetic construct
  misc_feature 1..80: note = Artificially Synthesized Probe
  source 1..80: mol_type = other DNA
ggcttttgtaggcttttcttttttaattagacaatttgttcctcacagatagggttgatgaagaacgcttggtaggtaag

SEQ ID NO: 98238 - DNA, 80 bp, synthetic construct
  misc_feature 1..80: note = Artificially Synthesized Probe
  source 1..80: mol_type = other DNA
gagccgagtcattcataaagagctgttcacagatagggttgatgaagaatgcttggtaggtaagcgcctgtatgtgagcc

SEQ ID NO: 98239 - DNA, 80 bp, synthetic construct; identical to SEQ ID NO: 34817
  misc_feature 1..80: note = Artificially Synthesized Probe
  source 1..80: mol_type = other DNA

SEQ ID NO: 98240 - DNA, 80 bp, synthetic construct
  misc_feature 1..80: note = Artificially Synthesized Probe
  source 1..80: mol_type = other DNA
cttttacctttttttttttttttttttttttgagacagggtctcactctgtcacccaggctggagtgcagtggcacattc

SEQ ID NO: 98241 - DNA, 80 bp, synthetic construct
  misc_feature 1..80: note = Artificially Synthesized Probe
  source 1..80: mol_type = other DNA
gtcctgtcctgagcaaaaggtattaggaacctgagaatccttccattagcacaatagaaaaatgggcaaaaaggccaggc

SEQ ID NO: 98242 - DNA, 80 bp, synthetic construct
  misc_feature 1..80: note = Artificially Synthesized Probe
  source 1..80: mol_type = other DNA
tgacctcagatggtctgcccacctccgcctcccaaagtgctgggattacaggcgtgagccactgcgcccggccactttca

SEQ ID NO: 98243 - DNA, 80 bp, synthetic construct
  misc_feature 1..80: note = Artificially Synthesized Probe
  source 1..80: mol_type = other DNA
gtgattctactgtgctcagcctagtcaatttcgcattaaactgattatcagctgagtatcaataatgtaatagtgacttc

SEQ ID NO: 98244 - DNA, 80 bp, synthetic construct
  misc_feature 1..80: note = Artificially Synthesized Probe
  source 1..80: mol_type = other DNA
aattttttttgtatttttagtagagatggggtttcaccatcttggccaggctggtcttaaactcctgacctcatgatcta

SEQ ID NO: 98245 - DNA, 80 bp, synthetic construct; identical to SEQ ID NO: 34818
  misc_feature 1..80: note = Artificially Synthesized Probe
  source 1..80: mol_type = other DNA

SEQ ID NO: 98246 - DNA, 80 bp, synthetic construct
  misc_feature 1..80: note = Artificially Synthesized Probe
  source 1..80: mol_type = other DNA
aaggaacaggaatgttactaattttaactactgcattgcaaacaaattgtattgcagtattttaccatcagaaaaggaag

SEQ ID NO: 98247 - DNA, 80 bp, synthetic construct
  misc_feature 1..80: note = Artificially Synthesized Probe
  source 1..80: mol_type = other DNA
cgtgcagtacagggacggagtaggaagaggtgaagtttcgtgcggtgcagggacggagtaggaagaggtgaagtttcgtg

SEQ ID NO: 98248 - DNA, 80 bp, synthetic construct; identical to SEQ ID NO: 34819
  misc_feature 1..80: note = Artificially Synthesized Probe
  source 1..80: mol_type = other DNA

SEQ ID NO: 98249 - DNA, 80 bp, synthetic construct
  misc_feature 1..80: note = Artificially Synthesized Probe
  source 1..80: mol_type = other DNA
cctggccaacatggtgaaaccctgtgtctactaaaaatacaaaaattagccaactgtggtggtgcgtgcctgtaatccca

SEQ ID NO: 98250 - DNA, 80 bp, synthetic construct
  misc_feature 1..80: note = Artificially Synthesized Probe
  source 1..80: mol_type = other DNA
tggtcatctgcctcaaattgtgttaccacacgggagacttagcaactcagccagattcttctaaacacattttttataat

SEQ ID NO: 98251 - DNA, 80 bp, synthetic construct
  misc_feature 1..80: note = Artificially Synthesized Probe
  source 1..80: mol_type = other DNA
cctcccaggcccaagcaatcctcccatctcagcccactttgtagctgggactgtaggcactggccaccatgtccgcctaa

SEQ ID NO: 98252 - DNA, 80 bp, synthetic construct
  misc_feature 1..80: note = Artificially Synthesized Probe
  source 1..80: mol_type = other DNA
agcactttgagaggccaaggcaggtggatcatctgaggtcaggagtttgagaccagcctggccaacatagtgaaaccccg

SEQ ID NO: 98253 - DNA, 80 bp, synthetic construct; identical to SEQ ID NO: 34820
  misc_feature 1..80: note = Artificially Synthesized Probe
  source 1..80: mol_type = other DNA

SEQ ID NO: 98254 - DNA, 80 bp, synthetic construct
  misc_feature 1..80: note = Artificially Synthesized Probe
  source 1..80: mol_type = other DNA
ggcagatggatcacctgaggttgggagtttgagaccagcctgactaacatggtgaaaccccctctctactaaaattacaa

SEQ ID NO: 98255 - DNA, 80 bp, synthetic construct
  misc_feature 1..80: note = Artificially Synthesized Probe
  source 1..80: mol_type = other DNA
aaagttcttcccttagaactagtcctgttgggctagtctttctgggattttggtttactctcctccacccattggaaggg

SEQ ID NO: 98256 - DNA, 80 bp, synthetic construct; identical to SEQ ID NO: 34821
  misc_feature 1..80: note = Artificially Synthesized Probe
  source 1..80: mol_type = other DNA

SEQ ID NO: 98257 - DNA, 80 bp, synthetic construct
  misc_feature 1..80: note = Artificially Synthesized Probe
  source 1..80: mol_type = other DNA
aaaaatacaaaaaattagccgggcatggtagcgggcgcctgtagtcccagctacttgggaggctgaggcaggagaatggc

SEQ ID NO: 98258 - DNA, 80 bp, synthetic construct
  misc_feature 1..80: note = Artificially Synthesized Probe
  source 1..80: mol_type = other DNA
caggagaatgatgtgaacccgggaggcagagcttgcagtgagccgagattgtgccactgcactccagcctgggcgacaga

SEQ ID NO: 98259 - DNA, 80 bp, synthetic construct
  misc_feature 1..80: note = Artificially Synthesized Probe
  source 1..80: mol_type = other DNA
ataaaaaattcacaactgctaaaacagtgttccttctagtgtaattttcacccttagagacctgtctgtaataaacatta

SEQ ID NO: 98260 - DNA, 80 bp, synthetic construct; identical to SEQ ID NO: 34789
  misc_feature 1..80: note = Artificially Synthesized Probe
  source 1..80: mol_type = other DNA

SEQ ID NO: 98261 - DNA, 80 bp, synthetic construct
  misc_feature 1..80: note = Artificially Synthesized Probe
  source 1..80: mol_type = other DNA
tttacaaactggcaagacgacataagcattgtcttatggtccttcagttaaaaaaaaaattgtgtaaaaacaaaaatgga

SEQ ID NO: 98262 - DNA, 80 bp, synthetic construct
  misc_feature 1..80: note = Artificially Synthesized Probe
  source 1..80: mol_type = other DNA
attaagttaaggattgcaaaatgagagcatcctggatttgggtggaccctaaatcgaatgttatgtgtactgagaagaga

SEQ ID NO: 98263 - DNA, 80 bp, synthetic construct; identical to SEQ ID NO: 34790
  misc_feature 1..80: note = Artificially Synthesized Probe
  source 1..80: mol_type = other DNA

SEQ ID NO: 98264 - DNA, 80 bp, synthetic construct
  misc_feature 1..80: note = Artificially Synthesized Probe
  source 1..80: mol_type = other DNA
gattttgctagtctggacatttcatataatctggcttctgtcactgaatattaggtttccaaggttcatggatattgtag

SEQ ID NO: 98265 - DNA, 80 bp, synthetic construct
  misc_feature 1..80: note = Artificially Synthesized Probe
  source 1..80: mol_type = other DNA
gggaatggaattgttgagtcatatggtaacatttaaacttttcaggaactggccaggtgtggtggattgaacctgggagg

SEQ ID NO: 98266 - DNA, 80 bp, synthetic construct
  misc_feature 1..80: note = Artificially Synthesized Probe
  source 1..80: mol_type = other DNA
tcagcctgaccaacattgtgaaaccccacttctactaaaaatacaaaaattagctggtcgtggtgttgcgtacctgtaat

SEQ ID NO: 98267 - DNA, 80 bp, synthetic construct
  misc_feature 1..80: note = Artificially Synthesized Probe
  source 1..80: mol_type = other DNA
tcaaaaaaaaaaaaaatgtccaagatgtggtcatgggtgagggtgtctcgggtggcgtcaagtctgaggtcgctagaagt

SEQ ID NO: 98268 - DNA, 80 bp, synthetic construct; identical to SEQ ID NO: 34791
  misc_feature 1..80: note = Artificially Synthesized Probe
  source 1..80: mol_type = other DNA

SEQ ID NO: 98269 - DNA, 80 bp, synthetic construct
  misc_feature 1..80: note = Artificially Synthesized Probe
  source 1..80: mol_type = other DNA
cactgcaacctccctctctgagcttcaagtgattctcctgcctcagcctcccaagtagctgggattataggcacatgcca

SEQ ID NO: 98270 - DNA, 80 bp, synthetic construct
  misc_feature 1..80: note = Artificially Synthesized Probe
  source 1..80: mol_type = other DNA
tacaggcgtgaaccaacgcatctggacacatattatgtttctaaataggtgtgggtctctcattgaactgttatattcta

SEQ ID NO: 98271 - DNA, 80 bp, synthetic construct
  misc_feature 1..80: note = Artificially Synthesized Probe
  source 1..80: mol_type = other DNA
tcatagccctttattacttccatataaatgttataattagggcctggcacggtggctcatgcctgtaatcctagcacttt

SEQ ID NO: 98272 - DNA, 80 bp, synthetic construct
  misc_feature 1..80: note = Artificially Synthesized Probe
  source 1..80: mol_type = other DNA
aacccaggaggcagaggttgcagtgagctgagatcgcaccattgcactccagcctgggcaaaaagcgcaaaactccatca

SEQ ID NO: 98273 - DNA, 80 bp, synthetic construct; identical to SEQ ID NO: 34792
  misc_feature 1..80: note = Artificially Synthesized Probe
  source 1..80: mol_type = other DNA

SEQ ID NO: 98274 - DNA, 80 bp, synthetic construct
  misc_feature 1..80: note = Artificially Synthesized Probe
  source 1..80: mol_type = other DNA
tacagtggcatcatctcggctcactgcaacctccacctgctgggttcaggcgattctcctgtctcagcctcccgagtagc

SEQ ID NO: 98275 - DNA, 80 bp, synthetic construct
  misc_feature 1..80: note = Artificially Synthesized Probe
  source 1..80: mol_type = other DNA
gcccagcctagattttttttaagaacattcacgtttacaatatttaggagcaccttttcctcttgatttattaatgtctt

SEQ ID NO: 98276 - DNA, 80 bp, synthetic construct; identical to SEQ ID NO: 34793
  misc_feature 1..80: note = Artificially Synthesized Probe
  source 1..80: mol_type = other DNA

SEQ ID NO: 98277 - DNA, 80 bp, synthetic construct
  misc_feature 1..80: note = Artificially Synthesized Probe
  source 1..80: mol_type = other DNA
taatggtatcatgtgtggtctgtaagtgtctatatgtgtagttttagtaagtcttaactttttataaaccagcagcctcc

SEQ ID NO: 98278 - DNA, 80 bp, synthetic construct; identical to SEQ ID NO: 34786
  misc_feature 1..80: note = Artificially Synthesized Probe
  source 1..80: mol_type = other DNA

SEQ ID NO: 98279 - DNA, 80 bp, synthetic construct
  misc_feature 1..80: note = Artificially Synthesized Probe
  source 1..80: mol_type = other DNA
catgccccaccactactttttatttgatttgattttatttttagacggagtttcactcttgttgcccaggctggagtgca

SEQ ID NO: 98280 - DNA, 80 bp, synthetic construct
  misc_feature 1..80: note = Artificially Synthesized Probe
  source 1..80: mol_type = other DNA
ctagaactcccaacctcaggtgatccgcccaccttggcctcccaaagttctgggattacaggtgtgggccacggcgcctg

SEQ ID NO: 98281 - DNA, 80 bp, synthetic construct; identical to SEQ ID NO: 34794
  misc_feature 1..80: note = Artificially Synthesized Probe
  source 1..80: mol_type = other DNA

SEQ ID NO: 98282 - DNA, 80 bp, synthetic construct
  misc_feature 1..80: note = Artificially Synthesized Probe
  source 1..80: mol_type = other DNA
ttacgtttctctcaactgtgaatgctgccatgtgtggtctctgtttctgtataaaagttttaataaatttaccagcctgg

SEQ ID NO: 98283 - DNA, 80 bp, synthetic construct
  misc_feature 1..80: note = Artificially Synthesized Probe
  source 1..80: mol_type = other DNA
tccagcctgagtgacaaagcaagactccgtgtcaaaaaaaaaacaaaaacaaaaacaaaaaaagtttttataaattttaa

SEQ ID NO: 98284 - DNA, 80 bp, synthetic construct
  misc_feature 1..80: note = Artificially Synthesized Probe
  source 1..80: mol_type = other DNA
atttttcaatatatttgttgaaaaaagctacatataagtggacccacatagctcaaacccatctatgccctacaagtgtc

SEQ ID NO: 98285 - DNA, 80 bp, synthetic construct
  misc_feature 1..80: note = Artificially Synthesized Probe
  source 1..80: mol_type = other DNA
ggcaacatggtgaaaccctgtctctacaaaaaatacaaaaattagccaggtgtggtactgtgcacctgtagtcccagcta

SEQ ID NO: 98286 - DNA, 80 bp, synthetic construct; identical to SEQ ID NO: 34795
  misc_feature 1..80: note = Artificially Synthesized Probe
  source 1..80: mol_type = other DNA

SEQ ID NO: 98287 - DNA, 80 bp, synthetic construct
  misc_feature 1..80: note = Artificially Synthesized Probe
  source 1..80: mol_type = other DNA
caccaccacacccagctaatttttgttgtatttttagtagcgacagggtttcaccacgttggccaggctggtctcgaact

SEQ ID NO: 98288 - DNA, 80 bp, synthetic construct
  misc_feature 1..80: note = Artificially Synthesized Probe
  source 1..80: mol_type = other DNA
tactggaagatgttttcaggccctacaagaataagaagtcttaaccaggcccgagttctgcttcctgggagtatctcccc

SEQ ID NO: 98289 - DNA, 80 bp, synthetic construct
  misc_feature 1..80: note = Artificially Synthesized Probe
  source 1..80: mol_type = other DNA
tctcctgcctcagcctcccgagtagctgagattacaggtatatgccaccatgcccagctaatttttgtatttttagtaga

SEQ ID NO: 98290 - DNA, 80 bp, synthetic construct; identical to SEQ ID NO: 34796
  misc_feature 1..80: note = Artificially Synthesized Probe
  source 1..80: mol_type = other DNA

SEQ ID NO: 98291 - DNA, 80 bp, synthetic construct
  misc_feature 1..80: note = Artificially Synthesized Probe
  source 1..80: mol_type = other DNA
tgctgagaccagtgcatgcttccagggtggcactgctgcctgtgatttcttgctacttctctgttttttttggatcccta

SEQ ID NO: 98292 - DNA, 80 bp, synthetic construct
  misc_feature 1..80: note = Artificially Synthesized Probe
  source 1..80: mol_type = other DNA
tgaggcaggggcggagacgggggagtactgaggtgagagaaggagaacttgattggtggtaacagaggaagcataaaggg

SEQ ID NO: 98293 - DNA, 80 bp, synthetic construct
  misc_feature 1..80: note = Artificially Synthesized Probe
  source 1..80: mol_type = other DNA
tagtcaaagaatttgggcactgccttggtggctggaggcaggtcagaaaatgtcagttggcatggtagaacttctaggac

SEQ ID NO: 98294 - DNA, 80 bp, synthetic construct
  misc_feature 1..80: note = Artificially Synthesized Probe
  source 1..80: mol_type = other DNA
agcctgccgagtagctgggactgcaggcgcccgccaccaggcctggctaattttttgtattttttagtagagatgggatt

SEQ ID NO: 98295 - DNA, 80 bp, synthetic construct; identical to SEQ ID NO: 34833
  misc_feature 1..80: note = Artificially Synthesized Probe
  source 1..80: mol_type = other DNA

SEQ ID NO: 98296 - DNA, 80 bp, synthetic construct
  misc_feature 1..80: note = Artificially Synthesized Probe
  source 1..80: mol_type = other DNA
agaataaggatggggagacccctggccaaattttgggctggggacccccctgggattctgctgaagaggaggaagaagat

SEQ ID NO: 98297 - DNA, 80 bp, synthetic construct
  misc_feature 1..80: note = Artificially Synthesized Probe
  source 1..80: mol_type = other DNA
gctcctctgccccctcctctgtgcttccctgcttcttggggcccatcaccttctcacagcctctctccaactacccccat

SEQ ID NO: 98298 - DNA, 80 bp, synthetic construct; identical to SEQ ID NO: 34834
  misc_feature 1..80: note = Artificially Synthesized Probe
  source 1..80: mol_type = other DNA

SEQ ID NO: 98299 - DNA, 80 bp, synthetic construct; identical to SEQ ID NO: 34823
  misc_feature 1..80: note = Artificially Synthesized Probe
  source 1..80: mol_type = other DNA

SEQ ID NO: 98300 - DNA, 80 bp, synthetic construct
  misc_feature 1..80: note = Artificially Synthesized Probe
  source 1..80: mol_type = other DNA
gctgcagccctggtggccaggggcccccctttggaggaacagggggctctgaggaggtacttgagggtccagcaggtccg

SEQ ID NO: 98301 - DNA, 80 bp, synthetic construct
  misc_feature 1..80: note = Artificially Synthesized Probe
  source 1..80: mol_type = other DNA
agcctcaggatgaggcagaaggaagggtaagggaaaggatggggaccacaaggaagagccaggtgctgctcagcagagga

SEQ ID NO: 98302 - DNA, 80 bp, synthetic construct
  misc_feature 1..80: note = Artificially Synthesized Probe
  source 1..80: mol_type = other DNA
ggacggctggtccgggcccaggccctcctccagcgacacccaggcctcgatgtagatgctgggcagcccccaccactgca

SEQ ID NO: 98303 - DNA, 80 bp, synthetic construct
  misc_feature 1..80: note = Artificially Synthesized Probe
  source 1..80: mol_type = other DNA
gtcataagcagctgaccagacctgaaatgaaagccaaccaatagttgagaaataagctggttatttggtcatcaggacct

SEQ ID NO: 98304 - DNA, 80 bp, synthetic construct
  misc_feature 1..80: note = Artificially Synthesized Probe
  source 1..80: mol_type = other DNA
tgtttcttgacagattgtttgctcgtagccaaaaagtagcatagaaggtaggctctggagttagattgcctggattcaaa

SEQ ID NO: 98305 - DNA, 80 bp, synthetic construct
  misc_feature 1..80: note = Artificially Synthesized Probe
  source 1..80: mol_type = other DNA
acaacaatcttaggaggtgagtactgatattatcccccatttcccagctgaggaaacagggcatagagaagtcatttgcc

SEQ ID NO: 98306 - DNA, 80 bp, synthetic construct; identical to SEQ ID NO: 34822
  misc_feature 1..80: note = Artificially Synthesized Probe
  source 1..80: mol_type = other DNA

SEQ ID NO: 98307 - DNA, 80 bp, synthetic construct; identical to SEQ ID NO: 34824
  misc_feature 1..80: note = Artificially Synthesized Probe
  source 1..80: mol_type = other DNA

SEQ ID NO: 98308 - DNA, 80 bp, synthetic construct
  misc_feature 1..80: note = Artificially Synthesized Probe
  source 1..80: mol_type = other DNA
aggttcaagtgattctcatgcgtcagcctcccaagtagctaggattacaggcgcatgccaccacgcccagctaattttta

SEQ ID NO: 98309 - DNA, 80 bp, synthetic construct
  misc_feature 1..80: note = Artificially Synthesized Probe
  source 1..80: mol_type = other DNA
aggtccatactcccttaaccacaattctaaactcaaaaacactctgagaaccaacatttttcatcaggctgccaccaaaa

SEQ ID NO: 98310 - DNA, 80 bp, synthetic construct; identical to SEQ ID NO: 34825
  misc_feature 1..80: note = Artificially Synthesized Probe
  source 1..80: mol_type = other DNA

SEQ ID NO: 98311 - DNA, 80 bp, synthetic construct
  misc_feature 1..80: note = Artificially Synthesized Probe
  source 1..80: mol_type = other DNA
tactaaaaatacaaaaattagccaggcatggtggcacacacctgtagtctcagctacttgggaggctgaggcaggagaat

SEQ ID NO: 98312 - DNA, 80 bp, synthetic construct
  misc_feature 1..80: note = Artificially Synthesized Probe
  source 1..80: mol_type = other DNA
agctgaaaccttctttccccatctagagatttccttctggagtaagaacattacaggaaaacctctagatccagatgaac

SEQ ID NO: 98313 - DNA, 80 bp, synthetic construct
  misc_feature 1..80: note = Artificially Synthesized Probe
  source 1..80: mol_type = other DNA
aaacagagtaggtttactgagtgcaggcatctaacttgacagctcatattgtaagaggcaggaccctggaaggcaaaaga

SEQ ID NO: 98314 - DNA, 80 bp, synthetic construct
  misc_feature 1..80: note = Artificially Synthesized Probe
  source 1..80: mol_type = other DNA
tgttgcccaggctagagtgcaatggcgcgatttcagcccacctcaacctctgcctcctgggttcaagagattctcctgcc

SEQ ID NO: 98315 - DNA, 80 bp, synthetic construct; identical to SEQ ID NO: 34826
  misc_feature 1..80: note = Artificially Synthesized Probe
  source 1..80: mol_type = other DNA

SEQ ID NO: 98316 - DNA, 80 bp, synthetic construct
  misc_feature 1..80: note = Artificially Synthesized Probe
  source 1..80: mol_type = other DNA
cccagctaattgtttgtatttttggtagagactgttttgctatgttatccaggctgttctgcatctcctgagttcaaaca

SEQ ID NO: 98317 - DNA, 80 bp, synthetic construct
  misc_feature 1..80: note = Artificially Synthesized Probe
  source 1..80: mol_type = other DNA
gtccatcactgaaccatctcctctctctgccaagttagaggaggcgggaaaaaacctccaaataactctcttttctccct

SEQ ID NO: 98318 - DNA, 80 bp, synthetic construct
  misc_feature 1..80: note = Artificially Synthesized Probe
  source 1..80: mol_type = other DNA
tctgaaatctcacagctctcaggtcattgtcttccaaagggggacccaagctcagtgccttcactcccagaccctggtgt

SEQ ID NO: 98319 - DNA, 80 bp, synthetic construct; identical to SEQ ID NO: 34827
  misc_feature 1..80: note = Artificially Synthesized Probe
  source 1..80: mol_type = other DNA

SEQ ID NO: 98320 - DNA, 80 bp, synthetic construct
  misc_feature 1..80: note = Artificially Synthesized Probe
  source 1..80: mol_type = other DNA
ccacctccgcctcctgggttcaagtgattctccttcctcagcctcctgagtagccgggactacaggagcctgccaccatg

SEQ ID NO: 98321 - DNA, 80 bp, synthetic construct
  misc_feature 1..80: note = Artificially Synthesized Probe
  source 1..80: mol_type = other DNA
gtgtttttagtagagatggggtttcaacatgttggccaggctggtctcaaactcctgacctcaagtgatccacccacctc

SEQ ID NO: 98322 - DNA, 80 bp, synthetic construct
  misc_feature 1..80: note = Artificially Synthesized Probe
  source 1..80: mol_type = other DNA
caatctcggctcactgcaacctccacctcccaggttcaagagattctcctgcctcagcctcccaagtagctgggactata

SEQ ID NO: 98323 - DNA, 80 bp, synthetic construct; identical to SEQ ID NO: 34828
  misc_feature 1..80: note = Artificially Synthesized Probe
  source 1..80: mol_type = other DNA

SEQ ID NO: 98324 - DNA, 80 bp, synthetic construct
  misc_feature 1..80: note = Artificially Synthesized Probe
  source 1..80: mol_type = other DNA
agccattctcctgcctcagcctcccaagtagctgggattacaggcgcccgccaccacgcccagctaattttttgtatttt

SEQ ID NO: 98325 - DNA, 80 bp, synthetic construct
  misc_feature 1..80: note = Artificially Synthesized Probe
  source 1..80: mol_type = other DNA
tgaacttttttttttttttttttccgagacagagtctcgctgtgtcacccaggctggagtgcaatggcgcaatctcagct

SEQ ID NO: 98326 - DNA, 80 bp, synthetic construct
  misc_feature 1..80: note = Artificially Synthesized Probe
  source 1..80: mol_type = other DNA
aactcctgtcctgacctgaggtgatccacccacctcagcttcccaaagtgctgggattacaggcatgagccactgtgcct

SEQ ID NO: 98327 - DNA, 80 bp, synthetic construct; identical to SEQ ID NO: 34829
  misc_feature 1..80: note = Artificially Synthesized Probe
  source 1..80: mol_type = other DNA

SEQ ID NO: 98328 - DNA, 80 bp, synthetic construct
  misc_feature 1..80: note = Artificially Synthesized Probe
  source 1..80: mol_type = other DNA
tcacttccgtcctccacctgcgtctctgcttgcgccatttcctccagcctggagtgtctccgcccttcccgcctcccgtc

SEQ ID NO: 98329 - DNA, 80 bp, synthetic construct
  misc_feature 1..80: note = Artificially Synthesized Probe
  source 1..80: mol_type = other DNA
gtccagtcgcgcaatcttggctcactgcaacctctgcctcccgggttcaagcagttctctgcctcagcctcccaagtagc

SEQ ID NO: 98330 - DNA, 80 bp, synthetic construct
  misc_feature 1..80: note = Artificially Synthesized Probe
  source 1..80: mol_type = other DNA
gccaccgcgcctggccgagttttttaatttctaaaaataaaaatgagtatacatctaaagtagtagaagaaaatgcagag

SEQ ID NO: 98331 - DNA, 80 bp, synthetic construct
  misc_feature 1..80: note = Artificially Synthesized Probe
  source 1..80: mol_type = other DNA
cacttgagccaggagttcaagaccagcctgaacaacacagtgagacctggtctgtacaaaaaatacaaaattagccaggc

SEQ ID NO: 98332 - DNA, 80 bp, synthetic construct
  misc_feature 1..80: note = Artificially Synthesized Probe
  source 1..80: mol_type = other DNA
aaagcttttttaaagatagatagaagaaaatgtttgcaatatgtataacacatacagtatatagaaccctcatatcaata

SEQ ID NO: 98333 - DNA, 80 bp, synthetic construct; identical to SEQ ID NO: 34830
  misc_feature 1..80: note = Artificially Synthesized Probe
  source 1..80: mol_type = other DNA

SEQ ID NO: 98334 - DNA, 80 bp, synthetic construct
  misc_feature 1..80: note = Artificially Synthesized Probe
  source 1..80: mol_type = other DNA
aaaaagtatgaggtagactgtatatattcctgtggaaaaatataaatgagatgttaaatgaaagaagcaagttgccaagc

SEQ ID NO: 98335 - DNA, 80 bp, synthetic construct
  misc_feature 1..80: note = Artificially Synthesized Probe
  source 1..80: mol_type = other DNA
tatatccctttcacattaaaatgtcaaataaaattgggggaaaagccacctacagccccaccacccataggctagaattt

SEQ ID NO: 98336 - DNA, 80 bp, synthetic construct; identical to SEQ ID NO: 34831
  misc_feature 1..80: note = Artificially Synthesized Probe
  source 1..80: mol_type = other DNA

SEQ ID NO: 98337 - DNA, 80 bp, synthetic construct
  misc_feature 1..80: note = Artificially Synthesized Probe
  source 1..80: mol_type = other DNA
ctctctctctctctcttttttttttttttttttttttttgagatagagtctcaccctgtcacccaggctggaatgcagag

SEQ ID NO: 98338 - DNA, 80 bp, synthetic construct
  misc_feature 1..80: note = Artificially Synthesized Probe
  source 1..80: mol_type = other DNA
gtttgttttagtaaagacgggttttcaccatcttggccaggctggtattgaactcctgaccttgtgatccattgtccccc

SEQ ID NO: 98339 - DNA, 80 bp, synthetic construct
  misc_feature 1..80: note = Artificially Synthesized Probe
  source 1..80: mol_type = other DNA
tcattattggagattatctgtgactttttaaaactcagatttctgctgataaaaattttccccatccggccctgttgggt

SEQ ID NO: 98340 - DNA, 80 bp, synthetic construct
  misc_feature 1..80: note = Artificially Synthesized Probe
  source 1..80: mol_type = other DNA
aaaacctatgaatgtaaacctcccatgcaagcctgagcactcaccatgctcaccacctgagctcaggtggggaacaagcg

SEQ ID NO: 98341 - DNA, 80 bp, synthetic construct; identical to SEQ ID NO: 34832
  misc_feature 1..80: note = Artificially Synthesized Probe
  source 1..80: mol_type = other DNA

SEQ ID NO: 98342 - DNA, 80 bp, synthetic construct
  misc_feature 1..80: note = Artificially Synthesized Probe
  source 1..80: mol_type = other DNA
gcagtgaaggaagtagcatggcactcagctaaccttgggccagatgcagcaaggttgggactgaagaaaaggggagttca

SEQ ID NO: 98343 - DNA, 80 bp, synthetic construct
  misc_feature 1..80: note = Artificially Synthesized Probe
  source 1..80: mol_type = other DNA
cctctcccatcatcccctggtaaggctggctgagagaaattcccctgaaaacatttattttactcagtttattgataagt

SEQ ID NO: 98344 - DNA, 80 bp, synthetic construct
  misc_feature 1..80: note = Artificially Synthesized Probe
  source 1..80: mol_type = other DNA
ggctaatttttttttatttttagtagagacagggtttcaccatcttggccaggctaatctcaaactcctgacctcgtgat

SEQ ID NO: 98345 - DNA, 80 bp, synthetic construct
  misc_feature 1..80: note = Artificially Synthesized Probe
  source 1..80: mol_type = other DNA
gtatctttagtagagagggggtttcaccgtgttggccaggctggtctcgaactcctgacctcagatgatctgccctcttt

SEQ ID NO: 98346 - DNA, 80 bp, synthetic construct; identical to SEQ ID NO: 34845
  misc_feature 1..80: note = Artificially Synthesized Probe
  source 1..80: mol_type = other DNA

SEQ ID NO: 98347 - DNA, 80 bp, synthetic construct
  misc_feature 1..80: note = Artificially Synthesized Probe
  source 1..80: mol_type = other DNA
tctgtcacccagggtgaagttcagtggagtgatatcaactcgctgaagcctcgacctccaggctcccgtgatcctcctgc

SEQ ID NO: 98348 - DNA, 80 bp, synthetic construct
  misc_feature 1..80: note = Artificially Synthesized Probe
  source 1..80: mol_type = other DNA
ttgcctcaccgcaacctccacctcctgggttcaagtgattttcatacctcagtctcgagtagctgggactacaggctggg

SEQ ID NO: 98349 - DNA, 80 bp, synthetic construct
  misc_feature 1..80: note = Artificially Synthesized Probe
  source 1..80: mol_type = other DNA
ctggctaatttttgcatagagccacccgctcccagccgtaagtttttgtatttttagtagagatgtggttttgctatgtt

SEQ ID NO: 98350 - DNA, 80 bp, synthetic construct; identical to SEQ ID NO: 34846
  misc_feature 1..80: note = Artificially Synthesized Probe
  source 1..80: mol_type = other DNA

SEQ ID NO: 98351 - DNA, 80 bp, synthetic construct
  misc_feature 1..80: note = Artificially Synthesized Probe
  source 1..80: mol_type = other DNA
cttgaacgcaggaagtgggggttgcagtgagccgagattgtgccactgcaccccaacttgggcaacatagcaagaccccg

SEQ ID NO: 98352 - DNA, 80 bp, synthetic construct
  misc_feature 1..80: note = Artificially Synthesized Probe
  source 1..80: mol_type = other DNA
aaggtggagatttggggattaccagcattttgtgatatttcatgccccaggagacaatgagcttaagaagttgctcccgg

SEQ ID NO: 98353 - DNA, 80 bp, synthetic construct
  misc_feature 1..80: note = Artificially Synthesized Probe
  source 1..80: mol_type = other DNA
gctggagatgcggcacctcttcagcctggggtggaaaagaggagaaaggagctggtcatttcttttgctccagttttgtg

SEQ ID NO: 98354 - DNA, 80 bp, synthetic construct
  misc_feature 1..80: note = Artificially Synthesized Probe
  source 1..80: mol_type = other DNA
tgccaccatgcctggctcattttggtatttttagtagagatggggtttcaccatgttggccaggctggtcttgaactcct

SEQ ID NO: 98355 - DNA, 80 bp, synthetic construct; identical to SEQ ID NO: 34847
  misc_feature 1..80: note = Artificially Synthesized Probe
  source 1..80: mol_type = other DNA

SEQ ID NO: 98356 - DNA, 80 bp, synthetic construct
  misc_feature 1..80: note = Artificially Synthesized Probe
  source 1..80: mol_type = other DNA
cccctgtaatcccagctaatcaggaggctgaggcaggagaattgcttgaactcaggaggcggaggttgcagtgagtcgag

SEQ ID NO: 98357 - DNA, 80 bp, synthetic construct
  misc_feature 1..80: note = Artificially Synthesized Probe
  source 1..80: mol_type = other DNA
atgggcagcatggtgaaaccccatctctccaaaacatacaaaaattagcctggtgtggctgggcacggtggctcagtctg

SEQ ID NO: 98358 - DNA, 80 bp, synthetic construct
  misc_feature 1..80: note = Artificially Synthesized Probe
  source 1..80: mol_type = other DNA
caggagaatcgcttgaacccaggaggcagaggttgcagtgagccgagatcacgctactgcactccagcctggtgacaaag

SEQ ID NO: 98359 - DNA, 80 bp, synthetic construct; identical to SEQ ID NO: 34848
  misc_feature 1..80: note = Artificially Synthesized Probe
  source 1..80: mol_type = other DNA

SEQ ID NO: 98360 - DNA, 80 bp, synthetic construct
  misc_feature 1..80: note = Artificially Synthesized Probe
  source 1..80: mol_type = other DNA
tagctttgattagaggtgtgtgccaccatacctggtgtgtgcgtgtgtgtgtgtgtgtgtgtgtgtgtgtgtaaagaaag

SEQ ID NO: 98361 - DNA, 80 bp, synthetic construct
  misc_feature 1..80: note = Artificially Synthesized Probe
  source 1..80: mol_type = other DNA
ttggcacttttttcccccctgagatggagtctcaccgtatcacccaggctggagtgcagtggcacaatcccggctcactg

SEQ ID NO: 98362 - DNA, 80 bp, synthetic construct
  misc_feature 1..80: note = Artificially Synthesized Probe
  source 1..80: mol_type = other DNA
gatctgcccgccttcacctgtcaacatactgggattacagacgtgagccacggcacctggctttgtgacacttttttatg

SEQ ID NO: 98363 - DNA, 80 bp, synthetic construct; identical to SEQ ID NO: 34849
  misc_feature 1..80: note = Artificially Synthesized Probe
  source 1..80: mol_type = other DNA

SEQ ID NO: 98364 - DNA, 80 bp, synthetic construct
  misc_feature 1..80: note = Artificially Synthesized Probe
  source 1..80: mol_type = other DNA
tgttgcccaggctggagtgcaatggcgcaatctcagctcaccacaacctccgcctcctgggttcaagcgattctcctgcc

SEQ ID NO: 98365 - DNA, 80 bp, synthetic construct
  misc_feature 1..80: note = Artificially Synthesized Probe
  source 1..80: mol_type = other DNA
aggcgtgagccaccacatccggccaaagcatgctatcttttcatttttttttttagagggccttgccctgttgtctaggc

SEQ ID NO: 98366 - DNA, 80 bp, synthetic construct
  misc_feature 1..80: note = Artificially Synthesized Probe
  source 1..80: mol_type = other DNA
ccaggctgcacctggctctatctgacgctcctaatcattgatagttggtttacttgtttccctctttattatctgtctcc

SEQ ID NO: 98367 - DNA, 80 bp, synthetic construct
  misc_feature 1..80: note = Artificially Synthesized Probe
  source 1..80: mol_type = other DNA
cctataatcccagcactttgggaggctgaggccgagagtttgagaccagcctggccaacatggtgacaccccatctctac

SEQ ID NO: 98368 - DNA, 80 bp, synthetic construct; identical to SEQ ID NO: 34850
  misc_feature 1..80: note = Artificially Synthesized Probe
  source 1..80: mol_type = other DNA

SEQ ID NO: 98369 - DNA, 80 bp, synthetic construct
  misc_feature 1..80: note = Artificially Synthesized Probe
  source 1..80: mol_type = other DNA
gatgtcagtagtattatttgcttcccagttgtgaccaccaaaaacgtgtctccaaacatcgccaaatgtcagagcaaaat

SEQ ID NO: 98370 - DNA, 80 bp, synthetic construct
  misc_feature 1..80: note = Artificially Synthesized Probe
  source 1..80: mol_type = other DNA
atcccagctactcaggaggctgaggcaggagaatcgcttgaacccgggaggcagaggctgcagtgagccaagattgcgcc

SEQ ID NO: 98371 - DNA, 80 bp, synthetic construct
  misc_feature 1..80: note = Artificially Synthesized Probe
  source 1..80: mol_type = other DNA
catggtgaaaccctgtctctactaaaaatacaaaaattaggtgggcgtggtggcgtgcacctgtagtcccagctacttgg

SEQ ID NO: 98372 - DNA, 80 bp, synthetic construct; identical to SEQ ID NO: 34836
  misc_feature 1..80: note = Artificially Synthesized Probe
  source 1..80: mol_type = other DNA

SEQ ID NO: 98373 - DNA, 80 bp, synthetic construct; identical to SEQ ID NO: 34851
  misc_feature 1..80: note = Artificially Synthesized Probe
  source 1..80: mol_type = other DNA

SEQ ID NO: 98374 - DNA, 80 bp, synthetic construct
  misc_feature 1..80: note = Artificially Synthesized Probe
  source 1..80: mol_type = other DNA
gatcccaagcagagggacttttgatctcaatctgcatgagtctgtctctaggaaggaggctgatcattatgctggggggg

SEQ ID NO: 98375 - DNA, 80 bp, synthetic construct
  misc_feature 1..80: note = Artificially Synthesized Probe
  source 1..80: mol_type = other DNA
caaggagccctgctgcagggtggagccgtcgctctgagctttgctttggatccactgcaacaggtccatcttgatgtgcg

SEQ ID NO: 98376 - DNA, 80 bp, synthetic construct
  misc_feature 1..80: note = Artificially Synthesized Probe
  source 1..80: mol_type = other DNA
cccctcgtccaggatatagtacatagctgcaaagaattcctggaaactcaagtggatgaagctgtagtacctctcacagt

SEQ ID NO: 98377 - DNA, 80 bp, synthetic construct
  misc_feature 1..80: note = Artificially Synthesized Probe
  source 1..80: mol_type = other DNA
ccaaggagcacaaccctctctggttgggtgggggctggaggcgcggggcccccggcttgggttgcatcagactcagcagg

SEQ ID NO: 98378 - DNA, 80 bp, synthetic construct; identical to SEQ ID NO: 34852
  misc_feature 1..80: note = Artificially Synthesized Probe
  source 1..80: mol_type = other DNA

SEQ ID NO: 98379 - DNA, 80 bp, synthetic construct
  misc_feature 1..80: note = Artificially Synthesized Probe
  source 1..80: mol_type = other DNA
cttcttccgaattaagctgttaagaagcagctccgtgggccgtttctcctcccagcagaggcaccagggtccctgaggat

SEQ ID NO: 98380 - DNA, 80 bp, synthetic construct
  misc_feature 1..80: note = Artificially Synthesized Probe
  source 1..80: mol_type = other DNA
gttgatgtagaagagataatcaaatctgccttggaagagcttcccgtccgcccagtccagcatcaccttgtgtgccagca

SEQ ID NO: 98381 - DNA, 80 bp, synthetic construct; identical to SEQ ID NO: 34853
  misc_feature 1..80: note = Artificially Synthesized Probe
  source 1..80: mol_type = other DNA

SEQ ID NO: 98382 - DNA, 80 bp, synthetic construct
  misc_feature 1..80: note = Artificially Synthesized Probe
  source 1..80: mol_type = other DNA
tgcctgtagttccagctactcaggaggctgagatgggagaatcacttgaacccctgaggtggaggttgcagtgagctgag

SEQ ID NO: 98383 - DNA, 80 bp, synthetic construct
  misc_feature 1..80: note = Artificially Synthesized Probe
  source 1..80: mol_type = other DNA
tgcaatggtgtgctccctgcaacatccacctcctgggttcaagtgattctccagtctcagcctcccgagtagctgggatt

SEQ ID NO: 98384 - DNA, 80 bp, synthetic construct
  misc_feature 1..80: note = Artificially Synthesized Probe
  source 1..80: mol_type = other DNA
ttgtgtttttattagagacggggtttcgccattttagccaggatggtctcgatctcctgacctcgtgatccacccgcctc

SEQ ID NO: 98385 - DNA, 80 bp, synthetic construct
  misc_feature 1..80: note = Artificially Synthesized Probe
  source 1..80: mol_type = other DNA
cacaaagtgactttcagcaaaggatttatagaacgggtacattaccagatagtgcagacatgaatctgccttttttcaaa

SEQ ID NO: 98386 - DNA, 80 bp, synthetic construct
  misc_feature 1..80: note = Artificially Synthesized Probe
  source 1..80: mol_type = other DNA
gtctctataaaaacaaaagaaagagaaaacaaagggggcacagaaaacttgggagcagtgcttctcaaactttttttttt

SEQ ID NO: 98387 - DNA, 80 bp, synthetic construct; identical to SEQ ID NO: 34854
  misc_feature 1..80: note = Artificially Synthesized Probe
  source 1..80: mol_type = other DNA

SEQ ID NO: 98388 - DNA, 80 bp, synthetic construct
  misc_feature 1..80: note = Artificially Synthesized Probe
  source 1..80: mol_type = other DNA
ccctagttccccaggggacatttggcaacgggacaagtgggttggttgttacaactgggaaagtactactgccacatagt

SEQ ID NO: 98389 - DNA, 80 bp, synthetic construct
  misc_feature 1..80: note = Artificially Synthesized Probe
  source 1..80: mol_type = other DNA
tagctgcctgagagaagcttaaaaaaaagaatctgagtttgatactaaaattttcaaaacaaatatgtgtacttttaatt

SEQ ID NO: 98390 - DNA, 80 bp, synthetic construct
  misc_feature 1..80: note = Artificially Synthesized Probe
  source 1..80: mol_type = other DNA
tctaggctcactgcaaactccgcctcccaggctcaagtgattctcctgcctcagtctcctgagtaactcgatttacaggt

SEQ ID NO: 98391 - DNA, 80 bp, synthetic construct; identical to SEQ ID NO: 34855
  misc_feature 1..80: note = Artificially Synthesized Probe
  source 1..80: mol_type = other DNA

SEQ ID NO: 98392 - DNA, 80 bp, synthetic construct
  misc_feature 1..80: note = Artificially Synthesized Probe
  source 1..80: mol_type = other DNA
caagtagctcagactacaggtgcctgccaccacgcctggctaatttttttgtatttttagtagagacaaggtttcaccgt

SEQ ID NO: 98393 - DNA, 80 bp, synthetic construct
  misc_feature 1..80: note = Artificially Synthesized Probe
  source 1..80: mol_type = other DNA
atcatacaatatttgtacccctctcccgcctttttttttgagacagggtctttctcactccccccaggctggagtgcagt

SEQ ID NO: 98394 - DNA, 80 bp, synthetic construct
  misc_feature 1..80: note = Artificially Synthesized Probe
  source 1..80: mol_type = other DNA
ggctggtctcagagcctggcctcccaaagtgcagggattacaggcgtgagccaccttgctcagctggtgaacccactctt

SEQ ID NO: 98395 - DNA, 80 bp, synthetic construct; identical to SEQ ID NO: 34856
  misc_feature 1..80: note = Artificially Synthesized Probe
  source 1..80: mol_type = other DNA

SEQ ID NO: 98396 - DNA, 80 bp, synthetic construct
  misc_feature 1..80: note = Artificially Synthesized Probe
  source 1..80: mol_type = other DNA
ccagcttatctaccctcatgctcccagcccaatgtccagcctcctccagaaagaactggtcatcatccctcaccagagga

SEQ ID NO: 98397 - DNA, 80 bp, synthetic construct
  misc_feature 1..80: note = Artificially Synthesized Probe
  source 1..80: mol_type = other DNA
tctgttgcccaggctggagtgcagtggtgcaatcttggctcactgcaacctctacctcccaggttcaagtgattcttctg

SEQ ID NO: 98398 - DNA, 80 bp, synthetic construct
  misc_feature 1..80: note = Artificially Synthesized Probe
  source 1..80: mol_type = other DNA
caggcgtgagccactgtacctggcctcttagccttccttgttgcccctgcgtgtatgagatggtttggtagccatctttc

SEQ ID NO: 98399 - DNA, 80 bp, synthetic construct; identical to SEQ ID NO: 34857
  misc_feature 1..80: note = Artificially Synthesized Probe
  source 1..80: mol_type = other DNA

SEQ ID NO: 98400 - DNA, 80 bp, synthetic construct
  misc_feature 1..80: note = Artificially Synthesized Probe
  source 1..80: mol_type = other DNA
gaaatgcctgcataactccctggtcacccgcaccccagaatgttcagtagtgactgcataggccgtgtgtgggaaatagc

SEQ ID NO: 98401 - DNA, 80 bp, synthetic construct
  misc_feature 1..80: note = Artificially Synthesized Probe
  source 1..80: mol_type = other DNA
acaacctccacctcctgaattcaagcgattctcctgcctcagcctcacgagtagctggcattacaggtgtgcgccacaat

SEQ ID NO: 98402 - DNA, 80 bp, synthetic construct
  misc_feature 1..80: note = Artificially Synthesized Probe
  source 1..80: mol_type = other DNA
gggaagttctgagtcagtctggactcctcccttgtcagctctgggccacatctcatccattatcttttcttttttctttt

SEQ ID NO: 98403 - DNA, 80 bp, synthetic construct
  misc_feature 1..80: note = Artificially Synthesized Probe
  source 1..80: mol_type = other DNA
atttttagtagagacagggtttcaccatgtgggtcaggctggtcttgaactcctgacctcgtgatccacccaactcggcc

SEQ ID NO: 98404 - DNA, 80 bp, synthetic construct; identical to SEQ ID NO: 34858
  misc_feature 1..80: note = Artificially Synthesized Probe
  source 1..80: mol_type = other DNA

SEQ ID NO: 98405 - DNA, 80 bp, synthetic construct
  misc_feature 1..80: note = Artificially Synthesized Probe
  source 1..80: mol_type = other DNA
aagttttcacctccctgctggttgctagtccatgaaatgattcatgaaagcaaagaacatccttttgaaggagccaggag

SEQ ID NO: 98406 - DNA, 80 bp, synthetic construct
  misc_feature 1..80: note = Artificially Synthesized Probe
  source 1..80: mol_type = other DNA
gacaccttccctgtgagtctgtgtgactaataaactgttgtctttcctctgttcagtgctggctctggtagattcagtca

SEQ ID NO: 98407 - DNA, 80 bp, synthetic construct; identical to SEQ ID NO: 34837
  misc_feature 1..80: note = Artificially Synthesized Probe
  source 1..80: mol_type = other DNA

SEQ ID NO: 98408 - DNA, 80 bp, synthetic construct
  misc_feature 1..80: note = Artificially Synthesized Probe
  source 1..80: mol_type = other DNA
cacccatgaccacgcaggtggtggtaaaaatacaaaaaaataatttttgtatttttagtagagatgcggtttgaccatgt

SEQ ID NO: 98409 - DNA, 80 bp, synthetic construct; identical to SEQ ID NO: 34859
  misc_feature 1..80: note = Artificially Synthesized Probe
  source 1..80: mol_type = other DNA

SEQ ID NO: 98410 - DNA, 80 bp, synthetic construct
  misc_feature 1..80: note = Artificially Synthesized Probe
  source 1..80: mol_type = other DNA
acggtgaaaccccgtctctactaaaaatacaaaaaaaaattagctgggcatggtggcaggcacctgtagtcccagcaatt

SEQ ID NO: 98411 - DNA, 80 bp, synthetic construct
  misc_feature 1..80: note = Artificially Synthesized Probe
  source 1..80: mol_type = other DNA
cttgaaccagggagtcagaggttgaagtgtgctgacatcgcatcattgcactccagcctggtgacggagcgagactccat

SEQ ID NO: 98412 - DNA, 80 bp, synthetic construct
  misc_feature 1..80: note = Artificially Synthesized Probe
  source 1..80: mol_type = other DNA
attagctgggcgtggtggcagatgcctgtaatcccagctacttgggaggctgaggcaggataattgcttgaacccatgag

SEQ ID NO: 98413 - DNA, 80 bp, synthetic construct
  misc_feature 1..80: note = Artificially Synthesized Probe
  source 1..80: mol_type = other DNA
tgtgtcgtccaggctggtgtgatgttggctcactgcaacctctgcctccagggttcaagtgattctcctgcctcagcctc

SEQ ID NO: 98414 - DNA, 80 bp, synthetic construct; identical to SEQ ID NO: 34860
  misc_feature 1..80: note = Artificially Synthesized Probe
  source 1..80: mol_type = other DNA

SEQ ID NO: 98415 - DNA, 80 bp, synthetic construct
  misc_feature 1..80: note = Artificially Synthesized Probe
  source 1..80: mol_type = other DNA
tcaagtgatctgcctgcctcagcctcccaaagtgctgggattataggtgtggccacattttttttttttaaaggtaatcc

SEQ ID NO: 98416 - DNA, 80 bp, synthetic construct
  misc_feature 1..80: note = Artificially Synthesized Probe
  source 1..80: mol_type = other DNA
tcccaggtactcgggaggctgaggcaggagaatcgcttgaacccgggaggcggaggttgcagtgagccgagaacgcacca

SEQ ID NO: 98417 - DNA, 80 bp, synthetic construct
  misc_feature 1..80: note = Artificially Synthesized Probe
  source 1..80: mol_type = other DNA
gcagattcctgttgcctaagacctgctgattcagaatcacgggttgagggtcttggattccccattggccacaagtgtct

SEQ ID NO: 98418 - DNA, 80 bp, synthetic construct
  misc_feature 1..80: note = Artificially Synthesized Probe
  source 1..80: mol_type = other DNA
gtttgagatggagtctccctctgttgcccatgctggagtgctgtggcatgatctcggctcactgcaacctctgcctcccg

SEQ ID NO: 98419 - DNA, 80 bp, synthetic construct; identical to SEQ ID NO: 34861
  misc_feature 1..80: note = Artificially Synthesized Probe
  source 1..80: mol_type = other DNA

SEQ ID NO: 98420 - DNA, 80 bp, synthetic construct
  misc_feature 1..80: note = Artificially Synthesized Probe
  source 1..80: mol_type = other DNA
agtaaattgatacttttttctttcttttctttttttgagatggagtctcgcttttgtcatccaggctggagtgcagtggc

SEQ ID NO: 98421 - DNA, 80 bp, synthetic construct
  misc_feature 1..80: note = Artificially Synthesized Probe
  source 1..80: mol_type = other DNA
tgtgtgtgtgtgtgtgtgtatatacatatgtgtatatatatgtatacatatgtgtatatatgtgtgtatgtatacgtata

SEQ ID NO: 98422 - DNA, 80 bp, synthetic construct
  misc_feature 1..80: note = Artificially Synthesized Probe
  source 1..80: mol_type = other DNA
cgtatatatatatgtatgtatgtatattaagacggagttttgctcttcttgtccaggctggagtgcagtggcgggatctt

SEQ ID NO: 98423 - DNA, 80 bp, synthetic construct; identical to SEQ ID NO: 34862
  misc_feature 1..80: note = Artificially Synthesized Probe
  source 1..80: mol_type = other DNA

SEQ ID NO: 98424 - DNA, 80 bp, synthetic construct
  misc_feature 1..80: note = Artificially Synthesized Probe
  source 1..80: mol_type = other DNA
tgaaggcgtccatgtcacagtagagaaaacaggtgagaaattacattaaaaaccacagctcaagcagggtgcagtggctc

SEQ ID NO: 98425 - DNA, 80 bp, synthetic construct
  misc_feature 1..80: note = Artificially Synthesized Probe
  source 1..80: mol_type = other DNA
aggctgaggcaggagaatcactggaacccgggaggcggagcttgcactgagccaagattgtgccactgcactccagcctg

SEQ ID NO: 98426 - DNA, 80 bp, synthetic construct
  misc_feature 1..80: note = Artificially Synthesized Probe
  source 1..80: mol_type = other DNA
agaccctatctctaaaaaataaattattttttttttttttgagacggagtcttgcactgtcacccaggctggagtgcagt

SEQ ID NO: 98427 - DNA, 80 bp, synthetic construct; identical to SEQ ID NO: 34863
  misc_feature 1..80: note = Artificially Synthesized Probe
  source 1..80: mol_type = other DNA

SEQ ID NO: 98428 - DNA, 80 bp, synthetic construct
  misc_feature 1..80: note = Artificially Synthesized Probe
  source 1..80: mol_type = other DNA
ctgtctcagcctctagattagcagggattactggcgcccgccaccacacccggctaatttttttgtatttttagtagaga

SEQ ID NO: 98429 - DNA, 80 bp, synthetic construct
  misc_feature 1..80: note = Artificially Synthesized Probe
  source 1..80: mol_type = other DNA
ttattttatgagatagaagatataataaaagaaatcatgttggctgggcacggtggctcacacctgtaatcacagcactt

SEQ ID NO: 98430 - DNA, 80 bp, synthetic construct
  misc_feature 1..80: note = Artificially Synthesized Probe
  source 1..80: mol_type = other DNA
caaagtgctgggattacaggcatgagccactgtgcccggccgtaatttttatatctttagtggagaggggatttcaccat

SEQ ID NO: 98431 - DNA, 80 bp, synthetic construct
  misc_feature 1..80: note = Artificially Synthesized Probe
  source 1..80: mol_type = other DNA
tgaacccaggaggtagagcttgcagtgagctgagattgcgccactgcactccagcctgggcgacagagcaagactctgtt

SEQ ID NO: 98432 - DNA, 80 bp, synthetic construct; identical to SEQ ID NO: 34864
  misc_feature 1..80: note = Artificially Synthesized Probe
  source 1..80: mol_type = other DNA

SEQ ID NO: 98433 - DNA, 80 bp, synthetic construct
  misc_feature 1..80: note = Artificially Synthesized Probe
  source 1..80: mol_type = other DNA
cagaaagatgggaagaagagacactggggactcgtggcggggagaaatctcaccattgggtactattactatgttcaagt

SEQ ID NO: 98434 - DNA, 80 bp, synthetic construct
  misc_feature 1..80: note = Artificially Synthesized Probe
  source 1..80: mol_type = other DNA
gtgtgtacgtaaattagaattccagatctcccaggctcagggattagtatgaaagaaaagggaattggtggccaggcagt

SEQ ID NO: 98435 - DNA, 80 bp, synthetic construct
  misc_feature 1..80: note = Artificially Synthesized Probe
  source 1..80: mol_type = other DNA
gtggatcacgaggtcagaagttcaagaccagcctggccaagatagtgaaaccccgtctctacaaaaaatacaaatacaaa

SEQ ID NO: 98436 - DNA, 80 bp, synthetic construct; identical to SEQ ID NO: 34865
  misc_feature 1..80: note = Artificially Synthesized Probe
  source 1..80: mol_type = other DNA

SEQ ID NO: 98437 - DNA, 80 bp, synthetic construct
  misc_feature 1..80: note = Artificially Synthesized Probe
  source 1..80: mol_type = other DNA
ttagtagagacagggttttgctatgttggccagactgatctcgaattcctgacctcaggtgacccacccgccttggcctc

SEQ ID NO: 98438 - DNA, 80 bp, synthetic construct
  misc_feature 1..80: note = Artificially Synthesized Probe
  source 1..80: mol_type = other DNA
gggattttatatatatgtattttaaatatttattttaataatatatgtattaaatatttaatatataatatttattattt

SEQ ID NO: 98439 - DNA, 80 bp, synthetic construct
  misc_feature 1..80: note = Artificially Synthesized Probe
  source 1..80: mol_type = other DNA
atatatttaaaatatatgttttaaatatatattttaaatatatatttaaaatatatattttaaaatatatttatttaaaa

SEQ ID NO: 98440 - DNA, 80 bp, synthetic construct; identical to SEQ ID NO: 34866
  misc_feature 1..80: note = Artificially Synthesized Probe
  source 1..80: mol_type = other DNA

SEQ ID NO: 98441 - DNA, 80 bp, synthetic construct
  misc_feature 1..80: note = Artificially Synthesized Probe
  source 1..80: mol_type = other DNA
cagcactttgggaggccgaggcaggcagatcacctgaggtcgggagttcaagaccagcctgaccaacatgagaaaccccg

SEQ ID NO: 98442 - DNA, 80 bp, synthetic construct
  misc_feature 1..80: note = Artificially Synthesized Probe
  source 1..80: mol_type = other DNA
ctgtcccgccacctccttacccctcaccaggtcctctctctgtcctctctcccacaggtccttcctgtttatccgctcaa

SEQ ID NO: 98443 - DNA, 80 bp, synthetic construct
  misc_feature 1..80: note = Artificially Synthesized Probe
  source 1..80: mol_type = other DNA
ctgtcgcggtccccaggtataacttgaacttcttcagttccacagcctcgagttcttccaagtaggtggacaggcgacag

SEQ ID NO: 98444 - DNA, 80 bp, synthetic construct
  misc_feature 1..80: note = Artificially Synthesized Probe
  source 1..80: mol_type = other DNA
tggaggagagagcaagggaggaaagaccttttgctgaaataatgctttctcactcttcagttccctcctgccctgcccca

SEQ ID NO: 98445 - DNA, 80 bp, synthetic construct; identical to SEQ ID NO: 34838
  misc_feature 1..80: note = Artificially Synthesized Probe
  source 1..80: mol_type = other DNA

SEQ ID NO: 98446 - DNA, 80 bp, synthetic construct
  misc_feature 1..80: note = Artificially Synthesized Probe
  source 1..80: mol_type = other DNA
ggttcaagtgattctcctgcctcagcctcctgtgtagctgggattacagacacccaccaccacgccaggctaatttttgt

SEQ ID NO: 98447 - DNA, 80 bp, synthetic construct
  misc_feature 1..80: note = Artificially Synthesized Probe
  source 1..80: mol_type = other DNA
ggtcattttattcaggtccatcccaaataacctgtggacacaagagttgatattattccagtgtactactgtggcattca

SEQ ID NO: 98448 - DNA, 80 bp, synthetic construct
  misc_feature 1..80: note = Artificially Synthesized Probe
  source 1..80: mol_type = other DNA
attattatttttgagacagagtcttgctctatcacccaggctggagggcagtggcatgatctcagctcactgtaatctcg

SEQ ID NO: 98449 - DNA, 80 bp, synthetic construct
  misc_feature 1..80: note = Artificially Synthesized Probe
  source 1..80: mol_type = other DNA
ctcggcctcccaaagtgctgggattgcaggcattaagctaccgtgcccagcctcttttgtaatttttaaattttaatttt

SEQ ID NO: 98450 - DNA, 80 bp, synthetic construct
  misc_feature 1..80: note = Artificially Synthesized Probe
  source 1..80: mol_type = other DNA
tttttttgtatttagtagagacagggtttcaccgtgttaggctggtcttgaactcctgacctcaggtgatccacccacct

SEQ ID NO: 98451 - DNA, 80 bp, synthetic construct; identical to SEQ ID NO: 34839
  misc_feature 1..80: note = Artificially Synthesized Probe
  source 1..80: mol_type = other DNA

SEQ ID NO: 98452 - DNA, 80 bp, synthetic construct
  misc_feature 1..80: note = Artificially Synthesized Probe
  source 1..80: mol_type = other DNA
ggcagagcccagccggcagatgcccaacctgcaaagacaggatgctagggcggagtgggaggcattcctcctgcaaaatc

SEQ ID NO: 98453 - DNA, 80 bp, synthetic construct
  misc_feature 1..80: note = Artificially Synthesized Probe
  source 1..80: mol_type = other DNA
gtgccctggctcatgcctgtcatcccagcatcttgggaggcttgaggctggagggttttttgaggtcaggagtttgtgac

SEQ ID NO: 98454 - DNA, 80 bp, synthetic construct; identical to SEQ ID NO: 34840
  misc_feature 1..80: note = Artificially Synthesized Probe
  source 1..80: mol_type = other DNA

SEQ ID NO: 98455 - DNA, 80 bp, synthetic construct
  misc_feature 1..80: note = Artificially Synthesized Probe
  source 1..80: mol_type = other DNA
gggttcaagtgattcttctgcctcagcctcctgagtagctgtgactacaggtgcacaccaccacgcccagctaatttttg

SEQ ID NO: 98456 - DNA, 80 bp, synthetic construct
  misc_feature 1..80: note = Artificially Synthesized Probe
  source 1..80: mol_type = other DNA
gccttgataaaaaaaatacacaaagtgtgttttttgagcacttctacccacgtcttatactagtcactaggagatacagt

SEQ ID NO: 98457 - DNA, 80 bp, synthetic construct
  misc_feature 1..80: note = Artificially Synthesized Probe
  source 1..80: mol_type = other DNA
caattcttctgcctcagcctcctgagtacctggatatcaggcgtccgccaccatgcctggctaatttttatatttttagt

SEQ ID NO: 98458 - DNA, 80 bp, synthetic construct
  misc_feature 1..80: note = Artificially Synthesized Probe
  source 1..80: mol_type = other DNA
gtctcattctgtcacccaggctggagtgcagtggtgcaatctcagctcactgcaacctccacctcccaggttcaagcgat

SEQ ID NO: 98459 - DNA, 80 bp, synthetic construct
  misc_feature 1..80: note = Artificially Synthesized Probe
  source 1..80: mol_type = other DNA
agatttcaataaatgatgctgagggggaagtatgaggtcacataggatcataaatctaggaacccagattttagctaggg

SEQ ID NO: 98460 - DNA, 80 bp, synthetic construct
  misc_feature 1..80: note = Artificially Synthesized Probe
  source 1..80: mol_type = other DNA
agaccttgtccctacaaaaaataaataaaaattggccaggcgcagtggctcacgcctgtaatcccagcactttgggaggc

SEQ ID NO: 98461 - DNA, 80 bp, synthetic construct; identical to SEQ ID NO: 34841
  misc_feature 1..80: note = Artificially Synthesized Probe
  source 1..80: mol_type = other DNA

SEQ ID NO: 98462 - DNA, 80 bp, synthetic construct
  misc_feature 1..80: note = Artificially Synthesized Probe
  source 1..80: mol_type = other DNA
aagtaaagagtgttcagaagaaaaattgaacttctccaggcaaagaggggacagagagcagaaggcatgccagggaataa

SEQ ID NO: 98463 - DNA, 80 bp, synthetic construct
  misc_feature 1..80: note = Artificially Synthesized Probe
  source 1..80: mol_type = other DNA
gcgagtagctggcattataggcatgcaccaccatgcctggctacttttgtatttttagtacagatggggtgtttctacat

SEQ ID NO: 98464 - DNA, 80 bp, synthetic construct
  misc_feature 1..80: note = Artificially Synthesized Probe
  source 1..80: mol_type = other DNA
gcactttgggaggccaaggcaggcagatcatgaggtcagtagatcgagaccatcctgctaacatgatgaaaccctgtctc

SEQ ID NO: 98465 - DNA, 80 bp, synthetic construct; identical to SEQ ID NO: 34842
  misc_feature 1..80: note = Artificially Synthesized Probe
  source 1..80: mol_type = other DNA

SEQ ID NO: 98466 - DNA, 80 bp, synthetic construct
  misc_feature 1..80: note = Artificially Synthesized Probe
  source 1..80: mol_type = other DNA
cagatcttcagcctgcacaaagtccaattcaacaagcattatggaggctttcctttctttttcttttttttttttttttt

SEQ ID NO: 98467 - DNA, 80 bp, synthetic construct
  misc_feature 1..80: note = Artificially Synthesized Probe
  source 1..80: mol_type = other DNA
tatttttagtagagacagggtttctcgccatgttggctagggtggtctcgaactcctgaccatgggtgatatgcctgcct

SEQ ID NO: 98468 - DNA, 80 bp, synthetic construct; identical to SEQ ID NO: 34843
  misc_feature 1..80: note = Artificially Synthesized Probe
  source 1..80: mol_type = other DNA

SEQ ID NO: 98469 - DNA, 80 bp, synthetic construct
  misc_feature 1..80: note = Artificially Synthesized Probe
  source 1..80: mol_type = other DNA
aatcccagctacttgggaggctgaggcaggagaatcacttgaacccaggaggcggaggttgccgtgagctgagatcacgc

SEQ ID NO: 98470 - DNA, 80 bp, synthetic construct; identical to SEQ ID NO: 34835
  misc_feature 1..80: note = Artificially Synthesized Probe
  source 1..80: mol_type = other DNA

SEQ ID NO: 98471 - DNA, 80 bp, synthetic construct
  misc_feature 1..80: note = Artificially Synthesized Probe
  source 1..80: mol_type = other DNA
ggggaaatacaaatgaaaaccacgataagatagcatctcatacccattaggatgcctactattaaaaataaatagaatgc

SEQ ID NO: 98472 - DNA, 80 bp, synthetic construct
  misc_feature 1..80: note = Artificially Synthesized Probe
  source 1..80: mol_type = other DNA
agtcccagctactagggaggtcgaggcaggagaatggtgtgaacccgggaggcggagcttgcagtgagcagagatcacac

SEQ ID NO: 98473 - DNA, 80 bp, synthetic construct
  misc_feature 1..80: note = Artificially Synthesized Probe
  source 1..80: mol_type = other DNA
tacagtggcttgatcacagctcactgcagccttggcctccgaggctcctgaatagctgggactccagacacataccaccc

SEQ ID NO: 98474 - DNA, 80 bp, synthetic construct; identical to SEQ ID NO: 34844
  misc_feature 1..80: note = Artificially Synthesized Probe
  source 1..80: mol_type = other DNA

SEQ ID NO: 98475 - DNA, 80 bp, synthetic construct
  misc_feature 1..80: note = Artificially Synthesized Probe
  source 1..80: mol_type = other DNA
cgagtagttgggattataggcatgtgccaccacgcctggctaattttgtattttagtagagacggggcttctccatgttg

SEQ ID NO: 98476 - DNA, 80 bp, synthetic construct
  misc_feature 1..80: note = Artificially Synthesized Probe
  source 1..80: mol_type = other DNA
aaatggaacctctgctcccgttaaacggtaactccccatttcttcctgttctaggccttggcagccactattctactttg

SEQ ID NO: 98477 - DNA, 80 bp, synthetic construct
  misc_feature 1..80: note = Artificially Synthesized Probe
  source 1..80: mol_type = other DNA
acaggtcataaggaccttgctgataacacaggtagcaatgtagcaggaccagccacagacaaaactcctcagacaccgag

SEQ ID NO: 98478 - DNA, 80 bp, synthetic construct
  misc_feature 1..80: note = Artificially Synthesized Probe
  source 1..80: mol_type = other DNA
aggcgtgatggcgtatgcctgtagccttcagtaagctatgattgtgccactgcacaccagcctaggcgacagagtgagac

SEQ ID NO: 98479 - DNA, 80 bp, synthetic construct
  misc_feature 1..80: note = Artificially Synthesized Probe
  source 1..80: mol_type = other DNA
ctggccaacatagtgaaaccccatctctactaaaaatacaaaaaaaaggctaggcgcagtggctcatgcctgtaatccta

SEQ ID NO: 98480 - DNA, 80 bp, synthetic construct
  misc_feature 1..80: note = Artificially Synthesized Probe
  source 1..80: mol_type = other DNA
aatcgcttgaactctggaggcggaggttgcagtgagccaagattgcgccactgcactccagcccgggcgacagtgccaga

SEQ ID NO: 98481 - DNA, 80 bp, synthetic construct
  misc_feature 1..80: note = Artificially Synthesized Probe
  source 1..80: mol_type = other DNA
ggttcaagcaattctctgcttcagcctcccaagtagctgggattacaggcacccgccaccacgcccgactaattttttgt

SEQ ID NO: 98482 - DNA, 80 bp, synthetic construct
  misc_feature 1..80: note = Artificially Synthesized Probe
  source 1..80: mol_type = other DNA
ttttttttttttttttttttgagatggagccttgctctgtcgcccaggctggagtgcagtggcgcgatctcggctcactg

SEQ ID NO: 98483 - DNA, 80 bp, synthetic construct
  misc_feature 1..80: note = Artificially Synthesized Probe
  source 1..80: mol_type = other DNA
atccacctgcctcggcctcccaaagtgctgggattacaggcgtgagccactgtgcccggctatatgtttacaaaattaat

SEQ ID NO: 98484 - DNA, 80 bp, synthetic construct
  misc_feature 1..80: note = Artificially Synthesized Probe
  source 1..80: mol_type = other DNA
tctattgaaaaaaatacaaaaattaaccaggcgttgtggcgcatgcttgtaatctcagctactcgggaggctgaggcagg

SEQ ID NO: 98485 - DNA, 80 bp, synthetic construct
  misc_feature 1..80: note = Artificially Synthesized Probe
  source 1..80: mol_type = other DNA
ggcgggtggatcatgaggtcaggagattgagaccatcctggctaacacggtgaaatcccatctctactaaaaaaaaatac

SEQ ID NO: 98486 - DNA, 80 bp, synthetic construct
  misc_feature 1..80: note = Artificially Synthesized Probe
  source 1..80: mol_type = other DNA
gacgtgtcattgatatttcacttgaaatacggttggatttttattaataatatacctggggtgatgggagaaggtagcca

SEQ ID NO: 98487 - DNA, 80 bp, synthetic construct
  misc_feature 1..80: note = Artificially Synthesized Probe
  source 1..80: mol_type = other DNA
tttaacaggcagtcaagatggaggaccacaggtggagatcgggaagctcaggtgaaggaccgccccccaacaccccccgc

SEQ ID NO: 98488 - DNA, 80 bp, synthetic construct
  misc_feature 1..80: note = Artificially Synthesized Probe
  source 1..80: mol_type = other DNA
gaggtgagtagctctccggcagctctgcaacttcatttctttatttctccattccacagttggtaaaatttctcctttta

SEQ ID NO: 98489 - DNA, 80 bp, synthetic construct
  misc_feature 1..80: note = Artificially Synthesized Probe
  source 1..80: mol_type = other DNA
ccggctaattttttgtatttttagtaggtggctcacgcctgtaatcccagcactttaggaggctgaggctggcagatcac

SEQ ID NO: 98490 - DNA, 80 bp, synthetic construct
  misc_feature 1..80: note = Artificially Synthesized Probe
  source 1..80: mol_type = other DNA
ctgaggcaggggaatcacttgaagccggcaggcggaggctgcggggagccgagatcgtgccgttgcactccagcctgggg

SEQ ID NO: 98491 - DNA, 80 bp, synthetic construct
  misc_feature 1..80: note = Artificially Synthesized Probe
  source 1..80: mol_type = other DNA
ggttggatttttattaataatatacctggggtgatgggagaaggtagccaatcacagctgaggcttctaagcggtgattc

SEQ ID NO: 98492 - DNA, 80 bp, synthetic construct
  misc_feature 1..80: note = Artificially Synthesized Probe
  source 1..80: mol_type = other DNA
cataggtaagtttaacaggcagtcaagatggaggaccacaggtggagatccggaagctcaggtgaaggaccgccccccaa

SEQ ID NO: 98493 - DNA, 80 bp, synthetic construct
  misc_feature 1..80: note = Artificially Synthesized Probe
  source 1..80: mol_type = other DNA
caggtgttgggaggtgagtagctctccggcagctctgcaacttcatttctttatttctccattccacagttggtaaaatt

SEQ ID NO: 98494 - DNA, 80 bp, synthetic construct
  misc_feature 1..80: note = Artificially Synthesized Probe
  source 1..80: mol_type = other DNA
gccactatgcccagctaatttttttgtatttttagtagagacggggtttcaccatgttggccaggctggtctcagtccgc

SEQ ID NO: 98495 - DNA, 80 bp, synthetic construct
  misc_feature 1..80: note = Artificially Synthesized Probe
  source 1..80: mol_type = other DNA
actctggcctggtgaaagagcgagactccgtctcaaaaaaaaaaaaaaaaaaaaaaaagggcaaccgaggccggacgtgg

SEQ ID NO: 98496 - DNA, 80 bp, synthetic construct
  misc_feature 1..80: note = Artificially Synthesized Probe
  source 1..80: mol_type = other DNA
aggttcaagcagtcctcacgcctcagcctttgaagtagctgggaccgtgggagggtgccaccacatctgttctggctaat

SEQ ID NO: 98497 - DNA, 80 bp, synthetic construct; identical to SEQ ID NO: 34913
  misc_feature 1..80: note = Artificially Synthesized Probe
  source 1..80: mol_type = other DNA

SEQ ID NO: 98498 - DNA, 80 bp, synthetic construct
  misc_feature 1..80: note = Artificially Synthesized Probe
  source 1..80: mol_type = other DNA
gaggttgcggggagcctagatcataccattgctctccagcctgcgcagcaagagagaaactgtctcaaaaaataaaataa

SEQ ID NO: 98499 - DNA, 80 bp, synthetic construct
  misc_feature 1..80: note = Artificially Synthesized Probe
  source 1..80: mol_type = other DNA
ggatttaggatagagctatagagagctccaaaaaaaaaaatatattggaacaggtcagatgctgtggttgctgtgtgtgg

SEQ ID NO: 98500 - DNA, 80 bp, synthetic construct
  misc_feature 1..80: note = Artificially Synthesized Probe
  source 1..80: mol_type = other DNA
gtcttatgcaaatacctatgccagttgccattctcacgctattcacagctatcatataaagaggtgttataccctttctg

SEQ ID NO: 98501 - DNA, 80 bp, synthetic construct; identical to SEQ ID NO: 34914
  misc_feature 1..80: note = Artificially Synthesized Probe
  source 1..80: mol_type = other DNA

SEQ ID NO: 98502 - DNA, 80 bp, synthetic construct
  misc_feature 1..80: note = Artificially Synthesized Probe
  source 1..80: mol_type = other DNA
ctgagcttcccaaagtgcggggattgcaagcgtcagccaccacccccagtgttgtgtttttgtttgttttaccaggctgg

SEQ ID NO: 98503 - DNA, 80 bp, synthetic construct
  misc_feature 1..80: note = Artificially Synthesized Probe
  source 1..80: mol_type = other DNA
catgttgcccaggctggtctcaaactccaagcaatcctcccaccttggcttcccaaagtgtttggggttccaggtgtgag

SEQ ID NO: 98504 - DNA, 80 bp, synthetic construct
  misc_feature 1..80: note = Artificially Synthesized Probe
  source 1..80: mol_type = other DNA
aacctctgcctcccactcccaggttcaagcgattctcctgcctcagcctcccaagtagctggaactacaggcacctgcca

SEQ ID NO: 98505 - DNA, 80 bp, synthetic construct; identical to SEQ ID NO: 34915
  misc_feature 1..80: note = Artificially Synthesized Probe
  source 1..80: mol_type = other DNA

SEQ ID NO: 98506 - DNA, 80 bp, synthetic construct
  misc_feature 1..80: note = Artificially Synthesized Probe
  source 1..80: mol_type = other DNA
actcaggaggctgaggcaggagaatcacttgaactgaagtgattcaaggcagaggtttcagtgagccaagatcacgccac

SEQ ID NO: 98507 - DNA, 80 bp, synthetic construct
  misc_feature 1..80: note = Artificially Synthesized Probe
  source 1..80: mol_type = other DNA
cacgaggtcaggagttcgagaccagcctggccaacttggtgaaaccccccatctctactaaaaatacaaaaaaattagct

SEQ ID NO: 98508 - DNA, 80 bp, synthetic construct
  misc_feature 1..80: note = Artificially Synthesized Probe
  source 1..80: mol_type = other DNA
gtgacaaagtgagactccgtctcaaaaaaaaaaaaaaaaaaaatacaaaaagtagctgagcgtggtggtgggtgcccata

SEQ ID NO: 98509 - DNA, 80 bp, synthetic construct
  misc_feature 1..80: note = Artificially Synthesized Probe
  source 1..80: mol_type = other DNA
tgttgcccagatgggagtgcagtggcacaatcaaggctcactgcagtttcagtctcccaggctcaagcaatcctcccact

SEQ ID NO: 98510 - DNA, 80 bp, synthetic construct
  misc_feature 1..80: note = Artificially Synthesized Probe
  source 1..80: mol_type = other DNA
tggcatttgagacaggagtgctaatcaccatccctctccactcctcccttgattgtcatcacagctcccacgtgggacaa

SEQ ID NO: 98511 - DNA, 80 bp, synthetic construct; identical to SEQ ID NO: 34916
  misc_feature 1..80: note = Artificially Synthesized Probe
  source 1..80: mol_type = other DNA

SEQ ID NO: 98512 - DNA, 80 bp, synthetic construct
  misc_feature 1..80: note = Artificially Synthesized Probe
  source 1..80: mol_type = other DNA
ctgaggcggttggaccacctgagggtcaggagtttgagaccagcctgaccaacatggtgatgaaacagcatctctactaa

SEQ ID NO: 98513 - DNA, 80 bp, synthetic construct
  misc_feature 1..80: note = Artificially Synthesized Probe
  source 1..80: mol_type = other DNA
tcaaaaaaaaaaagaaatggcattgaggcttggagagggactgcttgttctgaatgcaggtgctggatcttcataaaccc

SEQ ID NO: 98514 - DNA, 80 bp, synthetic construct
  misc_feature 1..80: note = Artificially Synthesized Probe
  source 1..80: mol_type = other DNA
tgtgccatgctggtgcgctgcacccactaactcgtcatctagcattaggtatatctcccaatgctatccctcccccctcc

SEQ ID NO: 98515 - DNA, 80 bp, synthetic construct; identical to SEQ ID NO: 34917
  misc_feature 1..80: note = Artificially Synthesized Probe
  source 1..80: mol_type = other DNA

SEQ ID NO: 98516 - DNA, 80 bp, synthetic construct
  misc_feature 1..80: note = Artificially Synthesized Probe
  source 1..80: mol_type = other DNA
tagatccctgaggaatccccacaccgacttccacaatggttgaactagtttacagtcccaccaacagtgtgaaagtgttc

SEQ ID NO: 98517 - DNA, 80 bp, synthetic construct; identical to SEQ ID NO: 34901
  misc_feature 1..80: note = Artificially Synthesized Probe
  source 1..80: mol_type = other DNA

SEQ ID NO: 98518 - DNA, 80 bp, synthetic construct
  misc_feature 1..80: note = Artificially Synthesized Probe
  source 1..80: mol_type = other DNA
gtcttcttttgagaagtgtctgttcatgtcgttcgcccactttttgatggggttgtttgtttttttcttgtaaattattt

SEQ ID NO: 98519 - DNA, 80 bp, synthetic construct
  misc_feature 1..80: note = Artificially Synthesized Probe
  source 1..80: mol_type = other DNA
atctcactctgtcacccaggctggaatttagcagcacgatctcggctcactgcaacctccgcctcccgggttcaagcgat

SEQ ID NO: 98520 - DNA, 80 bp, synthetic construct
  misc_feature 1..80: note = Artificially Synthesized Probe
  source 1..80: mol_type = other DNA
gcctcccaaagtgttgggattacaggcgtgagccaccgcacccagccagcaagtgcatttagaactactctactttctac

SEQ ID NO: 98521 - DNA, 80 bp, synthetic construct; identical to SEQ ID NO: 34918
  misc_feature 1..80: note = Artificially Synthesized Probe
  source 1..80: mol_type = other DNA

SEQ ID NO: 98522 - DNA, 80 bp, synthetic construct
  misc_feature 1..80: note = Artificially Synthesized Probe
  source 1..80: mol_type = other DNA
agcaatcctaccactatggcctcccaccacacctcgctcattcttgtatatatatatatttttgtagagatagggtttca

SEQ ID NO: 98523 - DNA, 80 bp, synthetic construct
  misc_feature 1..80: note = Artificially Synthesized Probe
  source 1..80: mol_type = other DNA
ggatgaataaaaaatgtgcccgttgggtaccctgcctactgcctgggttatgagattgttgggaccccaagccttaaaaa

SEQ ID NO: 98524 - DNA, 80 bp, synthetic construct
  misc_feature 1..80: note = Artificially Synthesized Probe
  source 1..80: mol_type = other DNA
cctgtctctactaaaaatataaaaaaatcagccgggcgtggtggcacactcctgtagtcccagctacttgggaggctgag

SEQ ID NO: 98525 - DNA, 80 bp, synthetic construct; identical to SEQ ID NO: 34919
  misc_feature 1..80: note = Artificially Synthesized Probe
  source 1..80: mol_type = other DNA

SEQ ID NO: 98526 - DNA, 80 bp, synthetic construct
  misc_feature 1..80: note = Artificially Synthesized Probe
  source 1..80: mol_type = other DNA
cctccagagtagctgggattacaggcgcctaccaccatgcccgctaatttttgtattttagtagagacagggttttacca

SEQ ID NO: 98527 - DNA, 80 bp, synthetic construct
  misc_feature 1..80: note = Artificially Synthesized Probe
  source 1..80: mol_type = other DNA
ccagagagttgtaaacttacgaaggtctgggctctgaaaaagatacaaattttctttccatgccaatagcgctcacacag

SEQ ID NO: 98528 - DNA, 80 bp, synthetic construct
  misc_feature 1..80: note = Artificially Synthesized Probe
  source 1..80: mol_type = other DNA
gctactcaggaggctgaggcaggagaatcacttgaacccgggtggcagaggttgcagtgagccaagatcatgccattgca

SEQ ID NO: 98529 - DNA, 80 bp, synthetic construct; identical to SEQ ID NO: 34920
  misc_feature 1..80: note = Artificially Synthesized Probe
  source 1..80: mol_type = other DNA

SEQ ID NO: 98530 - DNA, 80 bp, synthetic construct
  misc_feature 1..80: note = Artificially Synthesized Probe
  source 1..80: mol_type = other DNA
atggtggtgtatgcctatagtcccagctactcaggaagctgaggcaggagaatcgcttgaacctgggaggcagaggttgc

SEQ ID NO: 98531 - DNA, 80 bp, synthetic construct
  misc_feature 1..80: note = Artificially Synthesized Probe
  source 1..80: mol_type = other DNA
agcttatggtaaaatgcaaaattttccccccttctcctttttcagaagcagctttgaaatcctttaataaaaggaagcct

SEQ ID NO: 98532 - DNA, 80 bp, synthetic construct
  misc_feature 1..80: note = Artificially Synthesized Probe
  source 1..80: mol_type = other DNA
gtagcagtaagacctgggaagctgaaacacgatcgcgtttgttggaaatctataaatacatacaaagcggggaagggtaa

SEQ ID NO: 98533 - DNA, 80 bp, synthetic construct; identical to SEQ ID NO: 34921
  misc_feature 1..80: note = Artificially Synthesized Probe
  source 1..80: mol_type = other DNA

SEQ ID NO: 98534 - DNA, 80 bp, synthetic construct
  misc_feature 1..80: note = Artificially Synthesized Probe
  source 1..80: mol_type = other DNA
gagtggtgcaatcatggttcactgcagccttgacctcccaagctctggtgatcctcctgcctcagcctcctgagtagctg

SEQ ID NO: 98535 - DNA, 80 bp, synthetic construct
  misc_feature 1..80: note = Artificially Synthesized Probe
  source 1..80: mol_type = other DNA
ctggcccttaccagctacttatatcctgaagattattattattttttttttttttgagatagagtctctctctgttgccc

SEQ ID NO: 98536 - DNA, 80 bp, synthetic construct
  misc_feature 1..80: note = Artificially Synthesized Probe
  source 1..80: mol_type = other DNA
tgttagccaggatggtctcgatctcctgaccttgtgatccgcccgcctcggcctcccaaagtgctgggattacaggcgtg

SEQ ID NO: 98537 - DNA, 80 bp, synthetic construct; identical to SEQ ID NO: 34922
  misc_feature 1..80: note = Artificially Synthesized Probe
  source 1..80: mol_type = other DNA

SEQ ID NO: 98538 - DNA, 80 bp, synthetic construct
  misc_feature 1..80: note = Artificially Synthesized Probe
  source 1..80: mol_type = other DNA
gacctccgcctcccggttcaagtgattctcttgcctcagcctcccgagtagctgggattataggtgtctgccaccaagcc

SEQ ID NO: 98539 - DNA, 80 bp, synthetic construct
  misc_feature 1..80: note = Artificially Synthesized Probe
  source 1..80: mol_type = other DNA
gttcaagagttccagaccagcctggacaacatgatgaaacctcttcttgatcaaatatacagaatttcgactgagcacag

SEQ ID NO: 98540 - DNA, 80 bp, synthetic construct
  misc_feature 1..80: note = Artificially Synthesized Probe
  source 1..80: mol_type = other DNA
agagtcttgctctgtcacccaggctggagtgcagtggtacaatctcactgcagcctccgcctcccaggttcaagtgattc

SEQ ID NO: 98541 - DNA, 80 bp, synthetic construct
  misc_feature 1..80: note = Artificially Synthesized Probe
  source 1..80: mol_type = other DNA
gggattacaggcatgagccacctcacctggtggtgaagactctaaaggctcttctcagatcagcctttgtcctgaatttc

SEQ ID NO: 98542 - DNA, 80 bp, synthetic construct
  misc_feature 1..80: note = Artificially Synthesized Probe
  source 1..80: mol_type = other DNA
gccaggctgaagtgcagtggagcgatcttggctcactgcaatctccgcctcctgggttcaagcaattcccttgcctcagc

SEQ ID NO: 98543 - DNA, 80 bp, synthetic construct; identical to SEQ ID NO: 34923
  misc_feature 1..80: note = Artificially Synthesized Probe
  source 1..80: mol_type = other DNA

SEQ ID NO: 98544 - DNA, 80 bp, synthetic construct
  misc_feature 1..80: note = Artificially Synthesized Probe
  source 1..80: mol_type = other DNA
tgactgggggctgcatgcactggtaatcagatccaaacaaaacaggatagggattttcacagtgcttttctatacaatgt

SEQ ID NO: 98545 - DNA, 80 bp, synthetic construct
  misc_feature 1..80: note = Artificially Synthesized Probe
  source 1..80: mol_type = other DNA
cacttgaacccaggaggcggaggttgcagtgagccgacatcacaccattgcattccagcctgggcaacaagagcaaaact

SEQ ID NO: 98546 - DNA, 80 bp, synthetic construct
  misc_feature 1..80: note = Artificially Synthesized Probe
  source 1..80: mol_type = other DNA
atgtgttctgaactacttaggaattctcaccagaaaggcacataaacctgggatcatggcctaatgtactttcactttta

SEQ ID NO: 98547 - DNA, 80 bp, synthetic construct
  misc_feature 1..80: note = Artificially Synthesized Probe
  source 1..80: mol_type = other DNA
ccgccctttttctccagggataacacggaaagaacgaccacctctagacgtggacgaaatgctggagcgcttcaaaacag

SEQ ID NO: 98548 - DNA, 80 bp, synthetic construct; identical to SEQ ID NO: 34924
  misc_feature 1..80: note = Artificially Synthesized Probe
  source 1..80: mol_type = other DNA

SEQ ID NO: 98549 - DNA, 80 bp, synthetic construct
  misc_feature 1..80: note = Artificially Synthesized Probe
  source 1..80: mol_type = other DNA
ctgccaccacacccagctaatttttttttttttttttgagacgaagtcttgttcttgtcacccaggctggagtatagtgg

SEQ ID NO: 98550 - DNA, 80 bp, synthetic construct
  misc_feature 1..80: note = Artificially Synthesized Probe
  source 1..80: mol_type = other DNA
ctcaaactcctgacctcaagagatctgctccacccacccccaagtctcccgaagtgctgggattacaggcgagagccacc

SEQ ID NO: 98551 - DNA, 80 bp, synthetic construct
  misc_feature 1..80: note = Artificially Synthesized Probe
  source 1..80: mol_type = other DNA
aaattagccgggtgtggtggcacccgcctgtagtcccagctactcaggaggctgaggcaggagaatcgcttgaacccggg

SEQ ID NO: 98552 - DNA, 80 bp, synthetic construct
  misc_feature 1..80: note = Artificially Synthesized Probe
  source 1..80: mol_type = other DNA
gagaatgacgtgaatcccggagtcgtaggttgcagtgagccaagatcgtgccactgcacttcagcctgggcgacacagca

SEQ ID NO: 98553 - DNA, 80 bp, synthetic construct; identical to SEQ ID NO: 34925
  misc_feature 1..80: note = Artificially Synthesized Probe
  source 1..80: mol_type = other DNA

SEQ ID NO: 98554 - DNA, 80 bp, synthetic construct
  misc_feature 1..80: note = Artificially Synthesized Probe
  source 1..80: mol_type = other DNA
gggtttcaacagggtagccaggttggtctagaactcctgacctcaagtgatccacctacctcggtctcctaaagtgctgg

SEQ ID NO: 98555 - DNA, 80 bp, synthetic construct
  misc_feature 1..80: note = Artificially Synthesized Probe
  source 1..80: mol_type = other DNA
tcgccacaacctccacctcccaggttcaagtgattctgcctcagcctcccgagtagctgggatcataggcgcccaccacc

SEQ ID NO: 98556 - DNA, 80 bp, synthetic construct; identical to SEQ ID NO: 34926
  misc_feature 1..80: note = Artificially Synthesized Probe
  source 1..80: mol_type = other DNA

SEQ ID NO: 98557 - DNA, 80 bp, synthetic construct
  misc_feature 1..80: note = Artificially Synthesized Probe
  source 1..80: mol_type = other DNA
gcctcccaaatagctgggagtacaggtgtgtgccaccacgcccagctaattttttgtattttagtagagacagggtttca

SEQ ID NO: 98558 - DNA, 80 bp, synthetic construct
  misc_feature 1..80: note = Artificially Synthesized Probe
  source 1..80: mol_type = other DNA
tcatcatgcttcagcaggaaatgtgggtgaatagtgcctggtggcatggcaggtaaagaaatgttttgttttgttttttt

SEQ ID NO: 98559 - DNA, 80 bp, synthetic construct
  misc_feature 1..80: note = Artificially Synthesized Probe
  source 1..80: mol_type = other DNA
tagtagagacagggtttcaccgtgttagccaggatggtctcgatctcctgaccttatgatccacccgccttggcctccca

SEQ ID NO: 98560 - DNA, 80 bp, synthetic construct; identical to SEQ ID NO: 34927
  misc_feature 1..80: note = Artificially Synthesized Probe
  source 1..80: mol_type = other DNA

SEQ ID NO: 98561 - DNA, 80 bp, synthetic construct
  misc_feature 1..80: note = Artificially Synthesized Probe
  source 1..80: mol_type = other DNA
atcccagcactttgggaggctgaggtgggtggatcatctgaggtcagcagttttagactggcctggccaacatggcgaaa

SEQ ID NO: 98562 - DNA, 80 bp, synthetic construct
  misc_feature 1..80: note = Artificially Synthesized Probe
  source 1..80: mol_type = other DNA
agtgagactgtctcaaacagacctatagctgacctgtttcctcttgtttgtatgccctgaaccatggaggaaagcttatt

SEQ ID NO: 98563 - DNA, 80 bp, synthetic construct
  misc_feature 1..80: note = Artificially Synthesized Probe
  source 1..80: mol_type = other DNA
ccagcctggatgacagagcaagactgtgtctcaaaaataaataaataaataaataaatagccaactgtgatcgtgcatgc

SEQ ID NO: 98564 - DNA, 80 bp, synthetic construct
  misc_feature 1..80: note = Artificially Synthesized Probe
  source 1..80: mol_type = other DNA
atttttgcatttttagtagagatggggtttctgtgttggccaggctggtctcgaactcctgagctcaagtgatccacccc

SEQ ID NO: 98565 - DNA, 80 bp, synthetic construct
  misc_feature 1..80: note = Artificially Synthesized Probe
  source 1..80: mol_type = other DNA
acctgattttgtgtcaatctcacatgagtttgtattttgtagcgtttacagaaacgaaaggaaatgtcatctgcctgggt

SEQ ID NO: 98566 - DNA, 80 bp, synthetic construct; identical to SEQ ID NO: 34928
  misc_feature 1..80: note = Artificially Synthesized Probe
  source 1..80: mol_type = other DNA

SEQ ID NO: 98567 - DNA, 80 bp, synthetic construct
  misc_feature 1..80: note = Artificially Synthesized Probe
  source 1..80: mol_type = other DNA
tgcaacctccgcctcccaggttcaagcaattctcctgcctcagcctcccgagtagctgggattacaggcatgcgccacca

SEQ ID NO: 98568 - DNA, 80 bp, synthetic construct
  misc_feature 1..80: note = Artificially Synthesized Probe
  source 1..80: mol_type = other DNA
tattttggttttccctatgggtaactgattgcatcctctctcccttccctcctcaccaatgataaagacaaagacaatag

SEQ ID NO: 98569 - DNA, 80 bp, synthetic construct
  misc_feature 1..80: note = Artificially Synthesized Probe
  source 1..80: mol_type = other DNA
ggtgcttcccgggcccttctcatacacggtggtgctgtatggtcctgcaggccttgggaaaaccacgctggcccagaaac

SEQ ID NO: 98570 - DNA, 80 bp, synthetic construct; identical to SEQ ID NO: 34929
  misc_feature 1..80: note = Artificially Synthesized Probe
  source 1..80: mol_type = other DNA

SEQ ID NO: 98571 - DNA, 80 bp, synthetic construct
  misc_feature 1..80: note = Artificially Synthesized Probe
  source 1..80: mol_type = other DNA
tcctggcggaggagccgatctacataagggtggagggcttcctggaggaggacaggagggcctatttcctgagacacttt

SEQ ID NO: 98572 - DNA, 80 bp, synthetic construct
  misc_feature 1..80: note = Artificially Synthesized Probe
  source 1..80: mol_type = other DNA
cggggctgttcctgcgtttcctctgcagccggttcccgcagggcgcacagctgcggggcgcgctgcggacgctgagcctc

SEQ ID NO: 98573 - DNA, 80 bp, synthetic construct
  misc_feature 1..80: note = Artificially Synthesized Probe
  source 1..80: mol_type = other DNA
ggaaggaaggagggaaggagggaaggagggaagggaaggagggaaaggaagtcagtcttgtgggacaaggaaggaaggaa

SEQ ID NO: 98574 - DNA, 80 bp, synthetic construct
  misc_feature 1..80: note = Artificially Synthesized Probe
  source 1..80: mol_type = other DNA
tccagcagtttctcactgccctgttctacaccctggagaaggaggaggaagaggatagggacggccacacctgggacatt

SEQ ID NO: 98575 - DNA, 80 bp, synthetic construct
  misc_feature 1..80: note = Artificially Synthesized Probe
  source 1..80: mol_type = other DNA
tgcgatgcgacataagttgtaagggtggacattcaacggtgacagacctgcaggagctcctcggctgtctgtacgagtct

SEQ ID NO: 98576 - DNA, 80 bp, synthetic construct; identical to SEQ ID NO: 34930
  misc_feature 1..80: note = Artificially Synthesized Probe
  source 1..80: mol_type = other DNA

SEQ ID NO: 98577 - DNA, 80 bp, synthetic construct
  misc_feature 1..80: note = Artificially Synthesized Probe
  source 1..80: mol_type = other DNA
ccgcctcccgggttcaagtgattcttctgcctcagcctcctgagtagctgggactacaggcgcctgccaccttgcccggc

SEQ ID NO: 98578 - DNA, 80 bp, synthetic construct
  misc_feature 1..80: note = Artificially Synthesized Probe
  source 1..80: mol_type = other DNA
cttgctgtgttgctcaggctggagtacagtggtgaaatcagctcactgcatcctcaaacttctgggttcaagtgatgttc

SEQ ID NO: 98579 - DNA, 80 bp, synthetic construct; identical to SEQ ID NO: 34931
  misc_feature 1..80: note = Artificially Synthesized Probe
  source 1..80: mol_type = other DNA

SEQ ID NO: 98580 - DNA, 80 bp, synthetic construct
  misc_feature 1..80: note = Artificially Synthesized Probe
  source 1..80: mol_type = other DNA
tgggattacagccacccacgaccatgcccagctaatttttgtacttttagtagagacggggtttcaccatgttggccagg

SEQ ID NO: 98581 - DNA, 80 bp, synthetic construct
  misc_feature 1..80: note = Artificially Synthesized Probe
  source 1..80: mol_type = other DNA
taagaagaataggttctttctcctgtgatgcttcttgggtgttgagttgtctgatggtggtgctaataagtgattacatg

SEQ ID NO: 98582 - DNA, 80 bp, synthetic construct
  misc_feature 1..80: note = Artificially Synthesized Probe
  source 1..80: mol_type = other DNA
catatttggatcaaataaggatctgatgggtctagcaatcaatgatagctttctcagtgcctccctagtaaggatcctgt

SEQ ID NO: 98583 - DNA, 80 bp, synthetic construct
  misc_feature 1..80: note = Artificially Synthesized Probe
  source 1..80: mol_type = other DNA
ctggttgttggtggggagaaacatacatttttggtgaagtattctgtgttgagtgtgaaagtaggaaaaacaggactggg

SEQ ID NO: 98584 - DNA, 80 bp, synthetic construct; identical to SEQ ID NO: 34932
  misc_feature 1..80: note = Artificially Synthesized Probe
  source 1..80: mol_type = other DNA

SEQ ID NO: 98585 - DNA, 80 bp, synthetic construct
  misc_feature 1..80: note = Artificially Synthesized Probe
  source 1..80: mol_type = other DNA
ggctgaggcaggagaattacttgaacccaggaggcggaggttgcagtgaaccaagatcctgccactggactccagtctga

SEQ ID NO: 98586 - DNA, 80 bp, synthetic construct
  misc_feature 1..80: note = Artificially Synthesized Probe
  source 1..80: mol_type = other DNA
gtgcaagaccctgtctctacgaaaaatacaaaaatttgccaggtgtcgtggcaggtgcctataatcccagctactccgga

SEQ ID NO: 98587 - DNA, 80 bp, synthetic construct
  misc_feature 1..80: note = Artificially Synthesized Probe
  source 1..80: mol_type = other DNA
gttcctaaagtttaaatatatcgagcccctggtttccatttaagtacgatacaggtgtacacactaaagatttcactttc

SEQ ID NO: 98588 - DNA, 80 bp, synthetic construct; identical to SEQ ID NO: 34933
  misc_feature 1..80: note = Artificially Synthesized Probe
  source 1..80: mol_type = other DNA

SEQ ID NO: 98589 - DNA, 80 bp, synthetic construct
  misc_feature 1..80: note = Artificially Synthesized Probe
  source 1..80: mol_type = other DNA
caccctggacaaccatacgtgaggaccctgaatccaaagaaactcccagaatctttatcatctttttttttttttttatg

SEQ ID NO: 98590 - DNA, 80 bp, synthetic construct
  misc_feature 1..80: note = Artificially Synthesized Probe
  source 1..80: mol_type = other DNA
gagctggtttcgccacattgccaggctggtctcgaactcatgacctcaggtgacctgccctcctcaggctcccaaagtgc

SEQ ID NO: 98591 - DNA, 80 bp, synthetic construct
  misc_feature 1..80: note = Artificially Synthesized Probe
  source 1..80: mol_type = other DNA
cccaggttcaagtgattctcctgcctcagcctcctgagtagctgggattacaggtgcacaccaccacacctggttaattt

SEQ ID NO: 98592 - DNA, 80 bp, synthetic construct
  misc_feature 1..80: note = Artificially Synthesized Probe
  source 1..80: mol_type = other DNA
aatacaaaaattagctgggcgcggtggcaggtgcctgtaataccagctactcgggaggctgaggcaggagaatcacttga

SEQ ID NO: 98593 - DNA, 80 bp, synthetic construct; identical to SEQ ID NO: 34934
  misc_feature 1..80: note = Artificially Synthesized Probe
  source 1..80: mol_type = other DNA

SEQ ID NO: 98594 - DNA, 80 bp, synthetic construct
  misc_feature 1..80: note = Artificially Synthesized Probe
  source 1..80: mol_type = other DNA
tgaagcctcacttggccacactggtgtagtaggtggtcattggcctcaaattattgccctgggccaggcgcagtggctca

SEQ ID NO: 98595 - DNA, 80 bp, synthetic construct
  misc_feature 1..80: note = Artificially Synthesized Probe
  source 1..80: mol_type = other DNA
tcatttgaacctgagaggcggaggttgcagtgagctgagatcacaccaccgcactccagtctgggcaacagtgtgagact

SEQ ID NO: 98596 - DNA, 80 bp, synthetic construct
  misc_feature 1..80: note = Artificially Synthesized Probe
  source 1..80: mol_type = other DNA
acatggtgaaaccccacgtctactaaaaatacaaaaacattagctgggcatggtggcgcgtgcctgtaatcccagctact

SEQ ID NO: 98597 - DNA, 80 bp, synthetic construct; identical to SEQ ID NO: 34935
  misc_feature 1..80: note = Artificially Synthesized Probe
  source 1..80: mol_type = other DNA

SEQ ID NO: 98598 - DNA, 80 bp, synthetic construct
  misc_feature 1..80: note = Artificially Synthesized Probe
  source 1..80: mol_type = other DNA
taggctggagtgcagtgccacaatcttggttcactgcaacctctgcctcccgggttcaagtgattcttctccgtcaacct

SEQ ID NO: 98599 - DNA, 80 bp, synthetic construct
  misc_feature 1..80: note = Artificially Synthesized Probe
  source 1..80: mol_type = other DNA
tagagccggggtttcaccgtgttggctgggctggtctcgaactcctgacctcaagtgacatccatcttccaaaatgctgg

SEQ ID NO: 98600 - DNA, 80 bp, synthetic construct
  misc_feature 1..80: note = Artificially Synthesized Probe
  source 1..80: mol_type = other DNA
gccactcatttcttatgaatttattctaacacattttccggatgaacagggcaccttgaaacataggttagtgggctggg

SEQ ID NO: 98601 - DNA, 80 bp, synthetic construct; identical to SEQ ID NO: 34936
  misc_feature 1..80: note = Artificially Synthesized Probe
  source 1..80: mol_type = other DNA

SEQ ID NO: 98602 - DNA, 80 bp, synthetic construct
  misc_feature 1..80: note = Artificially Synthesized Probe
  source 1..80: mol_type = other DNA
tatcagcactttgggaggccgaggcaggtggatcactgacacccaacaccacgccttctaattttttgcatttttagtag

SEQ ID NO: 98603 - DNA, 80 bp, synthetic construct
  misc_feature 1..80: note = Artificially Synthesized Probe
  source 1..80: mol_type = other DNA
aaagttaggagtttgagaccagcctggccaacatggtaaaaccccatctctactaaaaaatacaaaaattagccaggcaa

SEQ ID NO: 98604 - DNA, 80 bp, synthetic construct
  misc_feature 1..80: note = Artificially Synthesized Probe
  source 1..80: mol_type = other DNA
gagcataaataactccctttcaaaaaaccaaacaatgaaacataggttagcggagtctgcatccaacattagagtcagat

SEQ ID NO: 98605 - DNA, 80 bp, synthetic construct
  misc_feature 1..80: note = Artificially Synthesized Probe
  source 1..80: mol_type = other DNA
cagataattcaagtcggggtataacacaaccagtgagatgtaaaccaaagacgattccacggttagattctcaagaatga

SEQ ID NO: 98606 - DNA, 80 bp, synthetic construct
  misc_feature 1..80: note = Artificially Synthesized Probe
  source 1..80: mol_type = other DNA
atggtgcatgcctgcagtcccagctactcgggaggctgaggcaggagaatcacttgaacccaggaggcggaggttgctgt

SEQ ID NO: 98607 - DNA, 80 bp, synthetic construct; identical to SEQ ID NO: 34937
  misc_feature 1..80: note = Artificially Synthesized Probe
  source 1..80: mol_type = other DNA

SEQ ID NO: 98608 - DNA, 80 bp, synthetic construct
  misc_feature 1..80: note = Artificially Synthesized Probe
  source 1..80: mol_type = other DNA
gaacacctgttcccatgtttagatccaggccgatggcctgtgaattttgttcttctctcattcctattccttcataggat

SEQ ID NO: 98609 - DNA, 80 bp, synthetic construct
  misc_feature 1..80: note = Artificially Synthesized Probe
  source 1..80: mol_type = other DNA
tttgtaggttggaaaactgtcaccttacagaagccaattgcaaggaccttgctgctgtgttggttgtcagccgggagctg

SEQ ID NO: 98610 - DNA, 80 bp, synthetic construct; identical to SEQ ID NO: 34938
  misc_feature 1..80: note = Artificially Synthesized Probe
  source 1..80: mol_type = other DNA

SEQ ID NO: 98611 - DNA, 80 bp, synthetic construct
  misc_feature 1..80: note = Artificially Synthesized Probe
  source 1..80: mol_type = other DNA
ctcctgagctcaagagatctgcctgccttggcctcccaaagtgctagaattacaggcatgagccatgtcaccccatgctg

SEQ ID NO: 98612 - DNA, 80 bp, synthetic construct; identical to SEQ ID NO: 34903
  misc_feature 1..80: note = Artificially Synthesized Probe
  source 1..80: mol_type = other DNA

SEQ ID NO: 98613 - DNA, 80 bp, synthetic construct
  misc_feature 1..80: note = Artificially Synthesized Probe
  source 1..80: mol_type = other DNA
tgggccagtgtacgctcagactcccaatggaagctattggaagctacatgctcaatgtgatcctccttttaatactaaaa

SEQ ID NO: 98614 - DNA, 80 bp, synthetic construct
  misc_feature 1..80: note = Artificially Synthesized Probe
  source 1..80: mol_type = other DNA
tggtgggacatgcctgtaatcccagttactcaggaggctaaggcaggagaatcacttgaacttcggaggtggaggttgca

SEQ ID NO: 98615 - DNA, 80 bp, synthetic construct
  misc_feature 1..80: note = Artificially Synthesized Probe
  source 1..80: mol_type = other DNA
ggtcaggagtttgagaccagcctggctgatgcagtgaaaccctgtctctactaaaaatacaaaaattagctaggcgtggt

SEQ ID NO: 98616 - DNA, 80 bp, synthetic construct; identical to SEQ ID NO: 34939
  misc_feature 1..80: note = Artificially Synthesized Probe
  source 1..80: mol_type = other DNA

SEQ ID NO: 98617 - DNA, 80 bp, synthetic construct
  misc_feature 1..80: note = Artificially Synthesized Probe
  source 1..80: mol_type = other DNA
tcgaactgacctcatgatccgcccgcctcagccttccaaagtgctaggatttacaggcatgagccactgcgtccagccat

SEQ ID NO: 98618 - DNA, 80 bp, synthetic construct
  misc_feature 1..80: note = Artificially Synthesized Probe
  source 1..80: mol_type = other DNA
ggaaaggattcttcccacacccactatatctaggccctgaaacattaaaaaagaagtcccacaagcagtgagatgtcacc

SEQ ID NO: 98619 - DNA, 80 bp, synthetic construct
  misc_feature 1..80: note = Artificially Synthesized Probe
  source 1..80: mol_type = other DNA
aatgcagtggctccatctcagctcactgcaacctccacctcctgagttcaggtgtgattctcctgcctcagcctcccagg

SEQ ID NO: 98620 - DNA, 80 bp, synthetic construct; identical to SEQ ID NO: 34940
  misc_feature 1..80: note = Artificially Synthesized Probe
  source 1..80: mol_type = other DNA

SEQ ID NO: 98621 - DNA, 80 bp, synthetic construct
  misc_feature 1..80: note = Artificially Synthesized Probe
  source 1..80: mol_type = other DNA
tgtaatcccagcttacttgggagggtgaggcagagaattgcttgaacctgggaggcggaagttgcagtgagctgagattg

SEQ ID NO: 98622 - DNA, 80 bp, synthetic construct
  misc_feature 1..80: note = Artificially Synthesized Probe
  source 1..80: mol_type = other DNA
tcctgtgtccctcagctagtggtatgcttcacttgggacccagagatacatgggcattatagttcaaattataattaagt

SEQ ID NO: 98623 - DNA, 80 bp, synthetic construct; identical to SEQ ID NO: 34941
  misc_feature 1..80: note = Artificially Synthesized Probe
  source 1..80: mol_type = other DNA

SEQ ID NO: 98624 - DNA, 80 bp, synthetic construct
  misc_feature 1..80: note = Artificially Synthesized Probe
  source 1..80: mol_type = other DNA
cacacctggctaatttttgtatttttagtggagactgggtttcaccctgttgtccaggctagtctcaaactcccgacgtc

SEQ ID NO: 98625 - DNA, 80 bp, synthetic construct
  misc_feature 1..80: note = Artificially Synthesized Probe
  source 1..80: mol_type = other DNA
acaagaatcgcgtgaaaccaggaggcggaggttgaagtgagccaccgtgccagctgagaatcctttttacttctccaact

SEQ ID NO: 98626 - DNA, 80 bp, synthetic construct
  misc_feature 1..80: note = Artificially Synthesized Probe
  source 1..80: mol_type = other DNA
ctcttatgaggatccctgtgattgctggacctacccaaataaaccaggatataaaccatcttaagatgctcagtcacctc

SEQ ID NO: 98627 - DNA, 80 bp, synthetic construct
  misc_feature 1..80: note = Artificially Synthesized Probe
  source 1..80: mol_type = other DNA
agcagtgagaactcacaggttcgggtttgctttcttcctgtggttgatttctaggctttggaactgcgacataactagcg

SEQ ID NO: 98628 - DNA, 80 bp, synthetic construct; identical to SEQ ID NO: 34942
  misc_feature 1..80: note = Artificially Synthesized Probe
  source 1..80: mol_type = other DNA

SEQ ID NO: 98629 - DNA, 80 bp, synthetic construct
  misc_feature 1..80: note = Artificially Synthesized Probe
  source 1..80: mol_type = other DNA
ggctggagtgcagtggcgtgatcttggctcactgcaacctccgcctcccaggttcaagcaattctcttgcttcagcttcc

SEQ ID NO: 98630 - DNA, 80 bp, synthetic construct
  misc_feature 1..80: note = Artificially Synthesized Probe
  source 1..80: mol_type = other DNA
cactgcgccaggccctatgtctaagttctagtctgtgtcatgcaaagaacacctgtgaaattttaaggatacagtgcctc

SEQ ID NO: 98631 - DNA, 80 bp, synthetic construct
  misc_feature 1..80: note = Artificially Synthesized Probe
  source 1..80: mol_type = other DNA
actccatctctactaaaatataaaaattagccgagcatagtagtgggtgcctcttttttttttttttttttttttgagat

SEQ ID NO: 98632 - DNA, 80 bp, synthetic construct
  misc_feature 1..80: note = Artificially Synthesized Probe
  source 1..80: mol_type = other DNA
atagacggggtttctccatgttggtcaggctggtctcgacctccggacctcaggtgagagccaccgtgcccagccagtag

SEQ ID NO: 98633 - DNA, 80 bp, synthetic construct; identical to SEQ ID NO: 34943
  misc_feature 1..80: note = Artificially Synthesized Probe
  source 1..80: mol_type = other DNA

SEQ ID NO: 98634 - DNA, 80 bp, synthetic construct
  misc_feature 1..80: note = Artificially Synthesized Probe
  source 1..80: mol_type = other DNA
gtagattgcttgaggccaagaatttaaaaacagcctggccaacacaatgaagccctgtctctactgaaagtacaaaaatc

SEQ ID NO: 98635 - DNA, 80 bp, synthetic construct
  misc_feature 1..80: note = Artificially Synthesized Probe
  source 1..80: mol_type = other DNA
agctcactgcagtttcctcctcccgggttcaagtgattctcctgcctcagcctccggagtagctgggattacaggcacac

SEQ ID NO: 98636 - DNA, 80 bp, synthetic construct
  misc_feature 1..80: note = Artificially Synthesized Probe
  source 1..80: mol_type = other DNA
aaaaaaaacaaaggcgcctttttaatcactcactgacacgtgtagaggagcaaaaagtttgagttgctggttggcccagg

SEQ ID NO: 98637 - DNA, 80 bp, synthetic construct
  misc_feature 1..80: note = Artificially Synthesized Probe
  source 1..80: mol_type = other DNA
gttcgtagaccagcctgtctctactaaagagacaggtgaaaccctgtctctctaaaaccacaaaaatcaggcaggcatgg

SEQ ID NO: 98638 - DNA, 80 bp, synthetic construct; identical to SEQ ID NO: 34944
  misc_feature 1..80: note = Artificially Synthesized Probe
  source 1..80: mol_type = other DNA

SEQ ID NO: 98639 - DNA, 80 bp, synthetic construct
  misc_feature 1..80: note = Artificially Synthesized Probe
  source 1..80: mol_type = other DNA
actcggtctcttcaccccctcacctccaaccattgtagccagaacccccagttattccctgtaccccttgcccttcagaa

SEQ ID NO: 98640 - DNA, 80 bp, synthetic construct
  misc_feature 1..80: note = Artificially Synthesized Probe
  source 1..80: mol_type = other DNA
ctcctgccccagcctcctgagtagctgggattacaggtgcctgtcaccacgcccagctaacttctgtatatttagtagag

SEQ ID NO: 98641 - DNA, 80 bp, synthetic construct
  misc_feature 1..80: note = Artificially Synthesized Probe
  source 1..80: mol_type = other DNA
cttgccggagggcatcgatcagcactggctgcattaacgtgttgatttctgtgtttccccaggttgtggggatgttccat

SEQ ID NO: 98642 - DNA, 80 bp, synthetic construct; identical to SEQ ID NO: 34945
  misc_feature 1..80: note = Artificially Synthesized Probe
  source 1..80: mol_type = other DNA

SEQ ID NO: 98643 - DNA, 80 bp, synthetic construct
  misc_feature 1..80: note = Artificially Synthesized Probe
  source 1..80: mol_type = other DNA
gtgagcaaccgcacccggccaccttttttttttttttcctttgaggcaagaactcactatgttccccaggctggagtcca

SEQ ID NO: 98644 - DNA, 80 bp, synthetic construct
  misc_feature 1..80: note = Artificially Synthesized Probe
  source 1..80: mol_type = other DNA
ctacctgctcatgatagccatttgtcactgggctgtgttttgtttgttgcattttgtcagggttttggggttttgttttg

SEQ ID NO: 98645 - DNA, 80 bp, synthetic construct
  misc_feature 1..80: note = Artificially Synthesized Probe
  source 1..80: mol_type = other DNA
cagcctcccaagtagctgggattacaggcatgcaccaccacacctaggtaatttttgtatttttagtagagacagggttt

SEQ ID NO: 98646 - DNA, 80 bp, synthetic construct; identical to SEQ ID NO: 34946
  misc_feature 1..80: note = Artificially Synthesized Probe
  source 1..80: mol_type = other DNA

SEQ ID NO: 98647 - DNA, 80 bp, synthetic construct
  misc_feature 1..80: note = Artificially Synthesized Probe
  source 1..80: mol_type = other DNA
cctttctgtagctcaggcagctagatgagcttcaatcatctggcccttcctccagtctcacatttttgtgggactcctgt

SEQ ID NO: 98648 - DNA, 80 bp, synthetic construct
  misc_feature 1..80: note = Artificially Synthesized Probe
  source 1..80: mol_type = other DNA
acagttttactcttttttttggggtgcatcttttttcttttttttttttttttttcctttttttttttttttttttttat

SEQ ID NO: 98649 - DNA, 80 bp, synthetic construct
  misc_feature 1..80: note = Artificially Synthesized Probe
  source 1..80: mol_type = other DNA
attagggagtggtgatgactcttaacgagcgtgctgccttcaggatctgtttaacaaagcatatcttgcaccgcccttaa

SEQ ID NO: 98650 - DNA, 80 bp, synthetic construct
  misc_feature 1..80: note = Artificially Synthesized Probe
  source 1..80: mol_type = other DNA
ggttagaggggctcctcacttcccattaggggcggccgggcagaggcgcccctcacctcccggacagggcggctggctgg

SEQ ID NO: 98651 - DNA, 80 bp, synthetic construct; identical to SEQ ID NO: 34947
  misc_feature 1..80: note = Artificially Synthesized Probe
  source 1..80: mol_type = other DNA

SEQ ID NO: 98652 - DNA, 80 bp, synthetic construct
  misc_feature 1..80: note = Artificially Synthesized Probe
  source 1..80: mol_type = other DNA
ctatagcccagctgtactcagcaattccattttctgtgtatgataatcaacaagcatctcaaactgcacaatggctatat

SEQ ID NO: 98653 - DNA, 80 bp, synthetic construct
  misc_feature 1..80: note = Artificially Synthesized Probe
  source 1..80: mol_type = other DNA
tgctcaggctggagtgcaggggcccgatctcagctcactgtaacctccgcctcccaggttcaagtgattctcctgtgtca

SEQ ID NO: 98654 - DNA, 80 bp, synthetic construct; identical to SEQ ID NO: 34948
  misc_feature 1..80: note = Artificially Synthesized Probe
  source 1..80: mol_type = other DNA

SEQ ID NO: 98655 - DNA, 80 bp, synthetic construct
  misc_feature 1..80: note = Artificially Synthesized Probe
  source 1..80: mol_type = other DNA
caacagagagactgtctttttttttttttttttttttttttttttttttttttttgagatcgcccaggctggagtacagt

SEQ ID NO: 98656 - DNA, 80 bp, synthetic construct
  misc_feature 1..80: note = Artificially Synthesized Probe
  source 1..80: mol_type = other DNA
gtcttgatctgctgacctcgtgatccacccgcctcagcctcctaaagtgctgggaattacaggcgtgagccatcacgccc

SEQ ID NO: 98657 - DNA, 80 bp, synthetic construct
  misc_feature 1..80: note = Artificially Synthesized Probe
  source 1..80: mol_type = other DNA
cttttcttcccccattgtaccccaggttgaaaatcgatgactttaatgatgaactcaataagctgctggaagaaatagaa

SEQ ID NO: 98658 - DNA, 80 bp, synthetic construct
  misc_feature 1..80: note = Artificially Synthesized Probe
  source 1..80: mol_type = other DNA
aagtgagacccagtctctatttaaaaaagatggggagggggccgggcacggtgtctcacgcctgtaattccagcactttg

SEQ ID NO: 98659 - DNA, 80 bp, synthetic construct; identical to SEQ ID NO: 34949
  misc_feature 1..80: note = Artificially Synthesized Probe
  source 1..80: mol_type = other DNA

SEQ ID NO: 98660 - DNA, 80 bp, synthetic construct
  misc_feature 1..80: note = Artificially Synthesized Probe
  source 1..80: mol_type = other DNA
ctgcacacatccttatctttgttacatatgaaatatctgtatcacgggtatattgagagaaataaaggtgagagcattca

SEQ ID NO: 98661 - DNA, 80 bp, synthetic construct
  misc_feature 1..80: note = Artificially Synthesized Probe
  source 1..80: mol_type = other DNA
tcatttctgccttttagtttttactttttctttctttggaggtggaaattgggcataagacaatatgaggggtggtctcc

SEQ ID NO: 98662 - DNA, 80 bp, synthetic construct
  misc_feature 1..80: note = Artificially Synthesized Probe
  source 1..80: mol_type = other DNA
gtttgggattttctccctgaggcacttgctatctccaggattatgggtctcaggtgaaagaaagacaaagaaggagagag

SEQ ID NO: 98663 - DNA, 80 bp, synthetic construct
  misc_feature 1..80: note = Artificially Synthesized Probe
  source 1..80: mol_type = other DNA
ctcacgcctctaatcccagcactttgggacgccgaggtgggcgaatcacaaggtcaggagttcaagaccagcctggccaa

SEQ ID NO: 98664 - DNA, 80 bp, synthetic construct
  misc_feature 1..80: note = Artificially Synthesized Probe
  source 1..80: mol_type = other DNA
agcccaagggacagagtgagactctgtctcaaataataataataataataactagtggccaggcacagtggctcacgcct

SEQ ID NO: 98665 - DNA, 80 bp, synthetic construct
  misc_feature 1..80: note = Artificially Synthesized Probe
  source 1..80: mol_type = other DNA
taaagactgcgcatgaaagggtcatgattgagcaatctaggggatacataacaggggtttcgtgcactgctggtcagaga

SEQ ID NO: 98666 - DNA, 80 bp, synthetic construct
  misc_feature 1..80: note = Artificially Synthesized Probe
  source 1..80: mol_type = other DNA
gccgggctacctgcctttggtttcacttccttgtttttttctttttctttttttttttttttgagacagagtcttgctct

SEQ ID NO: 98667 - DNA, 80 bp, synthetic construct
  misc_feature 1..80: note = Artificially Synthesized Probe
  source 1..80: mol_type = other DNA
tgcccggctaatttttgtatttttaatagagacggggtttcaccatgttggccaggctggtctcaaactcctgaccttgt

SEQ ID NO: 98668 - DNA, 80 bp, synthetic construct
  misc_feature 1..80: note = Artificially Synthesized Probe
  source 1..80: mol_type = other DNA
cggtttctctcttccctcaccagcactttgggaggctgaggcaggtggatcacaaggtcagagtggatagcactttagga

SEQ ID NO: 98669 - DNA, 80 bp, synthetic construct
  misc_feature 1..80: note = Artificially Synthesized Probe
  source 1..80: mol_type = other DNA
aaaaattagtgcttgaccaggaggcaagcacacctcctcatcctctcatggatgtctgtctgtagaaagtaaatggagac

SEQ ID NO: 98670 - DNA, 80 bp, synthetic construct
  misc_feature 1..80: note = Artificially Synthesized Probe
  source 1..80: mol_type = other DNA
acacggtgaaaccatctctactaaaaaaaaaaaatacaaaaaattagctgggcgtggtggcgggcgcctgtagtcccagc

SEQ ID NO: 98671 - DNA, 80 bp, synthetic construct
  misc_feature 1..80: note = Artificially Synthesized Probe
  source 1..80: mol_type = other DNA
ctgggcattttgttgaattgtttttgaattgtggtttcttatcagttcatccgatactctgttctaaccacgtagttcct

SEQ ID NO: 98672 - DNA, 80 bp, synthetic construct
  misc_feature 1..80: note = Artificially Synthesized Probe
  source 1..80: mol_type = other DNA
gcgagatctcagctcactgcaacctctgcttcccgggttcaagcaattctcctccctcagcctcctgggtagctgggatt

SEQ ID NO: 98673 - DNA, 80 bp, synthetic construct
  misc_feature 1..80: note = Artificially Synthesized Probe
  source 1..80: mol_type = other DNA
cagaagtctgtttaaatccatccttctccccagccacccatgagttatgtgaccttggggttgctacttaacatttcagt

SEQ ID NO: 98674 - DNA, 80 bp, synthetic construct
  misc_feature 1..80: note = Artificially Synthesized Probe
  source 1..80: mol_type = other DNA
acgccattctcctgcctcagcctcccaagtagctgggactacaggcacccgccaccgtgcccagctaatttttttaattt

SEQ ID NO: 98675 - DNA, 80 bp, synthetic construct
  misc_feature 1..80: note = Artificially Synthesized Probe
  source 1..80: mol_type = other DNA
aaaatattctatataattccaaggtcaaagaagaaataacaaagggcatttttaaaaatgctagaactgagtggtggtga

SEQ ID NO: 98676 - DNA, 80 bp, synthetic construct
  misc_feature 1..80: note = Artificially Synthesized Probe
  source 1..80: mol_type = other DNA
aggccaaggcgggagggccatggagcccaggagttcaagaccggcccggtgtacaaagtgagacccagtctctagttaaa

SEQ ID NO: 98677 - DNA, 80 bp, synthetic construct
  misc_feature 1..80: note = Artificially Synthesized Probe
  source 1..80: mol_type = other DNA
accccgtgtctactaaaaatacaaaattagcttggtatggtggcgggagcctataatcccagctagggcaggagaatcac

SEQ ID NO: 98678 - DNA, 80 bp, synthetic construct
  misc_feature 1..80: note = Artificially Synthesized Probe
  source 1..80: mol_type = other DNA
acctgtaatcccagcactttgggaagccgaggcaggtggatctcagatcaggagttcaagaagagcctggccagcatggt

SEQ ID NO: 98679 - DNA, 80 bp, synthetic construct
  misc_feature 1..80: note = Artificially Synthesized Probe
  source 1..80: mol_type = other DNA
aaggaaacaaaaaaaaaagtacctccaaattatggtagggtgtccatattaagaaggtagaaaaaggtcgggggaagtgg

SEQ ID NO: 98680 - DNA, 80 bp, synthetic construct
  misc_feature 1..80: note = Artificially Synthesized Probe
  source 1..80: mol_type = other DNA
caggagtctgaggcaggagaatcacaggaaaccggcaggcagaggttgcagtgagctgagatcgcgccattgcactccag

SEQ ID NO: 98681 - DNA, 80 bp, synthetic construct
  misc_feature 1..80: note = Artificially Synthesized Probe
  source 1..80: mol_type = other DNA
ttcgctcttgttgcccaggctggagtgcaatggcacgatctcagctcactgcaacctctgcctcccaggttccagccatt

SEQ ID NO: 98682 - DNA, 80 bp, synthetic construct
  misc_feature 1..80: note = Artificially Synthesized Probe
  source 1..80: mol_type = other DNA
catcaaaaccaagatagtgacgagagtaacctctggttgtcctcaccgctccactcccagcagccccatgacagtttaca

SEQ ID NO: 98683 - DNA, 80 bp, synthetic construct
  misc_feature 1..80: note = Artificially Synthesized Probe
  source 1..80: mol_type = other DNA
tgctgggattacaggcatgaatcaccacgcccggcccctcattttcttttctttctttctttcttttttgtttgtttgtt

SEQ ID NO: 98684 - DNA, 80 bp, synthetic construct
  misc_feature 1..80: note = Artificially Synthesized Probe
  source 1..80: mol_type = other DNA
atttttagtagagacggggtttcaccgtgttagccaggatggtctccatctcctgacctcgtgatccgcccgcctcggcc

SEQ ID NO: 98685 - DNA, 80 bp, synthetic construct; identical to SEQ ID NO: 34909
  misc_feature 1..80: note = Artificially Synthesized Probe
  source 1..80: mol_type = other DNA

SEQ ID NO: 98686 - DNA, 80 bp, synthetic construct
  misc_feature 1..80: note = Artificially Synthesized Probe
  source 1..80: mol_type = other DNA
ctcgggaggcggaggcaagaggatcacttgagcccaggaggcggaggttgcaacgagctagagattgccctactgcactc

SEQ ID NO: 98687 - DNA, 80 bp, synthetic construct
  misc_feature 1..80: note = Artificially Synthesized Probe
  source 1..80: mol_type = other DNA
cttctgtaagacgacagttttccaacctgcaaaaatatgaaacaaatggtagaaggatgagaacatttccacaactccaa

SEQ ID NO: 98688 - DNA, 80 bp, synthetic construct
  misc_feature 1..80: note = Artificially Synthesized Probe
  source 1..80: mol_type = other DNA
tgtttttgagacggagtctcgctctgtcgcccaggctggagtgcagtggcgcgatctcggttcactgccaatcgccgcct

SEQ ID NO: 98689 - DNA, 80 bp, synthetic construct
  misc_feature 1..80: note = Artificially Synthesized Probe
  source 1..80: mol_type = other DNA
gcctcccaacgtgctgggattacaggcatgagccaccgcacccggcctgtttttggtatttttaatagaaacagggtttc

SEQ ID NO: 98690 - DNA, 80 bp, synthetic construct; identical to SEQ ID NO: 34879
  misc_feature 1..80: note = Artificially Synthesized Probe
  source 1..80: mol_type = other DNA

SEQ ID NO: 98691 - DNA, 80 bp, synthetic construct
  misc_feature 1..80: note = Artificially Synthesized Probe
  source 1..80: mol_type = other DNA
ccggggtggcacagtgacctcccaacctgtgaaaagagtgggaaaagtcattcttctgggaggacagagtataccctatc

SEQ ID NO: 98692 - DNA, 80 bp, synthetic construct
  misc_feature 1..80: note = Artificially Synthesized Probe
  source 1..80: mol_type = other DNA
tttagtagagacgggatttcaccatgttggccacactggtcttgaactcctgacctcaggtgatccacccaccttggcct

SEQ ID NO: 98693 - DNA, 80 bp, synthetic construct
  misc_feature 1..80: note = Artificially Synthesized Probe
  source 1..80: mol_type = other DNA
ttcaagtatccccatggccattagggtaacatccagccacttctccaagagattgtaatacaattctgtgcaatgtttca

SEQ ID NO: 98694 - DNA, 80 bp, synthetic construct; identical to SEQ ID NO: 34880
  misc_feature 1..80: note = Artificially Synthesized Probe
  source 1..80: mol_type = other DNA

SEQ ID NO: 98695 - DNA, 80 bp, synthetic construct
  misc_feature 1..80: note = Artificially Synthesized Probe
  source 1..80: mol_type = other DNA
ggtgaaaccctgtctctattaaaaatacaaacatttgccaggcgtggtggtgcacgcctgtaaccccagctactcgggaa

SEQ ID NO: 98696 - DNA, 80 bp, synthetic construct
  misc_feature 1..80: note = Artificially Synthesized Probe
  source 1..80: mol_type = other DNA
attctcattgagtgcagagaaggttgcatgctccttatgaatacctaactcctgatgatctgagattgatgatccattct

SEQ ID NO: 98697 - DNA, 80 bp, synthetic construct
  misc_feature 1..80: note = Artificially Synthesized Probe
  source 1..80: mol_type = other DNA
agtgaaaccccgtctctactaaaaatacaaaaattagctgggcatggtggcagacaactgtaataccagctactcaggag

SEQ ID NO: 98698 - DNA, 80 bp, synthetic construct; identical to SEQ ID NO: 34881
  misc_feature 1..80: note = Artificially Synthesized Probe
  source 1..80: mol_type = other DNA

SEQ ID NO: 98699 - DNA, 80 bp, synthetic construct
  misc_feature 1..80: note = Artificially Synthesized Probe
  source 1..80: mol_type = other DNA
tagatcccccagcaacacggtgcagtggactccaggtgctggggagagccgtgaccgtgagacccacctcaggtactgca

SEQ ID NO: 98700 - DNA, 80 bp, synthetic construct
  misc_feature 1..80: note = Artificially Synthesized Probe
  source 1..80: mol_type = other DNA
agggaaaagcagaagagattccacttggagtgattaatactcacattgtgtggaggcatgtataaacaaaaagctgtttc

SEQ ID NO: 98701 - DNA, 80 bp, synthetic construct
  misc_feature 1..80: note = Artificially Synthesized Probe
  source 1..80: mol_type = other DNA
tggggccgaggcaggcagatcgcctgaggtcaggagttcgagaccagcctggccaacatggggaagccccgtctctacta

SEQ ID NO: 98702 - DNA, 80 bp, synthetic construct
  misc_feature 1..80: note = Artificially Synthesized Probe
  source 1..80: mol_type = other DNA
caaaagaaaaaaaaattcgccgggtgtggtggctcacgcctgtaatcccagcactttgggaggccgaggccgaggcgggt

SEQ ID NO: 98703 - DNA, 80 bp, synthetic construct; identical to SEQ ID NO: 34882
  misc_feature 1..80: note = Artificially Synthesized Probe
  source 1..80: mol_type = other DNA

SEQ ID NO: 98704 - DNA, 80 bp, synthetic construct
  misc_feature 1..80: note = Artificially Synthesized Probe
  source 1..80: mol_type = other DNA
aaaaaaagatagctggggccaggcatggtggctcatgcctgtaatcccagcactttcgaagaccgaggcaggcgcatcac

SEQ ID NO: 98705 - DNA, 80 bp, synthetic construct
  misc_feature 1..80: note = Artificially Synthesized Probe
  source 1..80: mol_type = other DNA
atgcctataatcccagcactttggaaggccgaggcaggcaaatcacctgaggtcaggagctcgagatcagcctgggcaac

SEQ ID NO: 98706 - DNA, 80 bp, synthetic construct
  misc_feature 1..80: note = Artificially Synthesized Probe
  source 1..80: mol_type = other DNA
gcaacaagagtaaatctccgtctcaccaaaaaaaaaaaaaaaaaaaaagacagctggaaaatccccaaatacatggagat

SEQ ID NO: 98707 - DNA, 80 bp, synthetic construct; identical to SEQ ID NO: 34869
  misc_feature 1..80: note = Artificially Synthesized Probe
  source 1..80: mol_type = other DNA

SEQ ID NO: 98708 - DNA, 80 bp, synthetic construct; identical to SEQ ID NO: 34883
  misc_feature 1..80: note = Artificially Synthesized Probe
  source 1..80: mol_type = other DNA

SEQ ID NO: 98709 - DNA, 80 bp, synthetic construct
  misc_feature 1..80: note = Artificially Synthesized Probe
  source 1..80: mol_type = other DNA
acagtgtctatagtaaacaatattgcatcacatgctttgctaccagtatagatcttaagttttacaaaaaaaataaaata

SEQ ID NO: 98710 - DNA, 80 bp, synthetic construct
  misc_feature 1..80: note = Artificially Synthesized Probe
  source 1..80: mol_type = other DNA
tgcacgcccatagtcccagctactcgggaggctgaggcaggagaatcacttgaacccgggaggcggaggttgcagtgagc

SEQ ID NO: 98711 - DNA, 80 bp, synthetic construct
  misc_feature 1..80: note = Artificially Synthesized Probe
  source 1..80: mol_type = other DNA
aaggagacgctggcctcttcctagtggagcgtgggatgggaaaacagttcttacctttcaaattcaatgtccagttcaaa

SEQ ID NO: 98712 - DNA, 80 bp, synthetic construct; identical to SEQ ID NO: 34884
  misc_feature 1..80: note = Artificially Synthesized Probe
  source 1..80: mol_type = other DNA

SEQ ID NO: 98713 - DNA, 80 bp, synthetic construct
  misc_feature 1..80: note = Artificially Synthesized Probe
  source 1..80: mol_type = other DNA
tcaggtcggtcacggataagggcttatttgcatgaagatgtgctttgcattgcagcaattcctgtttgatgtccggtgac

SEQ ID NO: 98714 - DNA, 80 bp, synthetic construct
  misc_feature 1..80: note = Artificially Synthesized Probe
  source 1..80: mol_type = other DNA
cctccccctcctccttctccagggcgtagaacagggcagtgagaaactgctggaagctgaggtggatgaaggagtagcag

SEQ ID NO: 98715 - DNA, 80 bp, synthetic construct
  misc_feature 1..80: note = Artificially Synthesized Probe
  source 1..80: mol_type = other DNA
gcagctgtgcgccctgcgggaaccggctgcagaggaaacgcaggaacagccccgtgcgggtgaggcaggtggggaccggg

SEQ ID NO: 98716 - DNA, 80 bp, synthetic construct; identical to SEQ ID NO: 34885
  misc_feature 1..80: note = Artificially Synthesized Probe
  source 1..80: mol_type = other DNA

SEQ ID NO: 98717 - DNA, 80 bp, synthetic construct
  misc_feature 1..80: note = Artificially Synthesized Probe
  source 1..80: mol_type = other DNA
ggattctctgtgcttgggctaggatgcttggaatgtcatcctgcaattcaggccagtctttggagatcagctctgcaaaa

SEQ ID NO: 98718 - DNA, 80 bp, synthetic construct
  misc_feature 1..80: note = Artificially Synthesized Probe
  source 1..80: mol_type = other DNA
gcttcctgggtgttctgggattcaagaatggaatgaaccgttggtttctcagagtgacgtcgtcatggaaattgtcaatg

SEQ ID NO: 98719 - DNA, 80 bp, synthetic construct
  misc_feature 1..80: note = Artificially Synthesized Probe
  source 1..80: mol_type = other DNA
aatacgccccaaacatatgacataagagaccacagggggctagagatttgtcaccaatagtccttggtggcattacagac

SEQ ID NO: 98720 - DNA, 80 bp, synthetic construct
  misc_feature 1..80: note = Artificially Synthesized Probe
  source 1..80: mol_type = other DNA
gacagcccataggacagttgaggttgatgatgatgattttctgaattattttgtcaagtaccagaaatgagggccaggca

SEQ ID NO: 98721 - DNA, 80 bp, synthetic construct
  misc_feature 1..80: note = Artificially Synthesized Probe
  source 1..80: mol_type = other DNA
gctactcaggaggctgaggcagagaattgcttgaacccgggaggcagaggttgcaatgagcagagacggagccactacac

SEQ ID NO: 98722 - DNA, 80 bp, synthetic construct; identical to SEQ ID NO: 34886
  misc_feature 1..80: note = Artificially Synthesized Probe
  source 1..80: mol_type = other DNA

SEQ ID NO: 98723 - DNA, 80 bp, synthetic construct
  misc_feature 1..80: note = Artificially Synthesized Probe
  source 1..80: mol_type = other DNA
gagatcaagaccagcctggccaacatggcaaaaccccatctctactaaaaatacaaaaaaaaaaaaattagccaggtgtg

SEQ ID NO: 98724 - DNA, 80 bp, synthetic construct
  misc_feature 1..80: note = Artificially Synthesized Probe
  source 1..80: mol_type = other DNA
aaaaaaaaaaaaatgaccaggacaccccaggttctacttacccatcatctcagcctttgccatcttacacaattccgtga

SEQ ID NO: 98725 - DNA, 80 bp, synthetic construct
  misc_feature 1..80: note = Artificially Synthesized Probe
  source 1..80: mol_type = other DNA
tctgtagcacgtcttcgaggggaaaagcccataaaagggatttgaaactctttaattcatcctcgttcagctgctccaga

SEQ ID NO: 98726 - DNA, 80 bp, synthetic construct; identical to SEQ ID NO: 34887
  misc_feature 1..80: note = Artificially Synthesized Probe
  source 1..80: mol_type = other DNA

SEQ ID NO: 98727 - DNA, 80 bp, synthetic construct
  misc_feature 1..80: note = Artificially Synthesized Probe
  source 1..80: mol_type = other DNA
acgatatcaggagatcgagaccatcctggctaacacagtgaaacccctgcctctactaaaaaaatacaaaaaattagcag

SEQ ID NO: 98728 - DNA, 80 bp, synthetic construct
  misc_feature 1..80: note = Artificially Synthesized Probe
  source 1..80: mol_type = other DNA
aaaaaaaagaatacaaagaatgaagggtcagtggtatgctagggccagcccgtgctgcctaatgggggcttcctatatgt

SEQ ID NO: 98729 - DNA, 80 bp, synthetic construct
  misc_feature 1..80: note = Artificially Synthesized Probe
  source 1..80: mol_type = other DNA
gggagctcaagaccagcctgaccaacacggcgaaaccccatctctactaaaaatacagaaattacaggcgggtgcctgta

SEQ ID NO: 98730 - DNA, 80 bp, synthetic construct; identical to SEQ ID NO: 34888
  misc_feature 1..80: note = Artificially Synthesized Probe
  source 1..80: mol_type = other DNA

SEQ ID NO: 98731 - DNA, 80 bp, synthetic construct
  misc_feature 1..80: note = Artificially Synthesized Probe
  source 1..80: mol_type = other DNA
agcgttccaataatgcaacactgggcatcatgaagcagtttacatgcgtatcatctctacaactaaaataactcttgaat

SEQ ID NO: 98732 - DNA, 80 bp, synthetic construct
  misc_feature 1..80: note = Artificially Synthesized Probe
  source 1..80: mol_type = other DNA
ctggcccacatggtgaaaccccatctctactaaaaatacaaaagctagccaagtgtagtggtaggaacctgtaatcccag

SEQ ID NO: 98733 - DNA, 80 bp, synthetic construct
  misc_feature 1..80: note = Artificially Synthesized Probe
  source 1..80: mol_type = other DNA
cagatacttgggaggctgacacaggaggattgtttgagcctacgatttggaggttgcagtgagccagccactgcacgcca

SEQ ID NO: 98734 - DNA, 80 bp, synthetic construct
  misc_feature 1..80: note = Artificially Synthesized Probe
  source 1..80: mol_type = other DNA
tactaaaaatacaaacaattagccgggcgtggtggcgggcgcctgtagtcccagctactcgggaggctgaggcaggagaa

SEQ ID NO: 98735 - DNA, 80 bp, synthetic construct; identical to SEQ ID NO: 34889
  misc_feature 1..80: note = Artificially Synthesized Probe
  source 1..80: mol_type = other DNA

SEQ ID NO: 98736 - DNA, 80 bp, synthetic construct
  misc_feature 1..80: note = Artificially Synthesized Probe
  source 1..80: mol_type = other DNA
tagggctatgcaggatgtgctttgttaaacagatgcttgaaggcagcatgcttgttaaaagtcatcaccactctctaatc

SEQ ID NO: 98737 - DNA, 80 bp, synthetic construct
  misc_feature 1..80: note = Artificially Synthesized Probe
  source 1..80: mol_type = other DNA
ctgtgctgaagaggattagtataagaggaaggcctttttgcagttaagaggaaggtatctgtctcctgctcgtccctggg

SEQ ID NO: 98738 - DNA, 80 bp, synthetic construct
  misc_feature 1..80: note = Artificially Synthesized Probe
  source 1..80: mol_type = other DNA
aaccttgtttatgacacagacatttgctcacatgttttcctgctgaccctctccccactgttaccctattgtcctgccac

SEQ ID NO: 98739 - DNA, 80 bp, synthetic construct; identical to SEQ ID NO: 34890
  misc_feature 1..80: note = Artificially Synthesized Probe
  source 1..80: mol_type = other DNA

SEQ ID NO: 98740 - DNA, 80 bp, synthetic construct; identical to SEQ ID NO: 34870
  misc_feature 1..80: note = Artificially Synthesized Probe
  source 1..80: mol_type = other DNA

SEQ ID NO: 98741 - DNA, 80 bp, synthetic construct
  misc_feature 1..80: note = Artificially Synthesized Probe
  source 1..80: mol_type = other DNA
ttaacatatccactgcttcatatagttgcctttcgtttttgcagtgacaacgcttgatgtacttagaaaaattcagggtt

SEQ ID NO: 98742 - DNA, 80 bp, synthetic construct
  misc_feature 1..80: note = Artificially Synthesized Probe
  source 1..80: mol_type = other DNA
ctaaaaatacaaaaaaaaaattagccgggcatggtggcgggcgcctgtagtcccagctacttgggaggctgaggcaggag

SEQ ID NO: 98743 - DNA, 80 bp, synthetic construct
  misc_feature 1..80: note = Artificially Synthesized Probe
  source 1..80: mol_type = other DNA
gcccaggctggagtgcaatggtgcgaggcttaccacaacctcctcttcccgggttcaagcgattctcctgcctcggcctc

SEQ ID NO: 98744 - DNA, 80 bp, synthetic construct; identical to SEQ ID NO: 34891
  misc_feature 1..80: note = Artificially Synthesized Probe
  source 1..80: mol_type = other DNA

SEQ ID NO: 98745 - DNA, 80 bp, synthetic construct
  misc_feature 1..80: note = Artificially Synthesized Probe
  source 1..80: mol_type = other DNA
acgccgggctagtttttgtatttttagtagagacagggtttcttgtttttttctgagatggagtcttgctctgtcaccca

SEQ ID NO: 98746 - DNA, 80 bp, synthetic construct
  misc_feature 1..80: note = Artificially Synthesized Probe
  source 1..80: mol_type = other DNA
tgttagccaggatggtctcgatcttctgacctcgtgatccgcccgcctcggcctcccatagtgctgggattacaggcgtg

SEQ ID NO: 98747 - DNA, 80 bp, synthetic construct
  misc_feature 1..80: note = Artificially Synthesized Probe
  source 1..80: mol_type = other DNA
agcatttcactctggttgcccaggctggagtgcagtggcgcaatctcagctcaccgcaacctccgcctcccgggttcaag

SEQ ID NO: 98748 - DNA, 80 bp, synthetic construct; identical to SEQ ID NO: 34892
  misc_feature 1..80: note = Artificially Synthesized Probe
  source 1..80: mol_type = other DNA

SEQ ID NO: 98749 - DNA, 80 bp, synthetic construct
  misc_feature 1..80: note = Artificially Synthesized Probe
  source 1..80: mol_type = other DNA
attgcaacctccccctcctaggtttaagctattctcctgcctcaaccttccaagtaactgggattacaggcatgcaccac

SEQ ID NO: 98750 - DNA, 80 bp, synthetic construct
  misc_feature 1..80: note = Artificially Synthesized Probe
  source 1..80: mol_type = other DNA
actaaaaatacaaaaaattagccgggcgtggtggcgggcgcctgtagtcccagctgctcgggaggctgaggcaggagaat

SEQ ID NO: 98751 - DNA, 80 bp, synthetic construct
  misc_feature 1..80: note = Artificially Synthesized Probe
  source 1..80: mol_type = other DNA
aatgacagagttttaccatgttgcccaggctagtctcaatctcctgaactcctctaaactatatttgaatagaagtcctt

SEQ ID NO: 98752 - DNA, 80 bp, synthetic construct
  misc_feature 1..80: note = Artificially Synthesized Probe
  source 1..80: mol_type = other DNA
acgtgcctgtagtcccagctactcaggaggctgaggcaggagaatggcgggtgaacccaggaggcggagtttgcagcgaa

SEQ ID NO: 98753 - DNA, 80 bp, synthetic construct; identical to SEQ ID NO: 34893
  misc_feature 1..80: note = Artificially Synthesized Probe
  source 1..80: mol_type = other DNA

SEQ ID NO: 98754 - DNA, 80 bp, synthetic construct
  misc_feature 1..80: note = Artificially Synthesized Probe
  source 1..80: mol_type = other DNA
tttggctgtaattgggcttcagtgggctttggagaattacggcttgctgaatctccccaggtgagattaatgtgcaattc

SEQ ID NO: 98755 - DNA, 80 bp, synthetic construct
  misc_feature 1..80: note = Artificially Synthesized Probe
  source 1..80: mol_type = other DNA
cgtgacttcctaagttacaaatacaataagtctactttgtggccaactgtggtgcctcctgcctataaatcccagcaggc

SEQ ID NO: 98756 - DNA, 80 bp, synthetic construct; identical to SEQ ID NO: 34894
  misc_feature 1..80: note = Artificially Synthesized Probe
  source 1..80: mol_type = other DNA

SEQ ID NO: 98757 - DNA, 80 bp, synthetic construct
  misc_feature 1..80: note = Artificially Synthesized Probe
  source 1..80: mol_type = other DNA
caaaaaaattagccatacatgatgggctgcacctgtaatcccagctattcaggaggctgaggtgggaggatcacctgagc

SEQ ID NO: 98758 - DNA, 80 bp, synthetic construct
  misc_feature 1..80: note = Artificially Synthesized Probe
  source 1..80: mol_type = other DNA
aatctccattcttgcaacctctgccttccaggttcaagcaattctgatgcctcagcttcccaagtagctgggactgcagg

SEQ ID NO: 98759 - DNA, 80 bp, synthetic construct
  misc_feature 1..80: note = Artificially Synthesized Probe
  source 1..80: mol_type = other DNA
gaaagcattcagcacagaattttggtagtttaaactgttaatttaatggaagcaaatggtcccacaaatgaagatgtata

SEQ ID NO: 98760 - DNA, 80 bp, synthetic construct
  misc_feature 1..80: note = Artificially Synthesized Probe
  source 1..80: mol_type = other DNA
tcgagaccaacctgggcaacatggcaaaaaacccctggctactaaaaataaagaattagccaggcatggtggtgtgcacc

SEQ ID NO: 98761 - DNA, 80 bp, synthetic construct
  misc_feature 1..80: note = Artificially Synthesized Probe
  source 1..80: mol_type = other DNA
aaaaatacaaataagtcattgaaaagatatacacgggtcacaactaagggagcatctgtaggacgatcttctgaaaagct

SEQ ID NO: 98762 - DNA, 80 bp, synthetic construct; identical to SEQ ID NO: 34895
  misc_feature 1..80: note = Artificially Synthesized Probe
  source 1..80: mol_type = other DNA

SEQ ID NO: 98763 - DNA, 80 bp, synthetic construct
  misc_feature 1..80: note = Artificially Synthesized Probe
  source 1..80: mol_type = other DNA
agctatggagagataaacatgaaagaggtatctcttgttatacatacccaggccctgcaaccacacctgagtttatgtaa

SEQ ID NO: 98764 - DNA, 80 bp, synthetic construct
  misc_feature 1..80: note = Artificially Synthesized Probe
  source 1..80: mol_type = other DNA
ccagctatgtgatcagcattgcccacctaaggaatcctccataaaccccaaaagaaaagggtttgggccgggtgtcctgt

SEQ ID NO: 98765 - DNA, 80 bp, synthetic construct
  misc_feature 1..80: note = Artificially Synthesized Probe
  source 1..80: mol_type = other DNA
caggaggctgaggcatgagaatcacttgaacgcaggagacagaggctgcagtgagctgagatagcgccactgcactccag

SEQ ID NO: 98766 - DNA, 80 bp, synthetic construct; identical to SEQ ID NO: 34896
  misc_feature 1..80: note = Artificially Synthesized Probe
  source 1..80: mol_type = other DNA

SEQ ID NO: 98767 - DNA, 80 bp, synthetic construct
  misc_feature 1..80: note = Artificially Synthesized Probe
  source 1..80: mol_type = other DNA
ttctcagagagggggatgtggcagggtcataggataatagtggagggaaggtcagcagataaacacgttaacaaaggtct

SEQ ID NO: 98768 - DNA, 80 bp, synthetic construct
  misc_feature 1..80: note = Artificially Synthesized Probe
  source 1..80: mol_type = other DNA
ttacacccatacattccattgcccagggacgagcaggagacagatgccttcctcttgtctcaactgcaaagaggtgttcc

SEQ ID NO: 98769 - DNA, 80 bp, synthetic construct
  misc_feature 1..80: note = Artificially Synthesized Probe
  source 1..80: mol_type = other DNA
ccgcagtgtttgtgtccctgggtacttgagattagggagtggtgatgactcttaaggagcatgctgccttcaagcatttg

SEQ ID NO: 98770 - DNA, 80 bp, synthetic construct
  misc_feature 1..80: note = Artificially Synthesized Probe
  source 1..80: mol_type = other DNA
tgatttaaactctcagtatgcctaggactaagtgttttgggggaaagttggacaatattcaattcacagagcattttaga

SEQ ID NO: 98771 - DNA, 80 bp, synthetic construct; identical to SEQ ID NO: 34897
  misc_feature 1..80: note = Artificially Synthesized Probe
  source 1..80: mol_type = other DNA

SEQ ID NO: 98772 - DNA, 80 bp, synthetic construct
  misc_feature 1..80: note = Artificially Synthesized Probe
  source 1..80: mol_type = other DNA
ctactcgagaggctgaggcagaattgtttgaacccgggaggcagaggcagaggttgcagtgagccgaggtcgcacgactg

SEQ ID NO: 98773 - DNA, 80 bp, synthetic construct; identical to SEQ ID NO: 34868
  misc_feature 1..80: note = Artificially Synthesized Probe
  source 1..80: mol_type = other DNA

SEQ ID NO: 98774 - DNA, 80 bp, synthetic construct
  misc_feature 1..80: note = Artificially Synthesized Probe
  source 1..80: mol_type = other DNA
cacgtggctctagacactgcacttttgcctcctcatcattgctgtagataggatttctgacagcagggtcattagacgaa

SEQ ID NO: 98775 - DNA, 80 bp, synthetic construct
  misc_feature 1..80: note = Artificially Synthesized Probe
  source 1..80: mol_type = other DNA
ctaattttttttgtatttttagtagagacgcggtttcaccatgttagccaggatggtctcgatctcctgacctcgtgatc

SEQ ID NO: 98776 - DNA, 80 bp, synthetic construct; identical to SEQ ID NO: 34898
  misc_feature 1..80: note = Artificially Synthesized Probe
  source 1..80: mol_type = other DNA

SEQ ID NO: 98777 - DNA, 80 bp, synthetic construct
  misc_feature 1..80: note = Artificially Synthesized Probe
  source 1..80: mol_type = other DNA
tgctatagaaagatgccttaagttgatccctacaaagagtacacacactcccaaaaaaactcttctctgcatgggaaatt

SEQ ID NO: 98778 - DNA, 80 bp, synthetic construct
  misc_feature 1..80: note = Artificially Synthesized Probe
  source 1..80: mol_type = other DNA
aggccaaggcaggtgaatcacctgaggtcaagagttcaagaccagcctggccaacatagtgaaaccccgtttctactaaa

SEQ ID NO: 98779 - DNA, 80 bp, synthetic construct
  misc_feature 1..80: note = Artificially Synthesized Probe
  source 1..80: mol_type = other DNA
aaaaaaaaaaaaaaccctagacccaaacttctgggggagatggattggaggtttcctcccatctcctcattcctcagccc

SEQ ID NO: 98780 - DNA, 80 bp, synthetic construct
  misc_feature 1..80: note = Artificially Synthesized Probe
  source 1..80: mol_type = other DNA
ccagacagttaaggcattctccaaaaaaaacaaaaatgacaggcacggtggcccagcactttgggaggccgaggcgggtg

SEQ ID NO: 98781 - DNA, 80 bp, synthetic construct; identical to SEQ ID NO: 34899
  misc_feature 1..80: note = Artificially Synthesized Probe
  source 1..80: mol_type = other DNA

SEQ ID NO: 98782 - DNA, 80 bp, synthetic construct
  misc_feature 1..80: note = Artificially Synthesized Probe
  source 1..80: mol_type = other DNA
tcacaactctaagggggtgtgcgtgagagggtcgtgatcgactgagcaagcagggggtacgtgactgggggctgcatgca

SEQ ID NO: 98783 - DNA, 80 bp, synthetic construct
  misc_feature 1..80: note = Artificially Synthesized Probe
  source 1..80: mol_type = other DNA
ccgcggggctgtctgcttgtggatttcattcctggggcgcggggctgtctgcttgtggatttcatttctgccttttagtt

SEQ ID NO: 98784 - DNA, 80 bp, synthetic construct
  misc_feature 1..80: note = Artificially Synthesized Probe
  source 1..80: mol_type = other DNA
agattgagaccatcctggctaacacggtgaaaccatctctactaaaaaaaaaaaatacaaaaaattagctgggcgtggtg

SEQ ID NO: 98785 - DNA, 80 bp, synthetic construct; identical to SEQ ID NO: 34900
  misc_feature 1..80: note = Artificially Synthesized Probe
  source 1..80: mol_type = other DNA

SEQ ID NO: 98786 - DNA, 80 bp, synthetic construct
  misc_feature 1..80: note = Artificially Synthesized Probe
  source 1..80: mol_type = other DNA
cccagcactttgggaggccgaggcgggtggatcatgaggtcaggagattgagaccatcctggctaacacggtgaaatccc

SEQ ID NO: 98787 - DNA, 80 bp, synthetic construct
  misc_feature 1..80: note = Artificially Synthesized Probe
  source 1..80: mol_type = other DNA
gcgagactccgtctcaaaaaaaaaaaaaaaaaaaaaaaagggcaaccgaggccggacgtggtggcttacgcctgtaatcc

SEQ ID NO: 98788 - DNA, 80 bp, synthetic construct; identical to SEQ ID NO: 34871
  misc_feature 1..80: note = Artificially Synthesized Probe
  source 1..80: mol_type = other DNA

SEQ ID NO: 98789 - DNA, 80 bp, synthetic construct
  misc_feature 1..80: note = Artificially Synthesized Probe
  source 1..80: mol_type = other DNA
gagaatcacttgaactgaagtgattcaaggcagaggtttcagtgagccaagatcacgccactgcactccagcctgggcga

SEQ ID NO: 98790 - DNA, 80 bp, synthetic construct
  misc_feature 1..80: note = Artificially Synthesized Probe
  source 1..80: mol_type = other DNA
gaacccaccatgcccagctcgtccttacttgcttttaaaaaatatcattggtggccgggcgcggtggctcacgcctgcaa

SEQ ID NO: 98791 - DNA, 80 bp, synthetic construct
  misc_feature 1..80: note = Artificially Synthesized Probe
  source 1..80: mol_type = other DNA
caggagaatcacttgaacccgggtggcagaggttgcagtgagccaagatcatgccattgcactccagcctgggcaacaag

SEQ ID NO: 98792 - DNA, 80 bp, synthetic construct
  misc_feature 1..80: note = Artificially Synthesized Probe
  source 1..80: mol_type = other DNA
gcctggacaacatgatgaaacctcttcttgatcaaatatacagaatttcgactgagcacagtggctgtaagcccagcatg

SEQ ID NO: 98793 - DNA, 80 bp, synthetic construct
  misc_feature 1..80: note = Artificially Synthesized Probe
  source 1..80: mol_type = other DNA
gagtcgtaggttgcagtgagccaagatcgtgccactgcacttcagcctgggcgacacagcaagactgaggttgcagtgag

SEQ ID NO: 98794 - DNA, 80 bp, synthetic construct; identical to SEQ ID NO: 34902
  misc_feature 1..80: note = Artificially Synthesized Probe
  source 1..80: mol_type = other DNA

SEQ ID NO: 98795 - DNA, 80 bp, synthetic construct
  misc_feature 1..80: note = Artificially Synthesized Probe
  source 1..80: mol_type = other DNA
gtgggacaaggaaggaaggaaggaagtcagtcagtcttgtgggactcagccctgaacctttgggatctgatgctgtcccc

SEQ ID NO: 98796 - DNA, 80 bp, synthetic construct
  misc_feature 1..80: note = Artificially Synthesized Probe
  source 1..80: mol_type = other DNA
cattccaggattttgggaggccaaggcaggcggatcacttgaggtcaggactttgagaccaccctggtgaacatggcaaa

SEQ ID NO: 98797 - DNA, 80 bp, synthetic construct
  misc_feature 1..80: note = Artificially Synthesized Probe
  source 1..80: mol_type = other DNA
acagagcaagactctccctcaaaaaaaaaaaaaggccgggcgcagtggctcacgcctataatatcagcactttgggaggc

SEQ ID NO: 98798 - DNA, 80 bp, synthetic construct
  misc_feature 1..80: note = Artificially Synthesized Probe
  source 1..80: mol_type = other DNA
acccagcaacttttcccccttttatcataccttaatttgcctccaccacccccagaagctccaagtctctacgccttttc

SEQ ID NO: 98799 - DNA, 80 bp, synthetic construct
  misc_feature 1..80: note = Artificially Synthesized Probe
  source 1..80: mol_type = other DNA
ccactgcactccagcctgggggacagagagagactctgtctttaaaaaaaaaaaaaaaaaaaaaaaattagccagctgtg

SEQ ID NO: 98800 - DNA, 80 bp, synthetic construct
  misc_feature 1..80: note = Artificially Synthesized Probe
  source 1..80: mol_type = other DNA
tgggattacagggcacaccaccacacctggctaatttttgtatttttagtggagactgggtttcaccctgttgtccaggc

SEQ ID NO: 98801 - DNA, 80 bp, synthetic construct
  misc_feature 1..80: note = Artificially Synthesized Probe
  source 1..80: mol_type = other DNA
ggagtacaatggtgcgatcttagctcactgcagtttcctcctcccgggttcaagtgattctcctgcctcagcctccggag

SEQ ID NO: 98802 - DNA, 80 bp, synthetic construct
  misc_feature 1..80: note = Artificially Synthesized Probe
  source 1..80: mol_type = other DNA
tgcaccctacactcttatactcctttctgtagctcaggcagctagatgagcttcaatcatctggcccttcctccagtctc

SEQ ID NO: 98803 - DNA, 80 bp, synthetic construct
  misc_feature 1..80: note = Artificially Synthesized Probe
  source 1..80: mol_type = other DNA
tcaagactggcccggtgtacaaagtgagacccagtctctatttaaaaaagatggggagggggccgggcacggtgtctcac

SEQ ID NO: 98804 - DNA, 80 bp, synthetic construct; identical to SEQ ID NO: 34904
  misc_feature 1..80: note = Artificially Synthesized Probe
  source 1..80: mol_type = other DNA

SEQ ID NO: 98805 - DNA, 80 bp, synthetic construct
  misc_feature 1..80: note = Artificially Synthesized Probe
  source 1..80: mol_type = other DNA
tagtattgccgggtgcagtggctcacgcctctaatcccagcactttgggacgccgaggtgggcgaatcacaaggtcagga

SEQ ID NO: 98806 - DNA, 80 bp, synthetic construct
  misc_feature 1..80: note = Artificially Synthesized Probe
  source 1..80: mol_type = other DNA
aagatcaggccactgcactccagcccaagggacagagtgagactctgtctcaaataataataataataataactagtggc

SEQ ID NO: 98807 - DNA, 80 bp, synthetic construct
  misc_feature 1..80: note = Artificially Synthesized Probe
  source 1..80: mol_type = other DNA
ccttttaagggctcacaacactaaagactgcgcatgaaagggtcatgattgagcaatctaggggatacataacaggggtt

SEQ ID NO: 98808 - DNA, 80 bp, synthetic construct; identical to SEQ ID NO: 34905
  misc_feature 1..80: note = Artificially Synthesized Probe
  source 1..80: mol_type = other DNA

SEQ ID NO: 98809 - DNA, 80 bp, synthetic construct
  misc_feature 1..80: note = Artificially Synthesized Probe
  source 1..80: mol_type = other DNA
gattacaggcgcacgccaccatgcccggctaatttttgtatttttaatagagacggggtttcaccatgttggccaggctg

SEQ ID NO: 98810 - DNA, 80 bp, synthetic construct
  misc_feature 1..80: note = Artificially Synthesized Probe
  source 1..80: mol_type = other DNA
ccagcactttgggaggctgaggcaggtggatcacaaggtcagagtggatagcactttaggaggttgaggtgggaggatcc

SEQ ID NO: 98811 - DNA, 80 bp, synthetic construct
  misc_feature 1..80: note = Artificially Synthesized Probe
  source 1..80: mol_type = other DNA
tgcaatggctcacctctgtaatcccaccactttgggaggccgaggcaggtggctcacctgaggtcaggagttcaagacta

SEQ ID NO: 98812 - DNA, 80 bp, synthetic construct
  misc_feature 1..80: note = Artificially Synthesized Probe
  source 1..80: mol_type = other DNA
ggaggcaagcacacctcctcatcctctcatggatgtctgtctgtagaaagtaaatggagacagcttcattttacccaact

SEQ ID NO: 98813 - DNA, 80 bp, synthetic construct; identical to SEQ ID NO: 34906
  misc_feature 1..80: note = Artificially Synthesized Probe
  source 1..80: mol_type = other DNA

SEQ ID NO: 98814 - DNA, 80 bp, synthetic construct
  misc_feature 1..80: note = Artificially Synthesized Probe
  source 1..80: mol_type = other DNA
caacctctgcttcccgggttcaagcaattctcctccctcagcctcctgggtagctgggattacaggtgcctgccgccaca

SEQ ID NO: 98815 - DNA, 80 bp, synthetic construct
  misc_feature 1..80: note = Artificially Synthesized Probe
  source 1..80: mol_type = other DNA
atccttctccccagccacccatgagttatgtgaccttggggttgctacttaacatttcagtctcaatttcctcaatagaa

SEQ ID NO: 98816 - DNA, 80 bp, synthetic construct
  misc_feature 1..80: note = Artificially Synthesized Probe
  source 1..80: mol_type = other DNA
gcctcccaagtagctgggactacaggcacccgccaccgtgcccagctaatttttttaatttttagtagagacggggtttc

SEQ ID NO: 98817 - DNA, 80 bp, synthetic construct; identical to SEQ ID NO: 34907
  misc_feature 1..80: note = Artificially Synthesized Probe
  source 1..80: mol_type = other DNA

SEQ ID NO: 98818 - DNA, 80 bp, synthetic construct
  misc_feature 1..80: note = Artificially Synthesized Probe
  source 1..80: mol_type = other DNA
gagacccagtctctagttaaaaaagagggggagtgggccaggcacagtgtctcacgcctgtaattccagcactttgggag

SEQ ID NO: 98819 - DNA, 80 bp, synthetic construct
  misc_feature 1..80: note = Artificially Synthesized Probe
  source 1..80: mol_type = other DNA
gttgcagtgagccaagatcatgccactgcactccagcctgggcaacaacagagagacttcatctctaaataaataaataa

SEQ ID NO: 98820 - DNA, 80 bp, synthetic construct
  misc_feature 1..80: note = Artificially Synthesized Probe
  source 1..80: mol_type = other DNA
gaagagcctggccagcatggtgaaaacctatctgtactaaaaattagcctggcatggtggcaggtgcctgtaggaggctg

SEQ ID NO: 98821 - DNA, 80 bp, synthetic construct; identical to SEQ ID NO: 34908
  misc_feature 1..80: note = Artificially Synthesized Probe
  source 1..80: mol_type = other DNA

SEQ ID NO: 98822 - DNA, 80 bp, synthetic construct
  misc_feature 1..80: note = Artificially Synthesized Probe
  source 1..80: mol_type = other DNA
ctgggctacaagaacaaaactccgtctcaaaaaaaaaaaaagaaaaagaaaaaaattagctggacatgttggcatgcctc

SEQ ID NO: 98823 - DNA, 80 bp, synthetic construct
  misc_feature 1..80: note = Artificially Synthesized Probe
  source 1..80: mol_type = other DNA
aatcacaggaaaccggcaggcagaggttgcagtgagctgagatcgcgccattgcactccagcctgggcgacaagagcaaa

SEQ ID NO: 98824 - DNA, 80 bp, synthetic construct
  misc_feature 1..80: note = Artificially Synthesized Probe
  source 1..80: mol_type = other DNA
ctggagtgcaatggcacgatctcagctcactgcaacctctgcctcccaggttccagccattttcctgcctcagcctccag

SEQ ID NO: 98825 - DNA, 80 bp, synthetic construct
  misc_feature 1..80: note = Artificially Synthesized Probe
  source 1..80: mol_type = other DNA
aatcaccacgcccggcccctcattttcttttctttctttctttcttttttgtttgtttgtttttgagacagagtcttgct

SEQ ID NO: 98826 - DNA, 80 bp, synthetic construct
  misc_feature 1..80: note = Artificially Synthesized Probe
  source 1..80: mol_type = other DNA
cacgcccggctaattttttgtatttttagtagagacggggtttcaccgtgttagccaggatggtctccatctcctgacct

SEQ ID NO: 98827 - DNA, 80 bp, synthetic construct
  misc_feature 1..80: note = Artificially Synthesized Probe
  source 1..80: mol_type = other DNA
ctcagacaggttttctaaatatgccttgccttcattttctcaaggaaagtgaaaaatgggtaggatcatggcaatcacta

SEQ ID NO: 98828 - DNA, 80 bp, synthetic construct
  misc_feature 1..80: note = Artificially Synthesized Probe
  source 1..80: mol_type = other DNA
aaaaaatacaaaaatctagtcaggcgtgatggcgtatgcctgtagccttcagtaagctatgattgtgccactgcacacca

SEQ ID NO: 98829 - DNA, 80 bp, synthetic construct
  misc_feature 1..80: note = Artificially Synthesized Probe
  source 1..80: mol_type = other DNA
ggtcaagagtttgagaccagcctggccaacatagtgaaaccccatctctactaaaaatacaaaaaaaaggctaggcgcag

SEQ ID NO: 98830 - DNA, 80 bp, synthetic construct
  misc_feature 1..80: note = Artificially Synthesized Probe
  source 1..80: mol_type = other DNA
tagcgtcatgtgaagggggtgcgtgactcgtgcagaatctcccaaaaatagtgagaaaaccagtgtcaaatcctacctct

SEQ ID NO: 98831 - DNA, 80 bp, synthetic construct
  misc_feature 1..80: note = Artificially Synthesized Probe
  source 1..80: mol_type = other DNA
ttcaggaggctgaggcaggagaatcgcttgaactctggaggcggaggttgcagtgagccaagattgcgccactgcactcc

SEQ ID NO: 98832 - DNA, 80 bp, synthetic construct; identical to SEQ ID NO: 34910
  misc_feature 1..80: note = Artificially Synthesized Probe
  source 1..80: mol_type = other DNA

SEQ ID NO: 98833 - DNA, 80 bp, synthetic construct
  misc_feature 1..80: note = Artificially Synthesized Probe
  source 1..80: mol_type = other DNA
agtcttatttatatggtgtttttttttttttttttttttttgagatggagccttgctctgtcgcccaggctggagtgcag

SEQ ID NO: 98834 - DNA, 80 bp, synthetic construct; identical to SEQ ID NO: 34872
  misc_feature 1..80: note = Artificially Synthesized Probe
  source 1..80: mol_type = other DNA

SEQ ID NO: 98835 - DNA, 80 bp, synthetic construct
  misc_feature 1..80: note = Artificially Synthesized Probe
  source 1..80: mol_type = other DNA
tctcgatctcctgacctcgtgatccacctgcctcggcctcccaaagtgctgggattacaggcgtgagccactgtgcccgg

SEQ ID NO: 98836 - DNA, 80 bp, synthetic construct
  misc_feature 1..80: note = Artificially Synthesized Probe
  source 1..80: mol_type = other DNA
aaattaaccaggcgttgtggcgcatgcttgtaatctcagctactcgggaggctgaggcaggggaatcacttgaagccggc

SEQ ID NO: 98837 - DNA, 80 bp, synthetic construct
  misc_feature 1..80: note = Artificially Synthesized Probe
  source 1..80: mol_type = other DNA
acttgaaatacggttggatttttattaataatatacctggggtgatgggagaaggtagccaatcacagctgaggcttcta

SEQ ID NO: 98838 - DNA, 80 bp, synthetic construct; identical to SEQ ID NO: 34911
  misc_feature 1..80: note = Artificially Synthesized Probe
  source 1..80: mol_type = other DNA

SEQ ID NO: 98839 - DNA, 80 bp, synthetic construct
  misc_feature 1..80: note = Artificially Synthesized Probe
  source 1..80: mol_type = other DNA
ttaatagagctttctcaacctgcagccctcatctccgccggcgagtagggccaggtgttgggaggtgagtagctctccgg

SEQ ID NO: 98840 - DNA, 80 bp, synthetic construct
  misc_feature 1..80: note = Artificially Synthesized Probe
  source 1..80: mol_type = other DNA
cacgccattctcctgcctcagcctcccgagtagctgggactacaggcgcccgccaccacgcccggctaattttttgtatt

SEQ ID NO: 98841 - DNA, 80 bp, synthetic construct
  misc_feature 1..80: note = Artificially Synthesized Probe
  source 1..80: mol_type = other DNA
aaaaatacaaaaattaaccaggcgttgtggcgcatgcttgtaatctcagctactcgggaggctgaggcaggggaatcact

SEQ ID NO: 98842 - DNA, 80 bp, synthetic construct
  misc_feature 1..80: note = Artificially Synthesized Probe
  source 1..80: mol_type = other DNA
ttgatatttcacttgaaatacggttggatttttattaataatatacctggggtgatgggagaaggtagccaatcacagct

SEQ ID NO: 98843 - DNA, 80 bp, synthetic construct
  misc_feature 1..80: note = Artificially Synthesized Probe
  source 1..80: mol_type = other DNA
gtgctttgaaatgaggctccacataggtaagtttaacaggcagtcaagatggaggaccacaggtggagatccggaagctc

SEQ ID NO: 98844 - DNA, 80 bp, synthetic construct
  misc_feature 1..80: note = Artificially Synthesized Probe
  source 1..80: mol_type = other DNA
gaaatccacgcattcactgagcaggtagtggctcaagcgtgtaatcccaacacttcgggaggccaaggcgggtggatcac

SEQ ID NO: 98845 - DNA, 80 bp, synthetic construct
  misc_feature 1..80: note = Artificially Synthesized Probe
  source 1..80: mol_type = other DNA
ccaggccaacatggcaaaaccccatctctacaaaaaattagccatgcatggtggtgtgtgcctttaatgctagctacttg

SEQ ID NO: 98846 - DNA, 80 bp, synthetic construct
  misc_feature 1..80: note = Artificially Synthesized Probe
  source 1..80: mol_type = other DNA
taaaatgaaaatacaaaaattagccaggtatggtggaaccacctataattccagctactcgagaggcaggagaatcgcct

SEQ ID NO: 98847 - DNA, 80 bp, synthetic construct
  misc_feature 1..80: note = Artificially Synthesized Probe
  source 1..80: mol_type = other DNA
gaaatccttgtcctcagagtttttagtgacagcagacatctcgatatgttctattgaagacaatggatgatggtattaaa

SEQ ID NO: 98848 - DNA, 80 bp, synthetic construct; identical to SEQ ID NO: 34873
  misc_feature 1..80: note = Artificially Synthesized Probe
  source 1..80: mol_type = other DNA

SEQ ID NO: 98849 - DNA, 80 bp, synthetic construct
  misc_feature 1..80: note = Artificially Synthesized Probe
  source 1..80: mol_type = other DNA
cttggctctctgcaacctccagctcccaagttcaagcaattctcatgcctcaggctcctgagtaactgtgattacaggtg

SEQ ID NO: 98850 - DNA, 80 bp, synthetic construct
  misc_feature 1..80: note = Artificially Synthesized Probe
  source 1..80: mol_type = other DNA
gagattacaggaacaagacaccaggtaatccacccgtttgcattgagcttttgagtctttggaaataaaggtatcacggt

SEQ ID NO: 98851 - DNA, 80 bp, synthetic construct
  misc_feature 1..80: note = Artificially Synthesized Probe
  source 1..80: mol_type = other DNA
cctggtctctactaaaaatacaaaaattagctgggtatggtggtgcacgcctgtaatcccaactactcagctcaatcagg

SEQ ID NO: 98852 - DNA, 80 bp, synthetic construct; identical to SEQ ID NO: 34874
  misc_feature 1..80: note = Artificially Synthesized Probe
  source 1..80: mol_type = other DNA

SEQ ID NO: 98853 - DNA, 80 bp, synthetic construct
  misc_feature 1..80: note = Artificially Synthesized Probe
  source 1..80: mol_type = other DNA
ctgattactggatcccagcagaagcagcatgctgctgaagtccaggtcactgggggccattgttatatatatttcacttc

SEQ ID NO: 98854 - DNA, 80 bp, synthetic construct
  misc_feature 1..80: note = Artificially Synthesized Probe
  source 1..80: mol_type = other DNA
atattcagtttctggaggggtttgatcttaaaactggatccgaagtgatacagtctgagatattgaaaacatagaaattg

SEQ ID NO: 98855 - DNA, 80 bp, synthetic construct
  misc_feature 1..80: note = Artificially Synthesized Probe
  source 1..80: mol_type = other DNA
agtcccagctactcaggaggctgaggcaggagaatagcgagaacccgggaggaagaggttgcagtaagccgagatcgcgc

SEQ ID NO: 98856 - DNA, 80 bp, synthetic construct
  misc_feature 1..80: note = Artificially Synthesized Probe
  source 1..80: mol_type = other DNA
aggtgggaggattccttgagcaccagaattcaaaaccagcccgggaaagatgacaagacctcatctctacagaaaacagt

SEQ ID NO: 98857 - DNA, 80 bp, synthetic construct; identical to SEQ ID NO: 34875
  misc_feature 1..80: note = Artificially Synthesized Probe
  source 1..80: mol_type = other DNA

SEQ ID NO: 98858 - DNA, 80 bp, synthetic construct
  misc_feature 1..80: note = Artificially Synthesized Probe
  source 1..80: mol_type = other DNA
ataatcaaaggaagagaagcctgttatccctctggctaacgccctgtgaagcagttatttccaacactatataccttcca

SEQ ID NO: 98859 - DNA, 80 bp, synthetic construct
  misc_feature 1..80: note = Artificially Synthesized Probe
  source 1..80: mol_type = other DNA
ataaccagacttggtggtgcacgcctgtagtgccagctactcagaagactgaggcaggagaatcgcttgaatccgggagg

SEQ ID NO: 98860 - DNA, 80 bp, synthetic construct; identical to SEQ ID NO: 34876
  misc_feature 1..80: note = Artificially Synthesized Probe
  source 1..80: mol_type = other DNA

SEQ ID NO: 98861 - DNA, 80 bp, synthetic construct
  misc_feature 1..80: note = Artificially Synthesized Probe
  source 1..80: mol_type = other DNA
gttttctaaaaagaaatttagacccacacaatggggatccttataagtctaagaaaaaaaagattatggccaggcacggt

SEQ ID NO: 98862 - DNA, 80 bp, synthetic construct
  misc_feature 1..80: note = Artificially Synthesized Probe
  source 1..80: mol_type = other DNA
tttgggagaccaaggtgggtgaatcacaagatcaggagttcaagaccagcctggccaaagtggtgaaaccccatctttac

SEQ ID NO: 98863 - DNA, 80 bp, synthetic construct
  misc_feature 1..80: note = Artificially Synthesized Probe
  source 1..80: mol_type = other DNA
ggcacatgcctgtaatcccagctactcaggaggctgaggcaggagaatctcttgaactggggagacggaggttgtggtga

SEQ ID NO: 98864 - DNA, 80 bp, synthetic construct
  misc_feature 1..80: note = Artificially Synthesized Probe
  source 1..80: mol_type = other DNA
gagccaagatcgcaccactgcactccagcctggtgacagagagagactgttaaaaaaaaaaaaaaaacatccaaatggcc

SEQ ID NO: 98865 - DNA, 80 bp, synthetic construct; identical to SEQ ID NO: 34877
  misc_feature 1..80: note = Artificially Synthesized Probe
  source 1..80: mol_type = other DNA

SEQ ID NO: 98866 - DNA, 80 bp, synthetic construct
  misc_feature 1..80: note = Artificially Synthesized Probe
  source 1..80: mol_type = other DNA
aaaaattagccaggcatggtggagggcacctgtaatcccagctacttgggaggctgaggcaggagaatcgcttgaacctg

SEQ ID NO: 98867 - DNA, 80 bp, synthetic construct
  misc_feature 1..80: note = Artificially Synthesized Probe
  source 1..80: mol_type = other DNA
atttttctaaccataattttaatgtgaacaggtagctcacgctgggcttctttccatataacaagattcagccaactata

SEQ ID NO: 98868 - DNA, 80 bp, synthetic construct
  misc_feature 1..80: note = Artificially Synthesized Probe
  source 1..80: mol_type = other DNA
caagcgattctcctacctcagccttctgagtagctggtactataggcacgcaccaccaagcctggttaatttttgtattt

SEQ ID NO: 98869 - DNA, 80 bp, synthetic construct; identical to SEQ ID NO: 34878
  misc_feature 1..80: note = Artificially Synthesized Probe
  source 1..80: mol_type = other DNA

SEQ ID NO: 98870 - DNA, 80 bp, synthetic construct
  misc_feature 1..80: note = Artificially Synthesized Probe
  source 1..80: mol_type = other DNA
cttccaggttcacgccattctcctgtctcatcctcccaagtagctgggactacaggcatccgccaccacacctggctaat

SEQ ID NO: 98871 - DNA, 80 bp, synthetic construct
  misc_feature 1..80: note = Artificially Synthesized Probe
  source 1..80: mol_type = other DNA
tttaaaagttacatttgaaatgaattaacaagtactttcatgtctctcctgcttgaattcatgtgcacacacacacacac

SEQ ID NO: 98872 - DNA, 80 bp, synthetic construct; identical to SEQ ID NO: 34950
  misc_feature 1..80: note = Artificially Synthesized Probe
  source 1..80: mol_type = other DNA

SEQ ID NO: 98873 - DNA, 80 bp, synthetic construct
  misc_feature 1..80: note = Artificially Synthesized Probe
  source 1..80: mol_type = other DNA
gaaaggttattttggaaaacacaaagggaggtactttcacttcctccttttagcaggaactttaggaggtactttcatgt

SEQ ID NO: 98874 - DNA, 80 bp, synthetic construct; identical to SEQ ID NO: 34961
  misc_feature 1..80: note = Artificially Synthesized Probe
  source 1..80: mol_type = other DNA

SEQ ID NO: 98875 - DNA, 80 bp, synthetic construct
  misc_feature 1..80: note = Artificially Synthesized Probe
  source 1..80: mol_type = other DNA
cagagatgtaaatacaaataaagcaaaataaaacattaagtggccataaaaaagggaacaccaacaaaaaacactctcag

SEQ ID NO: 98876 - DNA, 80 bp, synthetic construct
  misc_feature 1..80: note = Artificially Synthesized Probe
  source 1..80: mol_type = other DNA
gaggaggaagggagaaaattttgagccaagtgtgtggaagttggcctctgctaagcacatctgaaggtatccaaggatac

SEQ ID NO: 98877 - DNA, 80 bp, synthetic construct; identical to SEQ ID NO: 34951
  misc_feature 1..80: note = Artificially Synthesized Probe
  source 1..80: mol_type = other DNA

SEQ ID NO: 98878 - DNA, 80 bp, synthetic construct
  misc_feature 1..80: note = Artificially Synthesized Probe
  source 1..80: mol_type = other DNA
tattctcttctctaggaggaaattatcaacttaactgaaaggcctagagcctttccaattgggagacaccttttctgtta

SEQ ID NO: 98879 - DNA, 80 bp, synthetic construct; identical to SEQ ID NO: 34962
  misc_feature 1..80: note = Artificially Synthesized Probe
  source 1..80: mol_type = other DNA

SEQ ID NO: 98880 - DNA, 80 bp, synthetic construct
  misc_feature 1..80: note = Artificially Synthesized Probe
  source 1..80: mol_type = other DNA
acaaatgaaatgactcgagctattaccacagtatttctagagacgtgttctgctgcagggccctcgcaaggctctttcct

SEQ ID NO: 98881 - DNA, 80 bp, synthetic construct
  misc_feature 1..80: note = Artificially Synthesized Probe
  source 1..80: mol_type = other DNA
agaagtgttcagctgcagcagtagtgcccaggcgctgctgccccagagcccacacacagagcacaagggcaggctggacg

SEQ ID NO: 98882 - DNA, 80 bp, synthetic construct
  misc_feature 1..80: note = Artificially Synthesized Probe
  source 1..80: mol_type = other DNA
tctgctactgtccccaccttcttggactctttttcagtggtaggaagaacagcagcagagccgtggacataccaaggtcc

SEQ ID NO: 98883 - DNA, 80 bp, synthetic construct; identical to SEQ ID NO: 34963
  misc_feature 1..80: note = Artificially Synthesized Probe
  source 1..80: mol_type = other DNA

SEQ ID NO: 98884 - DNA, 80 bp, synthetic construct
  misc_feature 1..80: note = Artificially Synthesized Probe
  source 1..80: mol_type = other DNA
tattgtagcactatttacaatagcaaagacttggaaccaacccaaatgcccatcagtgatagactggataaagaaaatgt

SEQ ID NO: 98885 - DNA, 80 bp, synthetic construct
  misc_feature 1..80: note = Artificially Synthesized Probe
  source 1..80: mol_type = other DNA
aatgagaacacatggacacatggaggggaacaacacacaccagggcctgttgggggtggggggcaaggggagggcaagca

SEQ ID NO: 98886 - DNA, 80 bp, synthetic construct
  misc_feature 1..80: note = Artificially Synthesized Probe
  source 1..80: mol_type = other DNA
tagatggcctcttatgcatcaaagaaaggtttgacaagagtaaggaaaatcacacatgcaaattcctcttctattaggag

SEQ ID NO: 98887 - DNA, 80 bp, synthetic construct; identical to SEQ ID NO: 34964
  misc_feature 1..80: note = Artificially Synthesized Probe
  source 1..80: mol_type = other DNA

SEQ ID NO: 98888 - DNA, 80 bp, synthetic construct
  misc_feature 1..80: note = Artificially Synthesized Probe
  source 1..80: mol_type = other DNA
cagatagttccttcatattagcatggatcctctccagctgccatccctctgttcactgggtctcactaaggtcacctgta

SEQ ID NO: 98889 - DNA, 80 bp, synthetic construct
  misc_feature 1..80: note = Artificially Synthesized Probe
  source 1..80: mol_type = other DNA
gaggccatcggcaagtggcacagttagagaccgagcctcaccacgagcttcggagagctgtcagcccaggagcctgagct

SEQ ID NO: 98890 - DNA, 80 bp, synthetic construct
  misc_feature 1..80: note = Artificially Synthesized Probe
  source 1..80: mol_type = other DNA
aagtaccttcagaaaccccatcagcaacgttcctgtcacataaagaggacgttacccaaccaagctctgtggctacggcc

SEQ ID NO: 98891 - DNA, 80 bp, synthetic construct
  misc_feature 1..80: note = Artificially Synthesized Probe
  source 1..80: mol_type = other DNA
gacctcagttgccccatctataaaatggggataattagagcattccgtcatggagttgtgaggattcactgagttaacag

SEQ ID NO: 98892 - DNA, 80 bp, synthetic construct; identical to SEQ ID NO: 34965
  misc_feature 1..80: note = Artificially Synthesized Probe
  source 1..80: mol_type = other DNA

SEQ ID NO: 98893 - DNA, 80 bp, synthetic construct
  misc_feature 1..80: note = Artificially Synthesized Probe
  source 1..80: mol_type = other DNA
acccctactatattttttaaaagttgtacaaagagagagaagggagagaaagtgagagagcttaactgagcttaaatgtt

SEQ ID NO: 98894 - DNA, 80 bp, synthetic construct
  misc_feature 1..80: note = Artificially Synthesized Probe
  source 1..80: mol_type = other DNA
attaggatgggtactgtcaaaaagagaaaatagcaagtgttggcaaggatgtggagaaactagaatgaactgttggtggg

SEQ ID NO: 98895 - DNA, 80 bp, synthetic construct
  misc_feature 1..80: note = Artificially Synthesized Probe
  source 1..80: mol_type = other DNA
ccagcgtgagcgacgcagaagacgggtgatttctgcatttccatctgaggtaccgggttcatctcactagggagcgccag

SEQ ID NO: 98896 - DNA, 80 bp, synthetic construct; identical to SEQ ID NO: 34966
  misc_feature 1..80: note = Artificially Synthesized Probe
  source 1..80: mol_type = other DNA

SEQ ID NO: 98897 - DNA, 80 bp, synthetic construct
  misc_feature 1..80: note = Artificially Synthesized Probe
  source 1..80: mol_type = other DNA
cctgcctctgtaggctccacctctgggggcagggcacagacaaacaaaaagacagcagtaacctctgcagacttaagtgt

SEQ ID NO: 98898 - DNA, 80 bp, synthetic construct
  misc_feature 1..80: note = Artificially Synthesized Probe
  source 1..80: mol_type = other DNA
gcagggtattccaacagacctgcagctgagggtcctgtctgttagaaggaaaactaacaaccagaaaggacatctacact

SEQ ID NO: 98899 - DNA, 80 bp, synthetic construct
  misc_feature 1..80: note = Artificially Synthesized Probe
  source 1..80: mol_type = other DNA
cttcaatttcctttcctatattctcctccatgtgacctctacatctgagatttcctccaggtttggggctaagccctttt

SEQ ID NO: 98900 - DNA, 80 bp, synthetic construct
  misc_feature 1..80: note = Artificially Synthesized Probe
  source 1..80: mol_type = other DNA
tggagaatgattttgacgagctgagagaagaaggcttcagacgatcaaattactctgagctacgggaggacattcaaacc

SEQ ID NO: 98901 - DNA, 80 bp, synthetic construct
  misc_feature 1..80: note = Artificially Synthesized Probe
  source 1..80: mol_type = other DNA
aagaaagggtatcagcaatggaagatgaaatgaatgaaatgaagcgagaagggaagtttagagaaaaaagaataaaaaga

SEQ ID NO: 98902 - DNA, 80 bp, synthetic construct
  misc_feature 1..80: note = Artificially Synthesized Probe
  source 1..80: mol_type = other DNA
ttcagattcaggaaatacagagaacgccacaaagatactcctcgagaagagcaactccaagacacataattgtcagattc

SEQ ID NO: 98903 - DNA, 80 bp, synthetic construct
  misc_feature 1..80: note = Artificially Synthesized Probe
  source 1..80: mol_type = other DNA
agagagtgggggccaatattcaacattcttaaagaaaagaattttcaacccagaatttcatatccagccaaactaagctt

SEQ ID NO: 98904 - DNA, 80 bp, synthetic construct
  misc_feature 1..80: note = Artificially Synthesized Probe
  source 1..80: mol_type = other DNA
tcgagactaggaagaaactgcatcaactaatgagcaaaatcgccagctaacatcataatgacaggatcaaattcacacat

SEQ ID NO: 98905 - DNA, 80 bp, synthetic construct
  misc_feature 1..80: note = Artificially Synthesized Probe
  source 1..80: mol_type = other DNA
atctaccaagccaatggaaaacaaaaaaaggcaggggttgcaatcctagtctctgataaaacagactttaaaccaacaaa

SEQ ID NO: 98906 - DNA, 80 bp, synthetic construct
  misc_feature 1..80: note = Artificially Synthesized Probe
  source 1..80: mol_type = other DNA
ataatgggagactttaacaccccactgtcaacattagacagatcaatgagacagaaagtcaacaaggatacccaggaatt

SEQ ID NO: 98907 - DNA, 80 bp, synthetic construct
  misc_feature 1..80: note = Artificially Synthesized Probe
  source 1..80: mol_type = other DNA
attataacaaactatctctcagaccacagtgcaatcaaactagaactcaggattaagaatctcactcaaagccgctcaac

SEQ ID NO: 98908 - DNA, 80 bp, synthetic construct; identical to SEQ ID NO: 30694
  misc_feature 1..80: note = Artificially Synthesized Probe
  source 1..80: mol_type = other DNA

SEQ ID NO: 98909 - DNA, 80 bp, synthetic construct
  misc_feature 1..80: note = Artificially Synthesized Probe
  source 1..80: mol_type = other DNA
aagaaaaaaagagagaagaatcaaatagacacaataaaaaatgataaaggggatatcaccaccgatcccacagaaataca

SEQ ID NO: 98910 - DNA, 80 bp, synthetic construct
  misc_feature 1..80: note = Artificially Synthesized Probe
  source 1..80: mol_type = other DNA
ggttagtaacctgggggtcaacctggacaccttccttctcatccccatgttccttgtatcacaaagttctcccctaattc

SEQ ID NO: 98911 - DNA, 80 bp, synthetic construct; identical to SEQ ID NO: 26815
  misc_feature 1..80: note = Artificially Synthesized Probe
  source 1..80: mol_type = other DNA

SEQ ID NO: 98912 - DNA, 80 bp, synthetic construct
  misc_feature 1..80: note = Artificially Synthesized Probe
  source 1..80: mol_type = other DNA
atcctcaataaaatactggcaaaccgaatccagcagcacatcaaaaagcttatccaccatgatcaagtgggcttcatccc

SEQ ID NO: 98913 - DNA, 80 bp, synthetic construct
  misc_feature 1..80: note = Artificially Synthesized Probe
  source 1..80: mol_type = other DNA
attgatgggacgtatttcaaaataataagagctatctatgacaaacccacagccaatatcatactgaatgggcaaaaact

SEQ ID NO: 98914 - DNA, 80 bp, synthetic construct; identical to SEQ ID NO: 30693
  misc_feature 1..80: note = Artificially Synthesized Probe
  source 1..80: mol_type = other DNA

SEQ ID NO: 98915 - DNA, 80 bp, synthetic construct
  misc_feature 1..80: note = Artificially Synthesized Probe
  source 1..80: mol_type = other DNA
aaggagaactacaaaccactgctcaaggaaataaaagaggacacaaacaaatggaagaacattccatgctcatgggtagg

SEQ ID NO: 98916 - DNA, 80 bp, synthetic construct
  misc_feature 1..80: note = Artificially Synthesized Probe
  source 1..80: mol_type = other DNA
agccaaaagaacaaagctggaggcatcacactacctgacttcaaactatactacaaggctacagtaaccaaaacagcatg

SEQ ID NO: 98917 - DNA, 80 bp, synthetic construct
  misc_feature 1..80: note = Artificially Synthesized Probe
  source 1..80: mol_type = other DNA
gccatatgtagaaagctgaaactggatcccttccttacaccttatacaaaaatcaattcaagatggattaaagatttaaa

SEQ ID NO: 98918 - DNA, 80 bp, synthetic construct
  misc_feature 1..80: note = Artificially Synthesized Probe
  source 1..80: mol_type = other DNA
gcaaaagaaactaccatcagagtgaacaggcaacctacaacatgggagaaaattttcgcaacctactcatctgacaaagg

SEQ ID NO: 98919 - DNA, 80 bp, synthetic construct
  misc_feature 1..80: note = Artificially Synthesized Probe
  source 1..80: mol_type = other DNA
agagaaatgcaaatcaaaaccactatgagatatcatctcacaccagttagaatggcaatcattaaaaagtcaggaaacag

SEQ ID NO: 98920 - DNA, 80 bp, synthetic construct
  misc_feature 1..80: note = Artificially Synthesized Probe
  source 1..80: mol_type = other DNA
aatgagtataaatcatgctgctataaagacacatgcacacgtatgtttattgtggcactattcacaatagcaaagacttg

SEQ ID NO: 98921 - DNA, 80 bp, synthetic construct; identical to SEQ ID NO: 34952
  misc_feature 1..80: note = Artificially Synthesized Probe
  source 1..80: mol_type = other DNA

SEQ ID NO: 98922 - DNA, 80 bp, synthetic construct
  misc_feature 1..80: note = Artificially Synthesized Probe
  source 1..80: mol_type = other DNA
caaaaaaccaaacaccgcatattctcactcataggtgggaattgaacaatgagatcacatggacacaggaaggggaatat

SEQ ID NO: 98923 - DNA, 80 bp, synthetic construct
  misc_feature 1..80: note = Artificially Synthesized Probe
  source 1..80: mol_type = other DNA
agagtataataaaaaaaaaaagaatctaaaaaaaaaaaaaaaaaaaaaaaagaattgaaggcagtccttgaagagacatt

SEQ ID NO: 98924 - DNA, 80 bp, synthetic construct; identical to SEQ ID NO: 34972
  misc_feature 1..80: note = Artificially Synthesized Probe
  source 1..80: mol_type = other DNA

SEQ ID NO: 98925 - DNA, 80 bp, synthetic construct
  misc_feature 1..80: note = Artificially Synthesized Probe
  source 1..80: mol_type = other DNA
ctgggcaacagagcgagactctgtcaaaaaaaaaaaaaaaaaaaaaaaaaaaggaaatcctgtcccatgcttccatgtgg

SEQ ID NO: 98926 - DNA, 80 bp, synthetic construct
  misc_feature 1..80: note = Artificially Synthesized Probe
  source 1..80: mol_type = other DNA
taatgggcacggtttcagtttcgcagcatggtgaaagctctccactatctctccccgacagcgagccccagtggtccttc

SEQ ID NO: 98927 - DNA, 80 bp, synthetic construct
  misc_feature 1..80: note = Artificially Synthesized Probe
  source 1..80: mol_type = other DNA
gttttttcccagtctgcagagagagtcacacacagtcagcctccagctatgcaggggctccaatgtgggtcaccctcctc

SEQ ID NO: 98928 - DNA, 80 bp, synthetic construct
  misc_feature 1..80: note = Artificially Synthesized Probe
  source 1..80: mol_type = other DNA
agctcagggacctgagccctccctggggtcctctaattgacctcagcagcatcactgacttccctcgggagacctgggag

SEQ ID NO: 98929 - DNA, 80 bp, synthetic construct; identical to SEQ ID NO: 34973
  misc_feature 1..80: note = Artificially Synthesized Probe
  source 1..80: mol_type = other DNA

SEQ ID NO: 98930 - DNA, 80 bp, synthetic construct
  misc_feature 1..80: note = Artificially Synthesized Probe
  source 1..80: mol_type = other DNA
gacatttaatctttgaacaacagaagggggtgatcaagagaatatactaaggaacctggtgcctaccccacttacttaag

SEQ ID NO: 98931 - DNA, 80 bp, synthetic construct
  misc_feature 1..80: note = Artificially Synthesized Probe
  source 1..80: mol_type = other DNA
tgtcattttaatagcccctgttttttgaagcatatggtgtctactgatttccaaagtctgggttgaaaggggaacacaca

SEQ ID NO: 98932 - DNA, 80 bp, synthetic construct; identical to SEQ ID NO: 34974
  misc_feature 1..80: note = Artificially Synthesized Probe
  source 1..80: mol_type = other DNA

SEQ ID NO: 98933 - DNA, 80 bp, synthetic construct
  misc_feature 1..80: note = Artificially Synthesized Probe
  source 1..80: mol_type = other DNA
ccctttgcacatgctgttccctacgcagaatactcacctcagctgactagctcctattcatccttcatggcttagtgtaa

SEQ ID NO: 98934 - DNA, 80 bp, synthetic construct
  misc_feature 1..80: note = Artificially Synthesized Probe
  source 1..80: mol_type = other DNA
aggcagctaagctcaggcttccagggttccacagccacacagagccctggagccgagtgtggcccggggtcgtttgcgtc

SEQ ID NO: 98935 - DNA, 80 bp, synthetic construct
  misc_feature 1..80: note = Artificially Synthesized Probe
  source 1..80: mol_type = other DNA
ggcaactgatgtggagctacttatagtctttcttaccacacttggtttgactgtttcatacattctgcgggagaaatatg

SEQ ID NO: 98936 - DNA, 80 bp, synthetic construct
  misc_feature 1..80: note = Artificially Synthesized Probe
  source 1..80: mol_type = other DNA
attaaatatatccccttatattctcgttgcatcccccaataaccagttgtaagcctacttgcctatactgggatcccagt

SEQ ID NO: 98937 - DNA, 80 bp, synthetic construct; identical to SEQ ID NO: 34975
  misc_feature 1..80: note = Artificially Synthesized Probe
  source 1..80: mol_type = other DNA

SEQ ID NO: 98938 - DNA, 80 bp, synthetic construct
  misc_feature 1..80: note = Artificially Synthesized Probe
  source 1..80: mol_type = other DNA
agatccagaagccttcaggccctggagttttctcaggtatagacgcccctggagaatggccacagcaatcagccaaatag

SEQ ID NO: 98939 - DNA, 80 bp, synthetic construct
  misc_feature 1..80: note = Artificially Synthesized Probe
  source 1..80: mol_type = other DNA
catttggatgccagggccacaggggcaagccatgccctatttctttggagggacagaatcacttcttcccaaggccagac

SEQ ID NO: 98940 - DNA, 80 bp, synthetic construct
  misc_feature 1..80: note = Artificially Synthesized Probe
  source 1..80: mol_type = other DNA
tatgtgtcagccagaccctgtacctggttctcgtatggtggagggcatgggtttggaaatgtcaggggctgcttttagtg

SEQ ID NO: 98941 - DNA, 80 bp, synthetic construct
  misc_feature 1..80: note = Artificially Synthesized Probe
  source 1..80: mol_type = other DNA
tggaaaaggctgtgagtcccactgtcaaaggagactgctcatgtcattctgtaaagtgtcagacagcaaatattttaggc

SEQ ID NO: 98942 - DNA, 80 bp, synthetic construct; identical to SEQ ID NO: 34976
  misc_feature 1..80: note = Artificially Synthesized Probe
  source 1..80: mol_type = other DNA

SEQ ID NO: 98943 - DNA, 80 bp, synthetic construct
  misc_feature 1..80: note = Artificially Synthesized Probe
  source 1..80: mol_type = other DNA
tctgaaatctaagcagcaatataattagtaatagccaagaagtgttcttaaaagattgaggcatgctctcaatctttgcc

SEQ ID NO: 98944 - DNA, 80 bp, synthetic construct
  misc_feature 1..80: note = Artificially Synthesized Probe
  source 1..80: mol_type = other DNA
ctacctacctctagacttttacatgagagaaataagcttgtaactcaccaacatttggggttttcgctctcagctaaaac

SEQ ID NO: 98945 - DNA, 80 bp, synthetic construct
  misc_feature 1..80: note = Artificially Synthesized Probe
  source 1..80: mol_type = other DNA
aagccatgttgttcaccactggatttttggtgctagcacagtccctgatgctcaagcgtttcgttattcaaggaataaat

SEQ ID NO: 98946 - DNA, 80 bp, synthetic construct
  misc_feature 1..80: note = Artificially Synthesized Probe
  source 1..80: mol_type = other DNA
ttgaaaagatggacagaggggtcgggtgcggcggctcatgcctgtaaccccaacattttggaaggccgaggcgggcggat

SEQ ID NO: 98947 - DNA, 80 bp, synthetic construct
  misc_feature 1..80: note = Artificially Synthesized Probe
  source 1..80: mol_type = other DNA
tgcagtgagctgagatcacgccactgcactccagcctgggcaacagagcgggactccatttgggggagaaaaaaaaaaga

SEQ ID NO: 98948 - DNA, 80 bp, synthetic construct; identical to SEQ ID NO: 34977
  misc_feature 1..80: note = Artificially Synthesized Probe
  source 1..80: mol_type = other DNA

SEQ ID NO: 98949 - DNA, 80 bp, synthetic construct
  misc_feature 1..80: note = Artificially Synthesized Probe
  source 1..80: mol_type = other DNA
tcacagaaagtcaccagtgccaactggcacaaggtctgctttctctgcagtaataaaagctcccatattccagaaacttt

SEQ ID NO: 98950 - DNA, 80 bp, synthetic construct
  misc_feature 1..80: note = Artificially Synthesized Probe
  source 1..80: mol_type = other DNA
tacagggttgtaaagagcattccattaggtaatatttgtaatgcacttcacccattctcaactaacattggtccctgtgg

SEQ ID NO: 98951 - DNA, 80 bp, synthetic construct; identical to SEQ ID NO: 34978
  misc_feature 1..80: note = Artificially Synthesized Probe
  source 1..80: mol_type = other DNA

SEQ ID NO: 98952 - DNA, 80 bp, synthetic construct
  misc_feature 1..80: note = Artificially Synthesized Probe
  source 1..80: mol_type = other DNA
gagggcgctgcagtcggccgagcaggcgttgcagtaggtcagcttgaggtagttggcgcagatgcccctggccgccagct

SEQ ID NO: 98953 - DNA, 80 bp, synthetic construct
  misc_feature 1..80: note = Artificially Synthesized Probe
  source 1..80: mol_type = other DNA
tctcctcagggctgccgcgggcaccagatgccgcaggagtttctgtttggctttggacaacagcccgcacaggaagaggt

SEQ ID NO: 98954 - DNA, 80 bp, synthetic construct
  misc_feature 1..80: note = Artificially Synthesized Probe
  source 1..80: mol_type = other DNA
caccctgtcgtccagcacgaggaagaaggctgtaaagaaggcctggagggtgaggtggaaaaactcataggactgctggt

SEQ ID NO: 98955 - DNA, 80 bp, synthetic construct; identical to SEQ ID NO: 34979
  misc_feature 1..80: note = Artificially Synthesized Probe
  source 1..80: mol_type = other DNA

SEQ ID NO: 98956 - DNA, 80 bp, synthetic construct
  misc_feature 1..80: note = Artificially Synthesized Probe
  source 1..80: mol_type = other DNA
cagaactcatcaagggacttcagacttccaagttattttcagaaaggaatgaggtagaaataagtgtcagtacagttaac

SEQ ID NO: 98957 - DNA, 80 bp, synthetic construct
  misc_feature 1..80: note = Artificially Synthesized Probe
  source 1..80: mol_type = other DNA
cagcaggcggtcctgcagggcccgctcggggaacatcctcctggcataggcgcgcaggtggctgggggagaagccccgga

SEQ ID NO: 98958 - DNA, 80 bp, synthetic construct
  misc_feature 1..80: note = Artificially Synthesized Probe
  source 1..80: mol_type = other DNA
caggtccaagtccgagtgcagctcgtccaggccatcgaaggtgaagagggccacgtgggggaagcgcagcaggaaggcaa

SEQ ID NO: 98959 - DNA, 80 bp, synthetic construct
  misc_feature 1..80: note = Artificially Synthesized Probe
  source 1..80: mol_type = other DNA
cagccgctgtagcagcatggacttgcccaccccagcatcacccaggatgaagatggtctcaccctgctcattgaggatgc

SEQ ID NO: 98960 - DNA, 80 bp, synthetic construct
  misc_feature 1..80: note = Artificially Synthesized Probe
  source 1..80: mol_type = other DNA
gtgtcgcagctgctgggtatacctgctcactggagggagggggtggcagggcacagcagcagggtgaggagagaggcaga

SEQ ID NO: 98961 - DNA, 80 bp, synthetic construct; identical to SEQ ID NO: 34980
  misc_feature 1..80: note = Artificially Synthesized Probe
  source 1..80: mol_type = other DNA

SEQ ID NO: 98962 - DNA, 80 bp, synthetic construct
  misc_feature 1..80: note = Artificially Synthesized Probe
  source 1..80: mol_type = other DNA
atcatgcagtctcaaactcccaggctcaagcaatcctcccacctcagcctcccaagtagctgggacacaggcatatgcca

SEQ ID NO: 98963 - DNA, 80 bp, synthetic construct
  misc_feature 1..80: note = Artificially Synthesized Probe
  source 1..80: mol_type = other DNA
agttgtgcaaacctcaccacagtccaggtctagaacatctctaccatcttcccagagttttctggagcctatttgtagcc

SEQ ID NO: 98964 - DNA, 80 bp, synthetic construct
  misc_feature 1..80: note = Artificially Synthesized Probe
  source 1..80: mol_type = other DNA
aattacactgtaaaagctagtaaagtagctggctaacggaaccaacagagaagtctttcgaaagaatgattcctcatggg

SEQ ID NO: 98965 - DNA, 80 bp, synthetic construct
  misc_feature 1..80: note = Artificially Synthesized Probe
  source 1..80: mol_type = other DNA
ccaacaaagccacagccttctcagagcccagtcccatgaagtcacacacagaggagcatgctctggaggctcccagaaca

SEQ ID NO: 98966 - DNA, 80 bp, synthetic construct; identical to SEQ ID NO: 34981
  misc_feature 1..80: note = Artificially Synthesized Probe
  source 1..80: mol_type = other DNA

SEQ ID NO: 98967 - DNA, 80 bp, synthetic construct
  misc_feature 1..80: note = Artificially Synthesized Probe
  source 1..80: mol_type = other DNA
tatgttctcacatgccttggactgccgctgtcctgacacatttttgagattgctgactggtggtctcttccagctgactt

SEQ ID NO: 98968 - DNA, 80 bp, synthetic construct
  misc_feature 1..80: note = Artificially Synthesized Probe
  source 1..80: mol_type = other DNA
ctggcactcaacggtgacagaatactttgcctagaatcaaacctggcaaggctttttaatttttttctttccttttttag

SEQ ID NO: 98969 - DNA, 80 bp, synthetic construct; identical to SEQ ID NO: 34982
  misc_feature 1..80: note = Artificially Synthesized Probe
  source 1..80: mol_type = other DNA

SEQ ID NO: 98970 - DNA, 80 bp, synthetic construct
  misc_feature 1..80: note = Artificially Synthesized Probe
  source 1..80: mol_type = other DNA
ctaaaatcaaaatagcacctgggcctgcttcctgaggtggcactcagggctggcccagccattaccaaaccccccagggc

SEQ ID NO: 98971 - DNA, 80 bp, synthetic construct
  misc_feature 1..80: note = Artificially Synthesized Probe
  source 1..80: mol_type = other DNA
gaggaagaactcggacacctcctcgcccttgctctgtaccaggtccagaattttgcggacctggaggtgacacaagcatg

SEQ ID NO: 98972 - DNA, 80 bp, synthetic construct
  misc_feature 1..80: note = Artificially Synthesized Probe
  source 1..80: mol_type = other DNA
tgagcaagaaataaaaccactcagctctaagaaaccaggaggcttccatgagcctaaaaataaaaaggacagacaaatag

SEQ ID NO: 98973 - DNA, 80 bp, synthetic construct
  misc_feature 1..80: note = Artificially Synthesized Probe
  source 1..80: mol_type = other DNA
gctgggattacaggcacccaccaccatgcccgactaatttttgtgtttttattagagacgggttttccccatgttggcca

SEQ ID NO: 98974 - DNA, 80 bp, synthetic construct; identical to SEQ ID NO: 34983
  misc_feature 1..80: note = Artificially Synthesized Probe
  source 1..80: mol_type = other DNA

SEQ ID NO: 98975 - DNA, 80 bp, synthetic construct
  misc_feature 1..80: note = Artificially Synthesized Probe
  source 1..80: mol_type = other DNA
tgtcattcctctaaccaagaaggaatttgtggtctccattttatttttcaggagataacgcaaagcgtaagtggaagtaa

SEQ ID NO: 98976 - DNA, 80 bp, synthetic construct
  misc_feature 1..80: note = Artificially Synthesized Probe
  source 1..80: mol_type = other DNA
gggatgctcttatgcttatgttctttttccctcctaatttaaaggggatctaaaaatgaagtgtctgggaaccaatacac

SEQ ID NO: 98977 - DNA, 80 bp, synthetic construct; identical to SEQ ID NO: 34953
  misc_feature 1..80: note = Artificially Synthesized Probe
  source 1..80: mol_type = other DNA

SEQ ID NO: 98978 - DNA, 80 bp, synthetic construct
  misc_feature 1..80: note = Artificially Synthesized Probe
  source 1..80: mol_type = other DNA
agcagggagaggcctcttctagctcccggggtccacacaatgccatgcccgtccctgtccccggggcaccttgtcaggct

SEQ ID NO: 98979 - DNA, 80 bp, synthetic construct; identical to SEQ ID NO: 34984
  misc_feature 1..80: note = Artificially Synthesized Probe
  source 1..80: mol_type = other DNA

SEQ ID NO: 98980 - DNA, 80 bp, synthetic construct
  misc_feature 1..80: note = Artificially Synthesized Probe
  source 1..80: mol_type = other DNA
agcaggaaggaaccatgcttaagacctttatctggccaggcaagttggctcatgactgtaatcccagcgctttgggaggc

SEQ ID NO: 98981 - DNA, 80 bp, synthetic construct
  misc_feature 1..80: note = Artificially Synthesized Probe
  source 1..80: mol_type = other DNA
gcacaagagttcaaggctgcagtgaacgatgatcacaccactgcactccagcctgggtgacagagcaaggccctgtctct

SEQ ID NO: 98982 - DNA, 80 bp, synthetic construct; identical to SEQ ID NO: 34985
  misc_feature 1..80: note = Artificially Synthesized Probe
  source 1..80: mol_type = other DNA

SEQ ID NO: 98983 - DNA, 80 bp, synthetic construct
  misc_feature 1..80: note = Artificially Synthesized Probe
  source 1..80: mol_type = other DNA
tgcccattttgggttgtgctataacctcttcccccgtgtccttgaccttcagcaaagtctgttatacacaagcaccctgg

SEQ ID NO: 98984 - DNA, 80 bp, synthetic construct
  misc_feature 1..80: note = Artificially Synthesized Probe
  source 1..80: mol_type = other DNA
ttcttgtctgggtaggaacagggacccaggctattttatttgggcattaaaaaacatttgggttcatctgagttatccca

SEQ ID NO: 98985 - DNA, 80 bp, synthetic construct
  misc_feature 1..80: note = Artificially Synthesized Probe
  source 1..80: mol_type = other DNA
ttgtctaggcaggaaaactcatgcatttcagagagagagtaaaaaaaaggtttttttgtagttcaaaaaaaagctcatag

SEQ ID NO: 98986 - DNA, 80 bp, synthetic construct; identical to SEQ ID NO: 34986
  misc_feature 1..80: note = Artificially Synthesized Probe
  source 1..80: mol_type = other DNA

SEQ ID NO: 98987 - DNA, 80 bp, synthetic construct
  misc_feature 1..80: note = Artificially Synthesized Probe
  source 1..80: mol_type = other DNA
ctgcaacatctgcctcctgagctcaagcaattctcctgcatcagccacccgagtagctagaactacaggcgggtgccacc

SEQ ID NO: 98988 - DNA, 80 bp, synthetic construct
  misc_feature 1..80: note = Artificially Synthesized Probe
  source 1..80: mol_type = other DNA
cctccagtgcttcccaggctgctgggcaggctgggcttcgcaggcacacaggccacaggtgtctgtttagatctgggctc

SEQ ID NO: 98989 - DNA, 80 bp, synthetic construct
  misc_feature 1..80: note = Artificially Synthesized Probe
  source 1..80: mol_type = other DNA
caattctatgacccactttaggatccttagctttagaaaatcggttcatttaaagcataccagctgacaatattaaattt

SEQ ID NO: 98990 - DNA, 80 bp, synthetic construct
  misc_feature 1..80: note = Artificially Synthesized Probe
  source 1..80: mol_type = other DNA
aatgaataaaattggcaagagaataattttaaaatctagtactcccaggtatcagactactctctgtaccttcttctttt

SEQ ID NO: 98991 - DNA, 80 bp, synthetic construct
  misc_feature 1..80: note = Artificially Synthesized Probe
  source 1..80: mol_type = other DNA
cacttttttgttgttcttgccataattgagtcacacctgtcctttatttgcttaaccttttgctttcaattgagttttga

SEQ ID NO: 98992 - DNA, 80 bp, synthetic construct; identical to SEQ ID NO: 34987
  misc_feature 1..80: note = Artificially Synthesized Probe
  source 1..80: mol_type = other DNA

SEQ ID NO: 98993 - DNA, 80 bp, synthetic construct
  misc_feature 1..80: note = Artificially Synthesized Probe
  source 1..80: mol_type = other DNA
tttactcactgcttctgtctcttccaagcctgcgattcccataaaaacagcaacttgtcttcccagatgttttctgtaat

SEQ ID NO: 98994 - DNA, 80 bp, synthetic construct
  misc_feature 1..80: note = Artificially Synthesized Probe
  source 1..80: mol_type = other DNA
tataatgtccagagccctggctgaagatttaatcaggtgtgcagagttagctcaattcagcaagaacttaacaaggtatg

SEQ ID NO: 98995 - DNA, 80 bp, synthetic construct
  misc_feature 1..80: note = Artificially Synthesized Probe
  source 1..80: mol_type = other DNA
caatcctttcctttctttgcttggtaaagggtgggtccagttgatgaagacggtctggtcctctcttccaggcaaagaga

SEQ ID NO: 98996 - DNA, 80 bp, synthetic construct; identical to SEQ ID NO: 34988
  misc_feature 1..80: note = Artificially Synthesized Probe
  source 1..80: mol_type = other DNA

SEQ ID NO: 98997 - DNA, 80 bp, synthetic construct
  misc_feature 1..80: note = Artificially Synthesized Probe
  source 1..80: mol_type = other DNA
agctgggggttgcacaggcatttcctctcaaccgctcttctttctagctttctgccctcagagagggttagtttccaggg

SEQ ID NO: 98998 - DNA, 80 bp, synthetic construct
  misc_feature 1..80: note = Artificially Synthesized Probe
  source 1..80: mol_type = other DNA
caggatggcggatcttcaaagggaaaaaggagaccatagagcagctctgttgaattgaaatatgacacagctttcctagt

SEQ ID NO: 98999 - DNA, 80 bp, synthetic construct; identical to SEQ ID NO: 34989
  misc_feature 1..80: note = Artificially Synthesized Probe
  source 1..80: mol_type = other DNA

SEQ ID NO: 99000 - DNA, 80 bp, synthetic construct
  misc_feature 1..80: note = Artificially Synthesized Probe
  source 1..80: mol_type = other DNA
aggcacatagcaccatgtcgggctaatttttgtagtgacggggtttcgcatgttgcccaggctggtctcaaactcctgtg

SEQ ID NO: 99001 - DNA, 80 bp, synthetic construct
  misc_feature 1..80: note = Artificially Synthesized Probe
  source 1..80: mol_type = other DNA
aagtgatcctcccacctcagcctcccaaagtgctgggattacaggtgtgagccactgcacccagcccatcaacaaaaaat

SEQ ID NO: 99002 - DNA, 80 bp, synthetic construct
  misc_feature 1..80: note = Artificially Synthesized Probe
  source 1..80: mol_type = other DNA
atcactaaaagctagggtgttgagacatcagagttcctgcctgctgcccttccatttgaaatactgatgccaggaatgat

SEQ ID NO: 99003 - DNA, 80 bp, synthetic construct
  misc_feature 1..80: note = Artificially Synthesized Probe
  source 1..80: mol_type = other DNA
ccatgcccagctaattttttgtatttttagtagggacgcggtttcaccgtgttagccaggatggtcttgatctcctgacc

SEQ ID NO: 99004 - DNA, 80 bp, synthetic construct; identical to SEQ ID NO: 34990
  misc_feature 1..80: note = Artificially Synthesized Probe
  source 1..80: mol_type = other DNA

SEQ ID NO: 99005 - DNA, 80 bp, synthetic construct
  misc_feature 1..80: note = Artificially Synthesized Probe
  source 1..80: mol_type = other DNA
acacaatatgtgtcaacagactctgaaaactttctatttagtaacttccccttctagaaacccgccttttgaaaagaatc

SEQ ID NO: 99006 - DNA, 80 bp, synthetic construct
  misc_feature 1..80: note = Artificially Synthesized Probe
  source 1..80: mol_type = other DNA
tcaacaataaatgccaatgaaacaagaatccatcatgaatgagtgtcacagatactacactgagtgagagaagccagact

SEQ ID NO: 99007 - DNA, 80 bp, synthetic construct
  misc_feature 1..80: note = Artificially Synthesized Probe
  source 1..80: mol_type = other DNA
cgtggtgcacacctgtaatcccagctactagggaggctgaggcaggagaattggttgaatccgggaggcggaggttgcag

SEQ ID NO: 99008 - DNA, 80 bp, synthetic construct; identical to SEQ ID NO: 34991
  misc_feature 1..80: note = Artificially Synthesized Probe
  source 1..80: mol_type = other DNA

SEQ ID NO: 99009 - DNA, 80 bp, synthetic construct
  misc_feature 1..80: note = Artificially Synthesized Probe
  source 1..80: mol_type = other DNA
tacacttccatgaaattgattttcttttaaggaaaggcaaaataaagtttttccagacaaaaactgagactttgttgcta

SEQ ID NO: 99010 - DNA, 80 bp, synthetic construct
  misc_feature 1..80: note = Artificially Synthesized Probe
  source 1..80: mol_type = other DNA
gtactaaccgaactatattatattaatatctcgtgaggtcaccaggacccctcaggaaatgattgacctagaaaggagtc

SEQ ID NO: 99011 - DNA, 80 bp, synthetic construct
  misc_feature 1..80: note = Artificially Synthesized Probe
  source 1..80: mol_type = other DNA
tcccaggggaccttgagcggagatgtgcatttcttataactgagatgctaagattaaaaaaaaaaaaacattttataaag

SEQ ID NO: 99012 - DNA, 80 bp, synthetic construct; identical to SEQ ID NO: 34954
  misc_feature 1..80: note = Artificially Synthesized Probe
  source 1..80: mol_type = other DNA

SEQ ID NO: 99013 - DNA, 80 bp, synthetic construct; identical to SEQ ID NO: 34992
  misc_feature 1..80: note = Artificially Synthesized Probe
  source 1..80: mol_type = other DNA

SEQ ID NO: 99014 - DNA, 80 bp, synthetic construct
  misc_feature 1..80: note = Artificially Synthesized Probe
  source 1..80: mol_type = other DNA
tttttctcttataaagaagggtaagaactcacctgccactctgctgctttaaagctctgcatctgagaaattccacgtgc

SEQ ID NO: 99015 - DNA, 80 bp, synthetic construct
  misc_feature 1..80: note = Artificially Synthesized Probe
  source 1..80: mol_type = other DNA
tgcaagggggtgggcaggggcagagagtggtgggacaactccatgaggttgcagctgttcattccttctacagagatcca

SEQ ID NO: 99016 - DNA, 80 bp, synthetic construct
  misc_feature 1..80: note = Artificially Synthesized Probe
  source 1..80: mol_type = other DNA
tgtctgggatctctagagacagcagtgttcaaattctgactcatgagcaaattagagggaagttcctgctaaatggacca

SEQ ID NO: 99017 - DNA, 80 bp, synthetic construct; identical to SEQ ID NO: 34993
  misc_feature 1..80: note = Artificially Synthesized Probe
  source 1..80: mol_type = other DNA

SEQ ID NO: 99018 - DNA, 80 bp, synthetic construct
  misc_feature 1..80: note = Artificially Synthesized Probe
  source 1..80: mol_type = other DNA
cacagagtttacaactgggcaggacagacagacacagaacaaggaatcacaagtatggtgaatgtgtggaagcagaaatg

SEQ ID NO: 99019 - DNA, 80 bp, synthetic construct
  misc_feature 1..80: note = Artificially Synthesized Probe
  source 1..80: mol_type = other DNA
agttagagctcctctctcagggagtttgaatttgagacatttagagagatgctgagtcccaaaaacccacaggaggtgtg

SEQ ID NO: 99020 - DNA, 80 bp, synthetic construct
  misc_feature 1..80: note = Artificially Synthesized Probe
  source 1..80: mol_type = other DNA
ccttattttgtgtatctttataataaacccccatgaacatagcctcagtgtgcccctgttctctgcagcctaaaaaacac

SEQ ID NO: 99021 - DNA, 80 bp, synthetic construct
  misc_feature 1..80: note = Artificially Synthesized Probe
  source 1..80: mol_type = other DNA
aagaaagtcatttcccatcatcaacactggcctcatgatttcactctttcttcaggcacccaattgttgggaatcattat

SEQ ID NO: 99022 - DNA, 80 bp, synthetic construct
  misc_feature 1..80: note = Artificially Synthesized Probe
  source 1..80: mol_type = other DNA
ggccaaggagctgttttttgtttttttttaattggctatgaaattctccccagtcatgaaaggaggacatagttaataag

SEQ ID NO: 99023 - DNA, 80 bp, synthetic construct; identical to SEQ ID NO: 34994
  misc_feature 1..80: note = Artificially Synthesized Probe
  source 1..80: mol_type = other DNA

SEQ ID NO: 99024 - DNA, 80 bp, synthetic construct
  misc_feature 1..80: note = Artificially Synthesized Probe
  source 1..80: mol_type = other DNA
tgcaaccttggcggccacaggaaaaggccagtgattttatgaacacagaaaggattggcttctaggatataactttatgg

SEQ ID NO: 99025 - DNA, 80 bp, synthetic construct
  misc_feature 1..80: note = Artificially Synthesized Probe
  source 1..80: mol_type = other DNA
tccctacccctttgaagttacaggctttaactcatgaaacatgagcagaaacagaatgtgttgctttgggtaggaggctt

SEQ ID NO: 99026 - DNA, 80 bp, synthetic construct
  misc_feature 1..80: note = Artificially Synthesized Probe
  source 1..80: mol_type = other DNA
gctcttgccaactcgcaaaggacataagatatgaggaagaaatcaaccttgattgtttgatagccaggcatggtggtgca

SEQ ID NO: 99027 - DNA, 80 bp, synthetic construct; identical to SEQ ID NO: 34995
  misc_feature 1..80: note = Artificially Synthesized Probe
  source 1..80: mol_type = other DNA

SEQ ID NO: 99028 - DNA, 80 bp, synthetic construct
  misc_feature 1..80: note = Artificially Synthesized Probe
  source 1..80: mol_type = other DNA
ccttctttatttgtccttgggttacatcattcaccttctcccaacttgtgttgggtcctgccacctcactccacccctca

SEQ ID NO: 99029 - DNA, 80 bp, synthetic construct
  misc_feature 1..80: note = Artificially Synthesized Probe
  source 1..80: mol_type = other DNA
agaaagaaatatagagtataataacatttatatggcttgcccacatcccctgccctccaaatacacaaagcactccacgt

SEQ ID NO: 99030 - DNA, 80 bp, synthetic construct; identical to SEQ ID NO: 34996
  misc_feature 1..80: note = Artificially Synthesized Probe
  source 1..80: mol_type = other DNA

SEQ ID NO: 99031 - DNA, 80 bp, synthetic construct
  misc_feature 1..80: note = Artificially Synthesized Probe
  source 1..80: mol_type = other DNA
aaaaagctcttcctgttttgtgaaagtatcacaataaatctgatgggattgtgggtgggaacagttttttttgttgttgt

SEQ ID NO: 99032 - DNA, 80 bp, synthetic construct
  misc_feature 1..80: note = Artificially Synthesized Probe
  source 1..80: mol_type = other DNA
ccaccacacccggctaatttttgtatttttagtagagacggggtttcaccacgttggccaggctggtcttgaactcctga

SEQ ID NO: 99033 - DNA, 80 bp, synthetic construct
  misc_feature 1..80: note = Artificially Synthesized Probe
  source 1..80: mol_type = other DNA
atcagtccccacaaaaatagtacagagcaaaagtcaacaatactggctttcaagtggatttttaaaatcccagagccaca

SEQ ID NO: 99034 - DNA, 80 bp, synthetic construct
  misc_feature 1..80: note = Artificially Synthesized Probe
  source 1..80: mol_type = other DNA
aggaagttctcaaagcagaaaaaagaagtagacaaagagcacaggtcagttcaagtcagcctggaaatgtcttacggaac

SEQ ID NO: 99035 - DNA, 80 bp, synthetic construct; identical to SEQ ID NO: 34997
  misc_feature 1..80: note = Artificially Synthesized Probe
  source 1..80: mol_type = other DNA

SEQ ID NO: 99036 - DNA, 80 bp, synthetic construct
  misc_feature 1..80: note = Artificially Synthesized Probe
  source 1..80: mol_type = other DNA
acaataggaatagataactgatattcatttattgaatgaactaagttaaagccatcattccctgcctacctcatgtaggt

SEQ ID NO: 99037 - DNA, 80 bp, synthetic construct
  misc_feature 1..80: note = Artificially Synthesized Probe
  source 1..80: mol_type = other DNA
ctctatctttgccagcagacagtgagactccaggattaaaattaaaagcccgtggtgcatcctttccttgacattaactt

SEQ ID NO: 99038 - DNA, 80 bp, synthetic construct
  misc_feature 1..80: note = Artificially Synthesized Probe
  source 1..80: mol_type = other DNA
gaatttaatccacaggctccacagttttacaagtaaagaagataattatactctagttgttgacatgaactgcttggatg

SEQ ID NO: 99039 - DNA, 80 bp, synthetic construct
  misc_feature 1..80: note = Artificially Synthesized Probe
  source 1..80: mol_type = other DNA
ttggtcagctcaaatggtgtcctacttttcctgctgcatgatccacaacaatctgtgttctgttgttgtctgtttgtttt

SEQ ID NO: 99040 - DNA, 80 bp, synthetic construct; identical to SEQ ID NO: 34998
  misc_feature 1..80: note = Artificially Synthesized Probe
  source 1..80: mol_type = other DNA

SEQ ID NO: 99041 - DNA, 80 bp, synthetic construct
  misc_feature 1..80: note = Artificially Synthesized Probe
  source 1..80: mol_type = other DNA
attcggggtgggaccacagtggaacgcatacatcctttcacagctgccaaggccttctgggaagtccaatgcctgccccc

SEQ ID NO: 99042 - DNA, 80 bp, synthetic construct
  misc_feature 1..80: note = Artificially Synthesized Probe
  source 1..80: mol_type = other DNA
gcagggccctggacttgtccggatcaatcaaaactagcatccaagtctcctggctgcgagacagttgcttcttttgtcta

SEQ ID NO: 99043 - DNA, 80 bp, synthetic construct
  misc_feature 1..80: note = Artificially Synthesized Probe
  source 1..80: mol_type = other DNA
cgcctctctcagagggcgtgcaactttgtgtcctaagttgattattttcctttcacattggttggtagtggcagtgaagg

SEQ ID NO: 99044 - DNA, 80 bp, synthetic construct; identical to SEQ ID NO: 34999
  misc_feature 1..80: note = Artificially Synthesized Probe
  source 1..80: mol_type = other DNA

SEQ ID NO: 99045 - DNA, 80 bp, synthetic construct
  misc_feature 1..80: note = Artificially Synthesized Probe
  source 1..80: mol_type = other DNA
gccgggtgcactgcgtatagcaggtgcttcatcatgtccactgatacgtggatttccataattcacaggctcacttaggg

SEQ ID NO: 99046 - DNA, 80 bp, synthetic construct
  misc_feature 1..80: note = Artificially Synthesized Probe
  source 1..80: mol_type = other DNA
gagcacagaatatggaatcaggcattctgggctgaattctagcttctctcgtagtgaccttgggcaaccttatttcactg

SEQ ID NO: 99047 - DNA, 80 bp, synthetic construct
  misc_feature 1..80: note = Artificially Synthesized Probe
  source 1..80: mol_type = other DNA
tcacctactgcttgacattttcttggttttatccaggctttgaaaaacaaagttcccaaaacactgcacttgatattcat

SEQ ID NO: 99048 - DNA, 80 bp, synthetic construct
  misc_feature 1..80: note = Artificially Synthesized Probe
  source 1..80: mol_type = other DNA
aggacatctggatatggcatttaggactgacacagaaagtgtctggggcttatcaagtgaaaagcactccacaagaacaa

SEQ ID NO: 99049 - DNA, 80 bp, synthetic construct; identical to SEQ ID NO: 35000
  misc_feature 1..80: note = Artificially Synthesized Probe
  source 1..80: mol_type = other DNA

SEQ ID NO: 99050 - DNA, 80 bp, synthetic construct
  misc_feature 1..80: note = Artificially Synthesized Probe
  source 1..80: mol_type = other DNA
aggactgctctcttccctcactaagtgaggtcccatgttaagcagaaggcctgcccaaccagccgagatacacctggcct

SEQ ID NO: 99051 - DNA, 80 bp, synthetic construct
  misc_feature 1..80: note = Artificially Synthesized Probe
  source 1..80: mol_type = other DNA
ttgtttttaccaaaccctgggtctctcaagtgcacacaaatgatgaattcagattttcaaaggtgaacagagctgggaag

SEQ ID NO: 99052 - DNA, 80 bp, synthetic construct
  misc_feature 1..80: note = Artificially Synthesized Probe
  source 1..80: mol_type = other DNA
tcttttgttcctgtttctaaagagccaggaaggactggactccaccctagtccatccactgaagctcctgatgaaggatg

SEQ ID NO: 99053 - DNA, 80 bp, synthetic construct; identical to SEQ ID NO: 35001
  misc_feature 1..80: note = Artificially Synthesized Probe
  source 1..80: mol_type = other DNA

SEQ ID NO: 99054 - DNA, 80 bp, synthetic construct
  misc_feature 1..80: note = Artificially Synthesized Probe
  source 1..80: mol_type = other DNA
aggccctacttggcctgagtgtgtctcattatttagctctgtaccctcctgggcttgggccttaccacaccagccactca

SEQ ID NO: 99055 - DNA, 80 bp, synthetic construct
  misc_feature 1..80: note = Artificially Synthesized Probe
  source 1..80: mol_type = other DNA
cctgtctcatgacatgctgttgttttcacttaaagcactttccacaagttacaattatgtatttacctgtgtgcttactg

SEQ ID NO: 99056 - DNA, 80 bp, synthetic construct; identical to SEQ ID NO: 34955
  misc_feature 1..80: note = Artificially Synthesized Probe
  source 1..80: mol_type = other DNA

SEQ ID NO: 99057 - DNA, 80 bp, synthetic construct
  misc_feature 1..80: note = Artificially Synthesized Probe
  source 1..80: mol_type = other DNA
ttatagcaagagacatgagaaacctctttcacaaatcaggaagagggtcctcaccaaactcccatgctggcaaccaggtc

SEQ ID NO: 99058 - DNA, 80 bp, synthetic construct
  misc_feature 1..80: note = Artificially Synthesized Probe
  source 1..80: mol_type = other DNA
gtaatccaagtacttagtagactcctggcaccagcaagactttctgataatatttgttgaattaacatgttgcagaattg

SEQ ID NO: 99059 - DNA, 80 bp, synthetic construct; identical to SEQ ID NO: 35002
  misc_feature 1..80: note = Artificially Synthesized Probe
  source 1..80: mol_type = other DNA

SEQ ID NO: 99060 - DNA, 80 bp, synthetic construct
  misc_feature 1..80: note = Artificially Synthesized Probe
  source 1..80: mol_type = other DNA
tttgatgtaatattattttcaatactgttgctgtccacctgagtctcaacctgggatctcctaggcctggtttctgtctt

SEQ ID NO: 99061 - DNA, 80 bp, synthetic construct
  misc_feature 1..80: note = Artificially Synthesized Probe
  source 1..80: mol_type = other DNA
taaccagcctaagcaatggatgaggtttaatgttatctggaagtgggaggaggcgacaggaggagtgagctgccactttc

SEQ ID NO: 99062 - DNA, 80 bp, synthetic construct; identical to SEQ ID NO: 35003
  misc_feature 1..80: note = Artificially Synthesized Probe
  source 1..80: mol_type = other DNA

SEQ ID NO: 99063 - DNA, 80 bp, synthetic construct
  misc_feature 1..80: note = Artificially Synthesized Probe
  source 1..80: mol_type = other DNA
tgtcatcatttcatttaatcaaatcaagcctcaaagcaatctttccagataggtagagttagcccattttacagattcaa

SEQ ID NO: 99064 - DNA, 80 bp, synthetic construct
  misc_feature 1..80: note = Artificially Synthesized Probe
  source 1..80: mol_type = other DNA
catcaaatactgaaaactgcccagcaaggaaagcattattgtaactagtttacaaaggaggacacagagttggagtggtt

SEQ ID NO: 99065 - DNA, 80 bp, synthetic construct
  misc_feature 1..80: note = Artificially Synthesized Probe
  source 1..80: mol_type = other DNA
ggcattaaattctcataaggaatgtgcagcctagatccctcgcgtgtgcggttcaccatagggttcccctcgcatgagaa

SEQ ID NO: 99066 - DNA, 80 bp, synthetic construct; identical to SEQ ID NO: 35004
  misc_feature 1..80: note = Artificially Synthesized Probe
  source 1..80: mol_type = other DNA

SEQ ID NO: 99067 - DNA, 80 bp, synthetic construct
  misc_feature 1..80: note = Artificially Synthesized Probe
  source 1..80: mol_type = other DNA
ctgagtccatgtgactttgtatctggctaaaagtgtccaggtaagatccactagagtaaaggatagcttgatatttttta

SEQ ID NO: 99068 - DNA, 80 bp, synthetic construct
  misc_feature 1..80: note = Artificially Synthesized Probe
  source 1..80: mol_type = other DNA
ccaagaaggtttggttttgaggtcataggcagcaatctgggcatgtgttacaagaagcaggggaagttcttactcattag

SEQ ID NO: 99069 - DNA, 80 bp, synthetic construct
  misc_feature 1..80: note = Artificially Synthesized Probe
  source 1..80: mol_type = other DNA
caattctgaccctaacctgtatggtggcaatgacagaacagaaggccaagggacatcaactttctgaaacaaatgtaatc

SEQ ID NO: 99070 - DNA, 80 bp, synthetic construct
  misc_feature 1..80: note = Artificially Synthesized Probe
  source 1..80: mol_type = other DNA
agtaacttttaatttccatgcagtataatacaaaattgccttgttggctctaaggacgtgcatccctcatcagggaactc

SEQ ID NO: 99071 - DNA, 80 bp, synthetic construct
  misc_feature 1..80: note = Artificially Synthesized Probe
  source 1..80: mol_type = other DNA
cagttccagataaaacacatgtttaaataagagttcaagccaggaagtcttgcctgaatgaactttctagcgtgggtaaa

SEQ ID NO: 99072 - DNA, 80 bp, synthetic construct; identical to SEQ ID NO: 35005
  misc_feature 1..80: note = Artificially Synthesized Probe
  source 1..80: mol_type = other DNA

SEQ ID NO: 99073 - DNA, 80 bp, synthetic construct
  misc_feature 1..80: note = Artificially Synthesized Probe
  source 1..80: mol_type = other DNA
taagagataagactttgatagtcttgtgtaagcaaatatcagtgatcacacatacactagaaaaacacttgatctttatg

SEQ ID NO: 99074 - DNA, 80 bp, synthetic construct
  misc_feature 1..80: note = Artificially Synthesized Probe
  source 1..80: mol_type = other DNA
ggcatcagcaattgtagaatttgggttctcccttcctcagatccctgactgtccttggtcattcaagaaagattcactgt

SEQ ID NO: 99075 - DNA, 80 bp, synthetic construct; identical to SEQ ID NO: 35006
  misc_feature 1..80: note = Artificially Synthesized Probe
  source 1..80: mol_type = other DNA

SEQ ID NO: 99076 - DNA, 80 bp, synthetic construct
  misc_feature 1..80: note = Artificially Synthesized Probe
  source 1..80: mol_type = other DNA
agtggctgtactaagtaaacaattaacgggcacaaactgccactccagtgtctaataactacctctgccagagcacctgc

SEQ ID NO: 99077 - DNA, 80 bp, synthetic construct
  misc_feature 1..80: note = Artificially Synthesized Probe
  source 1..80: mol_type = other DNA
ttgacccagatttgatgggttccaaagcgtgaacttatttctccactccacaaaaataaaacctactcttcttacaatat

SEQ ID NO: 99078 - DNA, 80 bp, synthetic construct
  misc_feature 1..80: note = Artificially Synthesized Probe
  source 1..80: mol_type = other DNA
acgagctcaggagatcgataccatcctggccaacctgtctctattaaaaatacaaaaaaattagctgggcatggtggtgt

SEQ ID NO: 99079 - DNA, 80 bp, synthetic construct
  misc_feature 1..80: note = Artificially Synthesized Probe
  source 1..80: mol_type = other DNA
cactcctctctaagatgcatcgtggagttactcttttactcttccctgaaagtgatagttcaatcttcaacaggggcttt

SEQ ID NO: 99080 - DNA, 80 bp, synthetic construct
  misc_feature 1..80: note = Artificially Synthesized Probe
  source 1..80: mol_type = other DNA
tcaagcaattctcctgcttcagcctcccgagtagctgggattacaggcatgcgccaccacgcccggttaatttttttttt

SEQ ID NO: 99081 - DNA, 80 bp, synthetic construct; identical to SEQ ID NO: 35007
  misc_feature 1..80: note = Artificially Synthesized Probe
  source 1..80: mol_type = other DNA

SEQ ID NO: 99082 - DNA, 80 bp, synthetic construct
  misc_feature 1..80: note = Artificially Synthesized Probe
  source 1..80: mol_type = other DNA
gtttttgaatgtgatattcaggcgaccttgccaagcattgtctcatttccttactttgtggagcatgaaacccaagggaa

SEQ ID NO: 99083 - DNA, 80 bp, synthetic construct
  misc_feature 1..80: note = Artificially Synthesized Probe
  source 1..80: mol_type = other DNA
ggaggcctgggtctgactccgtgagattctgatggaattgatctagggtgcagcctggatatctggattttaaaagctcc

SEQ ID NO: 99084 - DNA, 80 bp, synthetic construct; identical to SEQ ID NO: 35008
  misc_feature 1..80: note = Artificially Synthesized Probe
  source 1..80: mol_type = other DNA

SEQ ID NO: 99085 - DNA, 80 bp, synthetic construct
  misc_feature 1..80: note = Artificially Synthesized Probe
  source 1..80: mol_type = other DNA
gaagcgccgtggcccgggaggacgctgctcccgcagtagcgcgagggaggggcaggaccggggcggctgcctcgcgggcc

SEQ ID NO: 99086 - DNA, 80 bp, synthetic construct
  misc_feature 1..80: note = Artificially Synthesized Probe
  source 1..80: mol_type = other DNA
tccatttatatttttatatatatttgggagaccaccaatctgaacaacaaattgtaagaaacacaccatgggacaggaag

SEQ ID NO: 99087 - DNA, 80 bp, synthetic construct; identical to SEQ ID NO: 34956
  misc_feature 1..80: note = Artificially Synthesized Probe
  source 1..80: mol_type = other DNA

SEQ ID NO: 99088 - DNA, 80 bp, synthetic construct
  misc_feature 1..80: note = Artificially Synthesized Probe
  source 1..80: mol_type = other DNA
gtagaataggctcctgctaaacatgacccttagaaatcctggcactgacccaagaaggaagcccttaccaggaagacgag

SEQ ID NO: 99089 - DNA, 80 bp, synthetic construct
  misc_feature 1..80: note = Artificially Synthesized Probe
  source 1..80: mol_type = other DNA
gaataactataagagtgccccccatccactgggtgtgtgagatttcaagaggagggtattaggcacagtgtccaggggga

SEQ ID NO: 99090 - DNA, 80 bp, synthetic construct
  misc_feature 1..80: note = Artificially Synthesized Probe
  source 1..80: mol_type = other DNA
ccaggaagtgggcaccaagttctgtattcagttacactctgctgttttctagtcaccacttaggcttttttgaaggcagg

SEQ ID NO: 99091 - DNA, 80 bp, synthetic construct
  misc_feature 1..80: note = Artificially Synthesized Probe
  source 1..80: mol_type = other DNA
taatactaatccatcaaacacgttttattcaagaagcttggcaccaactttgtgccacatcctcaactcttcaatgaaaa

SEQ ID NO: 99092 - DNA, 80 bp, synthetic construct
  misc_feature 1..80: note = Artificially Synthesized Probe
  source 1..80: mol_type = other DNA
accctgtcctagctctgctctccctggagaggctggcctgcacttagggaatgggatcaaataattctgcaggctaaaaa

SEQ ID NO: 99093 - DNA, 80 bp, synthetic construct; identical to SEQ ID NO: 34957
  misc_feature 1..80: note = Artificially Synthesized Probe
  source 1..80: mol_type = other DNA

SEQ ID NO: 99094 - DNA, 80 bp, synthetic construct
  misc_feature 1..80: note = Artificially Synthesized Probe
  source 1..80: mol_type = other DNA
gattgcagacctatatgtgaggggaaacaactataacgcttaacagaaaacttaggtggagttctttgtgatcttggatt

SEQ ID NO: 99095 - DNA, 80 bp, synthetic construct
  misc_feature 1..80: note = Artificially Synthesized Probe
  source 1..80: mol_type = other DNA
gtcaggagttcaagaccagcctgggcctaaatggtgaaaccccatctctattaaaaatacaaaatgagacaggcatggtg

SEQ ID NO: 99096 - DNA, 80 bp, synthetic construct; identical to SEQ ID NO: 34958
  misc_feature 1..80: note = Artificially Synthesized Probe
  source 1..80: mol_type = other DNA

SEQ ID NO: 99097 - DNA, 80 bp, synthetic construct
  misc_feature 1..80: note = Artificially Synthesized Probe
  source 1..80: mol_type = other DNA
aaatgcaaatcaaaaccacaatattacttcacatccactagtataactagattttaaaagatggacaataataagtgttg

SEQ ID NO: 99098 - DNA, 80 bp, synthetic construct
  misc_feature 1..80: note = Artificially Synthesized Probe
  source 1..80: mol_type = other DNA
catatgttcacccaaaagcatgaacaggagtgttcacagtagcattacgcataatagtcaaaaagtagaaacaacccaaa

SEQ ID NO: 99099 - DNA, 80 bp, synthetic construct
  misc_feature 1..80: note = Artificially Synthesized Probe
  source 1..80: mol_type = other DNA
gaaagcggattagtggttgccagggtctggggaggaggacagggagtgactgcttaatggataccagggctttttggagt

SEQ ID NO: 99100 - DNA, 80 bp, synthetic construct
  misc_feature 1..80: note = Artificially Synthesized Probe
  source 1..80: mol_type = other DNA
ggcaataaagtctcttcacagtgtatttactgtaactacaacagctcgcaagacacattctttttctgcagaattgtagc

SEQ ID NO: 99101 - DNA, 80 bp, synthetic construct; identical to SEQ ID NO: 34959
  misc_feature 1..80: note = Artificially Synthesized Probe
  source 1..80: mol_type = other DNA

SEQ ID NO: 99102 - DNA, 80 bp, synthetic construct
  misc_feature 1..80: note = Artificially Synthesized Probe
  source 1..80: mol_type = other DNA
cctgtcagccccacagaaggtcaatgggactcatttttaatgcaaatcctgtacctgggctcctatttcttagcccagct

SEQ ID NO: 99103 - DNA, 80 bp, synthetic construct
  misc_feature 1..80: note = Artificially Synthesized Probe
  source 1..80: mol_type = other DNA
tttgaagacctgaaacagtcactgactgcacattaaaatgtgttcagtactttgctctcagttaacttgtgagggaccca

SEQ ID NO: 99104 - DNA, 80 bp, synthetic construct
  misc_feature 1..80: note = Artificially Synthesized Probe
  source 1..80: mol_type = other DNA
aaaaaaaaaaattccttgaagggcagtttggatgtgcctgcccaaatttttaatgtgcttcattttaagacaatcagact

SEQ ID NO: 99105 - DNA, 80 bp, synthetic construct
  misc_feature 1..80: note = Artificially Synthesized Probe
  source 1..80: mol_type = other DNA
aaatatattgtgatatctattcgagatgttgtgcagcttgtagggagaatgaggtagaatgaggagggagaagaacacag

SEQ ID NO: 99106 - DNA, 80 bp, synthetic construct; identical to SEQ ID NO: 34960
  misc_feature 1..80: note = Artificially Synthesized Probe
  source 1..80: mol_type = other DNA

SEQ ID NO: 99107 - DNA, 80 bp, synthetic construct
  misc_feature 1..80: note = Artificially Synthesized Probe
  source 1..80: mol_type = other DNA
tgcggctaaaccgtctatgatgcacaggacagccctaccataataaagaatcacttggaccaaaatgtcaacagcatcaa

SEQ ID NO: 99108 - DNA, 80 bp, synthetic construct
  misc_feature 1..80: note = Artificially Synthesized Probe
  source 1..80: mol_type = other DNA
gttcaaatatctcactgactttataaataaatgtatgaatgtgaacttataacaaatttatacacaaaatattattttat

SEQ ID NO: 99109 - DNA, 80 bp, synthetic construct
  misc_feature 1..80: note = Artificially Synthesized Probe
  source 1..80: mol_type = other DNA
ttaagattttacagctaggccgggcgcggtggctcacacctgtaatctcagcactttgggagaccgaggcaggcagatca

SEQ ID NO: 99110 - DNA, 80 bp, synthetic construct
  misc_feature 1..80: note = Artificially Synthesized Probe
  source 1..80: mol_type = other DNA
gtgagccaagatcgcgccactgcactccagcctgggcgacagagcgagactccctctcaaaaaaaaaaaaaaaaaaaaat

SEQ ID NO: 99111 - DNA, 80 bp, synthetic construct
  misc_feature 1..80: note = Artificially Synthesized Probe
  source 1..80: mol_type = other DNA
acatcaagactatcactctttactcccattcaggacactctggagctaaaggacagaaatttgaaatgtaaccagataat

SEQ ID NO: 99112 - DNA, 80 bp, synthetic construct
  misc_feature 1..80: note = Artificially Synthesized Probe
  source 1..80: mol_type = other DNA
atgttcttaccagtgcagcacagagctgaaccatgacctcctgatctggacactatgcttttactatttcagagtaagtt

SEQ ID NO: 99113 - DNA, 80 bp, synthetic construct
  misc_feature 1..80: note = Artificially Synthesized Probe
  source 1..80: mol_type = other DNA
tactagtgtaccctatttttctcatcttatacttgtagcacatgttttttgaacccaataattggaactgtcattcattc

SEQ ID NO: 99114 - DNA, 80 bp, synthetic construct
  misc_feature 1..80: note = Artificially Synthesized Probe
  source 1..80: mol_type = other DNA
cctatagcactgaaaaggacaccaaagctaactgatttgcccaaagttggttatctgtgaatctagcaatttccccagtt

SEQ ID NO: 99115 - DNA, 80 bp, synthetic construct; identical to SEQ ID NO: 35120
  misc_feature 1..80: note = Artificially Synthesized Probe
  source 1..80: mol_type = other DNA

SEQ ID NO: 99116 - DNA, 80 bp, synthetic construct
  misc_feature 1..80: note = Artificially Synthesized Probe
  source 1..80: mol_type = other DNA
tcccctatattaaaatctttttaatttccagtgagaaacatcatgcttcccttctggtatatctccaacttaggttcctt

SEQ ID NO: 99117 - DNA, 80 bp, synthetic construct
  misc_feature 1..80: note = Artificially Synthesized Probe
  source 1..80: mol_type = other DNA
tgtctccactggtatggttcttctttatttaagccactgttatgtctttgctgtacctttctcaaactcccatctagata

SEQ ID NO: 99118 - DNA, 80 bp, synthetic construct
  misc_feature 1..80: note = Artificially Synthesized Probe
  source 1..80: mol_type = other DNA
tctgtgatctgtctggtagaataacaggccaaatcaacctaatagtcatcctgaggtacagaattatccttcacacccca

SEQ ID NO: 99119 - DNA, 80 bp, synthetic construct; identical to SEQ ID NO: 35121
  misc_feature 1..80: note = Artificially Synthesized Probe
  source 1..80: mol_type = other DNA

SEQ ID NO: 99120 - DNA, 80 bp, synthetic construct
  misc_feature 1..80: note = Artificially Synthesized Probe
  source 1..80: mol_type = other DNA
tgaatgttttcctcctgtagggagtttattaattattttcataactgtctcttcaatgtctctcagtgacttttacttac

SEQ ID NO: 99121 - DNA, 80 bp, synthetic construct
  misc_feature 1..80: note = Artificially Synthesized Probe
  source 1..80: mol_type = other DNA
gtctcagctgggcacagtggctcacacctgtaatcccagcactgtgggaggccaaggcaagcagattgctagagcagaag

SEQ ID NO: 99122 - DNA, 80 bp, synthetic construct
  misc_feature 1..80: note = Artificially Synthesized Probe
  source 1..80: mol_type = other DNA
gaatggcagtcataaactaatacagtggttttcaacactttccaccatgacacactcccgtggctatattacaattttgc

SEQ ID NO: 99123 - DNA, 80 bp, synthetic construct; identical to SEQ ID NO: 35122
  misc_feature 1..80: note = Artificially Synthesized Probe
  source 1..80: mol_type = other DNA

SEQ ID NO: 99124 - DNA, 80 bp, synthetic construct
  misc_feature 1..80: note = Artificially Synthesized Probe
  source 1..80: mol_type = other DNA
agaaaaatttgttctttcacgtttcctaagtgaatagccactcgtctacagaaaagcttaaaacagtgtagcagcttgtg

SEQ ID NO: 99125 - DNA, 80 bp, synthetic construct
  misc_feature 1..80: note = Artificially Synthesized Probe
  source 1..80: mol_type = other DNA
ttttttttttttaaaaacgaggatttggccattcaaaaaaaaacaacaacaacaacaaagcaaaatcccaccacatacaa

SEQ ID NO: 99126 - DNA, 80 bp, synthetic construct
  misc_feature 1..80: note = Artificially Synthesized Probe
  source 1..80: mol_type = other DNA
tagtttccagcagaaaattctttgaacagaactctgctttcaacccactttcttcttgcgctgggcctcttggcccccca

SEQ ID NO: 99127 - DNA, 80 bp, synthetic construct; identical to SEQ ID NO: 35123
  misc_feature 1..80: note = Artificially Synthesized Probe
  source 1..80: mol_type = other DNA

SEQ ID NO: 99128 - DNA, 80 bp, synthetic construct
  misc_feature 1..80: note = Artificially Synthesized Probe
  source 1..80: mol_type = other DNA
cactggtctccctcctttcagtacctcctggctgaggtctgatgggcttgtcaactttttaattctgtcactctgtgtaa

SEQ ID NO: 99129 - DNA, 80 bp, synthetic construct
  misc_feature 1..80: note = Artificially Synthesized Probe
  source 1..80: mol_type = other DNA
aaaaaaagaaagaaaaaaaggaaatactatagcttactcagcaagaaggaaaaacaaaaagaactttaaaaaaaagtatt

SEQ ID NO: 99130 - DNA, 80 bp, synthetic construct
  misc_feature 1..80: note = Artificially Synthesized Probe
  source 1..80: mol_type = other DNA
aactaatacacaaagactaccaaatactgcagggcagctcatttttctactatgtaaattcagcttcctggacagaccat

SEQ ID NO: 99131 - DNA, 80 bp, synthetic construct
  misc_feature 1..80: note = Artificially Synthesized Probe
  source 1..80: mol_type = other DNA
ggaattatctctgaaaccccacctcacttagtttacatgtgttaggtttttcaccccctcatctgaataaagcattaaat

SEQ ID NO: 99132 - DNA, 80 bp, synthetic construct; identical to SEQ ID NO: 35124
  misc_feature 1..80: note = Artificially Synthesized Probe
  source 1..80: mol_type = other DNA

SEQ ID NO: 99133 - DNA, 80 bp, synthetic construct
  misc_feature 1..80: note = Artificially Synthesized Probe
  source 1..80: mol_type = other DNA
ctgactgtggtttcagtcactcacaaggcatttagaatcatggtcaatgtgagtaaatgcccagagcttagaatttaaaa

SEQ ID NO: 99134 - DNA, 80 bp, synthetic construct
  misc_feature 1..80: note = Artificially Synthesized Probe
  source 1..80: mol_type = other DNA
cacattctagacatatgagtttacaaaaaacacccttcgatgtaatggacaaaactgaatgagttagctcagttgttccc

SEQ ID NO: 99135 - DNA, 80 bp, synthetic construct
  misc_feature 1..80: note = Artificially Synthesized Probe
  source 1..80: mol_type = other DNA
acagtatacattgtattcaaacaacacactgagaaattgtttcatctcaagctctctcctttatgcactatactcttgct

SEQ ID NO: 99136 - DNA, 80 bp, synthetic construct
  misc_feature 1..80: note = Artificially Synthesized Probe
  source 1..80: mol_type = other DNA
aacagccttgataccccctctgttcttataaccctgagcctgtgttactcattagcccttattatgattatctgtcaaca

SEQ ID NO: 99137 - DNA, 80 bp, synthetic construct; identical to SEQ ID NO: 35125
  misc_feature 1..80: note = Artificially Synthesized Probe
  source 1..80: mol_type = other DNA

SEQ ID NO: 99138 - DNA, 80 bp, synthetic construct
  misc_feature 1..80: note = Artificially Synthesized Probe
  source 1..80: mol_type = other DNA
acttttattagtctttcatcggttgttgataaaagactgactacataaaccaccagggacctggagccctgactaagaaa

SEQ ID NO: 99139 - DNA, 80 bp, synthetic construct
  misc_feature 1..80: note = Artificially Synthesized Probe
  source 1..80: mol_type = other DNA
aaatatctaaaagcagagtaatttaaaaagcttactgtttagtctaaaaggattttcctagatcaaaaacaactgtacct

SEQ ID NO: 99140 - DNA, 80 bp, synthetic construct; identical to SEQ ID NO: 35126
  misc_feature 1..80: note = Artificially Synthesized Probe
  source 1..80: mol_type = other DNA

SEQ ID NO: 99141 - DNA, 80 bp, synthetic construct
  misc_feature 1..80: note = Artificially Synthesized Probe
  source 1..80: mol_type = other DNA
accctctaggtgcacagataattcaatatacacttatgtaaatgaattgttccacaactcacactttcagctagcccctc

SEQ ID NO: 99142 - DNA, 80 bp, synthetic construct
  misc_feature 1..80: note = Artificially Synthesized Probe
  source 1..80: mol_type = other DNA
atagaatggtggtaggtatttcagcctctatggaatctgacctgctgattagttatacaaggctaaaactgactgaagtg

SEQ ID NO: 99143 - DNA, 80 bp, synthetic construct
  misc_feature 1..80: note = Artificially Synthesized Probe
  source 1..80: mol_type = other DNA
gatgctatcatcaattcttataaaatttagaaaagaataggtgatgtctcctaattagagagtttgcttctgtcacaaac

SEQ ID NO: 99144 - DNA, 80 bp, synthetic construct; identical to SEQ ID NO: 35020
  misc_feature 1..80: note = Artificially Synthesized Probe
  source 1..80: mol_type = other DNA

SEQ ID NO: 99145 - DNA, 80 bp, synthetic construct; identical to SEQ ID NO: 35127
  misc_feature 1..80: note = Artificially Synthesized Probe
  source 1..80: mol_type = other DNA

SEQ ID NO: 99146 - DNA, 80 bp, synthetic construct
  misc_feature 1..80: note = Artificially Synthesized Probe
  source 1..80: mol_type = other DNA
agtttattctggaaaattgagggtttggatatgtactatataatcagaggaaacaagcagtaaaggacctgagctaattt

SEQ ID NO: 99147 - DNA, 80 bp, synthetic construct
  misc_feature 1..80: note = Artificially Synthesized Probe
  source 1..80: mol_type = other DNA
ttcttagtgcctctgttttcctatcactttccctatcccaatccattcttgctcttgccttagagattcttagattctga

SEQ ID NO: 99148 - DNA, 80 bp, synthetic construct
  misc_feature 1..80: note = Artificially Synthesized Probe
  source 1..80: mol_type = other DNA
cattctacctccaaacgttcaagttaacatgtgctaaaggaaggattttctaaatcacttacctgtcactgtgaaactag

SEQ ID NO: 99149 - DNA, 80 bp, synthetic construct
  misc_feature 1..80: note = Artificially Synthesized Probe
  source 1..80: mol_type = other DNA
ctcagctcccttcctctcacccttctcctacctatccgtcttctaaggcaccactaatattcaaagatttaggatctaag

SEQ ID NO: 99150 - DNA, 80 bp, synthetic construct; identical to SEQ ID NO: 35128
  misc_feature 1..80: note = Artificially Synthesized Probe
  source 1..80: mol_type = other DNA

SEQ ID NO: 99151 - DNA, 80 bp, synthetic construct
  misc_feature 1..80: note = Artificially Synthesized Probe
  source 1..80: mol_type = other DNA
agtgttcagcacacaggattatagacagtgactgcaggaaaatgacctgaatctatacagatttaatagtctaaatgcta

SEQ ID NO: 99152 - DNA, 80 bp, synthetic construct
  misc_feature 1..80: note = Artificially Synthesized Probe
  source 1..80: mol_type = other DNA
tcacttttctttcataaaactcttttcataaagatcaagtagaagactgtttaggagaagagcatttcgagcagaaatta

SEQ ID NO: 99153 - DNA, 80 bp, synthetic construct
  misc_feature 1..80: note = Artificially Synthesized Probe
  source 1..80: mol_type = other DNA
tagagggcaactttgacctcaacagtcctgaaaaaatagagggctacataatgaaaattgttcccccaattgacactctt

SEQ ID NO: 99154 - DNA, 80 bp, synthetic construct
  misc_feature 1..80: note = Artificially Synthesized Probe
  source 1..80: mol_type = other DNA
tgggttgtaaggtaaaactcaactaaaagaaatatgaaaacaaaatgcataacacagtcgcatgtgcacacatgtgtgca

SEQ ID NO: 99155 - DNA, 80 bp, synthetic construct; identical to SEQ ID NO: 35129
  misc_feature 1..80: note = Artificially Synthesized Probe
  source 1..80: mol_type = other DNA

SEQ ID NO: 99156 - DNA, 80 bp, synthetic construct
  misc_feature 1..80: note = Artificially Synthesized Probe
  source 1..80: mol_type = other DNA
agattacgattgacctggagactgtgttgaaagaaacctagctaaattcacatctattaatgccagactgcaggccaaaa

SEQ ID NO: 99157 - DNA, 80 bp, synthetic construct
  misc_feature 1..80: note = Artificially Synthesized Probe
  source 1..80: mol_type = other DNA
ctatgtgttaagaagctactaactggccaggcacagtggttcaggcctgtaattccagccctttgggaggcagaagtggg

SEQ ID NO: 99158 - DNA, 80 bp, synthetic construct; identical to SEQ ID NO: 35130
  misc_feature 1..80: note = Artificially Synthesized Probe
  source 1..80: mol_type = other DNA

SEQ ID NO: 99159 - DNA, 80 bp, synthetic construct
  misc_feature 1..80: note = Artificially Synthesized Probe
  source 1..80: mol_type = other DNA
actcactatgcaaatgtaaggtgccatattcaacaacttgtgacttttgtgctggcaacaacatttatcaaaaatcactg

SEQ ID NO: 99160 - DNA, 80 bp, synthetic construct
  misc_feature 1..80: note = Artificially Synthesized Probe
  source 1..80: mol_type = other DNA
tttcatccacagttattacattgagctttcatgttaaaggccatttctcagaaatgcagtattcaccaaacctggcccat

SEQ ID NO: 99161 - DNA, 80 bp, synthetic construct
  misc_feature 1..80: note = Artificially Synthesized Probe
  source 1..80: mol_type = other DNA
ccacacttccttttcagaaggttccatttgaactacaaacttaaaacaggtaattctgtcccattttattgacaggcaaa

SEQ ID NO: 99162 - DNA, 80 bp, synthetic construct
  misc_feature 1..80: note = Artificially Synthesized Probe
  source 1..80: mol_type = other DNA
ccctaatacgcaataatgttagctagcattatagactttaacttgccaaagatccaattgttaataggaatcaggactca

SEQ ID NO: 99163 - DNA, 80 bp, synthetic construct
  misc_feature 1..80: note = Artificially Synthesized Probe
  source 1..80: mol_type = other DNA
gaagcagtggtctgagtcttgaacacactggcggttgtcaatttccagaaagactttagagctgtgggatgccaagggag

SEQ ID NO: 99164 - DNA, 80 bp, synthetic construct; identical to SEQ ID NO: 35131
  misc_feature 1..80: note = Artificially Synthesized Probe
  source 1..80: mol_type = other DNA

SEQ ID NO: 99165 - DNA, 80 bp, synthetic construct
  misc_feature 1..80: note = Artificially Synthesized Probe
  source 1..80: mol_type = other DNA
tgcaggctgaaccatactagatcataaggcaaaagaaaaaatcagtagtacttatctccttatttaaaattttgataatt

SEQ ID NO: 99166 - DNA, 80 bp, synthetic construct
  misc_feature 1..80: note = Artificially Synthesized Probe
  source 1..80: mol_type = other DNA
acagaaggccacattatagtcagtttttttcatacttggctttactctgaacctctctaagaagcccaagttaatgaact

SEQ ID NO: 99167 - DNA, 80 bp, synthetic construct
  misc_feature 1..80: note = Artificially Synthesized Probe
  source 1..80: mol_type = other DNA
attttaagaaaagattactctatgagaggtatttaatgagccaagaaaacagcattctttgttttatgttaaaaagataa

SEQ ID NO: 99168 - DNA, 80 bp, synthetic construct; identical to SEQ ID NO: 35132
  misc_feature 1..80: note = Artificially Synthesized Probe
  source 1..80: mol_type = other DNA

SEQ ID NO: 99169 - DNA, 80 bp, synthetic construct
  misc_feature 1..80: note = Artificially Synthesized Probe
  source 1..80: mol_type = other DNA
atggctctagtttttcttggatggattcaggaaatctggaccaccaacatgactgcctaatcctggcaaggaaaattgtt

SEQ ID NO: 99170 - DNA, 80 bp, synthetic construct
  misc_feature 1..80: note = Artificially Synthesized Probe
  source 1..80: mol_type = other DNA
cacccatctacaggaatgtatacaactcacagtgactttctgctgttttacaaacactacgttagatatttaccaagtgg

SEQ ID NO: 99171 - DNA, 80 bp, synthetic construct
  misc_feature 1..80: note = Artificially Synthesized Probe
  source 1..80: mol_type = other DNA
tcagaaaaagcaaagcaaactatatgaaacccacatttacagttttgtttttttttttatcgtgaaggtacaccccagtt

SEQ ID NO: 99172 - DNA, 80 bp, synthetic construct; identical to SEQ ID NO: 35133
  misc_feature 1..80: note = Artificially Synthesized Probe
  source 1..80: mol_type = other DNA

SEQ ID NO: 99173 - DNA, 80 bp, synthetic construct; identical to SEQ ID NO: 35021
  misc_feature 1..80: note = Artificially Synthesized Probe
  source 1..80: mol_type = other DNA

SEQ ID NO: 99174 - DNA, 80 bp, synthetic construct
  misc_feature 1..80: note = Artificially Synthesized Probe
  source 1..80: mol_type = other DNA
agggtcacatcttgggaataagaaccctatcccatgactaagatttgtgtcatcggactaagggcagaacagaagtaggc

SEQ ID NO: 99175 - DNA, 80 bp, synthetic construct
  misc_feature 1..80: note = Artificially Synthesized Probe
  source 1..80: mol_type = other DNA
aagtcatacccatggtccaaagaaggagcagttgatagaaacagaaacacatccatagacaacccagatgttaagaacca

SEQ ID NO: 99176 - DNA, 80 bp, synthetic construct; identical to SEQ ID NO: 35134
  misc_feature 1..80: note = Artificially Synthesized Probe
  source 1..80: mol_type = other DNA

SEQ ID NO: 99177 - DNA, 80 bp, synthetic construct
  misc_feature 1..80: note = Artificially Synthesized Probe
  source 1..80: mol_type = other DNA
gaaaaaacagtggagctgagtacaaaactaatcttcaaaagtagttatcttcatctgtcaatgtgatcttatcaaggatt

SEQ ID NO: 99178 - DNA, 80 bp, synthetic construct
  misc_feature 1..80: note = Artificially Synthesized Probe
  source 1..80: mol_type = other DNA
cttcaactttcttttcttaatccactaagcaatcgcatgaataaaaagataatcacatgccctgcatgcctgatagaatt

SEQ ID NO: 99179 - DNA, 80 bp, synthetic construct
  misc_feature 1..80: note = Artificially Synthesized Probe
  source 1..80: mol_type = other DNA
ttgcttaaaattctgtggaggctggcaaagcactgtagaatgattgacatggctgccttgatattgttcttgctttttct

SEQ ID NO: 99180 - DNA, 80 bp, synthetic construct; identical to SEQ ID NO: 35135
  misc_feature 1..80: note = Artificially Synthesized Probe
  source 1..80: mol_type = other DNA

SEQ ID NO: 99181 - DNA, 80 bp, synthetic construct
  misc_feature 1..80: note = Artificially Synthesized Probe
  source 1..80: mol_type = other DNA
agtaactgggattacaggtgcgtgccaccacgcccagctaatttttttgcatttttagtagagatgggatttcaccgtgt

SEQ ID NO: 99182 - DNA, 80 bp, synthetic construct
  misc_feature 1..80: note = Artificially Synthesized Probe
  source 1..80: mol_type = other DNA
gtacttggtgctactctaaacatacatccctgtgtgtttttagtccttattttcctttgtctctgcattggtatctcagc

SEQ ID NO: 99183 - DNA, 80 bp, synthetic construct
  misc_feature 1..80: note = Artificially Synthesized Probe
  source 1..80: mol_type = other DNA
cagaccaaaaatatataggcgaacacttagaacatatttgaaattctccatatataagtcaccaagttgaatgatcttca

SEQ ID NO: 99184 - DNA, 80 bp, synthetic construct
  misc_feature 1..80: note = Artificially Synthesized Probe
  source 1..80: mol_type = other DNA
atcaacccgtcatccaggttttaagccccacgtgcattaggtattcatcctaatgctctccctcccctttccccccaccc

SEQ ID NO: 99185 - DNA, 80 bp, synthetic construct
  misc_feature 1..80: note = Artificially Synthesized Probe
  source 1..80: mol_type = other DNA
agtctccaattcagaacccaaatgagaaagtgattatccatcttaccttcccttttattagataccacacaattcaagag

SEQ ID NO: 99186 - DNA, 80 bp, synthetic construct; identical to SEQ ID NO: 35136
  misc_feature 1..80: note = Artificially Synthesized Probe
  source 1..80: mol_type = other DNA

SEQ ID NO: 99187 - DNA, 80 bp, synthetic construct
  misc_feature 1..80: note = Artificially Synthesized Probe
  source 1..80: mol_type = other DNA
tgaggaatcgccacactgaaatttttaaaggagagaaccagtgtcttcttatttaacataaatagataagaaacatgtgc

SEQ ID NO: 99188 - DNA, 80 bp, synthetic construct
  misc_feature 1..80: note = Artificially Synthesized Probe
  source 1..80: mol_type = other DNA
gggttaactaccacaagagttgcataacagaataaagcaagcaactaaggcaccaaatgccacaaaaagactaaacaaga

SEQ ID NO: 99189 - DNA, 80 bp, synthetic construct
  misc_feature 1..80: note = Artificially Synthesized Probe
  source 1..80: mol_type = other DNA
tctttattccaatccaaacaacctattgttaagctttactgtcatcacagcttaaaatattttcactttagtgaagaaaa

SEQ ID NO: 99190 - DNA, 80 bp, synthetic construct
  misc_feature 1..80: note = Artificially Synthesized Probe
  source 1..80: mol_type = other DNA
ccaccaaagcaaagaacaactactcctcacaaaaatgaaggaaaagaagagaaatttcatattaccaaattttatttctc

SEQ ID NO: 99191 - DNA, 80 bp, synthetic construct; identical to SEQ ID NO: 35137
  misc_feature 1..80: note = Artificially Synthesized Probe
  source 1..80: mol_type = other DNA

SEQ ID NO: 99192 - DNA, 80 bp, synthetic construct
  misc_feature 1..80: note = Artificially Synthesized Probe
  source 1..80: mol_type = other DNA
aaggcaatgattaatgtaaaaaggaatgtcactaataaagggatttgaggcaactctggcaaaaggttatggattctggc

SEQ ID NO: 99193 - DNA, 80 bp, synthetic construct
  misc_feature 1..80: note = Artificially Synthesized Probe
  source 1..80: mol_type = other DNA
atctatttggttttacttaaaaacaagataataggtaacatgttaaggggagactctaagagtatgccttaatctgaaaa

SEQ ID NO: 99194 - DNA, 80 bp, synthetic construct
  misc_feature 1..80: note = Artificially Synthesized Probe
  source 1..80: mol_type = other DNA
gtagctgggactccagtcatgcgccaccacacctggctaatttttgtatttttagtagagatagggtttcactatgttgg

SEQ ID NO: 99195 - DNA, 80 bp, synthetic construct; identical to SEQ ID NO: 35138
  misc_feature 1..80: note = Artificially Synthesized Probe
  source 1..80: mol_type = other DNA

SEQ ID NO: 99196 - DNA, 80 bp, synthetic construct
  misc_feature 1..80: note = Artificially Synthesized Probe
  source 1..80: mol_type = other DNA
agggttcatagccatctcgacactgcaatgctaaaaataaaaacaaatgcacattagaagtaagtcactaatcataaccc

SEQ ID NO: 99197 - DNA, 80 bp, synthetic construct
  misc_feature 1..80: note = Artificially Synthesized Probe
  source 1..80: mol_type = other DNA
tgatgctcttatttctctgtgttttagtatctccagctgttacatctccatctcccaattaaaaattaaagccataccat

SEQ ID NO: 99198 - DNA, 80 bp, synthetic construct
  misc_feature 1..80: note = Artificially Synthesized Probe
  source 1..80: mol_type = other DNA
aagtaatcagaaacagcaataacagtaattcgacaaactaaaattgagagcctagtatgcaccaggcacaaaattaggat

SEQ ID NO: 99199 - DNA, 80 bp, synthetic construct; identical to SEQ ID NO: 35139
  misc_feature 1..80: note = Artificially Synthesized Probe
  source 1..80: mol_type = other DNA

SEQ ID NO: 99200 - DNA, 80 bp, synthetic construct
  misc_feature 1..80: note = Artificially Synthesized Probe
  source 1..80: mol_type = other DNA
ccaaaatacatatcaagaaccctaacaactggaaaggtaagacagaaagaaacctagtcaaacaataaatatcaaattga

SEQ ID NO: 99201 - DNA, 80 bp, synthetic construct
  misc_feature 1..80: note = Artificially Synthesized Probe
  source 1..80: mol_type = other DNA
ctggccatccctggccacgaaaccagtagcccaggtgcaagctggatgtcagaacaactcctccaacaacaattactgca

SEQ ID NO: 99202 - DNA, 80 bp, synthetic construct
  misc_feature 1..80: note = Artificially Synthesized Probe
  source 1..80: mol_type = other DNA
acataaattagctaactaattcaatcttcacaacaacccttagaagtaaatttcattatacccactctcaggtgagaaaa

SEQ ID NO: 99203 - DNA, 80 bp, synthetic construct
  misc_feature 1..80: note = Artificially Synthesized Probe
  source 1..80: mol_type = other DNA
ttgagttatgacttgtgctatatgtcaaagtgctaggcttcataaaattagccttgaagttcagaaaccaaacacctacc

SEQ ID NO: 99204 - DNA, 80 bp, synthetic construct
  misc_feature 1..80: note = Artificially Synthesized Probe
  source 1..80: mol_type = other DNA
ggattggcagcgtggatattattatacccatttaccaatagtagaggccagagagaataagtggcctctttatggggcat

SEQ ID NO: 99205 - DNA, 80 bp, synthetic construct; identical to SEQ ID NO: 35140
  misc_feature 1..80: note = Artificially Synthesized Probe
  source 1..80: mol_type = other DNA

SEQ ID NO: 99206 - DNA, 80 bp, synthetic construct
  misc_feature 1..80: note = Artificially Synthesized Probe
  source 1..80: mol_type = other DNA
tgtaggcacagaaaaagctgtagctctgtccccctgcaggaatcctggtgcagtggagggactcaggagacctgaaatcc

SEQ ID NO: 99207 - DNA, 80 bp, synthetic construct
  misc_feature 1..80: note = Artificially Synthesized Probe
  source 1..80: mol_type = other DNA
aagaaacctggagtacataatgacccagccacccatgactcagaatgccatgggtgcaaaaatcacggcctgttcctatt

SEQ ID NO: 99208 - DNA, 80 bp, synthetic construct
  misc_feature 1..80: note = Artificially Synthesized Probe
  source 1..80: mol_type = other DNA
taatgccacttggctgatgtgtgggatcatgctaccttgaacctttagcatttactgagccacggttctcaaactttagt

SEQ ID NO: 99209 - DNA, 80 bp, synthetic construct; identical to SEQ ID NO: 35141
  misc_feature 1..80: note = Artificially Synthesized Probe
  source 1..80: mol_type = other DNA

SEQ ID NO: 99210 - DNA, 80 bp, synthetic construct
  misc_feature 1..80: note = Artificially Synthesized Probe
  source 1..80: mol_type = other DNA
accccaaatattttaaatcagtttattgaaatgatgtctgtacacccataccaagttatggaagtgtccatcaacagatg

SEQ ID NO: 99211 - DNA, 80 bp, synthetic construct
  misc_feature 1..80: note = Artificially Synthesized Probe
  source 1..80: mol_type = other DNA
cagcacgccagtaatcgcagctactcaggaggctgaggcaggagaatcacttgaacctggggggcggaggttgcagtgag

SEQ ID NO: 99212 - DNA, 80 bp, synthetic construct; identical to SEQ ID NO: 35142
  misc_feature 1..80: note = Artificially Synthesized Probe
  source 1..80: mol_type = other DNA

SEQ ID NO: 99213 - DNA, 80 bp, synthetic construct
  misc_feature 1..80: note = Artificially Synthesized Probe
  source 1..80: mol_type = other DNA
ttgtacatttcaaaattgctaagagagtaaatttcaaaaaatgttaaatatttgagatgaaggatacactaactaccttt

SEQ ID NO: 99214 - DNA, 80 bp, synthetic construct
  misc_feature 1..80: note = Artificially Synthesized Probe
  source 1..80: mol_type = other DNA
caagaagctgcgagcatcctggagcagttgttcaggtggcatcaataccacaataaccagggtaccttctgccaggttct

SEQ ID NO: 99215 - DNA, 80 bp, synthetic construct
  misc_feature 1..80: note = Artificially Synthesized Probe
  source 1..80: mol_type = other DNA
caaagagaaattaaaactttgataacctgaagccatgaaagtgagaccgggacagacctcatttcaaaattcaatttact

SEQ ID NO: 99216 - DNA, 80 bp, synthetic construct
  misc_feature 1..80: note = Artificially Synthesized Probe
  source 1..80: mol_type = other DNA
aaccccaattttcatgtcaataaatatttgctggctgaaataaatcttatttactgtgtgtgtatctgctgtttgtgcag

SEQ ID NO: 99217 - DNA, 80 bp, synthetic construct
  misc_feature 1..80: note = Artificially Synthesized Probe
  source 1..80: mol_type = other DNA
atctaatattcagaacatatttagaaagcatctactatcggcaggcacaagccctgatgtcagggataccgtagtataca

SEQ ID NO: 99218 - DNA, 80 bp, synthetic construct; identical to SEQ ID NO: 35143
  misc_feature 1..80: note = Artificially Synthesized Probe
  source 1..80: mol_type = other DNA

SEQ ID NO: 99219 - DNA, 80 bp, synthetic construct
  misc_feature 1..80: note = Artificially Synthesized Probe
  source 1..80: mol_type = other DNA
gaatcacagctctaagtaggagagtaaactactcagctgttttaaataagaaaaatgacacagatttatgtttgaaaaaa

SEQ ID NO: 99220 - DNA, 80 bp, synthetic construct
  misc_feature 1..80: note = Artificially Synthesized Probe
  source 1..80: mol_type = other DNA
agcactacttgtaacatgttgccccactactttctaacctacaagggctgtcagttcttacttagttctcagaacttagc

SEQ ID NO: 99221 - DNA, 80 bp, synthetic construct; identical to SEQ ID NO: 35144
  misc_feature 1..80: note = Artificially Synthesized Probe
  source 1..80: mol_type = other DNA

SEQ ID NO: 99222 - DNA, 80 bp, synthetic construct
  misc_feature 1..80: note = Artificially Synthesized Probe
  source 1..80: mol_type = other DNA
gtaacactcatgactctcaattcagcactacatggtcttctagctctctgctttttcacttttaagttcctgggatatgg

SEQ ID NO: 99223 - DNA, 80 bp, synthetic construct
  misc_feature 1..80: note = Artificially Synthesized Probe
  source 1..80: mol_type = other DNA
aaatctcacgttgaaacgtaatccccaatgttgaaggtggggcctactgggaggtgttcaggttatgggggcagatctct

SEQ ID NO: 99224 - DNA, 80 bp, synthetic construct; identical to SEQ ID NO: 35022
  misc_feature 1..80: note = Artificially Synthesized Probe
  source 1..80: mol_type = other DNA

SEQ ID NO: 99225 - DNA, 80 bp, synthetic construct
  misc_feature 1..80: note = Artificially Synthesized Probe
  source 1..80: mol_type = other DNA
caccagaagcagatgttggctctaaacttcttgtacaatctgcaaagctattagccaaataaaccttttttctttataaa

SEQ ID NO: 99226 - DNA, 80 bp, synthetic construct
  misc_feature 1..80: note = Artificially Synthesized Probe
  source 1..80: mol_type = other DNA
tttgtcgagaaactactgtcagcattgtcccctactaggcactgcatgaaaattaagcacaaataaaacaaacaatctct

SEQ ID NO: 99227 - DNA, 80 bp, synthetic construct; identical to SEQ ID NO: 35145
  misc_feature 1..80: note = Artificially Synthesized Probe
  source 1..80: mol_type = other DNA

SEQ ID NO: 99228 - DNA, 80 bp, synthetic construct
  misc_feature 1..80: note = Artificially Synthesized Probe
  source 1..80: mol_type = other DNA
acctaagttttccaatgcttttcactatcataccagctacatatcactggcttaaaagcctccctttgttttaggaatct

SEQ ID NO: 99229 - DNA, 80 bp, synthetic construct
  misc_feature 1..80: note = Artificially Synthesized Probe
  source 1..80: mol_type = other DNA
ttcatatccttctccctatgtgcagtgtggtatctgtgcttagacccactgctcaatcggaaggtattttaacgtcttga

SEQ ID NO: 99230 - DNA, 80 bp, synthetic construct; identical to SEQ ID NO: 35146
  misc_feature 1..80: note = Artificially Synthesized Probe
  source 1..80: mol_type = other DNA

SEQ ID NO: 99231 - DNA, 80 bp, synthetic construct
  misc_feature 1..80: note = Artificially Synthesized Probe
  source 1..80: mol_type = other DNA
ccaagtggtacatttaaataaaaacgaagtggagaaacatctgtcttcctccttgaaatttgtcttgattaaaaggaaaa

SEQ ID NO: 99232 - DNA, 80 bp, synthetic construct
  misc_feature 1..80: note = Artificially Synthesized Probe
  source 1..80: mol_type = other DNA
tcatagcaaattattactgcttttcaaaaactgaaaatataccttaagaaaatataatcaatgataacaacttataaatg

SEQ ID NO: 99233 - DNA, 80 bp, synthetic construct
  misc_feature 1..80: note = Artificially Synthesized Probe
  source 1..80: mol_type = other DNA
tattgaaatctactatatactgtgtagtttttccttttatttttctcttattaaagacttcagaaaaaaattcaatttat

SEQ ID NO: 99234 - DNA, 80 bp, synthetic construct; identical to SEQ ID NO: 35147
  misc_feature 1..80: note = Artificially Synthesized Probe
  source 1..80: mol_type = other DNA

SEQ ID NO: 99235 - DNA, 80 bp, synthetic construct
  misc_feature 1..80: note = Artificially Synthesized Probe
  source 1..80: mol_type = other DNA
tacaagcctgttaagtcaggttttcaaacaaagctgcatatctgaaacaaaagtcaacctggttcatgcttcctctactt

SEQ ID NO: 99236 - DNA, 80 bp, synthetic construct
  misc_feature 1..80: note = Artificially Synthesized Probe
  source 1..80: mol_type = other DNA
tctttgtacacctgggacctaagaagatgcctggaccacagcaggtactcaatactcaataagatattcaataaactaaa

SEQ ID NO: 99237 - DNA, 80 bp, synthetic construct
  misc_feature 1..80: note = Artificially Synthesized Probe
  source 1..80: mol_type = other DNA
agaattgtacttttctaatctttgcaaaactgaaacagttttgaaagttcctttcttaccatttgtttgaatgaagatac

SEQ ID NO: 99238 - DNA, 80 bp, synthetic construct
  misc_feature 1..80: note = Artificially Synthesized Probe
  source 1..80: mol_type = other DNA
gtattatcttccccatgagtaggttcactaatacacatcggcagaacaataagcaccaacgagatccaaatgacactgac

SEQ ID NO: 99239 - DNA, 80 bp, synthetic construct; identical to SEQ ID NO: 35148
  misc_feature 1..80: note = Artificially Synthesized Probe
  source 1..80: mol_type = other DNA

SEQ ID NO: 99240 - DNA, 80 bp, synthetic construct
  misc_feature 1..80: note = Artificially Synthesized Probe
  source 1..80: mol_type = other DNA
cctgcctcagcctcccgagtagctgggactataggtgcccgccaccacatccggctaattttttttgtatttttagtaga

SEQ ID NO: 99241 - DNA, 80 bp, synthetic construct
  misc_feature 1..80: note = Artificially Synthesized Probe
  source 1..80: mol_type = other DNA
tttaagtacacttgctggaaaaaaatttataaatatatataatcttcttgctatacacccaaaagaaacaacatattctt

SEQ ID NO: 99242 - DNA, 80 bp, synthetic construct
  misc_feature 1..80: note = Artificially Synthesized Probe
  source 1..80: mol_type = other DNA
tacttcctaaaacaaaacagggaaaatccaaagaacaacctcagatttccctacatgcatccttcctcatagccttttta

SEQ ID NO: 99243 - DNA, 80 bp, synthetic construct; identical to SEQ ID NO: 35149
  misc_feature 1..80: note = Artificially Synthesized Probe
  source 1..80: mol_type = other DNA

SEQ ID NO: 99244 - DNA, 80 bp, synthetic construct
  misc_feature 1..80: note = Artificially Synthesized Probe
  source 1..80: mol_type = other DNA
ttcttttattttattattatactttaagttttagggtacatgtgcacaacgtgcaggtttgttacatatgtatacatgtg

SEQ ID NO: 99245 - DNA, 80 bp, synthetic construct
  misc_feature 1..80: note = Artificially Synthesized Probe
  source 1..80: mol_type = other DNA
ggaaagcagataatagaaaaatatcaaatctttattaaataccaaagggagaagaaaacataaaatatagccctaaacgg

SEQ ID NO: 99246 - DNA, 80 bp, synthetic construct
  misc_feature 1..80: note = Artificially Synthesized Probe
  source 1..80: mol_type = other DNA
cagaaggtaaaggcagatgggtatgtccttatagcacaccagatattacttgtacaggctctttcaatatttggaaaagg

SEQ ID NO: 99247 - DNA, 80 bp, synthetic construct
  misc_feature 1..80: note = Artificially Synthesized Probe
  source 1..80: mol_type = other DNA
gtagtcccagctactagggagtctgaggcaggagaatggaatgaacccgggaggcggagcttgcaatgagccgagattgt

SEQ ID NO: 99248 - DNA, 80 bp, synthetic construct
  misc_feature 1..80: note = Artificially Synthesized Probe
  source 1..80: mol_type = other DNA
cccacatcaacacaacttgggtctcctggtcaacagaaaaaaataataatgtgtacttaatgatatttgatgaggagctg

SEQ ID NO: 99249 - DNA, 80 bp, synthetic construct; identical to SEQ ID NO: 35150
  misc_feature 1..80: note = Artificially Synthesized Probe
  source 1..80: mol_type = other DNA

SEQ ID NO: 99250 - DNA, 80 bp, synthetic construct
  misc_feature 1..80: note = Artificially Synthesized Probe
  source 1..80: mol_type = other DNA
ctttgataaaggctttctttgttctagagaggtcaaaagatttctctccagcttcagcctgaagatctcggatcaaaaga

SEQ ID NO: 99251 - DNA, 80 bp, synthetic construct
  misc_feature 1..80: note = Artificially Synthesized Probe
  source 1..80: mol_type = other DNA
gaaagaaaaaaagaaaagagagagaggaagggaaagggaaagagagaggaaggaagcaaaagaaagaaaggagagagaga

SEQ ID NO: 99252 - DNA, 80 bp, synthetic construct; identical to SEQ ID NO: 35151
  misc_feature 1..80: note = Artificially Synthesized Probe
  source 1..80: mol_type = other DNA

SEQ ID NO: 99253 - DNA, 80 bp, synthetic construct
  misc_feature 1..80: note = Artificially Synthesized Probe
  source 1..80: mol_type = other DNA
ctcttttgtttatcactcttaaaattctctcttcaataaaactccattctactttagggacatgggagtgacactcatgt

SEQ ID NO: 99254 - DNA, 80 bp, synthetic construct
  misc_feature 1..80: note = Artificially Synthesized Probe
  source 1..80: mol_type = other DNA
atttagtaaatgtggttattagtgtagtgttggtgattaagtaatatttctcctcctccccactaaagcacacattacct

SEQ ID NO: 99255 - DNA, 80 bp, synthetic construct
  misc_feature 1..80: note = Artificially Synthesized Probe
  source 1..80: mol_type = other DNA
agattaggagtcaaagaaacaacttgctttggcaagttctttaacccttgggcctaagttctctcacctatgaaagaatg

SEQ ID NO: 99256 - DNA, 80 bp, synthetic construct
  misc_feature 1..80: note = Artificially Synthesized Probe
  source 1..80: mol_type = other DNA
gttaagaagaacaagtttataaatttgagcacagtgagtttttgtgtgtgcccacccacctccacggaaaataccccaaa

SEQ ID NO: 99257 - DNA, 80 bp, synthetic construct
  misc_feature 1..80: note = Artificially Synthesized Probe
  source 1..80: mol_type = other DNA
gggcatcatgaagaaaagcaaggcatctgatagtactccatacaatatatttaggattaacatctcagcttctaataggc

SEQ ID NO: 99258 - DNA, 80 bp, synthetic construct; identical to SEQ ID NO: 35152
  misc_feature 1..80: note = Artificially Synthesized Probe
  source 1..80: mol_type = other DNA

SEQ ID NO: 99259 - DNA, 80 bp, synthetic construct
  misc_feature 1..80: note = Artificially Synthesized Probe
  source 1..80: mol_type = other DNA
tgtgactacaacattctcaggtgggtaaccacccacataccagctatgcacatcaaaaacatttacacgaaagatcagct

SEQ ID NO: 99260 - DNA, 80 bp, synthetic construct
  misc_feature 1..80: note = Artificially Synthesized Probe
  source 1..80: mol_type = other DNA
accccacttttgaaaacttgccaactctaggattcaacatactacactatgcattatttctccaggaaaaaaaaaaaact

SEQ ID NO: 99261 - DNA, 80 bp, synthetic construct
  misc_feature 1..80: note = Artificially Synthesized Probe
  source 1..80: mol_type = other DNA
ggaaccagatcataagtatgatataccctatcttgacaagattttactcttaaaaatgaaggccctattaaaagtaggta

SEQ ID NO: 99262 - DNA, 80 bp, synthetic construct; identical to SEQ ID NO: 35153
  misc_feature 1..80: note = Artificially Synthesized Probe
  source 1..80: mol_type = other DNA

SEQ ID NO: 99263 - DNA, 80 bp, synthetic construct
  misc_feature 1..80: note = Artificially Synthesized Probe
  source 1..80: mol_type = other DNA
attttatcactaagtttggtatactgtcccacaaaatgccaccttattccatgtccataccactaaagaactatagaaaa

SEQ ID NO: 99264 - DNA, 80 bp, synthetic construct
  misc_feature 1..80: note = Artificially Synthesized Probe
  source 1..80: mol_type = other DNA
caaaattcagggtatttggtgatagaaatctaaggaggaaatgaatttttgaaatgtctcaggccaaaagaaaactaaaa

SEQ ID NO: 99265 - DNA, 80 bp, synthetic construct; identical to SEQ ID NO: 35023
  misc_feature 1..80: note = Artificially Synthesized Probe
  source 1..80: mol_type = other DNA

SEQ ID NO: 99266 - DNA, 80 bp, synthetic construct; identical to SEQ ID NO: 35154
  misc_feature 1..80: note = Artificially Synthesized Probe
  source 1..80: mol_type = other DNA

SEQ ID NO: 99267 - DNA, 80 bp, synthetic construct
  misc_feature 1..80: note = Artificially Synthesized Probe
  source 1..80: mol_type = other DNA
aaatgatgatcagtgtaacaaaagaatctttcactgcatttgctcagtgaatcattgtcttagctaatagctaatcccca

SEQ ID NO: 99268 - DNA, 80 bp, synthetic construct
  misc_feature 1..80: note = Artificially Synthesized Probe
  source 1..80: mol_type = other DNA
acactctggtagattcccccttctactgctctgtcatttctagcttacttgctagttaaggtggaaagactttaaaaaaa

SEQ ID NO: 99269 - DNA, 80 bp, synthetic construct
  misc_feature 1..80: note = Artificially Synthesized Probe
  source 1..80: mol_type = other DNA
gtattccctcttaaggagagatacaacctaattcacatatatcttctatctttatcttttctacctcaagtatacagttt

SEQ ID NO: 99270 - DNA, 80 bp, synthetic construct
  misc_feature 1..80: note = Artificially Synthesized Probe
  source 1..80: mol_type = other DNA
agaagcaggggaggtgtaagaccatccactggggcactggaagaaattttaaaacatctccatatttatgggctaaaaaa

SEQ ID NO: 99271 - DNA, 80 bp, synthetic construct; identical to SEQ ID NO: 35155
  misc_feature 1..80: note = Artificially Synthesized Probe
  source 1..80: mol_type = other DNA

SEQ ID NO: 99272 - DNA, 80 bp, synthetic construct
  misc_feature 1..80: note = Artificially Synthesized Probe
  source 1..80: mol_type = other DNA
ctctatcttctagccatctgaccaagggccaatcacttcgcacttccaggcctttccagctccttcctactcaaattttg

SEQ ID NO: 99273 - DNA, 80 bp, synthetic construct
  misc_feature 1..80: note = Artificially Synthesized Probe
  source 1..80: mol_type = other DNA
gatctgtttatatgatgtgaaagggcactttctggaaggctctgtaagtgttctcaggttattaccagtgtcccccagta

SEQ ID NO: 99274 - DNA, 80 bp, synthetic construct
  misc_feature 1..80: note = Artificially Synthesized Probe
  source 1..80: mol_type = other DNA
tgagaaggcaaagataggcagagagagagggtcattatgcaatgagcattcctggcccattgtcagcaagggagagcaca

SEQ ID NO: 99275 - DNA, 80 bp, synthetic construct
  misc_feature 1..80: note = Artificially Synthesized Probe
  source 1..80: mol_type = other DNA
caaaatcacccacctaatgaagatatatgatctagcaaaagaaaatgaggctgagaacatccacaggtaagccaggctat

SEQ ID NO: 99276 - DNA, 80 bp, synthetic construct; identical to SEQ ID NO: 35156
  misc_feature 1..80: note = Artificially Synthesized Probe
  source 1..80: mol_type = other DNA

SEQ ID NO: 99277 - DNA, 80 bp, synthetic construct
  misc_feature 1..80: note = Artificially Synthesized Probe
  source 1..80: mol_type = other DNA
gcattcccaggtgcacttctaaggaagtggtatggtgtgaagaataaagcaatggaccaagggctaaaaagtcagacatc

SEQ ID NO: 99278 - DNA, 80 bp, synthetic construct
  misc_feature 1..80: note = Artificially Synthesized Probe
  source 1..80: mol_type = other DNA
ccagtaatcccggctactcgggaggctaaggcaggagaatcgcttgagcctgggaggtggaggttgtggtaagccaacat

SEQ ID NO: 99279 - DNA, 80 bp, synthetic construct
  misc_feature 1..80: note = Artificially Synthesized Probe
  source 1..80: mol_type = other DNA
tctattgcccaggttggagtgcaatggcgtgatctcagctcatggcagcctccgcctcccaggttcaagcgattctcctg

SEQ ID NO: 99280 - DNA, 80 bp, synthetic construct; identical to SEQ ID NO: 35157
  misc_feature 1..80: note = Artificially Synthesized Probe
  source 1..80: mol_type = other DNA

SEQ ID NO: 99281 - DNA, 80 bp, synthetic construct
  misc_feature 1..80: note = Artificially Synthesized Probe
  source 1..80: mol_type = other DNA
tactatgtgatactctctattctacccttttttcccccaaagtgctgttggagacctaccaaattggtttcatgacccat

SEQ ID NO: 99282 - DNA, 80 bp, synthetic construct
  misc_feature 1..80: note = Artificially Synthesized Probe
  source 1..80: mol_type = other DNA
ggctcactgcagcctcaacctctggggctcaagcaatcctcctgcctcagcctcccaagtagctgggaccacaggtgtgc

SEQ ID NO: 99283 - DNA, 80 bp, synthetic construct
  misc_feature 1..80: note = Artificially Synthesized Probe
  source 1..80: mol_type = other DNA
ttttaactagctgcataatcttgggtaaactactaacctttccaaagtacatcttttaaattaagactaatacaccaggg

SEQ ID NO: 99284 - DNA, 80 bp, synthetic construct; identical to SEQ ID NO: 35158
  misc_feature 1..80: note = Artificially Synthesized Probe
  source 1..80: mol_type = other DNA

SEQ ID NO: 99285 - DNA, 80 bp, synthetic construct
  misc_feature 1..80: note = Artificially Synthesized Probe
  source 1..80: mol_type = other DNA
tgttcccctggcattcaaagttgtcaaacaggcactcgaccgtgttgcacagctcatcacactggttgttgatataatcc

SEQ ID NO: 99286 - DNA, 80 bp, synthetic construct
  misc_feature 1..80: note = Artificially Synthesized Probe
  source 1..80: mol_type = other DNA
ccagcaacgcctgcacagcacccctgcccaaaaatccaaacaccttgagattgttgtaagccagtgactctcaaagtgta

SEQ ID NO: 99287 - DNA, 80 bp, synthetic construct
  misc_feature 1..80: note = Artificially Synthesized Probe
  source 1..80: mol_type = other DNA
gcattacaaactgatgatttagggaccaatagcaattccagggagctacatgtacaatcaaacggactcctgcaaagttt

SEQ ID NO: 99288 - DNA, 80 bp, synthetic construct
  misc_feature 1..80: note = Artificially Synthesized Probe
  source 1..80: mol_type = other DNA
tattcagcacaaagcctgattgctaaaaaaatgcaaaacctatttgttaaatgatcttttatctaagcacattccctggg

SEQ ID NO: 99289 - DNA, 80 bp, synthetic construct; identical to SEQ ID NO: 35159
  misc_feature 1..80: note = Artificially Synthesized Probe
  source 1..80: mol_type = other DNA

SEQ ID NO: 99290 - DNA, 80 bp, synthetic construct
  misc_feature 1..80: note = Artificially Synthesized Probe
  source 1..80: mol_type = other DNA
tagaaaaaacacactgttttttatcaaaaggcaggaaaatataactgtcttctttctactctggtaaaggatttctaaat

SEQ ID NO: 99291 - DNA, 80 bp, synthetic construct
  misc_feature 1..80: note = Artificially Synthesized Probe
  source 1..80: mol_type = other DNA
ctacaaataaaaacatggccttgtctctataaaagatacaatgtacatagaagtgttttgcaaactattatatattatct

SEQ ID NO: 99292 - DNA, 80 bp, synthetic construct; identical to SEQ ID NO: 35160
  misc_feature 1..80: note = Artificially Synthesized Probe
  source 1..80: mol_type = other DNA

SEQ ID NO: 99293 - DNA, 80 bp, synthetic construct
  misc_feature 1..80: note = Artificially Synthesized Probe
  source 1..80: mol_type = other DNA
tcctttgctatgggtacactgtcttttcatgtggcctcaaagaaatagttgagccattattgttgttgataatgacgagc

SEQ ID NO: 99294 - DNA, 80 bp, synthetic construct
  misc_feature 1..80: note = Artificially Synthesized Probe
  source 1..80: mol_type = other DNA
gccaactgagattaggcactattataaaaaaagttttgaaaaaacaattccaaggtctattcctcctcccaacacacaca

SEQ ID NO: 99295 - DNA, 80 bp, synthetic construct
  misc_feature 1..80: note = Artificially Synthesized Probe
  source 1..80: mol_type = other DNA
taatttcaacctgtcttgaataaaaattataatacatatataattttctatgaaaaaattgtatgtattttggataatct

SEQ ID NO: 99296 - DNA, 80 bp, synthetic construct
  misc_feature 1..80: note = Artificially Synthesized Probe
  source 1..80: mol_type = other DNA
tgctggggggtgccgtgtagagttcacagcggctacccgagaatggtggggcacactggcaggagtaataaggaggctgg

SEQ ID NO: 99297 - DNA, 80 bp, synthetic construct; identical to SEQ ID NO: 35010
  misc_feature 1..80: note = Artificially Synthesized Probe
  source 1..80: mol_type = other DNA

SEQ ID NO: 99298 - DNA, 80 bp, synthetic construct; identical to SEQ ID NO: 35161
  misc_feature 1..80: note = Artificially Synthesized Probe
  source 1..80: mol_type = other DNA

SEQ ID NO: 99299 - DNA, 80 bp, synthetic construct
  misc_feature 1..80: note = Artificially Synthesized Probe
  source 1..80: mol_type = other DNA
atgtaaacaaggcagagactaggctaaaataaagtgtaaaatgtgagtttgttaatttttctttccccgtgaacatttgg

SEQ ID NO: 99300 - DNA, 80 bp, synthetic construct
  misc_feature 1..80: note = Artificially Synthesized Probe
  source 1..80: mol_type = other DNA
tgctaaactgcacttacataagtgacagtgcaatagtgacacacccatctgtgtacacaatttgtattctgtttaaattt

SEQ ID NO: 99301 - DNA, 80 bp, synthetic construct
  misc_feature 1..80: note = Artificially Synthesized Probe
  source 1..80: mol_type = other DNA
aatggctgaggaaaaatactaagaaatagacatcagaaaattaaaaacgcctgtaaacgagggtgacattatagacccac

SEQ ID NO: 99302 - DNA, 80 bp, synthetic construct
  misc_feature 1..80: note = Artificially Synthesized Probe
  source 1..80: mol_type = other DNA
gaatactcgaattctgctccatttctgtcatgctctgatgcagctaaccaaacagaaataaagagaatcctttcacatca

SEQ ID NO: 99303 - DNA, 80 bp, synthetic construct; identical to SEQ ID NO: 35162
  misc_feature 1..80: note = Artificially Synthesized Probe
  source 1..80: mol_type = other DNA

SEQ ID NO: 99304 - DNA, 80 bp, synthetic construct
  misc_feature 1..80: note = Artificially Synthesized Probe
  source 1..80: mol_type = other DNA
attattagatccattcctccagcccaaatgggggtggtaagtatacgttgttagaccagtgtaactaacttcaacaactt

SEQ ID NO: 99305 - DNA, 80 bp, synthetic construct
  misc_feature 1..80: note = Artificially Synthesized Probe
  source 1..80: mol_type = other DNA
ccgacataggccacttcgcatgcctgatcagatatgctttcccaatgctgaaaaccaactgcttctaacattttaaacct

SEQ ID NO: 99306 - DNA, 80 bp, synthetic construct
  misc_feature 1..80: note = Artificially Synthesized Probe
  source 1..80: mol_type = other DNA
tgcttctgagatgagaggtacaagacactacaaactatgaccacgcaaaagatttttaaaagcttttgattcacagtgag

SEQ ID NO: 99307 - DNA, 80 bp, synthetic construct; identical to SEQ ID NO: 35163
  misc_feature 1..80: note = Artificially Synthesized Probe
  source 1..80: mol_type = other DNA

SEQ ID NO: 99308 - DNA, 80 bp, synthetic construct
  misc_feature 1..80: note = Artificially Synthesized Probe
  source 1..80: mol_type = other DNA
taatattcttagctagtacaaatcagagcccagtctctctgattccaaaactcaccagctatgctaaagcaaaaatcaaa

SEQ ID NO: 99309 - DNA, 80 bp, synthetic construct; identical to SEQ ID NO: 35024
  misc_feature 1..80: note = Artificially Synthesized Probe
  source 1..80: mol_type = other DNA

SEQ ID NO: 99310 - DNA, 80 bp, synthetic construct
  misc_feature 1..80: note = Artificially Synthesized Probe
  source 1..80: mol_type = other DNA
cagtatgtttgaaagaacccacatgtctgagcatgcaggtgaaggacggtgttttaaaatagcagggataatctaagatt

SEQ ID NO: 99311 - DNA, 80 bp, synthetic construct; identical to SEQ ID NO: 35164
  misc_feature 1..80: note = Artificially Synthesized Probe
  source 1..80: mol_type = other DNA

SEQ ID NO: 99312 - DNA, 80 bp, synthetic construct
  misc_feature 1..80: note = Artificially Synthesized Probe
  source 1..80: mol_type = other DNA
atctctctcaattttttatttaaaaaaatccacacattcattcctggtcttgatctactaaagaatttcttttgggatca

SEQ ID NO: 99313 - DNA, 80 bp, synthetic construct
  misc_feature 1..80: note = Artificially Synthesized Probe
  source 1..80: mol_type = other DNA
attaaaatattgttttaaaaagtaaaatgtaagtcagtctagtgcacaaaatgtttacattaaatacaaaattacactat

SEQ ID NO: 99314 - DNA, 80 bp, synthetic construct
  misc_feature 1..80: note = Artificially Synthesized Probe
  source 1..80: mol_type = other DNA
taacatctattttaaggactaaaggaaacaagtaaagtattttgtccccaagcatctgtcacataataaaccctcagaat

SEQ ID NO: 99315 - DNA, 80 bp, synthetic construct; identical to SEQ ID NO: 35165
  misc_feature 1..80: note = Artificially Synthesized Probe
  source 1..80: mol_type = other DNA

SEQ ID NO: 99316 - DNA, 80 bp, synthetic construct
  misc_feature 1..80: note = Artificially Synthesized Probe
  source 1..80: mol_type = other DNA
agaagggagtggcaggtagaggataacttactaaatcggcaaaataaaatttggaattttttcttaaaacaaaacaaaat

SEQ ID NO: 99317 - DNA, 80 bp, synthetic construct
  misc_feature 1..80: note = Artificially Synthesized Probe
  source 1..80: mol_type = other DNA
tgtctcaactactacaaagaagtccaaagggacaggcagaggttcacaggcaaattattttcactgctgtcattgaaatt

SEQ ID NO: 99318 - DNA, 80 bp, synthetic construct
  misc_feature 1..80: note = Artificially Synthesized Probe
  source 1..80: mol_type = other DNA
gagattggattctggccccaaccctgacccagctctaggtacttgggccagtcactttgcttctttggttttctctcttt

SEQ ID NO: 99319 - DNA, 80 bp, synthetic construct; identical to SEQ ID NO: 35166
  misc_feature 1..80: note = Artificially Synthesized Probe
  source 1..80: mol_type = other DNA

SEQ ID NO: 99320 - DNA, 80 bp, synthetic construct
  misc_feature 1..80: note = Artificially Synthesized Probe
  source 1..80: mol_type = other DNA
tagctaaaattgagcttccctctactttaagagacaacttgcttccaaatggttcctgctaaagaatgtaagagcagcat

SEQ ID NO: 99321 - DNA, 80 bp, synthetic construct
  misc_feature 1..80: note = Artificially Synthesized Probe
  source 1..80: mol_type = other DNA
gtgatattgtggcttcagctccagatcacctcaataaagcaaacagtacaatgaagcaagtcagaaattttttggttccc

SEQ ID NO: 99322 - DNA, 80 bp, synthetic construct
  misc_feature 1..80: note = Artificially Synthesized Probe
  source 1..80: mol_type = other DNA
ggtgctgatacatttgctcgacatagggttgccacaaactttcaatttgtaaaaaataaaacaaaatctgtgaagcacaa

SEQ ID NO: 99323 - DNA, 80 bp, synthetic construct
  misc_feature 1..80: note = Artificially Synthesized Probe
  source 1..80: mol_type = other DNA
cctatttcctcatgaaggttcccaatcactcatccacttttgattaaagaaaagtgaatgcaccaagaagccagtctgta

SEQ ID NO: 99324 - DNA, 80 bp, synthetic construct
  misc_feature 1..80: note = Artificially Synthesized Probe
  source 1..80: mol_type = other DNA
attgaggcacaccatgcttcagaaactagcccaaagacacggggctagtaaatttagagcaaggcttgtatgttttccaa

SEQ ID NO: 99325 - DNA, 80 bp, synthetic construct; identical to SEQ ID NO: 35167
  misc_feature 1..80: note = Artificially Synthesized Probe
  source 1..80: mol_type = other DNA

SEQ ID NO: 99326 - DNA, 80 bp, synthetic construct
  misc_feature 1..80: note = Artificially Synthesized Probe
  source 1..80: mol_type = other DNA
agtgagggttatggagacagatctagctctgaatctcgactaagccacttactaactgcattatcctgtgcaagttagaa

SEQ ID NO: 99327 - DNA, 80 bp, synthetic construct
  misc_feature 1..80: note = Artificially Synthesized Probe
  source 1..80: mol_type = other DNA
aaagctgtgaacctaagttccaaattccttacctataatgtagaaaaatattgtctactccaaaggatagccatatgaat

SEQ ID NO: 99328 - DNA, 80 bp, synthetic construct; identical to SEQ ID NO: 35168
  misc_feature 1..80: note = Artificially Synthesized Probe
  source 1..80: mol_type = other DNA

SEQ ID NO: 99329 - DNA, 80 bp, synthetic construct
  misc_feature 1..80: note = Artificially Synthesized Probe
  source 1..80: mol_type = other DNA
gtttttcttaagactgacagtcatggattgggaagctcactgtttctgggagtgtctaaacagcttttatttgtttttgt

SEQ ID NO: 99330 - DNA, 80 bp, synthetic construct
  misc_feature 1..80: note = Artificially Synthesized Probe
  source 1..80: mol_type = other DNA
aaatcaagccacaagtttaagtaccagctctgtcacttattatgtaggggtaaacaatgtatacaagtcacctaacccct

SEQ ID NO: 99331 - DNA, 80 bp, synthetic construct
  misc_feature 1..80: note = Artificially Synthesized Probe
  source 1..80: mol_type = other DNA
ttcatctttaaaatggaaaaaactgaggcagagaaatgttgagccatagagggaaggctactggtttgaaatgtagggtg

SEQ ID NO: 99332 - DNA, 80 bp, synthetic construct
  misc_feature 1..80: note = Artificially Synthesized Probe
  source 1..80: mol_type = other DNA
ctggttaagcctctcagtgcacagtgtgggcataataattctcttacttcctcccagaaacagtattagacttcagagtg

SEQ ID NO: 99333 - DNA, 80 bp, synthetic construct; identical to SEQ ID NO: 35169
  misc_feature 1..80: note = Artificially Synthesized Probe
  source 1..80: mol_type = other DNA

SEQ ID NO: 99334 - DNA, 80 bp, synthetic construct
  misc_feature 1..80: note = Artificially Synthesized Probe
  source 1..80: mol_type = other DNA
agcttggaaaaaaagcaatctactcttctttattgctacattctttagcaacaacattgatctcctacccactgtgcaca

SEQ ID NO: 99335 - DNA, 80 bp, synthetic construct
  misc_feature 1..80: note = Artificially Synthesized Probe
  source 1..80: mol_type = other DNA
accaagctaactggctagacccactgtactggcatttatccattaggtcaaagtgtcagaattagcagtgcatggtagac

SEQ ID NO: 99336 - DNA, 80 bp, synthetic construct
  misc_feature 1..80: note = Artificially Synthesized Probe
  source 1..80: mol_type = other DNA
taaatgtcaatttcctagacatatacagctgaaagcatgctgatttacgatacagtcagataagaactttcaagtagcta

SEQ ID NO: 99337 - DNA, 80 bp, synthetic construct
  misc_feature 1..80: note = Artificially Synthesized Probe
  source 1..80: mol_type = other DNA
cccatttcgaagattggtaaaaccaggtttaatctcagttctgttcacagattgtatggaagagacaatgccccttctta

SEQ ID NO: 99338 - DNA, 80 bp, synthetic construct; identical to SEQ ID NO: 35170
  misc_feature 1..80: note = Artificially Synthesized Probe
  source 1..80: mol_type = other DNA

SEQ ID NO: 99339 - DNA, 80 bp, synthetic construct
  misc_feature 1..80: note = Artificially Synthesized Probe
  source 1..80: mol_type = other DNA
agtatattatgtgtgtgtgcatatatatatatgtagatctgttcataaactaaatatatatatatatatatataaaaata

SEQ ID NO: 99340 - DNA, 80 bp, synthetic construct
  misc_feature 1..80: note = Artificially Synthesized Probe
  source 1..80: mol_type = other DNA
aaaaaatcttgtaaaggtgccagagaaaatcagcaaagtataaatacgagttaattatctgtaaacataacgaataattc

SEQ ID NO: 99341 - DNA, 80 bp, synthetic construct
  misc_feature 1..80: note = Artificially Synthesized Probe
  source 1..80: mol_type = other DNA
gtcttttacctaaaattcctcatgaagattagaatgcactttaaatgttgtaataaagtaaatgcccttaatgtttctaa

SEQ ID NO: 99342 - DNA, 80 bp, synthetic construct; identical to SEQ ID NO: 35171
  misc_feature 1..80: note = Artificially Synthesized Probe
  source 1..80: mol_type = other DNA

SEQ ID NO: 99343 - DNA, 80 bp, synthetic construct
  misc_feature 1..80: note = Artificially Synthesized Probe
  source 1..80: mol_type = other DNA
ataaaaagagatgaaaaagaagcaaacaacaattttaaaacgtgcctgcctcagaacaaggcagtttattttagaatgta

SEQ ID NO: 99344 - DNA, 80 bp, synthetic construct
  misc_feature 1..80: note = Artificially Synthesized Probe
  source 1..80: mol_type = other DNA
tcatatgaataaacatatataataagggtgagagagctactcttaacccagaaacaggttctgcaacacccatagatcca

SEQ ID NO: 99345 - DNA, 80 bp, synthetic construct
  misc_feature 1..80: note = Artificially Synthesized Probe
  source 1..80: mol_type = other DNA
atgggaagaaaaacccagcccctcactgcctggccagaggacccggggtaccatggctggagcgacgtagctggctggaa

SEQ ID NO: 99346 - DNA, 80 bp, synthetic construct; identical to SEQ ID NO: 35172
  misc_feature 1..80: note = Artificially Synthesized Probe
  source 1..80: mol_type = other DNA

SEQ ID NO: 99347 - DNA, 80 bp, synthetic construct
  misc_feature 1..80: note = Artificially Synthesized Probe
  source 1..80: mol_type = other DNA
acaaaggggtttttgtcttttccccaagccaagttctaatacttctaaattacaacacagaaagaggaaaatggcagaca

SEQ ID NO: 99348 - DNA, 80 bp, synthetic construct; identical to SEQ ID NO: 35025
  misc_feature 1..80: note = Artificially Synthesized Probe
  source 1..80: mol_type = other DNA

SEQ ID NO: 99349 - DNA, 80 bp, synthetic construct
  misc_feature 1..80: note = Artificially Synthesized Probe
  source 1..80: mol_type = other DNA
tttcatattcctaattgtgtgcttatctgtcttgtctccatgatgatgtcagctccttgggagcaggaccatattttcta

SEQ ID NO: 99350 - DNA, 80 bp, synthetic construct
  misc_feature 1..80: note = Artificially Synthesized Probe
  source 1..80: mol_type = other DNA
ccaagggctagtgatcctaccagtgaattacatggaaacctatgtatttacatacacaagttaatacaataattcctttg

SEQ ID NO: 99351 - DNA, 80 bp, synthetic construct
  misc_feature 1..80: note = Artificially Synthesized Probe
  source 1..80: mol_type = other DNA
gatgcagtttgtcccgtctcaagcctatgagcatatcctttcagatctgaagccacttccttcttcctatcaaggacagt

SEQ ID NO: 99352 - DNA, 80 bp, synthetic construct; identical to SEQ ID NO: 35173
  misc_feature 1..80: note = Artificially Synthesized Probe
  source 1..80: mol_type = other DNA

SEQ ID NO: 99353 - DNA, 80 bp, synthetic construct
  misc_feature 1..80: note = Artificially Synthesized Probe
  source 1..80: mol_type = other DNA
aaaatgctggatttcgcaaatttcttttaagacaaaacaactttactaaccttataccatagcagctttcttctctgtac

SEQ ID NO: 99354 - DNA, 80 bp, synthetic construct
  misc_feature 1..80: note = Artificially Synthesized Probe
  source 1..80: mol_type = other DNA
gaatcacctggctatttcttgaacacacaaattcccagatgacactccagatgcactgaatcagaatctccatgagaaca

SEQ ID NO: 99355 - DNA, 80 bp, synthetic construct
  misc_feature 1..80: note = Artificially Synthesized Probe
  source 1..80: mol_type = other DNA
ttttatggagagctgggtgtcagctcagtaaagtctacagacaagcatctctttgggtccctatcacctgcacaggtctc

SEQ ID NO: 99356 - DNA, 80 bp, synthetic construct; identical to SEQ ID NO: 35174
  misc_feature 1..80: note = Artificially Synthesized Probe
  source 1..80: mol_type = other DNA

SEQ ID NO: 99357 - DNA, 80 bp, synthetic construct
  misc_feature 1..80: note = Artificially Synthesized Probe
  source 1..80: mol_type = other DNA
gtaagtaccaactcacacaacagggtgggtgagaaaagtgacttaaatcccatcaaaaaaagagaaatcacacttcagct

SEQ ID NO: 99358 - DNA, 80 bp, synthetic construct
  misc_feature 1..80: note = Artificially Synthesized Probe
  source 1..80: mol_type = other DNA
atcagcctctcctatagaatgttctaaaggtgggaaagcaggagtcatagatgctgtgactaagacctgctgctcagttg

SEQ ID NO: 99359 - DNA, 80 bp, synthetic construct
  misc_feature 1..80: note = Artificially Synthesized Probe
  source 1..80: mol_type = other DNA
tgtcagtagggtgttcaggggactctcttggttcaaaaaaaaaaaaaagcaaatatactttactaaatgtacatattctc

SEQ ID NO: 99360 - DNA, 80 bp, synthetic construct; identical to SEQ ID NO: 35175
  misc_feature 1..80: note = Artificially Synthesized Probe
  source 1..80: mol_type = other DNA

SEQ ID NO: 99361 - DNA, 80 bp, synthetic construct
  misc_feature 1..80: note = Artificially Synthesized Probe
  source 1..80: mol_type = other DNA
ccaaatgtaaggtaagcatgactcctgcaaatactgtttttaaaatgtctaggagtaccacagttgtccaaaataagaaa

SEQ ID NO: 99362 - DNA, 80 bp, synthetic construct
  misc_feature 1..80: note = Artificially Synthesized Probe
  source 1..80: mol_type = other DNA
gaggatgttataagagtttttgtgcacataagcgcatttgtacacgagatggaagcaatgaggacagtgaatgaggcact

SEQ ID NO: 99363 - DNA, 80 bp, synthetic construct
  misc_feature 1..80: note = Artificially Synthesized Probe
  source 1..80: mol_type = other DNA
gttcagtgatctgtccaaaatactacacatacggtaggctgacaaagaaagaaaagaagaccttttggtttcaagtcatt

SEQ ID NO: 99364 - DNA, 80 bp, synthetic construct; identical to SEQ ID NO: 35176
  misc_feature 1..80: note = Artificially Synthesized Probe
  source 1..80: mol_type = other DNA

SEQ ID NO: 99365 - DNA, 80 bp, synthetic construct
  misc_feature 1..80: note = Artificially Synthesized Probe
  source 1..80: mol_type = other DNA
tcttacgttagcaatttttaaattccttgagtcagaagcgttaaacactggaatgactaaggttacatttgttatggaaa

SEQ ID NO: 99366 - DNA, 80 bp, synthetic construct
  misc_feature 1..80: note = Artificially Synthesized Probe
  source 1..80: mol_type = other DNA
tgatttgcggtatagagaattttcatctgtgatacctcatttcaatcactttttggcctttctgtaacctaactcgtatt

SEQ ID NO: 99367 - DNA, 80 bp, synthetic construct
  misc_feature 1..80: note = Artificially Synthesized Probe
  source 1..80: mol_type = other DNA
aagatccaccccaacagattttgatgtagccaggacacagagttttttctaccataatgggagaggtagggaggaggatc

SEQ ID NO: 99368 - DNA, 80 bp, synthetic construct
  misc_feature 1..80: note = Artificially Synthesized Probe
  source 1..80: mol_type = other DNA
cagcaactacaatccaggtgaaccaaaagttgctcctctatgtcatagaagcctacaggagaggcagtagggtgggaatg

SEQ ID NO: 99369 - DNA, 80 bp, synthetic construct; identical to SEQ ID NO: 35177
  misc_feature 1..80: note = Artificially Synthesized Probe
  source 1..80: mol_type = other DNA

SEQ ID NO: 99370 - DNA, 80 bp, synthetic construct
  misc_feature 1..80: note = Artificially Synthesized Probe
  source 1..80: mol_type = other DNA
acactcaaaagtttagaagggtgtgctgcaactggtaccttagcaaaacacaataataaattaagaggattcaagaagcc

SEQ ID NO: 99371 - DNA, 80 bp, synthetic construct
  misc_feature 1..80: note = Artificially Synthesized Probe
  source 1..80: mol_type = other DNA
ttcactgtagactctaagaagatttaagatttgtaccgagaaacggcttctaaatctcttctactgcattagtttagcat

SEQ ID NO: 99372 - DNA, 80 bp, synthetic construct
  misc_feature 1..80: note = Artificially Synthesized Probe
  source 1..80: mol_type = other DNA
aagaagccctatgtgtcagagtaatcccatttctgatatcatattatttaatacttaatttttcaaatcactttacaatt

SEQ ID NO: 99373 - DNA, 80 bp, synthetic construct
  misc_feature 1..80: note = Artificially Synthesized Probe
  source 1..80: mol_type = other DNA
ctctatcctaaagctacacttaaagctttcactcaaagaaaaaggaaaagcaaaaacaccatcatatatgctctttatta

SEQ ID NO: 99374 - DNA, 80 bp, synthetic construct; identical to SEQ ID NO: 35178
  misc_feature 1..80: note = Artificially Synthesized Probe
  source 1..80: mol_type = other DNA

SEQ ID NO: 99375 - DNA, 80 bp, synthetic construct
  misc_feature 1..80: note = Artificially Synthesized Probe
  source 1..80: mol_type = other DNA
agcagtaaaacacagcctcggccctgaaaggactttctgaacacctttggagtgtcatccgtttaatatacattatttta

SEQ ID NO: 99376 - DNA, 80 bp, synthetic construct
  misc_feature 1..80: note = Artificially Synthesized Probe
  source 1..80: mol_type = other DNA
gggaagatatgatttgattccctttccttggtccaaccgtgttagaaacatccaaccataaagaagctttctaaggaagc

SEQ ID NO: 99377 - DNA, 80 bp, synthetic construct; identical to SEQ ID NO: 35179
  misc_feature 1..80: note = Artificially Synthesized Probe
  source 1..80: mol_type = other DNA

SEQ ID NO: 99378 - DNA, 80 bp, synthetic construct; identical to SEQ ID NO: 35026
  misc_feature 1..80: note = Artificially Synthesized Probe
  source 1..80: mol_type = other DNA

SEQ ID NO: 99379 - DNA, 80 bp, synthetic construct
  misc_feature 1..80: note = Artificially Synthesized Probe
  source 1..80: mol_type = other DNA
gcgacggtgcaggccgtttggcttggcggccctgcccccgctctccacgccagaatctggcattccttcgctcagcccct

SEQ ID NO: 99380 - DNA, 80 bp, synthetic construct
  misc_feature 1..80: note = Artificially Synthesized Probe
  source 1..80: mol_type = other DNA
ggggagcagaggcggcggggaaccccggcggttggcggggcaccacgggaggggcccccggcgatgtccaaactcttggg

SEQ ID NO: 99381 - DNA, 80 bp, synthetic construct
  misc_feature 1..80: note = Artificially Synthesized Probe
  source 1..80: mol_type = other DNA
gccagagcgccagcagcgcccacagcagagcggggcgcagggcgggcatcttctcggtcgcctcctcctccgccgccgcc

SEQ ID NO: 99382 - DNA, 80 bp, synthetic construct
  misc_feature 1..80: note = Artificially Synthesized Probe
  source 1..80: mol_type = other DNA
gccgccgcctcagccgccgcccgaagtttggctgaaactttctcgggtgtgcaacgaagcagcctcgtgtgtccttccgc

SEQ ID NO: 99383 - DNA, 80 bp, synthetic construct; identical to SEQ ID NO: 35180
  misc_feature 1..80: note = Artificially Synthesized Probe
  source 1..80: mol_type = other DNA

SEQ ID NO: 99384 - DNA, 80 bp, synthetic construct
  misc_feature 1..80: note = Artificially Synthesized Probe
  source 1..80: mol_type = other DNA
taggaccagtgctgtcaaagaaggaaagtgggccaaggcgccaaagtccattaaaaaggaatagagccatcacggagtgg

SEQ ID NO: 99385 - DNA, 80 bp, synthetic construct
  misc_feature 1..80: note = Artificially Synthesized Probe
  source 1..80: mol_type = other DNA
aggctttcccagaggagctgggatgaaagcaggatcttgaaaggtcagtaaaatttgtataagacaaggagaccagctaa

SEQ ID NO: 99386 - DNA, 80 bp, synthetic construct; identical to SEQ ID NO: 35181
  misc_feature 1..80: note = Artificially Synthesized Probe
  source 1..80: mol_type = other DNA

SEQ ID NO: 99387 - DNA, 80 bp, synthetic construct
  misc_feature 1..80: note = Artificially Synthesized Probe
  source 1..80: mol_type = other DNA
agttgtatggacatatcattccaggaaagagccctcgtgaaagcaaaggtacagtcaaaagagtaagtaaatgagttctg

SEQ ID NO: 99388 - DNA, 80 bp, synthetic construct
  misc_feature 1..80: note = Artificially Synthesized Probe
  source 1..80: mol_type = other DNA
ttgctctgataattctgtagaaaattgattgttgggggagcaagaggtgaactggagccccaggaccagtcaagagttgg

SEQ ID NO: 99389 - DNA, 80 bp, synthetic construct
  misc_feature 1..80: note = Artificially Synthesized Probe
  source 1..80: mol_type = other DNA
tcaagggattttttttttttcattcacaaatgtggaaaatgcacaaacactacttcctggctgtgggatactacttcaaa

SEQ ID NO: 99390 - DNA, 80 bp, synthetic construct
  misc_feature 1..80: note = Artificially Synthesized Probe
  source 1..80: mol_type = other DNA
tagaacctctccctgactcctataggataaaattcaaacttctaaacatggtacatacaaggccttttcgtcattgggcc

SEQ ID NO: 99391 - DNA, 80 bp, synthetic construct; identical to SEQ ID NO: 35182
  misc_feature 1..80: note = Artificially Synthesized Probe
  source 1..80: mol_type = other DNA

SEQ ID NO: 99392 - DNA, 80 bp, synthetic construct
  misc_feature 1..80: note = Artificially Synthesized Probe
  source 1..80: mol_type = other DNA
aaaatgtttgcacactatgaaagaggctgacagaatgttgccacatggagagaataaagcagagaatgaacaaacttaat

SEQ ID NO: 99393 - DNA, 80 bp, synthetic construct
  misc_feature 1..80: note = Artificially Synthesized Probe
  source 1..80: mol_type = other DNA
aactagaatgtgaaacaacactaagcaagtacaagtcagtatgggcatagacctatgaagttccaaaactgcatgttaac

SEQ ID NO: 99394 - DNA, 80 bp, synthetic construct
  misc_feature 1..80: note = Artificially Synthesized Probe
  source 1..80: mol_type = other DNA
taccagttcgatcttcctctttactcactaaagataattcatagtgacttggctgcatacaaattttaaaaatcacctgc

SEQ ID NO: 99395 - DNA, 80 bp, synthetic construct
  misc_feature 1..80: note = Artificially Synthesized Probe
  source 1..80: mol_type = other DNA
ctgaggtgggcagatcacctgaggtcaggagtttgagaccagcctggccaacatgttgaaaacccgtctctactaaaaat

SEQ ID NO: 99396 - DNA, 80 bp, synthetic construct
  misc_feature 1..80: note = Artificially Synthesized Probe
  source 1..80: mol_type = other DNA
aaaaaaaaaaaaaaaaaaaataggtatgcagtttctcaaagtaaccgttttaaagaaagcagctattatgttcacatata

SEQ ID NO: 99397 - DNA, 80 bp, synthetic construct; identical to SEQ ID NO: 35183
  misc_feature 1..80: note = Artificially Synthesized Probe
  source 1..80: mol_type = other DNA

SEQ ID NO: 99398 - DNA, 80 bp, synthetic construct
  misc_feature 1..80: note = Artificially Synthesized Probe
  source 1..80: mol_type = other DNA
gaatgaggaacatatatatctatataaactggggaacaatgcaagactggaagaatgtcttggtgtgttggagaagttga

SEQ ID NO: 99399 - DNA, 80 bp, synthetic construct
  misc_feature 1..80: note = Artificially Synthesized Probe
  source 1..80: mol_type = other DNA
aaagtgcagtttggccaatacgaggctgtagacagattattcatacttattctgttccacattgcctcaatagctattat

SEQ ID NO: 99400 - DNA, 80 bp, synthetic construct
  misc_feature 1..80: note = Artificially Synthesized Probe
  source 1..80: mol_type = other DNA
accttccaaaaacacttttaattatattatctcatttgatcctcaaaacaatcgtgggaaataggcaccccagtcattat

SEQ ID NO: 99401 - DNA, 80 bp, synthetic construct
  misc_feature 1..80: note = Artificially Synthesized Probe
  source 1..80: mol_type = other DNA
agatgatatttagtgtggggacctctgtgtagagggacaccagcttcttgtcacttccatgttagcacagaacaagctga

SEQ ID NO: 99402 - DNA, 80 bp, synthetic construct; identical to SEQ ID NO: 35184
  misc_feature 1..80: note = Artificially Synthesized Probe
  source 1..80: mol_type = other DNA

SEQ ID NO: 99403 - DNA, 80 bp, synthetic construct
  misc_feature 1..80: note = Artificially Synthesized Probe
  source 1..80: mol_type = other DNA
tcaataaagacctactttctgaaaggttcacagagttcagccaaacacaggacaagttctagaaggcaagaagttaacct

SEQ ID NO: 99404 - DNA, 80 bp, synthetic construct
  misc_feature 1..80: note = Artificially Synthesized Probe
  source 1..80: mol_type = other DNA
gaattgtaatccccatgtgtcaagggagagaccaggtggaggtaattgaatcatgggggcggtttctcccatgctgttct

SEQ ID NO: 99405 - DNA, 80 bp, synthetic construct
  misc_feature 1..80: note = Artificially Synthesized Probe
  source 1..80: mol_type = other DNA
aactgtgagtcagttaacctgtttcctttataaattacccagtcttgggcagttctttacagcactgtgaagacagacta

SEQ ID NO: 99406 - DNA, 80 bp, synthetic construct
  misc_feature 1..80: note = Artificially Synthesized Probe
  source 1..80: mol_type = other DNA
gggccacaaagtgagaccctgtctctacaaaaaattaaaaaactaactgggcatggtgatgcatgtctctagtcccagct

SEQ ID NO: 99407 - DNA, 80 bp, synthetic construct; identical to SEQ ID NO: 35185
  misc_feature 1..80: note = Artificially Synthesized Probe
  source 1..80: mol_type = other DNA

SEQ ID NO: 99408 - DNA, 80 bp, synthetic construct
  misc_feature 1..80: note = Artificially Synthesized Probe
  source 1..80: mol_type = other DNA
gtgctttagtcactaaaatggttatgcaattttgaatatttattgacgttgttctcagggactgttgaattgtttttact

SEQ ID NO: 99409 - DNA, 80 bp, synthetic construct
  misc_feature 1..80: note = Artificially Synthesized Probe
  source 1..80: mol_type = other DNA
aggaaagatggctggagatgggctcaggatgtagcagagttcagcttgatgaattgtttgtaaacagactattaaagcct

SEQ ID NO: 99410 - DNA, 80 bp, synthetic construct
  misc_feature 1..80: note = Artificially Synthesized Probe
  source 1..80: mol_type = other DNA
tactaagtggaattcaaaatggttaactaagtatgagagaggggacatcaaaagtaaggaagagaaatcccattataaaa

SEQ ID NO: 99411 - DNA, 80 bp, synthetic construct; identical to SEQ ID NO: 35186
  misc_feature 1..80: note = Artificially Synthesized Probe
  source 1..80: mol_type = other DNA

SEQ ID NO: 99412 - DNA, 80 bp, synthetic construct
  misc_feature 1..80: note = Artificially Synthesized Probe
  source 1..80: mol_type = other DNA
aatggctggaaacaggtatttataatggaagcatacatggccttaacgatagggtttgcttctgaaaacactctaattaa

SEQ ID NO: 99413 - DNA, 80 bp, synthetic construct
  misc_feature 1..80: note = Artificially Synthesized Probe
  source 1..80: mol_type = other DNA
gctaaaagtacatcattattattattcatcaatgtggaatggaatgtgaaattggaatcagcaggtgaggggtggttgta

SEQ ID NO: 99414 - DNA, 80 bp, synthetic construct
  misc_feature 1..80: note = Artificially Synthesized Probe
  source 1..80: mol_type = other DNA
tctaagcagaaaaagaagaacagatggtggtaagacctagaatgtttaccccattaagatctatatctgaatccagaagg

SEQ ID NO: 99415 - DNA, 80 bp, synthetic construct
  misc_feature 1..80: note = Artificially Synthesized Probe
  source 1..80: mol_type = other DNA
atggttggggaaatagatattttaaaaataagggaagaagtgggtagggtaaacccaggcttacttatgtaaactctgag

SEQ ID NO: 99416 - DNA, 80 bp, synthetic construct; identical to SEQ ID NO: 35187
  misc_feature 1..80: note = Artificially Synthesized Probe
  source 1..80: mol_type = other DNA

SEQ ID NO: 99417 - DNA, 80 bp, synthetic construct
  misc_feature 1..80: note = Artificially Synthesized Probe
  source 1..80: mol_type = other DNA
tctctcacggctcttaagatacctccctgaagtccctccaaagaattcaatgtgcccctagtctaaatcagtttcctcca

SEQ ID NO: 99418 - DNA, 80 bp, synthetic construct
  misc_feature 1..80: note = Artificially Synthesized Probe
  source 1..80: mol_type = other DNA
tattttagttcccaaaagtcaccatgctgccctctccagaagtaactagtaagttcttgtgataagacccctattctgag

SEQ ID NO: 99419 - DNA, 80 bp, synthetic construct
  misc_feature 1..80: note = Artificially Synthesized Probe
  source 1..80: mol_type = other DNA
tgaaacctgagtaagttgtcttagatcacacagctgctaagcagtggcacagggatttaagcccaggtccatctgatcaa

SEQ ID NO: 99420 - DNA, 80 bp, synthetic construct; identical to SEQ ID NO: 35188
  misc_feature 1..80: note = Artificially Synthesized Probe
  source 1..80: mol_type = other DNA

SEQ ID NO: 99421 - DNA, 80 bp, synthetic construct
  misc_feature 1..80: note = Artificially Synthesized Probe
  source 1..80: mol_type = other DNA
taattataaacattaaaacatcaatttaaaatttaaaggaaaaatgacctataataccaccactaatagcattttcatgt

SEQ ID NO: 99422 - DNA, 80 bp, synthetic construct
  misc_feature 1..80: note = Artificially Synthesized Probe
  source 1..80: mol_type = other DNA
ctcccaggttcaagtgactctcctgcctcagcctccctagtagctgggattacaggcgcacgtgactatgcctggctaat

SEQ ID NO: 99423 - DNA, 80 bp, synthetic construct
  misc_feature 1..80: note = Artificially Synthesized Probe
  source 1..80: mol_type = other DNA
ccatacctggccgacatacatatagtttttatccagatttcttaggcaattcatataccataaatattttcctttgttgt

SEQ ID NO: 99424 - DNA, 80 bp, synthetic construct
  misc_feature 1..80: note = Artificially Synthesized Probe
  source 1..80: mol_type = other DNA
ttttattgccaatcacaattggatgaataagtggactctttctttgtcttgaatcagggagatggatcagcccaaaagaa

SEQ ID NO: 99425 - DNA, 80 bp, synthetic construct; identical to SEQ ID NO: 35189
  misc_feature 1..80: note = Artificially Synthesized Probe
  source 1..80: mol_type = other DNA

SEQ ID NO: 99426 - DNA, 80 bp, synthetic construct
  misc_feature 1..80: note = Artificially Synthesized Probe
  source 1..80: mol_type = other DNA
ctgtctcatcattcatctttccctctctactggcttaatccctcagccaacagttttcttccagacacacacacacacac

SEQ ID NO: 99427 - DNA, 80 bp, synthetic construct
  misc_feature 1..80: note = Artificially Synthesized Probe
  source 1..80: mol_type = other DNA
tgagcacttaagatgtaaaaacaatatggaaatagagatcgataaagcagtccctactcccgaagagcttctagttagta

SEQ ID NO: 99428 - DNA, 80 bp, synthetic construct; identical to SEQ ID NO: 35027
  misc_feature 1..80: note = Artificially Synthesized Probe
  source 1..80: mol_type = other DNA

SEQ ID NO: 99429 - DNA, 80 bp, synthetic construct
  misc_feature 1..80: note = Artificially Synthesized Probe
  source 1..80: mol_type = other DNA
atttgagttaggccttgaacaatgagttcaatattaccaggcagagactgtacatatattgcacatgactgacaggaaca

SEQ ID NO: 99430 - DNA, 80 bp, synthetic construct; identical to SEQ ID NO: 35190
  misc_feature 1..80: note = Artificially Synthesized Probe
  source 1..80: mol_type = other DNA

SEQ ID NO: 99431 - DNA, 80 bp, synthetic construct
  misc_feature 1..80: note = Artificially Synthesized Probe
  source 1..80: mol_type = other DNA
ccaactgtcaaatgcaatgaactcattctcagtcttcattttccttgatgagtttgcagcatttgacatcattggcaatt

SEQ ID NO: 99432 - DNA, 80 bp, synthetic construct
  misc_feature 1..80: note = Artificially Synthesized Probe
  source 1..80: mol_type = other DNA
ccaatggctccccattctctacagttagagcccaaactggacagatggcatggaaaatcgttggcattctgaccacattt

SEQ ID NO: 99433 - DNA, 80 bp, synthetic construct; identical to SEQ ID NO: 35191
  misc_feature 1..80: note = Artificially Synthesized Probe
  source 1..80: mol_type = other DNA

SEQ ID NO: 99434 - DNA, 80 bp, synthetic construct
  misc_feature 1..80: note = Artificially Synthesized Probe
  source 1..80: mol_type = other DNA
tagttcacagtagacctggttgtttacaaggagcctgacaccccccccctcttgctccgtctcttgccatatgacacact

SEQ ID NO: 99435 - DNA, 80 bp, synthetic construct
  misc_feature 1..80: note = Artificially Synthesized Probe
  source 1..80: mol_type = other DNA
ctttttttcttttttttcgtgacaaattcttgctctgtttcccagtctggagtgccctggtgcaagctccgctcactgca

SEQ ID NO: 99436 - DNA, 80 bp, synthetic construct
  misc_feature 1..80: note = Artificially Synthesized Probe
  source 1..80: mol_type = other DNA
tccacccgcttcagcctcccaaagttctgggataatagatgtgagccaccagtcctggccaaaataaaccccttttcccc

SEQ ID NO: 99437 - DNA, 80 bp, synthetic construct
  misc_feature 1..80: note = Artificially Synthesized Probe
  source 1..80: mol_type = other DNA
tattatatataccacttaacaactagttgaacatgtgattactatatggggacttgcttcagtctctgaatcttactctg

SEQ ID NO: 99438 - DNA, 80 bp, synthetic construct; identical to SEQ ID NO: 35192
  misc_feature 1..80: note = Artificially Synthesized Probe
  source 1..80: mol_type = other DNA

SEQ ID NO: 99439 - DNA, 80 bp, synthetic construct
  misc_feature 1..80: note = Artificially Synthesized Probe
  source 1..80: mol_type = other DNA
aaacactttagtagtttgtcttggtgcatgcaccacaagcagacagccatttgccttccatttagtttctgcaactgaag

SEQ ID NO: 99440 - DNA, 80 bp, synthetic construct
  misc_feature 1..80: note = Artificially Synthesized Probe
  source 1..80: mol_type = other DNA
gaatgggggtgatagtagaacaacaatgtcaatgtactaaacaatgccactgaactgtacactgtacactttaaaatgat

SEQ ID NO: 99441 - DNA, 80 bp, synthetic construct
  misc_feature 1..80: note = Artificially Synthesized Probe
  source 1..80: mol_type = other DNA
ctgggctgtatcctcctccttctctaataaagctatgacgttaaggaagccctatcaactgatgagctcagaatgcccat

SEQ ID NO: 99442 - DNA, 80 bp, synthetic construct; identical to SEQ ID NO: 35193
  misc_feature 1..80: note = Artificially Synthesized Probe
  source 1..80: mol_type = other DNA

SEQ ID NO: 99443 - DNA, 80 bp, synthetic construct
  misc_feature 1..80: note = Artificially Synthesized Probe
  source 1..80: mol_type = other DNA
ctgatttccagggcagcctacaaatatccaccatattgaaagaactgtttgaatggatatgtttaatgttccaagaattt

SEQ ID NO: 99444 - DNA, 80 bp, synthetic construct
  misc_feature 1..80: note = Artificially Synthesized Probe
  source 1..80: mol_type = other DNA
acacatttacctttgatccagaccctccccagaagcagtgcttttgaaatctcttctcctcttctttttgtttgacaaaa

SEQ ID NO: 99445 - DNA, 80 bp, synthetic construct
  misc_feature 1..80: note = Artificially Synthesized Probe
  source 1..80: mol_type = other DNA
cactggtgttcttggcattgtgaataaacagagatggtgataacatccatcatagagttaagcacattgagtgggtgata

SEQ ID NO: 99446 - DNA, 80 bp, synthetic construct; identical to SEQ ID NO: 35194
  misc_feature 1..80: note = Artificially Synthesized Probe
  source 1..80: mol_type = other DNA

SEQ ID NO: 99447 - DNA, 80 bp, synthetic construct
  misc_feature 1..80: note = Artificially Synthesized Probe
  source 1..80: mol_type = other DNA
tgccattctcctgcctcagcctcccgagtagctgggactacaggcgcccgtcaacacacctggctaattttttgtatttt

SEQ ID NO: 99448 - DNA, 80 bp, synthetic construct
  misc_feature 1..80: note = Artificially Synthesized Probe
  source 1..80: mol_type = other DNA
aaaaacactttttaagtcaaaatgaacctactaacaacaaaagtcatattccagaagtgcaagtagacacaaatgatcac

SEQ ID NO: 99449 - DNA, 80 bp, synthetic construct
  misc_feature 1..80: note = Artificially Synthesized Probe
  source 1..80: mol_type = other DNA
ttttcttgcctctttccaaaagtgcgttaaaaatgtccaggttttttaactcattaagatgttcatcaagcatcttaatg

SEQ ID NO: 99450 - DNA, 80 bp, synthetic construct
  misc_feature 1..80: note = Artificially Synthesized Probe
  source 1..80: mol_type = other DNA
caacaaaagaatctcttaggaaaaattaaaggtagacactgatcataacatccataaagtacagactaagaaaaaactgg

SEQ ID NO: 99451 - DNA, 80 bp, synthetic construct
  misc_feature 1..80: note = Artificially Synthesized Probe
  source 1..80: mol_type = other DNA
gctgctgaagcagaggagagataggtgcgctactgtctcaatggaaaatgtcgctgttttttctgcaaggaatatgtaca

SEQ ID NO: 99452 - DNA, 80 bp, synthetic construct; identical to SEQ ID NO: 35195
  misc_feature 1..80: note = Artificially Synthesized Probe
  source 1..80: mol_type = other DNA

SEQ ID NO: 99453 - DNA, 80 bp, synthetic construct
  misc_feature 1..80: note = Artificially Synthesized Probe
  source 1..80: mol_type = other DNA
gtgttcttggaaaaggttagcatttgaattggtagagtgagtaaaagatcacccttggcagtgtgagtgggcatcatgca

SEQ ID NO: 99454 - DNA, 80 bp, synthetic construct
  misc_feature 1..80: note = Artificially Synthesized Probe
  source 1..80: mol_type = other DNA
tggttctcaggccttctggcttggactggagtcataatacaccactaactttcctgggcttccaatttgcagacagctga

SEQ ID NO: 99455 - DNA, 80 bp, synthetic construct
  misc_feature 1..80: note = Artificially Synthesized Probe
  source 1..80: mol_type = other DNA
ctgcactttgtacatttaaaaaattaagttgtttttttatcccccaagatcaattctcactcccattgagaatgtgcaac

SEQ ID NO: 99456 - DNA, 80 bp, synthetic construct; identical to SEQ ID NO: 35196
  misc_feature 1..80: note = Artificially Synthesized Probe
  source 1..80: mol_type = other DNA

SEQ ID NO: 99457 - DNA, 80 bp, synthetic construct
  misc_feature 1..80: note = Artificially Synthesized Probe
  source 1..80: mol_type = other DNA
ctgtgccctattgatgaaaatctctgattattataggggaatacattatgttggcttctgtattccctgagaaccatcta

SEQ ID NO: 99458 - DNA, 80 bp, synthetic construct
  misc_feature 1..80: note = Artificially Synthesized Probe
  source 1..80: mol_type = other DNA
atcctaacctaacctaatctctcctaacctaaaaacaggagcagacccagggtcctgactgggcattctcattatgcttc

SEQ ID NO: 99459 - DNA, 80 bp, synthetic construct
  misc_feature 1..80: note = Artificially Synthesized Probe
  source 1..80: mol_type = other DNA
tgaatgctgtctttgagggtcttctcagtctcttccttcccctttatcttttatcaaaggcactcttttaatcttttggt

SEQ ID NO: 99460 - DNA, 80 bp, synthetic construct; identical to SEQ ID NO: 35197
  misc_feature 1..80: note = Artificially Synthesized Probe
  source 1..80: mol_type = other DNA

SEQ ID NO: 99461 - DNA, 80 bp, synthetic construct
  misc_feature 1..80: note = Artificially Synthesized Probe
  source 1..80: mol_type = other DNA
acacaggtagtcattggtgagctgtatacagtccaggctgccctcagagctgcaggggttggagaggcactcgttgatgt

SEQ ID NO: 99462 - DNA, 80 bp, synthetic construct
  misc_feature 1..80: note = Artificially Synthesized Probe
  source 1..80: mol_type = other DNA
gaggggaagcagacaagcgtgggcagggagagtggtaggcaacgaccctgcaaagttaggaatgcaccgcaactgtagtc

SEQ ID NO: 99463 - DNA, 80 bp, synthetic construct
  misc_feature 1..80: note = Artificially Synthesized Probe
  source 1..80: mol_type = other DNA
aatcaaaatataatagagaggtagatgtgttttaaaagttattatgtgcaatacaagccaacccatgcagtgaaggtagt

SEQ ID NO: 99464 - DNA, 80 bp, synthetic construct; identical to SEQ ID NO: 35198
  misc_feature 1..80: note = Artificially Synthesized Probe
  source 1..80: mol_type = other DNA

SEQ ID NO: 99465 - DNA, 80 bp, synthetic construct
  misc_feature 1..80: note = Artificially Synthesized Probe
  source 1..80: mol_type = other DNA
gaggtatgaaggtctgccaatgctttaattttagcctcatgaaatagcctcatttcagacttctgacctcaaaaagagta

SEQ ID NO: 99466 - DNA, 80 bp, synthetic construct
  misc_feature 1..80: note = Artificially Synthesized Probe
  source 1..80: mol_type = other DNA
tgtttagtgttggtctggtttaagaaccaccaagtaaggagcagaagaatgcactggcatgcaaagcaagtgccagatga

SEQ ID NO: 99467 - DNA, 80 bp, synthetic construct
  misc_feature 1..80: note = Artificially Synthesized Probe
  source 1..80: mol_type = other DNA
accatttaaggaagctataacaaagtcctggagggacgtggtggggcttgaactaaagcagtgtgaatagcaggagaagg

SEQ ID NO: 99468 - DNA, 80 bp, synthetic construct; identical to SEQ ID NO: 35199
  misc_feature 1..80: note = Artificially Synthesized Probe
  source 1..80: mol_type = other DNA

SEQ ID NO: 99469 - DNA, 80 bp, synthetic construct
  misc_feature 1..80: note = Artificially Synthesized Probe
  source 1..80: mol_type = other DNA
agaataagttagcttgcatttaatctagaagatccttatagaaggtaattttgggtagttccatctccaattcgtatctt

SEQ ID NO: 99470 - DNA, 80 bp, synthetic construct
  misc_feature 1..80: note = Artificially Synthesized Probe
  source 1..80: mol_type = other DNA
tttttttttaatttccaagcttgtggtctaagtgtcttcctgcgtatgactagtgcacaggtcatgccacctgtgactca

SEQ ID NO: 99471 - DNA, 80 bp, synthetic construct
  misc_feature 1..80: note = Artificially Synthesized Probe
  source 1..80: mol_type = other DNA
tctcaattttagcaccatccacataccacatttgaaatctccatacttagtaagccccttactaaaacacttttgaggga

SEQ ID NO: 99472 - DNA, 80 bp, synthetic construct; identical to SEQ ID NO: 35028
  misc_feature 1..80: note = Artificially Synthesized Probe
  source 1..80: mol_type = other DNA

SEQ ID NO: 99473 - DNA, 80 bp, synthetic construct; identical to SEQ ID NO: 35200
  misc_feature 1..80: note = Artificially Synthesized Probe
  source 1..80: mol_type = other DNA

SEQ ID NO: 99474 - DNA, 80 bp, synthetic construct
  misc_feature 1..80: note = Artificially Synthesized Probe
  source 1..80: mol_type = other DNA
ttcctttttatggctgcatagtattccatggtatgtatgtacattttctttatccagtctgtcattgatggaaatttagg

SEQ ID NO: 99475 - DNA, 80 bp, synthetic construct
  misc_feature 1..80: note = Artificially Synthesized Probe
  source 1..80: mol_type = other DNA
ctgtcttccacaatggttgaactaatttacactccaactaacagcataaaagcattcctttttctccacaacctcaccag

SEQ ID NO: 99476 - DNA, 80 bp, synthetic construct
  misc_feature 1..80: note = Artificially Synthesized Probe
  source 1..80: mol_type = other DNA
catgtcctttgcccatctttcaatggggtttttttttcttgtaaatttgtttaagttccttgtaaactctggatattaga

SEQ ID NO: 99477 - DNA, 80 bp, synthetic construct; identical to SEQ ID NO: 35201
  misc_feature 1..80: note = Artificially Synthesized Probe
  source 1..80: mol_type = other DNA

SEQ ID NO: 99478 - DNA, 80 bp, synthetic construct
  misc_feature 1..80: note = Artificially Synthesized Probe
  source 1..80: mol_type = other DNA
ttaacgtgaaagactctcaaatttttatcaagttcttgccagaggtattccaaccacttcaattttaccagccctaatta

SEQ ID NO: 99479 - DNA, 80 bp, synthetic construct
  misc_feature 1..80: note = Artificially Synthesized Probe
  source 1..80: mol_type = other DNA
ttatgttggacttcctccagcccccaatgagtatgtttgtagccttatattacagttcttttaggacctttttttcaatc

SEQ ID NO: 99480 - DNA, 80 bp, synthetic construct
  misc_feature 1..80: note = Artificially Synthesized Probe
  source 1..80: mol_type = other DNA
cacatgctctcagatgctctcatcctctcctatggaatcagttattacctagagagactcatgccctcaactctttcctg

SEQ ID NO: 99481 - DNA, 80 bp, synthetic construct
  misc_feature 1..80: note = Artificially Synthesized Probe
  source 1..80: mol_type = other DNA
tcatttccctttattccccatcttcagctgattgccactcaccattccaccactgctgtgtttatttctccaatcattct

SEQ ID NO: 99482 - DNA, 80 bp, synthetic construct; identical to SEQ ID NO: 35202
  misc_feature 1..80: note = Artificially Synthesized Probe
  source 1..80: mol_type = other DNA

SEQ ID NO: 99483 - DNA, 80 bp, synthetic construct
  misc_feature 1..80: note = Artificially Synthesized Probe
  source 1..80: mol_type = other DNA
aggtcctattatttgtcccatctcaaagagaaggaaactggagctcaagagaggctcagtaatttttccaaagtataatc

SEQ ID NO: 99484 - DNA, 80 bp, synthetic construct
  misc_feature 1..80: note = Artificially Synthesized Probe
  source 1..80: mol_type = other DNA
ctgccaacctttccaccacttctcaggcccctgtacctttgagcattctattctggcgaccagctatgaaccaacccttg

SEQ ID NO: 99485 - DNA, 80 bp, synthetic construct
  misc_feature 1..80: note = Artificially Synthesized Probe
  source 1..80: mol_type = other DNA
tagattctaggggtacaaagataaagatggcccttacaaagatggctcttaaggagcttatcttcaattagtagagaaag

SEQ ID NO: 99486 - DNA, 80 bp, synthetic construct
  misc_feature 1..80: note = Artificially Synthesized Probe
  source 1..80: mol_type = other DNA
actaaaaatgcaaaaaattagccgggcatggtggcgggcgcctgtagtcccagctactccggaggctgaggcaggagaat

SEQ ID NO: 99487 - DNA, 80 bp, synthetic construct; identical to SEQ ID NO: 35203
  misc_feature 1..80: note = Artificially Synthesized Probe
  source 1..80: mol_type = other DNA

SEQ ID NO: 99488 - DNA, 80 bp, synthetic construct
  misc_feature 1..80: note = Artificially Synthesized Probe
  source 1..80: mol_type = other DNA
cagttagacagaaggctggagaaaaaggagaaagctttaccttatagggaacaaggagccactgcatggttttacacagg

SEQ ID NO: 99489 - DNA, 80 bp, synthetic construct
  misc_feature 1..80: note = Artificially Synthesized Probe
  source 1..80: mol_type = other DNA
tgcctaatacattttttcatcaagcaataagagagaggatcttcagcctggccaacatggtgaaatcccgtctctactaa

SEQ ID NO: 99490 - DNA, 80 bp, synthetic construct; identical to SEQ ID NO: 35204
  misc_feature 1..80: note = Artificially Synthesized Probe
  source 1..80: mol_type = other DNA

SEQ ID NO: 99491 - DNA, 80 bp, synthetic construct
  misc_feature 1..80: note = Artificially Synthesized Probe
  source 1..80: mol_type = other DNA
gtttgcagtcaatatttggtaatacaaataaaagtttacagaggtggatgtcaagtggtaagtgcactgtgaagcacagg

SEQ ID NO: 99492 - DNA, 80 bp, synthetic construct
  misc_feature 1..80: note = Artificially Synthesized Probe
  source 1..80: mol_type = other DNA
tgacaaattcctgttgcctagtaacatcatagccttgtaatgtcatagcacaattactttttaaataaattcagtgtagc

SEQ ID NO: 99493 - DNA, 80 bp, synthetic construct
  misc_feature 1..80: note = Artificially Synthesized Probe
  source 1..80: mol_type = other DNA
gtcttcttcttattattataaggctttaagttttcaaatacattttgaagacattagaagcctgagagacacccagcagt

SEQ ID NO: 99494 - DNA, 80 bp, synthetic construct
  misc_feature 1..80: note = Artificially Synthesized Probe
  source 1..80: mol_type = other DNA
gaatttaaaattcaggatctccagcaacagagccaatttctattgaccacccgctcaaaaaagcacaggtttattttagc

SEQ ID NO: 99495 - DNA, 80 bp, synthetic construct
  misc_feature 1..80: note = Artificially Synthesized Probe
  source 1..80: mol_type = other DNA
atattgaaatggaaatatttaaatttaatttgttagagattttgtgttcaacttttaaaatttaatgaggtattaacctt

SEQ ID NO: 99496 - DNA, 80 bp, synthetic construct; identical to SEQ ID NO: 35205
  misc_feature 1..80: note = Artificially Synthesized Probe
  source 1..80: mol_type = other DNA

SEQ ID NO: 99497 - DNA, 80 bp, synthetic construct
  misc_feature 1..80: note = Artificially Synthesized Probe
  source 1..80: mol_type = other DNA
aatcccctgggctttgacttagctgagcgtggactcagttttcagttgcttggcttgttcttgaagagtaagctgacagg

SEQ ID NO: 99498 - DNA, 80 bp, synthetic construct
  misc_feature 1..80: note = Artificially Synthesized Probe
  source 1..80: mol_type = other DNA
ccgaggctgctgtacaaaaagcctgtattctaatagactcattaaccccaaaacctattcagagcacctaactttcattt

SEQ ID NO: 99499 - DNA, 80 bp, synthetic construct
  misc_feature 1..80: note = Artificially Synthesized Probe
  source 1..80: mol_type = other DNA
gagtctcactctgtcaccaggctggagtgcaatggcccgatctcggctcactgcaacctccgcctcctgggttcaagcga

SEQ ID NO: 99500 - DNA, 80 bp, synthetic construct; identical to SEQ ID NO: 35206
  misc_feature 1..80: note = Artificially Synthesized Probe
  source 1..80: mol_type = other DNA

SEQ ID NO: 99501 - DNA, 80 bp, synthetic construct
  misc_feature 1..80: note = Artificially Synthesized Probe
  source 1..80: mol_type = other DNA
aataataatggaaaatagaaatgttgtcactccggataagttttttccccatcccacagaagttggaaaaaatagcatga

SEQ ID NO: 99502 - DNA, 80 bp, synthetic construct
  misc_feature 1..80: note = Artificially Synthesized Probe
  source 1..80: mol_type = other DNA
ctcatatcaagcctgggagaaagaagagggaattgtgtactgacttaagaaaagtggcagataaaaataaaacatgcatt

SEQ ID NO: 99503 - DNA, 80 bp, synthetic construct
  misc_feature 1..80: note = Artificially Synthesized Probe
  source 1..80: mol_type = other DNA
ttcttgaatgaatggccctccaccattcattctcacaaaagtagctctccttcacttactttggttctcaaaaggttact

SEQ ID NO: 99504 - DNA, 80 bp, synthetic construct
  misc_feature 1..80: note = Artificially Synthesized Probe
  source 1..80: mol_type = other DNA
tgtatttttactgtaccttttaaatcttctactgtacctcttcttaaatatgttcagacacataaatacttaccattgtg

SEQ ID NO: 99505 - DNA, 80 bp, synthetic construct; identical to SEQ ID NO: 35207
  misc_feature 1..80: note = Artificially Synthesized Probe
  source 1..80: mol_type = other DNA

SEQ ID NO: 99506 - DNA, 80 bp, synthetic construct
  misc_feature 1..80: note = Artificially Synthesized Probe
  source 1..80: mol_type = other DNA
aacaataactcatagacttttgtaagatttgaatgaattaataactgtacaatgattagaaaagtaaaagtacctgatat

SEQ ID NO: 99507 - DNA, 80 bp, synthetic construct
  misc_feature 1..80: note = Artificially Synthesized Probe
  source 1..80: mol_type = other DNA
tgcagccatagaaggaatgagaactgtcattcaaaccaaaagagtcgggaattcacctgttaatatctacaaaatgccca

SEQ ID NO: 99508 - DNA, 80 bp, synthetic construct
  misc_feature 1..80: note = Artificially Synthesized Probe
  source 1..80: mol_type = other DNA
ttatcttgtcacccaggtgcagtgggtcacacctataatcccagcactttgggaggctgaggcaggtgaatcaccttagg

SEQ ID NO: 99509 - DNA, 80 bp, synthetic construct
  misc_feature 1..80: note = Artificially Synthesized Probe
  source 1..80: mol_type = other DNA
cgagatcgcaccactgcactccaacctgggggccagagcaagaccccctctcaaaaaaaaaaagtaaaataaaattatct

SEQ ID NO: 99510 - DNA, 80 bp, synthetic construct
  misc_feature 1..80: note = Artificially Synthesized Probe
  source 1..80: mol_type = other DNA
ttttctactggtgtagcatttttttctattgatgtaattttgatttccagttacagtaaagacacttgactggataccat

SEQ ID NO: 99511 - DNA, 80 bp, synthetic construct; identical to SEQ ID NO: 35208
  misc_feature 1..80: note = Artificially Synthesized Probe
  source 1..80: mol_type = other DNA

SEQ ID NO: 99512 - DNA, 80 bp, synthetic construct
  misc_feature 1..80: note = Artificially Synthesized Probe
  source 1..80: mol_type = other DNA
agtgggatcatctctccagattatctgctgcactgactgaccttaaatcactcttgccatgatttaagttccttatactc

SEQ ID NO: 99513 - DNA, 80 bp, synthetic construct
  misc_feature 1..80: note = Artificially Synthesized Probe
  source 1..80: mol_type = other DNA
taatgcttttaggattaaaaatcaaaagccctcccctgcaaaatgtcctaactgtatgtctaggaattacttaaaacata

SEQ ID NO: 99514 - DNA, 80 bp, synthetic construct
  misc_feature 1..80: note = Artificially Synthesized Probe
  source 1..80: mol_type = other DNA
cccgtgccagtgagaaccataccttgttctaatccaattctttctccagaagagagaagagaaatcaggaaatagtttat

SEQ ID NO: 99515 - DNA, 80 bp, synthetic construct; identical to SEQ ID NO: 35209
  misc_feature 1..80: note = Artificially Synthesized Probe
  source 1..80: mol_type = other DNA

SEQ ID NO: 99516 - DNA, 80 bp, synthetic construct
  misc_feature 1..80: note = Artificially Synthesized Probe
  source 1..80: mol_type = other DNA
cagctaatgggccagggggtgagaaatgccaagggagccagaccttcttacttgggtcctataattcttttttttttttt

SEQ ID NO: 99517 - DNA, 80 bp, synthetic construct; identical to SEQ ID NO: 35029
  misc_feature 1..80: note = Artificially Synthesized Probe
  source 1..80: mol_type = other DNA

SEQ ID NO: 99518 - DNA, 80 bp, synthetic construct
  misc_feature 1..80: note = Artificially Synthesized Probe
  source 1..80: mol_type = other DNA
ttagtagagacggggtttcaccatattggtcaggctggtcctggactcctgaccttaggtgatccacccacctcggcctc

SEQ ID NO: 99519 - DNA, 80 bp, synthetic construct; identical to SEQ ID NO: 35210
  misc_feature 1..80: note = Artificially Synthesized Probe
  source 1..80: mol_type = other DNA

SEQ ID NO: 99520 - DNA, 80 bp, synthetic construct
  misc_feature 1..80: note = Artificially Synthesized Probe
  source 1..80: mol_type = other DNA
caccctcctcttagaaaaaaaatccttctttcttcattttattttcatgggctgcttctaggagtatattgaattctgcc

SEQ ID NO: 99521 - DNA, 80 bp, synthetic construct
  misc_feature 1..80: note = Artificially Synthesized Probe
  source 1..80: mol_type = other DNA
tctgatcgttattatctatgggggctgaggcaggttgctttcactctgatcctcagtttcctcacctgtaaagtggccat

SEQ ID NO: 99522 - DNA, 80 bp, synthetic construct
  misc_feature 1..80: note = Artificially Synthesized Probe
  source 1..80: mol_type = other DNA
aatattgagcactctgtgtgagtcactgatgtgggctctggggacacaacaataaacagacagacctggacactgctttc

SEQ ID NO: 99523 - DNA, 80 bp, synthetic construct; identical to SEQ ID NO: 35211
  misc_feature 1..80: note = Artificially Synthesized Probe
  source 1..80: mol_type = other DNA

SEQ ID NO: 99524 - DNA, 80 bp, synthetic construct
  misc_feature 1..80: note = Artificially Synthesized Probe
  source 1..80: mol_type = other DNA
agttgactttttcagcattaatgctcaaggtaaagtgttatgactgaattaactgaaatcaactactatttccttaacac

SEQ ID NO: 99525 - DNA, 80 bp, synthetic construct
  misc_feature 1..80: note = Artificially Synthesized Probe
  source 1..80: mol_type = other DNA
tactgggcgataggccctagagcattaaagagtttcatggctctttccatgactcagaggcccttctttgttttcttctg

SEQ ID NO: 99526 - DNA, 80 bp, synthetic construct
  misc_feature 1..80: note = Artificially Synthesized Probe
  source 1..80: mol_type = other DNA
cctctggaactgtctccagacatgcccatgaatgctgaagaccctactgaggcaaatatttccattttgcccccagcaaa

SEQ ID NO: 99527 - DNA, 80 bp, synthetic construct
  misc_feature 1..80: note = Artificially Synthesized Probe
  source 1..80: mol_type = other DNA
attcttctgtttagtaggtattcaaaaattggtaactattgtaattacttacgtagtagtttaatgggcaattgtaaaca

SEQ ID NO: 99528 - DNA, 80 bp, synthetic construct
  misc_feature 1..80: note = Artificially Synthesized Probe
  source 1..80: mol_type = other DNA
tagtatgaatatctgcatatagtgtcttacaaagaaacaaaagaaatcaatgactattctagaaattattctatgattaa

SEQ ID NO: 99529 - DNA, 80 bp, synthetic construct; identical to SEQ ID NO: 35212
  misc_feature 1..80: note = Artificially Synthesized Probe
  source 1..80: mol_type = other DNA

SEQ ID NO: 99530 - DNA, 80 bp, synthetic construct
  misc_feature 1..80: note = Artificially Synthesized Probe
  source 1..80: mol_type = other DNA
agttgaaagaatggtgcagaaccaaagttggatccaaacactcaccttgtccaagagccaggtattccagttagaagtct

SEQ ID NO: 99531 - DNA, 80 bp, synthetic construct
  misc_feature 1..80: note = Artificially Synthesized Probe
  source 1..80: mol_type = other DNA
tgggaatatgtgatgaaacgtccagatctacaatgctatctctttcagaaatgagagatgggctcccagggcactcctat

SEQ ID NO: 99532 - DNA, 80 bp, synthetic construct
  misc_feature 1..80: note = Artificially Synthesized Probe
  source 1..80: mol_type = other DNA
gtgtggtggtacatgtctgtaatctcagctacttgggaggctgaggcaggagaatcacttgaaaccgggagatgaagctt

SEQ ID NO: 99533 - DNA, 80 bp, synthetic construct
  misc_feature 1..80: note = Artificially Synthesized Probe
  source 1..80: mol_type = other DNA
cacgaggtcaggagatcgagaccatcctggctaacatggtgaaaccccgtctccactaaaaaatacaaaaaaaaaattag

SEQ ID NO: 99534 - DNA, 80 bp, synthetic construct; identical to SEQ ID NO: 35030
  misc_feature 1..80: note = Artificially Synthesized Probe
  source 1..80: mol_type = other DNA

SEQ ID NO: 99535 - DNA, 80 bp, synthetic construct
  misc_feature 1..80: note = Artificially Synthesized Probe
  source 1..80: mol_type = other DNA
gtcctaacagacacaaaagagacttgaataaatggaaagacataccaggatttggttagcaagactcctcatcataaagt

SEQ ID NO: 99536 - DNA, 80 bp, synthetic construct
  misc_feature 1..80: note = Artificially Synthesized Probe
  source 1..80: mol_type = other DNA
tattggtgaattaatagaataacacagaaaataaagaaaatccagaagaacaccaaaaatacacatgggaatttagaatc

SEQ ID NO: 99537 - DNA, 80 bp, synthetic construct; identical to SEQ ID NO: 35031
  misc_feature 1..80: note = Artificially Synthesized Probe
  source 1..80: mol_type = other DNA

SEQ ID NO: 99538 - DNA, 80 bp, synthetic construct
  misc_feature 1..80: note = Artificially Synthesized Probe
  source 1..80: mol_type = other DNA
atgtatatatacatatatatatatataaacaaagaaactgcaaaaaaaatcaaaagaaaatgattcttaaatgaaaatat

SEQ ID NO: 99539 - DNA, 80 bp, synthetic construct
  misc_feature 1..80: note = Artificially Synthesized Probe
  source 1..80: mol_type = other DNA
cactggttaaaatatggtatgcctgtaaaagggaattctgtagctataaaaaatattgaggaagttcaggctgggtgtgg

SEQ ID NO: 99540 - DNA, 80 bp, synthetic construct; identical to SEQ ID NO: 35011
  misc_feature 1..80: note = Artificially Synthesized Probe
  source 1..80: mol_type = other DNA

SEQ ID NO: 99541 - DNA, 80 bp, synthetic construct
  misc_feature 1..80: note = Artificially Synthesized Probe
  source 1..80: mol_type = other DNA
tcagccaggcatggtggcacatgcctgtaatcccagctactcagggcgctgaggcaggaaaatcactcgaacccaggagg

SEQ ID NO: 99542 - DNA, 80 bp, synthetic construct
  misc_feature 1..80: note = Artificially Synthesized Probe
  source 1..80: mol_type = other DNA
tctatctatctatctcagagagagagagaggaagttctatattttgatatgaaaatatctccaattaagtaaaaaaaaat

SEQ ID NO: 99543 - DNA, 80 bp, synthetic construct; identical to SEQ ID NO: 35032
  misc_feature 1..80: note = Artificially Synthesized Probe
  source 1..80: mol_type = other DNA

SEQ ID NO: 99544 - DNA, 80 bp, synthetic construct
  misc_feature 1..80: note = Artificially Synthesized Probe
  source 1..80: mol_type = other DNA
atttccccatcagaatggaaccaccagaaataaacagatctatcaactgagagagaactcaacctcagcctgaagcaaag

SEQ ID NO: 99545 - DNA, 80 bp, synthetic construct
  misc_feature 1..80: note = Artificially Synthesized Probe
  source 1..80: mol_type = other DNA
ccaatggccagagaagttaagtcaggataaaaaaatactgttccacatacctaaacaagcacacacagtaaaataatcca

SEQ ID NO: 99546 - DNA, 80 bp, synthetic construct
  misc_feature 1..80: note = Artificially Synthesized Probe
  source 1..80: mol_type = other DNA
tggatatcagaaagcagtgggatgatatattcaaagtgctgaaagaaaaagactgtcaatgataatatcaaaactagtat

SEQ ID NO: 99547 - DNA, 80 bp, synthetic construct; identical to SEQ ID NO: 35033
  misc_feature 1..80: note = Artificially Synthesized Probe
  source 1..80: mol_type = other DNA

SEQ ID NO: 99548 - DNA, 80 bp, synthetic construct
  misc_feature 1..80: note = Artificially Synthesized Probe
  source 1..80: mol_type = other DNA
ttaagctctgagatttgaggtttaattagctgctatagcttgaagtttgactgcaccaaaccacatgttaaaatgtgatc

SEQ ID NO: 99549 - DNA, 80 bp, synthetic construct
  misc_feature 1..80: note = Artificially Synthesized Probe
  source 1..80: mol_type = other DNA
cgaaaaataaattacttagtctcaggtattcttttatagcaacataaatgaactacgataacagctatcaccagaatcgt

SEQ ID NO: 99550 - DNA, 80 bp, synthetic construct
  misc_feature 1..80: note = Artificially Synthesized Probe
  source 1..80: mol_type = other DNA
ccattaacctcattccttaataatcagcctactactagggtactctcctattttaatttagtcaaactctgatacctggg

SEQ ID NO: 99551 - DNA, 80 bp, synthetic construct; identical to SEQ ID NO: 35034
  misc_feature 1..80: note = Artificially Synthesized Probe
  source 1..80: mol_type = other DNA

SEQ ID NO: 99552 - DNA, 80 bp, synthetic construct
  misc_feature 1..80: note = Artificially Synthesized Probe
  source 1..80: mol_type = other DNA
gggctgttttggatcatagaaaacaagtccaactttccaattcctgcacttgaacatataaagtccatgtcttcagtgag

SEQ ID NO: 99553 - DNA, 80 bp, synthetic construct
  misc_feature 1..80: note = Artificially Synthesized Probe
  source 1..80: mol_type = other DNA
ttacaccatcagtatcctcccctgaagctatgaaaataggcagatattttcatttcattcattcccccaccttatagagg

SEQ ID NO: 99554 - DNA, 80 bp, synthetic construct
  misc_feature 1..80: note = Artificially Synthesized Probe
  source 1..80: mol_type = other DNA
tgttatgctaatgttgtatcccttccatattctgtgtttcatggaatatcaagatgccaaacaaccagataaaactgaca

SEQ ID NO: 99555 - DNA, 80 bp, synthetic construct
  misc_feature 1..80: note = Artificially Synthesized Probe
  source 1..80: mol_type = other DNA
ccctgaacactaagaatggatttataacttaagacaatgccctggatggaaaatggataaggatgatttcataccccgag

SEQ ID NO: 99556 - DNA, 80 bp, synthetic construct; identical to SEQ ID NO: 35009
  misc_feature 1..80: note = Artificially Synthesized Probe
  source 1..80: mol_type = other DNA

SEQ ID NO: 99557 - DNA, 80 bp, synthetic construct; identical to SEQ ID NO: 35035
  misc_feature 1..80: note = Artificially Synthesized Probe
  source 1..80: mol_type = other DNA

SEQ ID NO: 99558 - DNA, 80 bp, synthetic construct
  misc_feature 1..80: note = Artificially Synthesized Probe
  source 1..80: mol_type = other DNA
atttacctactcctctttcagttgaaaaaggcactttaaagggaaggcaaggactgaatacaatgaaggatgtttcagat

SEQ ID NO: 99559 - DNA, 80 bp, synthetic construct
  misc_feature 1..80: note = Artificially Synthesized Probe
  source 1..80: mol_type = other DNA
gtacagacatgcaattattgatctccaggtttaggaaattggatctatgtgtgagaaactggttgagataggcttagggg

SEQ ID NO: 99560 - DNA, 80 bp, synthetic construct
  misc_feature 1..80: note = Artificially Synthesized Probe
  source 1..80: mol_type = other DNA
aggggtaggtgagtaaggggaagacagcaagtaaactctgggaaagaaggatcagagaaggagtctaggtgatgtcactc

SEQ ID NO: 99561 - DNA, 80 bp, synthetic construct; identical to SEQ ID NO: 35036
  misc_feature 1..80: note = Artificially Synthesized Probe
  source 1..80: mol_type = other DNA

SEQ ID NO: 99562 - DNA, 80 bp, synthetic construct
  misc_feature 1..80: note = Artificially Synthesized Probe
  source 1..80: mol_type = other DNA
cttgatggtttgaattggtatcaaattaatgtctcaggcattttgctaatatcttgcttgctctaaccattatcagccca

SEQ ID NO: 99563 - DNA, 80 bp, synthetic construct
  misc_feature 1..80: note = Artificially Synthesized Probe
  source 1..80: mol_type = other DNA
tgctagttgactgattaatgactaaatacaaaggtgacaggggccaaagggacactccacaaagcagtttttcctatctc

SEQ ID NO: 99564 - DNA, 80 bp, synthetic construct; identical to SEQ ID NO: 35037
  misc_feature 1..80: note = Artificially Synthesized Probe
  source 1..80: mol_type = other DNA

SEQ ID NO: 99565 - DNA, 80 bp, synthetic construct
  misc_feature 1..80: note = Artificially Synthesized Probe
  source 1..80: mol_type = other DNA
gcaagggtacaacatttgagacagtgtcttctgtggatatgaaaggaaaggctcaacagttaagactagtttcatatgct

SEQ ID NO: 99566 - DNA, 80 bp, synthetic construct
  misc_feature 1..80: note = Artificially Synthesized Probe
  source 1..80: mol_type = other DNA
tcacctcgcatctgtatccaccaatgaagtcactgcatgttgccccgtgctggcaggggttggacgcacactcatcgagt

SEQ ID NO: 99567 - DNA, 80 bp, synthetic construct
  misc_feature 1..80: note = Artificially Synthesized Probe
  source 1..80: mol_type = other DNA
ggttcaaatcaaccaatgagcaagtaaatctaaactggctgacacatccaatcttattcttagccagttcttcacaaccc

SEQ ID NO: 99568 - DNA, 80 bp, synthetic construct
  misc_feature 1..80: note = Artificially Synthesized Probe
  source 1..80: mol_type = other DNA
ccttccctcttattccacaaaaaaatgataccttctctaaatgccactggacagtcaatactgcagtgaatgacctgagc

SEQ ID NO: 99569 - DNA, 80 bp, synthetic construct
  misc_feature 1..80: note = Artificially Synthesized Probe
  source 1..80: mol_type = other DNA
gattcaccagggtctgaaacagaggcaggggtgtacatacatcaaaattcaaatactagaaatgaagaaaagaagttata

SEQ ID NO: 99570 - DNA, 80 bp, synthetic construct; identical to SEQ ID NO: 35038
  misc_feature 1..80: note = Artificially Synthesized Probe
  source 1..80: mol_type = other DNA

SEQ ID NO: 99571 - DNA, 80 bp, synthetic construct
  misc_feature 1..80: note = Artificially Synthesized Probe
  source 1..80: mol_type = other DNA
ctacttatttctggttaaaaaaaaaatcactaaacttcaaattaacacccacttctgatattaaacattaaaataaacaa

SEQ ID NO: 99572 - DNA, 80 bp, synthetic construct
  misc_feature 1..80: note = Artificially Synthesized Probe
  source 1..80: mol_type = other DNA
agaaagcaacactaaccaatatggcaggcttgctgggtggttttgtaccacattgtttattgttgtgcactcatatgatt

SEQ ID NO: 99573 - DNA, 80 bp, synthetic construct
  misc_feature 1..80: note = Artificially Synthesized Probe
  source 1..80: mol_type = other DNA
agcctcccgagtagctgggactacaggcacccgctaccacacccggctaattttttgtatttttagtagaggcggggttt

SEQ ID NO: 99574 - DNA, 80 bp, synthetic construct; identical to SEQ ID NO: 35039
  misc_feature 1..80: note = Artificially Synthesized Probe
  source 1..80: mol_type = other DNA

SEQ ID NO: 99575 - DNA, 80 bp, synthetic construct
  misc_feature 1..80: note = Artificially Synthesized Probe
  source 1..80: mol_type = other DNA
ggtcttctatttaaaaagttcttaccaaaaaagtttaaaaattcagggaaacccaacaggttaagctattcccaatgctc

SEQ ID NO: 99576 - DNA, 80 bp, synthetic construct
  misc_feature 1..80: note = Artificially Synthesized Probe
  source 1..80: mol_type = other DNA
gcctgttaataagcctaaaaccgtttaagagcttatttctaaggaaggcaatcagacttatgaaaaatctgaagcaaaga

SEQ ID NO: 99577 - DNA, 80 bp, synthetic construct
  misc_feature 1..80: note = Artificially Synthesized Probe
  source 1..80: mol_type = other DNA
cctttttctggttttaaaaaagtggggagggtcatagtaactagactatcaaggataaaactttacactgaccaggccca

SEQ ID NO: 99578 - DNA, 80 bp, synthetic construct; identical to SEQ ID NO: 35040
  misc_feature 1..80: note = Artificially Synthesized Probe
  source 1..80: mol_type = other DNA

SEQ ID NO: 99579 - DNA, 80 bp, synthetic construct
  misc_feature 1..80: note = Artificially Synthesized Probe
  source 1..80: mol_type = other DNA
cccctctggggctgtttcgccttccatgaaatcgaaggttagattagttgcctataagggctctttccattctaaaattt

SEQ ID NO: 99580 - DNA, 80 bp, synthetic construct
  misc_feature 1..80: note = Artificially Synthesized Probe
  source 1..80: mol_type = other DNA
agttctttttgtgcttccaatgtaaaaaacaaaaaaacaaaaaacaaaaaacaaaaatctgtgtttatttcccacatgta

SEQ ID NO: 99581 - DNA, 80 bp, synthetic construct
  misc_feature 1..80: note = Artificially Synthesized Probe
  source 1..80: mol_type = other DNA
attcagactagaaagtgaacaggtataatattcagctgctctaggggagctgagtgaatgggaaggaagtcaattacctg

SEQ ID NO: 99582 - DNA, 80 bp, synthetic construct; identical to SEQ ID NO: 35041
  misc_feature 1..80: note = Artificially Synthesized Probe
  source 1..80: mol_type = other DNA

SEQ ID NO: 99583 - DNA, 80 bp, synthetic construct
  misc_feature 1..80: note = Artificially Synthesized Probe
  source 1..80: mol_type = other DNA
atttaaaagactgagcttactatagatacctacagaaaatgaagttttctaggttttacccagtccttctgtagttttcc

SEQ ID NO: 99584 - DNA, 80 bp, synthetic construct
  misc_feature 1..80: note = Artificially Synthesized Probe
  source 1..80: mol_type = other DNA
attccaatctctgcagaaaaactggaatttttggatttttgaaatgaatgagaggccaagggaagaacagaacaaaatta

SEQ ID NO: 99585 - DNA, 80 bp, synthetic construct
  misc_feature 1..80: note = Artificially Synthesized Probe
  source 1..80: mol_type = other DNA
gactgtggactgggatccatgtggacacctcatccctgctccacaattctagcattgtgctctgaaatttccttcccttt

SEQ ID NO: 99586 - DNA, 80 bp, synthetic construct
  misc_feature 1..80: note = Artificially Synthesized Probe
  source 1..80: mol_type = other DNA
ttgaagaaaagtattcttctccccttctctctccaggaatgatatatgcaggagaacacaatacagtatgtccattttcc

SEQ ID NO: 99587 - DNA, 80 bp, synthetic construct; identical to SEQ ID NO: 35042
  misc_feature 1..80: note = Artificially Synthesized Probe
  source 1..80: mol_type = other DNA

SEQ ID NO: 99588 - DNA, 80 bp, synthetic construct
  misc_feature 1..80: note = Artificially Synthesized Probe
  source 1..80: mol_type = other DNA
gtcatgctgggggcagcataattctgactttttcattcaattttgccaactccctcatttatgaaaatgaattcaataat

SEQ ID NO: 99589 - DNA, 80 bp, synthetic construct
  misc_feature 1..80: note = Artificially Synthesized Probe
  source 1..80: mol_type = other DNA
caaatatgtgccccaatacacagaatatcaatcaatattttcaaaaggtatatgtgattgtggagtgtgtgggggaggac

SEQ ID NO: 99590 - DNA, 80 bp, synthetic construct
  misc_feature 1..80: note = Artificially Synthesized Probe
  source 1..80: mol_type = other DNA
cttggaacactttatactcatagtaaggaaccaacaaattttaagctacagtcatgccacggcactctacaattatatgc

SEQ ID NO: 99591 - DNA, 80 bp, synthetic construct
  misc_feature 1..80: note = Artificially Synthesized Probe
  source 1..80: mol_type = other DNA
ttcatctcttgaactaattcccttataagactcatctgcaatctctattaaagcaattgtaaaaattgtttcagtttttc

SEQ ID NO: 99592 - DNA, 80 bp, synthetic construct; identical to SEQ ID NO: 35043
  misc_feature 1..80: note = Artificially Synthesized Probe
  source 1..80: mol_type = other DNA

SEQ ID NO: 99593 - DNA, 80 bp, synthetic construct
  misc_feature 1..80: note = Artificially Synthesized Probe
  source 1..80: mol_type = other DNA
cgcctcccgggttcaagagattctcgtgcatcagcctcccgagtagctggaattacaggtgcctgccaccacgcctggct

SEQ ID NO: 99594 - DNA, 80 bp, synthetic construct
  misc_feature 1..80: note = Artificially Synthesized Probe
  source 1..80: mol_type = other DNA
tatttatcttatcactgccggcacctagcatggtggcctctatatgataatctgaagttatatatcctgtaaattaaggt

SEQ ID NO: 99595 - DNA, 80 bp, synthetic construct; identical to SEQ ID NO: 35044
  misc_feature 1..80: note = Artificially Synthesized Probe
  source 1..80: mol_type = other DNA

SEQ ID NO: 99596 - DNA, 80 bp, synthetic construct; identical to SEQ ID NO: 35012
  misc_feature 1..80: note = Artificially Synthesized Probe
  source 1..80: mol_type = other DNA

SEQ ID NO: 99597 - DNA, 80 bp, synthetic construct
  misc_feature 1..80: note = Artificially Synthesized Probe
  source 1..80: mol_type = other DNA
gtttttttaaaaaagatttttaaaaaaattcagcatggaacaatgtaagatggatgtctagcatccagtaaaaagttacc

SEQ ID NO: 99598 - DNA, 80 bp, synthetic construct
  misc_feature 1..80: note = Artificially Synthesized Probe
  source 1..80: mol_type = other DNA
ggaaataaaagcatgaacatgacaaagagggaggtaacgttaaaagaaagacttgaattaaacttccacatataaaaaca

SEQ ID NO: 99599 - DNA, 80 bp, synthetic construct
  misc_feature 1..80: note = Artificially Synthesized Probe
  source 1..80: mol_type = other DNA
aaccttgcagcctaataaatgcataatgaacattataaaagggagacgcaaaaacttttgaaaaaaataatggctaaata

SEQ ID NO: 99600 - DNA, 80 bp, synthetic construct
  misc_feature 1..80: note = Artificially Synthesized Probe
  source 1..80: mol_type = other DNA
aagatcaggagatcaagaccaccctggctaacacggtgaaaccccatctctactaaaaatacaaaaaatcagccgggcgt

SEQ ID NO: 99601 - DNA, 80 bp, synthetic construct; identical to SEQ ID NO: 35045
  misc_feature 1..80: note = Artificially Synthesized Probe
  source 1..80: mol_type = other DNA

SEQ ID NO: 99602 - DNA, 80 bp, synthetic construct
  misc_feature 1..80: note = Artificially Synthesized Probe
  source 1..80: mol_type = other DNA
caaaataaaaacctttctgacacacaaaaacagaaagacttcatcaccaggagacaaagactacacaaaatattcaaggg

SEQ ID NO: 99603 - DNA, 80 bp, synthetic construct
  misc_feature 1..80: note = Artificially Synthesized Probe
  source 1..80: mol_type = other DNA
ggtttaatgctatatacattttataacaacaatagaagagaggccaggaggaatgtaaatgtgagtgtacagctcttctc

SEQ ID NO: 99604 - DNA, 80 bp, synthetic construct
  misc_feature 1..80: note = Artificially Synthesized Probe
  source 1..80: mol_type = other DNA
aggccaggaggaatgtaaatgtgagtgtacagctcttctcctctatatgaagtggtacgattgaaggtacattataataa

SEQ ID NO: 99605 - DNA, 80 bp, synthetic construct; identical to SEQ ID NO: 35046
  misc_feature 1..80: note = Artificially Synthesized Probe
  source 1..80: mol_type = other DNA

SEQ ID NO: 99606 - DNA, 80 bp, synthetic construct
  misc_feature 1..80: note = Artificially Synthesized Probe
  source 1..80: mol_type = other DNA
gagtagctatatcagtatcaggcaaagtagacttcagagagagaaatatgacaagagtttaaaaaggccatttcaaaatg

SEQ ID NO: 99607 - DNA, 80 bp, synthetic construct
  misc_feature 1..80: note = Artificially Synthesized Probe
  source 1..80: mol_type = other DNA
aaacagaaagcctccttattatattctatgaataataagtagacagaaagtcatagaggacataaaagacctgaataaca

SEQ ID NO: 99608 - DNA, 80 bp, synthetic construct
  misc_feature 1..80: note = Artificially Synthesized Probe
  source 1..80: mol_type = other DNA
tctgggcttcaataagcatccatcttattctccaaatagaagagagtaaacatggacccaaggcttgtattcatcttgca

SEQ ID NO: 99609 - DNA, 80 bp, synthetic construct
  misc_feature 1..80: note = Artificially Synthesized Probe
  source 1..80: mol_type = other DNA
aaggaaaccatcacagatctaatagactattaaagcacagtaaggaaatgttataaaacaaattgatgttatgtcaacaa

SEQ ID NO: 99610 - DNA, 80 bp, synthetic construct; identical to SEQ ID NO: 35047
  misc_feature 1..80: note = Artificially Synthesized Probe
  source 1..80: mol_type = other DNA

SEQ ID NO: 99611 - DNA, 80 bp, synthetic construct
  misc_feature 1..80: note = Artificially Synthesized Probe
  source 1..80: mol_type = other DNA
aaaaggaataacacataatgaccaagtggaatatagcccataaatttaagattagcttttaacatttgcaaaatgttaaa

SEQ ID NO: 99612 - DNA, 80 bp, synthetic construct
  misc_feature 1..80: note = Artificially Synthesized Probe
  source 1..80: mol_type = other DNA
aagacctcttaaaaaccagaagtacaaggtctctcaatttgataaagggcctttatgaaaacctataggtaacatctcac

SEQ ID NO: 99613 - DNA, 80 bp, synthetic construct
  misc_feature 1..80: note = Artificially Synthesized Probe
  source 1..80: mol_type = other DNA
tttatagacaggatgattgtatctgtagaaaatcctaagaatctaaactatctagaggctaacctacgaacctacaacta

SEQ ID NO: 99614 - DNA, 80 bp, synthetic construct; identical to SEQ ID NO: 35048
  misc_feature 1..80: note = Artificially Synthesized Probe
  source 1..80: mol_type = other DNA

SEQ ID NO: 99615 - DNA, 80 bp, synthetic construct
  misc_feature 1..80: note = Artificially Synthesized Probe
  source 1..80: mol_type = other DNA
aaagaattcttatttaaaaatacaaagaactctttcaactcaagaagacaacctaattatttcaaatgggcaaaaaattt

SEQ ID NO: 99616 - DNA, 80 bp, synthetic construct
  misc_feature 1..80: note = Artificially Synthesized Probe
  source 1..80: mol_type = other DNA
ctagaagagctaaatttaaatgatatcaccaagagtttgtgagcatatggttcaaacagaactttcatacaattctggtg

SEQ ID NO: 99617 - DNA, 80 bp, synthetic construct
  misc_feature 1..80: note = Artificially Synthesized Probe
  source 1..80: mol_type = other DNA
tgtaatatccccaaattggaaaacacccaaatggccatcaaccaatgaactgtaatatgtccatacaatggaatactgca

SEQ ID NO: 99618 - DNA, 80 bp, synthetic construct; identical to SEQ ID NO: 35049
  misc_feature 1..80: note = Artificially Synthesized Probe
  source 1..80: mol_type = other DNA

SEQ ID NO: 99619 - DNA, 80 bp, synthetic construct
  misc_feature 1..80: note = Artificially Synthesized Probe
  source 1..80: mol_type = other DNA
aattaaagggaatgcttaaaatatattccactgcctcaattcccaaggacactagcttcaaaagaaagagttaaaacact

SEQ ID NO: 99620 - DNA, 80 bp, synthetic construct
  misc_feature 1..80: note = Artificially Synthesized Probe
  source 1..80: mol_type = other DNA
gaccttcatttgttcctcagcagcatttacaaaagtcagttatgtctctacactggaggtggactctctcacgcataaac

SEQ ID NO: 99621 - DNA, 80 bp, synthetic construct
  misc_feature 1..80: note = Artificially Synthesized Probe
  source 1..80: mol_type = other DNA
tgactggcatactcactggcaaggcagtcatcaatgtcctcctcacagtccataccactgaagcctggtggacattcaca

SEQ ID NO: 99622 - DNA, 80 bp, synthetic construct
  misc_feature 1..80: note = Artificially Synthesized Probe
  source 1..80: mol_type = other DNA
ccttggaagctgattcccacaaaaatctacgcaggacctgagcttagttggggtgcatggagctattccacagacaaact

SEQ ID NO: 99623 - DNA, 80 bp, synthetic construct
  misc_feature 1..80: note = Artificially Synthesized Probe
  source 1..80: mol_type = other DNA
ggctttctaagccatttcaagtagcagctcctttgcaaaacctgtgtgctcttgacaagatggacaggcctcataagacc

SEQ ID NO: 99624 - DNA, 80 bp, synthetic construct; identical to SEQ ID NO: 35050
  misc_feature 1..80: note = Artificially Synthesized Probe
  source 1..80: mol_type = other DNA

SEQ ID NO: 99625 - DNA, 80 bp, synthetic construct
  misc_feature 1..80: note = Artificially Synthesized Probe
  source 1..80: mol_type = other DNA
tgatattgttaactgtgtaaccttgggcaagatagttagggacctcctacaactgtgattttatgaactaggcctgttaa

SEQ ID NO: 99626 - DNA, 80 bp, synthetic construct
  misc_feature 1..80: note = Artificially Synthesized Probe
  source 1..80: mol_type = other DNA
ctgggactacaggcacccaccacgacgcccggctaattttttatatttttagtagagacggggtttcaccatgttagcca

SEQ ID NO: 99627 - DNA, 80 bp, synthetic construct; identical to SEQ ID NO: 35051
  misc_feature 1..80: note = Artificially Synthesized Probe
  source 1..80: mol_type = other DNA

SEQ ID NO: 99628 - DNA, 80 bp, synthetic construct
  misc_feature 1..80: note = Artificially Synthesized Probe
  source 1..80: mol_type = other DNA
atataaccaatcacaagaaggcgataataagccagtagaaaacaaagaataaatgtcccaagcacactccaaacataaca

SEQ ID NO: 99629 - DNA, 80 bp, synthetic construct
  misc_feature 1..80: note = Artificially Synthesized Probe
  source 1..80: mol_type = other DNA
aggccattaagaggaaaagcttcagattcaaagagacctacaggtaaatcctagatgtactacttacctatatgaccttg

SEQ ID NO: 99630 - DNA, 80 bp, synthetic construct
  misc_feature 1..80: note = Artificially Synthesized Probe
  source 1..80: mol_type = other DNA
aagacaaatagctaatgtcctggaaacattcaaatgatagacaaccatcatctatgtgcctggttccagccacatacaat

SEQ ID NO: 99631 - DNA, 80 bp, synthetic construct
  misc_feature 1..80: note = Artificially Synthesized Probe
  source 1..80: mol_type = other DNA
caaatgactgtccaccacttgcatcttaggaggccacaatgtttcctcaaagctcaagatccagtcagtaaaggcaggaa

SEQ ID NO: 99632 - DNA, 80 bp, synthetic construct; identical to SEQ ID NO: 35052
  misc_feature 1..80: note = Artificially Synthesized Probe
  source 1..80: mol_type = other DNA

SEQ ID NO: 99633 - DNA, 80 bp, synthetic construct; identical to SEQ ID NO: 35013
  misc_feature 1..80: note = Artificially Synthesized Probe
  source 1..80: mol_type = other DNA

SEQ ID NO: 99634 - DNA, 80 bp, synthetic construct
  misc_feature 1..80: note = Artificially Synthesized Probe
  source 1..80: mol_type = other DNA
ccactgaaatacctgttcattcatttcagccccatgtccctgaaatacagtcagtaaatgacagcaattagttgaaaaga

SEQ ID NO: 99635 - DNA, 80 bp, synthetic construct
  misc_feature 1..80: note = Artificially Synthesized Probe
  source 1..80: mol_type = other DNA
ctggagtgcagttgtgtaatcatggctcactgcagcctcgacctctcgggctcagcaatcctcccacctcagcctcctga

SEQ ID NO: 99636 - DNA, 80 bp, synthetic construct; identical to SEQ ID NO: 35053
  misc_feature 1..80: note = Artificially Synthesized Probe
  source 1..80: mol_type = other DNA

SEQ ID NO: 99637 - DNA, 80 bp, synthetic construct
  misc_feature 1..80: note = Artificially Synthesized Probe
  source 1..80: mol_type = other DNA
gaaaccttctcccactaagaaaaggataaaaggaataaaaaattagtggagatagcacagtacccaaatactgcacacct

SEQ ID NO: 99638 - DNA, 80 bp, synthetic construct
  misc_feature 1..80: note = Artificially Synthesized Probe
  source 1..80: mol_type = other DNA
gttcactgataagcaagtctcagaagataaagaaataaaagtgttttgaaatctacaagtttctttgccaatgtaataca

SEQ ID NO: 99639 - DNA, 80 bp, synthetic construct
  misc_feature 1..80: note = Artificially Synthesized Probe
  source 1..80: mol_type = other DNA
tacccacacggctctcttttgtgagtttccaagagaaaactgatggtagaaatataacagtgataactcagaagcagatt

SEQ ID NO: 99640 - DNA, 80 bp, synthetic construct
  misc_feature 1..80: note = Artificially Synthesized Probe
  source 1..80: mol_type = other DNA
tttaggatgatgattcaagcacatcccatttattgtgcactttacttttattattataatattacactgtaatatacaat

SEQ ID NO: 99641 - DNA, 80 bp, synthetic construct; identical to SEQ ID NO: 35054
  misc_feature 1..80: note = Artificially Synthesized Probe
  source 1..80: mol_type = other DNA

SEQ ID NO: 99642 - DNA, 80 bp, synthetic construct
  misc_feature 1..80: note = Artificially Synthesized Probe
  source 1..80: mol_type = other DNA
gttgaggacctccggtgtagaccaaagatgactaaataactaagaatatctcaatgtgttaaaaagtttgttgaaagagt

SEQ ID NO: 99643 - DNA, 80 bp, synthetic construct
  misc_feature 1..80: note = Artificially Synthesized Probe
  source 1..80: mol_type = other DNA
cttataattagacacttggccaatgctgtaaaactggagtcttaactgctcatcttaaatattaccatttcaggctgggt

SEQ ID NO: 99644 - DNA, 80 bp, synthetic construct
  misc_feature 1..80: note = Artificially Synthesized Probe
  source 1..80: mol_type = other DNA
gggcccgcaacagctggagggcaggtggactgaggctggggagcccccgctggttgggcaatactgcctttagggatgag

SEQ ID NO: 99645 - DNA, 80 bp, synthetic construct
  misc_feature 1..80: note = Artificially Synthesized Probe
  source 1..80: mol_type = other DNA
ctactagggaggctgaggcaggagaatggcttgaacccgggaggtagagcttgcagtgagccaagatcacgcaccattgc

SEQ ID NO: 99646 - DNA, 80 bp, synthetic construct; identical to SEQ ID NO: 35055
  misc_feature 1..80: note = Artificially Synthesized Probe
  source 1..80: mol_type = other DNA

SEQ ID NO: 99647 - DNA, 80 bp, synthetic construct
  misc_feature 1..80: note = Artificially Synthesized Probe
  source 1..80: mol_type = other DNA
tccacttcacagttgatgccaacccagcctgcatcacagagacacttatatctgaaagaagacaaaactttttactatag

SEQ ID NO: 99648 - DNA, 80 bp, synthetic construct
  misc_feature 1..80: note = Artificially Synthesized Probe
  source 1..80: mol_type = other DNA
taccatgtggccctatcaggtgtatccagtaaagaaaccttcttggtgctttcctggctcactaagttagtgaaattata

SEQ ID NO: 99649 - DNA, 80 bp, synthetic construct; identical to SEQ ID NO: 35056
  misc_feature 1..80: note = Artificially Synthesized Probe
  source 1..80: mol_type = other DNA

SEQ ID NO: 99650 - DNA, 80 bp, synthetic construct
  misc_feature 1..80: note = Artificially Synthesized Probe
  source 1..80: mol_type = other DNA
atgatagctttcttatcgggagaattttaagaaaatgagagatggataagggtgccttgaaggctgctatactctgaaac

SEQ ID NO: 99651 - DNA, 80 bp, synthetic construct
  misc_feature 1..80: note = Artificially Synthesized Probe
  source 1..80: mol_type = other DNA
aaatgcagcaagagtataagagcgtctcgtgagacctaaggtcactctatgattctagaaaatcactaacacatcacaca

SEQ ID NO: 99652 - DNA, 80 bp, synthetic construct
  misc_feature 1..80: note = Artificially Synthesized Probe
  source 1..80: mol_type = other DNA
atcattccagtaatacatactaaaaacataactgccaaagattcatacaatgagtatgggttcctcccatgaggtccttg

SEQ ID NO: 99653 - DNA, 80 bp, synthetic construct; identical to SEQ ID NO: 35057
  misc_feature 1..80: note = Artificially Synthesized Probe
  source 1..80: mol_type = other DNA

SEQ ID NO: 99654 - DNA, 80 bp, synthetic construct
  misc_feature 1..80: note = Artificially Synthesized Probe
  source 1..80: mol_type = other DNA
caccgttgatacatgttgcacccttgcgacagggattggaggcacactcatcaatgtcaatgttacatctctgccctgtg

SEQ ID NO: 99655 - DNA, 80 bp, synthetic construct
  misc_feature 1..80: note = Artificially Synthesized Probe
  source 1..80: mol_type = other DNA
gtcaagatgtaaggaattagacacccaataacacttaatgccatgcaaaggagcaaagagcattgacttttgataatcaa

SEQ ID NO: 99656 - DNA, 80 bp, synthetic construct
  misc_feature 1..80: note = Artificially Synthesized Probe
  source 1..80: mol_type = other DNA
ctcttcttaatgctgccctgagtacaactcaaagaagcattcattaacatgctttgtgccggtttagcacaaattcattt

SEQ ID NO: 99657 - DNA, 80 bp, synthetic construct
  misc_feature 1..80: note = Artificially Synthesized Probe
  source 1..80: mol_type = other DNA
ttcatccaatctgctgggactgggactggatggagcctactcaagcttccagcactgccactgcctggagacacaatgtg

SEQ ID NO: 99658 - DNA, 80 bp, synthetic construct
  misc_feature 1..80: note = Artificially Synthesized Probe
  source 1..80: mol_type = other DNA
gaggtaacactgccaggccatggatgcagtattggaaaataaaaaatacaacaccactgagcttggcaaaccttttttat

SEQ ID NO: 99659 - DNA, 80 bp, synthetic construct
  misc_feature 1..80: note = Artificially Synthesized Probe
  source 1..80: mol_type = other DNA
tagagtctcaaagtataattttgttgtcttctgatattagagaaaataatgcagtctgtcactgcagacctatggttctt

SEQ ID NO: 99660 - DNA, 80 bp, synthetic construct; identical to SEQ ID NO: 35058
  misc_feature 1..80: note = Artificially Synthesized Probe
  source 1..80: mol_type = other DNA

SEQ ID NO: 99661 - DNA, 80 bp, synthetic construct
  misc_feature 1..80: note = Artificially Synthesized Probe
  source 1..80: mol_type = other DNA
ataattctataaatgagtggcatcaagcaactgctatgaatttatatatttcaaagaacacaatgttctgattctgattt

SEQ ID NO: 99662 - DNA, 80 bp, synthetic construct
  misc_feature 1..80: note = Artificially Synthesized Probe
  source 1..80: mol_type = other DNA
tgctctctaaaccatcattggtggttcttgtggtaaaaacccataatctggaagtggctgctgttttcctcttaagtgtt

SEQ ID NO: 99663 - DNA, 80 bp, synthetic construct
  misc_feature 1..80: note = Artificially Synthesized Probe
  source 1..80: mol_type = other DNA
cgtaatatagtgaaggataacaggaaaaaggtttcttcatttttggtcttttcttggaagcgtctcctcagaagccactc

SEQ ID NO: 99664 - DNA, 80 bp, synthetic construct; identical to SEQ ID NO: 35059
  misc_feature 1..80: note = Artificially Synthesized Probe
  source 1..80: mol_type = other DNA

SEQ ID NO: 99665 - DNA, 80 bp, synthetic construct
  misc_feature 1..80: note = Artificially Synthesized Probe
  source 1..80: mol_type = other DNA
atttgagtcccattcattcgttcattcagcaacattcactaagcgtttcctacgtgccagacattgctttagacacttgc

SEQ ID NO: 99666 - DNA, 80 bp, synthetic construct
  misc_feature 1..80: note = Artificially Synthesized Probe
  source 1..80: mol_type = other DNA
aaacgggtatagtagaacttcctttctggattgttatgagaattcaggaagataatgggcatgaaggtgctttgtaaaac

SEQ ID NO: 99667 - DNA, 80 bp, synthetic construct
  misc_feature 1..80: note = Artificially Synthesized Probe
  source 1..80: mol_type = other DNA
agagcaagaataaaactcctcacatttaccactcatgagtatataccacagtcatctctaatgtttttagcagctgatta

SEQ ID NO: 99668 - DNA, 80 bp, synthetic construct; identical to SEQ ID NO: 35060
  misc_feature 1..80: note = Artificially Synthesized Probe
  source 1..80: mol_type = other DNA

SEQ ID NO: 99669 - DNA, 80 bp, synthetic construct
  misc_feature 1..80: note = Artificially Synthesized Probe
  source 1..80: mol_type = other DNA
attctggctgctgtgcactggtaacattacttaacatctctgtgttctgggtttcttattctgtaggtattctcaacgtc

SEQ ID NO: 99670 - DNA, 80 bp, synthetic construct
  misc_feature 1..80: note = Artificially Synthesized Probe
  source 1..80: mol_type = other DNA
atcccaggggatgtaatcattggagaggatgtggtgtcggaaacatacgtgtgaggagattctagggaatcaacagggga

SEQ ID NO: 99671 - DNA, 80 bp, synthetic construct
  misc_feature 1..80: note = Artificially Synthesized Probe
  source 1..80: mol_type = other DNA
ttcaggatgcagaacatcaggctactacagcagcactgggcattgggtatgacagttttcatcagattttgcttctcagt

SEQ ID NO: 99672 - DNA, 80 bp, synthetic construct; identical to SEQ ID NO: 35061
  misc_feature 1..80: note = Artificially Synthesized Probe
  source 1..80: mol_type = other DNA

SEQ ID NO: 99673 - DNA, 80 bp, synthetic construct
  misc_feature 1..80: note = Artificially Synthesized Probe
  source 1..80: mol_type = other DNA
gcagtagtagcctctagcactttttgatcaggagggtaaaagataaaggtaatattgacaagtaaagagagagaagatgt

SEQ ID NO: 99674 - DNA, 80 bp, synthetic construct
  misc_feature 1..80: note = Artificially Synthesized Probe
  source 1..80: mol_type = other DNA
gctacccaaattagggtggtctccccaagctctgacctcatccaacaatatttcagaagacgaagtacccagaaataagc

SEQ ID NO: 99675 - DNA, 80 bp, synthetic construct
  misc_feature 1..80: note = Artificially Synthesized Probe
  source 1..80: mol_type = other DNA
tacctgtaatcaataaacatagctttggaagcaatgtaactcaagcaaagcaaaggcaatttatggtctgtctaggaatt

SEQ ID NO: 99676 - DNA, 80 bp, synthetic construct
  misc_feature 1..80: note = Artificially Synthesized Probe
  source 1..80: mol_type = other DNA
caatattcctttggatgctatattcccaaagtgatagggctgaaggaggggccttgcagtaaaaggagctttacctgtga

SEQ ID NO: 99677 - DNA, 80 bp, synthetic construct; identical to SEQ ID NO: 35062
  misc_feature 1..80: note = Artificially Synthesized Probe
  source 1..80: mol_type = other DNA

SEQ ID NO: 99678 - DNA, 80 bp, synthetic construct
  misc_feature 1..80: note = Artificially Synthesized Probe
  source 1..80: mol_type = other DNA
agtagaaccagactgtactataattattctactgctcacctccacatgccacagttaaacaagcaaaaacgccagtttca

SEQ ID NO: 99679 - DNA, 80 bp, synthetic construct
  misc_feature 1..80: note = Artificially Synthesized Probe
  source 1..80: mol_type = other DNA
aatgctattgtttgagctgtgagttgaaatagctgctttcttcatgaaaccccattttaattgaaagagcaactgacagg

SEQ ID NO: 99680 - DNA, 80 bp, synthetic construct; identical to SEQ ID NO: 35063
  misc_feature 1..80: note = Artificially Synthesized Probe
  source 1..80: mol_type = other DNA

SEQ ID NO: 99681 - DNA, 80 bp, synthetic construct
  misc_feature 1..80: note = Artificially Synthesized Probe
  source 1..80: mol_type = other DNA
ttcaggctgaggaaagatctgttgggcccacagatgacaggtgagagagcagaagtcaacacggtgcctggagggcttgg

SEQ ID NO: 99682 - DNA, 80 bp, synthetic construct
  misc_feature 1..80: note = Artificially Synthesized Probe
  source 1..80: mol_type = other DNA
ttttatttttgtatgaatttagtgatgctttctgagtatcacagaataatattttggtagtttaaaaagactaaaaataa

SEQ ID NO: 99683 - DNA, 80 bp, synthetic construct
  misc_feature 1..80: note = Artificially Synthesized Probe
  source 1..80: mol_type = other DNA
caatatccctgactcaagctatccccccacctcagcctcccgattacaggtgtgtaccaccttacctggctaatttttat

SEQ ID NO: 99684 - DNA, 80 bp, synthetic construct
  misc_feature 1..80: note = Artificially Synthesized Probe
  source 1..80: mol_type = other DNA
aggaacagtttattgagttctatgagcaaagtacgctgctttgcctgtcatgtaagttttctctaaccctgtcacccacc

SEQ ID NO: 99685 - DNA, 80 bp, synthetic construct; identical to SEQ ID NO: 35064
  misc_feature 1..80: note = Artificially Synthesized Probe
  source 1..80: mol_type = other DNA

SEQ ID NO: 99686 - DNA, 80 bp, synthetic construct
  misc_feature 1..80: note = Artificially Synthesized Probe
  source 1..80: mol_type = other DNA
acaacactgaaacacagactgtgtgacctctggtctacaaatgcccagtttcctattcttttctccaaagccttattatt

SEQ ID NO: 99687 - DNA, 80 bp, synthetic construct
  misc_feature 1..80: note = Artificially Synthesized Probe
  source 1..80: mol_type = other DNA
aaaagcacagatgagagaacgcactgaaggtaactctgggtagtatatctcactttaagtacccagtgagtgactaccac

SEQ ID NO: 99688 - DNA, 80 bp, synthetic construct
  misc_feature 1..80: note = Artificially Synthesized Probe
  source 1..80: mol_type = other DNA
gatacatgccaggtctttctccacccattacagatcaacatttttttaatgttgtctgaccgttgcttgctttaattctc

SEQ ID NO: 99689 - DNA, 80 bp, synthetic construct; identical to SEQ ID NO: 35065
  misc_feature 1..80: note = Artificially Synthesized Probe
  source 1..80: mol_type = other DNA

SEQ ID NO: 99690 - DNA, 80 bp, synthetic construct
  misc_feature 1..80: note = Artificially Synthesized Probe
  source 1..80: mol_type = other DNA
tactataatttctcatgtctgaggaacagcccggaagcaaattgcttttggaagttttcacaaagatctattcagccctt

SEQ ID NO: 99691 - DNA, 80 bp, synthetic construct
  misc_feature 1..80: note = Artificially Synthesized Probe
  source 1..80: mol_type = other DNA
ccttgggtaaagaccagagcctttgacaaatttgaagaaatggatttggaaacagtaaaagaaaatgagggtagctaact

SEQ ID NO: 99692 - DNA, 80 bp, synthetic construct
  misc_feature 1..80: note = Artificially Synthesized Probe
  source 1..80: mol_type = other DNA
tccactaatacattttcctttgatctggaacatagtacatctctgtccactaaccatagttgtgaccataatcattcatc

SEQ ID NO: 99693 - DNA, 80 bp, synthetic construct; identical to SEQ ID NO: 35014
  misc_feature 1..80: note = Artificially Synthesized Probe
  source 1..80: mol_type = other DNA

SEQ ID NO: 99694 - DNA, 80 bp, synthetic construct; identical to SEQ ID NO: 35066
  misc_feature 1..80: note = Artificially Synthesized Probe
  source 1..80: mol_type = other DNA

SEQ ID NO: 99695 - DNA, 80 bp, synthetic construct
  misc_feature 1..80: note = Artificially Synthesized Probe
  source 1..80: mol_type = other DNA
ggaaggaaggaaggactgaatttattaatctgggtggggtggaacttaaagaaaaaaagataatatagccacaaaaaaga

SEQ ID NO: 99696 - DNA, 80 bp, synthetic construct
  misc_feature 1..80: note = Artificially Synthesized Probe
  source 1..80: mol_type = other DNA
tggctttggctgtgcttctcagaatcaggactgttttttaggtatctgagcatatgccaacagtctgaaacatctgtgta

SEQ ID NO: 99697 - DNA, 80 bp, synthetic construct
  misc_feature 1..80: note = Artificially Synthesized Probe
  source 1..80: mol_type = other DNA
cagatggcgcccatgtacccgggattgcagatgcaggtgtaggaatcaataccatcctgacactgaccatggtggcaagg

SEQ ID NO: 99698 - DNA, 80 bp, synthetic construct; identical to SEQ ID NO: 35067
  misc_feature 1..80: note = Artificially Synthesized Probe
  source 1..80: mol_type = other DNA

SEQ ID NO: 99699 - DNA, 80 bp, synthetic construct
  misc_feature 1..80: note = Artificially Synthesized Probe
  source 1..80: mol_type = other DNA
ccaagtccaatatacaggttaatgatttcatgtatcttatgtccccaattctgactttggaggtaagagagctttatttt

SEQ ID NO: 99700 - DNA, 80 bp, synthetic construct
  misc_feature 1..80: note = Artificially Synthesized Probe
  source 1..80: mol_type = other DNA
ctaaaagactccaggagtcctccccccacttttaaacctgagctaaaggtttttaatctctttgaaacttatcctctaca

SEQ ID NO: 99701 - DNA, 80 bp, synthetic construct
  misc_feature 1..80: note = Artificially Synthesized Probe
  source 1..80: mol_type = other DNA
ttctgtgatcagaaataaattatatgcatgatgcctttaatctttaagactccattctctaaaattaatgtcttgaatta

SEQ ID NO: 99702 - DNA, 80 bp, synthetic construct; identical to SEQ ID NO: 35068
  misc_feature 1..80: note = Artificially Synthesized Probe
  source 1..80: mol_type = other DNA

SEQ ID NO: 99703 - DNA, 80 bp, synthetic construct
  misc_feature 1..80: note = Artificially Synthesized Probe
  source 1..80: mol_type = other DNA
agaagccccagtgaaaaatagctttcaactggatttcttctctttcctaaatgagtcaatctagccagctggaaacttac

SEQ ID NO: 99704 - DNA, 80 bp, synthetic construct
  misc_feature 1..80: note = Artificially Synthesized Probe
  source 1..80: mol_type = other DNA
acaattttgccccttagggggaacatctctttagttgggaattcataaaataaagcatgcccctgagccagagactcact

SEQ ID NO: 99705 - DNA, 80 bp, synthetic construct
  misc_feature 1..80: note = Artificially Synthesized Probe
  source 1..80: mol_type = other DNA
aggtgctgcagaaaaagagagcagcaaaaaatttgttagaaacagctcttcctaaacacagaggagcctctgggagtgga

SEQ ID NO: 99706 - DNA, 80 bp, synthetic construct
  misc_feature 1..80: note = Artificially Synthesized Probe
  source 1..80: mol_type = other DNA
gtactggaacagtcatcaatatcaatctggcaaactggcccagtgaaacctcaaaaagggacagtggtaacatgagtcaa

SEQ ID NO: 99707 - DNA, 80 bp, synthetic construct; identical to SEQ ID NO: 35069
  misc_feature 1..80: note = Artificially Synthesized Probe
  source 1..80: mol_type = other DNA

SEQ ID NO: 99708 - DNA, 80 bp, synthetic construct
  misc_feature 1..80: note = Artificially Synthesized Probe
  source 1..80: mol_type = other DNA
ctgaactcatgggtgaaatgtctaaaaataacagtctcacagagggccttcaagaatatgacccatgggaaaaaaataaa

SEQ ID NO: 99709 - DNA, 80 bp, synthetic construct
  misc_feature 1..80: note = Artificially Synthesized Probe
  source 1..80: mol_type = other DNA
cacacactcctatcaccaagcacttactctaatgatttcctcatgcacagcccacacacattctctccctgctctcttcc

SEQ ID NO: 99710 - DNA, 80 bp, synthetic construct
  misc_feature 1..80: note = Artificially Synthesized Probe
  source 1..80: mol_type = other DNA
cacctttgaaacctaaacaaaacagaccacacaagtggcttaaagagagagaaaggtgtattccagacaaggaagcacaa

SEQ ID NO: 99711 - DNA, 80 bp, synthetic construct; identical to SEQ ID NO: 35070
  misc_feature 1..80: note = Artificially Synthesized Probe
  source 1..80: mol_type = other DNA

SEQ ID NO: 99712 - DNA, 80 bp, synthetic construct
  misc_feature 1..80: note = Artificially Synthesized Probe
  source 1..80: mol_type = other DNA
atttggctgtatcctctcaaaattaaagacatggtctatgcagaagagctccagaatacaactaaacatgtactgcactt

SEQ ID NO: 99713 - DNA, 80 bp, synthetic construct
  misc_feature 1..80: note = Artificially Synthesized Probe
  source 1..80: mol_type = other DNA
gaagagaaaaaactaaggcatgcacagaactgggaaaagtaagggaaacagtgaaagaagagacaaaacatgtgcaagaa

SEQ ID NO: 99714 - DNA, 80 bp, synthetic construct
  misc_feature 1..80: note = Artificially Synthesized Probe
  source 1..80: mol_type = other DNA
atataacaggcttgtttaatttggtctacatagcttgatgaattctagcactgccttactctttgagtaaggaaggtttg

SEQ ID NO: 99715 - DNA, 80 bp, synthetic construct
  misc_feature 1..80: note = Artificially Synthesized Probe
  source 1..80: mol_type = other DNA
atgcacagacatgtgaagcctccaatcttatccagacaggtagcatcattctggcaggggtctgaatggcactcattgat

SEQ ID NO: 99716 - DNA, 80 bp, synthetic construct; identical to SEQ ID NO: 35071
  misc_feature 1..80: note = Artificially Synthesized Probe
  source 1..80: mol_type = other DNA

SEQ ID NO: 99717 - DNA, 80 bp, synthetic construct
  misc_feature 1..80: note = Artificially Synthesized Probe
  source 1..80: mol_type = other DNA
tttcatacagttaatccccagaatggaatatatggttatggctatgctgaaaggtcacttgtaaacactggccatgtagc

SEQ ID NO: 99718 - DNA, 80 bp, synthetic construct
  misc_feature 1..80: note = Artificially Synthesized Probe
  source 1..80: mol_type = other DNA
catggcacattcatccacatcttctgtgcagtcagcccctttgtagccttgtgggcaggtgcaaatatattgcccattta

SEQ ID NO: 99719 - DNA, 80 bp, synthetic construct
  misc_feature 1..80: note = Artificially Synthesized Probe
  source 1..80: mol_type = other DNA
acttggggaagagctttctctttcacccaggagggaaaacctcatgatcagttcctcagaatccaacatggagatttata

SEQ ID NO: 99720 - DNA, 80 bp, synthetic construct
  misc_feature 1..80: note = Artificially Synthesized Probe
  source 1..80: mol_type = other DNA
acatctacaggccagaagataagaagacggagacaggaaagtggagctatcttccagatagtgtgccagatttagcaaat

SEQ ID NO: 99721 - DNA, 80 bp, synthetic construct; identical to SEQ ID NO: 35072
  misc_feature 1..80: note = Artificially Synthesized Probe
  source 1..80: mol_type = other DNA

SEQ ID NO: 99722 - DNA, 80 bp, synthetic construct
  misc_feature 1..80: note = Artificially Synthesized Probe
  source 1..80: mol_type = other DNA
gctagagcttttggaaaggcctccatgaaagaacatttcaaaactgctgggcagaaagttctcccagctaaattatcttc

SEQ ID NO: 99723 - DNA, 80 bp, synthetic construct
  misc_feature 1..80: note = Artificially Synthesized Probe
  source 1..80: mol_type = other DNA
catagacattgagggttagaaggcacttaaatgtttctctcctgccaacttcttctgagtaaatagatggtttcttctta

SEQ ID NO: 99724 - DNA, 80 bp, synthetic construct; identical to SEQ ID NO: 35073
  misc_feature 1..80: note = Artificially Synthesized Probe
  source 1..80: mol_type = other DNA

SEQ ID NO: 99725 - DNA, 80 bp, synthetic construct
  misc_feature 1..80: note = Artificially Synthesized Probe
  source 1..80: mol_type = other DNA
atgcaggtggagcctggagtacaggaggcgaaggcacaatcatcaatgttctcactgcagtcatctccactccagccgtt

SEQ ID NO: 99726 - DNA, 80 bp, synthetic construct
  misc_feature 1..80: note = Artificially Synthesized Probe
  source 1..80: mol_type = other DNA
aagaagtgattatgaacagaagagacaactggagaaaaggaaatgtcagggaagagaaagagttacaccaagctatctat

SEQ ID NO: 99727 - DNA, 80 bp, synthetic construct
  misc_feature 1..80: note = Artificially Synthesized Probe
  source 1..80: mol_type = other DNA
attacttttgattagggctcttgagtctcaaaggactagtaccataccagccccccacactcttcatcttcatgtgacct

SEQ ID NO: 99728 - DNA, 80 bp, synthetic construct
  misc_feature 1..80: note = Artificially Synthesized Probe
  source 1..80: mol_type = other DNA
accgttagaaactctaacaacattagggtttagccaacttatcaaagagaaggtaaaacctgtaggaccctcgagttaac

SEQ ID NO: 99729 - DNA, 80 bp, synthetic construct
  misc_feature 1..80: note = Artificially Synthesized Probe
  source 1..80: mol_type = other DNA
gcaacagttccataagatgatgttaccactgggagacccttgataaagggtacaggaaatctttctatattaattcttat

SEQ ID NO: 99730 - DNA, 80 bp, synthetic construct; identical to SEQ ID NO: 35074
  misc_feature 1..80: note = Artificially Synthesized Probe
  source 1..80: mol_type = other DNA

SEQ ID NO: 99731 - DNA, 80 bp, synthetic construct
  misc_feature 1..80: note = Artificially Synthesized Probe
  source 1..80: mol_type = other DNA
caacttacaaccaggaatctgtgattaacaaaaacagtatagggccagatcatatgagctataaaataaagtggtgattg

SEQ ID NO: 99732 - DNA, 80 bp, synthetic construct
  misc_feature 1..80: note = Artificially Synthesized Probe
  source 1..80: mol_type = other DNA
aaaggcactctgataaagaggcctcctaataaaaaaagaacacaatatttgtgcttggaaaatgccaaggctatctctag

SEQ ID NO: 99733 - DNA, 80 bp, synthetic construct
  misc_feature 1..80: note = Artificially Synthesized Probe
  source 1..80: mol_type = other DNA
atctaacatgtacctccattactatagaaccaatatcactctatcacacttatttggttgcacatctgtctcccactact

SEQ ID NO: 99734 - DNA, 80 bp, synthetic construct; identical to SEQ ID NO: 35075
  misc_feature 1..80: note = Artificially Synthesized Probe
  source 1..80: mol_type = other DNA

SEQ ID NO: 99735 - DNA, 80 bp, synthetic construct
  misc_feature 1..80: note = Artificially Synthesized Probe
  source 1..80: mol_type = other DNA
gtgaatcagaagtgcacagagagccaggcacagtggctcacacctgtaaacccaacattttgggaggccaaacaggaaga

SEQ ID NO: 99736 - DNA, 80 bp, synthetic construct; identical to SEQ ID NO: 35015
  misc_feature 1..80: note = Artificially Synthesized Probe
  source 1..80: mol_type = other DNA

SEQ ID NO: 99737 - DNA, 80 bp, synthetic construct
  misc_feature 1..80: note = Artificially Synthesized Probe
  source 1..80: mol_type = other DNA
gaaaaaaacatggtggcattcaagttgttggttccaattgctactgaagcccaactactagtaagcctactcagtggcat

SEQ ID NO: 99738 - DNA, 80 bp, synthetic construct
  misc_feature 1..80: note = Artificially Synthesized Probe
  source 1..80: mol_type = other DNA
aggtaatgagggtaatgagggaaatgagggaggaaggaagggagaagatgaataagaaagtgagaacactgaggtagtga

SEQ ID NO: 99739 - DNA, 80 bp, synthetic construct; identical to SEQ ID NO: 35076
  misc_feature 1..80: note = Artificially Synthesized Probe
  source 1..80: mol_type = other DNA

SEQ ID NO: 99740 - DNA, 80 bp, synthetic construct
  misc_feature 1..80: note = Artificially Synthesized Probe
  source 1..80: mol_type = other DNA
gtgaagagctactgcaacatgaaaattgctgagtctcatctattatacttatgctaactcaaatatccactgcccaccaa

SEQ ID NO: 99741 - DNA, 80 bp, synthetic construct
  misc_feature 1..80: note = Artificially Synthesized Probe
  source 1..80: mol_type = other DNA
gcaccataataaacagacactgaaataatgtagcaagacaaactaggtaaataaaggaaaggaaatgtggcactcttggg

SEQ ID NO: 99742 - DNA, 80 bp, synthetic construct
  misc_feature 1..80: note = Artificially Synthesized Probe
  source 1..80: mol_type = other DNA
tgtaagccagtgagtgaaggacagttgagatttgaactggagctgcctcactctaaaattcttaacaaagacctgaggtg

SEQ ID NO: 99743 - DNA, 80 bp, synthetic construct; identical to SEQ ID NO: 35077
  misc_feature 1..80: note = Artificially Synthesized Probe
  source 1..80: mol_type = other DNA

SEQ ID NO: 99744 - DNA, 80 bp, synthetic construct
  misc_feature 1..80: note = Artificially Synthesized Probe
  source 1..80: mol_type = other DNA
tctacaaattcacatttcctcctagtcctatttctgccagattattttctccctattaaaattctatcaactggttctaa

SEQ ID NO: 99745 - DNA, 80 bp, synthetic construct
  misc_feature 1..80: note = Artificially Synthesized Probe
  source 1..80: mol_type = other DNA
gttcaggaaggtaaaaaaaaggaaataaaatcttccaaagttcacacggttggtgagtgagagtgctgcattgaaacccg

SEQ ID NO: 99746 - DNA, 80 bp, synthetic construct; identical to SEQ ID NO: 35078
  misc_feature 1..80: note = Artificially Synthesized Probe
  source 1..80: mol_type = other DNA

SEQ ID NO: 99747 - DNA, 80 bp, synthetic construct
  misc_feature 1..80: note = Artificially Synthesized Probe
  source 1..80: mol_type = other DNA
gtattctttggctggggttttagaagaagaaaaagtgggaggtcattgaggctttgacttcgagtatgaattcggaactt

SEQ ID NO: 99748 - DNA, 80 bp, synthetic construct
  misc_feature 1..80: note = Artificially Synthesized Probe
  source 1..80: mol_type = other DNA
cctactcttagtataagacactatgacttgcacaatgaaatcttaaactccccagagatcagcaggaagcagttctctgt

SEQ ID NO: 99749 - DNA, 80 bp, synthetic construct
  misc_feature 1..80: note = Artificially Synthesized Probe
  source 1..80: mol_type = other DNA
ctttggtgaaacaggagagctgtattgtttccatgtcctaccaagctactaaatcttcaatacaaacaagtgtcagcatg

SEQ ID NO: 99750 - DNA, 80 bp, synthetic construct
  misc_feature 1..80: note = Artificially Synthesized Probe
  source 1..80: mol_type = other DNA
ggcagtggactagttaggctcttatttcctatgggcaaaagagaaagaagataacttgtttttaaaaactaccctctcta

SEQ ID NO: 99751 - DNA, 80 bp, synthetic construct
  misc_feature 1..80: note = Artificially Synthesized Probe
  source 1..80: mol_type = other DNA
tcttaaactccccagagatcagcaggaagcagttctctgtaggggtctataggaaaaaccaaagtaatctcttctttttc

SEQ ID NO: 99752 - DNA, 80 bp, synthetic construct; identical to SEQ ID NO: 35079
  misc_feature 1..80: note = Artificially Synthesized Probe
  source 1..80: mol_type = other DNA

SEQ ID NO: 99753 - DNA, 80 bp, synthetic construct
  misc_feature 1..80: note = Artificially Synthesized Probe
  source 1..80: mol_type = other DNA
caatccatcctggaatgtatcacgagctgtgatttcatatttatttactctttacagtctcttccccatttcgctataag

SEQ ID NO: 99754 - DNA, 80 bp, synthetic construct
  misc_feature 1..80: note = Artificially Synthesized Probe
  source 1..80: mol_type = other DNA
ttgcccaactttgcacagttagttggcaaaataattagaagtgaaaatagctcagtgctgataaagactttggggtgtga

SEQ ID NO: 99755 - DNA, 80 bp, synthetic construct
  misc_feature 1..80: note = Artificially Synthesized Probe
  source 1..80: mol_type = other DNA
gcaggagtagggtcacctccatgctgatcttttcttgttgctccatcctctggcttcaggctgaacaagtaagattatgg

SEQ ID NO: 99756 - DNA, 80 bp, synthetic construct
  misc_feature 1..80: note = Artificially Synthesized Probe
  source 1..80: mol_type = other DNA
tgcctgtagtcccagctacttgggaggctgaggcaggagaatcgcttgaatccaggaggcggaggtggcagtgatctgag

SEQ ID NO: 99757 - DNA, 80 bp, synthetic construct; identical to SEQ ID NO: 35080
  misc_feature 1..80: note = Artificially Synthesized Probe
  source 1..80: mol_type = other DNA

SEQ ID NO: 99758 - DNA, 80 bp, synthetic construct
  misc_feature 1..80: note = Artificially Synthesized Probe
  source 1..80: mol_type = other DNA
cagtcatctctcaactgtgaagtctgtgggaaaaagtctgatcacattactggtccagttaagggtcaactctcattgca

SEQ ID NO: 99759 - DNA, 80 bp, synthetic construct
  misc_feature 1..80: note = Artificially Synthesized Probe
  source 1..80: mol_type = other DNA
ctttctgtgtcagagcagatcattcctgggacttctatcctacaaaacctcagctccatacacaggagactttctatcac

SEQ ID NO: 99760 - DNA, 80 bp, synthetic construct; identical to SEQ ID NO: 35081
  misc_feature 1..80: note = Artificially Synthesized Probe
  source 1..80: mol_type = other DNA

SEQ ID NO: 99761 - DNA, 80 bp, synthetic construct
  misc_feature 1..80: note = Artificially Synthesized Probe
  source 1..80: mol_type = other DNA
gtagaatgcgccactcgcttgttcaaatcctttgatgaattattttgcatttaggataaaattctaacacctaccagtgt

SEQ ID NO: 99762 - DNA, 80 bp, synthetic construct
  misc_feature 1..80: note = Artificially Synthesized Probe
  source 1..80: mol_type = other DNA
gagaatattctacaactctcctagagaagtcagctctcataaatcctcaaatcaagtgttatgcctaggaaactacatgg

SEQ ID NO: 99763 - DNA, 80 bp, synthetic construct
  misc_feature 1..80: note = Artificially Synthesized Probe
  source 1..80: mol_type = other DNA
ccttgtgcctgggatagtcttatcctcactctccccaactcctactcattgtctatatggaaaatgttactttctcaaag

SEQ ID NO: 99764 - DNA, 80 bp, synthetic construct
  misc_feature 1..80: note = Artificially Synthesized Probe
  source 1..80: mol_type = other DNA
agaaatggggggtagctgtttacctcatcactgaatccccagcatgaaacacaatcccaagcttaaataaatattcgtta

SEQ ID NO: 99765 - DNA, 80 bp, synthetic construct
  misc_feature 1..80: note = Artificially Synthesized Probe
  source 1..80: mol_type = other DNA
ccctcatcccagtccccttcctgtgtcactgaactctatctcatttgtatcacacccagattcaccttgcctttgcccac

SEQ ID NO: 99766 - DNA, 80 bp, synthetic construct; identical to SEQ ID NO: 35082
  misc_feature 1..80: note = Artificially Synthesized Probe
  source 1..80: mol_type = other DNA

SEQ ID NO: 99767 - DNA, 80 bp, synthetic construct
  misc_feature 1..80: note = Artificially Synthesized Probe
  source 1..80: mol_type = other DNA
tatcttagaaaggtaagaagagctgtgaatttggagatgaggttgggctgggaacaactggaaaatttaatgctgtaatt

SEQ ID NO: 99768 - DNA, 80 bp, synthetic construct
  misc_feature 1..80: note = Artificially Synthesized Probe
  source 1..80: mol_type = other DNA
acaaacaatgatgacacagagtgacaggtgctttcatagatacctattgccttgggagtacagagtagggagaatagaga

SEQ ID NO: 99769 - DNA, 80 bp, synthetic construct; identical to SEQ ID NO: 35083
  misc_feature 1..80: note = Artificially Synthesized Probe
  source 1..80: mol_type = other DNA

SEQ ID NO: 99770 - DNA, 80 bp, synthetic construct
  misc_feature 1..80: note = Artificially Synthesized Probe
  source 1..80: mol_type = other DNA
aaacttcaagaactgcagagtccaggctcctgtggccactattggccactatagcaatgagaaatactgcagtgcatctg

SEQ ID NO: 99771 - DNA, 80 bp, synthetic construct
  misc_feature 1..80: note = Artificially Synthesized Probe
  source 1..80: mol_type = other DNA
tctggctctccccaccttaggctgctgggttgttgagccagtttacataaaagcccctcactgcaccaggaggaaaaact

SEQ ID NO: 99772 - DNA, 80 bp, synthetic construct
  misc_feature 1..80: note = Artificially Synthesized Probe
  source 1..80: mol_type = other DNA
gatattgatgaaaagcacactgggaaaattattcacttacaggagctaatacattttagaaagaactgctcctgtacact

SEQ ID NO: 99773 - DNA, 80 bp, synthetic construct; identical to SEQ ID NO: 35084
  misc_feature 1..80: note = Artificially Synthesized Probe
  source 1..80: mol_type = other DNA

SEQ ID NO: 99774 - DNA, 80 bp, synthetic construct
  misc_feature 1..80: note = Artificially Synthesized Probe
  source 1..80: mol_type = other DNA
cagttctctaagggtcacgtaactctattcccctcgtcagaggcatgctttgcaggtaagaatccaaatccctgcctttc

SEQ ID NO: 99775 - DNA, 80 bp, synthetic construct
  misc_feature 1..80: note = Artificially Synthesized Probe
  source 1..80: mol_type = other DNA
gaaaaagaagaaacactcaactggcattgcatttccctagaatagtaaccagaagacacaaaggaacaatgtctaagaat

SEQ ID NO: 99776 - DNA, 80 bp, synthetic construct
  misc_feature 1..80: note = Artificially Synthesized Probe
  source 1..80: mol_type = other DNA
tgttaatgaaaataaggaactcagaaatgaaaatgttgtgacataattgcactggtagttaacacaaaacaagtagcaca

SEQ ID NO: 99777 - DNA, 80 bp, synthetic construct
  misc_feature 1..80: note = Artificially Synthesized Probe
  source 1..80: mol_type = other DNA
cttttaagagaaatgtacacaaggaagtaaccatagtaccacttattagtgggggcctctgggtacataaatgtgtcctc

SEQ ID NO: 99778 - DNA, 80 bp, synthetic construct
  misc_feature 1..80: note = Artificially Synthesized Probe
  source 1..80: mol_type = other DNA
ttatttatacaaagtctagtgagtgagtgaaagctatgagaagtatgctaattcctcatcttcgagagaaagaaatcaat

SEQ ID NO: 99779 - DNA, 80 bp, synthetic construct; identical to SEQ ID NO: 35085
  misc_feature 1..80: note = Artificially Synthesized Probe
  source 1..80: mol_type = other DNA

SEQ ID NO: 99780 - DNA, 80 bp, synthetic construct
  misc_feature 1..80: note = Artificially Synthesized Probe
  source 1..80: mol_type = other DNA
ctctgactataactttcccatcttcttcctttcccattcccagcagacatcttacctaaagtattccccactaaaaactg

SEQ ID NO: 99781 - DNA, 80 bp, synthetic construct
  misc_feature 1..80: note = Artificially Synthesized Probe
  source 1..80: mol_type = other DNA
aaatcttacatagtgatctaaacccattttgccccttccttctccccaaagcctactttttcctttaacttcctcaatct

SEQ ID NO: 99782 - DNA, 80 bp, synthetic construct
  misc_feature 1..80: note = Artificially Synthesized Probe
  source 1..80: mol_type = other DNA
taaccatggtttgttaaaatcagttctgggaatgtcaaaataagtaagagcagtttcctgccttccagaggctgatagtc

SEQ ID NO: 99783 - DNA, 80 bp, synthetic construct
  misc_feature 1..80: note = Artificially Synthesized Probe
  source 1..80: mol_type = other DNA
cccttttctcactttccttctttggatccccttcctcgtcaattttctgaagtgtggatgtttctcatacttcgggtcca

SEQ ID NO: 99784 - DNA, 80 bp, synthetic construct; identical to SEQ ID NO: 35086
  misc_feature 1..80: note = Artificially Synthesized Probe
  source 1..80: mol_type = other DNA

SEQ ID NO: 99785 - DNA, 80 bp, synthetic construct
  misc_feature 1..80: note = Artificially Synthesized Probe
  source 1..80: mol_type = other DNA
attgtttctttcaaattcacattcacacacaccttctgcttcctagtgtggttatgtgtggactttcttatgtcttccta

SEQ ID NO: 99786 - DNA, 80 bp, synthetic construct
  misc_feature 1..80: note = Artificially Synthesized Probe
  source 1..80: mol_type = other DNA
tattgaacctactaacaaccgttccatgggggcttagagagccatgaagttaaactggatcgtgcctgtaacatagccaa

SEQ ID NO: 99787 - DNA, 80 bp, synthetic construct; identical to SEQ ID NO: 35016
  misc_feature 1..80: note = Artificially Synthesized Probe
  source 1..80: mol_type = other DNA

SEQ ID NO: 99788 - DNA, 80 bp, synthetic construct
  misc_feature 1..80: note = Artificially Synthesized Probe
  source 1..80: mol_type = other DNA
tggcagtctgcccaactgataggaaaccgaatttggggtgaggaggtagaattcagaaaacaggcttattatacttctca

SEQ ID NO: 99789 - DNA, 80 bp, synthetic construct; identical to SEQ ID NO: 35087
  misc_feature 1..80: note = Artificially Synthesized Probe
  source 1..80: mol_type = other DNA

SEQ ID NO: 99790 - DNA, 80 bp, synthetic construct
  misc_feature 1..80: note = Artificially Synthesized Probe
  source 1..80: mol_type = other DNA
atgctgtaaaggagagctgagagaaagtgtggtcagttttctttgactcatatccacctaacttccattgttcacttctg

SEQ ID NO: 99791 - DNA, 80 bp, synthetic construct
  misc_feature 1..80: note = Artificially Synthesized Probe
  source 1..80: mol_type = other DNA
tatatttctggattaataacaagcacaagaaaataaatcacatctgccccagaagtgagcccaaagtcaaaagcagccac

SEQ ID NO: 99792 - DNA, 80 bp, synthetic construct; identical to SEQ ID NO: 35088
  misc_feature 1..80: note = Artificially Synthesized Probe
  source 1..80: mol_type = other DNA

SEQ ID NO: 99793 - DNA, 80 bp, synthetic construct
  misc_feature 1..80: note = Artificially Synthesized Probe
  source 1..80: mol_type = other DNA
ttcttttttccatctgagcttaagctagtccacaagagtggtagtttttgaaggcacaaacaaacactaattagacagcc

SEQ ID NO: 99794 - DNA, 80 bp, synthetic construct
  misc_feature 1..80: note = Artificially Synthesized Probe
  source 1..80: mol_type = other DNA
ggtaatacctacagaccatctttgcatctgaagtaatgctgtccaactgaaatataatgagagtaacagatataatttca

SEQ ID NO: 99795 - DNA, 80 bp, synthetic construct
  misc_feature 1..80: note = Artificially Synthesized Probe
  source 1..80: mol_type = other DNA
ttctttttttttttttgagacaggttcttggtctcactctgtcccctagggtggaatgtgcagtggcgtgattagcctcc

SEQ ID NO: 99796 - DNA, 80 bp, synthetic construct
  misc_feature 1..80: note = Artificially Synthesized Probe
  source 1..80: mol_type = other DNA
ccactgtgcccggccatactaagtcttcaaaatcagttatttgacaattacaacacatctcaattcacattagccatatt

SEQ ID NO: 99797 - DNA, 80 bp, synthetic construct; identical to SEQ ID NO: 35089
  misc_feature 1..80: note = Artificially Synthesized Probe
  source 1..80: mol_type = other DNA

SEQ ID NO: 99798 - DNA, 80 bp, synthetic construct
  misc_feature 1..80: note = Artificially Synthesized Probe
  source 1..80: mol_type = other DNA
ttctttttcaaatagctggcaacttcatttccttcattttctcacctcactactccaacccctcctttttcattttgtca

SEQ ID NO: 99799 - DNA, 80 bp, synthetic construct
  misc_feature 1..80: note = Artificially Synthesized Probe
  source 1..80: mol_type = other DNA
aggaaagaagagggatgtggggaaatatcacaacttcagtcaggatacagcctaaggtgattcagaatgcttccaatttc

SEQ ID NO: 99800 - DNA, 80 bp, synthetic construct
  misc_feature 1..80: note = Artificially Synthesized Probe
  source 1..80: mol_type = other DNA
tacacataatgttaacttctaacctcaaaataaccagctaggttcttaaaaagggaaaacacatggagtaaatcaccaaa

SEQ ID NO: 99801 - DNA, 80 bp, synthetic construct; identical to SEQ ID NO: 35090
  misc_feature 1..80: note = Artificially Synthesized Probe
  source 1..80: mol_type = other DNA

SEQ ID NO: 99802 - DNA, 80 bp, synthetic construct
  misc_feature 1..80: note = Artificially Synthesized Probe
  source 1..80: mol_type = other DNA
agcacagtatttggatgctaataaacattagttaactcctactagattcctgctccattcacttctttaatttgtgtaac

SEQ ID NO: 99803 - DNA, 80 bp, synthetic construct
  misc_feature 1..80: note = Artificially Synthesized Probe
  source 1..80: mol_type = other DNA
ctagtaactgctgtcatcaatagtccaaccgcccccataactcggtacatccctcacatcaagcatataataatatcaat

SEQ ID NO: 99804 - DNA, 80 bp, synthetic construct
  misc_feature 1..80: note = Artificially Synthesized Probe
  source 1..80: mol_type = other DNA
atctgagtcaggcatgccaaaaatgatgagaaaaatgggggaggagtggagaaggaaaccctagagaaaaggaatggtgt

SEQ ID NO: 99805 - DNA, 80 bp, synthetic construct; identical to SEQ ID NO: 35091
  misc_feature 1..80: note = Artificially Synthesized Probe
  source 1..80: mol_type = other DNA

SEQ ID NO: 99806 - DNA, 80 bp, synthetic construct
  misc_feature 1..80: note = Artificially Synthesized Probe
  source 1..80: mol_type = other DNA
atttattaaatgtcctgggataagaaatttgaataaaaaaatcatttcactggggaagttttccccaagagcaggccttc

SEQ ID NO: 99807 - DNA, 80 bp, synthetic construct
  misc_feature 1..80: note = Artificially Synthesized Probe
  source 1..80: mol_type = other DNA
cagagcaagggagagatcagaatgtggtcaagttcttaacaagtatctcatcctgtccaatactgtaaggatcattaaaa

SEQ ID NO: 99808 - DNA, 80 bp, synthetic construct
  misc_feature 1..80: note = Artificially Synthesized Probe
  source 1..80: mol_type = other DNA
agttctaggatcaagacaccatgaagaaattctaggagaagtcccaattctaggaaaacctggtgggaaagtattaaaag

SEQ ID NO: 99809 - DNA, 80 bp, synthetic construct; identical to SEQ ID NO: 35092
  misc_feature 1..80: note = Artificially Synthesized Probe
  source 1..80: mol_type = other DNA

SEQ ID NO: 99810 - DNA, 80 bp, synthetic construct
  misc_feature 1..80: note = Artificially Synthesized Probe
  source 1..80: mol_type = other DNA
acataaagagaaattagaaccaaatgtctgcgtaaatcactcaacctgcctaagactacatgagaaacttccaagaggct

SEQ ID NO: 99811 - DNA, 80 bp, synthetic construct
  misc_feature 1..80: note = Artificially Synthesized Probe
  source 1..80: mol_type = other DNA
tttgggaggcatcttggcacaacaaattatcactaataatcagaaagactggtgttgtctgcagttggctctatcactat

SEQ ID NO: 99812 - DNA, 80 bp, synthetic construct
  misc_feature 1..80: note = Artificially Synthesized Probe
  source 1..80: mol_type = other DNA
tgacattaagatgggacagatctctgtccgtgaacaaataggctctgaactctggtagcctgtacaatttattttagcat

SEQ ID NO: 99813 - DNA, 80 bp, synthetic construct
  misc_feature 1..80: note = Artificially Synthesized Probe
  source 1..80: mol_type = other DNA
agcatggtgctgggttcagagttgctgcccaataatacctgtgaaaatatgtctttgagtgaacataggaaaatgtatga

SEQ ID NO: 99814 - DNA, 80 bp, synthetic construct
  misc_feature 1..80: note = Artificially Synthesized Probe
  source 1..80: mol_type = other DNA
gttactgatattttaaaaaaacagtctgcctctggttaccaatccatatcccattctggtggattctccacactgtacat

SEQ ID NO: 99815 - DNA, 80 bp, synthetic construct; identical to SEQ ID NO: 35093
  misc_feature 1..80: note = Artificially Synthesized Probe
  source 1..80: mol_type = other DNA

SEQ ID NO: 99816 - DNA, 80 bp, synthetic construct
  misc_feature 1..80: note = Artificially Synthesized Probe
  source 1..80: mol_type = other DNA
gatgataaatgtctacttgggacagagatattcaagggttctaaaaaaacagggtattggattttccccagctccatacc

SEQ ID NO: 99817 - DNA, 80 bp, synthetic construct
  misc_feature 1..80: note = Artificially Synthesized Probe
  source 1..80: mol_type = other DNA
aagtcccaatctcaccacctgcaagctattcgtacatggtaagctaaagttctgcatcaacttcctcacctgtaaaaaat

SEQ ID NO: 99818 - DNA, 80 bp, synthetic construct; identical to SEQ ID NO: 35094
  misc_feature 1..80: note = Artificially Synthesized Probe
  source 1..80: mol_type = other DNA

SEQ ID NO: 99819 - DNA, 80 bp, synthetic construct
  misc_feature 1..80: note = Artificially Synthesized Probe
  source 1..80: mol_type = other DNA
atagtatgattacatatttggcttcctcgaaatatcccttaaggttcctctctctcactcaaaatacttactgggactta

SEQ ID NO: 99820 - DNA, 80 bp, synthetic construct
  misc_feature 1..80: note = Artificially Synthesized Probe
  source 1..80: mol_type = other DNA
actttgctttattccttaccataagttactgtggcattctacatctgctctgctacactggaacatggctgatttctcta

SEQ ID NO: 99821 - DNA, 80 bp, synthetic construct
  misc_feature 1..80: note = Artificially Synthesized Probe
  source 1..80: mol_type = other DNA
gtatttggtactcagtccattcaagcagatgaatcactgaagaagcctgaaaaagactatgaaaatttactcaaatttca

SEQ ID NO: 99822 - DNA, 80 bp, synthetic construct; identical to SEQ ID NO: 35095
  misc_feature 1..80: note = Artificially Synthesized Probe
  source 1..80: mol_type = other DNA

SEQ ID NO: 99823 - DNA, 80 bp, synthetic construct; identical to SEQ ID NO: 35017
  misc_feature 1..80: note = Artificially Synthesized Probe
  source 1..80: mol_type = other DNA

SEQ ID NO: 99824 - DNA, 80 bp, synthetic construct
  misc_feature 1..80: note = Artificially Synthesized Probe
  source 1..80: mol_type = other DNA
tgactctaactttatattagccaatgttacaactaactgaattcaccaaccacagacaagaaagcagaagcatttcagca

SEQ ID NO: 99825 - DNA, 80 bp, synthetic construct
  misc_feature 1..80: note = Artificially Synthesized Probe
  source 1..80: mol_type = other DNA
taggctcaactctcagcattgccatgcaatagctgagtgaatatgggcaatatacttaaactttcttggggaattaacag

SEQ ID NO: 99826 - DNA, 80 bp, synthetic construct
  misc_feature 1..80: note = Artificially Synthesized Probe
  source 1..80: mol_type = other DNA
aaaggtaggtggtaaaattataaatcacttagaaatagtaaatctttgtaatgtgggataagcaaagttttcacaaatat

SEQ ID NO: 99827 - DNA, 80 bp, synthetic construct
  misc_feature 1..80: note = Artificially Synthesized Probe
  source 1..80: mol_type = other DNA
atatattttttaaaaactattacagttcaatattaaaaagataaaccaattataaagtaggtaaaggatctgaacagaca

SEQ ID NO: 99828 - DNA, 80 bp, synthetic construct; identical to SEQ ID NO: 35096
  misc_feature 1..80: note = Artificially Synthesized Probe
  source 1..80: mol_type = other DNA

SEQ ID NO: 99829 - DNA, 80 bp, synthetic construct
  misc_feature 1..80: note = Artificially Synthesized Probe
  source 1..80: mol_type = other DNA
actgatgatggataaataaaatgataaaatgtggtaaatccatatgataaaatattattcagccataaaaaggcacagag

SEQ ID NO: 99830 - DNA, 80 bp, synthetic construct
  misc_feature 1..80: note = Artificially Synthesized Probe
  source 1..80: mol_type = other DNA
ggagttaggaggaatggagagtaattgataatgggtaaagggtttcttctgatgtataaaaatattctagaattgactgt

SEQ ID NO: 99831 - DNA, 80 bp, synthetic construct
  misc_feature 1..80: note = Artificially Synthesized Probe
  source 1..80: mol_type = other DNA
gtattatagcacttgttagagattgtctactctaatccttttatgttacagatgaggaagttgagagccacatggctgac

SEQ ID NO: 99832 - DNA, 80 bp, synthetic construct
  misc_feature 1..80: note = Artificially Synthesized Probe
  source 1..80: mol_type = other DNA
atcagttctcctccaaagttgacaggatttatgctttaaaaatagagatacagaattctctttggaaagatctaccaaat

SEQ ID NO: 99833 - DNA, 80 bp, synthetic construct; identical to SEQ ID NO: 35097
  misc_feature 1..80: note = Artificially Synthesized Probe
  source 1..80: mol_type = other DNA

SEQ ID NO: 99834 - DNA, 80 bp, synthetic construct
  misc_feature 1..80: note = Artificially Synthesized Probe
  source 1..80: mol_type = other DNA
tgatgttagcagaagagtcctctgcatcttcatcttcatcactcaaatctgagctgcctcctcggagagaagccaacatc

SEQ ID NO: 99835 - DNA, 80 bp, synthetic construct
  misc_feature 1..80: note = Artificially Synthesized Probe
  source 1..80: mol_type = other DNA
ggaggtgtgagggtggaaagcctaggtagagaagagagcagaaaggagatgagatgacacaaccaggattctccgaagct

SEQ ID NO: 99836 - DNA, 80 bp, synthetic construct
  misc_feature 1..80: note = Artificially Synthesized Probe
  source 1..80: mol_type = other DNA
tataacacccaagaaaatgacacatgcggccaggcatggtggctcatgcctggaatcccagcactttgagaagccgaggc

SEQ ID NO: 99837 - DNA, 80 bp, synthetic construct
  misc_feature 1..80: note = Artificially Synthesized Probe
  source 1..80: mol_type = other DNA
tggaggttgcagtgagccgagatagcgccattgcactccagcctgggagaaagagcgatgctccgtctcaaaaaaaaaaa

SEQ ID NO: 99838 - DNA, 80 bp, synthetic construct; identical to SEQ ID NO: 35098
  misc_feature 1..80: note = Artificially Synthesized Probe
  source 1..80: mol_type = other DNA

SEQ ID NO: 99839 - DNA, 80 bp, synthetic construct
  misc_feature 1..80: note = Artificially Synthesized Probe
  source 1..80: mol_type = other DNA
ctatgctggggatgctggcgactagggtagggagttaaaatgagagtgtctacttggaaagatgaacagataaataatca

SEQ ID NO: 99840 - DNA, 80 bp, synthetic construct
  misc_feature 1..80: note = Artificially Synthesized Probe
  source 1..80: mol_type = other DNA
tgatagctgaggaggcagcataggcaagaacatccagcatgaaagaacagtgagggacatcaggaacatctttcaggaac

SEQ ID NO: 99841 - DNA, 80 bp, synthetic construct
  misc_feature 1..80: note = Artificially Synthesized Probe
  source 1..80: mol_type = other DNA
agggaattatttctaatagttcataagctcagcaacaacagagtagacacaaaagccacagaatgtgcttaggctttact

SEQ ID NO: 99842 - DNA, 80 bp, synthetic construct; identical to SEQ ID NO: 35099
  misc_feature 1..80: note = Artificially Synthesized Probe
  source 1..80: mol_type = other DNA

SEQ ID NO: 99843 - DNA, 80 bp, synthetic construct
  misc_feature 1..80: note = Artificially Synthesized Probe
  source 1..80: mol_type = other DNA
gtgcccctcctttagcttctgctaaagactttacataatgaaagctcatgaagtgtctggattactaacagttacttatc

SEQ ID NO: 99844 - DNA, 80 bp, synthetic construct
  misc_feature 1..80: note = Artificially Synthesized Probe
  source 1..80: mol_type = other DNA
ctcacagtgactacagtatcctttgcagggaaaaaattgtaaattaaccatttaaatatagtcactaagttatgtggcat

SEQ ID NO: 99845 - DNA, 80 bp, synthetic construct
  misc_feature 1..80: note = Artificially Synthesized Probe
  source 1..80: mol_type = other DNA
tttgccaccttttcctctgatagtatcatttctgtaaagaataatgggaaagtacaagtctttttaagctgggggctctt

SEQ ID NO: 99846 - DNA, 80 bp, synthetic construct
  misc_feature 1..80: note = Artificially Synthesized Probe
  source 1..80: mol_type = other DNA
tacagtcagtcagccaatatatatttgcgggcctagtatatactgggcactgtttgtaggtgtttgggttacatcagtaa

SEQ ID NO: 99847 - DNA, 80 bp, synthetic construct; identical to SEQ ID NO: 35100
  misc_feature 1..80: note = Artificially Synthesized Probe
  source 1..80: mol_type = other DNA

SEQ ID NO: 99848 - DNA, 80 bp, synthetic construct
  misc_feature 1..80: note = Artificially Synthesized Probe
  source 1..80: mol_type = other DNA
taacattttagtctcttgacaagcatgggaagcaatggaatgaagggcaatggaaggaagggcactgcattatgaaaagg

SEQ ID NO: 99849 - DNA, 80 bp, synthetic construct
  misc_feature 1..80: note = Artificially Synthesized Probe
  source 1..80: mol_type = other DNA
gaattctctttaaatttccttctatatatttatccaaagctgaagtcatctggtttagattatgggaccctgaaaagcaa

SEQ ID NO: 99850 - DNA, 80 bp, synthetic construct
  misc_feature 1..80: note = Artificially Synthesized Probe
  source 1..80: mol_type = other DNA
catatatttttaacccaaacagcttaaagcatttaacgaaaagttttacacacctacaaagtgctttcaggaagcagatg

SEQ ID NO: 99851 - DNA, 80 bp, synthetic construct; identical to SEQ ID NO: 35101
  misc_feature 1..80: note = Artificially Synthesized Probe
  source 1..80: mol_type = other DNA

SEQ ID NO: 99852 - DNA, 80 bp, synthetic construct
  misc_feature 1..80: note = Artificially Synthesized Probe
  source 1..80: mol_type = other DNA
gaataagagacagccaagatttccttactctatttcactagccctggcagcctctcagctgcggaatccttggttatttc

SEQ ID NO: 99853 - DNA, 80 bp, synthetic construct
  misc_feature 1..80: note = Artificially Synthesized Probe
  source 1..80: mol_type = other DNA
aatcactctctctcagctaaaaacttcctttattgacttctctaacttcccgtcaacatcttgctgccaaatcaacctct

SEQ ID NO: 99854 - DNA, 80 bp, synthetic construct; identical to SEQ ID NO: 35102
  misc_feature 1..80: note = Artificially Synthesized Probe
  source 1..80: mol_type = other DNA

SEQ ID NO: 99855 - DNA, 80 bp, synthetic construct
  misc_feature 1..80: note = Artificially Synthesized Probe
  source 1..80: mol_type = other DNA
gtgacaatgctttgtatagctgtattccaaatacatagcatggtgcctagaacatagcaggcagtcaatacatttttacc

SEQ ID NO: 99856 - DNA, 80 bp, synthetic construct
  misc_feature 1..80: note = Artificially Synthesized Probe
  source 1..80: mol_type = other DNA
tcagcctgtttagtctcaacacactgtacatgaagcaatgtgaaatccttccctttctgagctgataatttctttgtggc

SEQ ID NO: 99857 - DNA, 80 bp, synthetic construct
  misc_feature 1..80: note = Artificially Synthesized Probe
  source 1..80: mol_type = other DNA
tttgaggcaattctgcttacttagcacattactcccccctacagttttccttcttttgtttttgtactaaggatatttgt

SEQ ID NO: 99858 - DNA, 80 bp, synthetic construct
  misc_feature 1..80: note = Artificially Synthesized Probe
  source 1..80: mol_type = other DNA
ccccaagctccccgacactgctcctctttttgtttctatctttgggttgtgtgtgcactctagaacacttgtatcagtga

SEQ ID NO: 99859 - DNA, 80 bp, synthetic construct; identical to SEQ ID NO: 35103
  misc_feature 1..80: note = Artificially Synthesized Probe
  source 1..80: mol_type = other DNA

SEQ ID NO: 99860 - DNA, 80 bp, synthetic construct
  misc_feature 1..80: note = Artificially Synthesized Probe
  source 1..80: mol_type = other DNA
gtgttcttttccattccagacttgcctgtccctttcccagagctctgttcctcttatttctcactgtttctacaaaaggg

SEQ ID NO: 99861 - DNA, 80 bp, synthetic construct
  misc_feature 1..80: note = Artificially Synthesized Probe
  source 1..80: mol_type = other DNA
aacagcaattgagccacacccactacctcctgtgctaggggtttgtcccctaatcctgggacactagggagctccttacc

SEQ ID NO: 99862 - DNA, 80 bp, synthetic construct
  misc_feature 1..80: note = Artificially Synthesized Probe
  source 1..80: mol_type = other DNA
gtgccaccatgctggcagtgtcctggaatgtcacactcattgacatcagtctcacatttctgccctgtgaagcctgtgag

SEQ ID NO: 99863 - DNA, 80 bp, synthetic construct; identical to SEQ ID NO: 35104
  misc_feature 1..80: note = Artificially Synthesized Probe
  source 1..80: mol_type = other DNA

SEQ ID NO: 99864 - DNA, 80 bp, synthetic construct
  misc_feature 1..80: note = Artificially Synthesized Probe
  source 1..80: mol_type = other DNA
tctctcagagctcactgtctttgcatatgctgctcctgtttgaatatcaacttccgggccaggagcagtggctcacacct

SEQ ID NO: 99865 - DNA, 80 bp, synthetic construct
  misc_feature 1..80: note = Artificially Synthesized Probe
  source 1..80: mol_type = other DNA
gcagaagaatcacttgaacccaggaggcggaggttgcagtgagccgagattgtaccactgcactccagcctgggcgacac

SEQ ID NO: 99866 - DNA, 80 bp, synthetic construct
  misc_feature 1..80: note = Artificially Synthesized Probe
  source 1..80: mol_type = other DNA
ccaagtttgctattttcttctattataccacctgccacactggcagggttgggtctccatggtatgctctcaaatcatgt

SEQ ID NO: 99867 - DNA, 80 bp, synthetic construct; identical to SEQ ID NO: 35105
  misc_feature 1..80: note = Artificially Synthesized Probe
  source 1..80: mol_type = other DNA

SEQ ID NO: 99868 - DNA, 80 bp, synthetic construct
  misc_feature 1..80: note = Artificially Synthesized Probe
  source 1..80: mol_type = other DNA
ggacattcacatctaacacatccacctcctgctctgcctgaggaggggtgagagccagcgatggtgtcctacggatgtct

SEQ ID NO: 99869 - DNA, 80 bp, synthetic construct
  misc_feature 1..80: note = Artificially Synthesized Probe
  source 1..80: mol_type = other DNA
aatttggtattcacatggctggctttttgttgtcattagtctaagtcacttattatttaaactacagagatgagaactcc

SEQ ID NO: 99870 - DNA, 80 bp, synthetic construct
  misc_feature 1..80: note = Artificially Synthesized Probe
  source 1..80: mol_type = other DNA
cgtcccaccaccccacgacaggccccggtttgtgatgttccccttcctgtgtccaagtgttctcattgttcaattcccac

SEQ ID NO: 99871 - DNA, 80 bp, synthetic construct
  misc_feature 1..80: note = Artificially Synthesized Probe
  source 1..80: mol_type = other DNA
ccagtctatcattgatggacatttgggttggttccaagtctttgctattgtgaatagtgccgcaataaacatacgtgtgc

SEQ ID NO: 99872 - DNA, 80 bp, synthetic construct; identical to SEQ ID NO: 35106
  misc_feature 1..80: note = Artificially Synthesized Probe
  source 1..80: mol_type = other DNA

SEQ ID NO: 99873 - DNA, 80 bp, synthetic construct
  misc_feature 1..80: note = Artificially Synthesized Probe
  source 1..80: mol_type = other DNA
attttcagagtgatgcccacaactgaaacagaaagatccctgggccggaagtggtggctgatgcctgtaatcccagcact

SEQ ID NO: 99874 - DNA, 80 bp, synthetic construct
  misc_feature 1..80: note = Artificially Synthesized Probe
  source 1..80: mol_type = other DNA
ctcgaacccaagaggtggaggttgcagtgagccgagactgcgccactgtactaagcaacagagtgagaagaaagacagac

SEQ ID NO: 99875 - DNA, 80 bp, synthetic construct
  misc_feature 1..80: note = Artificially Synthesized Probe
  source 1..80: mol_type = other DNA
agaaagaaagaaagaatcaaccctgaatttggtttccatatatattatgtataggcactaacttgctgcctctgcttctt

SEQ ID NO: 99876 - DNA, 80 bp, synthetic construct
  misc_feature 1..80: note = Artificially Synthesized Probe
  source 1..80: mol_type = other DNA
gtaatcccagcactttgggaggccgaggcaggtggatcatgaggtcaggcgatccagaccattgtggctaacaaggtgaa

SEQ ID NO: 99877 - DNA, 80 bp, synthetic construct; identical to SEQ ID NO: 35018
  misc_feature 1..80: note = Artificially Synthesized Probe
  source 1..80: mol_type = other DNA

SEQ ID NO: 99878 - DNA, 80 bp, synthetic construct; identical to SEQ ID NO: 35107
  misc_feature 1..80: note = Artificially Synthesized Probe
  source 1..80: mol_type = other DNA

SEQ ID NO: 99879 - DNA, 80 bp, synthetic construct
  misc_feature 1..80: note = Artificially Synthesized Probe
  source 1..80: mol_type = other DNA
atcaggaagaaattattcttataacaccaaatattttcagtgacttacatcatcaataccatcatcgtcatgatggagat

SEQ ID NO: 99880 - DNA, 80 bp, synthetic construct
  misc_feature 1..80: note = Artificially Synthesized Probe
  source 1..80: mol_type = other DNA
tttcctgtgctattctcatgatagtgaataagtctcatgagatctgatgggtttctcagggtttctgcttttgcttcttc

SEQ ID NO: 99881 - DNA, 80 bp, synthetic construct; identical to SEQ ID NO: 35108
  misc_feature 1..80: note = Artificially Synthesized Probe
  source 1..80: mol_type = other DNA

SEQ ID NO: 99882 - DNA, 80 bp, synthetic construct
  misc_feature 1..80: note = Artificially Synthesized Probe
  source 1..80: mol_type = other DNA
tgcagaaaacaagatgggccggtggaaagctgacctggctactgccactacagagtgcccaatttgccagcagcagaaac

SEQ ID NO: 99883 - DNA, 80 bp, synthetic construct
  misc_feature 1..80: note = Artificially Synthesized Probe
  source 1..80: mol_type = other DNA
caatggttctgccaagactaccatccgcggactcatggaatgccttatccactgtcatggtattccacacagcattgcct

SEQ ID NO: 99884 - DNA, 80 bp, synthetic construct
  misc_feature 1..80: note = Artificially Synthesized Probe
  source 1..80: mol_type = other DNA
gggttggggcaaagttctcaagaaggctgtgtatgctctgaatcagcgtccaatatgtggtactgcttctcccatagcca

SEQ ID NO: 99885 - DNA, 80 bp, synthetic construct
  misc_feature 1..80: note = Artificially Synthesized Probe
  source 1..80: mol_type = other DNA
agacacaacaacaattccattaaactggtagttaagattgccaccaggacactttgggttcctacctttaagtaaacagg

SEQ ID NO: 99886 - DNA, 80 bp, synthetic construct
  misc_feature 1..80: note = Artificially Synthesized Probe
  source 1..80: mol_type = other DNA
ttaaggtcaatgggcaactacaacagcccaatccaggcggaactacaaatggtcccacctggatgaatgaaggtttgggc

SEQ ID NO: 99887 - DNA, 80 bp, synthetic construct
  misc_feature 1..80: note = Artificially Synthesized Probe
  source 1..80: mol_type = other DNA
tttattaaaaacatgtctgtgcttgcacacacttgtactaagaaaatatcttcattttatttcctttctcctttatcatg

SEQ ID NO: 99888 - DNA, 80 bp, synthetic construct
  misc_feature 1..80: note = Artificially Synthesized Probe
  source 1..80: mol_type = other DNA
accctccactagaaagtaaactttaattcttcttgttggccctaaaaagcatactctgcttacctctgcttaactgatca

SEQ ID NO: 99889 - DNA, 80 bp, synthetic construct
  misc_feature 1..80: note = Artificially Synthesized Probe
  source 1..80: mol_type = other DNA
tgtgatctcaggagatgtgtatgggttcaagttgacaaggggtagatttgtggtggttaaaactgagtgtgtcaacttga

SEQ ID NO: 99890 - DNA, 80 bp, synthetic construct
  misc_feature 1..80: note = Artificially Synthesized Probe
  source 1..80: mol_type = other DNA
acatgaaaaagcgagactggcctagcctcccagcctacatctttttcccgtgctggatgtttcctgccctcaaatatcga

SEQ ID NO: 99891 - DNA, 80 bp, synthetic construct; identical to SEQ ID NO: 35110
  misc_feature 1..80: note = Artificially Synthesized Probe
  source 1..80: mol_type = other DNA

SEQ ID NO: 99892 - DNA, 80 bp, synthetic construct
  misc_feature 1..80: note = Artificially Synthesized Probe
  source 1..80: mol_type = other DNA
acacttttgaataaagctcagacccacctagaaaaacccacaatctattcaggtgagatatgtgtaaaaaaaaattacaa

SEQ ID NO: 99893 - DNA, 80 bp, synthetic construct
  misc_feature 1..80: note = Artificially Synthesized Probe
  source 1..80: mol_type = other DNA
atactaaaatattttaattctcagactctctttccctcatacctttcccttccccacctcacataagaaaatgatgctta

SEQ ID NO: 99894 - DNA, 80 bp, synthetic construct
  misc_feature 1..80: note = Artificially Synthesized Probe
  source 1..80: mol_type = other DNA
aagtacaacattttcaggaaataaggagaatttggtgtgactaggcctagatgcttgtggggaggccaggctacaaaaag

SEQ ID NO: 99895 - DNA, 80 bp, synthetic construct; identical to SEQ ID NO: 35111
  misc_feature 1..80: note = Artificially Synthesized Probe
  source 1..80: mol_type = other DNA

SEQ ID NO: 99896 - DNA, 80 bp, synthetic construct
  misc_feature 1..80: note = Artificially Synthesized Probe
  source 1..80: mol_type = other DNA
gatgtacatggttgctacgtatttctgtcaacaaggtgagctgaaagtacctgtagaatatctccaaggagaacatacaa

SEQ ID NO: 99897 - DNA, 80 bp, synthetic construct
  misc_feature 1..80: note = Artificially Synthesized Probe
  source 1..80: mol_type = other DNA
tccctagggagagctgtgatgtggctcaaaagagggcgaaaaacagtgctccagggagcacaaacatttaatggataaga

SEQ ID NO: 99898 - DNA, 80 bp, synthetic construct
  misc_feature 1..80: note = Artificially Synthesized Probe
  source 1..80: mol_type = other DNA
tggtgacagtgtacttatttcttttagtgaagtaaactctgattccccatcctggtgtacatattttttttttgagacag

SEQ ID NO: 99899 - DNA, 80 bp, synthetic construct
  misc_feature 1..80: note = Artificially Synthesized Probe
  source 1..80: mol_type = other DNA
cttgtttttttgtagagatggggtcttgctgtgtttcccaggctggtctcaaacctctagcctcaagtgatcctcctgcc

SEQ ID NO: 99900 - DNA, 80 bp, synthetic construct
  misc_feature 1..80: note = Artificially Synthesized Probe
  source 1..80: mol_type = other DNA
catgataatttaaaagcagctaccctttactgaatacctagtacatgacaggaaagtagataaggcacatatgccaacac

SEQ ID NO: 99901 - DNA, 80 bp, synthetic construct; identical to SEQ ID NO: 35112
  misc_feature 1..80: note = Artificially Synthesized Probe
  source 1..80: mol_type = other DNA

SEQ ID NO: 99902 - DNA, 80 bp, synthetic construct
  misc_feature 1..80: note = Artificially Synthesized Probe
  source 1..80: mol_type = other DNA
ggcagggtcgagacacaaagcatggatgagatgttgagtactggcagtcctctcctgtaaaccctgaggcacatcggcac

SEQ ID NO: 99903 - DNA, 80 bp, synthetic construct
  misc_feature 1..80: note = Artificially Synthesized Probe
  source 1..80: mol_type = other DNA
ccaaaaaattacagtaaaacaatacagtccaatcaagaaagcacgagattgtgaatcaacagacctacaaggaccaccta

SEQ ID NO: 99904 - DNA, 80 bp, synthetic construct; identical to SEQ ID NO: 35113
  misc_feature 1..80: note = Artificially Synthesized Probe
  source 1..80: mol_type = other DNA

SEQ ID NO: 99905 - DNA, 80 bp, synthetic construct
  misc_feature 1..80: note = Artificially Synthesized Probe
  source 1..80: mol_type = other DNA
tcttatttccactgaaacatcaattggctgatacctagttttctgggttatgttcaggtggctgacattacaacggaaaa

SEQ ID NO: 99906 - DNA, 80 bp, synthetic construct
  misc_feature 1..80: note = Artificially Synthesized Probe
  source 1..80: mol_type = other DNA
gaatcaattgaagaataacattctatgatattttccacattgaggcactgaggaacctttttacatgccaccccttgatt

SEQ ID NO: 99907 - DNA, 80 bp, synthetic construct
  misc_feature 1..80: note = Artificially Synthesized Probe
  source 1..80: mol_type = other DNA
actataaatgctgctatatatttggctggtgccccaaatatgtgattcaacttattcctcgttttagttttcagggacta

SEQ ID NO: 99908 - DNA, 80 bp, synthetic construct; identical to SEQ ID NO: 35114
  misc_feature 1..80: note = Artificially Synthesized Probe
  source 1..80: mol_type = other DNA

SEQ ID NO: 99909 - DNA, 80 bp, synthetic construct
  misc_feature 1..80: note = Artificially Synthesized Probe
  source 1..80: mol_type = other DNA
aactggccacagcctcttcacccctcccagagctgcataagataagcatggcggagcaaggagcggctaaggctctgggc

SEQ ID NO: 99910 - DNA, 80 bp, synthetic construct
  misc_feature 1..80: note = Artificially Synthesized Probe
  source 1..80: mol_type = other DNA
atattaactaaagcaatcttcttaaccatcatgctccaccagctcccagccatgcacagctgtggatggatggtctgctt

SEQ ID NO: 99911 - DNA, 80 bp, synthetic construct
  misc_feature 1..80: note = Artificially Synthesized Probe
  source 1..80: mol_type = other DNA
tcttcactgactatccattttctcacattgtaaatagttaataaggtcacctacatcatgagattattctaagaactgaa

SEQ ID NO: 99912 - DNA, 80 bp, synthetic construct
  misc_feature 1..80: note = Artificially Synthesized Probe
  source 1..80: mol_type = other DNA
ctggctctactaaaaatacaaaaattagccagggtggtggtgcacgcttgtaatcccagctactcgggaggctgaggcat

SEQ ID NO: 99913 - DNA, 80 bp, synthetic construct
  misc_feature 1..80: note = Artificially Synthesized Probe
  source 1..80: mol_type = other DNA
caatgccccatccaaatcacagcttgatttgagaatagtttcttgtgttggttttttgaagtggaggagcaaaaagtgcc

SEQ ID NO: 99914 - DNA, 80 bp, synthetic construct; identical to SEQ ID NO: 35115
  misc_feature 1..80: note = Artificially Synthesized Probe
  source 1..80: mol_type = other DNA

SEQ ID NO: 99915 - DNA, 80 bp, synthetic construct
  misc_feature 1..80: note = Artificially Synthesized Probe
  source 1..80: mol_type = other DNA
cagtttaattcacattgttgctccctatcaagtatggaaaaataagttttaacctaagatatatttaagaaatcagtaaa

SEQ ID NO: 99916 - DNA, 80 bp, synthetic construct
  misc_feature 1..80: note = Artificially Synthesized Probe
  source 1..80: mol_type = other DNA
tgtccataaatagtcttactggaacacagccatgctcattcatttatagattgtctatggctgattttccactacaacaa

SEQ ID NO: 99917 - DNA, 80 bp, synthetic construct; identical to SEQ ID NO: 35116
  misc_feature 1..80: note = Artificially Synthesized Probe
  source 1..80: mol_type = other DNA

SEQ ID NO: 99918 - DNA, 80 bp, synthetic construct
  misc_feature 1..80: note = Artificially Synthesized Probe
  source 1..80: mol_type = other DNA
gagggtgtggggtgagcaaagagaagtatctcagtttagaataggaaaatcagagaagaccttcactgacaatacttgag

SEQ ID NO: 99919 - DNA, 80 bp, synthetic construct
  misc_feature 1..80: note = Artificially Synthesized Probe
  source 1..80: mol_type = other DNA
gtaactgggatgtggatcaattggggcctttaagccactgtaaagaaagacttagggttttcctctaaatgggataatac

SEQ ID NO: 99920 - DNA, 80 bp, synthetic construct
  misc_feature 1..80: note = Artificially Synthesized Probe
  source 1..80: mol_type = other DNA
aagatatacaagtctcttttaacccacactttcatgaggtcccatttccctttccaaattattgtttcacagctaacctt

SEQ ID NO: 99921 - DNA, 80 bp, synthetic construct; identical to SEQ ID NO: 35019
  misc_feature 1..80: note = Artificially Synthesized Probe
  source 1..80: mol_type = other DNA

SEQ ID NO: 99922 - DNA, 80 bp, synthetic construct
  misc_feature 1..80: note = Artificially Synthesized Probe
  source 1..80: mol_type = other DNA
ataaggaaattctctctcctatagggagaattgctaaccactccacgcaccgttttaatcattttaccttggcttctatg

SEQ ID NO: 99923 - DNA, 80 bp, synthetic construct; identical to SEQ ID NO: 35117
  misc_feature 1..80: note = Artificially Synthesized Probe
  source 1..80: mol_type = other DNA

SEQ ID NO: 99924 - DNA, 80 bp, synthetic construct
  misc_feature 1..80: note = Artificially Synthesized Probe
  source 1..80: mol_type = other DNA
tgttaactgaattcctataatacttatcattcgtgttcacagtttcctttttgatacaaattctgatcatcttaaaagcc

SEQ ID NO: 99925 - DNA, 80 bp, synthetic construct
  misc_feature 1..80: note = Artificially Synthesized Probe
  source 1..80: mol_type = other DNA
atgtagcatggtgccggataaatcttaagaatttaataaatgcttggagttattattgttctgctcttaagagtacagac

SEQ ID NO: 99926 - DNA, 80 bp, synthetic construct; identical to SEQ ID NO: 35118
  misc_feature 1..80: note = Artificially Synthesized Probe
  source 1..80: mol_type = other DNA

SEQ ID NO: 99927 - DNA, 80 bp, synthetic construct
  misc_feature 1..80: note = Artificially Synthesized Probe
  source 1..80: mol_type = other DNA
tataagctgatgaacagataaataaaatgtggtatatccataaatgaaatatgtggccatgaaaaggaatgacattctga

SEQ ID NO: 99928 - DNA, 80 bp, synthetic construct
  misc_feature 1..80: note = Artificially Synthesized Probe
  source 1..80: mol_type = other DNA
atagaaagtagattagtgttgccaggagctgtaaagaaagggaaatagacagtgactactaagcagtagagaatttcttt

SEQ ID NO: 99929 - DNA, 80 bp, synthetic construct
  misc_feature 1..80: note = Artificially Synthesized Probe
  source 1..80: mol_type = other DNA
ttaactttgaaaagaacaaactttgtctctctacaatttccaggttatctctaccctctagaacaaaaaagaacaagcct

SEQ ID NO: 99930 - DNA, 80 bp, synthetic construct; identical to SEQ ID NO: 35119
  misc_feature 1..80: note = Artificially Synthesized Probe
  source 1..80: mol_type = other DNA

SEQ ID NO: 99931 - DNA, 80 bp, synthetic construct; identical to SEQ ID NO: 35213
  misc_feature 1..80: note = Artificially Synthesized Probe
  source 1..80: mol_type = other DNA

SEQ ID NO: 99932 - DNA, 80 bp, synthetic construct
  misc_feature 1..80: note = Artificially Synthesized Probe
  source 1..80: mol_type = other DNA
atcagttggtgagcatttgagttgcttctacttgttgactgctatgaacgcttgtagacatgtcattttacttggatgta

SEQ ID NO: 99933 - DNA, 80 bp, synthetic construct; identical to SEQ ID NO: 35224
  misc_feature 1..80: note = Artificially Synthesized Probe
  source 1..80: mol_type = other DNA

SEQ ID NO: 99934 - DNA, 80 bp, synthetic construct; identical to SEQ ID NO: 35214
  misc_feature 1..80: note = Artificially Synthesized Probe
  source 1..80: mol_type = other DNA

SEQ ID NO: 99935 - DNA, 80 bp, synthetic construct
  misc_feature 1..80: note = Artificially Synthesized Probe
  source 1..80: mol_type = other DNA
tttcttttttctttttgatatgatttttgtatttttagtagagaaggggttttgccatgttggccaggctgttcttaaac

SEQ ID NO: 99936 - DNA, 80 bp, synthetic construct
  misc_feature 1..80: note = Artificially Synthesized Probe
  source 1..80: mol_type = other DNA
cctcccttgttcaagcaattcttctgcctctcccaagtagttgggattacaggcaccccccccaccacgcccggctaatt

SEQ ID NO: 99937 - DNA, 80 bp, synthetic construct
  misc_feature 1..80: note = Artificially Synthesized Probe
  source 1..80: mol_type = other DNA
ttatcagacacaagatttacagattatcttccaccattccgtgaattgttacttaactttcatgatggtggcctttgaac

SEQ ID NO: 99938 - DNA, 80 bp, synthetic construct; identical to SEQ ID NO: 35225
  misc_feature 1..80: note = Artificially Synthesized Probe
  source 1..80: mol_type = other DNA

SEQ ID NO: 99939 - DNA, 80 bp, synthetic construct
  misc_feature 1..80: note = Artificially Synthesized Probe
  source 1..80: mol_type = other DNA
tctctactaaaaatacaaattttagctgggcatggtagcgtgtgcctgtagtcccagctactcaggaggctgaggctgga

SEQ ID NO: 99940 - DNA, 80 bp, synthetic construct
  misc_feature 1..80: note = Artificially Synthesized Probe
  source 1..80: mol_type = other DNA
caacactgttcctctgtggtttttatttatttatttttttgaaatgagtctcactgtcacccaggctgtagcacagtggc

SEQ ID NO: 99941 - DNA, 80 bp, synthetic construct
  misc_feature 1..80: note = Artificially Synthesized Probe
  source 1..80: mol_type = other DNA
tcaggtgatctggccgtctcggcctcctaaaaagtgccgggattacaagcgtgagccacggtgccttggcccctttgtag

SEQ ID NO: 99942 - DNA, 80 bp, synthetic construct
  misc_feature 1..80: note = Artificially Synthesized Probe
  source 1..80: mol_type = other DNA
acacagttacagttcactgtctcaagcagatcctcctgccttagcttttcaaatagctaggactacaggcgcacaccacc

SEQ ID NO: 99943 - DNA, 80 bp, synthetic construct; identical to SEQ ID NO: 35226
  misc_feature 1..80: note = Artificially Synthesized Probe
  source 1..80: mol_type = other DNA

SEQ ID NO: 99944 - DNA, 80 bp, synthetic construct
  misc_feature 1..80: note = Artificially Synthesized Probe
  source 1..80: mol_type = other DNA
gcaacttcatttcccagcccctagcgatcacaattataccttctatttctttgagtttgactacttttagatacttaatg

SEQ ID NO: 99945 - DNA, 80 bp, synthetic construct
  misc_feature 1..80: note = Artificially Synthesized Probe
  source 1..80: mol_type = other DNA
tgggttcaccgggaagcatgggcctgcttgttggagcgggtagatgcacagcctggcgttattctggcctcagagcctgg

SEQ ID NO: 99946 - DNA, 80 bp, synthetic construct
  misc_feature 1..80: note = Artificially Synthesized Probe
  source 1..80: mol_type = other DNA
aatgcttcgataaacatgggtgcacaaataatcacttcaaggtcctgctttcaattcttgtgtctactcccaaattttga

SEQ ID NO: 99947 - DNA, 80 bp, synthetic construct; identical to SEQ ID NO: 35227
  misc_feature 1..80: note = Artificially Synthesized Probe
  source 1..80: mol_type = other DNA

SEQ ID NO: 99948 - DNA, 80 bp, synthetic construct
  misc_feature 1..80: note = Artificially Synthesized Probe
  source 1..80: mol_type = other DNA
atctcagctcactgcaacttctgcctcccgggttgaagcgattctcctgcctcagcctcctgagtagctggaattacaga

SEQ ID NO: 99949 - DNA, 80 bp, synthetic construct
  misc_feature 1..80: note = Artificially Synthesized Probe
  source 1..80: mol_type = other DNA
tcttacatggcttggacagctttgtttgcactgttgttggggtcagggacagtgattaagataaatttctaattgcagtc

SEQ ID NO: 99950 - DNA, 80 bp, synthetic construct
  misc_feature 1..80: note = Artificially Synthesized Probe
  source 1..80: mol_type = other DNA
tgtctgaaatttgataggcctttatagaacccctgtaattgctgtttaaaagttaaaatcagcttgctgcagccaggctc

SEQ ID NO: 99951 - DNA, 80 bp, synthetic construct; identical to SEQ ID NO: 35228
  misc_feature 1..80: note = Artificially Synthesized Probe
  source 1..80: mol_type = other DNA

SEQ ID NO: 99952 - DNA, 80 bp, synthetic construct
  misc_feature 1..80: note = Artificially Synthesized Probe
  source 1..80: mol_type = other DNA
gtctgggttagagttgcgtgatctcggcttactgcaaccttcacttcccgggttcaagcgattctcctgcctcagcttcc

SEQ ID NO: 99953 - DNA, 80 bp, synthetic construct
  misc_feature 1..80: note = Artificially Synthesized Probe
  source 1..80: mol_type = other DNA
gcctggcctgaattttttgtgattgtgaagtcaatagttgtttcctgtaaggaatctttgttgaaaggtatgtctgcata

SEQ ID NO: 99954 - DNA, 80 bp, synthetic construct
  misc_feature 1..80: note = Artificially Synthesized Probe
  source 1..80: mol_type = other DNA
tatggagattgtcataaaaatggtctggggtgggcgccaggcatcagactacagtgactttcttgctttattcttaggga

SEQ ID NO: 99955 - DNA, 80 bp, synthetic construct; identical to SEQ ID NO: 35229
  misc_feature 1..80: note = Artificially Synthesized Probe
  source 1..80: mol_type = other DNA

SEQ ID NO: 99956 - DNA, 80 bp, synthetic construct
  misc_feature 1..80: note = Artificially Synthesized Probe
  source 1..80: mol_type = other DNA
gttgccactcgtgagccagggatgctgtggctctgttgaagtgggaaatgttaagaggctggtagcactagggttctgga

SEQ ID NO: 99957 - DNA, 80 bp, synthetic construct
  misc_feature 1..80: note = Artificially Synthesized Probe
  source 1..80: mol_type = other DNA
agtggcgattcctcaaagagctaaaaacagaactaccatttgacccagcaatcccattacattcccaaaggaatataaat

SEQ ID NO: 99958 - DNA, 80 bp, synthetic construct
  misc_feature 1..80: note = Artificially Synthesized Probe
  source 1..80: mol_type = other DNA
tgggaggtaattggatcatggggtagatttccctcttgctgttctgttgatagtgaattctcatgagatctggttgtttg

SEQ ID NO: 99959 - DNA, 80 bp, synthetic construct
  misc_feature 1..80: note = Artificially Synthesized Probe
  source 1..80: mol_type = other DNA
ttcttcataaattacccaatctcaggtagttcttttttttttttttcattttatttatttatttatttattttttatttt

SEQ ID NO: 99960 - DNA, 80 bp, synthetic construct
  misc_feature 1..80: note = Artificially Synthesized Probe
  source 1..80: mol_type = other DNA
cagtgtttgtgtacctgattacttgagattagggattggtgatgactcttaacgagcatgctgccttcaagcatctgttt

SEQ ID NO: 99961 - DNA, 80 bp, synthetic construct; identical to SEQ ID NO: 35230
  misc_feature 1..80: note = Artificially Synthesized Probe
  source 1..80: mol_type = other DNA

SEQ ID NO: 99962 - DNA, 80 bp, synthetic construct
  misc_feature 1..80: note = Artificially Synthesized Probe
  source 1..80: mol_type = other DNA
ccccccccacctccctcccggacggggcggctggccaggcggggggctgacccccccacctccctcccggacagggcggc

SEQ ID NO: 99963 - DNA, 80 bp, synthetic construct
  misc_feature 1..80: note = Artificially Synthesized Probe
  source 1..80: mol_type = other DNA
tcccggacggggcggccggccaggcggggggcttacccccccacctccctcccggacggggcggctggccgggtgggggg

SEQ ID NO: 99964 - DNA, 80 bp, synthetic construct
  misc_feature 1..80: note = Artificially Synthesized Probe
  source 1..80: mol_type = other DNA
gccaggtggggggctgacccccccacctccctcccggatggcacggctggccggtcgggggggctgaccccccacctccc

SEQ ID NO: 99965 - DNA, 80 bp, synthetic construct; identical to SEQ ID NO: 35231
  misc_feature 1..80: note = Artificially Synthesized Probe
  source 1..80: mol_type = other DNA

SEQ ID NO: 99966 - DNA, 80 bp, synthetic construct
  misc_feature 1..80: note = Artificially Synthesized Probe
  source 1..80: mol_type = other DNA
cactttccagactgggcagccaggcagaggggctcctcacattccagacgatgggcggccaggcagagacactcctcact

SEQ ID NO: 99967 - DNA, 80 bp, synthetic construct
  misc_feature 1..80: note = Artificially Synthesized Probe
  source 1..80: mol_type = other DNA
ggcaataagagactaaatctaaaccaagacgcttgactccgtagctgctgcttcgtgaatattaatgaggcttcgtttta

SEQ ID NO: 99968 - DNA, 80 bp, synthetic construct
  misc_feature 1..80: note = Artificially Synthesized Probe
  source 1..80: mol_type = other DNA
gatttccttttttgaactgacttagtactgtgcataaaagcaaactcccaagttactctttttttttttatttaaagaga

SEQ ID NO: 99969 - DNA, 80 bp, synthetic construct
  misc_feature 1..80: note = Artificially Synthesized Probe
  source 1..80: mol_type = other DNA
ttaaaggaaagattttaagaacaaaattatatggcgtgaatttattgatgataattccagttgtataattagctttataa

SEQ ID NO: 99970 - DNA, 80 bp, synthetic construct; identical to SEQ ID NO: 35232
  misc_feature 1..80: note = Artificially Synthesized Probe
  source 1..80: mol_type = other DNA

SEQ ID NO: 99971 - DNA, 80 bp, synthetic construct
  misc_feature 1..80: note = Artificially Synthesized Probe
  source 1..80: mol_type = other DNA
taaatatgccttattttccattatgcaaggaacgtagtgcactggttgcaagataacattctgaccttccatgttaaaat

SEQ ID NO: 99972 - DNA, 80 bp, synthetic construct
  misc_feature 1..80: note = Artificially Synthesized Probe
  source 1..80: mol_type = other DNA
gattttcagcagattgagacatttctctttgccctttacaccaagttgtcaccagttaatacatgtagtaatagctagat

SEQ ID NO: 99973 - DNA, 80 bp, synthetic construct
  misc_feature 1..80: note = Artificially Synthesized Probe
  source 1..80: mol_type = other DNA
attctatgaataatacttttagactccaactattgagagcaaatgtggggtggtgaaaaattgccaactcatttccccat

SEQ ID NO: 99974 - DNA, 80 bp, synthetic construct; identical to SEQ ID NO: 35233
  misc_feature 1..80: note = Artificially Synthesized Probe
  source 1..80: mol_type = other DNA

SEQ ID NO: 99975 - DNA, 80 bp, synthetic construct
  misc_feature 1..80: note = Artificially Synthesized Probe
  source 1..80: mol_type = other DNA
caggctggaaacaatctcttggttccctaaagcactttcttctgactgctgtgattcagtgaaccttgccctttgctttc

SEQ ID NO: 99976 - DNA, 80 bp, synthetic construct
  misc_feature 1..80: note = Artificially Synthesized Probe
  source 1..80: mol_type = other DNA
aaattgtgaggtttattttactaggttattggaggcagttaagtttcttaatgctatacctgattctgccaaagtccctt

SEQ ID NO: 99977 - DNA, 80 bp, synthetic construct
  misc_feature 1..80: note = Artificially Synthesized Probe
  source 1..80: mol_type = other DNA
aaattttggttacaaagtcacaggtcttgccaatactgttgtagtttcttgcctatatccgtaatttgaaggaaatggtg

SEQ ID NO: 99978 - DNA, 80 bp, synthetic construct; identical to SEQ ID NO: 35215
  misc_feature 1..80: note = Artificially Synthesized Probe
  source 1..80: mol_type = other DNA

SEQ ID NO: 99979 - DNA, 80 bp, synthetic construct
  misc_feature 1..80: note = Artificially Synthesized Probe
  source 1..80: mol_type = other DNA
ccccattcaactttatatatctttaactgatgaccagatcattgttgttctgaaccagtttgtggtcagcaagtgttttg

SEQ ID NO: 99980 - DNA, 80 bp, synthetic construct; identical to SEQ ID NO: 35234
  misc_feature 1..80: note = Artificially Synthesized Probe
  source 1..80: mol_type = other DNA

SEQ ID NO: 99981 - DNA, 80 bp, synthetic construct
  misc_feature 1..80: note = Artificially Synthesized Probe
  source 1..80: mol_type = other DNA
aaggtatctctctcggtgtatttctctacttacctgtaataatgcttttgtcttaatagggtggttctcttcccaaagtg

SEQ ID NO: 99982 - DNA, 80 bp, synthetic construct
  misc_feature 1..80: note = Artificially Synthesized Probe
  source 1..80: mol_type = other DNA
ccacagataatatttcatttaatgaaatacctgaaaactcatgtatttaatgaaatgcatgaagaatacagttggcagtc

SEQ ID NO: 99983 - DNA, 80 bp, synthetic construct
  misc_feature 1..80: note = Artificially Synthesized Probe
  source 1..80: mol_type = other DNA
tggcttttttgggagttggtagagatcttttttttttttttcctagatcttatgggaaatacattatgccaaaatcatcc

SEQ ID NO: 99984 - DNA, 80 bp, synthetic construct; identical to SEQ ID NO: 35235
  misc_feature 1..80: note = Artificially Synthesized Probe
  source 1..80: mol_type = other DNA

SEQ ID NO: 99985 - DNA, 80 bp, synthetic construct
  misc_feature 1..80: note = Artificially Synthesized Probe
  source 1..80: mol_type = other DNA
gaaagttgtagtgatgggctataagatgatcaggttcagtctttggttgctgttctgttttttctctacatttgaatcct

SEQ ID NO: 99986 - DNA, 80 bp, synthetic construct
  misc_feature 1..80: note = Artificially Synthesized Probe
  source 1..80: mol_type = other DNA
aagagatgcattcttcaactactgccaaggaaagtgatgataaatttaatgattaagttgcagtagtcttctgtacttta

SEQ ID NO: 99987 - DNA, 80 bp, synthetic construct; identical to SEQ ID NO: 35236
  misc_feature 1..80: note = Artificially Synthesized Probe
  source 1..80: mol_type = other DNA

SEQ ID NO: 99988 - DNA, 80 bp, synthetic construct
  misc_feature 1..80: note = Artificially Synthesized Probe
  source 1..80: mol_type = other DNA
tgggcgtggtagttcatgcctataatcccagcactttgggaggcaacatggcaaaactctgtctctactaaaaatactaa

SEQ ID NO: 99989 - DNA, 80 bp, synthetic construct
  misc_feature 1..80: note = Artificially Synthesized Probe
  source 1..80: mol_type = other DNA
gaagaattttgcccattcatggagtgagagtagacatatgtattcaaaacattaaggctttaattcctagttattttgga

SEQ ID NO: 99990 - DNA, 80 bp, synthetic construct
  misc_feature 1..80: note = Artificially Synthesized Probe
  source 1..80: mol_type = other DNA
gatatttaatattggcattcggtattcagttaccttgtacctgagaacccattggctgtgaaacagtgacagctgagaga

SEQ ID NO: 99991 - DNA, 80 bp, synthetic construct
  misc_feature 1..80: note = Artificially Synthesized Probe
  source 1..80: mol_type = other DNA
ctggccagctgttttttttgttggtttgttttttgttttggtacccatctgtagtgtgatcttggctcactgcaacctct

SEQ ID NO: 99992 - DNA, 80 bp, synthetic construct
  misc_feature 1..80: note = Artificially Synthesized Probe
  source 1..80: mol_type = other DNA
ccgcctcagtctcccaaagtgtagggattacaggcgtgagccaccatgcctagcctcagcatatagttttttctaaatgt

SEQ ID NO: 99993 - DNA, 80 bp, synthetic construct; identical to SEQ ID NO: 35237
  misc_feature 1..80: note = Artificially Synthesized Probe
  source 1..80: mol_type = other DNA

SEQ ID NO: 99994 - DNA, 80 bp, synthetic construct
  misc_feature 1..80: note = Artificially Synthesized Probe
  source 1..80: mol_type = other DNA
gaagtgttgtggttccttaaccacatttctttttttttttttccaggctattcaagatctctggcagtggaggaagtctc

SEQ ID NO: 99995 - DNA, 80 bp, synthetic construct
  misc_feature 1..80: note = Artificially Synthesized Probe
  source 1..80: mol_type = other DNA
caaaatgcctgtttagtttttaaagatggaactccaccctttgcttggttttaagtatgtatggaatgttatgataggac

SEQ ID NO: 99996 - DNA, 80 bp, synthetic construct; identical to SEQ ID NO: 35238
  misc_feature 1..80: note = Artificially Synthesized Probe
  source 1..80: mol_type = other DNA

SEQ ID NO: 99997 - DNA, 80 bp, synthetic construct
  misc_feature 1..80: note = Artificially Synthesized Probe
  source 1..80: mol_type = other DNA
tcaatattctctctggagctaaccactttttcatcataaggatttagtgctgtgttcccacctcctgatgatagttaaca

SEQ ID NO: 99998 - DNA, 80 bp, synthetic construct
  misc_feature 1..80: note = Artificially Synthesized Probe
  source 1..80: mol_type = other DNA
ctgaatatagtttgaggcgtatgtcactttctgttgctttaaagagtggagtgttgatccctgtagcaaacttcggttct

SEQ ID NO: 99999 - DNA, 80 bp, synthetic construct
  misc_feature 1..80: note = Artificially Synthesized Probe
  source 1..80: mol_type = other DNA
tctcagcttattgcagcttctgcttcttgggttcaagcaggtctcctgcctcagcctcccaagtagctgggattacaggt

SEQ ID NO: 100000 - DNA, 80 bp, synthetic construct
  misc_feature 1..80: note = Artificially Synthesized Probe
  source 1..80: mol_type = other DNA
tggattccttatctgaatcaaagcaattatttcagtgactatttgctcaagttgcctagtacttcttacagatgtatagg

SEQ ID NO: 100001 - DNA, 80 bp, synthetic construct
  misc_feature 1..80: note = Artificially Synthesized Probe
  source 1..80: mol_type = other DNA
gttctccagttctgtgccgttttccttgggagattttcatctcccacttctatccattcttagtctggtttgattgtctt

SEQ ID NO: 100002 - DNA, 80 bp, synthetic construct
  misc_feature 1..80: note = Artificially Synthesized Probe
  source 1..80: mol_type = other DNA
aggttgagatttactaaaccattgagcttgtttatgcagaataacagtacctatcagcgtagttagagatgaaatatggt

SEQ ID NO: 100003 - DNA, 80 bp, synthetic construct
  misc_feature 1..80: note = Artificially Synthesized Probe
  source 1..80: mol_type = other DNA
ttcagtgttatttttctccttgttagagttgcttttttcttcatttacaggttgtgaactaaaggccgacaaagattatc

SEQ ID NO: 100004 - DNA, 80 bp, synthetic construct; identical to SEQ ID NO: 35216
  misc_feature 1..80: note = Artificially Synthesized Probe
  source 1..80: mol_type = other DNA

SEQ ID NO: 100005 - DNA, 80 bp, synthetic construct
  misc_feature 1..80: note = Artificially Synthesized Probe
  source 1..80: mol_type = other DNA
attcgcagccggctaacccgccatatcttacacagctaagggctgccgacgccattttgcagggtgggctgcgcagactc

SEQ ID NO: 100006 - DNA, 80 bp, synthetic construct
  misc_feature 1..80: note = Artificially Synthesized Probe
  source 1..80: mol_type = other DNA
gtgtgtatgcatatttatgcatttcttaaattttctgaatatgagaaactgatttgccaagatcacaaaacctgaggaca

SEQ ID NO: 100007 - DNA, 80 bp, synthetic construct
  misc_feature 1..80: note = Artificially Synthesized Probe
  source 1..80: mol_type = other DNA
tttcctgtttttttttttctttggaggcagtctcgctctgtcacccaggctggagtgcagtggtgtaatctcggctcact

SEQ ID NO: 100008 - DNA, 80 bp, synthetic construct
  misc_feature 1..80: note = Artificially Synthesized Probe
  source 1..80: mol_type = other DNA
atctgcccgcctcagcctccctaagtgttgggattacaggcatgagccaccaagcccggccctttcctatgcttagatgc

SEQ ID NO: 100009 - DNA, 80 bp, synthetic construct; identical to SEQ ID NO: 35217
  misc_feature 1..80: note = Artificially Synthesized Probe
  source 1..80: mol_type = other DNA

SEQ ID NO: 100010 - DNA, 80 bp, synthetic construct
  misc_feature 1..80: note = Artificially Synthesized Probe
  source 1..80: mol_type = other DNA
ttgaaaatgtctgtacagccaacggtaagggcacttacatactttggatgttgtgtcaaggtttaattctgttttaaggt

SEQ ID NO: 100011 - DNA, 80 bp, synthetic construct
  misc_feature 1..80: note = Artificially Synthesized Probe
  source 1..80: mol_type = other DNA
ttgcctgtaatgtttattgttcattttcttcacatgtttagtgatgaaaaatttctcccttctaggtttcccttgggggc

SEQ ID NO: 100012 - DNA, 80 bp, synthetic construct; identical to SEQ ID NO: 35218
  misc_feature 1..80: note = Artificially Synthesized Probe
  source 1..80: mol_type = other DNA

SEQ ID NO: 100013 - DNA, 80 bp, synthetic construct
  misc_feature 1..80: note = Artificially Synthesized Probe
  source 1..80: mol_type = other DNA
gtagagaaggggtttcgtgatgttggccaggccgatcttgaactcctggccttaacgtgatctgcacgccctggcctctc

SEQ ID NO: 100014 - DNA, 80 bp, synthetic construct
  misc_feature 1..80: note = Artificially Synthesized Probe
  source 1..80: mol_type = other DNA
actacaggcacactccacgcctggctaattttttttgtatatgtgcagatggggtctcagtatgttgcccagattggact

SEQ ID NO: 100015 - DNA, 80 bp, synthetic construct
  misc_feature 1..80: note = Artificially Synthesized Probe
  source 1..80: mol_type = other DNA
tttaaatagaatagaagtctcagtttttagagtatttactatcagtgttctttttttttctgacttcttgctgcttgagt

SEQ ID NO: 100016 - DNA, 80 bp, synthetic construct
  misc_feature 1..80: note = Artificially Synthesized Probe
  source 1..80: mol_type = other DNA
ctggaaggaggtgggggcgaggtagaaaggagtggggttgaaaagcgcttgcgcaggacggctacggtacgggggtggga

SEQ ID NO: 100017 - DNA, 80 bp, synthetic construct
  misc_feature 1..80: note = Artificially Synthesized Probe
  source 1..80: mol_type = other DNA
gttttgtattatagcttttagtttggtgatagaacagctcttgttcatgagtacgtatcttttcttttaaaagaaaaaag

SEQ ID NO: 100018 - DNA, 80 bp, synthetic construct; identical to SEQ ID NO: 35219
  misc_feature 1..80: note = Artificially Synthesized Probe
  source 1..80: mol_type = other DNA

SEQ ID NO: 100019 - DNA, 80 bp, synthetic construct
  misc_feature 1..80: note = Artificially Synthesized Probe
  source 1..80: mol_type = other DNA
gagattgggttgaaagaaaatatgattaaatagctctatattcattttacaagttgttactcaaggtttgttattcccta

SEQ ID NO: 100020 - DNA, 80 bp, synthetic construct
  misc_feature 1..80: note = Artificially Synthesized Probe
  source 1..80: mol_type = other DNA
cacactggtataaagtactgtttataattggtcttatgtgtgccagtaccagtaatgcattgaatactttgatttggctc

SEQ ID NO: 100021 - DNA, 80 bp, synthetic construct; identical to SEQ ID NO: 35220
  misc_feature 1..80: note = Artificially Synthesized Probe
  source 1..80: mol_type = other DNA

SEQ ID NO: 100022 - DNA, 80 bp, synthetic construct
  misc_feature 1..80: note = Artificially Synthesized Probe
  source 1..80: mol_type = other DNA
aaacttaaaggtagtatttgactgttgctgtttttgttttctttttttttttttttttttttgagatggagtctccagtt

SEQ ID NO: 100023 - DNA, 80 bp, synthetic construct
  misc_feature 1..80: note = Artificially Synthesized Probe
  source 1..80: mol_type = other DNA
tgttggtccggctggtcttgaactcctaacctcgtgatctacctgcctcggtctcccaaagtgctgggattgcagatgtg

SEQ ID NO: 100024 - DNA, 80 bp, synthetic construct
  misc_feature 1..80: note = Artificially Synthesized Probe
  source 1..80: mol_type = other DNA
ttcttgagatggtgttttaccatgctactcagactggacttgaatctctgggcacaagctatcctcccctctcagactat

SEQ ID NO: 100025 - DNA, 80 bp, synthetic construct; identical to SEQ ID NO: 35221
  misc_feature 1..80: note = Artificially Synthesized Probe
  source 1..80: mol_type = other DNA

SEQ ID NO: 100026 - DNA, 80 bp, synthetic construct
  misc_feature 1..80: note = Artificially Synthesized Probe
  source 1..80: mol_type = other DNA
ttgaggtcaggagttcaagaccagcctggccaacatggtgaaacccggtatctactaaaaatacaaaaattagctgggta

SEQ ID NO: 100027 - DNA, 80 bp, synthetic construct
  misc_feature 1..80: note = Artificially Synthesized Probe
  source 1..80: mol_type = other DNA
ctcctacctaagtgcgtgccgccacccgatggaagattcgatggacatggacatgagccccctgaggccccagaactatc

SEQ ID NO: 100028 - DNA, 80 bp, synthetic construct
  misc_feature 1..80: note = Artificially Synthesized Probe
  source 1..80: mol_type = other DNA
tctcaggaaggacagagctgaaaaacaaagttccgtaagtctggccggtaactacatctttccttcctaacaaagaataa

SEQ ID NO: 100029 - DNA, 80 bp, synthetic construct
  misc_feature 1..80: note = Artificially Synthesized Probe
  source 1..80: mol_type = other DNA
atgatgtaaccacaatgtaattttgtttgtctttaagttgggcattgataggaatgaaaagtgtagatatcaaggtccaa

SEQ ID NO: 100030 - DNA, 80 bp, synthetic construct
  misc_feature 1..80: note = Artificially Synthesized Probe
  source 1..80: mol_type = other DNA
gtgattctcctgcctcggcctccagagtagcttggattacaggcacttgccaccacgcctggctaagttttgtattttta

SEQ ID NO: 100031 - DNA, 80 bp, synthetic construct; identical to SEQ ID NO: 35222
  misc_feature 1..80: note = Artificially Synthesized Probe
  source 1..80: mol_type = other DNA

SEQ ID NO: 100032 - DNA, 80 bp, synthetic construct
  misc_feature 1..80: note = Artificially Synthesized Probe
  source 1..80: mol_type = other DNA
catagatgtatgtaatacgttgatagtatgtggcccttaaatgtcttttttaatttttggggaatttcttaagtaaagct

SEQ ID NO: 100033 - DNA, 80 bp, synthetic construct
  misc_feature 1..80: note = Artificially Synthesized Probe
  source 1..80: mol_type = other DNA
aggcatgtgccagcatgccaggctaattttttgtatttttaatagagatggggtttcgccatgttggtcaggctagtctt

SEQ ID NO: 100034 - DNA, 80 bp, synthetic construct
  misc_feature 1..80: note = Artificially Synthesized Probe
  source 1..80: mol_type = other DNA
gtttaaaaaaagcattctcatcttgtttctagcacaggggaggcacctgcagggattgggttctaatgccagaaacttgt

SEQ ID NO: 100035 - DNA, 80 bp, synthetic construct; identical to SEQ ID NO: 35223
  misc_feature 1..80: note = Artificially Synthesized Probe
  source 1..80: mol_type = other DNA

SEQ ID NO: 100036 - DNA, 80 bp, synthetic construct
  misc_feature 1..80: note = Artificially Synthesized Probe
  source 1..80: mol_type = other DNA
tgaaaccccgtctctgctaacatacagctgggtgtgatggtgggcgcttgcaatcccagctgctggggaggctgaggcag

SEQ ID NO: 100037 - DNA, 80 bp, synthetic construct
  misc_feature 1..80: note = Artificially Synthesized Probe
  source 1..80: mol_type = other DNA
acatttcatcacctcaatgagaaatcgtactctataggtattacccctcatgctcttcagctctagtcaaccacgaatga

SEQ ID NO: 100038 - DNA, 80 bp, synthetic construct
  misc_feature 1..80: note = Artificially Synthesized Probe
  source 1..80: mol_type = other DNA
cttctgtccatggtgctgaagtttattcactttcaaaccactttcagtaacaggtgaggttctaccttaaaatttaatgc

SEQ ID NO: 100039 - DNA, 80 bp, synthetic construct
  misc_feature 1..80: note = Artificially Synthesized Probe
  source 1..80: mol_type = other DNA
ttttttttaagcattttctcagcagactagctaaggacaatagatggcatgtcctgacacccatggggcactctgggtgt

SEQ ID NO: 100040 - DNA, 80 bp, synthetic construct
  misc_feature 1..80: note = Artificially Synthesized Probe
  source 1..80: mol_type = other DNA
tccgcaggctccgaggggcagtgagcagcgccctcagcttgctttttaggagggcagatcgatcagaggagtcccagggg

SEQ ID NO: 100041 - DNA, 80 bp, synthetic construct
  misc_feature 1..80: note = Artificially Synthesized Probe
  source 1..80: mol_type = other DNA
tagatgggatgatcacaactccatggcaacaagatgacacaaatgcagcagagaccccaggggacaggagcctcttgcag

SEQ ID NO: 100042 - DNA, 80 bp, synthetic construct
  misc_feature 1..80: note = Artificially Synthesized Probe
  source 1..80: mol_type = other DNA
agaaaaggaaaatacagggaaagggataaacctcactgacttggaggaaatcaagaggagtgagcacagcatcagaaagc

SEQ ID NO: 100043 - DNA, 80 bp, synthetic construct; identical to SEQ ID NO: 35241
  misc_feature 1..80: note = Artificially Synthesized Probe
  source 1..80: mol_type = other DNA

SEQ ID NO: 100044 - DNA, 80 bp, synthetic construct
  misc_feature 1..80: note = Artificially Synthesized Probe
  source 1..80: mol_type = other DNA
caagagccgcattcttactgatttgactcaagaggctcccacttcaaaggtgtgagaagagtaaaaaagagtccttggtt

SEQ ID NO: 100045 - DNA, 80 bp, synthetic construct
  misc_feature 1..80: note = Artificially Synthesized Probe
  source 1..80: mol_type = other DNA
tccagatgctcaagctggcctcacacctgcctcatccgccacgtgggcagacctctggcctcagacagggctgccttcac

SEQ ID NO: 100046 - DNA, 80 bp, synthetic construct; identical to SEQ ID NO: 35239
  misc_feature 1..80: note = Artificially Synthesized Probe
  source 1..80: mol_type = other DNA

SEQ ID NO: 100047 - DNA, 80 bp, synthetic construct
  misc_feature 1..80: note = Artificially Synthesized Probe
  source 1..80: mol_type = other DNA
ccgcctcccgggttcacgccattctcctgcctcagcctccggagtagctaggacttacaggcgcctgccaccacgcctgg

SEQ ID NO: 100048 - DNA, 80 bp, synthetic construct; identical to SEQ ID NO: 35240
  misc_feature 1..80: note = Artificially Synthesized Probe
  source 1..80: mol_type = other DNA

SEQ ID NO: 100049 - DNA, 80 bp, synthetic construct
  misc_feature 1..80: note = Artificially Synthesized Probe
  source 1..80: mol_type = other DNA
tatttacctaaaactttatacactcaaattggcaccaaaacctgccccctcccgggaccccatctagaatgccctggaag

SEQ ID NO: 100050 - DNA, 80 bp, synthetic construct
  misc_feature 1..80: note = Artificially Synthesized Probe
  source 1..80: mol_type = other DNA
gcgcaggggctggctgtgatggtgagggtgccgctgccgccgccccttcaccaccgccagctcaatggcctccgcctcag

SEQ ID NO: 100051 - DNA, 80 bp, synthetic construct
  misc_feature 1..80: note = Artificially Synthesized Probe
  source 1..80: mol_type = other DNA
ccggctgcatctcgggggacccgtcgtggccagagtaggcatcagccagcaggtgatctaggagagacactgagtgagcc

SEQ ID NO: 100052 - DNA, 80 bp, synthetic construct
  misc_feature 1..80: note = Artificially Synthesized Probe
  source 1..80: mol_type = other DNA
gaagctctagcatgtgcgtgggggctgggtgacgctgtgctacctgtgtgcggtcctgccgggtaggaacacgcaggcca

SEQ ID NO: 100053 - DNA, 80 bp, synthetic construct
  misc_feature 1..80: note = Artificially Synthesized Probe
  source 1..80: mol_type = other DNA
agcggctgggaactgctcctggggctcgggcagggagggcaggggatgtaaggaagccaggccggcagggcgccgggccc

SEQ ID NO: 100054 - DNA, 80 bp, synthetic construct; identical to SEQ ID NO: 35253
  misc_feature 1..80: note = Artificially Synthesized Probe
  source 1..80: mol_type = other DNA

SEQ ID NO: 100055 - DNA, 80 bp, synthetic construct
  misc_feature 1..80: note = Artificially Synthesized Probe
  source 1..80: mol_type = other DNA
tcgcgaggccggtcggctgctgttccccgggggaaccgaggccactcccgacctggggggtgcgctcgcccaccacgcgc

SEQ ID NO: 100056 - DNA, 80 bp, synthetic construct
  misc_feature 1..80: note = Artificially Synthesized Probe
  source 1..80: mol_type = other DNA
gcgggaaggcggccccgccgcactcaccgcactttggccgccaccgaggacatggcctcgctcctcagcgccctcctcct

SEQ ID NO: 100057 - DNA, 80 bp, synthetic construct
  misc_feature 1..80: note = Artificially Synthesized Probe
  source 1..80: mol_type = other DNA
gggtcgggctcggggtcgggcccggtccccgcatggccgcacccggcgctccgcgcgtgccgccgctcccgggagagcgc

SEQ ID NO: 100058 - DNA, 80 bp, synthetic construct
  misc_feature 1..80: note = Artificially Synthesized Probe
  source 1..80: mol_type = other DNA
aggagtgtaagtgaaagcacagacagtcggagactcggccagtgtagacagacccagagactcggccagtgtagacagag

SEQ ID NO: 100059 - DNA, 80 bp, synthetic construct; identical to SEQ ID NO: 35243
  misc_feature 1..80: note = Artificially Synthesized Probe
  source 1..80: mol_type = other DNA

SEQ ID NO: 100060 - DNA, 80 bp, synthetic construct
  misc_feature 1..80: note = Artificially Synthesized Probe
  source 1..80: mol_type = other DNA
cggaacccacagggggaacctgagcaacgtctgaggtgccctgaagtggctccaggcgagaccggagccacacagtcccg

SEQ ID NO: 100061 - DNA, 80 bp, synthetic construct
  misc_feature 1..80: note = Artificially Synthesized Probe
  source 1..80: mol_type = other DNA
caaagtacgtctcgatcatctgcttccctgggcggagcgggggcaggaggctcaggcctggccggccctggggatcccac

SEQ ID NO: 100062 - DNA, 80 bp, synthetic construct
  misc_feature 1..80: note = Artificially Synthesized Probe
  source 1..80: mol_type = other DNA
tgagtccgaggcagagagatggggaaggaggagcggggaggagatggggagcagggcccaccctcttttttcagaccccc

SEQ ID NO: 100063 - DNA, 80 bp, synthetic construct
  misc_feature 1..80: note = Artificially Synthesized Probe
  source 1..80: mol_type = other DNA
tctctccattggggttccccagaatgtagcagcccatgatgtggatgacgttcggctctgggttcactttgctcatcagg

SEQ ID NO: 100064 - DNA, 80 bp, synthetic construct
  misc_feature 1..80: note = Artificially Synthesized Probe
  source 1..80: mol_type = other DNA
gcctggctgtgcccagcagcggtctgggccctgaggacacctgaggttgagagagtggcccccatctgtggccacactgc

SEQ ID NO: 100065 - DNA, 80 bp, synthetic construct; identical to SEQ ID NO: 35244
  misc_feature 1..80: note = Artificially Synthesized Probe
  source 1..80: mol_type = other DNA

SEQ ID NO: 100066 - DNA, 80 bp, synthetic construct
  misc_feature 1..80: note = Artificially Synthesized Probe
  source 1..80: mol_type = other DNA
tgatctcccccaccacacgcctcttccctttgatctcccccccacgcctcttccccttgatctcccccaccacatgcctc

SEQ ID NO: 100067 - DNA, 80 bp, synthetic construct
  misc_feature 1..80: note = Artificially Synthesized Probe
  source 1..80: mol_type = other DNA
tctcccccaccacacgcctcttccctttgatttcccccaccacacgcctcttccccttgatcttcccccgcctcttcctc

SEQ ID NO: 100068 - DNA, 80 bp, synthetic construct
  misc_feature 1..80: note = Artificially Synthesized Probe
  source 1..80: mol_type = other DNA
cccttgatctcccccccacgcctcttccccttgatctccccctccacacgcctcttccccttgatcttcccctgcccctc

SEQ ID NO: 100069 - DNA, 80 bp, synthetic construct; identical to SEQ ID NO: 35245
  misc_feature 1..80: note = Artificially Synthesized Probe
  source 1..80: mol_type = other DNA

SEQ ID NO: 100070 - DNA, 80 bp, synthetic construct
  misc_feature 1..80: note = Artificially Synthesized Probe
  source 1..80: mol_type = other DNA
cgccacgtctcttccccttgatctcccccgccacgtctcttccccttgatctcccgcgccacacgcctcttccccttgtt

SEQ ID NO: 100071 - DNA, 80 bp, synthetic construct
  misc_feature 1..80: note = Artificially Synthesized Probe
  source 1..80: mol_type = other DNA
tcttccccttgatcttcccctgcccctcgtctcttccccttgatctcccccgccacgtctcttccccttgatctcccccg

SEQ ID NO: 100072 - DNA, 80 bp, synthetic construct; identical to SEQ ID NO: 35246
  misc_feature 1..80: note = Artificially Synthesized Probe
  source 1..80: mol_type = other DNA

SEQ ID NO: 100073 - DNA, 80 bp, synthetic construct
  misc_feature 1..80: note = Artificially Synthesized Probe
  source 1..80: mol_type = other DNA
tggtctcccccagccacacctcttccccttggtctccccctcaaacacctcttccccttggtcttcccaccccagcctct

SEQ ID NO: 100074 - DNA, 80 bp, synthetic construct
  misc_feature 1..80: note = Artificially Synthesized Probe
  source 1..80: mol_type = other DNA
ggtcttcccctgccccaccacgattcttctcctggtcaggagacgagcactgagccccacctggcagaaaatcagcattt

SEQ ID NO: 100075 - DNA, 80 bp, synthetic construct
  misc_feature 1..80: note = Artificially Synthesized Probe
  source 1..80: mol_type = other DNA
ccctcctgtgctggtccccctggctatgccctgtggggtggtctagtggcctagctccaactctgtccaggcaggaaggc

SEQ ID NO: 100076 - DNA, 80 bp, synthetic construct
  misc_feature 1..80: note = Artificially Synthesized Probe
  source 1..80: mol_type = other DNA
ggccaatgaggcacataccaaggatgtcctcgaaggttgcgtgctcatggtcctggggacagacacaggccacaaggcca

SEQ ID NO: 100077 - DNA, 80 bp, synthetic construct; identical to SEQ ID NO: 35247
  misc_feature 1..80: note = Artificially Synthesized Probe
  source 1..80: mol_type = other DNA

SEQ ID NO: 100078 - DNA, 80 bp, synthetic construct
  misc_feature 1..80: note = Artificially Synthesized Probe
  source 1..80: mol_type = other DNA
ctcgggttggggcggagtcctgctcggggtgtagaggagcactgcccgggctgggcctcaccatgacctttggtggcacg

SEQ ID NO: 100079 - DNA, 80 bp, synthetic construct
  misc_feature 1..80: note = Artificially Synthesized Probe
  source 1..80: mol_type = other DNA
tcctatcctggccatggccccaaggcccacagggcccgaaagccccatcccggagggtcctccaagcaagtgggaggacc

SEQ ID NO: 100080 - DNA, 80 bp, synthetic construct
  misc_feature 1..80: note = Artificially Synthesized Probe
  source 1..80: mol_type = other DNA
tgggggcgggcaccgcagccccctgcccctgagggcctcttgcgagtggcggtgggcacggccctacaggcgcccccggc

SEQ ID NO: 100081 - DNA, 80 bp, synthetic construct
  misc_feature 1..80: note = Artificially Synthesized Probe
  source 1..80: mol_type = other DNA
aggggaggctctggggaaggtgggcgggcctgtgcggggcacctactgtctcgggagtcgtgggaagtgtcggctttcat

SEQ ID NO: 100082 - DNA, 80 bp, synthetic construct; identical to SEQ ID NO: 35248
  misc_feature 1..80: note = Artificially Synthesized Probe
  source 1..80: mol_type = other DNA

SEQ ID NO: 100083 - DNA, 80 bp, synthetic construct
  misc_feature 1..80: note = Artificially Synthesized Probe
  source 1..80: mol_type = other DNA
gaggggaggagcctgggccgggctgggggcgtggctgggaggggaggagcctgggccgggctgggggcgtggctgggagg

SEQ ID NO: 100084 - DNA, 80 bp, synthetic construct
  misc_feature 1..80: note = Artificially Synthesized Probe
  source 1..80: mol_type = other DNA
ccgcacggggtcttactctgggccttcaccctccggctgccgaccatgcgcaggtgtttgcggaagttcctgggggagga

SEQ ID NO: 100085 - DNA, 80 bp, synthetic construct; identical to SEQ ID NO: 35249
  misc_feature 1..80: note = Artificially Synthesized Probe
  source 1..80: mol_type = other DNA

SEQ ID NO: 100086 - DNA, 80 bp, synthetic construct
  misc_feature 1..80: note = Artificially Synthesized Probe
  source 1..80: mol_type = other DNA
cagccctccctcagctgggaacacagccaggtgccctcagacccctggctctgcacaaggggggcctgccccctcgcccc

SEQ ID NO: 100087 - DNA, 80 bp, synthetic construct
  misc_feature 1..80: note = Artificially Synthesized Probe
  source 1..80: mol_type = other DNA
gctgggggcctgcaggagccccctctcctgctctgtgtccttgagccacctcaggggcaggtcctctcctccaccaaact

SEQ ID NO: 100088 - DNA, 80 bp, synthetic construct
  misc_feature 1..80: note = Artificially Synthesized Probe
  source 1..80: mol_type = other DNA
tttcctgcagcccgggccacatggcctctcctgcctgccacgtccccagagcagggccaggccagtggtcgccaccaccc

SEQ ID NO: 100089 - DNA, 80 bp, synthetic construct
  misc_feature 1..80: note = Artificially Synthesized Probe
  source 1..80: mol_type = other DNA
gcccctgaacaccctgggaaaccaccgcgagtcagcactgcccttggccggaggcaggagggacacagacgtcgggacag

SEQ ID NO: 100090 - DNA, 80 bp, synthetic construct
  misc_feature 1..80: note = Artificially Synthesized Probe
  source 1..80: mol_type = other DNA
cctcaagacccaggtccctggcctgcccaaacctatttggggtgggagggtctccccagggacaacagctgtgcccttag

SEQ ID NO: 100091 - DNA, 80 bp, synthetic construct; identical to SEQ ID NO: 35250
  misc_feature 1..80: note = Artificially Synthesized Probe
  source 1..80: mol_type = other DNA

SEQ ID NO: 100092 - DNA, 80 bp, synthetic construct
  misc_feature 1..80: note = Artificially Synthesized Probe
  source 1..80: mol_type = other DNA
aaatgtatgtcaagacagagaggagcaggtccctgcggggaccctgaaactgtgatgacctatggcacgtatgaaacaga

SEQ ID NO: 100093 - DNA, 80 bp, synthetic construct
  misc_feature 1..80: note = Artificially Synthesized Probe
  source 1..80: mol_type = other DNA
ggggctgggcaccagccatgggaggggaagagcagtcagccctggcctccctggcaggcctggcacagcataggcacgtg

SEQ ID NO: 100094 - DNA, 80 bp, synthetic construct
  misc_feature 1..80: note = Artificially Synthesized Probe
  source 1..80: mol_type = other DNA
aaagattttccttggggaaccaggtacgaatagggatgtcgtctaagagagacaaaaaggagcggtggctgggtgaagta

SEQ ID NO: 100095 - DNA, 80 bp, synthetic construct; identical to SEQ ID NO: 35251
  misc_feature 1..80: note = Artificially Synthesized Probe
  source 1..80: mol_type = other DNA

SEQ ID NO: 100096 - DNA, 80 bp, synthetic construct
  misc_feature 1..80: note = Artificially Synthesized Probe
  source 1..80: mol_type = other DNA
acagcctttccctgatgcccaagtgtggggacagtggagtgactttctgcctggtggacaagctaccacacaactcaaca

SEQ ID NO: 100097 - DNA, 80 bp, synthetic construct
  misc_feature 1..80: note = Artificially Synthesized Probe
  source 1..80: mol_type = other DNA
attgacctggtgctagcagggcgaaagcggactgtgaggcctggcagattttgctgaggagctgagggagctcacagctc

SEQ ID NO: 100098 - DNA, 80 bp, synthetic construct; identical to SEQ ID NO: 35242
  misc_feature 1..80: note = Artificially Synthesized Probe
  source 1..80: mol_type = other DNA

SEQ ID NO: 100099 - DNA, 80 bp, synthetic construct; identical to SEQ ID NO: 35252
  misc_feature 1..80: note = Artificially Synthesized Probe
  source 1..80: mol_type = other DNA

SEQ ID NO: 100100 - DNA, 80 bp, synthetic construct
  misc_feature 1..80: note = Artificially Synthesized Probe
  source 1..80: mol_type = other DNA
tctggtctcggtgctgtaggtcacatagccactctttcctggattgaggctttccagcaaaggggctgggacgtaaggct

SEQ ID NO: 100101 - DNA, 80 bp, synthetic construct
  misc_feature 1..80: note = Artificially Synthesized Probe
  source 1..80: mol_type = other DNA
ttgatgtagacacagatttacattggtttctaaaacagttccctcccaacacaccatcaccaatgggaacaaacatgtcc

SEQ ID NO: 100102 - DNA, 80 bp, synthetic construct
  misc_feature 1..80: note = Artificially Synthesized Probe
  source 1..80: mol_type = other DNA
tgacctgggagttgggggctaggtgttcgccaaagggagacttccagagtctacgagtgagatgaggactgcatcaggag

SEQ ID NO: 100103 - DNA, 80 bp, synthetic construct
  misc_feature 1..80: note = Artificially Synthesized Probe
  source 1..80: mol_type = other DNA
accctggttccctcctggccaacaccttcttctccacggtctgagttctgattcctcccccagggcgcttattggctcag

SEQ ID NO: 100104 - DNA, 80 bp, synthetic construct
  misc_feature 1..80: note = Artificially Synthesized Probe
  source 1..80: mol_type = other DNA
ggtcctctctggccccatctgcccacagaacacagcagtcagcctgacagatgcccctctgccccgtcccttctgctcga

SEQ ID NO: 100105 - DNA, 80 bp, synthetic construct
  misc_feature 1..80: note = Artificially Synthesized Probe
  source 1..80: mol_type = other DNA
cattcagggccatcctcaagagataaggtagcactgcccctttgcagggtttaggaatgttaagtgagccgtgtttgaag

SEQ ID NO: 100106 - DNA, 80 bp, synthetic construct
  misc_feature 1..80: note = Artificially Synthesized Probe
  source 1..80: mol_type = other DNA
gaagcagaacttgtgcttcctccacctctgtgtcccacctgagccctacaatctgcccctaaatgggcacagtggggctg

SEQ ID NO: 100107 - DNA, 80 bp, synthetic construct
  misc_feature 1..80: note = Artificially Synthesized Probe
  source 1..80: mol_type = other DNA
atagtgttcagagagatttggactggagttttctagatcttagggaggagtggggagaagtggtctcagccagaaaactg

SEQ ID NO: 100108 - DNA, 80 bp, synthetic construct
  misc_feature 1..80: note = Artificially Synthesized Probe
  source 1..80: mol_type = other DNA
acaggggtgggggcagatgaggaagttcaggcaacacagggcctgggtttcctgagttgttctgaattgtttgccctttt

SEQ ID NO: 100109 - DNA, 80 bp, synthetic construct
  misc_feature 1..80: note = Artificially Synthesized Probe
  source 1..80: mol_type = other DNA
tctcagtggaagggtctggaaaggctggtttccttttcagtagaggaaggagagtagcgcacgaataggaagatggttct

SEQ ID NO: 100110 - DNA, 80 bp, synthetic construct
  misc_feature 1..80: note = Artificially Synthesized Probe
  source 1..80: mol_type = other DNA
gaacccctggtttttggttggtcactatgttcagttattaggagctcaaaggagaagggccagggatgggctccttgtcc

SEQ ID NO: 100111 - DNA, 80 bp, synthetic construct
  misc_feature 1..80: note = Artificially Synthesized Probe
  source 1..80: mol_type = other DNA
cctctcagacctgctccctgggaacagagcttcctgagtggcagccgggaccatcgagtactgcggaaagggtggcccga

SEQ ID NO: 100112 - DNA, 80 bp, synthetic construct; identical to SEQ ID NO: 35266
  misc_feature 1..80: note = Artificially Synthesized Probe
  source 1..80: mol_type = other DNA

SEQ ID NO: 100113 - DNA, 80 bp, synthetic construct
  misc_feature 1..80: note = Artificially Synthesized Probe
  source 1..80: mol_type = other DNA
tgggaaagaaaggggtttacaagagcgtcaggaaaaggaagattgaagaggagatggggccataatattcggaagcttct

SEQ ID NO: 100114 - DNA, 80 bp, synthetic construct
  misc_feature 1..80: note = Artificially Synthesized Probe
  source 1..80: mol_type = other DNA
ggacacccgagggagacgctcgggcagcaaaggcttggctgttacttcttgggagacaggggtcagggagtcttggtgac

SEQ ID NO: 100115 - DNA, 80 bp, synthetic construct
  misc_feature 1..80: note = Artificially Synthesized Probe
  source 1..80: mol_type = other DNA
gagaccccagctcattcacctctttcctttgtctccacagcatacccagtgctgggaccgggcgtgaccgcgaaccctgg

SEQ ID NO: 100116 - DNA, 80 bp, synthetic construct; identical to SEQ ID NO: 35257
  misc_feature 1..80: note = Artificially Synthesized Probe
  source 1..80: mol_type = other DNA

SEQ ID NO: 100117 - DNA, 80 bp, synthetic construct
  misc_feature 1..80: note = Artificially Synthesized Probe
  source 1..80: mol_type = other DNA
cctgtgagggaggctggtcccagggccttcctcttccaccaccaccaccaccggctgcccagctgccccccattgtgtcc

SEQ ID NO: 100118 - DNA, 80 bp, synthetic construct
  misc_feature 1..80: note = Artificially Synthesized Probe
  source 1..80: mol_type = other DNA
aggcaccttccccagagtcctgacaccgaagcgctttcgtgcttcctcatgtgagtgtcctcggggcattggagctggtc

SEQ ID NO: 100119 - DNA, 80 bp, synthetic construct
  misc_feature 1..80: note = Artificially Synthesized Probe
  source 1..80: mol_type = other DNA
aggggcctcatctcaactgcccgtcactgtcccgtgagtccggccaatccttactttcaataattttcacaacaatgttt

SEQ ID NO: 100120 - DNA, 80 bp, synthetic construct; identical to SEQ ID NO: 35258
  misc_feature 1..80: note = Artificially Synthesized Probe
  source 1..80: mol_type = other DNA

SEQ ID NO: 100121 - DNA, 80 bp, synthetic construct
  misc_feature 1..80: note = Artificially Synthesized Probe
  source 1..80: mol_type = other DNA
gcacatgctatgacacattacatgacagcagttacgattactgtccccattactatcattatcaagactaggccatctag

SEQ ID NO: 100122 - DNA, 80 bp, synthetic construct
  misc_feature 1..80: note = Artificially Synthesized Probe
  source 1..80: mol_type = other DNA
caccctgcggtgcctctgtgaccctgtgtttcccgctgatgagcaaacgggagcttgagcacatccaccgtgcaacacac

SEQ ID NO: 100123 - DNA, 80 bp, synthetic construct
  misc_feature 1..80: note = Artificially Synthesized Probe
  source 1..80: mol_type = other DNA
catctctgctgctgccttccagttggaagggaaactcaggttcttgcctaatggccgaagcccttcacagaacgtccccc

SEQ ID NO: 100124 - DNA, 80 bp, synthetic construct
  misc_feature 1..80: note = Artificially Synthesized Probe
  source 1..80: mol_type = other DNA
ggggtggagctgccccaggctcacaggcctttgccatggctcctgtgggaatgtgggatctggacctgctgcttgcagtg

SEQ ID NO: 100125 - DNA, 80 bp, synthetic construct
  misc_feature 1..80: note = Artificially Synthesized Probe
  source 1..80: mol_type = other DNA
taaccctcacccccaggtcattctgtgtgcacgctgtctcagtcagctcaggctctgccgtaacgaatgccgtagactgg

SEQ ID NO: 100126 - DNA, 80 bp, synthetic construct
  misc_feature 1..80: note = Artificially Synthesized Probe
  source 1..80: mol_type = other DNA
ccctggcgtctccttctgcccttatcagggcttggattccatgactgggacccacgctcatgacctgctttaaccctgat

SEQ ID NO: 100127 - DNA, 80 bp, synthetic construct
  misc_feature 1..80: note = Artificially Synthesized Probe
  source 1..80: mol_type = other DNA
tgatcttggggttgtgttctggggcctgaggagcccacatgggggagaacaggacagggacagatggcgggacaggtgtg

SEQ ID NO: 100128 - DNA, 80 bp, synthetic construct
  misc_feature 1..80: note = Artificially Synthesized Probe
  source 1..80: mol_type = other DNA
ggccatgcgggaatggcagcacacgagcaactttgaccggatgatcttctacgagatggcggaaaagtgagtctggggtc

SEQ ID NO: 100129 - DNA, 80 bp, synthetic construct
  misc_feature 1..80: note = Artificially Synthesized Probe
  source 1..80: mol_type = other DNA
gagtgttctggggtctctgtcctggcctattgggaagcaccccctgcctggcctggggccatccctgccttgacactgga

SEQ ID NO: 100130 - DNA, 80 bp, synthetic construct
  misc_feature 1..80: note = Artificially Synthesized Probe
  source 1..80: mol_type = other DNA
tggccagggagttgggttggggagatctgcacctgggacaccatgggacccatctctggcctgactgcctttgctcctgg

SEQ ID NO: 100131 - DNA, 80 bp, synthetic construct
  misc_feature 1..80: note = Artificially Synthesized Probe
  source 1..80: mol_type = other DNA
caggactcctgcatctgggcatcatccctgatgccttctgccataaatcccacccctggccagctgaaacctggaggagg

SEQ ID NO: 100132 - DNA, 80 bp, synthetic construct
  misc_feature 1..80: note = Artificially Synthesized Probe
  source 1..80: mol_type = other DNA
agggcctggacagcccacccgaggcactccctcctatccctgccctcggccgctgcctggtcctgcggggagggggcctg

SEQ ID NO: 100133 - DNA, 80 bp, synthetic construct
  misc_feature 1..80: note = Artificially Synthesized Probe
  source 1..80: mol_type = other DNA
ccggcccctgaggtggtcaagcagccaggtatggcttcccacattcccacaggagccatggcaaaggccaaaagggccaa

SEQ ID NO: 100134 - DNA, 80 bp, synthetic construct; identical to SEQ ID NO: 35254
  misc_feature 1..80: note = Artificially Synthesized Probe
  source 1..80: mol_type = other DNA

SEQ ID NO: 100135 - DNA, 80 bp, synthetic construct
  misc_feature 1..80: note = Artificially Synthesized Probe
  source 1..80: mol_type = other DNA
gctctgcccaggaagcagggatgagcggggagagtacacggcatattggtggctccaaacttcctcccaagcgatgctgt

SEQ ID NO: 100136 - DNA, 80 bp, synthetic construct
  misc_feature 1..80: note = Artificially Synthesized Probe
  source 1..80: mol_type = other DNA
tctgcctcagtgtaccttcccagcaaggccggccccaaggccccgactgcctgcctgccaccacccaggccccagaggcc

SEQ ID NO: 100137 - DNA, 80 bp, synthetic construct; identical to SEQ ID NO: 35261
  misc_feature 1..80: note = Artificially Synthesized Probe
  source 1..80: mol_type = other DNA

SEQ ID NO: 100138 - DNA, 80 bp, synthetic construct
  misc_feature 1..80: note = Artificially Synthesized Probe
  source 1..80: mol_type = other DNA
aagctctgttccttagctactcagcagtgtgtgtatttccatggatttgagtgtctgtgtatgtgattgtgtgtgtctgt

SEQ ID NO: 100139 - DNA, 80 bp, synthetic construct
  misc_feature 1..80: note = Artificially Synthesized Probe
  source 1..80: mol_type = other DNA
tctctgtctgtgtgtgtgtagctaccaggtctgtggtctgtgtctgtagctggtggtcaccatgatatgagacagcccca

SEQ ID NO: 100140 - DNA, 80 bp, synthetic construct
  misc_feature 1..80: note = Artificially Synthesized Probe
  source 1..80: mol_type = other DNA
cacagatggatttcttggccctaagccaggacctggagcaggaggaaggactcacccttgcccaggtaccccaggggcag

SEQ ID NO: 100141 - DNA, 80 bp, synthetic construct; identical to SEQ ID NO: 35262
  misc_feature 1..80: note = Artificially Synthesized Probe
  source 1..80: mol_type = other DNA

SEQ ID NO: 100142 - DNA, 80 bp, synthetic construct
  misc_feature 1..80: note = Artificially Synthesized Probe
  source 1..80: mol_type = other DNA
caagttcttctaagtttgcagctggccaaggagcagagagagacgtccctgacccccaacaaggggttggcatggaaacc

SEQ ID NO: 100143 - DNA, 80 bp, synthetic construct
  misc_feature 1..80: note = Artificially Synthesized Probe
  source 1..80: mol_type = other DNA
agacccacctgccctggcgtgggtaccaaggatgccttggatctccctggagggtctcctgtcagggagtcacatgggct

SEQ ID NO: 100144 - DNA, 80 bp, synthetic construct
  misc_feature 1..80: note = Artificially Synthesized Probe
  source 1..80: mol_type = other DNA
tcagtccccatctgctgagagaagaggcctcaacctagcaccttctcctgccaacaaggccaagaagcgacctctctttg

SEQ ID NO: 100145 - DNA, 80 bp, synthetic construct
  misc_feature 1..80: note = Artificially Synthesized Probe
  source 1..80: mol_type = other DNA
attgtagccagtaggggcttctgagcaggctctctggggccaatccccaaggatggggctctggcatccgatgccccaaa

SEQ ID NO: 100146 - DNA, 80 bp, synthetic construct
  misc_feature 1..80: note = Artificially Synthesized Probe
  source 1..80: mol_type = other DNA
ctgtgtttagggaggacggcctcttagaggtggaacaagatggctgggggaatacaccgtgtaggagaaaggacagagtg

SEQ ID NO: 100147 - DNA, 80 bp, synthetic construct; identical to SEQ ID NO: 35263
  misc_feature 1..80: note = Artificially Synthesized Probe
  source 1..80: mol_type = other DNA

SEQ ID NO: 100148 - DNA, 80 bp, synthetic construct
  misc_feature 1..80: note = Artificially Synthesized Probe
  source 1..80: mol_type = other DNA
aggaagccctgatccctcccactaccgactcacaaggccctgcctgctttagggaggcttcttggggccccccatcgtca

SEQ ID NO: 100149 - DNA, 80 bp, synthetic construct
  misc_feature 1..80: note = Artificially Synthesized Probe
  source 1..80: mol_type = other DNA
ggagacgttgaggtgaccatccacacaggtgtgtttgggatacgatgatgggtggggagcaggggaagtccttctgcctg

SEQ ID NO: 100150 - DNA, 80 bp, synthetic construct; identical to SEQ ID NO: 35255
  misc_feature 1..80: note = Artificially Synthesized Probe
  source 1..80: mol_type = other DNA

SEQ ID NO: 100151 - DNA, 80 bp, synthetic construct
  misc_feature 1..80: note = Artificially Synthesized Probe
  source 1..80: mol_type = other DNA
gactgaactcatgtggaattgatgtagacacagatttacattggtttctaaaacagttccctcccaacacaccatcacca

SEQ ID NO: 100152 - DNA, 80 bp, synthetic construct
  misc_feature 1..80: note = Artificially Synthesized Probe
  source 1..80: mol_type = other DNA
tgggatgtggcattggctgtctgggaagtgccctgggagttgggggctaggtgttcgccaaagggagacttccagagtct

SEQ ID NO: 100153 - DNA, 80 bp, synthetic construct; identical to SEQ ID NO: 35264
  misc_feature 1..80: note = Artificially Synthesized Probe
  source 1..80: mol_type = other DNA

SEQ ID NO: 100154 - DNA, 80 bp, synthetic construct
  misc_feature 1..80: note = Artificially Synthesized Probe
  source 1..80: mol_type = other DNA
cacggtggcctggcccctcggccaagtgacaaagggagccatgtttgggtcctctctggccccatctgcccacagaacac

SEQ ID NO: 100155 - DNA, 80 bp, synthetic construct
  misc_feature 1..80: note = Artificially Synthesized Probe
  source 1..80: mol_type = other DNA
atgtggggagcgaagagtcactggtgggtgatgtgggcagctcccgtgactcctctacattcacggccatcctcaggaga

SEQ ID NO: 100156 - DNA, 80 bp, synthetic construct; identical to SEQ ID NO: 35265
  misc_feature 1..80: note = Artificially Synthesized Probe
  source 1..80: mol_type = other DNA

SEQ ID NO: 100157 - DNA, 80 bp, synthetic construct
  misc_feature 1..80: note = Artificially Synthesized Probe
  source 1..80: mol_type = other DNA
ctttgggagttattcagggttagaagagaccatgagggtggggccctaatgatgggattagggccctggtaagaagcaga

SEQ ID NO: 100158 - DNA, 80 bp, synthetic construct
  misc_feature 1..80: note = Artificially Synthesized Probe
  source 1..80: mol_type = other DNA
tttaatatgtgccaccacccccaagtctatggccctttgtccgagcagccctatgtgactaggacaaagtccataatctc

SEQ ID NO: 100159 - DNA, 80 bp, synthetic construct
  misc_feature 1..80: note = Artificially Synthesized Probe
  source 1..80: mol_type = other DNA
tgaaaaggaatctgtaaatacccatgatgtcatcgcatccacacttggggaagccatgcagcttgctcacagcaggtgct

SEQ ID NO: 100160 - DNA, 80 bp, synthetic construct; identical to SEQ ID NO: 35278
  misc_feature 1..80: note = Artificially Synthesized Probe
  source 1..80: mol_type = other DNA

SEQ ID NO: 100161 - DNA, 80 bp, synthetic construct
  misc_feature 1..80: note = Artificially Synthesized Probe
  source 1..80: mol_type = other DNA
tacatttttagtatgtatcattacatcaaacctttttgttgctgaataatattccattaatggatatactaaaatttatc

SEQ ID NO: 100162 - DNA, 80 bp, synthetic construct
  misc_feature 1..80: note = Artificially Synthesized Probe
  source 1..80: mol_type = other DNA
gctgggggctgctgtaactgccacagcccagagcccctcagctctctccctagagatggcttctccatcagttcaggtag

SEQ ID NO: 100163 - DNA, 80 bp, synthetic construct
  misc_feature 1..80: note = Artificially Synthesized Probe
  source 1..80: mol_type = other DNA
gaaactctgtgtttaaccatttcagaaggtgccagactgttcccagtgtacatgaaccattttatatacccactagctgt

SEQ ID NO: 100164 - DNA, 80 bp, synthetic construct
  misc_feature 1..80: note = Artificially Synthesized Probe
  source 1..80: mol_type = other DNA
atcttctttggagcaatgtgtactcaacatttagtaatttttaactggtttgtgttttgtcattgagttataagaattct

SEQ ID NO: 100165 - DNA, 80 bp, synthetic construct
  misc_feature 1..80: note = Artificially Synthesized Probe
  source 1..80: mol_type = other DNA
ctttgtgttactgtggagatgaagaatttgctcctattccatttatactacctcatgaacggggggcaggtgtggattct

SEQ ID NO: 100166 - DNA, 80 bp, synthetic construct
  misc_feature 1..80: note = Artificially Synthesized Probe
  source 1..80: mol_type = other DNA
tgactagagactgcatgaggtcctattgaacagggatgagttccagacaactttgcctcacccggcccatggcccaagaa

SEQ ID NO: 100167 - DNA, 80 bp, synthetic construct; identical to SEQ ID NO: 35256
  misc_feature 1..80: note = Artificially Synthesized Probe
  source 1..80: mol_type = other DNA

SEQ ID NO: 100168 - DNA, 80 bp, synthetic construct
  misc_feature 1..80: note = Artificially Synthesized Probe
  source 1..80: mol_type = other DNA
gggcgctggcttgggaaagatttccatccagtggttttgttttgttatgtctgagctgggaaagaaaggggtttacaaga

SEQ ID NO: 100169 - DNA, 80 bp, synthetic construct
  misc_feature 1..80: note = Artificially Synthesized Probe
  source 1..80: mol_type = other DNA
gacccatggcttgggagatgcctgtgaggctgacagggtctgccagggacacccgagggagaccctcgggcagcgaaggc

SEQ ID NO: 100170 - DNA, 80 bp, synthetic construct
  misc_feature 1..80: note = Artificially Synthesized Probe
  source 1..80: mol_type = other DNA
ctcccctctgattccccagtgactagtgtggacctggagaccccagctcattcacctctttcctttgtctccacagcata

SEQ ID NO: 100171 - DNA, 80 bp, synthetic construct
  misc_feature 1..80: note = Artificially Synthesized Probe
  source 1..80: mol_type = other DNA
ggttgattggcacaaaagtaggtctgctgataaagaatggaagtaaaggggccatcaggtagaagcttttgctgtgagtc

SEQ ID NO: 100172 - DNA, 80 bp, synthetic construct
  misc_feature 1..80: note = Artificially Synthesized Probe
  source 1..80: mol_type = other DNA
agcacacctctggtgacagaacaggatggctgcggcccgagtggggccggggcttccaacgtctttgtccagatgaggac

SEQ ID NO: 100173 - DNA, 80 bp, synthetic construct
  misc_feature 1..80: note = Artificially Synthesized Probe
  source 1..80: mol_type = other DNA
gttgggggcacccaggcctgtgagggaggctggtcccagggccttcctcttccaccaccaccaccaccggctgcccagct

SEQ ID NO: 100174 - DNA, 80 bp, synthetic construct
  misc_feature 1..80: note = Artificially Synthesized Probe
  source 1..80: mol_type = other DNA
gcccggaggcaccttccccagagtcctgacaccgaagcgctttcgtgcttcctcatgtgagtgtcctgggggcattggag

SEQ ID NO: 100175 - DNA, 80 bp, synthetic construct
  misc_feature 1..80: note = Artificially Synthesized Probe
  source 1..80: mol_type = other DNA
actgtcaggggcctcatctcaactgcccgtcactgtctcgtgagtccagccaatccttactttcaataattttcacaaca

SEQ ID NO: 100176 - DNA, 80 bp, synthetic construct
  misc_feature 1..80: note = Artificially Synthesized Probe
  source 1..80: mol_type = other DNA
gcagggcccagcaggaacctggcacatgcccgcagttccgctgaggtccagttagcacagcggtggtggagcctgcacag

SEQ ID NO: 100177 - DNA, 80 bp, synthetic construct
  misc_feature 1..80: note = Artificially Synthesized Probe
  source 1..80: mol_type = other DNA
tgcctggcacatgctatgacacattacatgatagcagttatgattactgtccccattactatcattatcaagactaggcc

SEQ ID NO: 100178 - DNA, 80 bp, synthetic construct
  misc_feature 1..80: note = Artificially Synthesized Probe
  source 1..80: mol_type = other DNA
tctctccaccctgcggtgcctctgtgaccctgtgtttcccgctgatgagcaaacgggagcttgagcacatccaccgtgca

SEQ ID NO: 100179 - DNA, 80 bp, synthetic construct
  misc_feature 1..80: note = Artificially Synthesized Probe
  source 1..80: mol_type = other DNA
attcttggggtggagctgccccaggctcacaggcctttgccatggctcctgtgggaatgtgggatctggacctgctgctt

SEQ ID NO: 100180 - DNA, 80 bp, synthetic construct
  misc_feature 1..80: note = Artificially Synthesized Probe
  source 1..80: mol_type = other DNA
gcactttaaccctcacccccaggtcattctgtgtgcacgctgtctcagtcagctcaggctctgccgtaacgaatgccgta

SEQ ID NO: 100181 - DNA, 80 bp, synthetic construct; identical to SEQ ID NO: 35259
  misc_feature 1..80: note = Artificially Synthesized Probe
  source 1..80: mol_type = other DNA

SEQ ID NO: 100182 - DNA, 80 bp, synthetic construct
  misc_feature 1..80: note = Artificially Synthesized Probe
  source 1..80: mol_type = other DNA
ttccagcaacatgcatgacctgggggtacaaggattgcttcctaaacaatgataagcacacagccacctaatagtctgga

SEQ ID NO: 100183 - DNA, 80 bp, synthetic construct
  misc_feature 1..80: note = Artificially Synthesized Probe
  source 1..80: mol_type = other DNA
gatgtttgatcttgggggtgtgtcctggggcctgaggagcccacatgggggagaacaggacagggacagatggcaggaca

SEQ ID NO: 100184 - DNA, 80 bp, synthetic construct
  misc_feature 1..80: note = Artificially Synthesized Probe
  source 1..80: mol_type = other DNA
tctggggtcctatgttccaggaacctgtttactttcaaattttcctgtttcagttggactcaggagcatctggtgagcca

SEQ ID NO: 100185 - DNA, 80 bp, synthetic construct
  misc_feature 1..80: note = Artificially Synthesized Probe
  source 1..80: mol_type = other DNA
gtggcgggccatgcgggaatggcagcacacgagcaactttgaccggatgatcttctacgagatggcggaaaagtgagtct

SEQ ID NO: 100186 - DNA, 80 bp, synthetic construct
  misc_feature 1..80: note = Artificially Synthesized Probe
  source 1..80: mol_type = other DNA
cacctagagtgttctggggtctctgtcctggcctattgggaagcaccccctgcctggcctggggccatccctgccttgac

SEQ ID NO: 100187 - DNA, 80 bp, synthetic construct
  misc_feature 1..80: note = Artificially Synthesized Probe
  source 1..80: mol_type = other DNA
ccagcctggccagggagttgggttggggagacctgcacctgggacaccatgggacccatctctggcctgactgcctttgc

SEQ ID NO: 100188 - DNA, 80 bp, synthetic construct; identical to SEQ ID NO: 35260
  misc_feature 1..80: note = Artificially Synthesized Probe
  source 1..80: mol_type = other DNA

SEQ ID NO: 100189 - DNA, 80 bp, synthetic construct
  misc_feature 1..80: note = Artificially Synthesized Probe
  source 1..80: mol_type = other DNA
acagtgagggcctggacagcccacccgaggcactccctcccatccctgccctcggccgctgcctggtcctggggggaggg

SEQ ID NO: 100190 - DNA, 80 bp, synthetic construct
  misc_feature 1..80: note = Artificially Synthesized Probe
  source 1..80: mol_type = other DNA
ggacccccggcccctgaggtggtcaagcagccaggtatggcttcccacattcccacaggagccatggcaaaggccaaagg

SEQ ID NO: 100191 - DNA, 80 bp, synthetic construct
  misc_feature 1..80: note = Artificially Synthesized Probe
  source 1..80: mol_type = other DNA
acatatgctctgcccaggaagcagggatgagcggggagagtacacggcatattggtggctccaaacttcctcccaagcga

SEQ ID NO: 100192 - DNA, 80 bp, synthetic construct
  misc_feature 1..80: note = Artificially Synthesized Probe
  source 1..80: mol_type = other DNA
tccctctctgcctcagtgtaccttcccagcaaggccggccccaaggccccgactgcctgcctgccaccacccaggcccca

SEQ ID NO: 100193 - DNA, 80 bp, synthetic construct
  misc_feature 1..80: note = Artificially Synthesized Probe
  source 1..80: mol_type = other DNA
catcatggaggagctgctggggccttctctcggggccacgggggagcccgagaaacaacgggaagagggcgaagtgaagc

SEQ ID NO: 100194 - DNA, 80 bp, synthetic construct
  misc_feature 1..80: note = Artificially Synthesized Probe
  source 1..80: mol_type = other DNA
ggaattaagctctgttccttagctactcagcagtgtgtgtatttccaaggatttgagtgtctgtgtatgtgattgtgtgt

SEQ ID NO: 100195 - DNA, 80 bp, synthetic construct
  misc_feature 1..80: note = Artificially Synthesized Probe
  source 1..80: mol_type = other DNA
aggaattcaaatttgacactgccccggggacagttgatagggctgatgttgaggagggagggaagactggatgtccccaa

SEQ ID NO: 100196 - DNA, 80 bp, synthetic construct
  misc_feature 1..80: note = Artificially Synthesized Probe
  source 1..80: mol_type = other DNA
tgtctgtgtgtgtgtagctaccaggtctgtggtctgtgtctgtagctggtggtcaccatgatatgagacagccccaggag

SEQ ID NO: 100197 - DNA, 80 bp, synthetic construct
  misc_feature 1..80: note = Artificially Synthesized Probe
  source 1..80: mol_type = other DNA
cagatccacagatggatttcttggccctaagccaggagctggagcaggaggaaggactcacccttgcccaggtaccccag

SEQ ID NO: 100198 - DNA, 80 bp, synthetic construct
  misc_feature 1..80: note = Artificially Synthesized Probe
  source 1..80: mol_type = other DNA
caagctgtggtgaggcccaacgggaggcccggcagagccacaccctctctctttgacataaagcccagctgcctcaggct

SEQ ID NO: 100199 - DNA, 80 bp, synthetic construct
  misc_feature 1..80: note = Artificially Synthesized Probe
  source 1..80: mol_type = other DNA
tagtcgtggcacagcccggttggactcaagttcttctaagtttgcagctggccaaggagcagagagagacgtccctgacc

SEQ ID NO: 100200 - DNA, 80 bp, synthetic construct
  misc_feature 1..80: note = Artificially Synthesized Probe
  source 1..80: mol_type = other DNA
ggccaacctctcctccccaggaccacagacccacctgccctggcgtgggtaccaaggatgccttggatctccctggaggg

SEQ ID NO: 100201 - DNA, 80 bp, synthetic construct
  misc_feature 1..80: note = Artificially Synthesized Probe
  source 1..80: mol_type = other DNA
gaaaagtggggaccccagggaactcatcagtccccatctgctgagagaagaggcctcaacctagcaccttctcctgccaa

SEQ ID NO: 100202 - DNA, 80 bp, synthetic construct
  misc_feature 1..80: note = Artificially Synthesized Probe
  source 1..80: mol_type = other DNA
ggtctccaggaaggagaagaagcagcgttgtagccagtaggggcttctgagcaggctctctggggccgatccccaaggat

SEQ ID NO: 100203 - DNA, 80 bp, synthetic construct
  misc_feature 1..80: note = Artificially Synthesized Probe
  source 1..80: mol_type = other DNA
gagtgggggtgggaagcagtgtgttgggggcctcgtgtgtaagtgtgaataaatgtagttgtcttggaaaatgctcttgg

SEQ ID NO: 100204 - DNA, 80 bp, synthetic construct
  misc_feature 1..80: note = Artificially Synthesized Probe
  source 1..80: mol_type = other DNA
gggactgacagatgctgaggaagccctgatccctcccaccacccactcacaaggccctgcctgctttagggaggcttctt

SEQ ID NO: 100205 - DNA, 80 bp, synthetic construct
  misc_feature 1..80: note = Artificially Synthesized Probe
  source 1..80: mol_type = other DNA
caggaagagcgcgggcactgggctgaggggagacgttgaggtgaccatccacacaggtgtgtttgggatacgatgatggg

SEQ ID NO: 100206 - DNA, 80 bp, synthetic construct
  misc_feature 1..80: note = Artificially Synthesized Probe
  source 1..80: mol_type = other DNA
tctccatcagacaccccaaggttccatccgaagcaggcggagcaccgaacgcaccccggggtggtcagggacccccatcc

SEQ ID NO: 100207 - DNA, 80 bp, synthetic construct
  misc_feature 1..80: note = Artificially Synthesized Probe
  source 1..80: mol_type = other DNA
ttaaagttactctgatacttttccgttaccttcaacttgaaagcacaagaggttttgcaggcagagatatccatggtcca

SEQ ID NO: 100208 - DNA, 80 bp, synthetic construct; identical to SEQ ID NO: 35290
  misc_feature 1..80: note = Artificially Synthesized Probe
  source 1..80: mol_type = other DNA

SEQ ID NO: 100209 - DNA, 80 bp, synthetic construct
  misc_feature 1..80: note = Artificially Synthesized Probe
  source 1..80: mol_type = other DNA
catggatgctaacaccagatgtgcactccccacaaaaactggtgtttcccaaatggaactcattgtttcaaactagcata

SEQ ID NO: 100210 - DNA, 80 bp, synthetic construct
  misc_feature 1..80: note = Artificially Synthesized Probe
  source 1..80: mol_type = other DNA
ttttatgtaaagcacccagcacgtcggtaggtgtctgatgaatgttagtttccttcctatcttctgtctcctaagctagt

SEQ ID NO: 100211 - DNA, 80 bp, synthetic construct; identical to SEQ ID NO: 35280
  misc_feature 1..80: note = Artificially Synthesized Probe
  source 1..80: mol_type = other DNA

SEQ ID NO: 100212 - DNA, 80 bp, synthetic construct
  misc_feature 1..80: note = Artificially Synthesized Probe
  source 1..80: mol_type = other DNA
ctcccactagactttcaaagccctcccttttcttactcatcctccatccactatattcttactgtaaccttattttaaaa

SEQ ID NO: 100213 - DNA, 80 bp, synthetic construct; identical to SEQ ID NO: 35291
  misc_feature 1..80: note = Artificially Synthesized Probe
  source 1..80: mol_type = other DNA

SEQ ID NO: 100214 - DNA, 80 bp, synthetic construct
  misc_feature 1..80: note = Artificially Synthesized Probe
  source 1..80: mol_type = other DNA
tcatttttaatgataaaggcatttaacccattagatggttactttgcattgaggagctagtatgtgctagtgcggctata

SEQ ID NO: 100215 - DNA, 80 bp, synthetic construct
  misc_feature 1..80: note = Artificially Synthesized Probe
  source 1..80: mol_type = other DNA
gtagtcctagctacttgggaggctgaggtaggaggagtacttgagcctggtagatcaaggctgcagtgagctgtgattgg

SEQ ID NO: 100216 - DNA, 80 bp, synthetic construct
  misc_feature 1..80: note = Artificially Synthesized Probe
  source 1..80: mol_type = other DNA
attggtttatcttggaagctaaagggcattgctcatcctgaagatcagctgaccattgacaatcagccatgtcatccagg

SEQ ID NO: 100217 - DNA, 80 bp, synthetic construct; identical to SEQ ID NO: 35292
  misc_feature 1..80: note = Artificially Synthesized Probe
  source 1..80: mol_type = other DNA

SEQ ID NO: 100218 - DNA, 80 bp, synthetic construct
  misc_feature 1..80: note = Artificially Synthesized Probe
  source 1..80: mol_type = other DNA
ccgggtgcggtggctcacgcctgtaatcccagcaccttgggaggccgaggctggcggatcacaaggtcaagagatcgaga

SEQ ID NO: 100219 - DNA, 80 bp, synthetic construct
  misc_feature 1..80: note = Artificially Synthesized Probe
  source 1..80: mol_type = other DNA
gtgagccgagatcacgccactgcactccagcctagagacagagcgagactccgtctgaaaaaaagaaaaaaggccaggcc

SEQ ID NO: 100220 - DNA, 80 bp, synthetic construct
  misc_feature 1..80: note = Artificially Synthesized Probe
  source 1..80: mol_type = other DNA
gggaagctgctcacgcttcggattctcatccgtgaccaaaagggctgcccccaggggggcggaactgcctccgggcggtg

SEQ ID NO: 100221 - DNA, 80 bp, synthetic construct
  misc_feature 1..80: note = Artificially Synthesized Probe
  source 1..80: mol_type = other DNA
ctatttgggaggctgagacaggagaatcgcttgaacccaggaggcggaggttgaggtgagctgagatggcgccattgcac

SEQ ID NO: 100222 - DNA, 80 bp, synthetic construct; identical to SEQ ID NO: 35293
  misc_feature 1..80: note = Artificially Synthesized Probe
  source 1..80: mol_type = other DNA

SEQ ID NO: 100223 - DNA, 80 bp, synthetic construct
  misc_feature 1..80: note = Artificially Synthesized Probe
  source 1..80: mol_type = other DNA
tctaaaacaagcagtgttgaggggttttgggctccttggtcatgtgaagacttatcagtgaatttttgaattccaaattt

SEQ ID NO: 100224 - DNA, 80 bp, synthetic construct
  misc_feature 1..80: note = Artificially Synthesized Probe
  source 1..80: mol_type = other DNA
ccccaccagcaaccaagtaatcagttctacagtggacaatagctgtgtgtcctctaattatcagttcaattctgacactg

SEQ ID NO: 100225 - DNA, 80 bp, synthetic construct
  misc_feature 1..80: note = Artificially Synthesized Probe
  source 1..80: mol_type = other DNA
agtggcttgcagaactcagggaaacagtacttaccattactggtttattataaagggtattacaaaagccaggtgtggtg

SEQ ID NO: 100226 - DNA, 80 bp, synthetic construct; identical to SEQ ID NO: 35294
  misc_feature 1..80: note = Artificially Synthesized Probe
  source 1..80: mol_type = other DNA

SEQ ID NO: 100227 - DNA, 80 bp, synthetic construct
  misc_feature 1..80: note = Artificially Synthesized Probe
  source 1..80: mol_type = other DNA
ttcctgtccagagagggttggggctgaaaagttccaaccctctaatcctagctcccatcctgaagcttcctagggctgcc

SEQ ID NO: 100228 - DNA, 80 bp, synthetic construct
  misc_feature 1..80: note = Artificially Synthesized Probe
  source 1..80: mol_type = other DNA
cctaaaacatggtggggacacaagttgtttatgacaatacagtttttaaaacatactagagaatatagtaattgagtaat

SEQ ID NO: 100229 - DNA, 80 bp, synthetic construct
  misc_feature 1..80: note = Artificially Synthesized Probe
  source 1..80: mol_type = other DNA
gtccttccctgtgtcctctccttttctctggagaccactgtcctgacgtatgatcattacctgcttttatcattttatca

SEQ ID NO: 100230 - DNA, 80 bp, synthetic construct; identical to SEQ ID NO: 35295
  misc_feature 1..80: note = Artificially Synthesized Probe
  source 1..80: mol_type = other DNA

SEQ ID NO: 100231 - DNA, 80 bp, synthetic construct
  misc_feature 1..80: note = Artificially Synthesized Probe
  source 1..80: mol_type = other DNA
attacctgtaactgcatgtattcatagttcatcagttttggcttcatagcactgtagaaatataacatgagccatatatg

SEQ ID NO: 100232 - DNA, 80 bp, synthetic construct
  misc_feature 1..80: note = Artificially Synthesized Probe
  source 1..80: mol_type = other DNA
caggggtcgagggccaagatggcctctgcgcctaggggttgggagcggcgccgagcccctcgcgctcctcgggaagccac

SEQ ID NO: 100233 - DNA, 80 bp, synthetic construct
  misc_feature 1..80: note = Artificially Synthesized Probe
  source 1..80: mol_type = other DNA
ctgggattacaagcacacaccaccacgcccaactagtttttgtattttcagtagagatggggtttcaccaggatagccag

SEQ ID NO: 100234 - DNA, 80 bp, synthetic construct; identical to SEQ ID NO: 35296
  misc_feature 1..80: note = Artificially Synthesized Probe
  source 1..80: mol_type = other DNA

SEQ ID NO: 100235 - DNA, 80 bp, synthetic construct
  misc_feature 1..80: note = Artificially Synthesized Probe
  source 1..80: mol_type = other DNA
ggattacaggcatgtgtcaccatgcctggctaatttttgtatttttagtagagatagggttttaccatgttctccaggct

SEQ ID NO: 100236 - DNA, 80 bp, synthetic construct
  misc_feature 1..80: note = Artificially Synthesized Probe
  source 1..80: mol_type = other DNA
tgcaacctccacctcccgggttcaagcaattctcgtgcctcagcctcctgagtagctgggattacaggcgcatgccacca

SEQ ID NO: 100237 - DNA, 80 bp, synthetic construct
  misc_feature 1..80: note = Artificially Synthesized Probe
  source 1..80: mol_type = other DNA
aagtgtatgatagacccaagtggctagtggctgccacattggacagtatagctatggagtattccattgtatggatatat

SEQ ID NO: 100238 - DNA, 80 bp, synthetic construct
  misc_feature 1..80: note = Artificially Synthesized Probe
  source 1..80: mol_type = other DNA
aaggatgtttatagttaaactgtttacaatacccccaaacagagataacccaaatgtctgagcagaatgggttgtggcta

SEQ ID NO: 100239 - DNA, 80 bp, synthetic construct; identical to SEQ ID NO: 35297
  misc_feature 1..80: note = Artificially Synthesized Probe
  source 1..80: mol_type = other DNA

SEQ ID NO: 100240 - DNA, 80 bp, synthetic construct
  misc_feature 1..80: note = Artificially Synthesized Probe
  source 1..80: mol_type = other DNA
cccttttaggaggtagtgtaggctacccttatggaggaagtggctttggtagctacggaagtggctatggctatggctat

SEQ ID NO: 100241 - DNA, 80 bp, synthetic construct
  misc_feature 1..80: note = Artificially Synthesized Probe
  source 1..80: mol_type = other DNA
taatagtgagtgctatcctgggcatcatggtgtttattgccacaattgtctatataatgggagtgaacccaactgctcag

SEQ ID NO: 100242 - DNA, 80 bp, synthetic construct
  misc_feature 1..80: note = Artificially Synthesized Probe
  source 1..80: mol_type = other DNA
agcagaggccttcaacttgagatatgtgatagaatcactctggaaactcttaaaaaatattgatgacaaggctccacttc

SEQ ID NO: 100243 - DNA, 80 bp, synthetic construct
  misc_feature 1..80: note = Artificially Synthesized Probe
  source 1..80: mol_type = other DNA
aaaagagaaacgtttcccatgaaggcacttatggtgttttttggtgattcttggtgtgatagaaaactaggcgttcccaa

SEQ ID NO: 100244 - DNA, 80 bp, synthetic construct; identical to SEQ ID NO: 35298
  misc_feature 1..80: note = Artificially Synthesized Probe
  source 1..80: mol_type = other DNA

SEQ ID NO: 100245 - DNA, 80 bp, synthetic construct
  misc_feature 1..80: note = Artificially Synthesized Probe
  source 1..80: mol_type = other DNA
tgtttttaaggtttacccatgtcatagcttgtgccattctctcattcctttttattgctaatattccagtgtgtggataa

SEQ ID NO: 100246 - DNA, 80 bp, synthetic construct
  misc_feature 1..80: note = Artificially Synthesized Probe
  source 1..80: mol_type = other DNA
ggatcatgaggtcaggagattgtgaccatcctcgctaataaggtgaaaccccgtctctactaaaaatacaaaaaaaatta

SEQ ID NO: 100247 - DNA, 80 bp, synthetic construct
  misc_feature 1..80: note = Artificially Synthesized Probe
  source 1..80: mol_type = other DNA
catgctatagacattcttgtatacgtttttgtgtgaacctatgttttaatgatttcttgagttgggttatacctaggggt

SEQ ID NO: 100248 - DNA, 80 bp, synthetic construct; identical to SEQ ID NO: 35299
  misc_feature 1..80: note = Artificially Synthesized Probe
  source 1..80: mol_type = other DNA

SEQ ID NO: 100249 - DNA, 80 bp, synthetic construct
  misc_feature 1..80: note = Artificially Synthesized Probe
  source 1..80: mol_type = other DNA
ccattctcctgcctcagcctcctgaatagctgggactacaggcaccggccaccacgcccagctaattttttttttttttt

SEQ ID NO: 100250 - DNA, 80 bp, synthetic construct
  misc_feature 1..80: note = Artificially Synthesized Probe
  source 1..80: mol_type = other DNA
tgttgttttgtttttgagacagagtctcactgtcacccaggctggggtgcagtggtgcagtcacagctcactgcatcctt

SEQ ID NO: 100251 - DNA, 80 bp, synthetic construct
  misc_feature 1..80: note = Artificially Synthesized Probe
  source 1..80: mol_type = other DNA
cctgccttggccttccaaaccgctgggattataggcatcttttcactttcttgatggtgtcctttgcataaaagctttta

SEQ ID NO: 100252 - DNA, 80 bp, synthetic construct
  misc_feature 1..80: note = Artificially Synthesized Probe
  source 1..80: mol_type = other DNA
cctgtaatcccagctactcagtaggctgaggcaggagaatcacttgaacccaggaggtggaggttgcagtgagctgaaat

SEQ ID NO: 100253 - DNA, 80 bp, synthetic construct; identical to SEQ ID NO: 35300
  misc_feature 1..80: note = Artificially Synthesized Probe
  source 1..80: mol_type = other DNA

SEQ ID NO: 100254 - DNA, 80 bp, synthetic construct; identical to SEQ ID NO: 35281
  misc_feature 1..80: note = Artificially Synthesized Probe
  source 1..80: mol_type = other DNA

SEQ ID NO: 100255 - DNA, 80 bp, synthetic construct
  misc_feature 1..80: note = Artificially Synthesized Probe
  source 1..80: mol_type = other DNA
ccctcccatccgagtttcaggtgaattggtcaccgagggaggaggccgacacaccacacctacactcccgcgtccacctc

SEQ ID NO: 100256 - DNA, 80 bp, synthetic construct
  misc_feature 1..80: note = Artificially Synthesized Probe
  source 1..80: mol_type = other DNA
tttatttctgggctctcagttcagctgcattaatcatatgtcctaatgccagtaccatactgtcttgattactgtaactt

SEQ ID NO: 100257 - DNA, 80 bp, synthetic construct
  misc_feature 1..80: note = Artificially Synthesized Probe
  source 1..80: mol_type = other DNA
atctgtaggtcaattttggatgtattgtcatctttacaattacaagtcttctgattcatgaacgtaagattcttttgatt

SEQ ID NO: 100258 - DNA, 80 bp, synthetic construct
  misc_feature 1..80: note = Artificially Synthesized Probe
  source 1..80: mol_type = other DNA
gtttctgagttactgatcttttttcccttgtttttccttttttcttacactaactcaggagttcccattcctgaatgagt

SEQ ID NO: 100259 - DNA, 80 bp, synthetic construct; identical to SEQ ID NO: 35301
  misc_feature 1..80: note = Artificially Synthesized Probe
  source 1..80: mol_type = other DNA

SEQ ID NO: 100260 - DNA, 80 bp, synthetic construct
  misc_feature 1..80: note = Artificially Synthesized Probe
  source 1..80: mol_type = other DNA
ctttgttacagggccctttctagtagtatgcaagactcctgaaacagagaaacctgccagaccaaatcaatcattagtca

SEQ ID NO: 100261 - DNA, 80 bp, synthetic construct
  misc_feature 1..80: note = Artificially Synthesized Probe
  source 1..80: mol_type = other DNA
tgagagtagcatttttcaggccctttagaagtataccaatgattgagttactttactggccattctcgtaggtgcacaaa

SEQ ID NO: 100262 - DNA, 80 bp, synthetic construct; identical to SEQ ID NO: 35302
  misc_feature 1..80: note = Artificially Synthesized Probe
  source 1..80: mol_type = other DNA

SEQ ID NO: 100263 - DNA, 80 bp, synthetic construct
  misc_feature 1..80: note = Artificially Synthesized Probe
  source 1..80: mol_type = other DNA
tattgtggcttttgctttaataattttctttgctgtgaaaactcgaagaaagatggacaggtatgacaagtccaatattt

SEQ ID NO: 100264 - DNA, 80 bp, synthetic construct
  misc_feature 1..80: note = Artificially Synthesized Probe
  source 1..80: mol_type = other DNA
tgcaaaggttgttgcattggtttttactcagaattttaagaggatgggctaagtggaaatggttttactaaaaggtgaaa

SEQ ID NO: 100265 - DNA, 80 bp, synthetic construct
  misc_feature 1..80: note = Artificially Synthesized Probe
  source 1..80: mol_type = other DNA
tttcttagtggtgctttaaaatagacatcttaagtgtgtgtgggaggcagagatatttcctcaaacaaagcaacactttt

SEQ ID NO: 100266 - DNA, 80 bp, synthetic construct
  misc_feature 1..80: note = Artificially Synthesized Probe
  source 1..80: mol_type = other DNA
ttgccaaaggtgctctcgtgggtcaagattggcaagagtgtttttggaatagcaggtggcaggccttttaaacttttttt

SEQ ID NO: 100267 - DNA, 80 bp, synthetic construct; identical to SEQ ID NO: 35303
  misc_feature 1..80: note = Artificially Synthesized Probe
  source 1..80: mol_type = other DNA

SEQ ID NO: 100268 - DNA, 80 bp, synthetic construct
  misc_feature 1..80: note = Artificially Synthesized Probe
  source 1..80: mol_type = other DNA
catggcaaccatccgatttctcaatcctttccccgcctttcccccctttctattccacaaaaccgccattgtcatcatgg

SEQ ID NO: 100269 - DNA, 80 bp, synthetic construct
  misc_feature 1..80: note = Artificially Synthesized Probe
  source 1..80: mol_type = other DNA
gacggggcggctggccgggcagaggggctcctcacttcccagtaggggcggccgggcagaggcgcccctaacctcccgga

SEQ ID NO: 100270 - DNA, 80 bp, synthetic construct
  misc_feature 1..80: note = Artificially Synthesized Probe
  source 1..80: mol_type = other DNA
ctacctccctcccagacggggcggctggccgggcagaggggctcctcacttcccagtaggggcggccgggcagaggcgcc

SEQ ID NO: 100271 - DNA, 80 bp, synthetic construct; identical to SEQ ID NO: 35304
  misc_feature 1..80: note = Artificially Synthesized Probe
  source 1..80: mol_type = other DNA

SEQ ID NO: 100272 - DNA, 80 bp, synthetic construct
  misc_feature 1..80: note = Artificially Synthesized Probe
  source 1..80: mol_type = other DNA
tgggcggccgggcagagacgctcctcacttcctagatggcatgggggccgggaagaggcgctcctcacttcctagatggg

SEQ ID NO: 100273 - DNA, 80 bp, synthetic construct
  misc_feature 1..80: note = Artificially Synthesized Probe
  source 1..80: mol_type = other DNA
aaggcaggcggctgggaggtggaggttgtagcgagccgagatcacgccactgcactccagcctgggcaccattgagcact

SEQ ID NO: 100274 - DNA, 80 bp, synthetic construct
  misc_feature 1..80: note = Artificially Synthesized Probe
  source 1..80: mol_type = other DNA
atcgcaggcactcggcaggctgaggcaggagaatcaggcagggaggctgcagtgagccgagatggcagcagtacagtcca

SEQ ID NO: 100275 - DNA, 80 bp, synthetic construct; identical to SEQ ID NO: 35305
  misc_feature 1..80: note = Artificially Synthesized Probe
  source 1..80: mol_type = other DNA

SEQ ID NO: 100276 - DNA, 80 bp, synthetic construct
  misc_feature 1..80: note = Artificially Synthesized Probe
  source 1..80: mol_type = other DNA
ctgtggtaaaagcattctgtattttctcatttaattatcccaacaactctaaaaggcaggccttagtagaactccatttt

SEQ ID NO: 100277 - DNA, 80 bp, synthetic construct
  misc_feature 1..80: note = Artificially Synthesized Probe
  source 1..80: mol_type = other DNA
gaacaacctaggcaacataatgggaccctgtctctacaaaaaataaaaaaaaaattagctgggcatgatgatgtatgcct

SEQ ID NO: 100278 - DNA, 80 bp, synthetic construct
  misc_feature 1..80: note = Artificially Synthesized Probe
  source 1..80: mol_type = other DNA
actttttctaagaaatcctgttagggtcctgttagaagctacctcagaaactgacatcacagggttctttgagcagattg

SEQ ID NO: 100279 - DNA, 80 bp, synthetic construct
  misc_feature 1..80: note = Artificially Synthesized Probe
  source 1..80: mol_type = other DNA
ttctggctctgtcgttcaggctggagtacagtggtgcaatattggctcactgcaacctccgcctcccgggttcaagagat

SEQ ID NO: 100280 - DNA, 80 bp, synthetic construct
  misc_feature 1..80: note = Artificially Synthesized Probe
  source 1..80: mol_type = other DNA
tgctgggattataggcaagacaatatcttgaaggcttagctctaacattctgtaagtctgatttttaaggaaatctagga

SEQ ID NO: 100281 - DNA, 80 bp, synthetic construct; identical to SEQ ID NO: 35306
  misc_feature 1..80: note = Artificially Synthesized Probe
  source 1..80: mol_type = other DNA

SEQ ID NO: 100282 - DNA, 80 bp, synthetic construct
  misc_feature 1..80: note = Artificially Synthesized Probe
  source 1..80: mol_type = other DNA
accaatgccagtaatattagagtcccagtgaactttggcctctcatctgattttactgtcatgaaggtttaatcagttct

SEQ ID NO: 100283 - DNA, 80 bp, synthetic construct
  misc_feature 1..80: note = Artificially Synthesized Probe
  source 1..80: mol_type = other DNA
cctctggaaatttgatagcctgtgggttgttgcatgtggacttcattgtttctctctagtaacaagtattttcattgtat

SEQ ID NO: 100284 - DNA, 80 bp, synthetic construct; identical to SEQ ID NO: 35307
  misc_feature 1..80: note = Artificially Synthesized Probe
  source 1..80: mol_type = other DNA

SEQ ID NO: 100285 - DNA, 80 bp, synthetic construct
  misc_feature 1..80: note = Artificially Synthesized Probe
  source 1..80: mol_type = other DNA
ctaaactgttcacagtggagtagattagggagttttcttccttttggtcatgagaaattaatatcaaaacaatctctact

SEQ ID NO: 100286 - DNA, 80 bp, synthetic construct
  misc_feature 1..80: note = Artificially Synthesized Probe
  source 1..80: mol_type = other DNA
ttgcgaggccaaggaggatcacttgagcccaggagtttaagaccatctggggcaagaaggcaagaccctatctctacaaa

SEQ ID NO: 100287 - DNA, 80 bp, synthetic construct
  misc_feature 1..80: note = Artificially Synthesized Probe
  source 1..80: mol_type = other DNA
gcctgatacaagatttcccgcattttgcttgatatcaaggtaaaattcttgttttcttctaaaggtagtgttggaattac

SEQ ID NO: 100288 - DNA, 80 bp, synthetic construct
  misc_feature 1..80: note = Artificially Synthesized Probe
  source 1..80: mol_type = other DNA
caaaaaagcaaaacaaaaaagtactacagtaacaattagctactcaatattagtttaatccctccctacagattggggtc

SEQ ID NO: 100289 - DNA, 80 bp, synthetic construct; identical to SEQ ID NO: 35308
  misc_feature 1..80: note = Artificially Synthesized Probe
  source 1..80: mol_type = other DNA

SEQ ID NO: 100290 - DNA, 80 bp, synthetic construct
  misc_feature 1..80: note = Artificially Synthesized Probe
  source 1..80: mol_type = other DNA
ggtctttgttttgttctgccctcaaatttcagatctgatttttttaattaaatattttatttggttaagtatggatgatt

SEQ ID NO: 100291 - DNA, 80 bp, synthetic construct
  misc_feature 1..80: note = Artificially Synthesized Probe
  source 1..80: mol_type = other DNA
caatactgttttccatctatgtttagttgaaaaaaatccacgtatatgtggacccatgcagttcaaacctggttgttcaa

SEQ ID NO: 100292 - DNA, 80 bp, synthetic construct
  misc_feature 1..80: note = Artificially Synthesized Probe
  source 1..80: mol_type = other DNA
tacaggtgcctgccaccatgtgcagctactttttgtatgtttagtagagatggggttttgtcatgttggccaggctggtc

SEQ ID NO: 100293 - DNA, 80 bp, synthetic construct
  misc_feature 1..80: note = Artificially Synthesized Probe
  source 1..80: mol_type = other DNA
gttgcccaggctggagcgcagtggcactatctcggctcactgcaacctctgtctcctgggttcaagcgattctcctgcct

SEQ ID NO: 100294 - DNA, 80 bp, synthetic construct; identical to SEQ ID NO: 35309
  misc_feature 1..80: note = Artificially Synthesized Probe
  source 1..80: mol_type = other DNA

SEQ ID NO: 100295 - DNA, 80 bp, synthetic construct
  misc_feature 1..80: note = Artificially Synthesized Probe
  source 1..80: mol_type = other DNA
aatatttgtaaaatacttagtataataccttgcacatggtaaataatgtaatgttgttacttttaataatttggtgggat

SEQ ID NO: 100296 - DNA, 80 bp, synthetic construct
  misc_feature 1..80: note = Artificially Synthesized Probe
  source 1..80: mol_type = other DNA
agctgggattacaggcacatgccaccacgtctagctaatttttgtacttttagtagagatggggtttcaccacgttggtc

SEQ ID NO: 100297 - DNA, 80 bp, synthetic construct; identical to SEQ ID NO: 35310
  misc_feature 1..80: note = Artificially Synthesized Probe
  source 1..80: mol_type = other DNA

SEQ ID NO: 100298 - DNA, 80 bp, synthetic construct
  misc_feature 1..80: note = Artificially Synthesized Probe
  source 1..80: mol_type = other DNA
cttgctagtgtttgtgtaagataaatttctagaactagtcattgagtgtgcacacttaaaattttactaggttagctggg

SEQ ID NO: 100299 - DNA, 80 bp, synthetic construct; identical to SEQ ID NO: 35282
  misc_feature 1..80: note = Artificially Synthesized Probe
  source 1..80: mol_type = other DNA

SEQ ID NO: 100300 - DNA, 80 bp, synthetic construct
  misc_feature 1..80: note = Artificially Synthesized Probe
  source 1..80: mol_type = other DNA
ggattaccaagttgcattgtttttgaaagctctgcagattctactaaccctgatggtatatgaaattgctcagttcccaa

SEQ ID NO: 100301 - DNA, 80 bp, synthetic construct
  misc_feature 1..80: note = Artificially Synthesized Probe
  source 1..80: mol_type = other DNA
cgttctttcctgactagagttttttatattatggatattaatattttgtcttattgatgataacttctcccacattattg

SEQ ID NO: 100302 - DNA, 80 bp, synthetic construct
  misc_feature 1..80: note = Artificially Synthesized Probe
  source 1..80: mol_type = other DNA
tcttatttttttatgtacttatatttcctgtctctttatggcctctacatatctttgttcctagagagttttacaccccc

SEQ ID NO: 100303 - DNA, 80 bp, synthetic construct; identical to SEQ ID NO: 35311
  misc_feature 1..80: note = Artificially Synthesized Probe
  source 1..80: mol_type = other DNA

SEQ ID NO: 100304 - DNA, 80 bp, synthetic construct
  misc_feature 1..80: note = Artificially Synthesized Probe
  source 1..80: mol_type = other DNA
ttgtttttaacatccaggatatacactggaccaccccccttgttttttaagataaatgtttcattttagaatagttttat

SEQ ID NO: 100305 - DNA, 80 bp, synthetic construct
  misc_feature 1..80: note = Artificially Synthesized Probe
  source 1..80: mol_type = other DNA
gctgggctcaagcagtcctcccacctcagcctcccaagtagctgggactacagacatgtgccgctatgcctggctgactt

SEQ ID NO: 100306 - DNA, 80 bp, synthetic construct
  misc_feature 1..80: note = Artificially Synthesized Probe
  source 1..80: mol_type = other DNA
acattagtgtggtgcatttgtcaccactaatggaccaatattgatatttactatttaccaaatgtcataactttattcat

SEQ ID NO: 100307 - DNA, 80 bp, synthetic construct; identical to SEQ ID NO: 35312
  misc_feature 1..80: note = Artificially Synthesized Probe
  source 1..80: mol_type = other DNA

SEQ ID NO: 100308 - DNA, 80 bp, synthetic construct
  misc_feature 1..80: note = Artificially Synthesized Probe
  source 1..80: mol_type = other DNA
aagccaggattagaaccctaactgagcatttccatgccagtagattcttaggaaaaaccttaatgattaccttttttttt

SEQ ID NO: 100309 - DNA, 80 bp, synthetic construct
  misc_feature 1..80: note = Artificially Synthesized Probe
  source 1..80: mol_type = other DNA
tgattctcagactgttctgtcttctttttctccctttctcttagactctacgcacttaattacatttgacaaactgaagt

SEQ ID NO: 100310 - DNA, 80 bp, synthetic construct
  misc_feature 1..80: note = Artificially Synthesized Probe
  source 1..80: mol_type = other DNA
agctaatttttgtatttttagtagacatggggttttgccacgttggccaggctggtctcaaactcctgacctcaggtgat

SEQ ID NO: 100311 - DNA, 80 bp, synthetic construct
  misc_feature 1..80: note = Artificially Synthesized Probe
  source 1..80: mol_type = other DNA
tcaggagtttgagaccatcctggccaacatggtgaaaccctgtctctactgaaaatacaaaaattagctgggcctggtgg

SEQ ID NO: 100312 - DNA, 80 bp, synthetic construct; identical to SEQ ID NO: 35313
  misc_feature 1..80: note = Artificially Synthesized Probe
  source 1..80: mol_type = other DNA

SEQ ID NO: 100313 - DNA, 80 bp, synthetic construct
  misc_feature 1..80: note = Artificially Synthesized Probe
  source 1..80: mol_type = other DNA
ctcatctacttgcttctacctgcccccagaggtagcctatctagaattttgagtttattataatttgctttttaagtttt

SEQ ID NO: 100314 - DNA, 80 bp, synthetic construct
  misc_feature 1..80: note = Artificially Synthesized Probe
  source 1..80: mol_type = other DNA
gattaatacatgttgatggagttgaagtccatctgatgtcgccattgtctggtcctctattttatcacatttcacagcag

SEQ ID NO: 100315 - DNA, 80 bp, synthetic construct
  misc_feature 1..80: note = Artificially Synthesized Probe
  source 1..80: mol_type = other DNA
cccgggttcaagcaattttcccacttcagcctcccaagtagctgggattataggcgtatgccaccacacctggctaattt

SEQ ID NO: 100316 - DNA, 80 bp, synthetic construct; identical to SEQ ID NO: 35314
  misc_feature 1..80: note = Artificially Synthesized Probe
  source 1..80: mol_type = other DNA

SEQ ID NO: 100317 - DNA, 80 bp, synthetic construct
  misc_feature 1..80: note = Artificially Synthesized Probe
  source 1..80: mol_type = other DNA
accacacccagctaattttttgtatttttagtctagacggggtttcgccatgttagccaggatggtctcgatctcctgac

SEQ ID NO: 100318 - DNA, 80 bp, synthetic construct
  misc_feature 1..80: note = Artificially Synthesized Probe
  source 1..80: mol_type = other DNA
tccagtcaaacgtgtaaaagtgtatcagtgttgtcttggtttatatttcttctgaacatgtcatgtttattggcctaatg

SEQ ID NO: 100319 - DNA, 80 bp, synthetic construct; identical to SEQ ID NO: 35315
  misc_feature 1..80: note = Artificially Synthesized Probe
  source 1..80: mol_type = other DNA

SEQ ID NO: 100320 - DNA, 80 bp, synthetic construct
  misc_feature 1..80: note = Artificially Synthesized Probe
  source 1..80: mol_type = other DNA
tgatggtcaaaatagacatttgatgtctgggatatgggcattccagatgcggtggagatgatacctatattttaggtatg

SEQ ID NO: 100321 - DNA, 80 bp, synthetic construct
  misc_feature 1..80: note = Artificially Synthesized Probe
  source 1..80: mol_type = other DNA
aaaaccaggcactgtcaggtttgagcatcactgtaggcaaaagagacccttaacttgtaggtctttacgaggtacagtgg

SEQ ID NO: 100322 - DNA, 80 bp, synthetic construct
  misc_feature 1..80: note = Artificially Synthesized Probe
  source 1..80: mol_type = other DNA
tgtagctggtctggagaccatatttcgagaaccactattttatagattcaagctgcaaccattaaactgtaagcaagtta

SEQ ID NO: 100323 - DNA, 80 bp, synthetic construct
  misc_feature 1..80: note = Artificially Synthesized Probe
  source 1..80: mol_type = other DNA
taacagtcttcacagggatttttgtttaagtaaggggccttgaatgagatcattggtaagcctcactgagtacaaggttt

SEQ ID NO: 100324 - DNA, 80 bp, synthetic construct; identical to SEQ ID NO: 35316
  misc_feature 1..80: note = Artificially Synthesized Probe
  source 1..80: mol_type = other DNA

SEQ ID NO: 100325 - DNA, 80 bp, synthetic construct
  misc_feature 1..80: note = Artificially Synthesized Probe
  source 1..80: mol_type = other DNA
ggagacttaacatttaaatgtattacaattaggccctgtacatcaaaaggtgaagcaggggccaggcgcggtggctcaca

SEQ ID NO: 100326 - DNA, 80 bp, synthetic construct
  misc_feature 1..80: note = Artificially Synthesized Probe
  source 1..80: mol_type = other DNA
tgaggcaggggaattgcttgaacccaggagacggtggttgcagtgagccgacacagtgccactgcactccagcctgggta

SEQ ID NO: 100327 - DNA, 80 bp, synthetic construct
  misc_feature 1..80: note = Artificially Synthesized Probe
  source 1..80: mol_type = other DNA
ggcttgtggaacaggggtcagtcagtatctgttggtggatgagctgcagttgttttctttttgtatttttttgtaagttt

SEQ ID NO: 100328 - DNA, 80 bp, synthetic construct; identical to SEQ ID NO: 35317
  misc_feature 1..80: note = Artificially Synthesized Probe
  source 1..80: mol_type = other DNA

SEQ ID NO: 100329 - DNA, 80 bp, synthetic construct
  misc_feature 1..80: note = Artificially Synthesized Probe
  source 1..80: mol_type = other DNA
cttaggattttatttatagttctcattggtctatattattactgtttctttggacagcgtgcagttgggtaggggcaatt

SEQ ID NO: 100330 - DNA, 80 bp, synthetic construct
  misc_feature 1..80: note = Artificially Synthesized Probe
  source 1..80: mol_type = other DNA
gtgtaaaagatctgggctttctagacaggaaattgcaagatcaatgtcctttttggattgacacctttattgtagacagc

SEQ ID NO: 100331 - DNA, 80 bp, synthetic construct
  misc_feature 1..80: note = Artificially Synthesized Probe
  source 1..80: mol_type = other DNA
caaaggtggagaaaagtctaagagaactttccagtcgattttgaagcttttatttgggggagtatctgagggtgtaaaat

SEQ ID NO: 100332 - DNA, 80 bp, synthetic construct
  misc_feature 1..80: note = Artificially Synthesized Probe
  source 1..80: mol_type = other DNA
aatcaccaagctgggaaaatcctactctttcctttttgagagaggtgttcctaaacgctgacctaaacaaaggcatgaaa

SEQ ID NO: 100333 - DNA, 80 bp, synthetic construct; identical to SEQ ID NO: 35318
  misc_feature 1..80: note = Artificially Synthesized Probe
  source 1..80: mol_type = other DNA

SEQ ID NO: 100334 - DNA, 80 bp, synthetic construct
  misc_feature 1..80: note = Artificially Synthesized Probe
  source 1..80: mol_type = other DNA
agtcgggtttgcctggcacatgctgaatactcaacaggtgaacttccctttccttcttagaggtagatggcttttgcaca

SEQ ID NO: 100335 - DNA, 80 bp, synthetic construct
  misc_feature 1..80: note = Artificially Synthesized Probe
  source 1..80: mol_type = other DNA
gtggggataagtgttttccccgatctttgttttggaggagagaagattttctttcaaagtgacctagaacattccttctt

SEQ ID NO: 100336 - DNA, 80 bp, synthetic construct
  misc_feature 1..80: note = Artificially Synthesized Probe
  source 1..80: mol_type = other DNA
tcctgttggcatcccacaggggtttaggatgttttcattaactctccaaggagtgttagatgttgtttgtcacaaagaat

SEQ ID NO: 100337 - DNA, 80 bp, synthetic construct; identical to SEQ ID NO: 35319
  misc_feature 1..80: note = Artificially Synthesized Probe
  source 1..80: mol_type = other DNA

SEQ ID NO: 100338 - DNA, 80 bp, synthetic construct
  misc_feature 1..80: note = Artificially Synthesized Probe
  source 1..80: mol_type = other DNA
ggattacgggcgtgcgtcaccatgcctggctaatttttgtatttttagtagagatggggtttcaccttgtttgccaggct

SEQ ID NO: 100339 - DNA, 80 bp, synthetic construct
  misc_feature 1..80: note = Artificially Synthesized Probe
  source 1..80: mol_type = other DNA
cttaagggaaaattgttacaaagacactttgctgtttagaattatgcctagctggttttctcaagtactcattctttaaa

SEQ ID NO: 100340 - DNA, 80 bp, synthetic construct
  misc_feature 1..80: note = Artificially Synthesized Probe
  source 1..80: mol_type = other DNA
ttcctttttaagagaactttaactacatcattgagttttatgagctgactggggcattctgtcagtaataacagtgaaat

SEQ ID NO: 100341 - DNA, 80 bp, synthetic construct; identical to SEQ ID NO: 35283
  misc_feature 1..80: note = Artificially Synthesized Probe
  source 1..80: mol_type = other DNA

SEQ ID NO: 100342 - DNA, 80 bp, synthetic construct; identical to SEQ ID NO: 35320
  misc_feature 1..80: note = Artificially Synthesized Probe
  source 1..80: mol_type = other DNA

SEQ ID NO: 100343 - DNA, 80 bp, synthetic construct
  misc_feature 1..80: note = Artificially Synthesized Probe
  source 1..80: mol_type = other DNA
aaatggaatgtttcatgaatttgggtgctgttcttgcccaaaggccatgctaatctttcctgtattgttcaactttatat

SEQ ID NO: 100344 - DNA, 80 bp, synthetic construct
  misc_feature 1..80: note = Artificially Synthesized Probe
  source 1..80: mol_type = other DNA
atacttgggtatacagtgtagaaatagaacagttatcaatgaggtaaactttatgcagcaaacttggggctcccgatttg

SEQ ID NO: 100345 - DNA, 80 bp, synthetic construct
  misc_feature 1..80: note = Artificially Synthesized Probe
  source 1..80: mol_type = other DNA
cctacaaaatgatctgtcacttcaatatttggctaattgtaagcagtcagatagtggtggcttaagcccagtccgctgcc

SEQ ID NO: 100346 - DNA, 80 bp, synthetic construct; identical to SEQ ID NO: 35321
  misc_feature 1..80: note = Artificially Synthesized Probe
  source 1..80: mol_type = other DNA

SEQ ID NO: 100347 - DNA, 80 bp, synthetic construct
  misc_feature 1..80: note = Artificially Synthesized Probe
  source 1..80: mol_type = other DNA
aagcatttgcctgtgaagcttggcaacttctgttgtaaacttttgttgtaaggaattctgtgggaaccaagagtgcttcc

SEQ ID NO: 100348 - DNA, 80 bp, synthetic construct
  misc_feature 1..80: note = Artificially Synthesized Probe
  source 1..80: mol_type = other DNA
tgttaaacaatcaagaatacccctatgtactttgaggggtaggtaaatatctttctgtatgtgatactgcctggatacgt

SEQ ID NO: 100349 - DNA, 80 bp, synthetic construct
  misc_feature 1..80: note = Artificially Synthesized Probe
  source 1..80: mol_type = other DNA
aatagcaaaataatccaaataaaggtcttctgccacctccaaattcttgtaaaaattatttgatcagatcaagtggcctt

SEQ ID NO: 100350 - DNA, 80 bp, synthetic construct
  misc_feature 1..80: note = Artificially Synthesized Probe
  source 1..80: mol_type = other DNA
tttatagaatttgtggttggcagacctggggtgagcccagataatctgatgctattggttgtgtttgtatgtatttgaga

SEQ ID NO: 100351 - DNA, 80 bp, synthetic construct
  misc_feature 1..80: note = Artificially Synthesized Probe
  source 1..80: mol_type = other DNA
ccccttccacgttggtgcgcatgcccgggggcagggccggttgtagggaggagggaaaggagagggagaagggggaggag

SEQ ID NO: 100352 - DNA, 80 bp, synthetic construct; identical to SEQ ID NO: 35322
  misc_feature 1..80: note = Artificially Synthesized Probe
  source 1..80: mol_type = other DNA

SEQ ID NO: 100353 - DNA, 80 bp, synthetic construct
  misc_feature 1..80: note = Artificially Synthesized Probe
  source 1..80: mol_type = other DNA
aatttaaaggctattaggtaaaatgtcaagagtgttggagctgttacataaaacataaaatctaacagtggccgggcgtg

SEQ ID NO: 100354 - DNA, 80 bp, synthetic construct
  misc_feature 1..80: note = Artificially Synthesized Probe
  source 1..80: mol_type = other DNA
atcctcccgtctcggccccccaaagtgctgggattacaggcgtgagccaccgcgcccggccacaacttaaactttttaaa

SEQ ID NO: 100355 - DNA, 80 bp, synthetic construct
  misc_feature 1..80: note = Artificially Synthesized Probe
  source 1..80: mol_type = other DNA
actcgggaggctgaggcaggagaatcacttgaacccaggaggcggaggttacagtgagccgagatcgcaccactgcactc

SEQ ID NO: 100356 - DNA, 80 bp, synthetic construct
  misc_feature 1..80: note = Artificially Synthesized Probe
  source 1..80: mol_type = other DNA
acacacacacacatatatatatacacacacacacacacatatatatacatacagtgttgggagtctagttggctgtgctt

SEQ ID NO: 100357 - DNA, 80 bp, synthetic construct; identical to SEQ ID NO: 35323
  misc_feature 1..80: note = Artificially Synthesized Probe
  source 1..80: mol_type = other DNA

SEQ ID NO: 100358 - DNA, 80 bp, synthetic construct
  misc_feature 1..80: note = Artificially Synthesized Probe
  source 1..80: mol_type = other DNA
ctctccgggcctgatagcttttaagaaagggcttacattcctcagataagaagaacctgtatatgtatttcacattaagg

SEQ ID NO: 100359 - DNA, 80 bp, synthetic construct
  misc_feature 1..80: note = Artificially Synthesized Probe
  source 1..80: mol_type = other DNA
taattttttttgtgtgtgtatttttagtagaaacggggtttcgctgtgtcagccaggatggtctcgatctcctgacctca

SEQ ID NO: 100360 - DNA, 80 bp, synthetic construct
  misc_feature 1..80: note = Artificially Synthesized Probe
  source 1..80: mol_type = other DNA
ttgtgtgatatattgtgtaggttattagtaatagagccatagagaacgtacattaagggagaataaacaaatctcttatt

SEQ ID NO: 100361 - DNA, 80 bp, synthetic construct; identical to SEQ ID NO: 35324
  misc_feature 1..80: note = Artificially Synthesized Probe
  source 1..80: mol_type = other DNA

SEQ ID NO: 100362 - DNA, 80 bp, synthetic construct
  misc_feature 1..80: note = Artificially Synthesized Probe
  source 1..80: mol_type = other DNA
aactattaacctgtaatgattgcctttttattattagtgttaatagtatttaatgggccacataaatattagataatgta

SEQ ID NO: 100363 - DNA, 80 bp, synthetic construct
  misc_feature 1..80: note = Artificially Synthesized Probe
  source 1..80: mol_type = other DNA
ctcttccaatggcaaagtgaatgacaagcggttttatccagagtcttcctataaatccacgccgtaagtagcatctctct

SEQ ID NO: 100364 - DNA, 80 bp, synthetic construct
  misc_feature 1..80: note = Artificially Synthesized Probe
  source 1..80: mol_type = other DNA
gaagaccaggatgaggagggtggggttctatttcccttctaagttgaaaatgcttcttttcacttacttgtttaattgaa

SEQ ID NO: 100365 - DNA, 80 bp, synthetic construct
  misc_feature 1..80: note = Artificially Synthesized Probe
  source 1..80: mol_type = other DNA
ttttttaagatagataacggagtcttactctgttgcccagcctgatcttgaagttctgggctcaaacaatccctctgcct

SEQ ID NO: 100366 - DNA, 80 bp, synthetic construct; identical to SEQ ID NO: 35325
  misc_feature 1..80: note = Artificially Synthesized Probe
  source 1..80: mol_type = other DNA

SEQ ID NO: 100367 - DNA, 80 bp, synthetic construct
  misc_feature 1..80: note = Artificially Synthesized Probe
  source 1..80: mol_type = other DNA
aagctcaattctaattccacctaatgactagtgagagaagactattggagataattggtatggacggggatgtaattttt

SEQ ID NO: 100368 - DNA, 80 bp, synthetic construct
  misc_feature 1..80: note = Artificially Synthesized Probe
  source 1..80: mol_type = other DNA
tgtggtatagcttcttgcttttacgctacaaatgcagacagcatgttaatataccaaatactctaggcagcggtaataca

SEQ ID NO: 100369 - DNA, 80 bp, synthetic construct
  misc_feature 1..80: note = Artificially Synthesized Probe
  source 1..80: mol_type = other DNA
caacatggagaaaccccatctctactaaaaatagccaggcgtggtggcgcatgcctgtaatcccagctacttgggaaggc

SEQ ID NO: 100370 - DNA, 80 bp, synthetic construct; identical to SEQ ID NO: 35326
  misc_feature 1..80: note = Artificially Synthesized Probe
  source 1..80: mol_type = other DNA

SEQ ID NO: 100371 - DNA, 80 bp, synthetic construct
  misc_feature 1..80: note = Artificially Synthesized Probe
  source 1..80: mol_type = other DNA
tccccacactttgggaggcccaggtggacggatcacctgaggtcaggagttcgagaccagcctggccaaaatggcaaaac

SEQ ID NO: 100372 - DNA, 80 bp, synthetic construct
  misc_feature 1..80: note = Artificially Synthesized Probe
  source 1..80: mol_type = other DNA
tgaaactctgtctcaaaaaaaaaaacaaaaggccggacgcggtggctcacccctgtaatcccagcactttgggaggctga

SEQ ID NO: 100373 - DNA, 80 bp, synthetic construct; identical to SEQ ID NO: 35327
  misc_feature 1..80: note = Artificially Synthesized Probe
  source 1..80: mol_type = other DNA

SEQ ID NO: 100374 - DNA, 80 bp, synthetic construct
  misc_feature 1..80: note = Artificially Synthesized Probe
  source 1..80: mol_type = other DNA
ctacattgtatagatatatagatatagagaagtattttccttattctataagcttttttttttttttttttttttggtag

SEQ ID NO: 100375 - DNA, 80 bp, synthetic construct
  misc_feature 1..80: note = Artificially Synthesized Probe
  source 1..80: mol_type = other DNA
ccatgcccagctatttttttctatttttttttgtagagacagggtcttgctatgttgtccaggctggtctcaaactcctg

SEQ ID NO: 100376 - DNA, 80 bp, synthetic construct
  misc_feature 1..80: note = Artificially Synthesized Probe
  source 1..80: mol_type = other DNA
tttcagattaacatatttgacaaggatctatctgctgcttcccttttgcccccgactctaatttagctgtctgacttctg

SEQ ID NO: 100377 - DNA, 80 bp, synthetic construct
  misc_feature 1..80: note = Artificially Synthesized Probe
  source 1..80: mol_type = other DNA
attttagtttctacactttattgttaaaaactaagatacagactgggtgcagtggcttatgcctgtaatcccaccacttt

SEQ ID NO: 100378 - DNA, 80 bp, synthetic construct; identical to SEQ ID NO: 35328
  misc_feature 1..80: note = Artificially Synthesized Probe
  source 1..80: mol_type = other DNA

SEQ ID NO: 100379 - DNA, 80 bp, synthetic construct
  misc_feature 1..80: note = Artificially Synthesized Probe
  source 1..80: mol_type = other DNA
ttatatactgtacataattgcatttgccgtatacttttattagtcccttattgactgaaatgtctttatgactttgtgac

SEQ ID NO: 100380 - DNA, 80 bp, synthetic construct
  misc_feature 1..80: note = Artificially Synthesized Probe
  source 1..80: mol_type = other DNA
aagtgtttttttgtttgttttgtttttgagacggagtctcactccgttacccaggctggagtgcagtagtgcgatctcag

SEQ ID NO: 100381 - DNA, 80 bp, synthetic construct
  misc_feature 1..80: note = Artificially Synthesized Probe
  source 1..80: mol_type = other DNA
ggggtttcatgatgttggccaggttggtctcgaactcctgacctcaggtgatctacctgtcttggcctcccaaagtgcgg

SEQ ID NO: 100382 - DNA, 80 bp, synthetic construct
  misc_feature 1..80: note = Artificially Synthesized Probe
  source 1..80: mol_type = other DNA
tggagaaagcacattttctctgttcttctctttggattttgacaaaaactaaagcacttgagagtgttagggacaagggt

SEQ ID NO: 100383 - DNA, 80 bp, synthetic construct; identical to SEQ ID NO: 35329
  misc_feature 1..80: note = Artificially Synthesized Probe
  source 1..80: mol_type = other DNA

SEQ ID NO: 100384 - DNA, 80 bp, synthetic construct
  misc_feature 1..80: note = Artificially Synthesized Probe
  source 1..80: mol_type = other DNA
acatgcgtgtgaacacccaatcatcatgctcatcaactataaaaggaccaatttgcagaactttcatacatacaaaatgt

SEQ ID NO: 100385 - DNA, 80 bp, synthetic construct
  misc_feature 1..80: note = Artificially Synthesized Probe
  source 1..80: mol_type = other DNA
tcttattcttgaatactttatgtagtggaaaatttaaaagggacaaaaggtaccagctagctagttcctctccccagagg

SEQ ID NO: 100386 - DNA, 80 bp, synthetic construct; identical to SEQ ID NO: 35330
  misc_feature 1..80: note = Artificially Synthesized Probe
  source 1..80: mol_type = other DNA

SEQ ID NO: 100387 - DNA, 80 bp, synthetic construct
  misc_feature 1..80: note = Artificially Synthesized Probe
  source 1..80: mol_type = other DNA
tcactttgaaagagaccttagaagtcttccagtctggtctccaaaaaaatatcaaataacttaagctttgcataaattgc

SEQ ID NO: 100388 - DNA, 80 bp, synthetic construct
  misc_feature 1..80: note = Artificially Synthesized Probe
  source 1..80: mol_type = other DNA
agaaaatattagcataccaaatgtatcattagcaatatattttatcttggatattgtccatatcactatgcaatgagttg

SEQ ID NO: 100389 - DNA, 80 bp, synthetic construct
  misc_feature 1..80: note = Artificially Synthesized Probe
  source 1..80: mol_type = other DNA
cgatctcggctcactgcaacctctgcctcccaggttcaagtgcctcccgagtagcctgccttagcctcctgagtagctgg

SEQ ID NO: 100390 - DNA, 80 bp, synthetic construct
  misc_feature 1..80: note = Artificially Synthesized Probe
  source 1..80: mol_type = other DNA
atacttaatgtattaatcctatatgatgcacactttcccccaatgttttgttattacagaccacaaatgtataaggaata

SEQ ID NO: 100391 - DNA, 80 bp, synthetic construct
  misc_feature 1..80: note = Artificially Synthesized Probe
  source 1..80: mol_type = other DNA
ttttgaaggtctggaaagtgcaaacacgatgcttcattttagaacccagatgaatgggtgaatgggagtggtactaagag

SEQ ID NO: 100392 - DNA, 80 bp, synthetic construct; identical to SEQ ID NO: 35331
  misc_feature 1..80: note = Artificially Synthesized Probe
  source 1..80: mol_type = other DNA

SEQ ID NO: 100393 - DNA, 80 bp, synthetic construct
  misc_feature 1..80: note = Artificially Synthesized Probe
  source 1..80: mol_type = other DNA
actaatcttgagtatacagcttgatgagttttcccatctatgaccacttaactcccaccaccaagatacattttgagccc

SEQ ID NO: 100394 - DNA, 80 bp, synthetic construct
  misc_feature 1..80: note = Artificially Synthesized Probe
  source 1..80: mol_type = other DNA
ttgcttataatgtcccataccttagaattttaaggcagtcagctctgagaattaatcctgcatcaggggacaccagaatt

SEQ ID NO: 100395 - DNA, 80 bp, synthetic construct; identical to SEQ ID NO: 35332
  misc_feature 1..80: note = Artificially Synthesized Probe
  source 1..80: mol_type = other DNA

SEQ ID NO: 100396 - DNA, 80 bp, synthetic construct
  misc_feature 1..80: note = Artificially Synthesized Probe
  source 1..80: mol_type = other DNA
aaaaaaatcatgaaaaaaaatagcttaagtgaaaggaggaattatctgagtcacgtgaggcccaaggacgtctgtagctt

SEQ ID NO: 100397 - DNA, 80 bp, synthetic construct
  misc_feature 1..80: note = Artificially Synthesized Probe
  source 1..80: mol_type = other DNA
atttatttatttatttatttttactttttagagatagggtctcactgtttcacacaggctggagtccagtggtgtgatca

SEQ ID NO: 100398 - DNA, 80 bp, synthetic construct
  misc_feature 1..80: note = Artificially Synthesized Probe
  source 1..80: mol_type = other DNA
ttggtgcaatcttggctcattgcaacctctacctcccaggttcaagcgatcctcccacctcagcctcctgagtagctggg

SEQ ID NO: 100399 - DNA, 80 bp, synthetic construct; identical to SEQ ID NO: 35284
  misc_feature 1..80: note = Artificially Synthesized Probe
  source 1..80: mol_type = other DNA

SEQ ID NO: 100400 - DNA, 80 bp, synthetic construct; identical to SEQ ID NO: 35333
  misc_feature 1..80: note = Artificially Synthesized Probe
  source 1..80: mol_type = other DNA

SEQ ID NO: 100401 - DNA, 80 bp, synthetic construct
  misc_feature 1..80: note = Artificially Synthesized Probe
  source 1..80: mol_type = other DNA
aagaatccttcttttctgattacacacagcatcagtgaaggcagagaaacaacccatgatcaacaatgccatgactatta

SEQ ID NO: 100402 - DNA, 80 bp, synthetic construct
  misc_feature 1..80: note = Artificially Synthesized Probe
  source 1..80: mol_type = other DNA
gccaatcagaatctttttgctatgtaagctttgggaaagaaaacttcatgctgggctggaaagatcaacgcagcttggga

SEQ ID NO: 100403 - DNA, 80 bp, synthetic construct
  misc_feature 1..80: note = Artificially Synthesized Probe
  source 1..80: mol_type = other DNA
aaggggtgtaggaggaggggaggaaaacttcgaagttaaagatatatcaatatctaatatcataaaaattctggcaggag

SEQ ID NO: 100404 - DNA, 80 bp, synthetic construct; identical to SEQ ID NO: 35334
  misc_feature 1..80: note = Artificially Synthesized Probe
  source 1..80: mol_type = other DNA

SEQ ID NO: 100405 - DNA, 80 bp, synthetic construct
  misc_feature 1..80: note = Artificially Synthesized Probe
  source 1..80: mol_type = other DNA
caagcaattcttctgcctcagcctcccgagtagctgggattacagatgcctgccacagtgcactaatttttgtatttttt

SEQ ID NO: 100406 - DNA, 80 bp, synthetic construct
  misc_feature 1..80: note = Artificially Synthesized Probe
  source 1..80: mol_type = other DNA
tctacacacacataccccaaagtttagagtctgcaagaaattgtgtgcttagaaatctaagactctgacaacagttacag

SEQ ID NO: 100407 - DNA, 80 bp, synthetic construct
  misc_feature 1..80: note = Artificially Synthesized Probe
  source 1..80: mol_type = other DNA
caaggctgatgcttggaaagtcttaggcccattctttggtgttttcatttctgttcttgcccttttctacaagaaaatga

SEQ ID NO: 100408 - DNA, 80 bp, synthetic construct
  misc_feature 1..80: note = Artificially Synthesized Probe
  source 1..80: mol_type = other DNA
attgtattagaagaaaatagtaagtgtgtaatggtaacccttctattcattctacgtggcttcaggattaacagcaattt

SEQ ID NO: 100409 - DNA, 80 bp, synthetic construct; identical to SEQ ID NO: 35335
  misc_feature 1..80: note = Artificially Synthesized Probe
  source 1..80: mol_type = other DNA

SEQ ID NO: 100410 - DNA, 80 bp, synthetic construct
  misc_feature 1..80: note = Artificially Synthesized Probe
  source 1..80: mol_type = other DNA
actacttgtgtgtattagaggactctgaactgctgtcaaattgaatgcagaaaacgaggcatctgctcagtgttgaacat

SEQ ID NO: 100411 - DNA, 80 bp, synthetic construct
  misc_feature 1..80: note = Artificially Synthesized Probe
  source 1..80: mol_type = other DNA
accaccatgcccaactaatttttgtatttttagtagagacgaggtttcaccgtgttggccaagatggtctcgatctcctt

SEQ ID NO: 100412 - DNA, 80 bp, synthetic construct
  misc_feature 1..80: note = Artificially Synthesized Probe
  source 1..80: mol_type = other DNA
ttcgcctgtggatgacttcaggcagcctcgttacagcagcggtggtaactttgagacaccttcaaaaagagcacctgcaa

SEQ ID NO: 100413 - DNA, 80 bp, synthetic construct
  misc_feature 1..80: note = Artificially Synthesized Probe
  source 1..80: mol_type = other DNA
ccaaccaggtgttggagttattgcctcccaaattgaggtcactggtgtaatttcattctttgccaaccaggactggagac

SEQ ID NO: 100414 - DNA, 80 bp, synthetic construct; identical to SEQ ID NO: 35336
  misc_feature 1..80: note = Artificially Synthesized Probe
  source 1..80: mol_type = other DNA

SEQ ID NO: 100415 - DNA, 80 bp, synthetic construct
  misc_feature 1..80: note = Artificially Synthesized Probe
  source 1..80: mol_type = other DNA
atagagctagaccctatctcaaaaaacaaccaaaggcctttcaaataaataaaatccaggtatagaagaactttgtttta

SEQ ID NO: 100416 - DNA, 80 bp, synthetic construct
  misc_feature 1..80: note = Artificially Synthesized Probe
  source 1..80: mol_type = other DNA
ctaccaagtagctgggattacaggcgcccaccaccatgcccggctaattattgtatttttagtagagacgggtttcacca

SEQ ID NO: 100417 - DNA, 80 bp, synthetic construct
  misc_feature 1..80: note = Artificially Synthesized Probe
  source 1..80: mol_type = other DNA
tccaaagagttccgtaaacaattgaggtaacaatttagtgttcagccacagttgtggttaagtttctttgtgttttggtg

SEQ ID NO: 100418 - DNA, 80 bp, synthetic construct; identical to SEQ ID NO: 35337
  misc_feature 1..80: note = Artificially Synthesized Probe
  source 1..80: mol_type = other DNA

SEQ ID NO: 100419 - DNA, 80 bp, synthetic construct
  misc_feature 1..80: note = Artificially Synthesized Probe
  source 1..80: mol_type = other DNA
tggcttagccatctatctgtaaaatattcacctaacttgtatcacggaagatttaactgaaaactttatatatttttttg

SEQ ID NO: 100420 - DNA, 80 bp, synthetic construct
  misc_feature 1..80: note = Artificially Synthesized Probe
  source 1..80: mol_type = other DNA
taatagagacagggtttcaccatgttggctgggctggtctcaaactcctgacctcaggtgatccacccacctcggcctcc

SEQ ID NO: 100421 - DNA, 80 bp, synthetic construct; identical to SEQ ID NO: 35338
  misc_feature 1..80: note = Artificially Synthesized Probe
  source 1..80: mol_type = other DNA

SEQ ID NO: 100422 - DNA, 80 bp, synthetic construct
  misc_feature 1..80: note = Artificially Synthesized Probe
  source 1..80: mol_type = other DNA
tagcatattattcctagatatgagcactatttctgtgaataaagtttgggataggttgttagcttttgttgaaattctta

SEQ ID NO: 100423 - DNA, 80 bp, synthetic construct
  misc_feature 1..80: note = Artificially Synthesized Probe
  source 1..80: mol_type = other DNA
ccacttcggaaaaacaagagcaaaaaaataaataaaccagtctgaaaactatgggtggtagcaggaaacagccacttcca

SEQ ID NO: 100424 - DNA, 80 bp, synthetic construct
  misc_feature 1..80: note = Artificially Synthesized Probe
  source 1..80: mol_type = other DNA
gcctggccaacatggtgaaaccctgtctctactaaaatacaaaaattagccgggcgtggtggcaggcacctgtaatccca

SEQ ID NO: 100425 - DNA, 80 bp, synthetic construct
  misc_feature 1..80: note = Artificially Synthesized Probe
  source 1..80: mol_type = other DNA
cattattgatattgtgtatgggaaataagtgagttcctatgacttgtaccttcaattttgtaaatgattttcaaaattat

SEQ ID NO: 100426 - DNA, 80 bp, synthetic construct; identical to SEQ ID NO: 35339
  misc_feature 1..80: note = Artificially Synthesized Probe
  source 1..80: mol_type = other DNA

SEQ ID NO: 100427 - DNA, 80 bp, synthetic construct
  misc_feature 1..80: note = Artificially Synthesized Probe
  source 1..80: mol_type = other DNA
atcagaacttgatgagatcaataaagaactctcccgtttggataaagaattggatgactatagagaagaaagtgaagagt

SEQ ID NO: 100428 - DNA, 80 bp, synthetic construct
  misc_feature 1..80: note = Artificially Synthesized Probe
  source 1..80: mol_type = other DNA
tttcctaatagaagattgtactaatgtataatagttaataattacaaagcactattctgttttttttttttttttgaggt

SEQ ID NO: 100429 - DNA, 80 bp, synthetic construct
  misc_feature 1..80: note = Artificially Synthesized Probe
  source 1..80: mol_type = other DNA
tttttagtagagacggggtttcaccatgttagccaggatggtctcgatctcctgacctcgtgatctgcccgtcttagcct

SEQ ID NO: 100430 - DNA, 80 bp, synthetic construct
  misc_feature 1..80: note = Artificially Synthesized Probe
  source 1..80: mol_type = other DNA
tcacctgaggtcaggagttagagaatagcgtgcctaacatggtgaaaccccatctctactaaaaatacaaaaaatagcag

SEQ ID NO: 100431 - DNA, 80 bp, synthetic construct; identical to SEQ ID NO: 35340
  misc_feature 1..80: note = Artificially Synthesized Probe
  source 1..80: mol_type = other DNA

SEQ ID NO: 100432 - DNA, 80 bp, synthetic construct
  misc_feature 1..80: note = Artificially Synthesized Probe
  source 1..80: mol_type = other DNA
aaaaaatacaaaaaattagccaggtatggtggcgggtacttgtagtctcagctacttgggaggctgaggcaggagaatgg

SEQ ID NO: 100433 - DNA, 80 bp, synthetic construct
  misc_feature 1..80: note = Artificially Synthesized Probe
  source 1..80: mol_type = other DNA
ccatcaagaaatccttatcaccaaaatattagttaaaacaatctctccaagcaggagtcaccaaggcacatacacctttc

SEQ ID NO: 100434 - DNA, 80 bp, synthetic construct
  misc_feature 1..80: note = Artificially Synthesized Probe
  source 1..80: mol_type = other DNA
agctacttgggaggctgaggcaggagaatggcgtgaacccgggaggcggagcttgcagtgagccgagatcccgccactgc

SEQ ID NO: 100435 - DNA, 80 bp, synthetic construct; identical to SEQ ID NO: 35341
  misc_feature 1..80: note = Artificially Synthesized Probe
  source 1..80: mol_type = other DNA

SEQ ID NO: 100436 - DNA, 80 bp, synthetic construct
  misc_feature 1..80: note = Artificially Synthesized Probe
  source 1..80: mol_type = other DNA
ctttattttgtagctctaattgttctcgctttgacggttgggaactttcagttgcttcccgtgtccctttgacatactct

SEQ ID NO: 100437 - DNA, 80 bp, synthetic construct
  misc_feature 1..80: note = Artificially Synthesized Probe
  source 1..80: mol_type = other DNA
aatttatggttgtatcataatttaagagtcattttctatggatagacatttaagtatgtctccccctactccagtagtac

SEQ ID NO: 100438 - DNA, 80 bp, synthetic construct
  misc_feature 1..80: note = Artificially Synthesized Probe
  source 1..80: mol_type = other DNA
ttctcccgcctcagcctcccgagtagctgggattacaggcatgtggcaccacacctgactaatttttgtatttttagtag

SEQ ID NO: 100439 - DNA, 80 bp, synthetic construct
  misc_feature 1..80: note = Artificially Synthesized Probe
  source 1..80: mol_type = other DNA
gtcagagggtacgtacctttgcaaagttgcaaaattgccctccagagagactgcaccaactgtgtctccctcttgataca

SEQ ID NO: 100440 - DNA, 80 bp, synthetic construct; identical to SEQ ID NO: 35342
  misc_feature 1..80: note = Artificially Synthesized Probe
  source 1..80: mol_type = other DNA

SEQ ID NO: 100441 - DNA, 80 bp, synthetic construct
  misc_feature 1..80: note = Artificially Synthesized Probe
  source 1..80: mol_type = other DNA
tccagacagaagggtgcggggaggtgcatgattacagccataaggaaaacatgattgaaatcctgaagcatttaacatgt

SEQ ID NO: 100442 - DNA, 80 bp, synthetic construct
  misc_feature 1..80: note = Artificially Synthesized Probe
  source 1..80: mol_type = other DNA
tagcatggggactggcatgaggagagatgagaagtagcagaacagatagttacctgcctatgtgagtgaaatgtgaaaga

SEQ ID NO: 100443 - DNA, 80 bp, synthetic construct; identical to SEQ ID NO: 35343
  misc_feature 1..80: note = Artificially Synthesized Probe
  source 1..80: mol_type = other DNA

SEQ ID NO: 100444 - DNA, 80 bp, synthetic construct
  misc_feature 1..80: note = Artificially Synthesized Probe
  source 1..80: mol_type = other DNA
cagaaaagtgtataaatcaaagtgtataacatggtgaattttcacaatgtgaccacatacctgcgtatgcagatcaagaa

SEQ ID NO: 100445 - DNA, 80 bp, synthetic construct; identical to SEQ ID NO: 35285
  misc_feature 1..80: note = Artificially Synthesized Probe
  source 1..80: mol_type = other DNA

SEQ ID NO: 100446 - DNA, 80 bp, synthetic construct
  misc_feature 1..80: note = Artificially Synthesized Probe
  source 1..80: mol_type = other DNA
ttttgtgtgtgatttcttttgctcagtatagtgtttgtaagggtccatttgtagttcattactattattttttttagacg

SEQ ID NO: 100447 - DNA, 80 bp, synthetic construct
  misc_feature 1..80: note = Artificially Synthesized Probe
  source 1..80: mol_type = other DNA
ggtttcaccacattggccaggctggtcttgaactcccaacctcaggtgatccccctgccttggcctcacaaagtgctggg

SEQ ID NO: 100448 - DNA, 80 bp, synthetic construct
  misc_feature 1..80: note = Artificially Synthesized Probe
  source 1..80: mol_type = other DNA
tcccgagccactgggattacaggcaagcaccaccacacctggctaattttcctatttttagtagagatggggttttacca

SEQ ID NO: 100449 - DNA, 80 bp, synthetic construct; identical to SEQ ID NO: 35344
  misc_feature 1..80: note = Artificially Synthesized Probe
  source 1..80: mol_type = other DNA

SEQ ID NO: 100450 - DNA, 80 bp, synthetic construct
  misc_feature 1..80: note = Artificially Synthesized Probe
  source 1..80: mol_type = other DNA
aaacattaaaaaaaaattatattaaaatttttgtaaattacttatccaggtgctgtggttacatgcctgtagtcctagct

SEQ ID NO: 100451 - DNA, 80 bp, synthetic construct
  misc_feature 1..80: note = Artificially Synthesized Probe
  source 1..80: mol_type = other DNA
agtttaaagggtatacagtaaaatttcccatctctcttatcccctattcagcttccctttccccagtcaaatgagatcac

SEQ ID NO: 100452 - DNA, 80 bp, synthetic construct; identical to SEQ ID NO: 35345
  misc_feature 1..80: note = Artificially Synthesized Probe
  source 1..80: mol_type = other DNA

SEQ ID NO: 100453 - DNA, 80 bp, synthetic construct
  misc_feature 1..80: note = Artificially Synthesized Probe
  source 1..80: mol_type = other DNA
agacagaaaacatagaaggctgatgccaagttgtttgagaaattaagtatctgacatctctgcaatcttctcagaaggca

SEQ ID NO: 100454 - DNA, 80 bp, synthetic construct
  misc_feature 1..80: note = Artificially Synthesized Probe
  source 1..80: mol_type = other DNA
ttgtattaagaatgaaatactgtttgaggtttttaagccttaaaggaaggttctggtgtgaactaaactttcacacccca

SEQ ID NO: 100455 - DNA, 80 bp, synthetic construct
  misc_feature 1..80: note = Artificially Synthesized Probe
  source 1..80: mol_type = other DNA
ctgcaatgaagtctctgaagtgaaactgcttgtttcctagcacacacttttggttaagtctgttttatgacttcattaat

SEQ ID NO: 100456 - DNA, 80 bp, synthetic construct
  misc_feature 1..80: note = Artificially Synthesized Probe
  source 1..80: mol_type = other DNA
aaaaaaaaaaaatcagtttacattttaaaaatgactcatttatgccaccaatatagtcacccttcagtatctgtgagagg

SEQ ID NO: 100457 - DNA, 80 bp, synthetic construct
  misc_feature 1..80: note = Artificially Synthesized Probe
  source 1..80: mol_type = other DNA
tatatttacttttttaagatcaaagtttaaaccccgtggttagaattttgtgtgtttttaaatactttttatctttttgc

SEQ ID NO: 100458 - DNA, 80 bp, synthetic construct; identical to SEQ ID NO: 35346
  misc_feature 1..80: note = Artificially Synthesized Probe
  source 1..80: mol_type = other DNA

SEQ ID NO: 100459 - DNA, 80 bp, synthetic construct
  misc_feature 1..80: note = Artificially Synthesized Probe
  source 1..80: mol_type = other DNA
gttgatagcactgtgctgaccaagttgattgtgatcatcccagcttagacttttctaaaaacttttttttagaataatct

SEQ ID NO: 100460 - DNA, 80 bp, synthetic construct
  misc_feature 1..80: note = Artificially Synthesized Probe
  source 1..80: mol_type = other DNA
tctcgagtagttgagactacaggtgcccatcaccatgcgtggctaatttttgtatttttaatagagacggggttttacca

SEQ ID NO: 100461 - DNA, 80 bp, synthetic construct
  misc_feature 1..80: note = Artificially Synthesized Probe
  source 1..80: mol_type = other DNA
cttgttgaacaggctggagtgcaatgtcgcgatctcagctcaccacaacctccgcctcccaggttcaaacaattctcctg

SEQ ID NO: 100462 - DNA, 80 bp, synthetic construct; identical to SEQ ID NO: 35347
  misc_feature 1..80: note = Artificially Synthesized Probe
  source 1..80: mol_type = other DNA

SEQ ID NO: 100463 - DNA, 80 bp, synthetic construct
  misc_feature 1..80: note = Artificially Synthesized Probe
  source 1..80: mol_type = other DNA
tttaacaatttgttcttggaagtcagttcgtgaaggcaagtttgtcagtattttcacaaaactattcagctgaatccaga

SEQ ID NO: 100464 - DNA, 80 bp, synthetic construct
  misc_feature 1..80: note = Artificially Synthesized Probe
  source 1..80: mol_type = other DNA
taaatttgaaaagccactcaagcagcttcctagtctagaaagtcagaggtttagattagatttccgacatcccttccatt

SEQ ID NO: 100465 - DNA, 80 bp, synthetic construct
  misc_feature 1..80: note = Artificially Synthesized Probe
  source 1..80: mol_type = other DNA
tattttgaaaaatttaaatacagaaaagtataaaatataagtaccatccgcccagaaataacatgtgttaatgttttgtc

SEQ ID NO: 100466 - DNA, 80 bp, synthetic construct
  misc_feature 1..80: note = Artificially Synthesized Probe
  source 1..80: mol_type = other DNA
tgagacagaatctcactccatcatctaggctggagtgcagtgatgcaattttggcccactgcaaactctgcctcctgggc

SEQ ID NO: 100467 - DNA, 80 bp, synthetic construct
  misc_feature 1..80: note = Artificially Synthesized Probe
  source 1..80: mol_type = other DNA
cccgagggtccccgtggggggaccgcggcgactatgttaggggaggtgccggggggaggacgctccgcgctggtttcggt

SEQ ID NO: 100468 - DNA, 80 bp, synthetic construct; identical to SEQ ID NO: 35348
  misc_feature 1..80: note = Artificially Synthesized Probe
  source 1..80: mol_type = other DNA

SEQ ID NO: 100469 - DNA, 80 bp, synthetic construct
  misc_feature 1..80: note = Artificially Synthesized Probe
  source 1..80: mol_type = other DNA
tcctgtgaaatatctgtaaagacctgaatgggtacatgtgtgtaaagaagaatcagggcagaaaagtgcttttatcatgg

SEQ ID NO: 100470 - DNA, 80 bp, synthetic construct
  misc_feature 1..80: note = Artificially Synthesized Probe
  source 1..80: mol_type = other DNA
gaatcagaattcataatttcctggcagctcatgattctgctacactacaccatgccatctcttgtgtgaaaggacagatt

SEQ ID NO: 100471 - DNA, 80 bp, synthetic construct
  misc_feature 1..80: note = Artificially Synthesized Probe
  source 1..80: mol_type = other DNA
atacataactagggttttgtgtatgactacaacgaaatgcagaatggtgtctccaaaaggtttccaattgctgccacaag

SEQ ID NO: 100472 - DNA, 80 bp, synthetic construct; identical to SEQ ID NO: 35349
  misc_feature 1..80: note = Artificially Synthesized Probe
  source 1..80: mol_type = other DNA

SEQ ID NO: 100473 - DNA, 80 bp, synthetic construct
  misc_feature 1..80: note = Artificially Synthesized Probe
  source 1..80: mol_type = other DNA
gcttctttaggttagagcaaatagtttacttatcaagatcacaattgttagatactgttgtcaattacagaggttttaga

SEQ ID NO: 100474 - DNA, 80 bp, synthetic construct
  misc_feature 1..80: note = Artificially Synthesized Probe
  source 1..80: mol_type = other DNA
tgattgtgaatgtcctaaccctgttgattgtgtctggccactcatgggcaaagaacagattatccattctttatagttgt

SEQ ID NO: 100475 - DNA, 80 bp, synthetic construct
  misc_feature 1..80: note = Artificially Synthesized Probe
  source 1..80: mol_type = other DNA
tttgttttgctgtagtaccattcctagttgaatcttaacatccatgtctaaaatctatacagaacaaatattacagttgg

SEQ ID NO: 100476 - DNA, 80 bp, synthetic construct; identical to SEQ ID NO: 35286
  misc_feature 1..80: note = Artificially Synthesized Probe
  source 1..80: mol_type = other DNA

SEQ ID NO: 100477 - DNA, 80 bp, synthetic construct
  misc_feature 1..80: note = Artificially Synthesized Probe
  source 1..80: mol_type = other DNA
ctcccatctcagtctcttgagtagctggaacttacagggatgtgccaccatgcctggctaattttaagaaaaattttttg

SEQ ID NO: 100478 - DNA, 80 bp, synthetic construct
  misc_feature 1..80: note = Artificially Synthesized Probe
  source 1..80: mol_type = other DNA
aggttggttgaatcagaatttaaaacccatggatgtggagggtcagctgtatttgaaaatggatacaatatacctaagtg

SEQ ID NO: 100479 - DNA, 80 bp, synthetic construct
  misc_feature 1..80: note = Artificially Synthesized Probe
  source 1..80: mol_type = other DNA
tcactgcaacctcctcctcctggattcaagcgattctcctgcctcagcctcctgagtagctggggctacaggcgcgcgcc

SEQ ID NO: 100480 - DNA, 80 bp, synthetic construct; identical to SEQ ID NO: 35287
  misc_feature 1..80: note = Artificially Synthesized Probe
  source 1..80: mol_type = other DNA

SEQ ID NO: 100481 - DNA, 80 bp, synthetic construct
  misc_feature 1..80: note = Artificially Synthesized Probe
  source 1..80: mol_type = other DNA
actttgtctgtgtttaccagtggagacctcccaccaggtggacataaatggttcattcttttgtgctaattgggtgccgt

SEQ ID NO: 100482 - DNA, 80 bp, synthetic construct
  misc_feature 1..80: note = Artificially Synthesized Probe
  source 1..80: mol_type = other DNA
aagaggaaataataaaggagaaaataaaatccaccagtttggtaaccttcccagaaaaggaaatgaagttggtgtggcat

SEQ ID NO: 100483 - DNA, 80 bp, synthetic construct
  misc_feature 1..80: note = Artificially Synthesized Probe
  source 1..80: mol_type = other DNA
tttacaggcatgcaccaccacgcccctctaattttttgtatttttagtagagatagggtttcaccacattggtcagctgg

SEQ ID NO: 100484 - DNA, 80 bp, synthetic construct; identical to SEQ ID NO: 35279
  misc_feature 1..80: note = Artificially Synthesized Probe
  source 1..80: mol_type = other DNA

SEQ ID NO: 100485 - DNA, 80 bp, synthetic construct; identical to SEQ ID NO: 35288
  misc_feature 1..80: note = Artificially Synthesized Probe
  source 1..80: mol_type = other DNA

SEQ ID NO: 100486 - DNA, 80 bp, synthetic construct
  misc_feature 1..80: note = Artificially Synthesized Probe
  source 1..80: mol_type = other DNA
agcgattctcatgcctcagtttctcaagtagctgggattacaggcacgtgccaccatgcccagctaatttttgtattttt

SEQ ID NO: 100487 - DNA, 80 bp, synthetic construct
  misc_feature 1..80: note = Artificially Synthesized Probe
  source 1..80: mol_type = other DNA
tggacttttgcctttttatagtaccataacattttcgcctaaattgctcatttgtatgtgtgtttcaccattactagaat

SEQ ID NO: 100488 - DNA, 80 bp, synthetic construct
  misc_feature 1..80: note = Artificially Synthesized Probe
  source 1..80: mol_type = other DNA
ttatctctactaaaaatacaaaaattagccaggcgtggtggcatgtgcctgtagtccagctacttgtgaggctgaggcag

SEQ ID NO: 100489 - DNA, 80 bp, synthetic construct; identical to SEQ ID NO: 35289
  misc_feature 1..80: note = Artificially Synthesized Probe
  source 1..80: mol_type = other DNA

SEQ ID NO: 100490 - DNA, 80 bp, synthetic construct
  misc_feature 1..80: note = Artificially Synthesized Probe
  source 1..80: mol_type = other DNA
cctgtaatcccagcactttgggaggccaaggagggcagattgcctgagctcaggagtttgacaccagactgtgcaacatg

SEQ ID NO: 100491 - DNA, 80 bp, synthetic construct
  misc_feature 1..80: note = Artificially Synthesized Probe
  source 1..80: mol_type = other DNA
tgcagtgagctgagatcatgccattgcattccatcctggtgacagagcgagactcggctcaaaaaaaaaaaaaagagttg

SEQ ID NO: 100492 - DNA, 80 bp, synthetic construct
  misc_feature 1..80: note = Artificially Synthesized Probe
  source 1..80: mol_type = other DNA
ccccgcccgcgcgtcggcccccacagtcgcctgggggtggcccggagagtcgaggtgctcatagtggagccctggctccc

SEQ ID NO: 100493 - DNA, 80 bp, synthetic construct; identical to SEQ ID NO: 35360
  misc_feature 1..80: note = Artificially Synthesized Probe
  source 1..80: mol_type = other DNA

SEQ ID NO: 100494 - DNA, 80 bp, synthetic construct
  misc_feature 1..80: note = Artificially Synthesized Probe
  source 1..80: mol_type = other DNA
acagcgagggatgctgggtcctggggcatctgcctgttccgtcctctcctgatttgccaggtatcctagcaacgctgctg

SEQ ID NO: 100495 - DNA, 80 bp, synthetic construct
  misc_feature 1..80: note = Artificially Synthesized Probe
  source 1..80: mol_type = other DNA
cacccacacagccttgacctgtgacctttcatctcagtggatcaggcatgggacccccgtgctgagaaggaggcaactct

SEQ ID NO: 100496 - DNA, 80 bp, synthetic construct
  misc_feature 1..80: note = Artificially Synthesized Probe
  source 1..80: mol_type = other DNA
ccagctgtggcagaggtgccctgggcactgatctggggcccagctgtggcagaggtgccctgggcactgatctggggccc

SEQ ID NO: 100497 - DNA, 80 bp, synthetic construct
  misc_feature 1..80: note = Artificially Synthesized Probe
  source 1..80: mol_type = other DNA
gggcccagctgtggcagaggtgccctgggcactgatctggggcccagctgtggcagaggtgccctgggcactgatctggg

SEQ ID NO: 100498 - DNA, 80 bp, synthetic construct; identical to SEQ ID NO: 35361
  misc_feature 1..80: note = Artificially Synthesized Probe
  source 1..80: mol_type = other DNA

SEQ ID NO: 100499 - DNA, 80 bp, synthetic construct
  misc_feature 1..80: note = Artificially Synthesized Probe
  source 1..80: mol_type = other DNA
gtcctggacccaagcatcttacccgcttgtttacgacgaagctttgatctgtcgagagctggccgggtgggggcatttcg

SEQ ID NO: 100500 - DNA, 80 bp, synthetic construct
  misc_feature 1..80: note = Artificially Synthesized Probe
  source 1..80: mol_type = other DNA
ctggcctgtgcgtgtgtgtctgtctggggtctgtgggtctgagcctcctttttcatctctgtgtgtcctggactgtgtgt

SEQ ID NO: 100501 - DNA, 80 bp, synthetic construct
  misc_feature 1..80: note = Artificially Synthesized Probe
  source 1..80: mol_type = other DNA
aggaagcccacagggacaagaggcaggctgctacttattcagcccacataacactcctgagcggtgggcacaggtgaggt

SEQ ID NO: 100502 - DNA, 80 bp, synthetic construct
  misc_feature 1..80: note = Artificially Synthesized Probe
  source 1..80: mol_type = other DNA
ggctgctgcgtctggtctggcgtctgctgagaagatcctcttctaccctgctctgcacctgtgctcgactgccagccggc

SEQ ID NO: 100503 - DNA, 80 bp, synthetic construct; identical to SEQ ID NO: 35362
  misc_feature 1..80: note = Artificially Synthesized Probe
  source 1..80: mol_type = other DNA

SEQ ID NO: 100504 - DNA, 80 bp, synthetic construct
  misc_feature 1..80: note = Artificially Synthesized Probe
  source 1..80: mol_type = other DNA
tgcatgtgtgtctttgtgttctgtgagtccctgtctgtgcacacgtgtcctcgtgtctccatgtgtccctgcatgtgcat

SEQ ID NO: 100505 - DNA, 80 bp, synthetic construct
  misc_feature 1..80: note = Artificially Synthesized Probe
  source 1..80: mol_type = other DNA
ctctgtcccaggtaccgtacagagtggatttgcagggcagtggcatggagcccctcttccccgcgccgttctgggaggtt

SEQ ID NO: 100506 - DNA, 80 bp, synthetic construct; identical to SEQ ID NO: 35363
  misc_feature 1..80: note = Artificially Synthesized Probe
  source 1..80: mol_type = other DNA

SEQ ID NO: 100507 - DNA, 80 bp, synthetic construct
  misc_feature 1..80: note = Artificially Synthesized Probe
  source 1..80: mol_type = other DNA
ggaggggaggggagggggctggccctggcccaccgcgctctgtcccaggcagagacgtcaccaccctgacctctggtttg

SEQ ID NO: 100508 - DNA, 80 bp, synthetic construct
  misc_feature 1..80: note = Artificially Synthesized Probe
  source 1..80: mol_type = other DNA
caggctccagggctcctgctcatggcaggtgtctgtggctgagcccatgatctgttggtgctcagagatgggaaaacttg

SEQ ID NO: 100509 - DNA, 80 bp, synthetic construct; identical to SEQ ID NO: 35364
  misc_feature 1..80: note = Artificially Synthesized Probe
  source 1..80: mol_type = other DNA

SEQ ID NO: 100510 - DNA, 80 bp, synthetic construct
  misc_feature 1..80: note = Artificially Synthesized Probe
  source 1..80: mol_type = other DNA
ggggggcagtgtgggggcagtgtgtggggacagtgtgggggcagtgtggggtcagtgtgggggtcagtgtgggggcagtg

SEQ ID NO: 100511 - DNA, 80 bp, synthetic construct
  misc_feature 1..80: note = Artificially Synthesized Probe
  source 1..80: mol_type = other DNA
agtgtgggggcagagtgggggcagtgtggggggcagtgtggggggcagtgtggggggcagtgtgggggcagtgtgggggc

SEQ ID NO: 100512 - DNA, 80 bp, synthetic construct
  misc_feature 1..80: note = Artificially Synthesized Probe
  source 1..80: mol_type = other DNA
cgggtcactctacaaccccccagtcattcccccgtctcctctggccccttgggcctgctctccaccgccctggcttctgc

SEQ ID NO: 100513 - DNA, 80 bp, synthetic construct
  misc_feature 1..80: note = Artificially Synthesized Probe
  source 1..80: mol_type = other DNA
gggcagtgtggggggcagtgtgggggtcagtgtgggggcagtgtgggggcagtgtgtgggtcagtgtgggggcagtgtgg

SEQ ID NO: 100514 - DNA, 80 bp, synthetic construct
  misc_feature 1..80: note = Artificially Synthesized Probe
  source 1..80: mol_type = other DNA
gggggcagtgtgggggtcagtgtgggggcagtgtgtggggggcagtgtgggggcagtgtgtgggggcagtgtgtgggtca

SEQ ID NO: 100515 - DNA, 80 bp, synthetic construct
  misc_feature 1..80: note = Artificially Synthesized Probe
  source 1..80: mol_type = other DNA
agcgtggggggatagcatggggggacagtgggggtggccagaggaatagcggggggatagtgtgggggagatggtgtggg

SEQ ID NO: 100516 - DNA, 80 bp, synthetic construct; identical to SEQ ID NO: 35365
  misc_feature 1..80: note = Artificially Synthesized Probe
  source 1..80: mol_type = other DNA

SEQ ID NO: 100517 - DNA, 80 bp, synthetic construct
  misc_feature 1..80: note = Artificially Synthesized Probe
  source 1..80: mol_type = other DNA
tgggggatagttggggggagctggggggatagtggggggatagcatcggggggatagtgtgggggggatagtgtggggga

SEQ ID NO: 100518 - DNA, 80 bp, synthetic construct
  misc_feature 1..80: note = Artificially Synthesized Probe
  source 1..80: mol_type = other DNA
ggattgggcaggtagaagatggagatgacttaagcagaaagggagggttttctgggcagaggaaatgatggacctcaaat

SEQ ID NO: 100519 - DNA, 80 bp, synthetic construct; identical to SEQ ID NO: 35366
  misc_feature 1..80: note = Artificially Synthesized Probe
  source 1..80: mol_type = other DNA

SEQ ID NO: 100520 - DNA, 80 bp, synthetic construct
  misc_feature 1..80: note = Artificially Synthesized Probe
  source 1..80: mol_type = other DNA
tcccatctggaaagtgagcaaggtggaccatgcagccacgtgtatatgtatgtgtgtgtacatgtgtgtgcaggtgatgc

SEQ ID NO: 100521 - DNA, 80 bp, synthetic construct
  misc_feature 1..80: note = Artificially Synthesized Probe
  source 1..80: mol_type = other DNA
cctgggcttgagcacctttcctgatatgatcgcttctctactgtgtttctcctctgcattgaggcatttaatctctcaga

SEQ ID NO: 100522 - DNA, 80 bp, synthetic construct
  misc_feature 1..80: note = Artificially Synthesized Probe
  source 1..80: mol_type = other DNA
agtcaggacactccgttctgagccctgctctgctttttaccagctctaaggccttaaaaaaacaacatagatcctcttgg

SEQ ID NO: 100523 - DNA, 80 bp, synthetic construct; identical to SEQ ID NO: 35351
  misc_feature 1..80: note = Artificially Synthesized Probe
  source 1..80: mol_type = other DNA

SEQ ID NO: 100524 - DNA, 80 bp, synthetic construct; identical to SEQ ID NO: 35367
  misc_feature 1..80: note = Artificially Synthesized Probe
  source 1..80: mol_type = other DNA

SEQ ID NO: 100525 - DNA, 80 bp, synthetic construct
  misc_feature 1..80: note = Artificially Synthesized Probe
  source 1..80: mol_type = other DNA
caccatcaccaccatcatcaccatcatcatcatgaccatcaccaccatcaccactatcaccaccaccaccatcattacca

SEQ ID NO: 100526 - DNA, 80 bp, synthetic construct
  misc_feature 1..80: note = Artificially Synthesized Probe
  source 1..80: mol_type = other DNA
tcaccatcatcaccatcatcatcatcaccactaccatcacgctcacagtcatcaccatcaccaccatgatcactgccatc

SEQ ID NO: 100527 - DNA, 80 bp, synthetic construct
  misc_feature 1..80: note = Artificially Synthesized Probe
  source 1..80: mol_type = other DNA
ctgtccccccgtcaccattttcggtctccattgctaggcagcagtgtggacttggaagccttttgatatgttcttacaga

SEQ ID NO: 100528 - DNA, 80 bp, synthetic construct; identical to SEQ ID NO: 35368
  misc_feature 1..80: note = Artificially Synthesized Probe
  source 1..80: mol_type = other DNA

SEQ ID NO: 100529 - DNA, 80 bp, synthetic construct
  misc_feature 1..80: note = Artificially Synthesized Probe
  source 1..80: mol_type = other DNA
gtggccaagaggagccccttgccctttgctgcctggtccagccagcatggccaagtgaagcctttcttctccctctactc

SEQ ID NO: 100530 - DNA, 80 bp, synthetic construct
  misc_feature 1..80: note = Artificially Synthesized Probe
  source 1..80: mol_type = other DNA
attgccattgactactacaacatgttcaccagcaccttcaccctaactgccatgagtgtggatcgctatgtagccatctg

SEQ ID NO: 100531 - DNA, 80 bp, synthetic construct
  misc_feature 1..80: note = Artificially Synthesized Probe
  source 1..80: mol_type = other DNA
ctcccctcaccaggctccctggctcccgggtggctcctctgggcccacgtgccctccacgtctcctgggcccactctgac

SEQ ID NO: 100532 - DNA, 80 bp, synthetic construct
  misc_feature 1..80: note = Artificially Synthesized Probe
  source 1..80: mol_type = other DNA
cggctccgtggagtccgcctgctctcgggctcccgagagaaggaccggaacctgcggcgcatcactcggctggtgctggt

SEQ ID NO: 100533 - DNA, 80 bp, synthetic construct; identical to SEQ ID NO: 35369
  misc_feature 1..80: note = Artificially Synthesized Probe
  source 1..80: mol_type = other DNA

SEQ ID NO: 100534 - DNA, 80 bp, synthetic construct
  misc_feature 1..80: note = Artificially Synthesized Probe
  source 1..80: mol_type = other DNA
gcacttgctgctgtggggtactgcaccaagacccttattttaaagataaagaaatggagtctcagagaaatggtgaaata

SEQ ID NO: 100535 - DNA, 80 bp, synthetic construct
  misc_feature 1..80: note = Artificially Synthesized Probe
  source 1..80: mol_type = other DNA
cacaggtcactgctctctaggcggacacaccctgggccctgagcatccagagcctgggatgggcttttccctgtgggcca

SEQ ID NO: 100536 - DNA, 80 bp, synthetic construct
  misc_feature 1..80: note = Artificially Synthesized Probe
  source 1..80: mol_type = other DNA
ggtggacggccgtgactggagcccgtgcccctccctccccgtgcttcatgtgactcttggcctctctgctgctgcgttgg

SEQ ID NO: 100537 - DNA, 80 bp, synthetic construct; identical to SEQ ID NO: 35370
  misc_feature 1..80: note = Artificially Synthesized Probe
  source 1..80: mol_type = other DNA

SEQ ID NO: 100538 - DNA, 80 bp, synthetic construct
  misc_feature 1..80: note = Artificially Synthesized Probe
  source 1..80: mol_type = other DNA
actgcagcttgactctgggcccaacccccatttcccttcaggagaccagcgagaggccctggcccattccctccagcggt

SEQ ID NO: 100539 - DNA, 80 bp, synthetic construct
  misc_feature 1..80: note = Artificially Synthesized Probe
  source 1..80: mol_type = other DNA
gtgggagaagattctctgggggtccccacatcctcccaaggctcccctcacagcctctcctttgcttgaagccagaggtc

SEQ ID NO: 100540 - DNA, 80 bp, synthetic construct
  misc_feature 1..80: note = Artificially Synthesized Probe
  source 1..80: mol_type = other DNA
cacagcagagccagcatgaggggtggggcctggcagggcttgcttgagccaaactgcaaaggctgtggtggctgtgagga

SEQ ID NO: 100541 - DNA, 80 bp, synthetic construct; identical to SEQ ID NO: 35371
  misc_feature 1..80: note = Artificially Synthesized Probe
  source 1..80: mol_type = other DNA

SEQ ID NO: 100542 - DNA, 80 bp, synthetic construct
  misc_feature 1..80: note = Artificially Synthesized Probe
  source 1..80: mol_type = other DNA
gttttgtgaatctgtgctgatgtaatgtgcaccttcacgtatttatgcatgtggcaagcgttacttcctgtgcacgtagc

SEQ ID NO: 100543 - DNA, 80 bp, synthetic construct
  misc_feature 1..80: note = Artificially Synthesized Probe
  source 1..80: mol_type = other DNA
gctgccactcctggacagactgcctcccttccctgtctgtctgcccctgctcaagccccttctccctggcctccttcctc

SEQ ID NO: 100544 - DNA, 80 bp, synthetic construct
  misc_feature 1..80: note = Artificially Synthesized Probe
  source 1..80: mol_type = other DNA
gggctggctgaggggcgagtgcgcagggctccaccccctggccggggctggggagaaacactggctgccatggagcagga

SEQ ID NO: 100545 - DNA, 80 bp, synthetic construct
  misc_feature 1..80: note = Artificially Synthesized Probe
  source 1..80: mol_type = other DNA
ggctgctgcaaaggaccgatcggcgggtacgccagcccggcccacccctcgcctccgtgagccgcgtctgtaaaactggg

SEQ ID NO: 100546 - DNA, 80 bp, synthetic construct; identical to SEQ ID NO: 35352
  misc_feature 1..80: note = Artificially Synthesized Probe
  source 1..80: mol_type = other DNA

SEQ ID NO: 100547 - DNA, 80 bp, synthetic construct
  misc_feature 1..80: note = Artificially Synthesized Probe
  source 1..80: mol_type = other DNA
gaggctattcaggatggaaaggaaggccagagggtgggatttttgtctgggggccgcaggggttccccttgcccagtctc

SEQ ID NO: 100548 - DNA, 80 bp, synthetic construct
  misc_feature 1..80: note = Artificially Synthesized Probe
  source 1..80: mol_type = other DNA
cttctgctgaaacaggctctttctccgtcctccccaagactgggggcctcccatagacccacagaacgccaggttgccag

SEQ ID NO: 100549 - DNA, 80 bp, synthetic construct; identical to SEQ ID NO: 35353
  misc_feature 1..80: note = Artificially Synthesized Probe
  source 1..80: mol_type = other DNA

SEQ ID NO: 100550 - DNA, 80 bp, synthetic construct
  misc_feature 1..80: note = Artificially Synthesized Probe
  source 1..80: mol_type = other DNA
ccgcccctaccggggcttgtctgcacctcttggcggtccagggggtccgggatccgcgcgggcttcagctgcggcggcag

SEQ ID NO: 100551 - DNA, 80 bp, synthetic construct
  misc_feature 1..80: note = Artificially Synthesized Probe
  source 1..80: mol_type = other DNA
ccccctctgccctccgaccccctcgcctcacccgcatgcgggtgtagcgcagccgcagggcgcggactcgcccgcgggcc

SEQ ID NO: 100552 - DNA, 80 bp, synthetic construct
  misc_feature 1..80: note = Artificially Synthesized Probe
  source 1..80: mol_type = other DNA
aggtcgccgaagagcagatggcggtggcgctgcgcagggagcatggccgccagtccctgcggcgtcagggcccagcccgg

SEQ ID NO: 100553 - DNA, 80 bp, synthetic construct
  misc_feature 1..80: note = Artificially Synthesized Probe
  source 1..80: mol_type = other DNA
gtcccgtcggtgccggggctggcaccgggccctgcccgcccctcggcagggccccaacgtgcgccccagctcccgcccgc

SEQ ID NO: 100554 - DNA, 80 bp, synthetic construct; identical to SEQ ID NO: 35354
  misc_feature 1..80: note = Artificially Synthesized Probe
  source 1..80: mol_type = other DNA

SEQ ID NO: 100555 - DNA, 80 bp, synthetic construct
  misc_feature 1..80: note = Artificially Synthesized Probe
  source 1..80: mol_type = other DNA
gggcaggtgacagaggagggagggtccaaaagcccagctggctcctcccttcccggccccagcctacagctgccaccttg

SEQ ID NO: 100556 - DNA, 80 bp, synthetic construct; identical to SEQ ID NO: 35350
  misc_feature 1..80: note = Artificially Synthesized Probe
  source 1..80: mol_type = other DNA

SEQ ID NO: 100557 - DNA, 80 bp, synthetic construct
  misc_feature 1..80: note = Artificially Synthesized Probe
  source 1..80: mol_type = other DNA
ccgccgtagcccagactctttgggcttgttgacgcggttgcccagcaaccgggagtcctgcccctccctcgaccaggtgg

SEQ ID NO: 100558 - DNA, 80 bp, synthetic construct
  misc_feature 1..80: note = Artificially Synthesized Probe
  source 1..80: mol_type = other DNA
taggggttgtgggcccaggttcctggcttgaggggtctttggggttagttttgtgggtggggccctcggctatgaggaga

SEQ ID NO: 100559 - DNA, 80 bp, synthetic construct
  misc_feature 1..80: note = Artificially Synthesized Probe
  source 1..80: mol_type = other DNA
gactagagctgggttttgctgaacactgtgtcttgggatcttgggtcctagatactagattttggaaatctatttgtgca

SEQ ID NO: 100560 - DNA, 80 bp, synthetic construct; identical to SEQ ID NO: 35355
  misc_feature 1..80: note = Artificially Synthesized Probe
  source 1..80: mol_type = other DNA

SEQ ID NO: 100561 - DNA, 80 bp, synthetic construct
  misc_feature 1..80: note = Artificially Synthesized Probe
  source 1..80: mol_type = other DNA
ttggcaggaggctgttgggtgttcccattgtttttgggagactgccctggcctctcagtaagagggtaaattttgacatt

SEQ ID NO: 100562 - DNA, 80 bp, synthetic construct
  misc_feature 1..80: note = Artificially Synthesized Probe
  source 1..80: mol_type = other DNA
cagcttggcttgaggaaggtccctggtctccagaagcagcagtgactgcttagggatgctcacccagcagccgctttctc

SEQ ID NO: 100563 - DNA, 80 bp, synthetic construct
  misc_feature 1..80: note = Artificially Synthesized Probe
  source 1..80: mol_type = other DNA
ggaatattcttctgttctgcaagaaggggcttgtaacctctttttataggactggaaaaccttgacaccccctagtccat

SEQ ID NO: 100564 - DNA, 80 bp, synthetic construct; identical to SEQ ID NO: 35356
  misc_feature 1..80: note = Artificially Synthesized Probe
  source 1..80: mol_type = other DNA

SEQ ID NO: 100565 - DNA, 80 bp, synthetic construct
  misc_feature 1..80: note = Artificially Synthesized Probe
  source 1..80: mol_type = other DNA
tttgatgaaactcagaattgttaaaaattctttcacttttttaatagcacaaatgtgcggcctggtgactggcttccctg

SEQ ID NO: 100566 - DNA, 80 bp, synthetic construct
  misc_feature 1..80: note = Artificially Synthesized Probe
  source 1..80: mol_type = other DNA
gtttgctgattctgagtcactggatgagagtgaggtgtgtgtatttgcctgctgagtgggtgtgaatctcaccccggaac

SEQ ID NO: 100567 - DNA, 80 bp, synthetic construct
  misc_feature 1..80: note = Artificially Synthesized Probe
  source 1..80: mol_type = other DNA
cagcacaagcactccacccggatagttcccagtgtcgggatctgttcataaaatgccttccagttgcacaggtcaggtgc

SEQ ID NO: 100568 - DNA, 80 bp, synthetic construct
  misc_feature 1..80: note = Artificially Synthesized Probe
  source 1..80: mol_type = other DNA
gttcgtgtcttgggctatccctagtatcctcgcacacaagctctgtgctgtcattcgcgtgtcatcgttcgtgtcttggg

SEQ ID NO: 100569 - DNA, 80 bp, synthetic construct; identical to SEQ ID NO: 35357
  misc_feature 1..80: note = Artificially Synthesized Probe
  source 1..80: mol_type = other DNA

SEQ ID NO: 100570 - DNA, 80 bp, synthetic construct
  misc_feature 1..80: note = Artificially Synthesized Probe
  source 1..80: mol_type = other DNA
ggttgtcttgctctctcatataacatgtgcctcttgctatctcttgtgtaacatatatgttctatataggaccctgattc

SEQ ID NO: 100571 - DNA, 80 bp, synthetic construct
  misc_feature 1..80: note = Artificially Synthesized Probe
  source 1..80: mol_type = other DNA
ggagcactgtcagtgtcacacctggccaatcccctagccaggtgaccaggcctgtctttcactctaagactgcgcctgtg

SEQ ID NO: 100572 - DNA, 80 bp, synthetic construct
  misc_feature 1..80: note = Artificially Synthesized Probe
  source 1..80: mol_type = other DNA
gaggaggtaggactggagctggctggggtggggcaggatccatgcaaggggccagaatctgcacatgggccaggatctgt

SEQ ID NO: 100573 - DNA, 80 bp, synthetic construct; identical to SEQ ID NO: 35358
  misc_feature 1..80: note = Artificially Synthesized Probe
  source 1..80: mol_type = other DNA

SEQ ID NO: 100574 - DNA, 80 bp, synthetic construct
  misc_feature 1..80: note = Artificially Synthesized Probe
  source 1..80: mol_type = other DNA
tgtgcagggaggccagggtctgtgcagagtggccaggatctgtgcaaggggtaggatctgtgcagagtggccaggatctg

SEQ ID NO: 100575 - DNA, 80 bp, synthetic construct
  misc_feature 1..80: note = Artificially Synthesized Probe
  source 1..80: mol_type = other DNA
tgcaaggggtaggatctgtgcagagtggccagggtctttgcaagggggcaggatctttgcaggggggacaggttgtgtgc

SEQ ID NO: 100576 - DNA, 80 bp, synthetic construct; identical to SEQ ID NO: 35359
  misc_feature 1..80: note = Artificially Synthesized Probe
  source 1..80: mol_type = other DNA

SEQ ID NO: 100577 - DNA, 80 bp, synthetic construct
  misc_feature 1..80: note = Artificially Synthesized Probe
  source 1..80: mol_type = other DNA
aggcttggggtcaaaagaggtgggggtcagggagctaggtctgacctcgtcccccctcctttcttcctgtcctcctatcc

SEQ ID NO: 100578 - DNA, 80 bp, synthetic construct
  misc_feature 1..80: note = Artificially Synthesized Probe
  source 1..80: mol_type = other DNA
cttatgctggggggcgcagagtgagttgtggggagcaggcagggaaggcctgggtgagaggggggagggctgaggagggg

SEQ ID NO: 100579 - DNA, 80 bp, synthetic construct
  misc_feature 1..80: note = Artificially Synthesized Probe
  source 1..80: mol_type = other DNA
aggtggaagacagacatgcgaagggagaggtgtctgcagtagcagggatgaggtgcttgtgtcccacactctgccctggc

SEQ ID NO: 100580 - DNA, 80 bp, synthetic construct
  misc_feature 1..80: note = Artificially Synthesized Probe
  source 1..80: mol_type = other DNA
ctgctcagacgttggtgagcccagctggggcggagggctgcaggagtccgagcctgcctggattcctgccccctctcggc

SEQ ID NO: 100581 - DNA, 80 bp, synthetic construct
  misc_feature 1..80: note = Artificially Synthesized Probe
  source 1..80: mol_type = other DNA
ggattctgattgcgattagtgttccatagattattttgtcttttgtctgaagtgatgctgaatacaacctcagtcaccga

SEQ ID NO: 100582 - DNA, 80 bp, synthetic construct
  misc_feature 1..80: note = Artificially Synthesized Probe
  source 1..80: mol_type = other DNA
cagtggtctaaattcttagatactttagaagaagacactattgggtaaaatgaaggaagaattgttgagtctattggaag

SEQ ID NO: 100583 - DNA, 80 bp, synthetic construct; identical to SEQ ID NO: 35373
  misc_feature 1..80: note = Artificially Synthesized Probe
  source 1..80: mol_type = other DNA

SEQ ID NO: 100584 - DNA, 80 bp, synthetic construct
  misc_feature 1..80: note = Artificially Synthesized Probe
  source 1..80: mol_type = other DNA
tgcactccgtaatgacttctcgcttgaacttctgtggttccaaccgtatccatcattttctctgtgatattaagccattg

SEQ ID NO: 100585 - DNA, 80 bp, synthetic construct
  misc_feature 1..80: note = Artificially Synthesized Probe
  source 1..80: mol_type = other DNA
cacttcatggtagttattcttttctatgcacctgttcttttcacctatatccatcctgcgttagagagcttcatggacca

SEQ ID NO: 100586 - DNA, 80 bp, synthetic construct
  misc_feature 1..80: note = Artificially Synthesized Probe
  source 1..80: mol_type = other DNA
aaataaccagcaatgaaaaagtagagatgtgtaattttactgcttctcagatggtttataagtgtaaaatagaggcaact

SEQ ID NO: 100587 - DNA, 80 bp, synthetic construct; identical to SEQ ID NO: 35374
  misc_feature 1..80: note = Artificially Synthesized Probe
  source 1..80: mol_type = other DNA

SEQ ID NO: 100588 - DNA, 80 bp, synthetic construct
  misc_feature 1..80: note = Artificially Synthesized Probe
  source 1..80: mol_type = other DNA
aaatatacctcaggctaatatttgattgatgtattattttttcctttcccagtagagctccatgacattgccagagatgt

SEQ ID NO: 100589 - DNA, 80 bp, synthetic construct
  misc_feature 1..80: note = Artificially Synthesized Probe
  source 1..80: mol_type = other DNA
cctctctttttttttttttttttttttttttgagacggagtctcgctctgtcgcccaggctggagtgcagtggcgggatc

SEQ ID NO: 100590 - DNA, 80 bp, synthetic construct; identical to SEQ ID NO: 35372
  misc_feature 1..80: note = Artificially Synthesized Probe
  source 1..80: mol_type = other DNA

SEQ ID NO: 100591 - DNA, 80 bp, synthetic construct
  misc_feature 1..80: note = Artificially Synthesized Probe
  source 1..80: mol_type = other DNA
atctcttcaggtacatctagtccattcataaagggcttttaattaaccaagtggtttactaaaaaggacaattcactaca

SEQ ID NO: 100592 - DNA, 80 bp, synthetic construct
  misc_feature 1..80: note = Artificially Synthesized Probe
  source 1..80: mol_type = other DNA
atatataattctaatggttgaattccaagaataatctatggcatgaaagattttacctgtcaacagtggctggctcttca

SEQ ID NO: 100593 - DNA, 80 bp, synthetic construct; identical to SEQ ID NO: 35376
  misc_feature 1..80: note = Artificially Synthesized Probe
  source 1..80: mol_type = other DNA

SEQ ID NO: 100594 - DNA, 80 bp, synthetic construct
  misc_feature 1..80: note = Artificially Synthesized Probe
  source 1..80: mol_type = other DNA
tgcatatttaaggtctattctaaattgcacactttgattcaaaagaaacagtccaaccaaccagtcaggacagaaattat

SEQ ID NO: 100595 - DNA, 80 bp, synthetic construct
  misc_feature 1..80: note = Artificially Synthesized Probe
  source 1..80: mol_type = other DNA
atttttataggactttaaaaacagtaatgtgctgctttgagtgtgtaggactaagaaatgggattcagagtagtaaagag

SEQ ID NO: 100596 - DNA, 80 bp, synthetic construct
  misc_feature 1..80: note = Artificially Synthesized Probe
  source 1..80: mol_type = other DNA
tttacatcttacttgcccattaactcttatacctaatccaaagattgttaatatggctatgtctcactttcaggacacct

SEQ ID NO: 100597 - DNA, 80 bp, synthetic construct; identical to SEQ ID NO: 35377
  misc_feature 1..80: note = Artificially Synthesized Probe
  source 1..80: mol_type = other DNA

SEQ ID NO: 100598 - DNA, 80 bp, synthetic construct
  misc_feature 1..80: note = Artificially Synthesized Probe
  source 1..80: mol_type = other DNA
atctattctgcataattccattttgtgtttaccttctggaaaaatgaaaggattctgtatggttaacttaaatacttaga

SEQ ID NO: 100599 - DNA, 80 bp, synthetic construct
  misc_feature 1..80: note = Artificially Synthesized Probe
  source 1..80: mol_type = other DNA
atattgaccattactatttgctagaaaatttatatacctggtcgtatccaatcctcacagaacttctataaagttgtgct

SEQ ID NO: 100600 - DNA, 80 bp, synthetic construct
  misc_feature 1..80: note = Artificially Synthesized Probe
  source 1..80: mol_type = other DNA
tcttacaggtcttcattcacccctttcctgctcacacaaccacaacctgcagctattacctattgttaggcttaaaataa

SEQ ID NO: 100601 - DNA, 80 bp, synthetic construct
  misc_feature 1..80: note = Artificially Synthesized Probe
  source 1..80: mol_type = other DNA
tatctcctatgaaagtccttcacactttctctcatttaaactttattgcattttcctcactttttctcacttcacttttg

SEQ ID NO: 100602 - DNA, 80 bp, synthetic construct; identical to SEQ ID NO: 35378
  misc_feature 1..80: note = Artificially Synthesized Probe
  source 1..80: mol_type = other DNA

SEQ ID NO: 100603 - DNA, 80 bp, synthetic construct
  misc_feature 1..80: note = Artificially Synthesized Probe
  source 1..80: mol_type = other DNA
gaaagtcactgtaagagtgagcagaatgatataaaatgaggctttgaatttgaatataataattctgacttccttctcct

SEQ ID NO: 100604 - DNA, 80 bp, synthetic construct
  misc_feature 1..80: note = Artificially Synthesized Probe
  source 1..80: mol_type = other DNA
tggaggaatcgtgtttggaaaccttcttattgtcataacagtggtatctgactcccaccttcactctcccatgtacttcc

SEQ ID NO: 100605 - DNA, 80 bp, synthetic construct
  misc_feature 1..80: note = Artificially Synthesized Probe
  source 1..80: mol_type = other DNA
tggtgatcctcatagccatgggctttgacagatatatagcaatatgcaagcccctacactacactacaattatgtgtggc

SEQ ID NO: 100606 - DNA, 80 bp, synthetic construct; identical to SEQ ID NO: 35379
  misc_feature 1..80: note = Artificially Synthesized Probe
  source 1..80: mol_type = other DNA

SEQ ID NO: 100607 - DNA, 80 bp, synthetic construct
  misc_feature 1..80: note = Artificially Synthesized Probe
  source 1..80: mol_type = other DNA
gtcattagataaattccttgctgtattttattctgtgatcacccctctcttgaacccaattatatacacactgaggaaca

SEQ ID NO: 100608 - DNA, 80 bp, synthetic construct
  misc_feature 1..80: note = Artificially Synthesized Probe
  source 1..80: mol_type = other DNA
tgtgccctccattcccatataatttagtaattgtctaggaacttccacatacattgcctcaatttatctttcaacaactt

SEQ ID NO: 100609 - DNA, 80 bp, synthetic construct; identical to SEQ ID NO: 35375
  misc_feature 1..80: note = Artificially Synthesized Probe
  source 1..80: mol_type = other DNA

SEQ ID NO: 100610 - DNA, 80 bp, synthetic construct
  misc_feature 1..80: note = Artificially Synthesized Probe
  source 1..80: mol_type = other DNA
gagaaaatatagcctagcttataaatttaaaaaaaaatttatttggtccattttgtgaaaaacataaaaaaagaactgtc

SEQ ID NO: 100611 - DNA, 80 bp, synthetic construct; identical to SEQ ID NO: 35380
  misc_feature 1..80: note = Artificially Synthesized Probe
  source 1..80: mol_type = other DNA

SEQ ID NO: 100612 - DNA, 80 bp, synthetic construct
  misc_feature 1..80: note = Artificially Synthesized Probe
  source 1..80: mol_type = other DNA
tgggcacattacgtagctttcatgagctttagtttctacatttataaacaggagattatacctattatgcatggttatta

SEQ ID NO: 100613 - DNA, 80 bp, synthetic construct
  misc_feature 1..80: note = Artificially Synthesized Probe
  source 1..80: mol_type = other DNA
acacatcccaatcttaacagatgctcatttgggatactgtacttgtgagtggaagtgtgtatatttgtgtgcaagtgtgt

SEQ ID NO: 100614 - DNA, 80 bp, synthetic construct
  misc_feature 1..80: note = Artificially Synthesized Probe
  source 1..80: mol_type = other DNA
attctaagaaaaaaggaatctagtttgtcaaaatgtgacttgaattaatagataaggagagtcagatgataagagggtca

SEQ ID NO: 100615 - DNA, 80 bp, synthetic construct; identical to SEQ ID NO: 35381
  misc_feature 1..80: note = Artificially Synthesized Probe
  source 1..80: mol_type = other DNA

SEQ ID NO: 100616 - DNA, 80 bp, synthetic construct
  misc_feature 1..80: note = Artificially Synthesized Probe
  source 1..80: mol_type = other DNA
taaggacataaggcatttatatatatatatattatatatactatatatttatatatattacatattatatatataatata

SEQ ID NO: 100617 - DNA, 80 bp, synthetic construct
  misc_feature 1..80: note = Artificially Synthesized Probe
  source 1..80: mol_type = other DNA
ataatataatatatattatataatataatatattttattatataaatatatattatattatataatatatattttattat

SEQ ID NO: 100618 - DNA, 80 bp, synthetic construct
  misc_feature 1..80: note = Artificially Synthesized Probe
  source 1..80: mol_type = other DNA
tcttccattgacacaattttgctacaactctcactctaatctgtttagtttttacacaataaacaattggtttcatcagc

SEQ ID NO: 100619 - DNA, 80 bp, synthetic construct
  misc_feature 1..80: note = Artificially Synthesized Probe
  source 1..80: mol_type = other DNA
taaagtctaccataaggcagagtgctccaaaaaagccatagataacatcaattctgttgtcagaacaggccaacttcatg

SEQ ID NO: 100620 - DNA, 80 bp, synthetic construct; identical to SEQ ID NO: 35383
  misc_feature 1..80: note = Artificially Synthesized Probe
  source 1..80: mol_type = other DNA

SEQ ID NO: 100621 - DNA, 80 bp, synthetic construct; identical to SEQ ID NO: 35382
  misc_feature 1..80: note = Artificially Synthesized Probe
  source 1..80: mol_type = other DNA

SEQ ID NO: 100622 - DNA, 80 bp, synthetic construct
  misc_feature 1..80: note = Artificially Synthesized Probe
  source 1..80: mol_type = other DNA
cgttgacccgcggcgttcacgggaattgttcgctttagtgccggcgccatggggtcggagctgatcgggcgcctagcccc

SEQ ID NO: 100623 - DNA, 80 bp, synthetic construct
  misc_feature 1..80: note = Artificially Synthesized Probe
  source 1..80: mol_type = other DNA
gagccacaggagttaggcttagtgtgaagctaaccaggctgtattcattgtttaccaacgtgttgagcaaacttctgaat

SEQ ID NO: 100624 - DNA, 80 bp, synthetic construct
  misc_feature 1..80: note = Artificially Synthesized Probe
  source 1..80: mol_type = other DNA
agggtaagtaggtcccaccgaatgtctgaataatccagtgcaacattgaagctcttttaacttttggttgaactaaaccc

SEQ ID NO: 100625 - DNA, 80 bp, synthetic construct; identical to SEQ ID NO: 35385
  misc_feature 1..80: note = Artificially Synthesized Probe
  source 1..80: mol_type = other DNA

SEQ ID NO: 100626 - DNA, 80 bp, synthetic construct
  misc_feature 1..80: note = Artificially Synthesized Probe
  source 1..80: mol_type = other DNA
cgctggattattatgaggattaaatgtacataacaccattaacacagcacctgtgtcataacgatacactcattaaatgg

SEQ ID NO: 100627 - DNA, 80 bp, synthetic construct
  misc_feature 1..80: note = Artificially Synthesized Probe
  source 1..80: mol_type = other DNA
ctcttctggcaaactcctatttgtcttacatgaccttgccttattgttacattgaaactttccttaagtctcccagacag

SEQ ID NO: 100628 - DNA, 80 bp, synthetic construct
  misc_feature 1..80: note = Artificially Synthesized Probe
  source 1..80: mol_type = other DNA
gctacttctctccttccttttcccaataaattacacgttagcacctttgtataaacacaagtaaccatctgtgtgtttcc

SEQ ID NO: 100629 - DNA, 80 bp, synthetic construct
  misc_feature 1..80: note = Artificially Synthesized Probe
  source 1..80: mol_type = other DNA
gtttagggcctacttcaagaaaaacttctcggccgtgagcttgaatgagatggcaagaagggcgatagcaaacggcgatg

SEQ ID NO: 100630 - DNA, 80 bp, synthetic construct; identical to SEQ ID NO: 35386
  misc_feature 1..80: note = Artificially Synthesized Probe
  source 1..80: mol_type = other DNA

SEQ ID NO: 100631 - DNA, 80 bp, synthetic construct
  misc_feature 1..80: note = Artificially Synthesized Probe
  source 1..80: mol_type = other DNA
atcttttgagtgtttactgggcctgaattcaaatattggaataagagacctagctgtacagtttagctgtatagaagcag

SEQ ID NO: 100632 - DNA, 80 bp, synthetic construct
  misc_feature 1..80: note = Artificially Synthesized Probe
  source 1..80: mol_type = other DNA
gccaacatggtgaaaccccatttctactaaaaatacaaaaattagctgggcgaggcgtcatgcacctgtaatcccagcta

SEQ ID NO: 100633 - DNA, 80 bp, synthetic construct
  misc_feature 1..80: note = Artificially Synthesized Probe
  source 1..80: mol_type = other DNA
gatacaaattatccattgtcctgttctggttaattttcagtcttaaaaaaaatgactcgtgttaagtgacagcacacata

SEQ ID NO: 100634 - DNA, 80 bp, synthetic construct; identical to SEQ ID NO: 35387
  misc_feature 1..80: note = Artificially Synthesized Probe
  source 1..80: mol_type = other DNA

SEQ ID NO: 100635 - DNA, 80 bp, synthetic construct
  misc_feature 1..80: note = Artificially Synthesized Probe
  source 1..80: mol_type = other DNA
cagctgtatatatatgctgggaattctgatttcagtctgccttttgtaagagatgatatctgtcattaaaacagtcttca

SEQ ID NO: 100636 - DNA, 80 bp, synthetic construct
  misc_feature 1..80: note = Artificially Synthesized Probe
  source 1..80: mol_type = other DNA
agaaaaaaaaaaaaaattagctgggtgtcagcacatgcctccagtcctggcttctcagctactcgggaggctgaagctga

SEQ ID NO: 100637 - DNA, 80 bp, synthetic construct
  misc_feature 1..80: note = Artificially Synthesized Probe
  source 1..80: mol_type = other DNA
ttttgataattcttgggtgtttctcacagagggggatttggcagggtcatgggacaatagtggagggaaggtcagcagat

SEQ ID NO: 100638 - DNA, 80 bp, synthetic construct
  misc_feature 1..80: note = Artificially Synthesized Probe
  source 1..80: mol_type = other DNA
ttaatccatttaaccctgagtggacacagcacatgtttcagagagcacagggttgggggtaaggtcacagatcaacagga

SEQ ID NO: 100639 - DNA, 80 bp, synthetic construct; identical to SEQ ID NO: 35388
  misc_feature 1..80: note = Artificially Synthesized Probe
  source 1..80: mol_type = other DNA

SEQ ID NO: 100640 - DNA, 80 bp, synthetic construct
  misc_feature 1..80: note = Artificially Synthesized Probe
  source 1..80: mol_type = other DNA
ttcccagtaggggcggccggggcggctggccgggcggggggctgacccccccacaacactgtctcttaaaaaaaaaacaa

SEQ ID NO: 100641 - DNA, 80 bp, synthetic construct
  misc_feature 1..80: note = Artificially Synthesized Probe
  source 1..80: mol_type = other DNA
cctgagccactgggcttggggtggagcgcggcctagcggctgcctttaacacaaagaaacaaacaaaactcggaaaagca

SEQ ID NO: 100642 - DNA, 80 bp, synthetic construct
  misc_feature 1..80: note = Artificially Synthesized Probe
  source 1..80: mol_type = other DNA
atcttgccagaaaactccttagaaaacaaaatgtagttggcccttaaagaatggatttctcactacctacccactaattt

SEQ ID NO: 100643 - DNA, 80 bp, synthetic construct
  misc_feature 1..80: note = Artificially Synthesized Probe
  source 1..80: mol_type = other DNA
acgctgagtaagaaaaggtcttgacaggtctattctgaagaaaaagtttattttgtgtttgtaattagtggttgctgtgg

SEQ ID NO: 100644 - DNA, 80 bp, synthetic construct; identical to SEQ ID NO: 35389
  misc_feature 1..80: note = Artificially Synthesized Probe
  source 1..80: mol_type = other DNA

SEQ ID NO: 100645 - DNA, 80 bp, synthetic construct
  misc_feature 1..80: note = Artificially Synthesized Probe
  source 1..80: mol_type = other DNA
cttgagaaaagcaacttatgaaattgttttgtaggattctaaagctgaaagtggataaaaacaaaatggtagccacatcc

SEQ ID NO: 100646 - DNA, 80 bp, synthetic construct
  misc_feature 1..80: note = Artificially Synthesized Probe
  source 1..80: mol_type = other DNA
actggctgcttcctaaattccgtattacatgtggaccaggtatgtttttattgatgtttctaacctatgattccatgaat

SEQ ID NO: 100647 - DNA, 80 bp, synthetic construct
  misc_feature 1..80: note = Artificially Synthesized Probe
  source 1..80: mol_type = other DNA
aaaattaaccttgataacacttcttaaaggagaacctggagatgtagctactccaccacggaagagaaagaagatagtgg

SEQ ID NO: 100648 - DNA, 80 bp, synthetic construct
  misc_feature 1..80: note = Artificially Synthesized Probe
  source 1..80: mol_type = other DNA
ttccaagcaatcagtaatggaagtaacatcgttattgggtaattaagaatatggctggtctggcacagtggcttattcct

SEQ ID NO: 100649 - DNA, 80 bp, synthetic construct; identical to SEQ ID NO: 35390
  misc_feature 1..80: note = Artificially Synthesized Probe
  source 1..80: mol_type = other DNA

SEQ ID NO: 100650 - DNA, 80 bp, synthetic construct
  misc_feature 1..80: note = Artificially Synthesized Probe
  source 1..80: mol_type = other DNA
catgctagagtgcagtggcacggtctcggctcactgcagcctccgcctcctgagctcaaaccatcctcccacctcagcct

SEQ ID NO: 100651 - DNA, 80 bp, synthetic construct
  misc_feature 1..80: note = Artificially Synthesized Probe
  source 1..80: mol_type = other DNA
agccactatgcccaaccactggctatgggattctaagaaagtataatttctgtgagcctcaatttcctgacctataaaat

SEQ ID NO: 100652 - DNA, 80 bp, synthetic construct; identical to SEQ ID NO: 35391
  misc_feature 1..80: note = Artificially Synthesized Probe
  source 1..80: mol_type = other DNA

SEQ ID NO: 100653 - DNA, 80 bp, synthetic construct
  misc_feature 1..80: note = Artificially Synthesized Probe
  source 1..80: mol_type = other DNA
tcaggcgagggaaggcaaggaaaacagcacttaaaagatttgaagacaaacctgcaggactcggtagtcatttagaacag

SEQ ID NO: 100654 - DNA, 80 bp, synthetic construct
  misc_feature 1..80: note = Artificially Synthesized Probe
  source 1..80: mol_type = other DNA
tattttagacaatttaaacaagtttacctttttttaaatttcatttctaagctaagaattttgaaattgcttttgataat

SEQ ID NO: 100655 - DNA, 80 bp, synthetic construct
  misc_feature 1..80: note = Artificially Synthesized Probe
  source 1..80: mol_type = other DNA
aactggtatacattccaaactgatagtacattgccatctccaggaagacttgacggctttgggattttgtttaaactttt

SEQ ID NO: 100656 - DNA, 80 bp, synthetic construct
  misc_feature 1..80: note = Artificially Synthesized Probe
  source 1..80: mol_type = other DNA
ggcgcagtggctcacgcctgtaatcccagcactttgggaggccaaggtgggtggatcacctgaggtcaggagctcgagac

SEQ ID NO: 100657 - DNA, 80 bp, synthetic construct; identical to SEQ ID NO: 35392
  misc_feature 1..80: note = Artificially Synthesized Probe
  source 1..80: mol_type = other DNA

SEQ ID NO: 100658 - DNA, 80 bp, synthetic construct
  misc_feature 1..80: note = Artificially Synthesized Probe
  source 1..80: mol_type = other DNA
tacttcaatttttgtgtacggtattttttatttgactaaatcaatatattgtacagcctaagttaataaatgttatttat

SEQ ID NO: 100659 - DNA, 80 bp, synthetic construct; identical to SEQ ID NO: 35384
  misc_feature 1..80: note = Artificially Synthesized Probe
  source 1..80: mol_type = other DNA

SEQ ID NO: 100660 - DNA, 80 bp, synthetic construct
  misc_feature 1..80: note = Artificially Synthesized Probe
  source 1..80: mol_type = other DNA
tgcagcgccttcctggaggtgggggccgcccgcgccatggccgccgcccagcccaagtaccccgccggggcgaccgcccg

SEQ ID NO: 100661 - DNA, 80 bp, synthetic construct
  misc_feature 1..80: note = Artificially Synthesized Probe
  source 1..80: mol_type = other DNA
agtgacctctgcctcccaggcctgaggactgggcgctgtgtgccctattaccaggggccctccaagacctgcgaggtgtt

SEQ ID NO: 100662 - DNA, 80 bp, synthetic construct
  misc_feature 1..80: note = Artificially Synthesized Probe
  source 1..80: mol_type = other DNA
gctttgcgggaagaggggactaaacaacccttctgtgcctcctcagccaatttctgggtacgatggccccaaatttcacc

SEQ ID NO: 100663 - DNA, 80 bp, synthetic construct
  misc_feature 1..80: note = Artificially Synthesized Probe
  source 1..80: mol_type = other DNA
cgcacagacgggtacctgaagcgctgcacgttccacgaggcctccgacctctactgccccatcttcaagctgggctttat

SEQ ID NO: 100664 - DNA, 80 bp, synthetic construct; identical to SEQ ID NO: 35394
  misc_feature 1..80: note = Artificially Synthesized Probe
  source 1..80: mol_type = other DNA

SEQ ID NO: 100665 - DNA, 80 bp, synthetic construct
  misc_feature 1..80: note = Artificially Synthesized Probe
  source 1..80: mol_type = other DNA
ggctctcgaggggcctctcgtgtgccctcctgacccccttctctggctccttcttggcagggtggtgtcatcggggtcat

SEQ ID NO: 100666 - DNA, 80 bp, synthetic construct
  misc_feature 1..80: note = Artificially Synthesized Probe
  source 1..80: mol_type = other DNA
tcccgagaggcccaatgcctgtggggcagccctggagtgcagaggacgagtgggcactggcgttcccattgcaggtttgc

SEQ ID NO: 100667 - DNA, 80 bp, synthetic construct
  misc_feature 1..80: note = Artificially Synthesized Probe
  source 1..80: mol_type = other DNA
tgcggggcgcaggggaggggctgggattgggggcgctgggctggaggcgcggggctggggctggggctgggaccgggggc

SEQ ID NO: 100668 - DNA, 80 bp, synthetic construct
  misc_feature 1..80: note = Artificially Synthesized Probe
  source 1..80: mol_type = other DNA
taagccccatcagacgccgtcagacattctgaccacgacccccattctccccaggccgggaagttcagcctgattcccac

SEQ ID NO: 100669 - DNA, 80 bp, synthetic construct; identical to SEQ ID NO: 35395
  misc_feature 1..80: note = Artificially Synthesized Probe
  source 1..80: mol_type = other DNA

SEQ ID NO: 100670 - DNA, 80 bp, synthetic construct
  misc_feature 1..80: note = Artificially Synthesized Probe
  source 1..80: mol_type = other DNA
cctgcggccttgccccatctctgccccttctgagcagatggtggacactcctgcctccgagcctgcccaagcctccacac

SEQ ID NO: 100671 - DNA, 80 bp, synthetic construct
  misc_feature 1..80: note = Artificially Synthesized Probe
  source 1..80: mol_type = other DNA
cagtagcggagcatctccacgaaacggggcaccacaggatccctgtgcaagggctgggggcacgctctggccccaggctt

SEQ ID NO: 100672 - DNA, 80 bp, synthetic construct; identical to SEQ ID NO: 35396
  misc_feature 1..80: note = Artificially Synthesized Probe
  source 1..80: mol_type = other DNA

SEQ ID NO: 100673 - DNA, 80 bp, synthetic construct
  misc_feature 1..80: note = Artificially Synthesized Probe
  source 1..80: mol_type = other DNA
ggctggggctgggaccgggggcgcggggcaggggctggggctgggaccgagggcgcggggcaggccccaagagccccgca

SEQ ID NO: 100674 - DNA, 80 bp, synthetic construct; identical to SEQ ID NO: 35393
  misc_feature 1..80: note = Artificially Synthesized Probe
  source 1..80: mol_type = other DNA

SEQ ID NO: 100675 - DNA, 80 bp, synthetic construct
  misc_feature 1..80: note = Artificially Synthesized Probe
  source 1..80: mol_type = other DNA
ctgccccgaggtgaggggatcccgcggcgctgggggaccccgcctcagctaggcgggccagctgtcccttgcggggtccc

SEQ ID NO: 100676 - DNA, 80 bp, synthetic construct
  misc_feature 1..80: note = Artificially Synthesized Probe
  source 1..80: mol_type = other DNA
gagcttgaatccaagtccccttttgacagatcatagatagcccatggccagtcatggaaatggatctgggacccagacct

SEQ ID NO: 100677 - DNA, 80 bp, synthetic construct
  misc_feature 1..80: note = Artificially Synthesized Probe
  source 1..80: mol_type = other DNA
gggtccctattcagtccttaaggactaaagaggagtttatacaagacaaagaggtggaaggacattacggagggaggaac

SEQ ID NO: 100678 - DNA, 80 bp, synthetic construct; identical to SEQ ID NO: 35398
  misc_feature 1..80: note = Artificially Synthesized Probe
  source 1..80: mol_type = other DNA

SEQ ID NO: 100679 - DNA, 80 bp, synthetic construct; identical to SEQ ID NO: 35408
  misc_feature 1..80: note = Artificially Synthesized Probe
  source 1..80: mol_type = other DNA

SEQ ID NO: 100680 - DNA, 80 bp, synthetic construct
  misc_feature 1..80: note = Artificially Synthesized Probe
  source 1..80: mol_type = other DNA
ggcgtggtggcgggtgtctgtaatcccagctactcaggacgctgaggcaggaaaatcgcctgaactcgggaggtggaggt

SEQ ID NO: 100681 - DNA, 80 bp, synthetic construct
  misc_feature 1..80: note = Artificially Synthesized Probe
  source 1..80: mol_type = other DNA
accagagcgatgcaattgcccctctcctccagcagagggagactccacccacagcacagggcagggttggggcctgaatg

SEQ ID NO: 100682 - DNA, 80 bp, synthetic construct; identical to SEQ ID NO: 35409
  misc_feature 1..80: note = Artificially Synthesized Probe
  source 1..80: mol_type = other DNA

SEQ ID NO: 100683 - DNA, 80 bp, synthetic construct
  misc_feature 1..80: note = Artificially Synthesized Probe
  source 1..80: mol_type = other DNA
cctgtaatcccagctactcaggaggctgaggcagaagaattgcttgagcctgggaggcagaggctgcagtgagccaagat

SEQ ID NO: 100684 - DNA, 80 bp, synthetic construct
  misc_feature 1..80: note = Artificially Synthesized Probe
  source 1..80: mol_type = other DNA
tggagctcacttttcttgaccccctcccaggaacgtggtcctggtatgggacacaattttccaggttttaacaaaagtca

SEQ ID NO: 100685 - DNA, 80 bp, synthetic construct
  misc_feature 1..80: note = Artificially Synthesized Probe
  source 1..80: mol_type = other DNA
catggctctcaaaaactccagaaggaccacggggcagtgtagactcaggacgcctttccctgccctcagtccctgtgtct

SEQ ID NO: 100686 - DNA, 80 bp, synthetic construct; identical to SEQ ID NO: 35410
  misc_feature 1..80: note = Artificially Synthesized Probe
  source 1..80: mol_type = other DNA

SEQ ID NO: 100687 - DNA, 80 bp, synthetic construct
  misc_feature 1..80: note = Artificially Synthesized Probe
  source 1..80: mol_type = other DNA
aaatttaaaaattagccacaggtggtggtgcacctgcagccctggctagtggggaggctgaggtgggaggatcgcttgag

SEQ ID NO: 100688 - DNA, 80 bp, synthetic construct
  misc_feature 1..80: note = Artificially Synthesized Probe
  source 1..80: mol_type = other DNA
ccagaaaagtgtgaaatatgaaatagaaaacaaacaaaaacctcctacgacacccagcacagccctctgtgcattgtgga

SEQ ID NO: 100689 - DNA, 80 bp, synthetic construct
  misc_feature 1..80: note = Artificially Synthesized Probe
  source 1..80: mol_type = other DNA
tgtccaggctggggtgcagttgtgtgatctgggctcaccgcaacctcctcctcccgggttcaagcgattctcctgcctca

SEQ ID NO: 100690 - DNA, 80 bp, synthetic construct
  misc_feature 1..80: note = Artificially Synthesized Probe
  source 1..80: mol_type = other DNA
gcacaatgctattcccagtgaggtaatctaggaactctacagggcactgcggtccttagctgaggtgctcaaggactccg

SEQ ID NO: 100691 - DNA, 80 bp, synthetic construct; identical to SEQ ID NO: 35411
  misc_feature 1..80: note = Artificially Synthesized Probe
  source 1..80: mol_type = other DNA

SEQ ID NO: 100692 - DNA, 80 bp, synthetic construct
  misc_feature 1..80: note = Artificially Synthesized Probe
  source 1..80: mol_type = other DNA
ccctcttttcccacgcctattctgatcttgccagctctggttctttctgggggcactgggacacggtcctcctgaacagc

SEQ ID NO: 100693 - DNA, 80 bp, synthetic construct; identical to SEQ ID NO: 35412
  misc_feature 1..80: note = Artificially Synthesized Probe
  source 1..80: mol_type = other DNA

SEQ ID NO: 100694 - DNA, 80 bp, synthetic construct
  misc_feature 1..80: note = Artificially Synthesized Probe
  source 1..80: mol_type = other DNA
cccgcccccccgcccagcctcagaacaggagaacgcacagcggggcccccagggaccctcccaacgtcccccgccccccg

SEQ ID NO: 100695 - DNA, 80 bp, synthetic construct
  misc_feature 1..80: note = Artificially Synthesized Probe
  source 1..80: mol_type = other DNA
ggcccccagggaccctcccaacgtcccccgccccccgcccagcctcagaacaggagaacgcacagcggggcccccaggga

SEQ ID NO: 100696 - DNA, 80 bp, synthetic construct
  misc_feature 1..80: note = Artificially Synthesized Probe
  source 1..80: mol_type = other DNA
caggagaacgcacagcggggcccccagggaccctcccaacgtcccccgccccccgcccagcctcagaacaggagaacgca

SEQ ID NO: 100697 - DNA, 80 bp, synthetic construct
  misc_feature 1..80: note = Artificially Synthesized Probe
  source 1..80: mol_type = other DNA
caacgtcccccgccccccgcccagcctcagaacaggagaacacacagcggggcccccagggaccctcccaacgtcccccg

SEQ ID NO: 100698 - DNA, 80 bp, synthetic construct
  misc_feature 1..80: note = Artificially Synthesized Probe
  source 1..80: mol_type = other DNA
acagcggggcccccagggaccctcccaacgtcccccgccccccgcccagcctcagaacaggagaacgcacagcggggccc

SEQ ID NO: 100699 - DNA, 80 bp, synthetic construct
  misc_feature 1..80: note = Artificially Synthesized Probe
  source 1..80: mol_type = other DNA
tcccagcctgagaacaggagaacacacagctgggcccccagggaccctcccaacgtcccccgccccccgcccagcctcag

SEQ ID NO: 100700 - DNA, 80 bp, synthetic construct; identical to SEQ ID NO: 35413
  misc_feature 1..80: note = Artificially Synthesized Probe
  source 1..80: mol_type = other DNA

SEQ ID NO: 100701 - DNA, 80 bp, synthetic construct
  misc_feature 1..80: note = Artificially Synthesized Probe
  source 1..80: mol_type = other DNA
tggctggtccctgtgatgtggcattgatagcacccaatgtacaaatttcccgttgggcagcatcctgggattcccaaagg

SEQ ID NO: 100702 - DNA, 80 bp, synthetic construct
  misc_feature 1..80: note = Artificially Synthesized Probe
  source 1..80: mol_type = other DNA
agaacacacagctgggcccccagggaccctcccaacgtccccctcccagcctgagaacaggagaacacacagctgggccc

SEQ ID NO: 100703 - DNA, 80 bp, synthetic construct; identical to SEQ ID NO: 100699
  misc_feature 1..80: note = Artificially Synthesized Probe
  source 1..80: mol_type = other DNA

SEQ ID NO: 100704 - DNA, 80 bp, synthetic construct
  misc_feature 1..80: note = Artificially Synthesized Probe
  source 1..80: mol_type = other DNA
acacgcaccttgccgttcaccatcacgtcaaagcggatcccgtaggctttcatcagggtgcggaactccaccccggctgc

SEQ ID NO: 100705 - DNA, 80 bp, synthetic construct; identical to SEQ ID NO: 35414
  misc_feature 1..80: note = Artificially Synthesized Probe
  source 1..80: mol_type = other DNA

SEQ ID NO: 100706 - DNA, 80 bp, synthetic construct
  misc_feature 1..80: note = Artificially Synthesized Probe
  source 1..80: mol_type = other DNA
cacacctctcctgggccatctgtccctgcacctcccgctctgacacccacccccaggaaggggcctcaatagtgctggca

SEQ ID NO: 100707 - DNA, 80 bp, synthetic construct
  misc_feature 1..80: note = Artificially Synthesized Probe
  source 1..80: mol_type = other DNA
acagttccattcaatattaattcctatcacgccacccttgataaaagagagatgagggtcagcacacacagctttccgga

SEQ ID NO: 100708 - DNA, 80 bp, synthetic construct; identical to SEQ ID NO: 35415
  misc_feature 1..80: note = Artificially Synthesized Probe
  source 1..80: mol_type = other DNA

SEQ ID NO: 100709 - DNA, 80 bp, synthetic construct
  misc_feature 1..80: note = Artificially Synthesized Probe
  source 1..80: mol_type = other DNA
actttgcagggccaccctcgcccgctgccacggcctgcctgtgtgccacagccagttctgaaaacactgagtccctgggg

SEQ ID NO: 100710 - DNA, 80 bp, synthetic construct
  misc_feature 1..80: note = Artificially Synthesized Probe
  source 1..80: mol_type = other DNA
agtgcccccaggccctcagggagggctccctgcgtgcaccccacccacctccagggctatatcctggaagtcgctcccgg

SEQ ID NO: 100711 - DNA, 80 bp, synthetic construct
  misc_feature 1..80: note = Artificially Synthesized Probe
  source 1..80: mol_type = other DNA
gcctggccaggagtcactcggtccctcaccaacctgagtgctgacagctccccgcagcaacaccccactttacagcaggg

SEQ ID NO: 100712 - DNA, 80 bp, synthetic construct
  misc_feature 1..80: note = Artificially Synthesized Probe
  source 1..80: mol_type = other DNA
ttcccaagtctgaaaagagctacagttcatgcttcacttctccccatttaaaagccagtttccggccaggcgcggtggct

SEQ ID NO: 100713 - DNA, 80 bp, synthetic construct; identical to SEQ ID NO: 35416
  misc_feature 1..80: note = Artificially Synthesized Probe
  source 1..80: mol_type = other DNA

SEQ ID NO: 100714 - DNA, 80 bp, synthetic construct
  misc_feature 1..80: note = Artificially Synthesized Probe
  source 1..80: mol_type = other DNA
cagaacagcctgtccaggaggccccacccctgtgcccctcccccaggcctgggccagtgtgaggcctgttccttgggtcc

SEQ ID NO: 100715 - DNA, 80 bp, synthetic construct
  misc_feature 1..80: note = Artificially Synthesized Probe
  source 1..80: mol_type = other DNA
gtcctgaggctgcagccactcactccggcctggagcttgtctccaacgggcaccaggcaaagatctcacaggtgcccctg

SEQ ID NO: 100716 - DNA, 80 bp, synthetic construct
  misc_feature 1..80: note = Artificially Synthesized Probe
  source 1..80: mol_type = other DNA
tgtccttggagcacgcgccatcaggaatgccttcattctgccaggagagaaggggcacctggatgggggggttcccccag

SEQ ID NO: 100717 - DNA, 80 bp, synthetic construct
  misc_feature 1..80: note = Artificially Synthesized Probe
  source 1..80: mol_type = other DNA
agaagagagtagaccccaaccactgccggtggctctcccacccccacgccagggcccctcgccaaatcaaacctcagcac

SEQ ID NO: 100718 - DNA, 80 bp, synthetic construct; identical to SEQ ID NO: 35417
  misc_feature 1..80: note = Artificially Synthesized Probe
  source 1..80: mol_type = other DNA

SEQ ID NO: 100719 - DNA, 80 bp, synthetic construct
  misc_feature 1..80: note = Artificially Synthesized Probe
  source 1..80: mol_type = other DNA
cacctgactcacaatgacctgaaagttctctgggtcccatttgttctcagcagactcagatagaacagagcagtcacccg

SEQ ID NO: 100720 - DNA, 80 bp, synthetic construct
  misc_feature 1..80: note = Artificially Synthesized Probe
  source 1..80: mol_type = other DNA
ccctgccagccttggccgtgtgctaggtggggactcagacctgggctggaatgacgtagtcggcgacatcccagatccgc

SEQ ID NO: 100721 - DNA, 80 bp, synthetic construct
  misc_feature 1..80: note = Artificially Synthesized Probe
  source 1..80: mol_type = other DNA
attagccgggcgaggcgagcgcctgtagtcccagctactcgggaggctcaggcaggggaatggcgtgaacccgggaggcg

SEQ ID NO: 100722 - DNA, 80 bp, synthetic construct; identical to SEQ ID NO: 35418
  misc_feature 1..80: note = Artificially Synthesized Probe
  source 1..80: mol_type = other DNA

SEQ ID NO: 100723 - DNA, 80 bp, synthetic construct
  misc_feature 1..80: note = Artificially Synthesized Probe
  source 1..80: mol_type = other DNA
cgcaaggtcaggagattgagaccatcctggctaacacagtgaaaccctgtctctactcaaaaaaaaaaaaaaaaatacaa

SEQ ID NO: 100724 - DNA, 80 bp, synthetic construct
  misc_feature 1..80: note = Artificially Synthesized Probe
  source 1..80: mol_type = other DNA
aaataaataaataaataaaagaggcaaagaccactgtccactcagaggccccaagtggacaagcctgggctgaagccaca

SEQ ID NO: 100725 - DNA, 80 bp, synthetic construct
  misc_feature 1..80: note = Artificially Synthesized Probe
  source 1..80: mol_type = other DNA
aggcacggtggctcgcgcctgtactcctagcactttgggagaccaaggcaggaggatcgcttgagcccaggagtttgaga

SEQ ID NO: 100726 - DNA, 80 bp, synthetic construct; identical to SEQ ID NO: 35419
  misc_feature 1..80: note = Artificially Synthesized Probe
  source 1..80: mol_type = other DNA

SEQ ID NO: 100727 - DNA, 80 bp, synthetic construct
  misc_feature 1..80: note = Artificially Synthesized Probe
  source 1..80: mol_type = other DNA
atacaaaaaactcttataatttaacaataaaaagccaaataatccaatttaaaaatgagcaaaggatttgaatagacatt

SEQ ID NO: 100728 - DNA, 80 bp, synthetic construct
  misc_feature 1..80: note = Artificially Synthesized Probe
  source 1..80: mol_type = other DNA
cctacagataacaggtgttgatgaggttgtgaagaaattagaacccccgtatatcactgatagggatgtaaaatgaggta

SEQ ID NO: 100729 - DNA, 80 bp, synthetic construct
  misc_feature 1..80: note = Artificially Synthesized Probe
  source 1..80: mol_type = other DNA
tcaggagttcgaggccagcctgaccaacatggtgaaactccgtgtctactaaaaaaatacaaaaattagccaggcatggt

SEQ ID NO: 100730 - DNA, 80 bp, synthetic construct
  misc_feature 1..80: note = Artificially Synthesized Probe
  source 1..80: mol_type = other DNA
aattgaaaaattgaaaacatgttcacaaaaaacttgtacatgaatgttctcagaagcattcttcttcttttttttttttt

SEQ ID NO: 100731 - DNA, 80 bp, synthetic construct; identical to SEQ ID NO: 35399
  misc_feature 1..80: note = Artificially Synthesized Probe
  source 1..80: mol_type = other DNA

SEQ ID NO: 100732 - DNA, 80 bp, synthetic construct; identical to SEQ ID NO: 35420
  misc_feature 1..80: note = Artificially Synthesized Probe
  source 1..80: mol_type = other DNA

SEQ ID NO: 100733 - DNA, 80 bp, synthetic construct
  misc_feature 1..80: note = Artificially Synthesized Probe
  source 1..80: mol_type = other DNA
aaggccgcatactatacaatttcatttatacgaaatacccagaataggcaaatccatagagacagattctcctgcctcag

SEQ ID NO: 100734 - DNA, 80 bp, synthetic construct
  misc_feature 1..80: note = Artificially Synthesized Probe
  source 1..80: mol_type = other DNA
gcatgagccacagcgcccggccgccaatttcctaattttcatacttgtacttagttaaatatgtcctgctttccctgcca

SEQ ID NO: 100735 - DNA, 80 bp, synthetic construct
  misc_feature 1..80: note = Artificially Synthesized Probe
  source 1..80: mol_type = other DNA
ttctattgttcaagcaaaagcaactccatttattcattcatgcgttcatttcacatctattccctaagcagttaagtgct

SEQ ID NO: 100736 - DNA, 80 bp, synthetic construct
  misc_feature 1..80: note = Artificially Synthesized Probe
  source 1..80: mol_type = other DNA
ggaggaggacgggcaggcctggctgagcaacagcacagcgcctacgaggccgctcaggtgggaggcggccaggggcctgg

SEQ ID NO: 100737 - DNA, 80 bp, synthetic construct; identical to SEQ ID NO: 35421
  misc_feature 1..80: note = Artificially Synthesized Probe
  source 1..80: mol_type = other DNA

SEQ ID NO: 100738 - DNA, 80 bp, synthetic construct
  misc_feature 1..80: note = Artificially Synthesized Probe
  source 1..80: mol_type = other DNA
gatgagtttctccagctctgagtaggcagtgacaccctgtgattataaataacctgccggcgcctgggtcagctgccagg

SEQ ID NO: 100739 - DNA, 80 bp, synthetic construct
  misc_feature 1..80: note = Artificially Synthesized Probe
  source 1..80: mol_type = other DNA
tcatcacctctagcgccagtgggggagtggagagccccctctctacaccctactcctacacccaaggacccaaagaggac

SEQ ID NO: 100740 - DNA, 80 bp, synthetic construct
  misc_feature 1..80: note = Artificially Synthesized Probe
  source 1..80: mol_type = other DNA
gttaaatcctctaaggaagcaaagtctaaaggggcaaccttgcagctaaagaccgtcaacttcattaaacaaaagcctca

SEQ ID NO: 100741 - DNA, 80 bp, synthetic construct; identical to SEQ ID NO: 35422
  misc_feature 1..80: note = Artificially Synthesized Probe
  source 1..80: mol_type = other DNA

SEQ ID NO: 100742 - DNA, 80 bp, synthetic construct
  misc_feature 1..80: note = Artificially Synthesized Probe
  source 1..80: mol_type = other DNA
gcagcccggggtgtccggcagggctgcggggcgcgggggcgggtcggggcggccttttattgacgcggttgagaaagcct

SEQ ID NO: 100743 - DNA, 80 bp, synthetic construct
  misc_feature 1..80: note = Artificially Synthesized Probe
  source 1..80: mol_type = other DNA
aaggaaaggttcattcctggtgtaagggagaagcagagggagtcctcagcctggtgggagaggagaaaaaaggaagaggg

SEQ ID NO: 100744 - DNA, 80 bp, synthetic construct
  misc_feature 1..80: note = Artificially Synthesized Probe
  source 1..80: mol_type = other DNA
gcttctcttacctggaatgcttccccctcacctagttaggctgctataacctttcagatttcaactcataggtcacttcc

SEQ ID NO: 100745 - DNA, 80 bp, synthetic construct; identical to SEQ ID NO: 35400
  misc_feature 1..80: note = Artificially Synthesized Probe
  source 1..80: mol_type = other DNA

SEQ ID NO: 100746 - DNA, 80 bp, synthetic construct
  misc_feature 1..80: note = Artificially Synthesized Probe
  source 1..80: mol_type = other DNA
tatttttttgtattttagtagagacagggtttcaccatgttgcccaggctgttctcaaactcctgaactcaggcaatctg

SEQ ID NO: 100747 - DNA, 80 bp, synthetic construct
  misc_feature 1..80: note = Artificially Synthesized Probe
  source 1..80: mol_type = other DNA
cccctgccttttttgcttcctcccaaacctaaaagtcaccaagttataaaaatgcaaggctttgcgtcagtgaagaagtg

SEQ ID NO: 100748 - DNA, 80 bp, synthetic construct
  misc_feature 1..80: note = Artificially Synthesized Probe
  source 1..80: mol_type = other DNA
tgggactacaggcatgtggacaccatgcccggctaatttttgtatttttagtagagatggggttttgccatattggccag

SEQ ID NO: 100749 - DNA, 80 bp, synthetic construct
  misc_feature 1..80: note = Artificially Synthesized Probe
  source 1..80: mol_type = other DNA
gaagttgctttgctctaggagggttcctgttctggagaccatgtccctgggcccctgacatccctctccaaagcctcagt

SEQ ID NO: 100750 - DNA, 80 bp, synthetic construct; identical to SEQ ID NO: 35401
  misc_feature 1..80: note = Artificially Synthesized Probe
  source 1..80: mol_type = other DNA

SEQ ID NO: 100751 - DNA, 80 bp, synthetic construct
  misc_feature 1..80: note = Artificially Synthesized Probe
  source 1..80: mol_type = other DNA
ctggggaaccgggaggacggaggttgcttttcactgactatcctttgcaccttctaaactttgaatcatgtaagtattac

SEQ ID NO: 100752 - DNA, 80 bp, synthetic construct
  misc_feature 1..80: note = Artificially Synthesized Probe
  source 1..80: mol_type = other DNA
accaaagctggcctttttcccctgagaaccagggcttcttaaatgtcactgtgcacacagatcaccttggaatcttgttg

SEQ ID NO: 100753 - DNA, 80 bp, synthetic construct; identical to SEQ ID NO: 35397
  misc_feature 1..80: note = Artificially Synthesized Probe
  source 1..80: mol_type = other DNA

SEQ ID NO: 100754 - DNA, 80 bp, synthetic construct
  misc_feature 1..80: note = Artificially Synthesized Probe
  source 1..80: mol_type = other DNA
ctgaagtcaggagttggagaccagcctggccaacatggtgaaaccccatctctgctaaaactacaaaaattagccgggca

SEQ ID NO: 100755 - DNA, 80 bp, synthetic construct; identical to SEQ ID NO: 35402
  misc_feature 1..80: note = Artificially Synthesized Probe
  source 1..80: mol_type = other DNA

SEQ ID NO: 100756 - DNA, 80 bp, synthetic construct
  misc_feature 1..80: note = Artificially Synthesized Probe
  source 1..80: mol_type = other DNA
ctcggcagggtcaaggcgactgtatctcccatctgggcaggtccatattccccgggcgtcccgaggctggtggagtcaga

SEQ ID NO: 100757 - DNA, 80 bp, synthetic construct
  misc_feature 1..80: note = Artificially Synthesized Probe
  source 1..80: mol_type = other DNA
ccacctttaaattttatccttggggcaagcccaaatgtccccttgggtgttgtccaagagctttctctgagcaaccatca

SEQ ID NO: 100758 - DNA, 80 bp, synthetic construct; identical to SEQ ID NO: 35403
  misc_feature 1..80: note = Artificially Synthesized Probe
  source 1..80: mol_type = other DNA

SEQ ID NO: 100759 - DNA, 80 bp, synthetic construct
  misc_feature 1..80: note = Artificially Synthesized Probe
  source 1..80: mol_type = other DNA
tgcctggaagcccctgtctcatgcaggcacagactcctctacccagttcagagctgcgggttgttctggccccaaagttt

SEQ ID NO: 100760 - DNA, 80 bp, synthetic construct
  misc_feature 1..80: note = Artificially Synthesized Probe
  source 1..80: mol_type = other DNA
tcaccagaggcagcaacgctcctggcagcactgcaggcaggcagagcattcagagagagcacagcctgccagggttcctg

SEQ ID NO: 100761 - DNA, 80 bp, synthetic construct
  misc_feature 1..80: note = Artificially Synthesized Probe
  source 1..80: mol_type = other DNA
caagatgaggaatatattgcttactaattgtttcttgtgtctgcctcttttgatcttgccttcttacattttcctttaaa

SEQ ID NO: 100762 - DNA, 80 bp, synthetic construct
  misc_feature 1..80: note = Artificially Synthesized Probe
  source 1..80: mol_type = other DNA
tcccgcttgctcagaatgggagctcaagtgagcacccaggaagtaagagtcagctcagggagcacaggagggctgccagg

SEQ ID NO: 100763 - DNA, 80 bp, synthetic construct; identical to SEQ ID NO: 35404
  misc_feature 1..80: note = Artificially Synthesized Probe
  source 1..80: mol_type = other DNA

SEQ ID NO: 100764 - DNA, 80 bp, synthetic construct
  misc_feature 1..80: note = Artificially Synthesized Probe
  source 1..80: mol_type = other DNA
gagcaggcccgagacaggtcccccacccagccagacgccctccccacgcaggctgagcctcgtctgcagagaagccagcg

SEQ ID NO: 100765 - DNA, 80 bp, synthetic construct
  misc_feature 1..80: note = Artificially Synthesized Probe
  source 1..80: mol_type = other DNA
tacagacactgccgggattcaaatctcagcgctgccattcaccggctgtgtgacttgagcaaattaccgagcctttctgt

SEQ ID NO: 100766 - DNA, 80 bp, synthetic construct
  misc_feature 1..80: note = Artificially Synthesized Probe
  source 1..80: mol_type = other DNA
aggcacccatggccatccagggtctcgggagctaagggggaccttgcggggtaaagcaccagccccttcccacagaggct

SEQ ID NO: 100767 - DNA, 80 bp, synthetic construct; identical to SEQ ID NO: 35405
  misc_feature 1..80: note = Artificially Synthesized Probe
  source 1..80: mol_type = other DNA

SEQ ID NO: 100768 - DNA, 80 bp, synthetic construct
  misc_feature 1..80: note = Artificially Synthesized Probe
  source 1..80: mol_type = other DNA
cgggcggagtgggccttgaagaatccctcgccctgcaggccgccaccctgcttcctccagccggtgtcctccaccctgct

SEQ ID NO: 100769 - DNA, 80 bp, synthetic construct
  misc_feature 1..80: note = Artificially Synthesized Probe
  source 1..80: mol_type = other DNA
atcctacgtcctccacccagcgtcctccaccctgcatcctccaccctgcatcctccaccctgagtcctccatccggtgtc

SEQ ID NO: 100770 - DNA, 80 bp, synthetic construct
  misc_feature 1..80: note = Artificially Synthesized Probe
  source 1..80: mol_type = other DNA
ccccgtctctactaaaaatacaaaaaaaattagccgtgcatggtggtgcacgcctgtaatccccgctactcaggaggctg

SEQ ID NO: 100771 - DNA, 80 bp, synthetic construct
  misc_feature 1..80: note = Artificially Synthesized Probe
  source 1..80: mol_type = other DNA
cctgcatcctccaccctgcgtcctccacccagtgtcctccaccctgcgtcctccaccctgcatcctccaccctgcatcct

SEQ ID NO: 100772 - DNA, 80 bp, synthetic construct; identical to SEQ ID NO: 35406
  misc_feature 1..80: note = Artificially Synthesized Probe
  source 1..80: mol_type = other DNA

SEQ ID NO: 100773 - DNA, 80 bp, synthetic construct
  misc_feature 1..80: note = Artificially Synthesized Probe
  source 1..80: mol_type = other DNA
tgcatcctccaccctgcatcctccacccagcgtcctccaccctgcatcctccaccctgagtcctccacccagtgtcctcc

SEQ ID NO: 100774 - DNA, 80 bp, synthetic construct
  misc_feature 1..80: note = Artificially Synthesized Probe
  source 1..80: mol_type = other DNA
cgtcctccaccctgcatcctccacccagcgtcctccacccggcttcctctaccctgcttccttcagcagcacagtcagga

SEQ ID NO: 100775 - DNA, 80 bp, synthetic construct
  misc_feature 1..80: note = Artificially Synthesized Probe
  source 1..80: mol_type = other DNA
gtcccaggctgtgggggtgctgagggagtactaaggtgtctgtcccaattcccattctgatccctgcttctccagaaggc

SEQ ID NO: 100776 - DNA, 80 bp, synthetic construct; identical to SEQ ID NO: 35407
  misc_feature 1..80: note = Artificially Synthesized Probe
  source 1..80: mol_type = other DNA

SEQ ID NO: 100777 - DNA, 80 bp, synthetic construct
  misc_feature 1..80: note = Artificially Synthesized Probe
  source 1..80: mol_type = other DNA
ccgccctgtggcccacagcgccctctcctcccactgctgccgaggccgaatccggttctgtagagcatgtactcagaaca

SEQ ID NO: 100778 - DNA, 80 bp, synthetic construct
  misc_feature 1..80: note = Artificially Synthesized Probe
  source 1..80: mol_type = other DNA
aaaactctctctttttgatgaggtagatgagtaccaggtcgcagaagaaagcaccctgcaaaacaggggttcctgattca

SEQ ID NO: 100779 - DNA, 80 bp, synthetic construct
  misc_feature 1..80: note = Artificially Synthesized Probe
  source 1..80: mol_type = other DNA
gagctcaagctggactggagctcccccgatcccacaggccaggcactccccgaccccgcaccacccggaccccatccaat

SEQ ID NO: 100780 - DNA, 80 bp, synthetic construct
  misc_feature 1..80: note = Artificially Synthesized Probe
  source 1..80: mol_type = other DNA
cagagggacgagctagcccgacgatggcccaggggacattgatccgtgtgaccccagagcagcccacccatgccgtgtgt

SEQ ID NO: 100781 - DNA, 80 bp, synthetic construct; identical to SEQ ID NO: 35433
  misc_feature 1..80: note = Artificially Synthesized Probe
  source 1..80: mol_type = other DNA

SEQ ID NO: 100782 - DNA, 80 bp, synthetic construct
  misc_feature 1..80: note = Artificially Synthesized Probe
  source 1..80: mol_type = other DNA
tgactttgagctctgaataaacatttttatattttcaccttttgccgttcatatgcacacaaggcgaaaattggcatgct

SEQ ID NO: 100783 - DNA, 80 bp, synthetic construct
  misc_feature 1..80: note = Artificially Synthesized Probe
  source 1..80: mol_type = other DNA
aactcccggctaatttttttttgtatttttaatagagatggggtttcaccatgttagccaggatggtctcgatctcctga

SEQ ID NO: 100784 - DNA, 80 bp, synthetic construct
  misc_feature 1..80: note = Artificially Synthesized Probe
  source 1..80: mol_type = other DNA
attacaggcgggagccatcgtgcctggccagtatactaacttttaaaaaaatctactaccacatgccccttgcttcttcc

SEQ ID NO: 100785 - DNA, 80 bp, synthetic construct
  misc_feature 1..80: note = Artificially Synthesized Probe
  source 1..80: mol_type = other DNA
ctttggaaggccaagatgggaggatcccttgagcccaggagttcaagaccagtctggagataaggagactccatctctac

SEQ ID NO: 100786 - DNA, 80 bp, synthetic construct; identical to SEQ ID NO: 35434
  misc_feature 1..80: note = Artificially Synthesized Probe
  source 1..80: mol_type = other DNA

SEQ ID NO: 100787 - DNA, 80 bp, synthetic construct
  misc_feature 1..80: note = Artificially Synthesized Probe
  source 1..80: mol_type = other DNA
tcagaaacagctggattgactacagctcggcatcggcctcatttgaacatggtttgaacagttggctgcctgagatcagc

SEQ ID NO: 100788 - DNA, 80 bp, synthetic construct
  misc_feature 1..80: note = Artificially Synthesized Probe
  source 1..80: mol_type = other DNA
ctacaaacttagtgacttcaaacagcacaaacttattacttaccagtttgcaagatcagaagtccaaaatatgaatctta

SEQ ID NO: 100789 - DNA, 80 bp, synthetic construct
  misc_feature 1..80: note = Artificially Synthesized Probe
  source 1..80: mol_type = other DNA
ttgcctctataatatgcttccccctgcacagatctacccccgccccatgaaatgcttaaaagataacttaactctttgtt

SEQ ID NO: 100790 - DNA, 80 bp, synthetic construct; identical to SEQ ID NO: 35435
  misc_feature 1..80: note = Artificially Synthesized Probe
  source 1..80: mol_type = other DNA

SEQ ID NO: 100791 - DNA, 80 bp, synthetic construct
  misc_feature 1..80: note = Artificially Synthesized Probe
  source 1..80: mol_type = other DNA
aaacaaggggtggattattcatgagttttcagggtaaagggtgggcaattccctgaactgagggttcctccactttttag

SEQ ID NO: 100792 - DNA, 80 bp, synthetic construct
  misc_feature 1..80: note = Artificially Synthesized Probe
  source 1..80: mol_type = other DNA
tggccagcttctttactgtcacctgttttatcagcaaggtctttatgacctgtgtcttgtgctgacctcctatctcatcc

SEQ ID NO: 100793 - DNA, 80 bp, synthetic construct
  misc_feature 1..80: note = Artificially Synthesized Probe
  source 1..80: mol_type = other DNA
caagatcgttaacttaatcacatttgcaagtttccttttctgtgtaaggtaacatcttcacaggtttgggggactagggt

SEQ ID NO: 100794 - DNA, 80 bp, synthetic construct
  misc_feature 1..80: note = Artificially Synthesized Probe
  source 1..80: mol_type = other DNA
tgggaagggagagccctccagatgaggggcaggtgagaagcaaagcccgggagatgggaaagtggggggcaggtgcaggg

SEQ ID NO: 100795 - DNA, 80 bp, synthetic construct; identical to SEQ ID NO: 35436
  misc_feature 1..80: note = Artificially Synthesized Probe
  source 1..80: mol_type = other DNA

SEQ ID NO: 100796 - DNA, 80 bp, synthetic construct
  misc_feature 1..80: note = Artificially Synthesized Probe
  source 1..80: mol_type = other DNA
tctcctcttctgtctacttcagacctcttaggttcttcaaaggctatgtcaaattccatctcctgaaggatcaacatcag

SEQ ID NO: 100797 - DNA, 80 bp, synthetic construct
  misc_feature 1..80: note = Artificially Synthesized Probe
  source 1..80: mol_type = other DNA
gaagatgattttgaggccttggatatttaaaggagaaagggcggataatggaagaagatgaagaaatttttttaatgtgt

SEQ ID NO: 100798 - DNA, 80 bp, synthetic construct; identical to SEQ ID NO: 35437
  misc_feature 1..80: note = Artificially Synthesized Probe
  source 1..80: mol_type = other DNA

SEQ ID NO: 100799 - DNA, 80 bp, synthetic construct
  misc_feature 1..80: note = Artificially Synthesized Probe
  source 1..80: mol_type = other DNA
gagtttgagaccagcctgaccaatatggtgaaaccctatctctactaaaaatacaaaaaattagccgggagtggtggcat

SEQ ID NO: 100800 - DNA, 80 bp, synthetic construct
  misc_feature 1..80: note = Artificially Synthesized Probe
  source 1..80: mol_type = other DNA
ctccatccccccccaaaaaaaaagataagctataaatgtacaattgctagggagaaattcaacagaactgttttagggta

SEQ ID NO: 100801 - DNA, 80 bp, synthetic construct
  misc_feature 1..80: note = Artificially Synthesized Probe
  source 1..80: mol_type = other DNA
gcatcggtggccctagaatggtgcccacaggagtgccggggacatttctttgctactgcctgagccccagcagccagaga

SEQ ID NO: 100802 - DNA, 80 bp, synthetic construct
  misc_feature 1..80: note = Artificially Synthesized Probe
  source 1..80: mol_type = other DNA
caagatgtattttcctttcacagtctgtaagtggtaagattcattttcttctaggcaatttatgtcttcttccctccctt

SEQ ID NO: 100803 - DNA, 80 bp, synthetic construct; identical to SEQ ID NO: 35438
  misc_feature 1..80: note = Artificially Synthesized Probe
  source 1..80: mol_type = other DNA

SEQ ID NO: 100804 - DNA, 80 bp, synthetic construct
  misc_feature 1..80: note = Artificially Synthesized Probe
  source 1..80: mol_type = other DNA
gaagcctccctcagtttcctgccacattggcctctccatagctcacaaaatggcagcttgcttcatcaaggtgagcaagg

SEQ ID NO: 100805 - DNA, 80 bp, synthetic construct
  misc_feature 1..80: note = Artificially Synthesized Probe
  source 1..80: mol_type = other DNA
acagcagagacgggaattactggggaccatcttagaagtctgtccaccatatacttttcctgtagtttcctaattcttta

SEQ ID NO: 100806 - DNA, 80 bp, synthetic construct
  misc_feature 1..80: note = Artificially Synthesized Probe
  source 1..80: mol_type = other DNA
cctgcatgacatggcaaaaccccatctctacaaaaatacaaaaatcagctgggtgtgatggtgcacacctgtagtcctgg

SEQ ID NO: 100807 - DNA, 80 bp, synthetic construct; identical to SEQ ID NO: 35439
  misc_feature 1..80: note = Artificially Synthesized Probe
  source 1..80: mol_type = other DNA

SEQ ID NO: 100808 - DNA, 80 bp, synthetic construct
  misc_feature 1..80: note = Artificially Synthesized Probe
  source 1..80: mol_type = other DNA
ttctccagagtatctgcctagaagtcaaattgctgggtttggggctggctaataacaccaagttgggttttttttgtttt

SEQ ID NO: 100809 - DNA, 80 bp, synthetic construct
  misc_feature 1..80: note = Artificially Synthesized Probe
  source 1..80: mol_type = other DNA
gtggagtgcctcttcatgttttcatgttgatttgcctaagttctttaaatagtctgcatgctaagcctttgttggtttta

SEQ ID NO: 100810 - DNA, 80 bp, synthetic construct
  misc_feature 1..80: note = Artificially Synthesized Probe
  source 1..80: mol_type = other DNA
acagggtctcactatgttgccctggctggccttgaactcctggctcaagtgatcttcccaccttggcctcccaaagcact

SEQ ID NO: 100811 - DNA, 80 bp, synthetic construct
  misc_feature 1..80: note = Artificially Synthesized Probe
  source 1..80: mol_type = other DNA
atcctgtatcctcttctagagattcaaagttctgactttcacatttaagtctttatctccctccagctgatttttgtgta

SEQ ID NO: 100812 - DNA, 80 bp, synthetic construct; identical to SEQ ID NO: 35440
  misc_feature 1..80: note = Artificially Synthesized Probe
  source 1..80: mol_type = other DNA

SEQ ID NO: 100813 - DNA, 80 bp, synthetic construct
  misc_feature 1..80: note = Artificially Synthesized Probe
  source 1..80: mol_type = other DNA
cccagggcctctcccagcatgcccaggctagccctctacccagcgtccatgagtagtaatcaagatcacaagtgcttcct

SEQ ID NO: 100814 - DNA, 80 bp, synthetic construct
  misc_feature 1..80: note = Artificially Synthesized Probe
  source 1..80: mol_type = other DNA
ttgaatatataaatccattggagagaattcatacctttacggcaacaaggcttcctaaccatatacatagtatttctatt

SEQ ID NO: 100815 - DNA, 80 bp, synthetic construct
  misc_feature 1..80: note = Artificially Synthesized Probe
  source 1..80: mol_type = other DNA
tgctagaaaaaaagaaaaatatttgtttcctatttattgctgatgtatagaaatgtaatttattttttcctctttacttt

SEQ ID NO: 100816 - DNA, 80 bp, synthetic construct; identical to SEQ ID NO: 35441
  misc_feature 1..80: note = Artificially Synthesized Probe
  source 1..80: mol_type = other DNA

SEQ ID NO: 100817 - DNA, 80 bp, synthetic construct
  misc_feature 1..80: note = Artificially Synthesized Probe
  source 1..80: mol_type = other DNA
ttttagtagagacagggttttgccacgttggccaggctggtctccaactcccgacctcatgggatctgcccacctcagct

SEQ ID NO: 100818 - DNA, 80 bp, synthetic construct
  misc_feature 1..80: note = Artificially Synthesized Probe
  source 1..80: mol_type = other DNA
tatcttcagtaatatttcttttgctttcctaatattttttctcttgatcaatgttgccagagatttgtcagttttattgg

SEQ ID NO: 100819 - DNA, 80 bp, synthetic construct
  misc_feature 1..80: note = Artificially Synthesized Probe
  source 1..80: mol_type = other DNA
gtatcacttttacatctccccaaaagttttgaaaatagtattttagttattgctcagtcctaagtattattacttaattt

SEQ ID NO: 100820 - DNA, 80 bp, synthetic construct; identical to SEQ ID NO: 35442
  misc_feature 1..80: note = Artificially Synthesized Probe
  source 1..80: mol_type = other DNA

SEQ ID NO: 100821 - DNA, 80 bp, synthetic construct
  misc_feature 1..80: note = Artificially Synthesized Probe
  source 1..80: mol_type = other DNA
ctattgttgattgagaaagaagagttgaaatcttcaactctgatggtggttttgtcaacttcttttccctatgaatgtat

SEQ ID NO: 100822 - DNA, 80 bp, synthetic construct
  misc_feature 1..80: note = Artificially Synthesized Probe
  source 1..80: mol_type = other DNA
agctaggactacacgtgcatgccacagtgcctggctaattattttgtattttttgtagagatggggttttaccatattgc

SEQ ID NO: 100823 - DNA, 80 bp, synthetic construct
  misc_feature 1..80: note = Artificially Synthesized Probe
  source 1..80: mol_type = other DNA
acaagtttagaatatcttctaggtaagttaaaccgtatatcattaggttgtaatcctctctattgataccaatgtgtttt

SEQ ID NO: 100824 - DNA, 80 bp, synthetic construct; identical to SEQ ID NO: 35424
  misc_feature 1..80: note = Artificially Synthesized Probe
  source 1..80: mol_type = other DNA

SEQ ID NO: 100825 - DNA, 80 bp, synthetic construct
  misc_feature 1..80: note = Artificially Synthesized Probe
  source 1..80: mol_type = other DNA
tttatttaatgaaaactctcttttaactggcaatattaatcctgttatatttattttgattatttacttttttttttttt

SEQ ID NO: 100826 - DNA, 80 bp, synthetic construct; identical to SEQ ID NO: 35443
  misc_feature 1..80: note = Artificially Synthesized Probe
  source 1..80: mol_type = other DNA

SEQ ID NO: 100827 - DNA, 80 bp, synthetic construct
  misc_feature 1..80: note = Artificially Synthesized Probe
  source 1..80: mol_type = other DNA
tttccatgtgtagaaatttataaatgctatttctattattttggtgaatatctttatttattttgtttcttaaagacagg

SEQ ID NO: 100828 - DNA, 80 bp, synthetic construct
  misc_feature 1..80: note = Artificially Synthesized Probe
  source 1..80: mol_type = other DNA
tttttgtacagacaggatcttcctatgttgcccaggctggtctcaaactcctgggtgcaaacaatcctcctgcctttgcc

SEQ ID NO: 100829 - DNA, 80 bp, synthetic construct
  misc_feature 1..80: note = Artificially Synthesized Probe
  source 1..80: mol_type = other DNA
gtttgagaccagcctgggtaacatagcgagactctgtctctacaaaaaattttaaaaattagctgggtgtggtggcatgc

SEQ ID NO: 100830 - DNA, 80 bp, synthetic construct
  misc_feature 1..80: note = Artificially Synthesized Probe
  source 1..80: mol_type = other DNA
ctagagttaaacaatatcttaattcccattttaatcaaggacctcaaaatacttcaactctctcatcctcctgccaaatt

SEQ ID NO: 100831 - DNA, 80 bp, synthetic construct; identical to SEQ ID NO: 35444
  misc_feature 1..80: note = Artificially Synthesized Probe
  source 1..80: mol_type = other DNA

SEQ ID NO: 100832 - DNA, 80 bp, synthetic construct
  misc_feature 1..80: note = Artificially Synthesized Probe
  source 1..80: mol_type = other DNA
tacgagtgcacgattctaggttaacagttacaactgacccttgaataacattgtggataggactgctgacccccaatgta

SEQ ID NO: 100833 - DNA, 80 bp, synthetic construct
  misc_feature 1..80: note = Artificially Synthesized Probe
  source 1..80: mol_type = other DNA
tctcaaaaaaaaaaaaaaaatagtaaatcttgtataactttgactctccaaaacttaactactaatagactactgttgat

SEQ ID NO: 100834 - DNA, 80 bp, synthetic construct
  misc_feature 1..80: note = Artificially Synthesized Probe
  source 1..80: mol_type = other DNA
tatatttactgttcattaagtggaagtggatcatcataagggtcttcagcctcgtcttcatgttgagtaggctgaggagg

SEQ ID NO: 100835 - DNA, 80 bp, synthetic construct; identical to SEQ ID NO: 35445
  misc_feature 1..80: note = Artificially Synthesized Probe
  source 1..80: mol_type = other DNA

SEQ ID NO: 100836 - DNA, 80 bp, synthetic construct
  misc_feature 1..80: note = Artificially Synthesized Probe
  source 1..80: mol_type = other DNA
cttcctgtcacttcttatctgttcttaacatagccccagacagcgcctccctcccatctcctgagcagccatcggcctct

SEQ ID NO: 100837 - DNA, 80 bp, synthetic construct
  misc_feature 1..80: note = Artificially Synthesized Probe
  source 1..80: mol_type = other DNA
tttaaaaagtatattttatccatgatccagttgtttcttaagaggaaggtccttcagagtacctggtctgccacaattcc

SEQ ID NO: 100838 - DNA, 80 bp, synthetic construct
  misc_feature 1..80: note = Artificially Synthesized Probe
  source 1..80: mol_type = other DNA
gtgtgcccatccctctgctatttttctagttcaaatgcaaacccttcaggtcaggggattcgctttctgtcagtctcatt

SEQ ID NO: 100839 - DNA, 80 bp, synthetic construct
  misc_feature 1..80: note = Artificially Synthesized Probe
  source 1..80: mol_type = other DNA
aactggctcacacgatcacaaggcaaagtcccacgatctgcaagctggggaagagagaagctggcagtggctcagtctga

SEQ ID NO: 100840 - DNA, 80 bp, synthetic construct; identical to SEQ ID NO: 35446
  misc_feature 1..80: note = Artificially Synthesized Probe
  source 1..80: mol_type = other DNA

SEQ ID NO: 100841 - DNA, 80 bp, synthetic construct
  misc_feature 1..80: note = Artificially Synthesized Probe
  source 1..80: mol_type = other DNA
accatcacaaggagaaatgctgggagagccatggctggcccagcccctcctcactgcatcctctgctttcccatgtgtct

SEQ ID NO: 100842 - DNA, 80 bp, synthetic construct
  misc_feature 1..80: note = Artificially Synthesized Probe
  source 1..80: mol_type = other DNA
gtggccagtggtagcacaggcgaccagaaggtgagtgtcatagctgtggggtggcagtgtggatgggcttcagcagggca

SEQ ID NO: 100843 - DNA, 80 bp, synthetic construct; identical to SEQ ID NO: 35447
  misc_feature 1..80: note = Artificially Synthesized Probe
  source 1..80: mol_type = other DNA

SEQ ID NO: 100844 - DNA, 80 bp, synthetic construct
  misc_feature 1..80: note = Artificially Synthesized Probe
  source 1..80: mol_type = other DNA
aattgcaaatgatactgagttctatggaggccacaaactggtagccccaagggatgctggtccatgctcctggatcggtt

SEQ ID NO: 100845 - DNA, 80 bp, synthetic construct
  misc_feature 1..80: note = Artificially Synthesized Probe
  source 1..80: mol_type = other DNA
atacaaaaattagctgggcgtagtggcgagcgcctgtaatcccagctactcaggaggctgaggcaggagaatctcttgaa

SEQ ID NO: 100846 - DNA, 80 bp, synthetic construct
  misc_feature 1..80: note = Artificially Synthesized Probe
  source 1..80: mol_type = other DNA
ctgaggtcaaggtgccagcagggccagatttttctggaggctccaggggagaataattatttgcctcctccagcttctgg

SEQ ID NO: 100847 - DNA, 80 bp, synthetic construct
  misc_feature 1..80: note = Artificially Synthesized Probe
  source 1..80: mol_type = other DNA
gggtgacagagtaagactctgtctcaaaaaaaaagaggcaaaaacacctaaccgagggtcacataaattaaaggtggcaa

SEQ ID NO: 100848 - DNA, 80 bp, synthetic construct
  misc_feature 1..80: note = Artificially Synthesized Probe
  source 1..80: mol_type = other DNA
ggagtagctggagagagaagaccccagcagccctgggaagtgccagtctcatggctgtgggttctttgccatgtacaagt

SEQ ID NO: 100849 - DNA, 80 bp, synthetic construct
  misc_feature 1..80: note = Artificially Synthesized Probe
  source 1..80: mol_type = other DNA
ctcaagatccttttttatttttttgagacaagagtctcgctctgtcgcccaggctggactgcagtggtgcaatctcggct

SEQ ID NO: 100850 - DNA, 80 bp, synthetic construct; identical to SEQ ID NO: 35448
  misc_feature 1..80: note = Artificially Synthesized Probe
  source 1..80: mol_type = other DNA

SEQ ID NO: 100851 - DNA, 80 bp, synthetic construct
  misc_feature 1..80: note = Artificially Synthesized Probe
  source 1..80: mol_type = other DNA
tctgggccaacagccacttattcccagcagaaccagccaagcaggcttctccctgggggaacacagagcttgactatcca

SEQ ID NO: 100852 - DNA, 80 bp, synthetic construct
  misc_feature 1..80: note = Artificially Synthesized Probe
  source 1..80: mol_type = other DNA
ttggggaaactgaggaagttctgtatggcaagaaaggtagatggaacaggaggtgaaggagtcagtttgaagagtttggt

SEQ ID NO: 100853 - DNA, 80 bp, synthetic construct
  misc_feature 1..80: note = Artificially Synthesized Probe
  source 1..80: mol_type = other DNA
aggctgacaccatggtccaggcagaggcagtgatggccgtggcgttttcctggatttccactgtctacagggcaggtccg

SEQ ID NO: 100854 - DNA, 80 bp, synthetic construct; identical to SEQ ID NO: 35449
  misc_feature 1..80: note = Artificially Synthesized Probe
  source 1..80: mol_type = other DNA

SEQ ID NO: 100855 - DNA, 80 bp, synthetic construct
  misc_feature 1..80: note = Artificially Synthesized Probe
  source 1..80: mol_type = other DNA
gctgctgggcccctactccctttcccagatctacctcaaagcacactccttcacaaacgaccctgccaggcagagtgtct

SEQ ID NO: 100856 - DNA, 80 bp, synthetic construct
  misc_feature 1..80: note = Artificially Synthesized Probe
  source 1..80: mol_type = other DNA
gggggtccagtgggtgtttgttgaatgactaagagaagtcattagtgatctgctctcccataggttcagatttcatacta

SEQ ID NO: 100857 - DNA, 80 bp, synthetic construct; identical to SEQ ID NO: 35450
  misc_feature 1..80: note = Artificially Synthesized Probe
  source 1..80: mol_type = other DNA

SEQ ID NO: 100858 - DNA, 80 bp, synthetic construct
  misc_feature 1..80: note = Artificially Synthesized Probe
  source 1..80: mol_type = other DNA
tggcatgatctcggctcactgcaacctgcgtctcccaggttcaagcgatcctcctgcttcagcgtccctagtagctggga

SEQ ID NO: 100859 - DNA, 80 bp, synthetic construct
  misc_feature 1..80: note = Artificially Synthesized Probe
  source 1..80: mol_type = other DNA
gccctctattcctttttgatacctcaaatatctataacaaaaagtagataatgacactgtcttatacaagaatatagata

SEQ ID NO: 100860 - DNA, 80 bp, synthetic construct
  misc_feature 1..80: note = Artificially Synthesized Probe
  source 1..80: mol_type = other DNA
tgtaatcccagcactttgggaggccgaggcaggcggatcacaaggtcaggagatcgagaccatcctggctaacatggtga

SEQ ID NO: 100861 - DNA, 80 bp, synthetic construct
  misc_feature 1..80: note = Artificially Synthesized Probe
  source 1..80: mol_type = other DNA
ctcattttgaacaataatatcatgattagtatcattatgtgtattaaacatataagtagcagccagacatggtggctcac

SEQ ID NO: 100862 - DNA, 80 bp, synthetic construct
  misc_feature 1..80: note = Artificially Synthesized Probe
  source 1..80: mol_type = other DNA
ggctgatgtgggaggattgctcgagcccagaaggtcaagactacatgattgtgccactgcactccagcctgggtgacaga

SEQ ID NO: 100863 - DNA, 80 bp, synthetic construct; identical to SEQ ID NO: 35451
  misc_feature 1..80: note = Artificially Synthesized Probe
  source 1..80: mol_type = other DNA

SEQ ID NO: 100864 - DNA, 80 bp, synthetic construct
  misc_feature 1..80: note = Artificially Synthesized Probe
  source 1..80: mol_type = other DNA
gaaaggacaatgcttccccggccctaactaagacgtggctatgaatatgtttagaaggtcatctgggtcagtctcatgtg

SEQ ID NO: 100865 - DNA, 80 bp, synthetic construct
  misc_feature 1..80: note = Artificially Synthesized Probe
  source 1..80: mol_type = other DNA
tattttattggaatgaccttgcagtcatatattcggatgagggaggaaggatttacaaacaaatgtttgctttctcagcc

SEQ ID NO: 100866 - DNA, 80 bp, synthetic construct
  misc_feature 1..80: note = Artificially Synthesized Probe
  source 1..80: mol_type = other DNA
gggtgtgcctgcagaggcttcacatcgaacctctcattgtggtggttgggaattccttccaaaatccctgggggtggcca

SEQ ID NO: 100867 - DNA, 80 bp, synthetic construct; identical to SEQ ID NO: 35452
  misc_feature 1..80: note = Artificially Synthesized Probe
  source 1..80: mol_type = other DNA

SEQ ID NO: 100868 - DNA, 80 bp, synthetic construct
  misc_feature 1..80: note = Artificially Synthesized Probe
  source 1..80: mol_type = other DNA
cccccttgtggtgatggggcaaatgctggcctgtcccacgtattccgtgttaactgttaaaaaaagaaagaaaattagca

SEQ ID NO: 100869 - DNA, 80 bp, synthetic construct
  misc_feature 1..80: note = Artificially Synthesized Probe
  source 1..80: mol_type = other DNA
ggctcaaaaactccctactccatgctctacagctgatatgggagagatttctgcagagctgtctacatgggggaataaca

SEQ ID NO: 100870 - DNA, 80 bp, synthetic construct
  misc_feature 1..80: note = Artificially Synthesized Probe
  source 1..80: mol_type = other DNA
caccattttatgctggtgtgcactgggggctgtgccctgtaaaaagatgaagatcctttgtggggtcagcaaaagtggga

SEQ ID NO: 100871 - DNA, 80 bp, synthetic construct; identical to SEQ ID NO: 35453
  misc_feature 1..80: note = Artificially Synthesized Probe
  source 1..80: mol_type = other DNA

SEQ ID NO: 100872 - DNA, 80 bp, synthetic construct; identical to SEQ ID NO: 35425
  misc_feature 1..80: note = Artificially Synthesized Probe
  source 1..80: mol_type = other DNA

SEQ ID NO: 100873 - DNA, 80 bp, synthetic construct
  misc_feature 1..80: note = Artificially Synthesized Probe
  source 1..80: mol_type = other DNA
ggttcaagtgattctcctacctcagcctcctgagtagctgcaattacaggtgcatgcctccacgcccagctaatttttgt

SEQ ID NO: 100874 - DNA, 80 bp, synthetic construct
  misc_feature 1..80: note = Artificially Synthesized Probe
  source 1..80: mol_type = other DNA
tgtcttgggctcctttttttaaatggatgaattgtgttttgggtgaatttggttgtgacttttggagtaaaaggcaaaaa

SEQ ID NO: 100875 - DNA, 80 bp, synthetic construct
  misc_feature 1..80: note = Artificially Synthesized Probe
  source 1..80: mol_type = other DNA
tcctggccaacatggtgaaatcccatctctactaaaaatacaaaaattagccaggtgtggtggcatgcgcctatagtacc

SEQ ID NO: 100876 - DNA, 80 bp, synthetic construct
  misc_feature 1..80: note = Artificially Synthesized Probe
  source 1..80: mol_type = other DNA
ggagttgctatgcctcttgcaagagttggagggctctatgctagtttctgagcatgactcttccctgctggtgtccagag

SEQ ID NO: 100877 - DNA, 80 bp, synthetic construct; identical to SEQ ID NO: 35454
  misc_feature 1..80: note = Artificially Synthesized Probe
  source 1..80: mol_type = other DNA

SEQ ID NO: 100878 - DNA, 80 bp, synthetic construct
  misc_feature 1..80: note = Artificially Synthesized Probe
  source 1..80: mol_type = other DNA
aggtcaaacctggagcctgaaatccttcgaaatgaaagcttttcattcccaaactcatatcagagcaggccctgagacct

SEQ ID NO: 100879 - DNA, 80 bp, synthetic construct
  misc_feature 1..80: note = Artificially Synthesized Probe
  source 1..80: mol_type = other DNA
tcacagcactgacacgtagcagactcggggtttgaaccccggacgtcccaacaccggagcaggtttagaggcatgaggat

SEQ ID NO: 100880 - DNA, 80 bp, synthetic construct
  misc_feature 1..80: note = Artificially Synthesized Probe
  source 1..80: mol_type = other DNA
gatgtattttcaagttgcatgtagttggcctggcccgatgccaggggacagcctctgtacagtgcctgacatgcggtaat

SEQ ID NO: 100881 - DNA, 80 bp, synthetic construct; identical to SEQ ID NO: 35455
  misc_feature 1..80: note = Artificially Synthesized Probe
  source 1..80: mol_type = other DNA

SEQ ID NO: 100882 - DNA, 80 bp, synthetic construct
  misc_feature 1..80: note = Artificially Synthesized Probe
  source 1..80: mol_type = other DNA
tagggagttctcggctttctaggttcaagattcagggaacgttgcaaggagcaaaatattaataaatgtggtccccgctt

SEQ ID NO: 100883 - DNA, 80 bp, synthetic construct
  misc_feature 1..80: note = Artificially Synthesized Probe
  source 1..80: mol_type = other DNA
gcttcgcagcccaccctgcctccaaatgctggggagtggactcccctgggcactgctccctgtgggcagagctcattcaa

SEQ ID NO: 100884 - DNA, 80 bp, synthetic construct
  misc_feature 1..80: note = Artificially Synthesized Probe
  source 1..80: mol_type = other DNA
tgaggctccaccaggaggtgaggtggctatgggaaaccagcagcggtctcagggccctgtgactcaggcaatgcccttct

SEQ ID NO: 100885 - DNA, 80 bp, synthetic construct
  misc_feature 1..80: note = Artificially Synthesized Probe
  source 1..80: mol_type = other DNA
tcctgccctggccaacggggcacaatcctgtcacacagctgtgtggcagataaatcctgagcacctactatgtgccaagt

SEQ ID NO: 100886 - DNA, 80 bp, synthetic construct; identical to SEQ ID NO: 35456
  misc_feature 1..80: note = Artificially Synthesized Probe
  source 1..80: mol_type = other DNA

SEQ ID NO: 100887 - DNA, 80 bp, synthetic construct
  misc_feature 1..80: note = Artificially Synthesized Probe
  source 1..80: mol_type = other DNA
cttagtggctgggagaactataggtaaaataattacataaaacacctagtgtgtccaacgctgtgacatgctatgtagaa

SEQ ID NO: 100888 - DNA, 80 bp, synthetic construct
  misc_feature 1..80: note = Artificially Synthesized Probe
  source 1..80: mol_type = other DNA
aacggcaagtgcgtgggccctgaggtgagatcatgcctgtggtttggaggaatgcagggaggctagtgcagctggggcgg

SEQ ID NO: 100889 - DNA, 80 bp, synthetic construct; identical to SEQ ID NO: 35457
  misc_feature 1..80: note = Artificially Synthesized Probe
  source 1..80: mol_type = other DNA

SEQ ID NO: 100890 - DNA, 80 bp, synthetic construct
  misc_feature 1..80: note = Artificially Synthesized Probe
  source 1..80: mol_type = other DNA
ccagctaatttttgtatttttagtagagatgggatttcaccaggttggccagacaggtctcgaactcctgacctcaaatg

SEQ ID NO: 100891 - DNA, 80 bp, synthetic construct
  misc_feature 1..80: note = Artificially Synthesized Probe
  source 1..80: mol_type = other DNA
gcaattctcctgcctcagcctcccgagtagctgtgattataggcatccaccacaatgcctggctaatttttttgtgtttt

SEQ ID NO: 100892 - DNA, 80 bp, synthetic construct
  misc_feature 1..80: note = Artificially Synthesized Probe
  source 1..80: mol_type = other DNA
gtttcattcttaaagtgattaaactgacactgatttggtgacaggtcaacttattgcctccacccaggcatcacctcctc

SEQ ID NO: 100893 - DNA, 80 bp, synthetic construct; identical to SEQ ID NO: 35458
  misc_feature 1..80: note = Artificially Synthesized Probe
  source 1..80: mol_type = other DNA

SEQ ID NO: 100894 - DNA, 80 bp, synthetic construct
  misc_feature 1..80: note = Artificially Synthesized Probe
  source 1..80: mol_type = other DNA
tccagcccaggctggagtgcagtggcaagatcttggctcaccgcaagctccacctcccgggttcacgcaattctcctgcc

SEQ ID NO: 100895 - DNA, 80 bp, synthetic construct
  misc_feature 1..80: note = Artificially Synthesized Probe
  source 1..80: mol_type = other DNA
gagaggaggaaaagtcttcagaagtggggacgcagacctgagtctcccctgcctctctcctagggggcaaactgtcctcc

SEQ ID NO: 100896 - DNA, 80 bp, synthetic construct
  misc_feature 1..80: note = Artificially Synthesized Probe
  source 1..80: mol_type = other DNA
tggtaggccgagaaggcagccctgcatcgggggcctgggcttccaggcagtggcctggctagggaaaggggtacagagcc

SEQ ID NO: 100897 - DNA, 80 bp, synthetic construct
  misc_feature 1..80: note = Artificially Synthesized Probe
  source 1..80: mol_type = other DNA
tgacccccaacacccagcccccgcaggaggtgtacgcgtgcaggtgagaggtcctggggtgctggggtgggtccagacaa

SEQ ID NO: 100898 - DNA, 80 bp, synthetic construct; identical to SEQ ID NO: 35459
  misc_feature 1..80: note = Artificially Synthesized Probe
  source 1..80: mol_type = other DNA

SEQ ID NO: 100899 - DNA, 80 bp, synthetic construct
  misc_feature 1..80: note = Artificially Synthesized Probe
  source 1..80: mol_type = other DNA
ccctgtctctactaaaaaatacaaaaattggccgggcgtggtggcgcatgcctgtaatccagctactcaggaggccgagg

SEQ ID NO: 100900 - DNA, 80 bp, synthetic construct
  misc_feature 1..80: note = Artificially Synthesized Probe
  source 1..80: mol_type = other DNA
acatggtgaaaccccgtctctactaaaaatacaaaaaattagccaggtgttgtggcatgtgcctgtaatcccagctactc

SEQ ID NO: 100901 - DNA, 80 bp, synthetic construct
  misc_feature 1..80: note = Artificially Synthesized Probe
  source 1..80: mol_type = other DNA
aaattaaataaaatgcacctttctggctgcctgtgagctgctgggtcttatccctgaggacggggcccatctgcattttg

SEQ ID NO: 100902 - DNA, 80 bp, synthetic construct; identical to SEQ ID NO: 35460
  misc_feature 1..80: note = Artificially Synthesized Probe
  source 1..80: mol_type = other DNA

SEQ ID NO: 100903 - DNA, 80 bp, synthetic construct
  misc_feature 1..80: note = Artificially Synthesized Probe
  source 1..80: mol_type = other DNA
ggtagtgaataagtctcatgagatctgatggttttatcaggggtttccacttttgcatcttgctcattttctcttgccgc

SEQ ID NO: 100904 - DNA, 80 bp, synthetic construct
  misc_feature 1..80: note = Artificially Synthesized Probe
  source 1..80: mol_type = other DNA
atggactaatacagtaaattgataccagtagaggggggcgttgctgaaaagatacccaaaatgtggaagcaactttggaa

SEQ ID NO: 100905 - DNA, 80 bp, synthetic construct
  misc_feature 1..80: note = Artificially Synthesized Probe
  source 1..80: mol_type = other DNA
gatgaggaacttgttgggaaccggagcaaaggtgactcttgttatgttttagcaaagagactggtggcattttgtacctg

SEQ ID NO: 100906 - DNA, 80 bp, synthetic construct
  misc_feature 1..80: note = Artificially Synthesized Probe
  source 1..80: mol_type = other DNA
caggcttgagccaccgcgcccagccgggtttccttctgaatagaccagttggcatgacagtggggagcctggacaagtct

SEQ ID NO: 100907 - DNA, 80 bp, synthetic construct; identical to SEQ ID NO: 35461
  misc_feature 1..80: note = Artificially Synthesized Probe
  source 1..80: mol_type = other DNA

SEQ ID NO: 100908 - DNA, 80 bp, synthetic construct
  misc_feature 1..80: note = Artificially Synthesized Probe
  source 1..80: mol_type = other DNA
gtgccctgcatcccagctgctccagccatggctaaaaggggccagtgtagagctcaggctgtggcttcagagggtggaag

SEQ ID NO: 100909 - DNA, 80 bp, synthetic construct
  misc_feature 1..80: note = Artificially Synthesized Probe
  source 1..80: mol_type = other DNA
tctgctacagcagtgcagaggggaaatgttggtttggagcccccacacagagtccctactgggacaccacgtagtggagt

SEQ ID NO: 100910 - DNA, 80 bp, synthetic construct
  misc_feature 1..80: note = Artificially Synthesized Probe
  source 1..80: mol_type = other DNA
taagaccatgggaacccacctcttgtgtcagcatgacctggatgtgagacctggagtcaaagatcattttggagctttaa

SEQ ID NO: 100911 - DNA, 80 bp, synthetic construct
  misc_feature 1..80: note = Artificially Synthesized Probe
  source 1..80: mol_type = other DNA
ggaagggacttgccctgtctcagatgagattttggattgtgaacttttgggttaatgctgaaatgagttaagactttggg

SEQ ID NO: 100912 - DNA, 80 bp, synthetic construct; identical to SEQ ID NO: 35462
  misc_feature 1..80: note = Artificially Synthesized Probe
  source 1..80: mol_type = other DNA

SEQ ID NO: 100913 - DNA, 80 bp, synthetic construct
  misc_feature 1..80: note = Artificially Synthesized Probe
  source 1..80: mol_type = other DNA
aaaacggactaatacacgggtggaaggggtacccactagttcctgcctcataacttgttagatggattccatgagctaat

SEQ ID NO: 100914 - DNA, 80 bp, synthetic construct
  misc_feature 1..80: note = Artificially Synthesized Probe
  source 1..80: mol_type = other DNA
taaggagctgcttttctgctctctctagtatttttgaaaatgaggacttcctgaagtcagtgactactctggccatgaaa

SEQ ID NO: 100915 - DNA, 80 bp, synthetic construct; identical to SEQ ID NO: 35463
  misc_feature 1..80: note = Artificially Synthesized Probe
  source 1..80: mol_type = other DNA

SEQ ID NO: 100916 - DNA, 80 bp, synthetic construct
  misc_feature 1..80: note = Artificially Synthesized Probe
  source 1..80: mol_type = other DNA
agccaccaaagcaggtcacaccccagctccagcactttccatggctcccatctcctcctgcttagtctgtttccaggccc

SEQ ID NO: 100917 - DNA, 80 bp, synthetic construct; identical to SEQ ID NO: 35426
  misc_feature 1..80: note = Artificially Synthesized Probe
  source 1..80: mol_type = other DNA

SEQ ID NO: 100918 - DNA, 80 bp, synthetic construct
  misc_feature 1..80: note = Artificially Synthesized Probe
  source 1..80: mol_type = other DNA
gactgggcctcatccagcctagcaccctgaccctccccaccactgccttgctttgcctcgggaccctgtccttccatgcc

SEQ ID NO: 100919 - DNA, 80 bp, synthetic construct
  misc_feature 1..80: note = Artificially Synthesized Probe
  source 1..80: mol_type = other DNA
caggaattcatccctctttcttttcacccccacacaacatcctttcttcctttcttgccattccatcttttcttttcttt

SEQ ID NO: 100920 - DNA, 80 bp, synthetic construct
  misc_feature 1..80: note = Artificially Synthesized Probe
  source 1..80: mol_type = other DNA
ggcatgtgccaccacgcctggctaattttgtatttttagtagagatggggtttctccgtgttggtcaggctggtctcgaa

SEQ ID NO: 100921 - DNA, 80 bp, synthetic construct; identical to SEQ ID NO: 35464
  misc_feature 1..80: note = Artificially Synthesized Probe
  source 1..80: mol_type = other DNA

SEQ ID NO: 100922 - DNA, 80 bp, synthetic construct
  misc_feature 1..80: note = Artificially Synthesized Probe
  source 1..80: mol_type = other DNA
tcctctgtgtccccacagacccctcaacccctcaccccccatcacctcctaaccctggtgcccactgcctggctcccttg

SEQ ID NO: 100923 - DNA, 80 bp, synthetic construct
  misc_feature 1..80: note = Artificially Synthesized Probe
  source 1..80: mol_type = other DNA
ggcaaacagggggcaataagctccgcttctgagccccttctctgagatcaaacatcccataggaatgtgcccttgactgc

SEQ ID NO: 100924 - DNA, 80 bp, synthetic construct
  misc_feature 1..80: note = Artificially Synthesized Probe
  source 1..80: mol_type = other DNA
acatccaagccccacacaaaacgctgcccgtggtcttcgactctccaaggaacagaggcctgaaggagtttcccatcaaa

SEQ ID NO: 100925 - DNA, 80 bp, synthetic construct; identical to SEQ ID NO: 35465
  misc_feature 1..80: note = Artificially Synthesized Probe
  source 1..80: mol_type = other DNA

SEQ ID NO: 100926 - DNA, 80 bp, synthetic construct
  misc_feature 1..80: note = Artificially Synthesized Probe
  source 1..80: mol_type = other DNA
ccatctgggatatgggggattttgggatcagtggatcagtggtcatttcctgggtgtgactttatcagccacaggctgtc

SEQ ID NO: 100927 - DNA, 80 bp, synthetic construct
  misc_feature 1..80: note = Artificially Synthesized Probe
  source 1..80: mol_type = other DNA
acctgaggtcaggagttcgaaaccagcctggacaacatggtgaaaccccatctctactaaaaatacaaaaattagccggg

SEQ ID NO: 100928 - DNA, 80 bp, synthetic construct
  misc_feature 1..80: note = Artificially Synthesized Probe
  source 1..80: mol_type = other DNA
tagccagtgctgcattctttacctgcactgactcatttaatttgataaactgttatggagattctatcaataggcccatt

SEQ ID NO: 100929 - DNA, 80 bp, synthetic construct
  misc_feature 1..80: note = Artificially Synthesized Probe
  source 1..80: mol_type = other DNA
ggtgcccagggaaaacgacggaaggagtgtggggtccaaggtttgctaggacaaatggctttccgacaagcatctgtact

SEQ ID NO: 100930 - DNA, 80 bp, synthetic construct; identical to SEQ ID NO: 35466
  misc_feature 1..80: note = Artificially Synthesized Probe
  source 1..80: mol_type = other DNA

SEQ ID NO: 100931 - DNA, 80 bp, synthetic construct
  misc_feature 1..80: note = Artificially Synthesized Probe
  source 1..80: mol_type = other DNA
cattgttgtcccctttcccacagacaactttggatgaaggcaggcagcactggtccctcagctaagcacatctgtgtatt

SEQ ID NO: 100932 - DNA, 80 bp, synthetic construct
  misc_feature 1..80: note = Artificially Synthesized Probe
  source 1..80: mol_type = other DNA
catggcgaaatcccgtctctactaaaaatacaaaaattagctgggcatggtggtgtgtgcctgtaatcctatcttctcaa

SEQ ID NO: 100933 - DNA, 80 bp, synthetic construct; identical to SEQ ID NO: 35467
  misc_feature 1..80: note = Artificially Synthesized Probe
  source 1..80: mol_type = other DNA

SEQ ID NO: 100934 - DNA, 80 bp, synthetic construct
  misc_feature 1..80: note = Artificially Synthesized Probe
  source 1..80: mol_type = other DNA
gtttcagcttctatttcctactcagtgaggccttccctgatgctaaaagagggatccctactcccaccccaactcctagc

SEQ ID NO: 100935 - DNA, 80 bp, synthetic construct
  misc_feature 1..80: note = Artificially Synthesized Probe
  source 1..80: mol_type = other DNA
cttcctgtaagcatcgtcagtaaattttctatcaccaccatcaatgggaaaccagcagcacttcctgcagatagaaggca

SEQ ID NO: 100936 - DNA, 80 bp, synthetic construct
  misc_feature 1..80: note = Artificially Synthesized Probe
  source 1..80: mol_type = other DNA
tgtcaaggatgtgtttgcatcactgaaacttgaatttttgaggaaccagaaaagactggaggaaaatgagaagggcaaca

SEQ ID NO: 100937 - DNA, 80 bp, synthetic construct; identical to SEQ ID NO: 35468
  misc_feature 1..80: note = Artificially Synthesized Probe
  source 1..80: mol_type = other DNA

SEQ ID NO: 100938 - DNA, 80 bp, synthetic construct
  misc_feature 1..80: note = Artificially Synthesized Probe
  source 1..80: mol_type = other DNA
ctcatacctgtaatcctagcactttggaaggccaaggtgggagaattgtttgaacccaggagtttgagaccagactgggc

SEQ ID NO: 100939 - DNA, 80 bp, synthetic construct
  misc_feature 1..80: note = Artificially Synthesized Probe
  source 1..80: mol_type = other DNA
tgggtattggggcaaagaggaagaaagaaaaaaaagatgggtagataagaggtaagtggttgcattgagtctttgatcag

SEQ ID NO: 100940 - DNA, 80 bp, synthetic construct
  misc_feature 1..80: note = Artificially Synthesized Probe
  source 1..80: mol_type = other DNA
tgcactccagtctgggtgacagatgagaccttgtcccagaggaaaaaaaaaaaaaaaaaaagagctacagggaaagacag

SEQ ID NO: 100941 - DNA, 80 bp, synthetic construct
  misc_feature 1..80: note = Artificially Synthesized Probe
  source 1..80: mol_type = other DNA
aggcaccatagtcaaaccctgtctctacaaaaaaaaaaaaaattaaaaataaaaataaaaataagccaggcatggtggtg

SEQ ID NO: 100942 - DNA, 80 bp, synthetic construct; identical to SEQ ID NO: 35469
  misc_feature 1..80: note = Artificially Synthesized Probe
  source 1..80: mol_type = other DNA

SEQ ID NO: 100943 - DNA, 80 bp, synthetic construct
  misc_feature 1..80: note = Artificially Synthesized Probe
  source 1..80: mol_type = other DNA
gaggtggtagaaaaggcagtcagggagctgatgggaggcagtaggagaggcggtcagggaggtgatgggaggtgggagga

SEQ ID NO: 100944 - DNA, 80 bp, synthetic construct
  misc_feature 1..80: note = Artificially Synthesized Probe
  source 1..80: mol_type = other DNA
cagagaggtgatgggaggcagtaggagaggcaatcagggaggtgatgagaggtggtaggagaggcggtcagggaggagat

SEQ ID NO: 100945 - DNA, 80 bp, synthetic construct
  misc_feature 1..80: note = Artificially Synthesized Probe
  source 1..80: mol_type = other DNA
ttaaggctgcttgtttagaaactgagaatcatcacagggtcttaaacagaggaggattatgatctggtttgttagaaaag

SEQ ID NO: 100946 - DNA, 80 bp, synthetic construct
  misc_feature 1..80: note = Artificially Synthesized Probe
  source 1..80: mol_type = other DNA
tctgacccccgctatgagagaggcaagccaaagctgacagcaaggctgtgacctctgtgggtggcaggcaccatcccctg

SEQ ID NO: 100947 - DNA, 80 bp, synthetic construct; identical to SEQ ID NO: 35470
  misc_feature 1..80: note = Artificially Synthesized Probe
  source 1..80: mol_type = other DNA

SEQ ID NO: 100948 - DNA, 80 bp, synthetic construct
  misc_feature 1..80: note = Artificially Synthesized Probe
  source 1..80: mol_type = other DNA
ggacaaggaaagctttgatgggcgggagaagcgggttggtctgggttttagagagaagtggagagaggaactggaagtgt

SEQ ID NO: 100949 - DNA, 80 bp, synthetic construct
  misc_feature 1..80: note = Artificially Synthesized Probe
  source 1..80: mol_type = other DNA
gccaggttgtgatagcatgcacctgtggtcccagctactcgggcggctgagacgggaccgtgatcctttgagcccaggag

SEQ ID NO: 100950 - DNA, 80 bp, synthetic construct; identical to SEQ ID NO: 35427
  misc_feature 1..80: note = Artificially Synthesized Probe
  source 1..80: mol_type = other DNA

SEQ ID NO: 100951 - DNA, 80 bp, synthetic construct
  misc_feature 1..80: note = Artificially Synthesized Probe
  source 1..80: mol_type = other DNA
ggctagatgtaccctctcctgggaggcaggggagatgggcggtggactgaataatggcccctctacatcctagtcccccc

SEQ ID NO: 100952 - DNA, 80 bp, synthetic construct; identical to SEQ ID NO: 35471
  misc_feature 1..80: note = Artificially Synthesized Probe
  source 1..80: mol_type = other DNA

SEQ ID NO: 100953 - DNA, 80 bp, synthetic construct
  misc_feature 1..80: note = Artificially Synthesized Probe
  source 1..80: mol_type = other DNA
gactagactggccaacatggtgaaaccccatctctactaaaaaaaaaaaaaaatacaaaaattagctgggcgtggtgggg

SEQ ID NO: 100954 - DNA, 80 bp, synthetic construct
  misc_feature 1..80: note = Artificially Synthesized Probe
  source 1..80: mol_type = other DNA
cttaaggggaaaaaaaatgatgttttacagatttgttttatgcccaagttaaggtttaccaagcagctggcacgctttag

SEQ ID NO: 100955 - DNA, 80 bp, synthetic construct; identical to SEQ ID NO: 35472
  misc_feature 1..80: note = Artificially Synthesized Probe
  source 1..80: mol_type = other DNA

SEQ ID NO: 100956 - DNA, 80 bp, synthetic construct
  misc_feature 1..80: note = Artificially Synthesized Probe
  source 1..80: mol_type = other DNA
ggacccaggtatgccgtagaaaagcagaggccagagtggaagccttgccttcctgcttccgattctagacagcccaacag

SEQ ID NO: 100957 - DNA, 80 bp, synthetic construct
  misc_feature 1..80: note = Artificially Synthesized Probe
  source 1..80: mol_type = other DNA
gacaagaaagacaagtccttaccactactctagtagggaaacagatgatagaaaagtagacaagataacttcaaatgaca

SEQ ID NO: 100958 - DNA, 80 bp, synthetic construct
  misc_feature 1..80: note = Artificially Synthesized Probe
  source 1..80: mol_type = other DNA
aaaggccctgaggcaggaatgagctcctgcgtgcaaggccaggatggctagaacctattgaacaagaagaggctgggcac

SEQ ID NO: 100959 - DNA, 80 bp, synthetic construct
  misc_feature 1..80: note = Artificially Synthesized Probe
  source 1..80: mol_type = other DNA
ttagctgggcctggtgatgcatgcctgtaatcccagctactcgggaggccgaggcaagagaatcgcttgatcccgggagg

SEQ ID NO: 100960 - DNA, 80 bp, synthetic construct; identical to SEQ ID NO: 35473
  misc_feature 1..80: note = Artificially Synthesized Probe
  source 1..80: mol_type = other DNA

SEQ ID NO: 100961 - DNA, 80 bp, synthetic construct
  misc_feature 1..80: note = Artificially Synthesized Probe
  source 1..80: mol_type = other DNA
ggcgggcagatcatgaggtcaagggatggagaccatcctggccaacatggtgaaaccctgtctctactaaaaatacaaaa

SEQ ID NO: 100962 - DNA, 80 bp, synthetic construct
  misc_feature 1..80: note = Artificially Synthesized Probe
  source 1..80: mol_type = other DNA
ggataaaataaaggcattctagactcctgcatccctttctcagctgaaggagaaccctgacctttttgccaagccccttg

SEQ ID NO: 100963 - DNA, 80 bp, synthetic construct
  misc_feature 1..80: note = Artificially Synthesized Probe
  source 1..80: mol_type = other DNA
ggccacgtggacgagttcctgagctttgtgccagcacccgacaggaaggtacagtcttgggggctgcctcaggaagccat

SEQ ID NO: 100964 - DNA, 80 bp, synthetic construct
  misc_feature 1..80: note = Artificially Synthesized Probe
  source 1..80: mol_type = other DNA
tcctggttcacagcacagtttgttaccccacatctcttagctaagcctccctcagtgggtgcataatagcgtgggtgggg

SEQ ID NO: 100965 - DNA, 80 bp, synthetic construct; identical to SEQ ID NO: 35474
  misc_feature 1..80: note = Artificially Synthesized Probe
  source 1..80: mol_type = other DNA

SEQ ID NO: 100966 - DNA, 80 bp, synthetic construct
  misc_feature 1..80: note = Artificially Synthesized Probe
  source 1..80: mol_type = other DNA
agcacctactgtgcgccaggcactgtgccaagtgctagggagactgcatgaacagggcagaacagcttgctgccctgtgg

SEQ ID NO: 100967 - DNA, 80 bp, synthetic construct
  misc_feature 1..80: note = Artificially Synthesized Probe
  source 1..80: mol_type = other DNA
gagaggaagagagataccacaggcagagggacgggggtggggcggctcagaggcaggagaaagcacgatgtgtgtgagga

SEQ ID NO: 100968 - DNA, 80 bp, synthetic construct
  misc_feature 1..80: note = Artificially Synthesized Probe
  source 1..80: mol_type = other DNA
tcttcctctctcgatgggatctctttggagataagataatttagcgttaatgcaaggcaaaatgttccagtgaacaagtt

SEQ ID NO: 100969 - DNA, 80 bp, synthetic construct
  misc_feature 1..80: note = Artificially Synthesized Probe
  source 1..80: mol_type = other DNA
gccccagccttccgagtagctgggattacaggtgtgcaccaccacacctggctaatgttttgtatttttagtagagatgg

SEQ ID NO: 100970 - DNA, 80 bp, synthetic construct; identical to SEQ ID NO: 35475
  misc_feature 1..80: note = Artificially Synthesized Probe
  source 1..80: mol_type = other DNA

SEQ ID NO: 100971 - DNA, 80 bp, synthetic construct
  misc_feature 1..80: note = Artificially Synthesized Probe
  source 1..80: mol_type = other DNA
caggagttcaaggccagctaggccaagatggtgaaaccccgtctctactaaaaatacaaaaattagccgggcgtggtggc

SEQ ID NO: 100972 - DNA, 80 bp, synthetic construct
  misc_feature 1..80: note = Artificially Synthesized Probe
  source 1..80: mol_type = other DNA
aaactaggccaagtgtggtggctcacacctgtaatcctagcactttgggaggctgaggcgggtggatcacctgaggtcaa

SEQ ID NO: 100973 - DNA, 80 bp, synthetic construct; identical to SEQ ID NO: 35476
  misc_feature 1..80: note = Artificially Synthesized Probe
  source 1..80: mol_type = other DNA

SEQ ID NO: 100974 - DNA, 80 bp, synthetic construct
  misc_feature 1..80: note = Artificially Synthesized Probe
  source 1..80: mol_type = other DNA
gaaagaaagaaacaatggggccaggcgtggtagctcatgcctgtaatcccaacactttgggaggctgaagtgggcagatc

SEQ ID NO: 100975 - DNA, 80 bp, synthetic construct
  misc_feature 1..80: note = Artificially Synthesized Probe
  source 1..80: mol_type = other DNA
tactaaaaatacaaaaaattagccgggcgaggtggcgggcgcctgtagtcccagctactccggaggctgaggcaggagaa

SEQ ID NO: 100976 - DNA, 80 bp, synthetic construct
  misc_feature 1..80: note = Artificially Synthesized Probe
  source 1..80: mol_type = other DNA
ttaatgagaacttatactgctaaaatattgtattaaagatatttgacttgcagatgctcacagcaaacctgtatggtaag

SEQ ID NO: 100977 - DNA, 80 bp, synthetic construct
  misc_feature 1..80: note = Artificially Synthesized Probe
  source 1..80: mol_type = other DNA
aaaaaacagcagaaaataaagaacattctgtcaaacaagacattgagagaacataattcatttgtggaggtaggagcctg

SEQ ID NO: 100978 - DNA, 80 bp, synthetic construct
  misc_feature 1..80: note = Artificially Synthesized Probe
  source 1..80: mol_type = other DNA
gaatgggaggccccagggtcccccgagagcactggccagaggcccctctgtgcagtgaggcctggcagccaccttcactg

SEQ ID NO: 100979 - DNA, 80 bp, synthetic construct; identical to SEQ ID NO: 35477
  misc_feature 1..80: note = Artificially Synthesized Probe
  source 1..80: mol_type = other DNA

SEQ ID NO: 100980 - DNA, 80 bp, synthetic construct
  misc_feature 1..80: note = Artificially Synthesized Probe
  source 1..80: mol_type = other DNA
ccaggtccatgcacgttggtgtctttccacaaggtcaggcttctactgatgctatttccatcataaaatccacaagccac

SEQ ID NO: 100981 - DNA, 80 bp, synthetic construct
  misc_feature 1..80: note = Artificially Synthesized Probe
  source 1..80: mol_type = other DNA
atgttacagatgaaacattcttaccaaacaaagcaatatttaacatcaagagagaaggggataggaaaaggggtcagtga

SEQ ID NO: 100982 - DNA, 80 bp, synthetic construct; identical to SEQ ID NO: 35478
  misc_feature 1..80: note = Artificially Synthesized Probe
  source 1..80: mol_type = other DNA

SEQ ID NO: 100983 - DNA, 80 bp, synthetic construct
  misc_feature 1..80: note = Artificially Synthesized Probe
  source 1..80: mol_type = other DNA
aggagcctgtaatcccaactacttgagaggcggaagcaggagaatcacttgaacctgggagacggaggttgcagtgagcc

SEQ ID NO: 100984 - DNA, 80 bp, synthetic construct
  misc_feature 1..80: note = Artificially Synthesized Probe
  source 1..80: mol_type = other DNA
ccctatctggttgggtgcagtctctgttgattaggcaaacatctggttcctgttagcatggtgccttttgaaatgtaaga

SEQ ID NO: 100985 - DNA, 80 bp, synthetic construct
  misc_feature 1..80: note = Artificially Synthesized Probe
  source 1..80: mol_type = other DNA
gcagtgagccaagatcatgccacggtactccagcctgggcgacagtgcaagaccttgtcaaaaaaaaaaaaaaaaaaaaa

SEQ ID NO: 100986 - DNA, 80 bp, synthetic construct
  misc_feature 1..80: note = Artificially Synthesized Probe
  source 1..80: mol_type = other DNA
ccgtaactaccatgctgccttcccacgtagcaccttccctggggctccggggtgatgcaggggatggagggatggatagg

SEQ ID NO: 100987 - DNA, 80 bp, synthetic construct; identical to SEQ ID NO: 35479
  misc_feature 1..80: note = Artificially Synthesized Probe
  source 1..80: mol_type = other DNA

SEQ ID NO: 100988 - DNA, 80 bp, synthetic construct
  misc_feature 1..80: note = Artificially Synthesized Probe
  source 1..80: mol_type = other DNA
actgggttcccactcagcctaggcagtgccagccccacctggggctccggggtggtgcctcaaatccagtggttcagatt

SEQ ID NO: 100989 - DNA, 80 bp, synthetic construct
  misc_feature 1..80: note = Artificially Synthesized Probe
  source 1..80: mol_type = other DNA
gtagtcagcaacgctgagggctgactgtgtgccttcactgttcaaggtccccagagggagtctgagcatgagaccagact

SEQ ID NO: 100990 - DNA, 80 bp, synthetic construct
  misc_feature 1..80: note = Artificially Synthesized Probe
  source 1..80: mol_type = other DNA
tacatgttcttacctaattgtcattgcaacggagatatgtgttgggctcattttgctgatgaggctcagaggggtgatat

SEQ ID NO: 100991 - DNA, 80 bp, synthetic construct; identical to SEQ ID NO: 35480
  misc_feature 1..80: note = Artificially Synthesized Probe
  source 1..80: mol_type = other DNA

SEQ ID NO: 100992 - DNA, 80 bp, synthetic construct
  misc_feature 1..80: note = Artificially Synthesized Probe
  source 1..80: mol_type = other DNA
gggccctgagtaatagaaagagtttaccagaaggtgacaggtaggggaggagaacgtagtgttaagagcatgggcagcat

SEQ ID NO: 100993 - DNA, 80 bp, synthetic construct
  misc_feature 1..80: note = Artificially Synthesized Probe
  source 1..80: mol_type = other DNA
tggtggcatctgctgaggcaggatgattgcttgagcccaggaggtggacactgcagtgagctgagatggcaccactgaac

SEQ ID NO: 100994 - DNA, 80 bp, synthetic construct
  misc_feature 1..80: note = Artificially Synthesized Probe
  source 1..80: mol_type = other DNA
aaacagtggatacacatagacacagagatggaaataataggcactgaggacccccaaaatggagagaatgagagcgaggt

SEQ ID NO: 100995 - DNA, 80 bp, synthetic construct
  misc_feature 1..80: note = Artificially Synthesized Probe
  source 1..80: mol_type = other DNA
tattttcctttgacagcagcgaggactgcatgagcctctgtgtgtgagagtggcagacactgaatgccaccctcatgggg

SEQ ID NO: 100996 - DNA, 80 bp, synthetic construct; identical to SEQ ID NO: 35481
  misc_feature 1..80: note = Artificially Synthesized Probe
  source 1..80: mol_type = other DNA

SEQ ID NO: 100997 - DNA, 80 bp, synthetic construct
  misc_feature 1..80: note = Artificially Synthesized Probe
  source 1..80: mol_type = other DNA
gggttcaagcaattctcctgcctcagcctcccaagtagctgggattacaggcacacctggctcattcttgtatttttagt

SEQ ID NO: 100998 - DNA, 80 bp, synthetic construct
  misc_feature 1..80: note = Artificially Synthesized Probe
  source 1..80: mol_type = other DNA
ccaggctggagtgcagtggcacaatcacagctcactgcagccttgacctcctgggctcaagtgatcctcctccctcagcc

SEQ ID NO: 100999 - DNA, 80 bp, synthetic construct
  misc_feature 1..80: note = Artificially Synthesized Probe
  source 1..80: mol_type = other DNA
ggtctgagccaccacccctggaggggctattatttccaaaggtcagagaagggtggggccgctcagattgcgctgcaggc

SEQ ID NO: 101000 - DNA, 80 bp, synthetic construct
  misc_feature 1..80: note = Artificially Synthesized Probe
  source 1..80: mol_type = other DNA
agtgcaccttcatcaacgacttcttcacctaccacatcaggcatggggaggtgcactgcggcaccaacgtgcgcagaaag

SEQ ID NO: 101001 - DNA, 80 bp, synthetic construct; identical to SEQ ID NO: 35482
  misc_feature 1..80: note = Artificially Synthesized Probe
  source 1..80: mol_type = other DNA

SEQ ID NO: 101002 - DNA, 80 bp, synthetic construct; identical to SEQ ID NO: 35428
  misc_feature 1..80: note = Artificially Synthesized Probe
  source 1..80: mol_type = other DNA

SEQ ID NO: 101003 - DNA, 80 bp, synthetic construct
  misc_feature 1..80: note = Artificially Synthesized Probe
  source 1..80: mol_type = other DNA
cccgtttgtgcccttctcccttcccctcttgaggaagccacatgggacagagggggctgaggcggacctagcccctcggt

SEQ ID NO: 101004 - DNA, 80 bp, synthetic construct
  misc_feature 1..80: note = Artificially Synthesized Probe
  source 1..80: mol_type = other DNA
gaaggaaaacaacagcacacagaaccaagagaatgagcctccaggctttggcagagaaacaagagccttggttaagtttt

SEQ ID NO: 101005 - DNA, 80 bp, synthetic construct
  misc_feature 1..80: note = Artificially Synthesized Probe
  source 1..80: mol_type = other DNA
atgccgggccctccaaaccttgcaaccacccaggaagcaggtcgacgtgattcccattttacagagaaggaagctgaggc

SEQ ID NO: 101006 - DNA, 80 bp, synthetic construct; identical to SEQ ID NO: 35429
  misc_feature 1..80: note = Artificially Synthesized Probe
  source 1..80: mol_type = other DNA

SEQ ID NO: 101007 - DNA, 80 bp, synthetic construct
  misc_feature 1..80: note = Artificially Synthesized Probe
  source 1..80: mol_type = other DNA
accaggctgggagcaggtgggaaagccaccacctgagctgaggggacaggcagggacagccatggcttgagtttagcaga

SEQ ID NO: 101008 - DNA, 80 bp, synthetic construct
  misc_feature 1..80: note = Artificially Synthesized Probe
  source 1..80: mol_type = other DNA
tgaaggaatgagtgtgtgttttaagggaaactatgcctgtcacacaggaggtgctatttaagtgtttgttgagtgaatga

SEQ ID NO: 101009 - DNA, 80 bp, synthetic construct; identical to SEQ ID NO: 35423
  misc_feature 1..80: note = Artificially Synthesized Probe
  source 1..80: mol_type = other DNA

SEQ ID NO: 101010 - DNA, 80 bp, synthetic construct; identical to SEQ ID NO: 35430
  misc_feature 1..80: note = Artificially Synthesized Probe
  source 1..80: mol_type = other DNA

SEQ ID NO: 101011 - DNA, 80 bp, synthetic construct
  misc_feature 1..80: note = Artificially Synthesized Probe
  source 1..80: mol_type = other DNA
gaaaactttctaaaaatcggtgcctgctgtgacccacacccttttctcataccttcccttgtagccctgggaaagaggaa

SEQ ID NO: 101012 - DNA, 80 bp, synthetic construct
  misc_feature 1..80: note = Artificially Synthesized Probe
  source 1..80: mol_type = other DNA
tgccctgacccctcctctctcggcccctatccacagggtgcctccacccagatggcccggcaaaaacaaaaccagcctgg

SEQ ID NO: 101013 - DNA, 80 bp, synthetic construct; identical to SEQ ID NO: 35431
  misc_feature 1..80: note = Artificially Synthesized Probe
  source 1..80: mol_type = other DNA

SEQ ID NO: 101014 - DNA, 80 bp, synthetic construct
  misc_feature 1..80: note = Artificially Synthesized Probe
  source 1..80: mol_type = other DNA
agcactttgggaggctgaggtgggcagatcacgaggtcaggagatcgagaccatcctggctaacacagtgaaaccccgtc

SEQ ID NO: 101015 - DNA, 80 bp, synthetic construct
  misc_feature 1..80: note = Artificially Synthesized Probe
  source 1..80: mol_type = other DNA
actccgtctcaaaataaataaataaataaattaattaattaattaattaattaaaataaataaataaataaaataacacc

SEQ ID NO: 101016 - DNA, 80 bp, synthetic construct
  misc_feature 1..80: note = Artificially Synthesized Probe
  source 1..80: mol_type = other DNA
tcacagtagcaagacctcatagtgctgccgtgaatgttcagccgatgagacagtgtgtgtagaacgccaggctcacagta

SEQ ID NO: 101017 - DNA, 80 bp, synthetic construct
  misc_feature 1..80: note = Artificially Synthesized Probe
  source 1..80: mol_type = other DNA
aagcaatccacttgcctcagcttcccaaagtgctagggttacaggcatgagccaccatgcctggctgtgtgtatggcttt

SEQ ID NO: 101018 - DNA, 80 bp, synthetic construct
  misc_feature 1..80: note = Artificially Synthesized Probe
  source 1..80: mol_type = other DNA
ctgggattacagacacccaccaccacacctggctaatttttttgtatttttagtacagacggggattcaccatgttggcc

SEQ ID NO: 101019 - DNA, 80 bp, synthetic construct; identical to SEQ ID NO: 35432
  misc_feature 1..80: note = Artificially Synthesized Probe
  source 1..80: mol_type = other DNA

SEQ ID NO: 101020 - DNA, 80 bp, synthetic construct
  misc_feature 1..80: note = Artificially Synthesized Probe
  source 1..80: mol_type = other DNA
caattttccctggaaaaaaaaaaaaaaaagagctggagtcccttaaaaattaactgcctgtttttttgtggctagtgagc

SEQ ID NO: 101021 - DNA, 80 bp, synthetic construct
  misc_feature 1..80: note = Artificially Synthesized Probe
  source 1..80: mol_type = other DNA
tggatgtggtagtgtgtgcctgtagtcccagctactcaggaggctgaggccggaggattgcttgagcccaggagttcaag

SEQ ID NO: 101022 - DNA, 80 bp, synthetic construct
  misc_feature 1..80: note = Artificially Synthesized Probe
  source 1..80: mol_type = other DNA
agtgaggcagatgctgctgttccgaagaccacactttgggaagcattggtctttaggaagtgctggatgctgggcacagc

SEQ ID NO: 101023 - DNA, 80 bp, synthetic construct
  misc_feature 1..80: note = Artificially Synthesized Probe
  source 1..80: mol_type = other DNA
cgtgccgggcgtgccatctgccgctccgctgcaaggtctcgcccgggaccggggctggcggagcgcgcgcccgcgagtag

SEQ ID NO: 101024 - DNA, 80 bp, synthetic construct; identical to SEQ ID NO: 35493
  misc_feature 1..80: note = Artificially Synthesized Probe
  source 1..80: mol_type = other DNA

SEQ ID NO: 101025 - DNA, 80 bp, synthetic construct
  misc_feature 1..80: note = Artificially Synthesized Probe
  source 1..80: mol_type = other DNA
aacacagctagattaggtaactagtaatgtattactgcttcatttgtaaaatattctggcagctgtctactgctagtatc

SEQ ID NO: 101026 - DNA, 80 bp, synthetic construct
  misc_feature 1..80: note = Artificially Synthesized Probe
  source 1..80: mol_type = other DNA
tgttctcagactcaacctgtatgggtaatagtttttattgcctagccttacggctatgtcagtattcagcaaacgtgaac

SEQ ID NO: 101027 - DNA, 80 bp, synthetic construct
  misc_feature 1..80: note = Artificially Synthesized Probe
  source 1..80: mol_type = other DNA
aggagtgcctagaaatcatgggattgtaaaaggtatgttccttggtgtttggaagaaaaattagggagcgttgtctcctt

SEQ ID NO: 101028 - DNA, 80 bp, synthetic construct
  misc_feature 1..80: note = Artificially Synthesized Probe
  source 1..80: mol_type = other DNA
agcattggctgggtgtatttcaggggatgaaattgaagtcttttactggagaggagctgcattatttaaataaaaagaat

SEQ ID NO: 101029 - DNA, 80 bp, synthetic construct; identical to SEQ ID NO: 35494
  misc_feature 1..80: note = Artificially Synthesized Probe
  source 1..80: mol_type = other DNA

SEQ ID NO: 101030 - DNA, 80 bp, synthetic construct
  misc_feature 1..80: note = Artificially Synthesized Probe
  source 1..80: mol_type = other DNA
tacagtatcccatctcatcctcacaataacctatgaagtagttcttatccctgctttacagtagggaactctgagcttgt

SEQ ID NO: 101031 - DNA, 80 bp, synthetic construct
  misc_feature 1..80: note = Artificially Synthesized Probe
  source 1..80: mol_type = other DNA
atgcattttaattttgtctttgcagactaaaaggatgatgcaggcgctttgaaagggatttccttaggggctttttgtaa

SEQ ID NO: 101032 - DNA, 80 bp, synthetic construct; identical to SEQ ID NO: 35495
  misc_feature 1..80: note = Artificially Synthesized Probe
  source 1..80: mol_type = other DNA

SEQ ID NO: 101033 - DNA, 80 bp, synthetic construct
  misc_feature 1..80: note = Artificially Synthesized Probe
  source 1..80: mol_type = other DNA
aaaaaaaaaaaaaaaaaccgggagcagtaatcatagactcttagagttggatggcgccttctagacagcactggggccac

SEQ ID NO: 101034 - DNA, 80 bp, synthetic construct
  misc_feature 1..80: note = Artificially Synthesized Probe
  source 1..80: mol_type = other DNA
acacagcctaataaccagaaccaattgagaaaaaaatataaagaaaatacagataggtagcaaagtacagcctacagtgg

SEQ ID NO: 101035 - DNA, 80 bp, synthetic construct
  misc_feature 1..80: note = Artificially Synthesized Probe
  source 1..80: mol_type = other DNA
tagcggagttcctctgggcatgcataatacctttctttcatcatgctcatcaagacttattcatactttgttatcaatta

SEQ ID NO: 101036 - DNA, 80 bp, synthetic construct
  misc_feature 1..80: note = Artificially Synthesized Probe
  source 1..80: mol_type = other DNA
ttgtctgagaacagacagaggctcagggatattgggatgatatttggtatgaagggtttcttatttggactgcaccaagt

SEQ ID NO: 101037 - DNA, 80 bp, synthetic construct
  misc_feature 1..80: note = Artificially Synthesized Probe
  source 1..80: mol_type = other DNA
caaggttttctaccctttttgtgtgtgtttattttaatgaggacaatgggaactacaccatttctttcctgttagttcat

SEQ ID NO: 101038 - DNA, 80 bp, synthetic construct; identical to SEQ ID NO: 35496
  misc_feature 1..80: note = Artificially Synthesized Probe
  source 1..80: mol_type = other DNA

SEQ ID NO: 101039 - DNA, 80 bp, synthetic construct
  misc_feature 1..80: note = Artificially Synthesized Probe
  source 1..80: mol_type = other DNA
gtaccatgcttattcgtttacacattgtggcttcttttacagcaaggatgggtatttctgtgtggcctgaaaggctgaga

SEQ ID NO: 101040 - DNA, 80 bp, synthetic construct
  misc_feature 1..80: note = Artificially Synthesized Probe
  source 1..80: mol_type = other DNA
gaattcagagagctgagtactagctgtacttcatgagccccattgaattgtgtttgttgtattgtcattgttttgttaaa

SEQ ID NO: 101041 - DNA, 80 bp, synthetic construct
  misc_feature 1..80: note = Artificially Synthesized Probe
  source 1..80: mol_type = other DNA
ttgtactcctggcctcaagcgatcctcccaccttgccctcctaaagtgctggggattgcaggtgtgagccactgtgccag

SEQ ID NO: 101042 - DNA, 80 bp, synthetic construct; identical to SEQ ID NO: 35497
  misc_feature 1..80: note = Artificially Synthesized Probe
  source 1..80: mol_type = other DNA

SEQ ID NO: 101043 - DNA, 80 bp, synthetic construct
  misc_feature 1..80: note = Artificially Synthesized Probe
  source 1..80: mol_type = other DNA
attaaaatataaaattaatagtaagacatatctgaatttttgttctagaaggtcccagagctctcctttaccattctacc

SEQ ID NO: 101044 - DNA, 80 bp, synthetic construct
  misc_feature 1..80: note = Artificially Synthesized Probe
  source 1..80: mol_type = other DNA
gtgcctgataaatgtttattcttatataatgtgtattaccgaaatatctttgaggtgtatttgtggtgggccggggagag

SEQ ID NO: 101045 - DNA, 80 bp, synthetic construct
  misc_feature 1..80: note = Artificially Synthesized Probe
  source 1..80: mol_type = other DNA
gacagagcagaggttctttagtatctagagtccccagaagtcaggaaggttgtgaacttggatgggtaaaaaaaatttct

SEQ ID NO: 101046 - DNA, 80 bp, synthetic construct
  misc_feature 1..80: note = Artificially Synthesized Probe
  source 1..80: mol_type = other DNA
atatttttggtagagatgggttttcaccatgttggccaggctggtcttgaactcctggcctcaggtgatcctcctgccta

SEQ ID NO: 101047 - DNA, 80 bp, synthetic construct; identical to SEQ ID NO: 35498
  misc_feature 1..80: note = Artificially Synthesized Probe
  source 1..80: mol_type = other DNA

SEQ ID NO: 101048 - DNA, 80 bp, synthetic construct
  misc_feature 1..80: note = Artificially Synthesized Probe
  source 1..80: mol_type = other DNA
ttcttttattggcaatcctttgtgttttatgcatttaaaaacacttttctgagaggggatccataggcgaccataggggt

SEQ ID NO: 101049 - DNA, 80 bp, synthetic construct
  misc_feature 1..80: note = Artificially Synthesized Probe
  source 1..80: mol_type = other DNA
acaagacccatatctaggaactgcagtttaagatcttatgccctgttggctaaaattcaaaatagcaggccctaagaggg

SEQ ID NO: 101050 - DNA, 80 bp, synthetic construct
  misc_feature 1..80: note = Artificially Synthesized Probe
  source 1..80: mol_type = other DNA
tctcttggtttataccatatcaactagatatttgtcagtgaaaaattgaaaatctacctcttcaccctctttgaattgta

SEQ ID NO: 101051 - DNA, 80 bp, synthetic construct
  misc_feature 1..80: note = Artificially Synthesized Probe
  source 1..80: mol_type = other DNA
gtattcttctgtgtcttgagtggttttgttgctgtaagtcaagcacatttattattcatgtataggggggccaagtttca

SEQ ID NO: 101052 - DNA, 80 bp, synthetic construct; identical to SEQ ID NO: 35499
  misc_feature 1..80: note = Artificially Synthesized Probe
  source 1..80: mol_type = other DNA

SEQ ID NO: 101053 - DNA, 80 bp, synthetic construct
  misc_feature 1..80: note = Artificially Synthesized Probe
  source 1..80: mol_type = other DNA
gtaacatgcctgagggccaccggctcagatgagttttctctacttcagaaagctattttccctttccacatttctttttt

SEQ ID NO: 101054 - DNA, 80 bp, synthetic construct
  misc_feature 1..80: note = Artificially Synthesized Probe
  source 1..80: mol_type = other DNA
aaagcttactatccttgtcctgttttaccgttacctaatgggaagacagctttctggaaaaacctgaagaccattctttc

SEQ ID NO: 101055 - DNA, 80 bp, synthetic construct; identical to SEQ ID NO: 35500
  misc_feature 1..80: note = Artificially Synthesized Probe
  source 1..80: mol_type = other DNA

SEQ ID NO: 101056 - DNA, 80 bp, synthetic construct
  misc_feature 1..80: note = Artificially Synthesized Probe
  source 1..80: mol_type = other DNA
gcatcaatttgggaagggacatttatcaaaatccagctgcctttctcaggagtaatttttaagtgggggactctcagcgt

SEQ ID NO: 101057 - DNA, 80 bp, synthetic construct
  misc_feature 1..80: note = Artificially Synthesized Probe
  source 1..80: mol_type = other DNA
gatcaaattaactaattagctttgtaccttttcaacacaagctaatagattgcctgacttcgtttatctgatcatgaatt

SEQ ID NO: 101058 - DNA, 80 bp, synthetic construct
  misc_feature 1..80: note = Artificially Synthesized Probe
  source 1..80: mol_type = other DNA
gggaggatcacttgagcccagcggttccaggcctgcagtaagcccagattgtgccattgtactccagtctggatgacaga

SEQ ID NO: 101059 - DNA, 80 bp, synthetic construct
  misc_feature 1..80: note = Artificially Synthesized Probe
  source 1..80: mol_type = other DNA
accccatctctactaaaaataaaaaaattagccgggcatggcagcacactcctgtaatcccagctactccagagattgag

SEQ ID NO: 101060 - DNA, 80 bp, synthetic construct
  misc_feature 1..80: note = Artificially Synthesized Probe
  source 1..80: mol_type = other DNA
tgactcaagccaatggcaattctttttttctgatttacagttgtgtttttttaaagatggcaactttgttttactttctt

SEQ ID NO: 101061 - DNA, 80 bp, synthetic construct; identical to SEQ ID NO: 35501
  misc_feature 1..80: note = Artificially Synthesized Probe
  source 1..80: mol_type = other DNA

SEQ ID NO: 101062 - DNA, 80 bp, synthetic construct
  misc_feature 1..80: note = Artificially Synthesized Probe
  source 1..80: mol_type = other DNA
cactatctctttatataatgacagcatccactatgtaagatttatattacatgcatgcgtgtggaatgtactttgaacca

SEQ ID NO: 101063 - DNA, 80 bp, synthetic construct
  misc_feature 1..80: note = Artificially Synthesized Probe
  source 1..80: mol_type = other DNA
tggagcaaagatttaagcattgagaaacccatagacctacaagaaaaaaacatgaatcttatataatcacagaatgggga

SEQ ID NO: 101064 - DNA, 80 bp, synthetic construct
  misc_feature 1..80: note = Artificially Synthesized Probe
  source 1..80: mol_type = other DNA
gtgctgggaaaattgacgatccatacacagaagattgaaactggacccctgtctctcaccatatacaaaaatcaaccgaa

SEQ ID NO: 101065 - DNA, 80 bp, synthetic construct; identical to SEQ ID NO: 35484
  misc_feature 1..80: note = Artificially Synthesized Probe
  source 1..80: mol_type = other DNA

SEQ ID NO: 101066 - DNA, 80 bp, synthetic construct; identical to SEQ ID NO: 35502
  misc_feature 1..80: note = Artificially Synthesized Probe
  source 1..80: mol_type = other DNA

SEQ ID NO: 101067 - DNA, 80 bp, synthetic construct
  misc_feature 1..80: note = Artificially Synthesized Probe
  source 1..80: mol_type = other DNA
aatggccaacagatatgtgaaaaaatgctccacatcactaattgtcaggaaaattcaaatcaaaaccatgagatattacc

SEQ ID NO: 101068 - DNA, 80 bp, synthetic construct
  misc_feature 1..80: note = Artificially Synthesized Probe
  source 1..80: mol_type = other DNA
tatgatacagtccatcagttccactacgggtatctattcaaaggaaaagcaatcagtatatcaaagagatacctacattt

SEQ ID NO: 101069 - DNA, 80 bp, synthetic construct; identical to SEQ ID NO: 35503
  misc_feature 1..80: note = Artificially Synthesized Probe
  source 1..80: mol_type = other DNA

SEQ ID NO: 101070 - DNA, 80 bp, synthetic construct
  misc_feature 1..80: note = Artificially Synthesized Probe
  source 1..80: mol_type = other DNA
tgactatagttagcaacaatgtattgtatatttcaaagtagctggaagtgaggactggaattgttctcaacacataaaaa

SEQ ID NO: 101071 - DNA, 80 bp, synthetic construct
  misc_feature 1..80: note = Artificially Synthesized Probe
  source 1..80: mol_type = other DNA
gtgtgttaaaacaaaagtcaaaagacaagcgaaaacctaggggataatttgtaactcataggagacataggactgttttc

SEQ ID NO: 101072 - DNA, 80 bp, synthetic construct
  misc_feature 1..80: note = Artificially Synthesized Probe
  source 1..80: mol_type = other DNA
tctacaaaaaatacaaaaattagccaggtatggtggtgcgtgcctgtagtcccaggtacttgggaggctgaggtgggagt

SEQ ID NO: 101073 - DNA, 80 bp, synthetic construct; identical to SEQ ID NO: 35504
  misc_feature 1..80: note = Artificially Synthesized Probe
  source 1..80: mol_type = other DNA

SEQ ID NO: 101074 - DNA, 80 bp, synthetic construct
  misc_feature 1..80: note = Artificially Synthesized Probe
  source 1..80: mol_type = other DNA
agttggtttcacactgaagtcaattttaagtctgtgctttgcaagtatgaattgaaaatggtggtgtggggtgctttctt

SEQ ID NO: 101075 - DNA, 80 bp, synthetic construct
  misc_feature 1..80: note = Artificially Synthesized Probe
  source 1..80: mol_type = other DNA
cagaagcagtgagaaatttgagggccggagggtttggtttttgtatttacacattctgaaccttctattttttgttaggt

SEQ ID NO: 101076 - DNA, 80 bp, synthetic construct
  misc_feature 1..80: note = Artificially Synthesized Probe
  source 1..80: mol_type = other DNA
cctcagtcactttgaatgctccctgtttttgcagcagtcatgacccatatttttaaacttttaaagtataaagtccatac

SEQ ID NO: 101077 - DNA, 80 bp, synthetic construct
  misc_feature 1..80: note = Artificially Synthesized Probe
  source 1..80: mol_type = other DNA
cactacctccttctcctcggtaaccatcctgactaatcttgccggtttttgagcttttagaaatggaattctacgttata

SEQ ID NO: 101078 - DNA, 80 bp, synthetic construct
  misc_feature 1..80: note = Artificially Synthesized Probe
  source 1..80: mol_type = other DNA
tttgagggacattgagcaatgtctggagatctttttctagttgttacaactcacagtaagggaagcgggtgttgctgcta

SEQ ID NO: 101079 - DNA, 80 bp, synthetic construct; identical to SEQ ID NO: 35505
  misc_feature 1..80: note = Artificially Synthesized Probe
  source 1..80: mol_type = other DNA

SEQ ID NO: 101080 - DNA, 80 bp, synthetic construct
  misc_feature 1..80: note = Artificially Synthesized Probe
  source 1..80: mol_type = other DNA
tgaagaggttttaagtgagaaagtgaaatgggctaagtcaaggttttcatcaaagaatgaaaagacttttcttagaaaca

SEQ ID NO: 101081 - DNA, 80 bp, synthetic construct
  misc_feature 1..80: note = Artificially Synthesized Probe
  source 1..80: mol_type = other DNA
attcccattcctactccaagttccgagaagctaccagtctactttctgtctcctgatagtttccttttttggatgtttct

SEQ ID NO: 101082 - DNA, 80 bp, synthetic construct; identical to SEQ ID NO: 35506
  misc_feature 1..80: note = Artificially Synthesized Probe
  source 1..80: mol_type = other DNA

SEQ ID NO: 101083 - DNA, 80 bp, synthetic construct
  misc_feature 1..80: note = Artificially Synthesized Probe
  source 1..80: mol_type = other DNA
agatctctgacatttacccatacagaccctagtatttcaaaggcattgtatagccatgccggctaggctatagagcagca

SEQ ID NO: 101084 - DNA, 80 bp, synthetic construct
  misc_feature 1..80: note = Artificially Synthesized Probe
  source 1..80: mol_type = other DNA
aaaaatctacaattcgagaggatttcctggcactatataaaaccccttccatcaatgggagttgttctcccttcttgaat

SEQ ID NO: 101085 - DNA, 80 bp, synthetic construct
  misc_feature 1..80: note = Artificially Synthesized Probe
  source 1..80: mol_type = other DNA
agttcccaaaagggctagataggtactatcggtactatttacagcaagccagctgtaaatgcatgtggaatctctcaagc

SEQ ID NO: 101086 - DNA, 80 bp, synthetic construct
  misc_feature 1..80: note = Artificially Synthesized Probe
  source 1..80: mol_type = other DNA
acccatctgcatcaaatgaagatgctgctgacagtagatattaaaagagatgttgaacacataaggtccaggtggccgca

SEQ ID NO: 101087 - DNA, 80 bp, synthetic construct; identical to SEQ ID NO: 35507
  misc_feature 1..80: note = Artificially Synthesized Probe
  source 1..80: mol_type = other DNA

SEQ ID NO: 101088 - DNA, 80 bp, synthetic construct
  misc_feature 1..80: note = Artificially Synthesized Probe
  source 1..80: mol_type = other DNA
ttccaagttgtgtagcttctcacatgcaagctaggcccagaaccacttgagttcacaactatttctttctttttcttttt

SEQ ID NO: 101089 - DNA, 80 bp, synthetic construct
  misc_feature 1..80: note = Artificially Synthesized Probe
  source 1..80: mol_type = other DNA
gagtagctgggactgcaggtgtgcaccacctcacccagtgaatttttgtatttttagtagagacggggtttcaccatgtt

SEQ ID NO: 101090 - DNA, 80 bp, synthetic construct
  misc_feature 1..80: note = Artificially Synthesized Probe
  source 1..80: mol_type = other DNA
atttcttgaaaatgagttcaacaatgtggaccttctgtgtgtgcaagggaatatgccttatattcatcctctattctatc

SEQ ID NO: 101091 - DNA, 80 bp, synthetic construct; identical to SEQ ID NO: 35508
  misc_feature 1..80: note = Artificially Synthesized Probe
  source 1..80: mol_type = other DNA

SEQ ID NO: 101092 - DNA, 80 bp, synthetic construct
  misc_feature 1..80: note = Artificially Synthesized Probe
  source 1..80: mol_type = other DNA
ctccttcccgggagtccggcagccgctgctgctgctgctgctgctgctgccgccgccgccgccgccgtccctgcgtcctt

SEQ ID NO: 101093 - DNA, 80 bp, synthetic construct
  misc_feature 1..80: note = Artificially Synthesized Probe
  source 1..80: mol_type = other DNA
taatttttaaaatttttgtggagatgggggtttcgctatgttgcccaagctggtcttgaactcctggcttcaagcgatcc

SEQ ID NO: 101094 - DNA, 80 bp, synthetic construct
  misc_feature 1..80: note = Artificially Synthesized Probe
  source 1..80: mol_type = other DNA
tacgtgttgtcaacaaaatgcagcaaaataaagagttgcatgataattttaatgcatgaccaatgaagattgaagccagc

SEQ ID NO: 101095 - DNA, 80 bp, synthetic construct
  misc_feature 1..80: note = Artificially Synthesized Probe
  source 1..80: mol_type = other DNA
tgatggggtatgtgattaaaccatgttagacaatatgattaggccatgccattattctttcacagttgcaaaggtaagct

SEQ ID NO: 101096 - DNA, 80 bp, synthetic construct; identical to SEQ ID NO: 35485
  misc_feature 1..80: note = Artificially Synthesized Probe
  source 1..80: mol_type = other DNA

SEQ ID NO: 101097 - DNA, 80 bp, synthetic construct
  misc_feature 1..80: note = Artificially Synthesized Probe
  source 1..80: mol_type = other DNA
tgtgttttaaatacgtggaaccgtacaatgtgtactcttctgtgtttgtaagatgcatccttagtgttgtgcgtagctgt

SEQ ID NO: 101098 - DNA, 80 bp, synthetic construct; identical to SEQ ID NO: 35509
  misc_feature 1..80: note = Artificially Synthesized Probe
  source 1..80: mol_type = other DNA

SEQ ID NO: 101099 - DNA, 80 bp, synthetic construct
  misc_feature 1..80: note = Artificially Synthesized Probe
  source 1..80: mol_type = other DNA
aaaatccaggtcaccaggctacacagggactcatctctacccctgggactaaagcttggctctcagatccagttttctga

SEQ ID NO: 101100 - DNA, 80 bp, synthetic construct
  misc_feature 1..80: note = Artificially Synthesized Probe
  source 1..80: mol_type = other DNA
tatatttttggctttaactgttcaggctctactcttttcaagcagagtatgaggaaacctgaggactacatttttgtttt

SEQ ID NO: 101101 - DNA, 80 bp, synthetic construct
  misc_feature 1..80: note = Artificially Synthesized Probe
  source 1..80: mol_type = other DNA
ggcggcttgagcctgggagtttgagaccagcctgtgcaacatagcaagacctcatccttacaaaaaaataaaaacattag

SEQ ID NO: 101102 - DNA, 80 bp, synthetic construct; identical to SEQ ID NO: 35510
  misc_feature 1..80: note = Artificially Synthesized Probe
  source 1..80: mol_type = other DNA

SEQ ID NO: 101103 - DNA, 80 bp, synthetic construct
  misc_feature 1..80: note = Artificially Synthesized Probe
  source 1..80: mol_type = other DNA
catcttagagcagtgcaaagtttactggatcttccagtgcattattggcctttggtgtgatgacgagagagcaggaagga

SEQ ID NO: 101104 - DNA, 80 bp, synthetic construct
  misc_feature 1..80: note = Artificially Synthesized Probe
  source 1..80: mol_type = other DNA
tgtatgtacagagatagattaaaacaattttttttcctagaagcattttacaaaagttaagtgtgcaagctatcctgtcg

SEQ ID NO: 101105 - DNA, 80 bp, synthetic construct; identical to SEQ ID NO: 35511
  misc_feature 1..80: note = Artificially Synthesized Probe
  source 1..80: mol_type = other DNA

SEQ ID NO: 101106 - DNA, 80 bp, synthetic construct
  misc_feature 1..80: note = Artificially Synthesized Probe
  source 1..80: mol_type = other DNA
cacactctctggatgaatattgcctttcagttcagaccactctaggaagaggagatagttttggtttaaatgagagagtg

SEQ ID NO: 101107 - DNA, 80 bp, synthetic construct
  misc_feature 1..80: note = Artificially Synthesized Probe
  source 1..80: mol_type = other DNA
ttatctaaattttgaaaaattgctatgtctacaatttcagaactggttgtcgactcatgagacgacacttactgttgtcc

SEQ ID NO: 101108 - DNA, 80 bp, synthetic construct
  misc_feature 1..80: note = Artificially Synthesized Probe
  source 1..80: mol_type = other DNA
tcttcaggattcccatggcctaggcatggaataaatgcaaggttagggcttattttctgagaaataaacccttagtagga

SEQ ID NO: 101109 - DNA, 80 bp, synthetic construct
  misc_feature 1..80: note = Artificially Synthesized Probe
  source 1..80: mol_type = other DNA
atttcaacagttcatatttgctgagtactttgggcatgatggttagagtcagaggtgactttaggagctgcaggccttgt

SEQ ID NO: 101110 - DNA, 80 bp, synthetic construct
  misc_feature 1..80: note = Artificially Synthesized Probe
  source 1..80: mol_type = other DNA
aactgatgatgcttatgacgtaggtgggaatacaggctcctatattaaaaaagttattgtggctaatactatcttatttt

SEQ ID NO: 101111 - DNA, 80 bp, synthetic construct; identical to SEQ ID NO: 35512
  misc_feature 1..80: note = Artificially Synthesized Probe
  source 1..80: mol_type = other DNA

SEQ ID NO: 101112 - DNA, 80 bp, synthetic construct
  misc_feature 1..80: note = Artificially Synthesized Probe
  source 1..80: mol_type = other DNA
tacttcatatatatgtacagttatgtctcaattaaaaatttaaaaaactcttaaaaagaaaaaagaatcaagagagaaga

SEQ ID NO: 101113 - DNA, 80 bp, synthetic construct
  misc_feature 1..80: note = Artificially Synthesized Probe
  source 1..80: mol_type = other DNA
atttaatattcatttctgtcagggttgaatttgatccaggagaaatggatgtgtactaactagtcaggtgtaactggaat

SEQ ID NO: 101114 - DNA, 80 bp, synthetic construct
  misc_feature 1..80: note = Artificially Synthesized Probe
  source 1..80: mol_type = other DNA
attattgttagagtttattatttttcaaaagataatgataaaacacacctgtaaatttaatataattataaattcgtcaa

SEQ ID NO: 101115 - DNA, 80 bp, synthetic construct; identical to SEQ ID NO: 35513
  misc_feature 1..80: note = Artificially Synthesized Probe
  source 1..80: mol_type = other DNA

SEQ ID NO: 101116 - DNA, 80 bp, synthetic construct
  misc_feature 1..80: note = Artificially Synthesized Probe
  source 1..80: mol_type = other DNA
tgagccaccaaggccggcagaactatggaaatttctaagaaacaaaaacccaaacagtccttcttattcagacttctttg

SEQ ID NO: 101117 - DNA, 80 bp, synthetic construct
  misc_feature 1..80: note = Artificially Synthesized Probe
  source 1..80: mol_type = other DNA
ccaaccctggctaccctcccacccccaccccctatacacacacatagacacctaggagagggaaagggacagactgcctc

SEQ ID NO: 101118 - DNA, 80 bp, synthetic construct
  misc_feature 1..80: note = Artificially Synthesized Probe
  source 1..80: mol_type = other DNA
tatggaaagcaactccataaacaagtcagaaacaacattattcacaaagttaaggaataaagaaccaggggtcagggccg

SEQ ID NO: 101119 - DNA, 80 bp, synthetic construct
  misc_feature 1..80: note = Artificially Synthesized Probe
  source 1..80: mol_type = other DNA
caatcctagctactcgggaggctgaggcaggagaattgcttgaaactgggaggcagaggttgtggtgagccgagatcatg

SEQ ID NO: 101120 - DNA, 80 bp, synthetic construct
  misc_feature 1..80: note = Artificially Synthesized Probe
  source 1..80: mol_type = other DNA
gtcaggagttcgagaccagcctaacatggtgaaaccccgtctctactaaatacaaaaaattagccaggcgtggtggcgca

SEQ ID NO: 101121 - DNA, 80 bp, synthetic construct; identical to SEQ ID NO: 35514
  misc_feature 1..80: note = Artificially Synthesized Probe
  source 1..80: mol_type = other DNA

SEQ ID NO: 101122 - DNA, 80 bp, synthetic construct
  misc_feature 1..80: note = Artificially Synthesized Probe
  source 1..80: mol_type = other DNA
cttgatatactctgtggcaatgctgttgggaactgaaactcccatccatcgctggtaggagtatagattggtgtaatatt

SEQ ID NO: 101123 - DNA, 80 bp, synthetic construct
  misc_feature 1..80: note = Artificially Synthesized Probe
  source 1..80: mol_type = other DNA
tggaaatcatccaagtattcatcaaaaaagagctagttaaatatatattcatacaccggaacattatgcaagggtaaaat

SEQ ID NO: 101124 - DNA, 80 bp, synthetic construct; identical to SEQ ID NO: 35515
  misc_feature 1..80: note = Artificially Synthesized Probe
  source 1..80: mol_type = other DNA

SEQ ID NO: 101125 - DNA, 80 bp, synthetic construct
  misc_feature 1..80: note = Artificially Synthesized Probe
  source 1..80: mol_type = other DNA
gggggaatttcaggggttagattgataggtgtgcagaatgtgaaggtggagtggtaagagatgagatgaaaagacccatt

SEQ ID NO: 101126 - DNA, 80 bp, synthetic construct
  misc_feature 1..80: note = Artificially Synthesized Probe
  source 1..80: mol_type = other DNA
cagagaggttaagtaatttacttaagggcatacagcagttggccactggtggaatcagtatgcacaacccatcatgaccc

SEQ ID NO: 101127 - DNA, 80 bp, synthetic construct
  misc_feature 1..80: note = Artificially Synthesized Probe
  source 1..80: mol_type = other DNA
ctgtagagctcatcttacagtactaccaagtatggctgcccccaaatctgtgactcagccaagattatttttaaatattt

SEQ ID NO: 101128 - DNA, 80 bp, synthetic construct
  misc_feature 1..80: note = Artificially Synthesized Probe
  source 1..80: mol_type = other DNA
ataggaaaacaattggaaaggagtgaaaagatactgaaaaccacagcgctctccatagatgtaagggattatcaaccttt

SEQ ID NO: 101129 - DNA, 80 bp, synthetic construct; identical to SEQ ID NO: 35516
  misc_feature 1..80: note = Artificially Synthesized Probe
  source 1..80: mol_type = other DNA

SEQ ID NO: 101130 - DNA, 80 bp, synthetic construct
  misc_feature 1..80: note = Artificially Synthesized Probe
  source 1..80: mol_type = other DNA
ccgccgaccacttgaatgagaatttcctggggatggtcctgggaatgtgtatttttaacaagtgcccatgagagtcttaa

SEQ ID NO: 101131 - DNA, 80 bp, synthetic construct
  misc_feature 1..80: note = Artificially Synthesized Probe
  source 1..80: mol_type = other DNA
gccacaccttaatgagtgagtaagcacccaaggagaaaggactttccaagcaaggagaattttaaaaattagccaggtat

SEQ ID NO: 101132 - DNA, 80 bp, synthetic construct
  misc_feature 1..80: note = Artificially Synthesized Probe
  source 1..80: mol_type = other DNA
ctggcaaagaagagaatggcttcatggaagagagggagtccagttcaaaggctgtcaggaagacttctgggagcaattag

SEQ ID NO: 101133 - DNA, 80 bp, synthetic construct
  misc_feature 1..80: note = Artificially Synthesized Probe
  source 1..80: mol_type = other DNA
gggtgatgataggaagatgaattccatcttgatcctgctgagtttcagtggctctggggggaatcatacctactaggcat

SEQ ID NO: 101134 - DNA, 80 bp, synthetic construct; identical to SEQ ID NO: 35517
  misc_feature 1..80: note = Artificially Synthesized Probe
  source 1..80: mol_type = other DNA

SEQ ID NO: 101135 - DNA, 80 bp, synthetic construct
  misc_feature 1..80: note = Artificially Synthesized Probe
  source 1..80: mol_type = other DNA
aactgacaggttgtctgattttatacagcttaaattcctaagagaatctaatgggttcatcctgtgtgttgatttcactt

SEQ ID NO: 101136 - DNA, 80 bp, synthetic construct
  misc_feature 1..80: note = Artificially Synthesized Probe
  source 1..80: mol_type = other DNA
gccaataatcatcataacaacccccaatgttgattaggcactgttttaaacaccttacacgtggtaattcatttaatctg

SEQ ID NO: 101137 - DNA, 80 bp, synthetic construct
  misc_feature 1..80: note = Artificially Synthesized Probe
  source 1..80: mol_type = other DNA
ttttgatgactgggtgggagactgtgccttctgatcaagtttcctgagttcttttaatggaatcatcagaatatcacaca

SEQ ID NO: 101138 - DNA, 80 bp, synthetic construct; identical to SEQ ID NO: 35518
  misc_feature 1..80: note = Artificially Synthesized Probe
  source 1..80: mol_type = other DNA

SEQ ID NO: 101139 - DNA, 80 bp, synthetic construct
  misc_feature 1..80: note = Artificially Synthesized Probe
  source 1..80: mol_type = other DNA
ataagtgtccagttcggtcgtttatttagatttagttgataacttggatttcagcactaactgaaatgcattggttcaca

SEQ ID NO: 101140 - DNA, 80 bp, synthetic construct; identical to SEQ ID NO: 35486
  misc_feature 1..80: note = Artificially Synthesized Probe
  source 1..80: mol_type = other DNA

SEQ ID NO: 101141 - DNA, 80 bp, synthetic construct
  misc_feature 1..80: note = Artificially Synthesized Probe
  source 1..80: mol_type = other DNA
gtggggcctagaagaagacaggtcacagcaggtctcacttgaagaaatctttaacacagaacataaaagtgactgtaact

SEQ ID NO: 101142 - DNA, 80 bp, synthetic construct
  misc_feature 1..80: note = Artificially Synthesized Probe
  source 1..80: mol_type = other DNA
atctcttttcatccttgcaaacattagcaggaactataatcccacaattttatgagatgtagagaggtcaggcttagctt

SEQ ID NO: 101143 - DNA, 80 bp, synthetic construct; identical to SEQ ID NO: 35519
  misc_feature 1..80: note = Artificially Synthesized Probe
  source 1..80: mol_type = other DNA

SEQ ID NO: 101144 - DNA, 80 bp, synthetic construct
  misc_feature 1..80: note = Artificially Synthesized Probe
  source 1..80: mol_type = other DNA
atgagaaaaggtgcaaaaccagaatgaccaagctgtgtccaggaaatcataaacagacctgctgctgagaacaaaagttc

SEQ ID NO: 101145 - DNA, 80 bp, synthetic construct
  misc_feature 1..80: note = Artificially Synthesized Probe
  source 1..80: mol_type = other DNA
aattaacctgattgtcaactggaaaaagaggtgatagagctggaaatcagtaaaggggctctgggccaggcagggaaatg

SEQ ID NO: 101146 - DNA, 80 bp, synthetic construct; identical to SEQ ID NO: 35520
  misc_feature 1..80: note = Artificially Synthesized Probe
  source 1..80: mol_type = other DNA

SEQ ID NO: 101147 - DNA, 80 bp, synthetic construct
  misc_feature 1..80: note = Artificially Synthesized Probe
  source 1..80: mol_type = other DNA
agggctgccttcttgctataagctcacatggaggaaaaacggccaggtggctctgtggggcctcttcataagagcactaa

SEQ ID NO: 101148 - DNA, 80 bp, synthetic construct
  misc_feature 1..80: note = Artificially Synthesized Probe
  source 1..80: mol_type = other DNA
taattagaccatagcagcctgtacataaaaaatgagcaggttagggggcaaaaggcaaggggaggacccgcaacaagttc

SEQ ID NO: 101149 - DNA, 80 bp, synthetic construct
  misc_feature 1..80: note = Artificially Synthesized Probe
  source 1..80: mol_type = other DNA
accaagacatgaagggtctaagtcagaatgctgacagtggaaattgcaagaaagttcttatgtgatagagatcatgaaga

SEQ ID NO: 101150 - DNA, 80 bp, synthetic construct
  misc_feature 1..80: note = Artificially Synthesized Probe
  source 1..80: mol_type = other DNA
atcacaaagagcccttttccataaggagatgctttttaaaaatatcagtctcacaggtcaggagtattgctacacccagg

SEQ ID NO: 101151 - DNA, 80 bp, synthetic construct
  misc_feature 1..80: note = Artificially Synthesized Probe
  source 1..80: mol_type = other DNA
tgtaccaccacgcccagctaatttttgtatttttagtagagacggggttttgccacgttggtcaggctggtctcgaactc

SEQ ID NO: 101152 - DNA, 80 bp, synthetic construct; identical to SEQ ID NO: 35521
  misc_feature 1..80: note = Artificially Synthesized Probe
  source 1..80: mol_type = other DNA

SEQ ID NO: 101153 - DNA, 80 bp, synthetic construct
  misc_feature 1..80: note = Artificially Synthesized Probe
  source 1..80: mol_type = other DNA
aaacctccttctttctcctcttttctatttcctgggctctctctatatggaaaattaaaggctatgtatgttataatagg

SEQ ID NO: 101154 - DNA, 80 bp, synthetic construct
  misc_feature 1..80: note = Artificially Synthesized Probe
  source 1..80: mol_type = other DNA
atatgcctatacttgttgtatgcacacccagctgctctaccagtgtcttgtccattaatttttctgttttttctgcttta

SEQ ID NO: 101155 - DNA, 80 bp, synthetic construct
  misc_feature 1..80: note = Artificially Synthesized Probe
  source 1..80: mol_type = other DNA
ccagcaatgcagaaactgaagtgattatgaaatgtttaggttttcgtgattttgtttgttgctaaatcttactaaaatgc

SEQ ID NO: 101156 - DNA, 80 bp, synthetic construct; identical to SEQ ID NO: 35522
  misc_feature 1..80: note = Artificially Synthesized Probe
  source 1..80: mol_type = other DNA

SEQ ID NO: 101157 - DNA, 80 bp, synthetic construct
  misc_feature 1..80: note = Artificially Synthesized Probe
  source 1..80: mol_type = other DNA
ttcttggagtttgtgtggtgttttctggtgattagaataggcaaaaaacgaacatggttatggcaaataggaagatcagg

SEQ ID NO: 101158 - DNA, 80 bp, synthetic construct
  misc_feature 1..80: note = Artificially Synthesized Probe
  source 1..80: mol_type = other DNA
ctcagccagacacagacccctgacctggagggcaccaaggagggtgccaaggagaggtggctcacctgtgctctgggagt

SEQ ID NO: 101159 - DNA, 80 bp, synthetic construct; identical to SEQ ID NO: 35523
  misc_feature 1..80: note = Artificially Synthesized Probe
  source 1..80: mol_type = other DNA

SEQ ID NO: 101160 - DNA, 80 bp, synthetic construct
  misc_feature 1..80: note = Artificially Synthesized Probe
  source 1..80: mol_type = other DNA
taacagcatgcacagtcccatgaggagaggggcttctttatttttcttggcaaacatctgaatgatgcttgcaaactgtc

SEQ ID NO: 101161 - DNA, 80 bp, synthetic construct
  misc_feature 1..80: note = Artificially Synthesized Probe
  source 1..80: mol_type = other DNA
atactattcaaattcttatctctttgacattagtctgtggtttatttcctactagtggcttcgaaaagtcaaatcaactt

SEQ ID NO: 101162 - DNA, 80 bp, synthetic construct
  misc_feature 1..80: note = Artificially Synthesized Probe
  source 1..80: mol_type = other DNA
aatttcagatttgggtaatttttgtgttgcccagtaactttgacaaatgatttaatttgctcttttcaggagtttctcaa

SEQ ID NO: 101163 - DNA, 80 bp, synthetic construct
  misc_feature 1..80: note = Artificially Synthesized Probe
  source 1..80: mol_type = other DNA
aaaagcatttcctagaggccagacactcagacatctcatccccacagtagctctcatctcaggaaacagctttgtcttca

SEQ ID NO: 101164 - DNA, 80 bp, synthetic construct; identical to SEQ ID NO: 35524
  misc_feature 1..80: note = Artificially Synthesized Probe
  source 1..80: mol_type = other DNA

SEQ ID NO: 101165 - DNA, 80 bp, synthetic construct
  misc_feature 1..80: note = Artificially Synthesized Probe
  source 1..80: mol_type = other DNA
aaaataatcaaaaacaacaataaaacccctatgttatgaaattttaatttagtgacacttattcagttaagactttccta

SEQ ID NO: 101166 - DNA, 80 bp, synthetic construct
  misc_feature 1..80: note = Artificially Synthesized Probe
  source 1..80: mol_type = other DNA
tagggcagctttctctgagaggttgccatttgtcatatcaatttccaaaagctgttataccttcatggacatttattctc

SEQ ID NO: 101167 - DNA, 80 bp, synthetic construct
  misc_feature 1..80: note = Artificially Synthesized Probe
  source 1..80: mol_type = other DNA
cttaaatatttgctctcaagatgtcaaggttaacatatatatttttttgcagtcaaagtttccctctgttacccaggccg

SEQ ID NO: 101168 - DNA, 80 bp, synthetic construct; identical to SEQ ID NO: 35525
  misc_feature 1..80: note = Artificially Synthesized Probe
  source 1..80: mol_type = other DNA

SEQ ID NO: 101169 - DNA, 80 bp, synthetic construct
  misc_feature 1..80: note = Artificially Synthesized Probe
  source 1..80: mol_type = other DNA
tactcgggaggctgaggcgggagaatcacttgaacccgggacgcagaggtttcagtgagtcgagatcatgccactaaaaa

SEQ ID NO: 101170 - DNA, 80 bp, synthetic construct
  misc_feature 1..80: note = Artificially Synthesized Probe
  source 1..80: mol_type = other DNA
tattatcactattagcatttttccatgattttcagacttttttctatatagccttatacatataaatacatatattttaa

SEQ ID NO: 101171 - DNA, 80 bp, synthetic construct
  misc_feature 1..80: note = Artificially Synthesized Probe
  source 1..80: mol_type = other DNA
attataatgttgagatcatttgagaatcagagaaactggcagagaaaattatagtgagtcattttatgttcgcaacaaaa

SEQ ID NO: 101172 - DNA, 80 bp, synthetic construct; identical to SEQ ID NO: 35526
  misc_feature 1..80: note = Artificially Synthesized Probe
  source 1..80: mol_type = other DNA

SEQ ID NO: 101173 - DNA, 80 bp, synthetic construct
  misc_feature 1..80: note = Artificially Synthesized Probe
  source 1..80: mol_type = other DNA
tgaaattttaaaacacgttagaaaaacaactatcagaaccatagatgtctacactaaaagtagaaaagttaattataact

SEQ ID NO: 101174 - DNA, 80 bp, synthetic construct
  misc_feature 1..80: note = Artificially Synthesized Probe
  source 1..80: mol_type = other DNA
tacaattgtcgtgaaaagtaagtaactcctaaaaattgtcttgctcagtgccagacccagagttagtgcttcatatgcag

SEQ ID NO: 101175 - DNA, 80 bp, synthetic construct
  misc_feature 1..80: note = Artificially Synthesized Probe
  source 1..80: mol_type = other DNA
aattggtacagtttaattgtatcgaggtagctagaagtttgaagagtatttttggcccaggtatgtatgattaatgatca

SEQ ID NO: 101176 - DNA, 80 bp, synthetic construct
  misc_feature 1..80: note = Artificially Synthesized Probe
  source 1..80: mol_type = other DNA
acaaagcatagaaaaaagaagcaccaaaatatgtttttatttatataataattttctttcttttttcttttttctttctt

SEQ ID NO: 101177 - DNA, 80 bp, synthetic construct; identical to SEQ ID NO: 35527
  misc_feature 1..80: note = Artificially Synthesized Probe
  source 1..80: mol_type = other DNA

SEQ ID NO: 101178 - DNA, 80 bp, synthetic construct
  misc_feature 1..80: note = Artificially Synthesized Probe
  source 1..80: mol_type = other DNA
caagcgattctctcaccttgacctcttaaagtgctgggattataggcatgagtcaccgcacccagcccaaaacatagttt

SEQ ID NO: 101179 - DNA, 80 bp, synthetic construct
  misc_feature 1..80: note = Artificially Synthesized Probe
  source 1..80: mol_type = other DNA
aaaagtcattgaatatttagaagtgggtatatcgtggtagcctggtaacttggttttgtcacttggaaaatgaactggca

SEQ ID NO: 101180 - DNA, 80 bp, synthetic construct
  misc_feature 1..80: note = Artificially Synthesized Probe
  source 1..80: mol_type = other DNA
tttaaattgtttacattatagtgtagtatgaaaagccttattatatattatctccttcaatcctcagggaggaagctgtg

SEQ ID NO: 101181 - DNA, 80 bp, synthetic construct
  misc_feature 1..80: note = Artificially Synthesized Probe
  source 1..80: mol_type = other DNA
aatatctctgagcagtagttttcagatctgtaaatggatcacaatgctcagtctctatggctcccaggttttgagcaata

SEQ ID NO: 101182 - DNA, 80 bp, synthetic construct; identical to SEQ ID NO: 35528
  misc_feature 1..80: note = Artificially Synthesized Probe
  source 1..80: mol_type = other DNA

SEQ ID NO: 101183 - DNA, 80 bp, synthetic construct
  misc_feature 1..80: note = Artificially Synthesized Probe
  source 1..80: mol_type = other DNA
agggcacgtgcttgttttttttaattgagacattatgaacatctcagaacaaaagctttgggctttggtaagctccacca

SEQ ID NO: 101184 - DNA, 80 bp, synthetic construct
  misc_feature 1..80: note = Artificially Synthesized Probe
  source 1..80: mol_type = other DNA
agtcttttccccaggttacttctcttgtagtcacgcaaaatcaaggctgaggctccctgtcacgaccctcggcacttcac

SEQ ID NO: 101185 - DNA, 80 bp, synthetic construct
  misc_feature 1..80: note = Artificially Synthesized Probe
  source 1..80: mol_type = other DNA
aagtgttcatgactctgtgacagccaggacaagggcagtaagtttgcagtagaatgacactgcaaattggtgaaccttag

SEQ ID NO: 101186 - DNA, 80 bp, synthetic construct
  misc_feature 1..80: note = Artificially Synthesized Probe
  source 1..80: mol_type = other DNA
gtcactgcagtctcgacctcctgggctcaagtgatcctcctgcctcagcctcccaagtacctagtactacaggtgcacac

SEQ ID NO: 101187 - DNA, 80 bp, synthetic construct; identical to SEQ ID NO: 35529
  misc_feature 1..80: note = Artificially Synthesized Probe
  source 1..80: mol_type = other DNA

SEQ ID NO: 101188 - DNA, 80 bp, synthetic construct
  misc_feature 1..80: note = Artificially Synthesized Probe
  source 1..80: mol_type = other DNA
agagatgttaataacttgctccaggtcacagagcaaatcagccgtgaagcaggtttcaaatccaggtctgcttgactcca

SEQ ID NO: 101189 - DNA, 80 bp, synthetic construct
  misc_feature 1..80: note = Artificially Synthesized Probe
  source 1..80: mol_type = other DNA
ttagatgggatgccgaggatgtctgtgtgttctctatgtacacacagcaagacagacattttttcctttaacatgtgttt

SEQ ID NO: 101190 - DNA, 80 bp, synthetic construct; identical to SEQ ID NO: 35530
  misc_feature 1..80: note = Artificially Synthesized Probe
  source 1..80: mol_type = other DNA

SEQ ID NO: 101191 - DNA, 80 bp, synthetic construct
  misc_feature 1..80: note = Artificially Synthesized Probe
  source 1..80: mol_type = other DNA
attccttctaattaattttgaactgttttcgaaaaacgaagaacttgctggggagacaatgatcaagatcgtaacaaagt

SEQ ID NO: 101192 - DNA, 80 bp, synthetic construct
  misc_feature 1..80: note = Artificially Synthesized Probe
  source 1..80: mol_type = other DNA
ttgggattgggatcagagtctttttccataaatgcagcagcattgagcaatataattccatctaaaatcttattgtatat

SEQ ID NO: 101193 - DNA, 80 bp, synthetic construct
  misc_feature 1..80: note = Artificially Synthesized Probe
  source 1..80: mol_type = other DNA
attacaggcatgcgccaccctgcacagctaatttttgtatttttagtagagacagggttttaccgtatcagctaggctga

SEQ ID NO: 101194 - DNA, 80 bp, synthetic construct; identical to SEQ ID NO: 35531
  misc_feature 1..80: note = Artificially Synthesized Probe
  source 1..80: mol_type = other DNA

SEQ ID NO: 101195 - DNA, 80 bp, synthetic construct
  misc_feature 1..80: note = Artificially Synthesized Probe
  source 1..80: mol_type = other DNA
agtccattccttttgattattgaatagtataaccattatataagtattctacactttgagttgggttattttctattttc

SEQ ID NO: 101196 - DNA, 80 bp, synthetic construct
  misc_feature 1..80: note = Artificially Synthesized Probe
  source 1..80: mol_type = other DNA
ttttttcccaggatgattgccccacttcatacctccaccatcaaaatatgagagcacatgtttgctgccattagatatta

SEQ ID NO: 101197 - DNA, 80 bp, synthetic construct; identical to SEQ ID NO: 35487
  misc_feature 1..80: note = Artificially Synthesized Probe
  source 1..80: mol_type = other DNA

SEQ ID NO: 101198 - DNA, 80 bp, synthetic construct
  misc_feature 1..80: note = Artificially Synthesized Probe
  source 1..80: mol_type = other DNA
ttatttttttttttgagatggagtctcgctctgtcgcccaggctggagcgtagtggcatgatctcgggtcactgcaacct

SEQ ID NO: 101199 - DNA, 80 bp, synthetic construct
  misc_feature 1..80: note = Artificially Synthesized Probe
  source 1..80: mol_type = other DNA
cgcctcggcctcccagagtgctgggattacaggtgtgagccgccgcgtctggccaggttgtctttttattactgagttgc

SEQ ID NO: 101200 - DNA, 80 bp, synthetic construct; identical to SEQ ID NO: 35532
  misc_feature 1..80: note = Artificially Synthesized Probe
  source 1..80: mol_type = other DNA

SEQ ID NO: 101201 - DNA, 80 bp, synthetic construct
  misc_feature 1..80: note = Artificially Synthesized Probe
  source 1..80: mol_type = other DNA
acagaataccttcaggggactggacatggtggcttctgcctgtaatcctagtactttggaaggctgaggtgggagtatca

SEQ ID NO: 101202 - DNA, 80 bp, synthetic construct
  misc_feature 1..80: note = Artificially Synthesized Probe
  source 1..80: mol_type = other DNA
gcagtgaggcctgattgaaccactgaactgcagtcggggtgacagagtaagtccctgtctcaaacaacaacaacaacaac

SEQ ID NO: 101203 - DNA, 80 bp, synthetic construct; identical to SEQ ID NO: 35533
  misc_feature 1..80: note = Artificially Synthesized Probe
  source 1..80: mol_type = other DNA

SEQ ID NO: 101204 - DNA, 80 bp, synthetic construct
  misc_feature 1..80: note = Artificially Synthesized Probe
  source 1..80: mol_type = other DNA
caggaaaggatgggacaagttgattatgacatccctttctagctctaaggaattcaataattctgatattcatccctaaa

SEQ ID NO: 101205 - DNA, 80 bp, synthetic construct
  misc_feature 1..80: note = Artificially Synthesized Probe
  source 1..80: mol_type = other DNA
tttggggggtgtctacagtgaatcatctgtattcacatttatagagaactttgccatttgcatgttcatatctgtcatct

SEQ ID NO: 101206 - DNA, 80 bp, synthetic construct
  misc_feature 1..80: note = Artificially Synthesized Probe
  source 1..80: mol_type = other DNA
ggagtacagtggtgcaatcatggctcactgcagccttggcctcctgggttcaagtgatcctcccacctcagcctctccag

SEQ ID NO: 101207 - DNA, 80 bp, synthetic construct
  misc_feature 1..80: note = Artificially Synthesized Probe
  source 1..80: mol_type = other DNA
ctccccgggagggggcgtcgggaggaggagtaagagtggggcacggagggaagcaagagaaagaggctctgtgtggaatt

SEQ ID NO: 101208 - DNA, 80 bp, synthetic construct; identical to SEQ ID NO: 35534
  misc_feature 1..80: note = Artificially Synthesized Probe
  source 1..80: mol_type = other DNA

SEQ ID NO: 101209 - DNA, 80 bp, synthetic construct
  misc_feature 1..80: note = Artificially Synthesized Probe
  source 1..80: mol_type = other DNA
attagtgtttcccaattcatgccatcgccatttattagatcatctgtttggactttggtgcggttaaaagataaatgtgg

SEQ ID NO: 101210 - DNA, 80 bp, synthetic construct
  misc_feature 1..80: note = Artificially Synthesized Probe
  source 1..80: mol_type = other DNA
ttttaagtccaccaaaaactgtatttattggctcactttaccttttttattcatcagacttgtacctcccagtcagagtt

SEQ ID NO: 101211 - DNA, 80 bp, synthetic construct
  misc_feature 1..80: note = Artificially Synthesized Probe
  source 1..80: mol_type = other DNA
ggctttttgaaagattaaaaagttcatacattaacccttgagaaagtggaaacagtttagttcttgtgaagaagtagccc

SEQ ID NO: 101212 - DNA, 80 bp, synthetic construct
  misc_feature 1..80: note = Artificially Synthesized Probe
  source 1..80: mol_type = other DNA
ggagtatttgggttctcagttcaagcctataggacttggggagaacatgcattcactgaaacgatgacattcctctaagg

SEQ ID NO: 101213 - DNA, 80 bp, synthetic construct
  misc_feature 1..80: note = Artificially Synthesized Probe
  source 1..80: mol_type = other DNA
aatagaattaataaatgttattctgtttgccaattatagaagatacagttgttgaagactattaatgtaatatgcaattg

SEQ ID NO: 101214 - DNA, 80 bp, synthetic construct; identical to SEQ ID NO: 35535
  misc_feature 1..80: note = Artificially Synthesized Probe
  source 1..80: mol_type = other DNA

SEQ ID NO: 101215 - DNA, 80 bp, synthetic construct
  misc_feature 1..80: note = Artificially Synthesized Probe
  source 1..80: mol_type = other DNA
ttttgtcttattttataggagaaccagcagaaatccaccaatgtagtctatcaggcccaccatgtgagcaggaataagag

SEQ ID NO: 101216 - DNA, 80 bp, synthetic construct
  misc_feature 1..80: note = Artificially Synthesized Probe
  source 1..80: mol_type = other DNA
tggaaattagtgtaacgtattacatgcttgttttatcattagaaggaggctgggagatgtagtagaaagcctgggtgtta

SEQ ID NO: 101217 - DNA, 80 bp, synthetic construct
  misc_feature 1..80: note = Artificially Synthesized Probe
  source 1..80: mol_type = other DNA
ggacaagatgattatgacatcccctttcagtgctaagggattcaataattctcatgttcatccctaaacatatttactgg

SEQ ID NO: 101218 - DNA, 80 bp, synthetic construct; identical to SEQ ID NO: 35536
  misc_feature 1..80: note = Artificially Synthesized Probe
  source 1..80: mol_type = other DNA

SEQ ID NO: 101219 - DNA, 80 bp, synthetic construct
  misc_feature 1..80: note = Artificially Synthesized Probe
  source 1..80: mol_type = other DNA
gagtccaaggtagacaaaattatttctggactcaaaaggaaaaaccaagttcatttcatagacaacagttttcaaatgga

SEQ ID NO: 101220 - DNA, 80 bp, synthetic construct
  misc_feature 1..80: note = Artificially Synthesized Probe
  source 1..80: mol_type = other DNA
gtactcttcaagtttttgccttgtgcctttggtttcctggtttcattcatgcctggactgtgcatcgaaacaactttctg

SEQ ID NO: 101221 - DNA, 80 bp, synthetic construct
  misc_feature 1..80: note = Artificially Synthesized Probe
  source 1..80: mol_type = other DNA
tctcagtcctaggagatttctgtttatttcaaaatctatcactaaatagtaatgggcactcattagtctttgtgtttgga

SEQ ID NO: 101222 - DNA, 80 bp, synthetic construct
  misc_feature 1..80: note = Artificially Synthesized Probe
  source 1..80: mol_type = other DNA
tatgtttcccttcatgcgaagatcactggtgaaaacaactttcgtgttgggctatacacacaaagtccattttctctaat

SEQ ID NO: 101223 - DNA, 80 bp, synthetic construct; identical to SEQ ID NO: 35537
  misc_feature 1..80: note = Artificially Synthesized Probe
  source 1..80: mol_type = other DNA

SEQ ID NO: 101224 - DNA, 80 bp, synthetic construct
  misc_feature 1..80: note = Artificially Synthesized Probe
  source 1..80: mol_type = other DNA
ggtgacagaatgagactccatctcaaaaaataaaaataaaaaattaaattaaattaaaaagtcatctttttctaatttat

SEQ ID NO: 101225 - DNA, 80 bp, synthetic construct
  misc_feature 1..80: note = Artificially Synthesized Probe
  source 1..80: mol_type = other DNA
ttgtacaatgggaataaagatagtacctgacttatggaggtgtcgatagaactaaatcaataaaagacaaatgtgctttg

SEQ ID NO: 101226 - DNA, 80 bp, synthetic construct
  misc_feature 1..80: note = Artificially Synthesized Probe
  source 1..80: mol_type = other DNA
ctgagagctgaagcaaaatggaaggacattctgttatttctctcattttctgacatgagagaacacaccagagattcagg

SEQ ID NO: 101227 - DNA, 80 bp, synthetic construct
  misc_feature 1..80: note = Artificially Synthesized Probe
  source 1..80: mol_type = other DNA
tgaagttagtgttgacacgttcttcatacagccatttcttctaatggtcctctgtcaaagccaaaggcatgactttaaaa

SEQ ID NO: 101228 - DNA, 80 bp, synthetic construct; identical to SEQ ID NO: 35538
  misc_feature 1..80: note = Artificially Synthesized Probe
  source 1..80: mol_type = other DNA

SEQ ID NO: 101229 - DNA, 80 bp, synthetic construct
  misc_feature 1..80: note = Artificially Synthesized Probe
  source 1..80: mol_type = other DNA
catggtggaagccacatggtaactcttttctcatataaagactctagagaatctttacacctaagagtgtgacatatggc

SEQ ID NO: 101230 - DNA, 80 bp, synthetic construct
  misc_feature 1..80: note = Artificially Synthesized Probe
  source 1..80: mol_type = other DNA
gctggctgtttccctccattccagctgattgctgactttgaaggggatatgagaccactgtcaccacatcttttgatttt

SEQ ID NO: 101231 - DNA, 80 bp, synthetic construct
  misc_feature 1..80: note = Artificially Synthesized Probe
  source 1..80: mol_type = other DNA
cctgagtagctgggaccacaggagtgcaccaccacacccggctaattttttttgttttttgtagatgcagggcctcacta

SEQ ID NO: 101232 - DNA, 80 bp, synthetic construct; identical to SEQ ID NO: 35539
  misc_feature 1..80: note = Artificially Synthesized Probe
  source 1..80: mol_type = other DNA

SEQ ID NO: 101233 - DNA, 80 bp, synthetic construct
  misc_feature 1..80: note = Artificially Synthesized Probe
  source 1..80: mol_type = other DNA
cattgaataaatgaatgagtaaatggctagagaattcattagaggatgtatttgctcttaggatccacattttttcctag

SEQ ID NO: 101234 - DNA, 80 bp, synthetic construct
  misc_feature 1..80: note = Artificially Synthesized Probe
  source 1..80: mol_type = other DNA
atttgtcatcttaaactatccaggccgatgtcagtctgttttatctgttctgaacaggtctctctggtgctggaaaaaca

SEQ ID NO: 101235 - DNA, 80 bp, synthetic construct
  misc_feature 1..80: note = Artificially Synthesized Probe
  source 1..80: mol_type = other DNA
gaggaaaatatccgccggattgctgaggtggctaagctgtttgctgatgctggtctggtctgcattaccagctttatttc

SEQ ID NO: 101236 - DNA, 80 bp, synthetic construct; identical to SEQ ID NO: 35540
  misc_feature 1..80: note = Artificially Synthesized Probe
  source 1..80: mol_type = other DNA

SEQ ID NO: 101237 - DNA, 80 bp, synthetic construct
  misc_feature 1..80: note = Artificially Synthesized Probe
  source 1..80: mol_type = other DNA
gtttaatgctgacatcactgagatggagtgtcactcttcttttaaatcaggaaatttctgggagccaaacatcagatgta

SEQ ID NO: 101238 - DNA, 80 bp, synthetic construct
  misc_feature 1..80: note = Artificially Synthesized Probe
  source 1..80: mol_type = other DNA
atttctggactttctctcaagcactctgcaaagcacaaaccccagtgttatctcaaggctattgaaaaccaaagtacaca

SEQ ID NO: 101239 - DNA, 80 bp, synthetic construct
  misc_feature 1..80: note = Artificially Synthesized Probe
  source 1..80: mol_type = other DNA
atatttgtagatgcacctctaaatatttgtgaaagcagagacgtaaaaggcctctataaaagggccagagctggggagat

SEQ ID NO: 101240 - DNA, 80 bp, synthetic construct; identical to SEQ ID NO: 35541
  misc_feature 1..80: note = Artificially Synthesized Probe
  source 1..80: mol_type = other DNA

SEQ ID NO: 101241 - DNA, 80 bp, synthetic construct
  misc_feature 1..80: note = Artificially Synthesized Probe
  source 1..80: mol_type = other DNA
tatattttcttacttatggctagaagtcaaggatggctgtttgaccttttctgttaaagtgtgaattttcagtttaatac

SEQ ID NO: 101242 - DNA, 80 bp, synthetic construct
  misc_feature 1..80: note = Artificially Synthesized Probe
  source 1..80: mol_type = other DNA
agtgagtgactgtgtccaccaggtagtggaacttctgcaagagcaggtaggtgaaccggttgtctttttttatatgttta

SEQ ID NO: 101243 - DNA, 80 bp, synthetic construct; identical to SEQ ID NO: 35488
  misc_feature 1..80: note = Artificially Synthesized Probe
  source 1..80: mol_type = other DNA

SEQ ID NO: 101244 - DNA, 80 bp, synthetic construct
  misc_feature 1..80: note = Artificially Synthesized Probe
  source 1..80: mol_type = other DNA
gagctgaggctgaaactctcccttcattatcaattactaaggtaagtgggtgcagactggtcaaataattaggcttaata

SEQ ID NO: 101245 - DNA, 80 bp, synthetic construct; identical to SEQ ID NO: 35542
  misc_feature 1..80: note = Artificially Synthesized Probe
  source 1..80: mol_type = other DNA

SEQ ID NO: 101246 - DNA, 80 bp, synthetic construct
  misc_feature 1..80: note = Artificially Synthesized Probe
  source 1..80: mol_type = other DNA
tttcataggaaacttccaaacttaaatatttctggcccttagatcatgggttagcataacaggtggggacacttaaaaca

SEQ ID NO: 101247 - DNA, 80 bp, synthetic construct
  misc_feature 1..80: note = Artificially Synthesized Probe
  source 1..80: mol_type = other DNA
ccctcaaaggtttcatgcgggagaaggagtacttacaggttatgcactttgacaccctgctagatggtatgtttttgttg

SEQ ID NO: 101248 - DNA, 80 bp, synthetic construct
  misc_feature 1..80: note = Artificially Synthesized Probe
  source 1..80: mol_type = other DNA
tttttggttgttctcaaaggttgttcctttaaaactaaggaactgaaaaatggtgtaaagccaagagaaagacaggtctg

SEQ ID NO: 101249 - DNA, 80 bp, synthetic construct
  misc_feature 1..80: note = Artificially Synthesized Probe
  source 1..80: mol_type = other DNA
gcattattgcaacaactgctttctttggtgcatgctaaagtgtcaatgttcatgcccacacatgaaatatattaaaatgg

SEQ ID NO: 101250 - DNA, 80 bp, synthetic construct; identical to SEQ ID NO: 35543
  misc_feature 1..80: note = Artificially Synthesized Probe
  source 1..80: mol_type = other DNA

SEQ ID NO: 101251 - DNA, 80 bp, synthetic construct
  misc_feature 1..80: note = Artificially Synthesized Probe
  source 1..80: mol_type = other DNA
ttcccttattcttttgctgtgacagataacaccccacaacctgaatccttcacttctcagattaaataatattccccaaa

SEQ ID NO: 101252 - DNA, 80 bp, synthetic construct
  misc_feature 1..80: note = Artificially Synthesized Probe
  source 1..80: mol_type = other DNA
aggaaactgcctcagattaagtgatttgctcataacattcataagtgaaagcccaagaccagagtccagaatcttaggaa

SEQ ID NO: 101253 - DNA, 80 bp, synthetic construct; identical to SEQ ID NO: 35544
  misc_feature 1..80: note = Artificially Synthesized Probe
  source 1..80: mol_type = other DNA

SEQ ID NO: 101254 - DNA, 80 bp, synthetic construct
  misc_feature 1..80: note = Artificially Synthesized Probe
  source 1..80: mol_type = other DNA
actttttgtatttttagtagagacggggtttcaccgcgttaaccaggatggttttgatctcctgacctcgtgatctgccc

SEQ ID NO: 101255 - DNA, 80 bp, synthetic construct
  misc_feature 1..80: note = Artificially Synthesized Probe
  source 1..80: mol_type = other DNA
ggtccttagcctgagatctaggacttcagggtgggctaacaaaaaatcttagaggcaaaaatgtttgtgttttgataagg

SEQ ID NO: 101256 - DNA, 80 bp, synthetic construct
  misc_feature 1..80: note = Artificially Synthesized Probe
  source 1..80: mol_type = other DNA
attcaagcaatccttccacctctgcctcctgggtagctgggactacaggcatgtaccaccatgcctggcagatttctaaa

SEQ ID NO: 101257 - DNA, 80 bp, synthetic construct
  misc_feature 1..80: note = Artificially Synthesized Probe
  source 1..80: mol_type = other DNA
aaagatgaagaacagctaatgcagataatccatctggatgatttaggcaaaatctctagcctttcttttacactgtctca

SEQ ID NO: 101258 - DNA, 80 bp, synthetic construct; identical to SEQ ID NO: 35545
  misc_feature 1..80: note = Artificially Synthesized Probe
  source 1..80: mol_type = other DNA

SEQ ID NO: 101259 - DNA, 80 bp, synthetic construct
  misc_feature 1..80: note = Artificially Synthesized Probe
  source 1..80: mol_type = other DNA
tgattttctatttcttatttgatgctcactaccgtgaggtggatgaagcacttattattgctcccactttccatgtaatc

SEQ ID NO: 101260 - DNA, 80 bp, synthetic construct
  misc_feature 1..80: note = Artificially Synthesized Probe
  source 1..80: mol_type = other DNA
gcgtttcctgtgttcctgagtcagggccccagccatgtgccacttgctgtgtgattctgtgggtctgtctgtactcagaa

SEQ ID NO: 101261 - DNA, 80 bp, synthetic construct
  misc_feature 1..80: note = Artificially Synthesized Probe
  source 1..80: mol_type = other DNA
agaattgagtgaggcaactcttgtaaggtgtatagatccctttatcctcatgtggctccagtgtggctctgtcaggaggg

SEQ ID NO: 101262 - DNA, 80 bp, synthetic construct
  misc_feature 1..80: note = Artificially Synthesized Probe
  source 1..80: mol_type = other DNA
accccagttatgatcaggattctgagctctgcacagcccacagaagcatcctaaatgcctgtgtaaattgataataaaaa

SEQ ID NO: 101263 - DNA, 80 bp, synthetic construct; identical to SEQ ID NO: 35546
  misc_feature 1..80: note = Artificially Synthesized Probe
  source 1..80: mol_type = other DNA

SEQ ID NO: 101264 - DNA, 80 bp, synthetic construct
  misc_feature 1..80: note = Artificially Synthesized Probe
  source 1..80: mol_type = other DNA
ccgtagtcccagctactcagagcctaaggcgggaggatcacttgagcccaggagctagagtcccacctgggcaacatagg

SEQ ID NO: 101265 - DNA, 80 bp, synthetic construct
  misc_feature 1..80: note = Artificially Synthesized Probe
  source 1..80: mol_type = other DNA
atactcactttctatgccaagacaattgtccttgccgtctctctgagtgggaggtaggtttattctggttcacccttatt

SEQ ID NO: 101266 - DNA, 80 bp, synthetic construct
  misc_feature 1..80: note = Artificially Synthesized Probe
  source 1..80: mol_type = other DNA
tttttctagcgtctggagatagaatggtaatgaaggcaggtgagcttgctgagaaatacagtacagtcattttctgagac

SEQ ID NO: 101267 - DNA, 80 bp, synthetic construct
  misc_feature 1..80: note = Artificially Synthesized Probe
  source 1..80: mol_type = other DNA
tgggttcaagcaattcttctgcctcagcctaccaagtagctgagactacaggcgcttgccacgaagcccaggaaattttt

SEQ ID NO: 101268 - DNA, 80 bp, synthetic construct; identical to SEQ ID NO: 35547
  misc_feature 1..80: note = Artificially Synthesized Probe
  source 1..80: mol_type = other DNA

SEQ ID NO: 101269 - DNA, 80 bp, synthetic construct
  misc_feature 1..80: note = Artificially Synthesized Probe
  source 1..80: mol_type = other DNA
gtgcctcacctgatggcgtttggactgaggagacagagttaaattgtaaaaagtgatttatttctatgtcagaatgttgg

SEQ ID NO: 101270 - DNA, 80 bp, synthetic construct
  misc_feature 1..80: note = Artificially Synthesized Probe
  source 1..80: mol_type = other DNA
cttcaaaccattgcaaatttcttgattacctacaatctgaaagcaacattgtttttattctgaccatgtctcctaaaaat

SEQ ID NO: 101271 - DNA, 80 bp, synthetic construct
  misc_feature 1..80: note = Artificially Synthesized Probe
  source 1..80: mol_type = other DNA
attattactcaagaatctacttttatatcagtgtatcatatcactttatttctcactagaagtatagttccagggttgtc

SEQ ID NO: 101272 - DNA, 80 bp, synthetic construct; identical to SEQ ID NO: 35548
  misc_feature 1..80: note = Artificially Synthesized Probe
  source 1..80: mol_type = other DNA

SEQ ID NO: 101273 - DNA, 80 bp, synthetic construct
  misc_feature 1..80: note = Artificially Synthesized Probe
  source 1..80: mol_type = other DNA
catgtgagattctaggatgttctagggcagtttgcttctatacttgctcccaaagcctagtttggaaactattctacagt

SEQ ID NO: 101274 - DNA, 80 bp, synthetic construct
  misc_feature 1..80: note = Artificially Synthesized Probe
  source 1..80: mol_type = other DNA
taaaaaattagaaaaccagataaacatctgaacaatgcttttggattgtattgaacaacattccatacaagttctgattt

SEQ ID NO: 101275 - DNA, 80 bp, synthetic construct
  misc_feature 1..80: note = Artificially Synthesized Probe
  source 1..80: mol_type = other DNA
taagattcgtttggtggagagctgaaaatgtttcttaattgtgtttatatttccctaggcatggcccttcctggtatgta

SEQ ID NO: 101276 - DNA, 80 bp, synthetic construct; identical to SEQ ID NO: 35549
  misc_feature 1..80: note = Artificially Synthesized Probe
  source 1..80: mol_type = other DNA

SEQ ID NO: 101277 - DNA, 80 bp, synthetic construct; identical to SEQ ID NO: 35489
  misc_feature 1..80: note = Artificially Synthesized Probe
  source 1..80: mol_type = other DNA

SEQ ID NO: 101278 - DNA, 80 bp, synthetic construct
  misc_feature 1..80: note = Artificially Synthesized Probe
  source 1..80: mol_type = other DNA
taaactgaatgtacctggttggattgtgtatgattgtacttcatttgtttgcaatgtatgattatgcatgaacttaattt

SEQ ID NO: 101279 - DNA, 80 bp, synthetic construct
  misc_feature 1..80: note = Artificially Synthesized Probe
  source 1..80: mol_type = other DNA
ttaagcaataaaaagtaatttaggttttgcacagaaacagtcccaaacaaccatgaagcagatctataaggctaacacag

SEQ ID NO: 101280 - DNA, 80 bp, synthetic construct; identical to SEQ ID NO: 35550
  misc_feature 1..80: note = Artificially Synthesized Probe
  source 1..80: mol_type = other DNA

SEQ ID NO: 101281 - DNA, 80 bp, synthetic construct
  misc_feature 1..80: note = Artificially Synthesized Probe
  source 1..80: mol_type = other DNA
cacttccttattgagacaacctgccagagtgttatttagtcatttcagattttcactcaaggccaagatgaaggtagatt

SEQ ID NO: 101282 - DNA, 80 bp, synthetic construct
  misc_feature 1..80: note = Artificially Synthesized Probe
  source 1..80: mol_type = other DNA
gcattttgctttatttcggccaagtcattctttataagcagaggcaaatatcatggtcttcctttcagcaatgtggtcag

SEQ ID NO: 101283 - DNA, 80 bp, synthetic construct
  misc_feature 1..80: note = Artificially Synthesized Probe
  source 1..80: mol_type = other DNA
ccctgcagcaacccatggagatacatgtcatttattagcccatttttccagtgaggaaactgagtttagaaaagttgaat

SEQ ID NO: 101284 - DNA, 80 bp, synthetic construct; identical to SEQ ID NO: 35551
  misc_feature 1..80: note = Artificially Synthesized Probe
  source 1..80: mol_type = other DNA

SEQ ID NO: 101285 - DNA, 80 bp, synthetic construct
  misc_feature 1..80: note = Artificially Synthesized Probe
  source 1..80: mol_type = other DNA
gttaggtttaaatggcttcattaatcatggcacattccctcaggtccataaataactgcatttgcttcctctggagttaa

SEQ ID NO: 101286 - DNA, 80 bp, synthetic construct
  misc_feature 1..80: note = Artificially Synthesized Probe
  source 1..80: mol_type = other DNA
atcattgtaggaggaacaccgttttgtacatttttttacattatctagaatcatagagaaatgagatgtttttagaaagc

SEQ ID NO: 101287 - DNA, 80 bp, synthetic construct
  misc_feature 1..80: note = Artificially Synthesized Probe
  source 1..80: mol_type = other DNA
ttattagttttaccagttattaaactgggcactaatgtaatggtgccctgaagatggggagacctgtgggattgttggct

SEQ ID NO: 101288 - DNA, 80 bp, synthetic construct
  misc_feature 1..80: note = Artificially Synthesized Probe
  source 1..80: mol_type = other DNA
gggttacaggtgtgcaccaccacacccggctaatttttgtatttttagttgagacgggttttcaccatgttggccagact

SEQ ID NO: 101289 - DNA, 80 bp, synthetic construct
  misc_feature 1..80: note = Artificially Synthesized Probe
  source 1..80: mol_type = other DNA
agatatgcatctctctatatagacatagatataaaatatatgtaacatatttaaataaatttatatatatgcatgtacat

SEQ ID NO: 101290 - DNA, 80 bp, synthetic construct; identical to SEQ ID NO: 35552
  misc_feature 1..80: note = Artificially Synthesized Probe
  source 1..80: mol_type = other DNA

SEQ ID NO: 101291 - DNA, 80 bp, synthetic construct
  misc_feature 1..80: note = Artificially Synthesized Probe
  source 1..80: mol_type = other DNA
ggttcaagtccacaggcggtctgctggcataattctctccttttctggggagaagagtcttttgtctaattaggcctttg

SEQ ID NO: 101292 - DNA, 80 bp, synthetic construct
  misc_feature 1..80: note = Artificially Synthesized Probe
  source 1..80: mol_type = other DNA
taacatcaaccatcacagtttctatgtgtattttttcagtagttttcctgtctcttcctttgtggtccagctgtcattgg

SEQ ID NO: 101293 - DNA, 80 bp, synthetic construct
  misc_feature 1..80: note = Artificially Synthesized Probe
  source 1..80: mol_type = other DNA
agactcagcataatggtgagaggagctcacactccagagaaagtacatgtgcgttaatgacttgatgtcatttttcactc

SEQ ID NO: 101294 - DNA, 80 bp, synthetic construct; identical to SEQ ID NO: 35553
  misc_feature 1..80: note = Artificially Synthesized Probe
  source 1..80: mol_type = other DNA

SEQ ID NO: 101295 - DNA, 80 bp, synthetic construct
  misc_feature 1..80: note = Artificially Synthesized Probe
  source 1..80: mol_type = other DNA
gctaatttaaaaaaaatatgtgtgtatacacacacacacacacacacacacacacacatattttttggtagagatgaggt

SEQ ID NO: 101296 - DNA, 80 bp, synthetic construct
  misc_feature 1..80: note = Artificially Synthesized Probe
  source 1..80: mol_type = other DNA
gatctagtatttgatagcacaacaggatgactatagtcaataataatttaacggctgggcacggtggcttacgcctctta

SEQ ID NO: 101297 - DNA, 80 bp, synthetic construct
  misc_feature 1..80: note = Artificially Synthesized Probe
  source 1..80: mol_type = other DNA
gacaatagcttgaacctgggaggcagaggttgcagtgagccaagatcgtgccagtgaactccagcctggcggcagagcaa

SEQ ID NO: 101298 - DNA, 80 bp, synthetic construct
  misc_feature 1..80: note = Artificially Synthesized Probe
  source 1..80: mol_type = other DNA
aatatcttatgcaccccataagcatatacactatgtacccaagaaagttaaaaatttaaaattaaagaaaaaggtgaatg

SEQ ID NO: 101299 - DNA, 80 bp, synthetic construct; identical to SEQ ID NO: 35554
  misc_feature 1..80: note = Artificially Synthesized Probe
  source 1..80: mol_type = other DNA

SEQ ID NO: 101300 - DNA, 80 bp, synthetic construct
  misc_feature 1..80: note = Artificially Synthesized Probe
  source 1..80: mol_type = other DNA
taacctacccatcactgctggaaacagagacctctaccctttctagattcctgtgaatcattaacatctcctatcatacc

SEQ ID NO: 101301 - DNA, 80 bp, synthetic construct
  misc_feature 1..80: note = Artificially Synthesized Probe
  source 1..80: mol_type = other DNA
aaagttagatcacttatggaggccacctccatgatttaaaactcaacccacttttcacatatgctccacttgctttggga

SEQ ID NO: 101302 - DNA, 80 bp, synthetic construct
  misc_feature 1..80: note = Artificially Synthesized Probe
  source 1..80: mol_type = other DNA
gattcatgcttcaaggatggcacaccttatatctagttttcgtgcatcacatggctctttccacagatggcgtgatcaac

SEQ ID NO: 101303 - DNA, 80 bp, synthetic construct
  misc_feature 1..80: note = Artificially Synthesized Probe
  source 1..80: mol_type = other DNA
ggacaacatgtacaaaacacccccatatcaaagtaagtcacaaaacctttggaaggactttcttgagctatttaaactga

SEQ ID NO: 101304 - DNA, 80 bp, synthetic construct; identical to SEQ ID NO: 35555
  misc_feature 1..80: note = Artificially Synthesized Probe
  source 1..80: mol_type = other DNA

SEQ ID NO: 101305 - DNA, 80 bp, synthetic construct
  misc_feature 1..80: note = Artificially Synthesized Probe
  source 1..80: mol_type = other DNA
caaatgctggaacaagaactcagagttcatgctctgtggctagtgagggggtcaatgatactctcttagtaaatgatact

SEQ ID NO: 101306 - DNA, 80 bp, synthetic construct
  misc_feature 1..80: note = Artificially Synthesized Probe
  source 1..80: mol_type = other DNA
ttcacagcttctaattactgtcggtgatggggtggggtgggattttattaagttgctggctgtggttcatttcccacaaa

SEQ ID NO: 101307 - DNA, 80 bp, synthetic construct; identical to SEQ ID NO: 35556
  misc_feature 1..80: note = Artificially Synthesized Probe
  source 1..80: mol_type = other DNA

SEQ ID NO: 101308 - DNA, 80 bp, synthetic construct
  misc_feature 1..80: note = Artificially Synthesized Probe
  source 1..80: mol_type = other DNA
taatcccagctactcaggaggctaaagcacgagagttgcttgaacccaggaggcagcggttgcagtgagccaagctgcca

SEQ ID NO: 101309 - DNA, 80 bp, synthetic construct
  misc_feature 1..80: note = Artificially Synthesized Probe
  source 1..80: mol_type = other DNA
ggaaagaccttttaagtcccctgtttgtggcctctgaagaccttctctatctgaacacaaaaggtcaatggcaagcaaag

SEQ ID NO: 101310 - DNA, 80 bp, synthetic construct
  misc_feature 1..80: note = Artificially Synthesized Probe
  source 1..80: mol_type = other DNA
tttctaccctttgggaatgatattcgcatacacatgactagcactaaaaaaacctgaagagtttcttaagtgattacagg

SEQ ID NO: 101311 - DNA, 80 bp, synthetic construct
  misc_feature 1..80: note = Artificially Synthesized Probe
  source 1..80: mol_type = other DNA
gacatccttagagatgtgcattgtcctgtccaatccttagtgttggtccaatttcaagtgcgttcttgtctgaaaggccc

SEQ ID NO: 101312 - DNA, 80 bp, synthetic construct; identical to SEQ ID NO: 35557
  misc_feature 1..80: note = Artificially Synthesized Probe
  source 1..80: mol_type = other DNA

SEQ ID NO: 101313 - DNA, 80 bp, synthetic construct
  misc_feature 1..80: note = Artificially Synthesized Probe
  source 1..80: mol_type = other DNA
acaatatttgaattaggccaattaataaccctgcaatggcctctaagtgttcaggtgaaaggaagactcacacatctctc

SEQ ID NO: 101314 - DNA, 80 bp, synthetic construct
  misc_feature 1..80: note = Artificially Synthesized Probe
  source 1..80: mol_type = other DNA
ggaaccccatctctactaaaaatacaaaattagccgggcatggtggtgcatgcctgtaatcccagctacttgggagcttg

SEQ ID NO: 101315 - DNA, 80 bp, synthetic construct
  misc_feature 1..80: note = Artificially Synthesized Probe
  source 1..80: mol_type = other DNA
caaaggaaaagttcttgaaggaaattacacacagtgagctaacaaatgataagaaaacaaagcagccttattgccaatgt

SEQ ID NO: 101316 - DNA, 80 bp, synthetic construct; identical to SEQ ID NO: 35558
  misc_feature 1..80: note = Artificially Synthesized Probe
  source 1..80: mol_type = other DNA

SEQ ID NO: 101317 - DNA, 80 bp, synthetic construct
  misc_feature 1..80: note = Artificially Synthesized Probe
  source 1..80: mol_type = other DNA
tagagaaagcctggctgtatcaatgtagattttctcttcaaatgcaaatgtaccccacaaaaggcagatttttagctatt

SEQ ID NO: 101318 - DNA, 80 bp, synthetic construct
  misc_feature 1..80: note = Artificially Synthesized Probe
  source 1..80: mol_type = other DNA
gcaaagccctaactcccttcaattctatgaaggttgagagaggtgagaaagctgcagaagaaaagttggaagctagcaga

SEQ ID NO: 101319 - DNA, 80 bp, synthetic construct
  misc_feature 1..80: note = Artificially Synthesized Probe
  source 1..80: mol_type = other DNA
agaaacagccttctattggaagaagatgccacctaggattttcagagctaaagaagagaagtcaatgcctggcttcaaag

SEQ ID NO: 101320 - DNA, 80 bp, synthetic construct
  misc_feature 1..80: note = Artificially Synthesized Probe
  source 1..80: mol_type = other DNA
gatagcacatctgtttacagcgtggtttactgaatattttaagcccactattgagaccgactgctcaaaaaaagattcat

SEQ ID NO: 101321 - DNA, 80 bp, synthetic construct; identical to SEQ ID NO: 35559
  misc_feature 1..80: note = Artificially Synthesized Probe
  source 1..80: mol_type = other DNA

SEQ ID NO: 101322 - DNA, 80 bp, synthetic construct; identical to SEQ ID NO: 35490
  misc_feature 1..80: note = Artificially Synthesized Probe
  source 1..80: mol_type = other DNA

SEQ ID NO: 101323 - DNA, 80 bp, synthetic construct
  misc_feature 1..80: note = Artificially Synthesized Probe
  source 1..80: mol_type = other DNA
gctcttccagacccgccttttcttctgtagggtctcggagcagatcgagctgactcccgttctgccaggtctggtcgctg

SEQ ID NO: 101324 - DNA, 80 bp, synthetic construct
  misc_feature 1..80: note = Artificially Synthesized Probe
  source 1..80: mol_type = other DNA
aatagcaagagaactagaattagaagtggagcctgaagaagtaactgaattgttgcaatctcatgatagaatttgaaagg

SEQ ID NO: 101325 - DNA, 80 bp, synthetic construct
  misc_feature 1..80: note = Artificially Synthesized Probe
  source 1..80: mol_type = other DNA
tgaaggaagttctaccatgcgtaaaatgctatcaaacagcatctcatgctacagagaaatctttcatgaaagaaagagtc

SEQ ID NO: 101326 - DNA, 80 bp, synthetic construct
  misc_feature 1..80: note = Artificially Synthesized Probe
  source 1..80: mol_type = other DNA
tttttagcaaaaaggtatttttaaattaagataggctgggcgcggtggctcaccctgtaatcccaacactttgggaggcc

SEQ ID NO: 101327 - DNA, 80 bp, synthetic construct; identical to SEQ ID NO: 35560
  misc_feature 1..80: note = Artificially Synthesized Probe
  source 1..80: mol_type = other DNA

SEQ ID NO: 101328 - DNA, 80 bp, synthetic construct
  misc_feature 1..80: note = Artificially Synthesized Probe
  source 1..80: mol_type = other DNA
tgcaatgtttctcaggtatgcctgtatttttttcatcatgccttacaatgcatgctggcagatggaactcagaattttag

SEQ ID NO: 101329 - DNA, 80 bp, synthetic construct
  misc_feature 1..80: note = Artificially Synthesized Probe
  source 1..80: mol_type = other DNA
ccctgcagacattttgtgcaaaagtgagagagattgatgaagattgttgaagattgtcgcatgtaccaaacacacaagtt

SEQ ID NO: 101330 - DNA, 80 bp, synthetic construct; identical to SEQ ID NO: 35561
  misc_feature 1..80: note = Artificially Synthesized Probe
  source 1..80: mol_type = other DNA

SEQ ID NO: 101331 - DNA, 80 bp, synthetic construct
  misc_feature 1..80: note = Artificially Synthesized Probe
  source 1..80: mol_type = other DNA
gttgcctttcgtccatggctcccagagatttgtcaagtagtaattatttttcacaatgctcttggtgaggaaagtaagaa

SEQ ID NO: 101332 - DNA, 80 bp, synthetic construct
  misc_feature 1..80: note = Artificially Synthesized Probe
  source 1..80: mol_type = other DNA
atcacccatgactggatcccatcctcacagattctcatttaattggctttgagtcagatctgattattgaggggtgggta

SEQ ID NO: 101333 - DNA, 80 bp, synthetic construct
  misc_feature 1..80: note = Artificially Synthesized Probe
  source 1..80: mol_type = other DNA
gtctcctatcttagtgacagcttcaccatccaaatggtggcctgtgaccaaaacctggatgccattcttgcttctctctt

SEQ ID NO: 101334 - DNA, 80 bp, synthetic construct
  misc_feature 1..80: note = Artificially Synthesized Probe
  source 1..80: mol_type = other DNA
tcccaaaaggttaattggtttatcataagcattgaatttgttataaattttgtcttcttgttcctttttcctgtcttttt

SEQ ID NO: 101335 - DNA, 80 bp, synthetic construct; identical to SEQ ID NO: 35562
  misc_feature 1..80: note = Artificially Synthesized Probe
  source 1..80: mol_type = other DNA

SEQ ID NO: 101336 - DNA, 80 bp, synthetic construct
  misc_feature 1..80: note = Artificially Synthesized Probe
  source 1..80: mol_type = other DNA
ctcctttcagaagtcagcactgactcctatgacacatgagcataactgagtgccccttctttgtcctcccagagtaattt

SEQ ID NO: 101337 - DNA, 80 bp, synthetic construct
  misc_feature 1..80: note = Artificially Synthesized Probe
  source 1..80: mol_type = other DNA
ccacttcccctctgtaaaactgccttctcttctgaaaatgaggacattaaatctacattacctccaggttccttaaagcc

SEQ ID NO: 101338 - DNA, 80 bp, synthetic construct
  misc_feature 1..80: note = Artificially Synthesized Probe
  source 1..80: mol_type = other DNA
accttatcttgctgaatccaccatttccttccttctttctggtttctttcccttctctctgctccctttttgcattcttt

SEQ ID NO: 101339 - DNA, 80 bp, synthetic construct; identical to SEQ ID NO: 35563
  misc_feature 1..80: note = Artificially Synthesized Probe
  source 1..80: mol_type = other DNA

SEQ ID NO: 101340 - DNA, 80 bp, synthetic construct
  misc_feature 1..80: note = Artificially Synthesized Probe
  source 1..80: mol_type = other DNA
tggaccaccttagggatagagatgccccttgtccctccccatcccagaaatgccaaacacatagttttaacatctctctt

SEQ ID NO: 101341 - DNA, 80 bp, synthetic construct
  misc_feature 1..80: note = Artificially Synthesized Probe
  source 1..80: mol_type = other DNA
ctaagcaatgaggagaaagtagatgtataggtatggatatttgaaaatgttcttgttgaattatctgactgagcacagag

SEQ ID NO: 101342 - DNA, 80 bp, synthetic construct
  misc_feature 1..80: note = Artificially Synthesized Probe
  source 1..80: mol_type = other DNA
gcctctgttcaccagatgccaatagcacttcagtcatcacaatcaaaattatcttcagatattgtcaaatgtcaccagga

SEQ ID NO: 101343 - DNA, 80 bp, synthetic construct; identical to SEQ ID NO: 35564
  misc_feature 1..80: note = Artificially Synthesized Probe
  source 1..80: mol_type = other DNA

SEQ ID NO: 101344 - DNA, 80 bp, synthetic construct
  misc_feature 1..80: note = Artificially Synthesized Probe
  source 1..80: mol_type = other DNA
aagtatttgtgtcagtgactaggagagacacagctctgtaattgattatacttcaataccagatggaaaatatttaaact

SEQ ID NO: 101345 - DNA, 80 bp, synthetic construct
  misc_feature 1..80: note = Artificially Synthesized Probe
  source 1..80: mol_type = other DNA
ctgcctcaacctcctgagtagctgggattacaggtgcccgccaccaggcctggctattttttatatttttagtagagaca

SEQ ID NO: 101346 - DNA, 80 bp, synthetic construct
  misc_feature 1..80: note = Artificially Synthesized Probe
  source 1..80: mol_type = other DNA
caaaaaattagccaagtgtggtggcgcgggcctgtagtcccagctatctaggaggctgaggtgggatcgccccagtactg

SEQ ID NO: 101347 - DNA, 80 bp, synthetic construct
  misc_feature 1..80: note = Artificially Synthesized Probe
  source 1..80: mol_type = other DNA
acatttgtggggcccagagcaagaatacaaatggagagccatacatcatatttaaaagttacatgtgtaactaacaaact

SEQ ID NO: 101348 - DNA, 80 bp, synthetic construct
  misc_feature 1..80: note = Artificially Synthesized Probe
  source 1..80: mol_type = other DNA
tgcttggcctcttcctatgctatgtgggtcctctggattgatttgtgggcaccccaggctgcatggctgagctctctcca

SEQ ID NO: 101349 - DNA, 80 bp, synthetic construct; identical to SEQ ID NO: 35565
  misc_feature 1..80: note = Artificially Synthesized Probe
  source 1..80: mol_type = other DNA

SEQ ID NO: 101350 - DNA, 80 bp, synthetic construct
  misc_feature 1..80: note = Artificially Synthesized Probe
  source 1..80: mol_type = other DNA
aaatcctcagtgagttaaaaaacggtggttcctctaaaaaaaaaaattaaggtaaaaaacagaacataaaaattatcatc

SEQ ID NO: 101351 - DNA, 80 bp, synthetic construct
  misc_feature 1..80: note = Artificially Synthesized Probe
  source 1..80: mol_type = other DNA
ttggaaggccgaagttggaggattgcttgagcccaggagttgagacctatctggttatcatagtgagaacctgtctctac

SEQ ID NO: 101352 - DNA, 80 bp, synthetic construct; identical to SEQ ID NO: 35566
  misc_feature 1..80: note = Artificially Synthesized Probe
  source 1..80: mol_type = other DNA

SEQ ID NO: 101353 - DNA, 80 bp, synthetic construct
  misc_feature 1..80: note = Artificially Synthesized Probe
  source 1..80: mol_type = other DNA
cttttaaaggatgaatgatcttcccttgtatgtgtataccacattttatttacccattcatccatctatgcacatttggg

SEQ ID NO: 101354 - DNA, 80 bp, synthetic construct
  misc_feature 1..80: note = Artificially Synthesized Probe
  source 1..80: mol_type = other DNA
ttttccatagtggttgcaccttttacaatcccactaacagtgtacaagggttccaatttttatttttctacatcctcacc

SEQ ID NO: 101355 - DNA, 80 bp, synthetic construct
  misc_feature 1..80: note = Artificially Synthesized Probe
  source 1..80: mol_type = other DNA
tagctgggactacaggcatgcaccaccatgccagattaatttttatattttatgaagagatggggttttaccatgttgcc

SEQ ID NO: 101356 - DNA, 80 bp, synthetic construct; identical to SEQ ID NO: 35567
  misc_feature 1..80: note = Artificially Synthesized Probe
  source 1..80: mol_type = other DNA

SEQ ID NO: 101357 - DNA, 80 bp, synthetic construct
  misc_feature 1..80: note = Artificially Synthesized Probe
  source 1..80: mol_type = other DNA
acttgaaatataagttgcctctgatgacacgtggtgtataaaatggattccatcagttgactgatgtgacttcctttaaa

SEQ ID NO: 101358 - DNA, 80 bp, synthetic construct
  misc_feature 1..80: note = Artificially Synthesized Probe
  source 1..80: mol_type = other DNA
tagttgcaattttttttgcttttgttgcccatgttttagatgtcatgtctaataaatcatttccaactccaatatcataa

SEQ ID NO: 101359 - DNA, 80 bp, synthetic construct
  misc_feature 1..80: note = Artificially Synthesized Probe
  source 1..80: mol_type = other DNA
agagactgtcctttcccccattgagtggtcctggtacccttgtcaaagattatttttaaaaatagggttttagctaatag

SEQ ID NO: 101360 - DNA, 80 bp, synthetic construct
  misc_feature 1..80: note = Artificially Synthesized Probe
  source 1..80: mol_type = other DNA
gatttttcccccagggtctctaatttaggtcttcattggaaatagtctaagatacatcagactgtattaggaatgtacta

SEQ ID NO: 101361 - DNA, 80 bp, synthetic construct; identical to SEQ ID NO: 35568
  misc_feature 1..80: note = Artificially Synthesized Probe
  source 1..80: mol_type = other DNA

SEQ ID NO: 101362 - DNA, 80 bp, synthetic construct
  misc_feature 1..80: note = Artificially Synthesized Probe
  source 1..80: mol_type = other DNA
gaaaagtacttgcacagtggtttgtgctacaagcaatactagccactattttttttcatggatcaccatgtctacttgaa

SEQ ID NO: 101363 - DNA, 80 bp, synthetic construct
  misc_feature 1..80: note = Artificially Synthesized Probe
  source 1..80: mol_type = other DNA
ttcaccaccataagcttggcagattcccagtacttagaaaactttttgatgagactagtagtgatattaacacatgtgtg

SEQ ID NO: 101364 - DNA, 80 bp, synthetic construct
  misc_feature 1..80: note = Artificially Synthesized Probe
  source 1..80: mol_type = other DNA
acagtgaactaatagtttctaattggccaatatgtaatattgcaaaatcattcatgggtaaatgattcatccaaagcaca

SEQ ID NO: 101365 - DNA, 80 bp, synthetic construct; identical to SEQ ID NO: 35569
  misc_feature 1..80: note = Artificially Synthesized Probe
  source 1..80: mol_type = other DNA

SEQ ID NO: 101366 - DNA, 80 bp, synthetic construct
  misc_feature 1..80: note = Artificially Synthesized Probe
  source 1..80: mol_type = other DNA
ccctacatttggggaggaaaatgcttatttttcactaaaaatgttatatatgttaacaggcaataggtttattaatgtta

SEQ ID NO: 101367 - DNA, 80 bp, synthetic construct
  misc_feature 1..80: note = Artificially Synthesized Probe
  source 1..80: mol_type = other DNA
ttaagagcataacgggttctagagaccaaaaagtttgagaaatactgtgccagaaatactaaagaactgaaggcagttct

SEQ ID NO: 101368 - DNA, 80 bp, synthetic construct
  misc_feature 1..80: note = Artificially Synthesized Probe
  source 1..80: mol_type = other DNA
taaagattttttaaaacagttacataaatatattatgtcaaatgctgcatcattcatagtgataatttctctgctagtca

SEQ ID NO: 101369 - DNA, 80 bp, synthetic construct
  misc_feature 1..80: note = Artificially Synthesized Probe
  source 1..80: mol_type = other DNA
tggaatgatgggctggaccaataccgtctgacacctctggagctcaaacagaaatgtaaagaaatgaatgctggtatgta

SEQ ID NO: 101370 - DNA, 80 bp, synthetic construct
  misc_feature 1..80: note = Artificially Synthesized Probe
  source 1..80: mol_type = other DNA
aattctcctgcctcagcctcctgagtagcttggattacaggtgcccaccactacgcccagctaatttttgtatttttagt

SEQ ID NO: 101371 - DNA, 80 bp, synthetic construct; identical to SEQ ID NO: 35570
  misc_feature 1..80: note = Artificially Synthesized Probe
  source 1..80: mol_type = other DNA

SEQ ID NO: 101372 - DNA, 80 bp, synthetic construct
  misc_feature 1..80: note = Artificially Synthesized Probe
  source 1..80: mol_type = other DNA
aaggcacatgccaccatactctgctaatttttatatttttttgtagaaatgggtctcactatgttttccaggctggtctt

SEQ ID NO: 101373 - DNA, 80 bp, synthetic construct
  misc_feature 1..80: note = Artificially Synthesized Probe
  source 1..80: mol_type = other DNA
gttgtactatatattagaaccatatattagaacgctattcaacagtttaaaatattcactgatagagatagctgaagtgt

SEQ ID NO: 101374 - DNA, 80 bp, synthetic construct; identical to SEQ ID NO: 35571
  misc_feature 1..80: note = Artificially Synthesized Probe
  source 1..80: mol_type = other DNA

SEQ ID NO: 101375 - DNA, 80 bp, synthetic construct
  misc_feature 1..80: note = Artificially Synthesized Probe
  source 1..80: mol_type = other DNA
taagtggagtagttttggagatttctttaaagcgaaagcaaaatttttttatatctttagattgttgccccttgcacagg

SEQ ID NO: 101376 - DNA, 80 bp, synthetic construct
  misc_feature 1..80: note = Artificially Synthesized Probe
  source 1..80: mol_type = other DNA
tctgcatctcatccctgtctcagctatctggtgttggttagtgctggattaacacctctaaagacccaggtgtattctcc

SEQ ID NO: 101377 - DNA, 80 bp, synthetic construct
  misc_feature 1..80: note = Artificially Synthesized Probe
  source 1..80: mol_type = other DNA
caacatggtgaaaccctgagtctactaaaaatacaaaaattagccgggtgtggtggcacacgcctgtaatcccagctact

SEQ ID NO: 101378 - DNA, 80 bp, synthetic construct; identical to SEQ ID NO: 35572
  misc_feature 1..80: note = Artificially Synthesized Probe
  source 1..80: mol_type = other DNA

SEQ ID NO: 101379 - DNA, 80 bp, synthetic construct
  misc_feature 1..80: note = Artificially Synthesized Probe
  source 1..80: mol_type = other DNA
ggcggctggaccaaggatgacgatgtgcctctagactggcggatgaagcagcacgcggctgtgctcgaggaaggggtcct

SEQ ID NO: 101380 - DNA, 80 bp, synthetic construct; identical to SEQ ID NO: 35491
  misc_feature 1..80: note = Artificially Synthesized Probe
  source 1..80: mol_type = other DNA

SEQ ID NO: 101381 - DNA, 80 bp, synthetic construct
  misc_feature 1..80: note = Artificially Synthesized Probe
  source 1..80: mol_type = other DNA
tcatgagcagattctggaatgttctggtgtctcttctttatctagcttaattatgtttccacttagtatttgaaaagtgc

SEQ ID NO: 101382 - DNA, 80 bp, synthetic construct
  misc_feature 1..80: note = Artificially Synthesized Probe
  source 1..80: mol_type = other DNA
tgtaatcccagctactcgggaagctgaggcaggagaatcgcttgaacctgggaggtggaggttgcagtgagccgagatca

SEQ ID NO: 101383 - DNA, 80 bp, synthetic construct; identical to SEQ ID NO: 35573
  misc_feature 1..80: note = Artificially Synthesized Probe
  source 1..80: mol_type = other DNA

SEQ ID NO: 101384 - DNA, 80 bp, synthetic construct
  misc_feature 1..80: note = Artificially Synthesized Probe
  source 1..80: mol_type = other DNA
gagtttaatgaattaattctcttcaatcagataaaagttccaggcccctagctctcctttccatcctttgtattgctatc

SEQ ID NO: 101385 - DNA, 80 bp, synthetic construct
  misc_feature 1..80: note = Artificially Synthesized Probe
  source 1..80: mol_type = other DNA
ccacatagttctgtagaatagtaagatttgagtgttcttgtccggctagcctgtttggagaagagatgaggaaatacaac

SEQ ID NO: 101386 - DNA, 80 bp, synthetic construct
  misc_feature 1..80: note = Artificially Synthesized Probe
  source 1..80: mol_type = other DNA
cataaaccatgacctacagatttgacccacaatgaccagcatgtcccttatggacattttctaggtccagtggcactgca

SEQ ID NO: 101387 - DNA, 80 bp, synthetic construct; identical to SEQ ID NO: 35574
  misc_feature 1..80: note = Artificially Synthesized Probe
  source 1..80: mol_type = other DNA

SEQ ID NO: 101388 - DNA, 80 bp, synthetic construct
  misc_feature 1..80: note = Artificially Synthesized Probe
  source 1..80: mol_type = other DNA
tatagtagatggtccataaatatttctctttcaacatgcattcttgagcatgcacagagtgcctggcacactaagtgaaa

SEQ ID NO: 101389 - DNA, 80 bp, synthetic construct
  misc_feature 1..80: note = Artificially Synthesized Probe
  source 1..80: mol_type = other DNA
ccattatttcccttctcttctgcaagttcctgaagatttagaggactgcccacttttgaagatgcagcattttacagaaa

SEQ ID NO: 101390 - DNA, 80 bp, synthetic construct
  misc_feature 1..80: note = Artificially Synthesized Probe
  source 1..80: mol_type = other DNA
gaacatgggtctcaaaaaccataacctactccaggaatccttaaggcagatatcatttacctacactgagttctttgttg

SEQ ID NO: 101391 - DNA, 80 bp, synthetic construct
  misc_feature 1..80: note = Artificially Synthesized Probe
  source 1..80: mol_type = other DNA
acagattattacaggtccctggagaagaactaagcctttggctccagagtttctttctgaagtgctctttgattaccttt

SEQ ID NO: 101392 - DNA, 80 bp, synthetic construct
  misc_feature 1..80: note = Artificially Synthesized Probe
  source 1..80: mol_type = other DNA
tttccttaagctctctaaaatcctttcctttttcagttcctgtcaaaatcctcacgtatatatttgtttacctcactcac

SEQ ID NO: 101393 - DNA, 80 bp, synthetic construct; identical to SEQ ID NO: 35575
  misc_feature 1..80: note = Artificially Synthesized Probe
  source 1..80: mol_type = other DNA

SEQ ID NO: 101394 - DNA, 80 bp, synthetic construct
  misc_feature 1..80: note = Artificially Synthesized Probe
  source 1..80: mol_type = other DNA
ttttttttctcactctaaaagaggtgtggctcacatcaagattcttcctgatattttacctcatgctgtacaaagcctta

SEQ ID NO: 101395 - DNA, 80 bp, synthetic construct
  misc_feature 1..80: note = Artificially Synthesized Probe
  source 1..80: mol_type = other DNA
agttacacggtgacttttaatagcatacagtgatttgatgaaaggacgtcaaacaatgtggcgatgtcgtggaaagttat

SEQ ID NO: 101396 - DNA, 80 bp, synthetic construct
  misc_feature 1..80: note = Artificially Synthesized Probe
  source 1..80: mol_type = other DNA
acaggtgaacaaactgtgatgatgcacatgtatgtgttttgtaagctgtgagcaccgtaacaaaatgtaaatttgccatt

SEQ ID NO: 101397 - DNA, 80 bp, synthetic construct; identical to SEQ ID NO: 35576
  misc_feature 1..80: note = Artificially Synthesized Probe
  source 1..80: mol_type = other DNA

SEQ ID NO: 101398 - DNA, 80 bp, synthetic construct
  misc_feature 1..80: note = Artificially Synthesized Probe
  source 1..80: mol_type = other DNA
tttcatattctcattcttaaaaaacactaatcttaactaacaaaagttcttttgagaataagttacacacaatggccaca

SEQ ID NO: 101399 - DNA, 80 bp, synthetic construct
  misc_feature 1..80: note = Artificially Synthesized Probe
  source 1..80: mol_type = other DNA
ttctgctctagtaccatgcttagtgcaaatgattatttctatgtacaactgatgcttgttcttattttaataaatttatc

SEQ ID NO: 101400 - DNA, 80 bp, synthetic construct
  misc_feature 1..80: note = Artificially Synthesized Probe
  source 1..80: mol_type = other DNA
ccgcacctttatattatcaacgttctgcccagtaagtcttgcagtggccttgagctaaaagcaataaaattcccaattga

SEQ ID NO: 101401 - DNA, 80 bp, synthetic construct; identical to SEQ ID NO: 35492
  misc_feature 1..80: note = Artificially Synthesized Probe
  source 1..80: mol_type = other DNA

SEQ ID NO: 101402 - DNA, 80 bp, synthetic construct
  misc_feature 1..80: note = Artificially Synthesized Probe
  source 1..80: mol_type = other DNA
cctcccagttggtttattacattctgacttagctttagcattttgttgtggcattctggggacagaaaatacagaccaaa

SEQ ID NO: 101403 - DNA, 80 bp, synthetic construct
  misc_feature 1..80: note = Artificially Synthesized Probe
  source 1..80: mol_type = other DNA
agatagcatgcaatgcagaaaaagttgtatttggtaaaggctggaccaagttcagttatacgccaaagcctcagttcagt

SEQ ID NO: 101404 - DNA, 80 bp, synthetic construct; identical to SEQ ID NO: 35483
  misc_feature 1..80: note = Artificially Synthesized Probe
  source 1..80: mol_type = other DNA

SEQ ID NO: 101405 - DNA, 80 bp, synthetic construct
  misc_feature 1..80: note = Artificially Synthesized Probe
  source 1..80: mol_type = other DNA
ttttcctaaagtatatgagtaattatggctcttgggccattgggtcactagtacaacaatgttttgagtagttactaaaa

SEQ ID NO: 101406 - DNA, 80 bp, synthetic construct
  misc_feature 1..80: note = Artificially Synthesized Probe
  source 1..80: mol_type = other DNA
gccgaggctgccgccggagtcgccaccgccgcgccctcgcccacccgcccgcccgccgctcccggccccgctcgccccct

SEQ ID NO: 101407 - DNA, 80 bp, synthetic construct
  misc_feature 1..80: note = Artificially Synthesized Probe
  source 1..80: mol_type = other DNA
attgggcaagtttggatgcatctactcaaaccacccatgaactcaccattccaaataacttaattggctgcataatcggg

SEQ ID NO: 101408 - DNA, 80 bp, synthetic construct; identical to SEQ ID NO: 35578
  misc_feature 1..80: note = Artificially Synthesized Probe
  source 1..80: mol_type = other DNA

SEQ ID NO: 101409 - DNA, 80 bp, synthetic construct
  misc_feature 1..80: note = Artificially Synthesized Probe
  source 1..80: mol_type = other DNA
ttagttctgtaatgtcaagaatttaagaattaaaaaacggattggttaaaaaatgcttcatatttgaaaaagctgggaat

SEQ ID NO: 101410 - DNA, 80 bp, synthetic construct; identical to SEQ ID NO: 35577
  misc_feature 1..80: note = Artificially Synthesized Probe
  source 1..80: mol_type = other DNA

SEQ ID NO: 101411 - DNA, 80 bp, synthetic construct
  misc_feature 1..80: note = Artificially Synthesized Probe
  source 1..80: mol_type = other DNA
tgaggctggtggtgccggccacccagtgcggctccctgattgggaaaggcgggtgtaagatcaaagagatccgcgagagt

SEQ ID NO: 101412 - DNA, 80 bp, synthetic construct
  misc_feature 1..80: note = Artificially Synthesized Probe
  source 1..80: mol_type = other DNA
agagtcatgaccattccgtaccagcccatgccggccagctccccagtcatctgcgcgggcggccaagatcggtgcagcga

SEQ ID NO: 101413 - DNA, 80 bp, synthetic construct
  misc_feature 1..80: note = Artificially Synthesized Probe
  source 1..80: mol_type = other DNA
cgccggtaggggacgcgccggcacagcaaaaatggcggcggcattacgggtggcggcggtcggggcaaggctcagcgttc

SEQ ID NO: 101414 - DNA, 80 bp, synthetic construct; identical to SEQ ID NO: 35589
  misc_feature 1..80: note = Artificially Synthesized Probe
  source 1..80: mol_type = other DNA

SEQ ID NO: 101415 - DNA, 80 bp, synthetic construct
  misc_feature 1..80: note = Artificially Synthesized Probe
  source 1..80: mol_type = other DNA
cttccatgggctggcaaagcctgaaccctcctgtttttacatgcctaaaataaaatttgtaggattttaaaggattaaaa

SEQ ID NO: 101416 - DNA, 80 bp, synthetic construct
  misc_feature 1..80: note = Artificially Synthesized Probe
  source 1..80: mol_type = other DNA
agggtatctgcaacaactttaataggacgtaaaaatatctgtggcttctaataatggcaaatcacagatatttctaatac

SEQ ID NO: 101417 - DNA, 80 bp, synthetic construct
  misc_feature 1..80: note = Artificially Synthesized Probe
  source 1..80: mol_type = other DNA
tggaagggccaggtgctagaaggtaaagaacagtgcgagcattgtatgctgatatttaaaaactactgctagagattaga

SEQ ID NO: 101418 - DNA, 80 bp, synthetic construct
  misc_feature 1..80: note = Artificially Synthesized Probe
  source 1..80: mol_type = other DNA
tttactccctctgttatgatgggtaaatgaggtaatggaagtgaaagtactttttaaactgtcaaggactgtaggaatat

SEQ ID NO: 101419 - DNA, 80 bp, synthetic construct; identical to SEQ ID NO: 35590
  misc_feature 1..80: note = Artificially Synthesized Probe
  source 1..80: mol_type = other DNA

SEQ ID NO: 101420 - DNA, 80 bp, synthetic construct
  misc_feature 1..80: note = Artificially Synthesized Probe
  source 1..80: mol_type = other DNA
gtgttactgcctcctgttttgaaaagtgcactcagaacgttttccagaaaacactgtggtattttgtgaatgtcgttttt

SEQ ID NO: 101421 - DNA, 80 bp, synthetic construct
  misc_feature 1..80: note = Artificially Synthesized Probe
  source 1..80: mol_type = other DNA
aaggagtggagtctttggctggctatgcagacatctttctggtgagaaacctgttaatagagaataaaaaaatacagggc

SEQ ID NO: 101422 - DNA, 80 bp, synthetic construct; identical to SEQ ID NO: 35591
  misc_feature 1..80: note = Artificially Synthesized Probe
  source 1..80: mol_type = other DNA

SEQ ID NO: 101423 - DNA, 80 bp, synthetic construct
  misc_feature 1..80: note = Artificially Synthesized Probe
  source 1..80: mol_type = other DNA
ggtccaaaggtaacagttccttttgacacttgagagtgaaatgtaaatttagtgatggtttgtggtgctaggagtgcttt

SEQ ID NO: 101424 - DNA, 80 bp, synthetic construct
  misc_feature 1..80: note = Artificially Synthesized Probe
  source 1..80: mol_type = other DNA
ataaagtccaagccacagtgcaaagaagaatgaaatcaccccagatcctaccattcagaaacatttggcgaacctcatta

SEQ ID NO: 101425 - DNA, 80 bp, synthetic construct
  misc_feature 1..80: note = Artificially Synthesized Probe
  source 1..80: mol_type = other DNA
agtataaagtatatttgtgagagatacagtaagaggctgggatgagggagagagatactgcagacagaaactggcaacat

SEQ ID NO: 101426 - DNA, 80 bp, synthetic construct
  misc_feature 1..80: note = Artificially Synthesized Probe
  source 1..80: mol_type = other DNA
gagacgtggtgataaaccaccacattttagagcttgactggattttagaatatcatctagttgaatacatctttatgggt

SEQ ID NO: 101427 - DNA, 80 bp, synthetic construct
  misc_feature 1..80: note = Artificially Synthesized Probe
  source 1..80: mol_type = other DNA
ccaccacgcccagctaatttttgtatttttagtagagacggggtttcaccatattagccaggttggtctcgaactcctga

SEQ ID NO: 101428 - DNA, 80 bp, synthetic construct; identical to SEQ ID NO: 35592
  misc_feature 1..80: note = Artificially Synthesized Probe
  source 1..80: mol_type = other DNA

SEQ ID NO: 101429 - DNA, 80 bp, synthetic construct
  misc_feature 1..80: note = Artificially Synthesized Probe
  source 1..80: mol_type = other DNA
ttcaagggctagtctttactttcagatcttcattgcttaattaattgcttactaatgctgcttgtcatattgatacctcc

SEQ ID NO: 101430 - DNA, 80 bp, synthetic construct
  misc_feature 1..80: note = Artificially Synthesized Probe
  source 1..80: mol_type = other DNA
aacatggtgaaatcctgtctctattaaaaatacaaaaattagctgggcatggtggcacatgcctgtaatcccaactactc

SEQ ID NO: 101431 - DNA, 80 bp, synthetic construct
  misc_feature 1..80: note = Artificially Synthesized Probe
  source 1..80: mol_type = other DNA
aactcctatatgtccttttcccagattcaccagttgtttacattttctccatttgttctgttattctctctccatatata

SEQ ID NO: 101432 - DNA, 80 bp, synthetic construct; identical to SEQ ID NO: 35593
  misc_feature 1..80: note = Artificially Synthesized Probe
  source 1..80: mol_type = other DNA

SEQ ID NO: 101433 - DNA, 80 bp, synthetic construct
  misc_feature 1..80: note = Artificially Synthesized Probe
  source 1..80: mol_type = other DNA
cctcctggccaggatccaatccagaataaagcattgactttagatgttatctctttttaatcttttttgatctggagcag

SEQ ID NO: 101434 - DNA, 80 bp, synthetic construct
  misc_feature 1..80: note = Artificially Synthesized Probe
  source 1..80: mol_type = other DNA
agatcaagaccgtcctggctaacacggtgaaaccccatctctactaaaaaaaaacaaaaaattagccaggtgtggtggcg

SEQ ID NO: 101435 - DNA, 80 bp, synthetic construct; identical to SEQ ID NO: 35580
  misc_feature 1..80: note = Artificially Synthesized Probe
  source 1..80: mol_type = other DNA

SEQ ID NO: 101436 - DNA, 80 bp, synthetic construct; identical to SEQ ID NO: 35594
  misc_feature 1..80: note = Artificially Synthesized Probe
  source 1..80: mol_type = other DNA

SEQ ID NO: 101437 - DNA, 80 bp, synthetic construct
  misc_feature 1..80: note = Artificially Synthesized Probe
  source 1..80: mol_type = other DNA
attgctcgaacctgagaggtggaggttgcagtgaactgagatcatgccactgcactccagcctgggtgacagagcgagac

SEQ ID NO: 101438 - DNA, 80 bp, synthetic construct
  misc_feature 1..80: note = Artificially Synthesized Probe
  source 1..80: mol_type = other DNA
tgcctgtttgcagtcagttcccacctaaccacagtcaattcctcacccaactttcttattttacaaatttttccatctga

SEQ ID NO: 101439 - DNA, 80 bp, synthetic construct
  misc_feature 1..80: note = Artificially Synthesized Probe
  source 1..80: mol_type = other DNA
gttgaaggatatttggattgtttctggttcctggctatcatgagtaaatgctactgtgaacatttgtgtattactttgtg

SEQ ID NO: 101440 - DNA, 80 bp, synthetic construct; identical to SEQ ID NO: 35595
  misc_feature 1..80: note = Artificially Synthesized Probe
  source 1..80: mol_type = other DNA

SEQ ID NO: 101441 - DNA, 80 bp, synthetic construct
  misc_feature 1..80: note = Artificially Synthesized Probe
  source 1..80: mol_type = other DNA
ccggctaattttttgtatttttagtagagactgggtttcaccatgttagctaggatggtctcgatctcctgacctcgtga

SEQ ID NO: 101442 - DNA, 80 bp, synthetic construct
  misc_feature 1..80: note = Artificially Synthesized Probe
  source 1..80: mol_type = other DNA
ttcaagtgattgccctgcctctgcctcccgagcagctgggattacaggcatgtgccaccatggctggctaattttggtat

SEQ ID NO: 101443 - DNA, 80 bp, synthetic construct
  misc_feature 1..80: note = Artificially Synthesized Probe
  source 1..80: mol_type = other DNA
aggctggagtacagtggcatgatcacagctcactgcagcctcgacctcctggggtcaagcgatcctcctgcctcaacctc

SEQ ID NO: 101444 - DNA, 80 bp, synthetic construct
  misc_feature 1..80: note = Artificially Synthesized Probe
  source 1..80: mol_type = other DNA
taaaccttctttgctgaaatgtctattcagatcttttgtccatctcgtaattgggtttttgagttgtaagagttcttcat

SEQ ID NO: 101445 - DNA, 80 bp, synthetic construct
  misc_feature 1..80: note = Artificially Synthesized Probe
  source 1..80: mol_type = other DNA
ctcctgcctcagcctcccaagtagctgggattacaggtgcccacgaccatgcctggcaactttttttttgtatttttagc

SEQ ID NO: 101446 - DNA, 80 bp, synthetic construct; identical to SEQ ID NO: 35596
  misc_feature 1..80: note = Artificially Synthesized Probe
  source 1..80: mol_type = other DNA

SEQ ID NO: 101447 - DNA, 80 bp, synthetic construct
  misc_feature 1..80: note = Artificially Synthesized Probe
  source 1..80: mol_type = other DNA
tatttttattttattttttagagacagggtcttgctctgttgcctgggctagagtgcgttagtgcaatcacagctcactg

SEQ ID NO: 101448 - DNA, 80 bp, synthetic construct
  misc_feature 1..80: note = Artificially Synthesized Probe
  source 1..80: mol_type = other DNA
tctcaagcgatctgcctcggcatcccgaagtgcagggattacaagccactgccccaagcctgtggtggctttttttttga

SEQ ID NO: 101449 - DNA, 80 bp, synthetic construct
  misc_feature 1..80: note = Artificially Synthesized Probe
  source 1..80: mol_type = other DNA
caggcacatgctaccacatctggcaattttttttcattatttgtagaggtgagggtcccactatgttgcccaggctgttc

SEQ ID NO: 101450 - DNA, 80 bp, synthetic construct; identical to SEQ ID NO: 35597
  misc_feature 1..80: note = Artificially Synthesized Probe
  source 1..80: mol_type = other DNA

SEQ ID NO: 101451 - DNA, 80 bp, synthetic construct
  misc_feature 1..80: note = Artificially Synthesized Probe
  source 1..80: mol_type = other DNA
tatatatatatatatatgtatatatatatatatatatctacatacacaagtacatataagagagcccagccagctttctt

SEQ ID NO: 101452 - DNA, 80 bp, synthetic construct
  misc_feature 1..80: note = Artificially Synthesized Probe
  source 1..80: mol_type = other DNA
ggtttgtttctgaactctcagttcttccattgttctatgtctgtccttaaaatagaaccacactgtcttgattactgtag

SEQ ID NO: 101453 - DNA, 80 bp, synthetic construct
  misc_feature 1..80: note = Artificially Synthesized Probe
  source 1..80: mol_type = other DNA
tcccgagtagctgggattacagtcacgtgccagcacacctagctaatttttgtatttttagtggagatagggtttcacca

SEQ ID NO: 101454 - DNA, 80 bp, synthetic construct
  misc_feature 1..80: note = Artificially Synthesized Probe
  source 1..80: mol_type = other DNA
caccccttttaaaacaatttttgaccatttccgtagattttcccagaagaggaattagtgggtcaaagggtgtaagttta

SEQ ID NO: 101455 - DNA, 80 bp, synthetic construct; identical to SEQ ID NO: 35598
  misc_feature 1..80: note = Artificially Synthesized Probe
  source 1..80: mol_type = other DNA

SEQ ID NO: 101456 - DNA, 80 bp, synthetic construct
  misc_feature 1..80: note = Artificially Synthesized Probe
  source 1..80: mol_type = other DNA
gaggtcacaagttcgagactagcctggctaacatagtgaaaccctgtctctactaaaaatacaaaaattagccaggtgtt

SEQ ID NO: 101457 - DNA, 80 bp, synthetic construct
  misc_feature 1..80: note = Artificially Synthesized Probe
  source 1..80: mol_type = other DNA
aaacaaaatattttactctttgtgatgctatttagaatggaattatcttgttaatttcctatttggattctttgcaaatg

SEQ ID NO: 101458 - DNA, 80 bp, synthetic construct
  misc_feature 1..80: note = Artificially Synthesized Probe
  source 1..80: mol_type = other DNA
tttctaatctggatgccttttatttctttttcttgctaattgctctgcttagaacctgtagtacagtgttaagtagaagt

SEQ ID NO: 101459 - DNA, 80 bp, synthetic construct
  misc_feature 1..80: note = Artificially Synthesized Probe
  source 1..80: mol_type = other DNA
gtgtggtggcgggtgcctgtagtcccagctactcgggaggctgaggcaggagaatgccgtgaacccgggaggcggagcct

SEQ ID NO: 101460 - DNA, 80 bp, synthetic construct; identical to SEQ ID NO: 35599
  misc_feature 1..80: note = Artificially Synthesized Probe
  source 1..80: mol_type = other DNA

SEQ ID NO: 101461 - DNA, 80 bp, synthetic construct
  misc_feature 1..80: note = Artificially Synthesized Probe
  source 1..80: mol_type = other DNA
catggtatatcatccttttttggaaggtgctgggctctgccagtatttccttgagtacttttgaatcaatattagtaaga

SEQ ID NO: 101462 - DNA, 80 bp, synthetic construct
  misc_feature 1..80: note = Artificially Synthesized Probe
  source 1..80: mol_type = other DNA
atgaacttttctgatttcagtaagacagaacactcacacaagttacatgaagtgcccggccacatctgttgttttttgac

SEQ ID NO: 101463 - DNA, 80 bp, synthetic construct; identical to SEQ ID NO: 35600
  misc_feature 1..80: note = Artificially Synthesized Probe
  source 1..80: mol_type = other DNA

SEQ ID NO: 101464 - DNA, 80 bp, synthetic construct
  misc_feature 1..80: note = Artificially Synthesized Probe
  source 1..80: mol_type = other DNA
atggccgtttttgtaggagtaaggtggtatctcattgtggttttcatttgcattttcctgatagtgatgtgagcattttg

SEQ ID NO: 101465 - DNA, 80 bp, synthetic construct
  misc_feature 1..80: note = Artificially Synthesized Probe
  source 1..80: mol_type = other DNA
ctggtcctttgtcaggtgcatagtttgcaaatattttctccagctctgtgagttggctctttgctgattacttcttttgc

SEQ ID NO: 101466 - DNA, 80 bp, synthetic construct
  misc_feature 1..80: note = Artificially Synthesized Probe
  source 1..80: mol_type = other DNA
ttagtagagatggagtttcaccatgttggccaggctggtcttgaactcctgacctcaggtgatccacccgcgtctgcctc

SEQ ID NO: 101467 - DNA, 80 bp, synthetic construct
  misc_feature 1..80: note = Artificially Synthesized Probe
  source 1..80: mol_type = other DNA
tggaagtctggtaatgtgatgccttcagatttgttctttttgcttagtattgctttggctatctggactcttttttggtt

SEQ ID NO: 101468 - DNA, 80 bp, synthetic construct; identical to SEQ ID NO: 35601
  misc_feature 1..80: note = Artificially Synthesized Probe
  source 1..80: mol_type = other DNA

SEQ ID NO: 101469 - DNA, 80 bp, synthetic construct
  misc_feature 1..80: note = Artificially Synthesized Probe
  source 1..80: mol_type = other DNA
taggagtcttttggatgagtcgctagagttttccaagtatatatgatcatatcactgataaacagtacttgtttgacttc

SEQ ID NO: 101470 - DNA, 80 bp, synthetic construct
  misc_feature 1..80: note = Artificially Synthesized Probe
  source 1..80: mol_type = other DNA
ttggctgtgggtttatcatatattgcttttactattttgaagtatatccctcctatgcctagtttgagagttttttgtca

SEQ ID NO: 101471 - DNA, 80 bp, synthetic construct
  misc_feature 1..80: note = Artificially Synthesized Probe
  source 1..80: mol_type = other DNA
gtattatctttttgatgtgctgtgggatttggttagctagtattttgttgaggatttttgcatccatgtttatcagagac

SEQ ID NO: 101472 - DNA, 80 bp, synthetic construct; identical to SEQ ID NO: 35602
  misc_feature 1..80: note = Artificially Synthesized Probe
  source 1..80: mol_type = other DNA

SEQ ID NO: 101473 - DNA, 80 bp, synthetic construct
  misc_feature 1..80: note = Artificially Synthesized Probe
  source 1..80: mol_type = other DNA
catttttcattgagcttatttggatctattctcttcttggttagtctaatggtcgaccaattttgtttattttttcaagg

SEQ ID NO: 101474 - DNA, 80 bp, synthetic construct
  misc_feature 1..80: note = Artificially Synthesized Probe
  source 1..80: mol_type = other DNA
tatgtacttaaaactatgaactttcctcttagcactacttttgctgtatccccagaggtttttataactgtgtcactact

SEQ ID NO: 101475 - DNA, 80 bp, synthetic construct
  misc_feature 1..80: note = Artificially Synthesized Probe
  source 1..80: mol_type = other DNA
tatgatttcaattttcttaaatttgttgagacttgttttgtggcctgtcatacagtctatcttggagaatgttccatgtg

SEQ ID NO: 101476 - DNA, 80 bp, synthetic construct; identical to SEQ ID NO: 35603
  misc_feature 1..80: note = Artificially Synthesized Probe
  source 1..80: mol_type = other DNA

SEQ ID NO: 101477 - DNA, 80 bp, synthetic construct; identical to SEQ ID NO: 35582
  misc_feature 1..80: note = Artificially Synthesized Probe
  source 1..80: mol_type = other DNA

SEQ ID NO: 101478 - DNA, 80 bp, synthetic construct
  misc_feature 1..80: note = Artificially Synthesized Probe
  source 1..80: mol_type = other DNA
tactttgcgaggccaagacgggcggatcgcgaggtcaggagatcgagaccatcctggctaacacggtgaaaccctgtctc

SEQ ID NO: 101479 - DNA, 80 bp, synthetic construct
  misc_feature 1..80: note = Artificially Synthesized Probe
  source 1..80: mol_type = other DNA
ctgtctcaaaaaaaaaaaaaaaaaaaaaaaaagaatagctcattctgcttgcttttggttcccatttgcatgggatatct

SEQ ID NO: 101480 - DNA, 80 bp, synthetic construct
  misc_feature 1..80: note = Artificially Synthesized Probe
  source 1..80: mol_type = other DNA
tgtgagatactgatctgtttatcattttagttgttacttactttgtttttttttcattgtgttattgttttataggcctt

SEQ ID NO: 101481 - DNA, 80 bp, synthetic construct
  misc_feature 1..80: note = Artificially Synthesized Probe
  source 1..80: mol_type = other DNA
cccgcccctggcgtccgcgacctatcactgcgtgcccggcttgcggcgtccgaggcctccctgccaatccgcacggtgcc

SEQ ID NO: 101482 - DNA, 80 bp, synthetic construct
  misc_feature 1..80: note = Artificially Synthesized Probe
  source 1..80: mol_type = other DNA
agttttgctggatgcaaaattcttgggtggcagttattctgtttaaggaggctaaagatagaaccccaatcccttctagc

SEQ ID NO: 101483 - DNA, 80 bp, synthetic construct; identical to SEQ ID NO: 35604
  misc_feature 1..80: note = Artificially Synthesized Probe
  source 1..80: mol_type = other DNA

SEQ ID NO: 101484 - DNA, 80 bp, synthetic construct
  misc_feature 1..80: note = Artificially Synthesized Probe
  source 1..80: mol_type = other DNA
tgcccaggctgtagtacagtgttgtgacctttgtctcctgggctcaggcaatcctcacacctctgcctcctgagtatctg

SEQ ID NO: 101485 - DNA, 80 bp, synthetic construct
  misc_feature 1..80: note = Artificially Synthesized Probe
  source 1..80: mol_type = other DNA
cccagcctatttatttcttttgattcttttttctttatttttgtctgattgggttaatttgaaagccttgtcttggagct

SEQ ID NO: 101486 - DNA, 80 bp, synthetic construct
  misc_feature 1..80: note = Artificially Synthesized Probe
  source 1..80: mol_type = other DNA
tttttttttatgttggttttcacctttctatggtgtctccttgagtagcttaataatcaacctactgaattatttatctg

SEQ ID NO: 101487 - DNA, 80 bp, synthetic construct; identical to SEQ ID NO: 35605
  misc_feature 1..80: note = Artificially Synthesized Probe
  source 1..80: mol_type = other DNA

SEQ ID NO: 101488 - DNA, 80 bp, synthetic construct
  misc_feature 1..80: note = Artificially Synthesized Probe
  source 1..80: mol_type = other DNA
cagtggcacaatcttggctcactgcaacctccacttcccgggttcaagtgattctcctgcctcagcttcccgagtagctg

SEQ ID NO: 101489 - DNA, 80 bp, synthetic construct; identical to SEQ ID NO: 35581
  misc_feature 1..80: note = Artificially Synthesized Probe
  source 1..80: mol_type = other DNA

SEQ ID NO: 101490 - DNA, 80 bp, synthetic construct
  misc_feature 1..80: note = Artificially Synthesized Probe
  source 1..80: mol_type = other DNA
ctggcctgtatttaatagatatgtacttgatgtgtgggcaagttcactgtctcctatggggttgagatggaaaggtctct

SEQ ID NO: 101491 - DNA, 80 bp, synthetic construct; identical to SEQ ID NO: 35606
  misc_feature 1..80: note = Artificially Synthesized Probe
  source 1..80: mol_type = other DNA

SEQ ID NO: 101492 - DNA, 80 bp, synthetic construct
  misc_feature 1..80: note = Artificially Synthesized Probe
  source 1..80: mol_type = other DNA
tctgcctctcttgcaagcctgaacttgggccagggcgggggtgggggttgggggattcctcctgtggagatgcagtcact

SEQ ID NO: 101493 - DNA, 80 bp, synthetic construct
  misc_feature 1..80: note = Artificially Synthesized Probe
  source 1..80: mol_type = other DNA
gcagactttcccttctgagcccagcactgcaattgtgtctctgctgaaaggaacttcccatcagtggaaagatctggaac

SEQ ID NO: 101494 - DNA, 80 bp, synthetic construct
  misc_feature 1..80: note = Artificially Synthesized Probe
  source 1..80: mol_type = other DNA
gctggggaatgtctgcaagggatccggtaatgggacctgtcctcaagtctcccagcaagggatataccaacactagtgct

SEQ ID NO: 101495 - DNA, 80 bp, synthetic construct; identical to SEQ ID NO: 35607
  misc_feature 1..80: note = Artificially Synthesized Probe
  source 1..80: mol_type = other DNA

SEQ ID NO: 101496 - DNA, 80 bp, synthetic construct
  misc_feature 1..80: note = Artificially Synthesized Probe
  source 1..80: mol_type = other DNA
taaccagggtgggtggaggggtacagccaggtgggggctgggtcaggtgggtctacactctgtctctccatgtgtgggga

SEQ ID NO: 101497 - DNA, 80 bp, synthetic construct
  misc_feature 1..80: note = Artificially Synthesized Probe
  source 1..80: mol_type = other DNA
ggcagatctcactccctctgtgctctgctagctgcactgggctaagttccaggcagcctaggctcagaactcaaacctgc

SEQ ID NO: 101498 - DNA, 80 bp, synthetic construct
  misc_feature 1..80: note = Artificially Synthesized Probe
  source 1..80: mol_type = other DNA
tgcccctgggaggtatgggttctggacaaaggagttcatcctcactcagtgttatatcttgaaatggggagattctttca

SEQ ID NO: 101499 - DNA, 80 bp, synthetic construct
  misc_feature 1..80: note = Artificially Synthesized Probe
  source 1..80: mol_type = other DNA
ccactgtttctacttttatatttcttactgctccctaaatcagtcccagccctgggtaaggttaaggccttcccccatgg

SEQ ID NO: 101500 - DNA, 80 bp, synthetic construct
  misc_feature 1..80: note = Artificially Synthesized Probe
  source 1..80: mol_type = other DNA
agtggcgcggtcttggctcactgcaagctccgcctcccgggttcatgccgttctcctgcctcagcctcctgagtagctgg

SEQ ID NO: 101501 - DNA, 80 bp, synthetic construct; identical to SEQ ID NO: 35608
  misc_feature 1..80: note = Artificially Synthesized Probe
  source 1..80: mol_type = other DNA

SEQ ID NO: 101502 - DNA, 80 bp, synthetic construct
  misc_feature 1..80: note = Artificially Synthesized Probe
  source 1..80: mol_type = other DNA
aattatagttttattccattgtgatcagaaaagatgttttttatgattccaatcattttaaatttaagatttgttttgtg

SEQ ID NO: 101503 - DNA, 80 bp, synthetic construct
  misc_feature 1..80: note = Artificially Synthesized Probe
  source 1..80: mol_type = other DNA
tgtctgttattagaagtgaggtgttaagtctgcaactattattgtgcacctatttctccccacaattctgttaacttttg

SEQ ID NO: 101504 - DNA, 80 bp, synthetic construct
  misc_feature 1..80: note = Artificially Synthesized Probe
  source 1..80: mol_type = other DNA
ccacctagggtctattttggttaccctttgcatggaatatttttttccatcctttagtttacctcttcatgtctttgtat

SEQ ID NO: 101505 - DNA, 80 bp, synthetic construct; identical to SEQ ID NO: 35609
  misc_feature 1..80: note = Artificially Synthesized Probe
  source 1..80: mol_type = other DNA

SEQ ID NO: 101506 - DNA, 80 bp, synthetic construct
  misc_feature 1..80: note = Artificially Synthesized Probe
  source 1..80: mol_type = other DNA
gaagaataccaggttagctttagtagtacatagacatactgcttctgtaactctccatccttccttttttatgttgttat

SEQ ID NO: 101507 - DNA, 80 bp, synthetic construct
  misc_feature 1..80: note = Artificially Synthesized Probe
  source 1..80: mol_type = other DNA
gcaagctccgcctcccaggttcacgccattctcctgcctcagcctcccgtgtagctgggactacaggcgcgcaccaccat

SEQ ID NO: 101508 - DNA, 80 bp, synthetic construct; identical to SEQ ID NO: 35610
  misc_feature 1..80: note = Artificially Synthesized Probe
  source 1..80: mol_type = other DNA

SEQ ID NO: 101509 - DNA, 80 bp, synthetic construct
  misc_feature 1..80: note = Artificially Synthesized Probe
  source 1..80: mol_type = other DNA
tctattgcaaatgaatgctctcagcttttgttgacttggaaatgtcttaattttcccttctttcttgaaggatagttttg

SEQ ID NO: 101510 - DNA, 80 bp, synthetic construct
  misc_feature 1..80: note = Artificially Synthesized Probe
  source 1..80: mol_type = other DNA
cctcctgagtagctggggccataggcatgcaccaccatgcctagctaatttttgtatattttgtaaaggcagggtttcac

SEQ ID NO: 101511 - DNA, 80 bp, synthetic construct
  misc_feature 1..80: note = Artificially Synthesized Probe
  source 1..80: mol_type = other DNA
gaatagagtgcagtggcatgatcatggctcattgcagcattgaccttataggatcaagcagtcttcctaccttggccttc

SEQ ID NO: 101512 - DNA, 80 bp, synthetic construct
  misc_feature 1..80: note = Artificially Synthesized Probe
  source 1..80: mol_type = other DNA
ggcctctttttttttcttaagacagggtctcaccttgttgctcaggctggagtgcggtggagtgatcgtggctcactaca

SEQ ID NO: 101513 - DNA, 80 bp, synthetic construct; identical to SEQ ID NO: 35611
  misc_feature 1..80: note = Artificially Synthesized Probe
  source 1..80: mol_type = other DNA

SEQ ID NO: 101514 - DNA, 80 bp, synthetic construct
  misc_feature 1..80: note = Artificially Synthesized Probe
  source 1..80: mol_type = other DNA
cttgggtatgtatacttatgtctttcatcaaatgtgggaagttttcagtcattatttcttcaaatctttgaccctttctt

SEQ ID NO: 101515 - DNA, 80 bp, synthetic construct
  misc_feature 1..80: note = Artificially Synthesized Probe
  source 1..80: mol_type = other DNA
ttgtattccagtttcctgatccttttttctgcttgcttaagtctgctgttgaacccctgaaatgaatttttcatttcagt

SEQ ID NO: 101516 - DNA, 80 bp, synthetic construct
  misc_feature 1..80: note = Artificially Synthesized Probe
  source 1..80: mol_type = other DNA
tctttagctcattgaacatatttaagacagttcatgtgccatctttgactattaagtccaatatctgggtttcttcagag

SEQ ID NO: 101517 - DNA, 80 bp, synthetic construct
  misc_feature 1..80: note = Artificially Synthesized Probe
  source 1..80: mol_type = other DNA
gtcaactgctgggtccatctgtttgaacttttgcaagctgtttttgcaaagagtatgttccttttttaatatggacattg

SEQ ID NO: 101518 - DNA, 80 bp, synthetic construct; identical to SEQ ID NO: 35612
  misc_feature 1..80: note = Artificially Synthesized Probe
  source 1..80: mol_type = other DNA

SEQ ID NO: 101519 - DNA, 80 bp, synthetic construct
  misc_feature 1..80: note = Artificially Synthesized Probe
  source 1..80: mol_type = other DNA
ttctcctctgggccctgaagtgtttgagtagactccagagttcaaaaatagttgctttagacagctgaatagttgttttg

SEQ ID NO: 101520 - DNA, 80 bp, synthetic construct
  misc_feature 1..80: note = Artificially Synthesized Probe
  source 1..80: mol_type = other DNA
tcttaatttatcacagtctgcttcaaattaatactgacttaattctggtaagacaggaactttgctccaatgtagctcca

SEQ ID NO: 101521 - DNA, 80 bp, synthetic construct
  misc_feature 1..80: note = Artificially Synthesized Probe
  source 1..80: mol_type = other DNA
ttcttgtggatttgaattatagtctggtgttattttctttcatccagtaggacattttgagctggtatgggcaatggtgg

SEQ ID NO: 101522 - DNA, 80 bp, synthetic construct; identical to SEQ ID NO: 35613
  misc_feature 1..80: note = Artificially Synthesized Probe
  source 1..80: mol_type = other DNA

SEQ ID NO: 101523 - DNA, 80 bp, synthetic construct
  misc_feature 1..80: note = Artificially Synthesized Probe
  source 1..80: mol_type = other DNA
tcctcccatctcggcctcccaaagtgctgggatgacagaatttttttttttttttttttttcttgagacagggtcttact

SEQ ID NO: 101524 - DNA, 80 bp, synthetic construct
  misc_feature 1..80: note = Artificially Synthesized Probe
  source 1..80: mol_type = other DNA
ccccacatcctatctttcctgaggcttagtccttcacaacacagtgtccttatggaggctttctggctccttctaccgcc

SEQ ID NO: 101525 - DNA, 80 bp, synthetic construct
  misc_feature 1..80: note = Artificially Synthesized Probe
  source 1..80: mol_type = other DNA
gcatgaggttttcagtcttctttcaggcagctttgcacagatggggggctttgcatttggagctgtggtgaggatggtgg

SEQ ID NO: 101526 - DNA, 80 bp, synthetic construct
  misc_feature 1..80: note = Artificially Synthesized Probe
  source 1..80: mol_type = other DNA
ggtctgttgcctcctgtatagaatttctgtgggaaaaaagccaaatgttatcttattgttgtctttatctttccacagat

SEQ ID NO: 101527 - DNA, 80 bp, synthetic construct; identical to SEQ ID NO: 35614
  misc_feature 1..80: note = Artificially Synthesized Probe
  source 1..80: mol_type = other DNA

SEQ ID NO: 101528 - DNA, 80 bp, synthetic construct
  misc_feature 1..80: note = Artificially Synthesized Probe
  source 1..80: mol_type = other DNA
gaattgcaaatgattttcaggtaatcaaagaatcctgtcctttgaccagatagatgactgtttactgagtcctattcaag

SEQ ID NO: 101529 - DNA, 80 bp, synthetic construct
  misc_feature 1..80: note = Artificially Synthesized Probe
  source 1..80: mol_type = other DNA
actttaatggacttatattttaaaaatatttttaaatgaagtctatttgaagttatacatgagtaattaccattcatctc

SEQ ID NO: 101530 - DNA, 80 bp, synthetic construct; identical to SEQ ID NO: 35615
  misc_feature 1..80: note = Artificially Synthesized Probe
  source 1..80: mol_type = other DNA

SEQ ID NO: 101531 - DNA, 80 bp, synthetic construct
  misc_feature 1..80: note = Artificially Synthesized Probe
  source 1..80: mol_type = other DNA
agcgaaaccccatctctacaaaaaaatacaaaaattagctgggcgtggtggtgcatacctgtggtcccagctacttggga

SEQ ID NO: 101532 - DNA, 80 bp, synthetic construct
  misc_feature 1..80: note = Artificially Synthesized Probe
  source 1..80: mol_type = other DNA
cagaattttctgaactttgcttactaagtctatatatacacacctagctggtgctacccccattctctcctccttcctgc

SEQ ID NO: 101533 - DNA, 80 bp, synthetic construct
  misc_feature 1..80: note = Artificially Synthesized Probe
  source 1..80: mol_type = other DNA
cttttctcctttctctttagtatcttcagtctgtccgttggtactagatcctcccatcaaaacttaatcacactcaggtc

SEQ ID NO: 101534 - DNA, 80 bp, synthetic construct
  misc_feature 1..80: note = Artificially Synthesized Probe
  source 1..80: mol_type = other DNA
tctcaactcctgggctcaagcagtcctcccaccttggccttccaaagtgctgggattacaggtgtgagctgcagtgcctg

SEQ ID NO: 101535 - DNA, 80 bp, synthetic construct; identical to SEQ ID NO: 35616
  misc_feature 1..80: note = Artificially Synthesized Probe
  source 1..80: mol_type = other DNA

SEQ ID NO: 101536 - DNA, 80 bp, synthetic construct
  misc_feature 1..80: note = Artificially Synthesized Probe
  source 1..80: mol_type = other DNA
taattgcatattagtgagacttcctctcttgtcctcagcaccattcttaagctgtcaccattctacatcttaaatattct

SEQ ID NO: 101537 - DNA, 80 bp, synthetic construct
  misc_feature 1..80: note = Artificially Synthesized Probe
  source 1..80: mol_type = other DNA
agtgtaatgaggagttagccctaccaggtgccaggatataaaactacaataactaaaactgtctgaagaacttgtaggta

SEQ ID NO: 101538 - DNA, 80 bp, synthetic construct
  misc_feature 1..80: note = Artificially Synthesized Probe
  source 1..80: mol_type = other DNA
cagagataccagtgattgctgcatcactaaatccagttgacatttctcaccctttgtcttacctgttgacaacatttgct

SEQ ID NO: 101539 - DNA, 80 bp, synthetic construct; identical to SEQ ID NO: 35617
  misc_feature 1..80: note = Artificially Synthesized Probe
  source 1..80: mol_type = other DNA

SEQ ID NO: 101540 - DNA, 80 bp, synthetic construct
  misc_feature 1..80: note = Artificially Synthesized Probe
  source 1..80: mol_type = other DNA
cttactaacaaaactgctaccactttgattcaagcacatcatttcccacctgattattacagaatcctcctgactggtct

SEQ ID NO: 101541 - DNA, 80 bp, synthetic construct
  misc_feature 1..80: note = Artificially Synthesized Probe
  source 1..80: mol_type = other DNA
tactaaaaatacaaaaattagccaagcgtggtggtacgtgcttgtaataccagctactcgggaggctgaggcaggagaat

SEQ ID NO: 101542 - DNA, 80 bp, synthetic construct
  misc_feature 1..80: note = Artificially Synthesized Probe
  source 1..80: mol_type = other DNA
gtcaggaaatagctcttcaagagccctgtcatcatgatcctttctaaggatcattgtagcctccatcctgcttagaattt

SEQ ID NO: 101543 - DNA, 80 bp, synthetic construct; identical to SEQ ID NO: 35618
  misc_feature 1..80: note = Artificially Synthesized Probe
  source 1..80: mol_type = other DNA

SEQ ID NO: 101544 - DNA, 80 bp, synthetic construct
  misc_feature 1..80: note = Artificially Synthesized Probe
  source 1..80: mol_type = other DNA
tcactggaacctttgcctcctcggtttaagtgattctcacacctcagcctcccatgtagctgggactacaggcgtgtgcc

SEQ ID NO: 101545 - DNA, 80 bp, synthetic construct
  misc_feature 1..80: note = Artificially Synthesized Probe
  source 1..80: mol_type = other DNA
atttcttaacatattcattcattccactgcagatggacatttgaattatttcaagatttttgccattgcaaatgatgctg

SEQ ID NO: 101546 - DNA, 80 bp, synthetic construct
  misc_feature 1..80: note = Artificially Synthesized Probe
  source 1..80: mol_type = other DNA
atagccaatttgaggtatgtggttttttttgttgttgttggggaaggggacggtaggctagggtatttgcttggggctga

SEQ ID NO: 101547 - DNA, 80 bp, synthetic construct
  misc_feature 1..80: note = Artificially Synthesized Probe
  source 1..80: mol_type = other DNA
tttgagaatttcacttgtttcacatccttgccagcacttacattaacatagtttaattgtgccagtttgatgcttgtggt

SEQ ID NO: 101548 - DNA, 80 bp, synthetic construct
  misc_feature 1..80: note = Artificially Synthesized Probe
  source 1..80: mol_type = other DNA
agaagaaagcgtattttgttgttagatgaagtatgtccatcatatcctgtttattgatactgtttttcttttaattttaa

SEQ ID NO: 101549 - DNA, 80 bp, synthetic construct; identical to SEQ ID NO: 35619
  misc_feature 1..80: note = Artificially Synthesized Probe
  source 1..80: mol_type = other DNA

SEQ ID NO: 101550 - DNA, 80 bp, synthetic construct
  misc_feature 1..80: note = Artificially Synthesized Probe
  source 1..80: mol_type = other DNA
tcatagcttaccacagcctcgacctgctgggctcaagtgatcctcctgtgtagctgggattacaggcacatgccaacaca

SEQ ID NO: 101551 - DNA, 80 bp, synthetic construct
  misc_feature 1..80: note = Artificially Synthesized Probe
  source 1..80: mol_type = other DNA
ggtgtgtgccaccatgcctggccaatttttttatttttgtagagacagggtttcaccatgttggccaggctaatttttat

SEQ ID NO: 101552 - DNA, 80 bp, synthetic construct; identical to SEQ ID NO: 35620
  misc_feature 1..80: note = Artificially Synthesized Probe
  source 1..80: mol_type = other DNA

SEQ ID NO: 101553 - DNA, 80 bp, synthetic construct
  misc_feature 1..80: note = Artificially Synthesized Probe
  source 1..80: mol_type = other DNA
gaattcctctgtataataactttccttggtctgaagccttttctttctgaaattaatatagctactcctgatttcttttg

SEQ ID NO: 101554 - DNA, 80 bp, synthetic construct
  misc_feature 1..80: note = Artificially Synthesized Probe
  source 1..80: mol_type = other DNA
attcagagagattgttggtatagttggattagtatctaccatatttgttactgttttctttttgttgtatttgttcttat

SEQ ID NO: 101555 - DNA, 80 bp, synthetic construct
  misc_feature 1..80: note = Artificially Synthesized Probe
  source 1..80: mol_type = other DNA
aacacttttctgcttcccaggttgtatgagtaccttataatagcaaaatcattctaattccttcctcctatccctcatat

SEQ ID NO: 101556 - DNA, 80 bp, synthetic construct
  misc_feature 1..80: note = Artificially Synthesized Probe
  source 1..80: mol_type = other DNA
ccttcttgaatgctctttctttctttatgtagatataagtttctgatctttatcatttaccttttctgtaaagaattttg

SEQ ID NO: 101557 - DNA, 80 bp, synthetic construct; identical to SEQ ID NO: 35621
  misc_feature 1..80: note = Artificially Synthesized Probe
  source 1..80: mol_type = other DNA

SEQ ID NO: 101558 - DNA, 80 bp, synthetic construct
  misc_feature 1..80: note = Artificially Synthesized Probe
  source 1..80: mol_type = other DNA
agtagctgggactacaggtgggtgctaccaagcccagctaattttttttgtatttttagtagagatagggtttcgccgtg

SEQ ID NO: 101559 - DNA, 80 bp, synthetic construct
  misc_feature 1..80: note = Artificially Synthesized Probe
  source 1..80: mol_type = other DNA
cctgggctcacatggtcttcctgcctcagcctcatgagtggctgggacaacaggtgtgcaccactacacctagctttctc

SEQ ID NO: 101560 - DNA, 80 bp, synthetic construct
  misc_feature 1..80: note = Artificially Synthesized Probe
  source 1..80: mol_type = other DNA
ttatgtatatgttacatcgtttgtaatttgtgccacagtttttagatactccagttttgttttgttttttttgatccatt

SEQ ID NO: 101561 - DNA, 80 bp, synthetic construct; identical to SEQ ID NO: 35622
  misc_feature 1..80: note = Artificially Synthesized Probe
  source 1..80: mol_type = other DNA

SEQ ID NO: 101562 - DNA, 80 bp, synthetic construct
  misc_feature 1..80: note = Artificially Synthesized Probe
  source 1..80: mol_type = other DNA
gtctgataattccaacatttctgctacatctgattccagttctgatgcttattctctcttcaaactttgttttttgtctt

SEQ ID NO: 101563 - DNA, 80 bp, synthetic construct
  misc_feature 1..80: note = Artificially Synthesized Probe
  source 1..80: mol_type = other DNA
aactatgaatgtcatgtgtctcagtctctcgtacttttttggtgggacggtggctagagcgggttggggctggccatttc

SEQ ID NO: 101564 - DNA, 80 bp, synthetic construct
  misc_feature 1..80: note = Artificially Synthesized Probe
  source 1..80: mol_type = other DNA
gtctttttttcccccatgcatgtcagaagcatgagggagttttctctgattatcactgtgagaaccttgttgagttccta

SEQ ID NO: 101565 - DNA, 80 bp, synthetic construct
  misc_feature 1..80: note = Artificially Synthesized Probe
  source 1..80: mol_type = other DNA
ttctgccctgcaaggctcaattttctgcatttgccagttggtctccagttttggggtgctttgttctgcaaagacctcac

SEQ ID NO: 101566 - DNA, 80 bp, synthetic construct; identical to SEQ ID NO: 35623
  misc_feature 1..80: note = Artificially Synthesized Probe
  source 1..80: mol_type = other DNA

SEQ ID NO: 101567 - DNA, 80 bp, synthetic construct
  misc_feature 1..80: note = Artificially Synthesized Probe
  source 1..80: mol_type = other DNA
tattatactaaagttttggaaacaaccttcatgaccatcaattggtgaaagttatgatacaaatcctactatactgatat

SEQ ID NO: 101568 - DNA, 80 bp, synthetic construct
  misc_feature 1..80: note = Artificially Synthesized Probe
  source 1..80: mol_type = other DNA
gtgttagaagataagagggcaaagagggcaaatatatatataaatgcacatggatgcatgggtgtctctgtagagagaag

SEQ ID NO: 101569 - DNA, 80 bp, synthetic construct
  misc_feature 1..80: note = Artificially Synthesized Probe
  source 1..80: mol_type = other DNA
cacggtggagtgatcacagctcaccacaacctccgcttcccaggttcaagtgattctcctgcctcagcctcttgagtagc

SEQ ID NO: 101570 - DNA, 80 bp, synthetic construct
  misc_feature 1..80: note = Artificially Synthesized Probe
  source 1..80: mol_type = other DNA
atctatatattagaaactaaaaattaaaagcctatcactctttaatagcaaagcattgatttattagtttttttgttttt

SEQ ID NO: 101571 - DNA, 80 bp, synthetic construct; identical to SEQ ID NO: 35624
  misc_feature 1..80: note = Artificially Synthesized Probe
  source 1..80: mol_type = other DNA

SEQ ID NO: 101572 - DNA, 80 bp, synthetic construct
  misc_feature 1..80: note = Artificially Synthesized Probe
  source 1..80: mol_type = other DNA
tgagggtgataatagtacttaggctttagtgacacagttttgtgaagtgcttaaaaaacttcttggtgcacagcaagctc

SEQ ID NO: 101573 - DNA, 80 bp, synthetic construct
  misc_feature 1..80: note = Artificially Synthesized Probe
  source 1..80: mol_type = other DNA
aagctacatcctatcctcattcagccacgtcactatcttctctgcatttgtcatcttggctgaatcaactctaaggctgt

SEQ ID NO: 101574 - DNA, 80 bp, synthetic construct
  misc_feature 1..80: note = Artificially Synthesized Probe
  source 1..80: mol_type = other DNA
gtgagaggccttgaagatgaccttgttgttttcaaacattgagaagagggcattgccaaagagcctggtggcagttttta

SEQ ID NO: 101575 - DNA, 80 bp, synthetic construct; identical to SEQ ID NO: 35625
  misc_feature 1..80: note = Artificially Synthesized Probe
  source 1..80: mol_type = other DNA

SEQ ID NO: 101576 - DNA, 80 bp, synthetic construct
  misc_feature 1..80: note = Artificially Synthesized Probe
  source 1..80: mol_type = other DNA
tctgtggcccaggctggagtgcagtgacacaatcttagcttattgcaacctccgcctcccaggctcaagcaatcctccca

SEQ ID NO: 101577 - DNA, 80 bp, synthetic construct
  misc_feature 1..80: note = Artificially Synthesized Probe
  source 1..80: mol_type = other DNA
caggcatgagccaccatacctggcttttgttttgttttgtttttgagatagggtctcatgctattgcccaggctggagtg

SEQ ID NO: 101578 - DNA, 80 bp, synthetic construct
  misc_feature 1..80: note = Artificially Synthesized Probe
  source 1..80: mol_type = other DNA
ccaggttggtctcgaactcctgggcttgagcaatcctcccacttcgacctcccaaagtgctgggattacaggcgtgagcc

SEQ ID NO: 101579 - DNA, 80 bp, synthetic construct; identical to SEQ ID NO: 35626
  misc_feature 1..80: note = Artificially Synthesized Probe
  source 1..80: mol_type = other DNA

SEQ ID NO: 101580 - DNA, 80 bp, synthetic construct; identical to SEQ ID NO: 35583
  misc_feature 1..80: note = Artificially Synthesized Probe
  source 1..80: mol_type = other DNA

SEQ ID NO: 101581 - DNA, 80 bp, synthetic construct
  misc_feature 1..80: note = Artificially Synthesized Probe
  source 1..80: mol_type = other DNA
attgtcagcatttcttcccagtgtccctaaagtagagatgtgtcttatcagtgaagtcttagattagatgaaatgtagtt

SEQ ID NO: 101582 - DNA, 80 bp, synthetic construct
  misc_feature 1..80: note = Artificially Synthesized Probe
  source 1..80: mol_type = other DNA
aagacatgtctagaatcagaacacttcttagcatcaactccagcacggcctgatgccatgctattgtctcagggctttat

SEQ ID NO: 101583 - DNA, 80 bp, synthetic construct
  misc_feature 1..80: note = Artificially Synthesized Probe
  source 1..80: mol_type = other DNA
tattccatcatccacagataatcactagtgattttttggttatacccttgcagtcttttcacgcacatgagcgtgaatac

SEQ ID NO: 101584 - DNA, 80 bp, synthetic construct; identical to SEQ ID NO: 35627
  misc_feature 1..80: note = Artificially Synthesized Probe
  source 1..80: mol_type = other DNA

SEQ ID NO: 101585 - DNA, 80 bp, synthetic construct
  misc_feature 1..80: note = Artificially Synthesized Probe
  source 1..80: mol_type = other DNA
acaattcagtggtttttaaaatacattcagagttggataattattaccacaatcaatttcaggacattgtcatcacccca

SEQ ID NO: 101586 - DNA, 80 bp, synthetic construct
  misc_feature 1..80: note = Artificially Synthesized Probe
  source 1..80: mol_type = other DNA
cttttacttagcataatgttgttaaaggctcatccatgttgtatcatgaatcagtactttattcatttttatggccgaat

SEQ ID NO: 101587 - DNA, 80 bp, synthetic construct
  misc_feature 1..80: note = Artificially Synthesized Probe
  source 1..80: mol_type = other DNA
gttaaatgataactcgatgtttaacttttaaggaactgacagactctcttccaaagtggctgtacccatttataaatatt

SEQ ID NO: 101588 - DNA, 80 bp, synthetic construct
  misc_feature 1..80: note = Artificially Synthesized Probe
  source 1..80: mol_type = other DNA
acctatgtgtgaagcattgttttaggtgctaggaatacatctgtggacagaacaaaagaaagacacctgcccatatgggg

SEQ ID NO: 101589 - DNA, 80 bp, synthetic construct; identical to SEQ ID NO: 35628
  misc_feature 1..80: note = Artificially Synthesized Probe
  source 1..80: mol_type = other DNA

SEQ ID NO: 101590 - DNA, 80 bp, synthetic construct
  misc_feature 1..80: note = Artificially Synthesized Probe
  source 1..80: mol_type = other DNA
gacttaaaaagctctgtctgtcagctttgtggacaagagaccgtaggggcaatggtgaaagaaaggagtctggtgggatg

SEQ ID NO: 101591 - DNA, 80 bp, synthetic construct
  misc_feature 1..80: note = Artificially Synthesized Probe
  source 1..80: mol_type = other DNA
gccaggtacattattcttaatgttggccaggcctgatcttaccctgttggagctgatattccaggagagatgtccggcag

SEQ ID NO: 101592 - DNA, 80 bp, synthetic construct
  misc_feature 1..80: note = Artificially Synthesized Probe
  source 1..80: mol_type = other DNA
ggggtttctccatgttggtcaggctggtctcgatctcctgaccttgtgatccacccgcctctgcctctcaaagtgctggg

SEQ ID NO: 101593 - DNA, 80 bp, synthetic construct
  misc_feature 1..80: note = Artificially Synthesized Probe
  source 1..80: mol_type = other DNA
cagagggaacatgtgctgcatgagttgaaggatcacccggaaggtatgtattatgtggcattacatcctcagtggagggt

SEQ ID NO: 101594 - DNA, 80 bp, synthetic construct; identical to SEQ ID NO: 35629
  misc_feature 1..80: note = Artificially Synthesized Probe
  source 1..80: mol_type = other DNA

SEQ ID NO: 101595 - DNA, 80 bp, synthetic construct
  misc_feature 1..80: note = Artificially Synthesized Probe
  source 1..80: mol_type = other DNA
agagtggctcccaggtgtggggatgatgtcatgtttggctataggagcaaagaaagatgattttattttcctttttcctc

SEQ ID NO: 101596 - DNA, 80 bp, synthetic construct
  misc_feature 1..80: note = Artificially Synthesized Probe
  source 1..80: mol_type = other DNA
actctcaagttatctagaattagagattcaagttttttttggtctggcctagtccccatgaagaagtctcccatttcctt

SEQ ID NO: 101597 - DNA, 80 bp, synthetic construct; identical to SEQ ID NO: 35579
  misc_feature 1..80: note = Artificially Synthesized Probe
  source 1..80: mol_type = other DNA

SEQ ID NO: 101598 - DNA, 80 bp, synthetic construct
  misc_feature 1..80: note = Artificially Synthesized Probe
  source 1..80: mol_type = other DNA
aaatgtaaaatgatgcaaacagcatgccctttaggaaacatgtttatgcatactgcttatagccagaggctgggacagtc

SEQ ID NO: 101599 - DNA, 80 bp, synthetic construct; identical to SEQ ID NO: 35630
  misc_feature 1..80: note = Artificially Synthesized Probe
  source 1..80: mol_type = other DNA

SEQ ID NO: 101600 - DNA, 80 bp, synthetic construct
  misc_feature 1..80: note = Artificially Synthesized Probe
  source 1..80: mol_type = other DNA
cacaaggtccagagctgtgggtatagcctttctgagtatacagtttggagttcctgaagggtttaggacatcacttgaag

SEQ ID NO: 101601 - DNA, 80 bp, synthetic construct
  misc_feature 1..80: note = Artificially Synthesized Probe
  source 1..80: mol_type = other DNA
catatgttcatgtgtgcatatgtacgtatatgcatatatatgtatacatacatgtatacatatttgtgcatacacacata

SEQ ID NO: 101602 - DNA, 80 bp, synthetic construct; identical to SEQ ID NO: 35631
  misc_feature 1..80: note = Artificially Synthesized Probe
  source 1..80: mol_type = other DNA

SEQ ID NO: 101603 - DNA, 80 bp, synthetic construct
  misc_feature 1..80: note = Artificially Synthesized Probe
  source 1..80: mol_type = other DNA
ggtatgcatgtgtgtgtatgtataggtatgcatgtgtatgtatgtatatgcatgtgtatgtataggtatgcatgtgtatg

SEQ ID NO: 101604 - DNA, 80 bp, synthetic construct
  misc_feature 1..80: note = Artificially Synthesized Probe
  source 1..80: mol_type = other DNA
aaacaggggataggatagtaggagaaggagaagcccacagaggaggcaggagaagaaccaggaagtagcgtgtccttgag

SEQ ID NO: 101605 - DNA, 80 bp, synthetic construct
  misc_feature 1..80: note = Artificially Synthesized Probe
  source 1..80: mol_type = other DNA
tgtgtatatatgcatacccacacatatgcatgtgtacacgcccacacatgcatatatgcatgcccacacacatgcatatc

SEQ ID NO: 101606 - DNA, 80 bp, synthetic construct
  misc_feature 1..80: note = Artificially Synthesized Probe
  source 1..80: mol_type = other DNA
tgtatgacaagtaaaaagggaggactttattagcagatggggctacccttagttttctttccagcgtagagctttttgcg

SEQ ID NO: 101607 - DNA, 80 bp, synthetic construct
  misc_feature 1..80: note = Artificially Synthesized Probe
  source 1..80: mol_type = other DNA
gagagaagaggttggagaggggcaagttgctgggtcctcctgtagagtgggagtgggctctggcttagtttttctgctga

SEQ ID NO: 101608 - DNA, 80 bp, synthetic construct; identical to SEQ ID NO: 35632
  misc_feature 1..80: note = Artificially Synthesized Probe
  source 1..80: mol_type = other DNA

SEQ ID NO: 101609 - DNA, 80 bp, synthetic construct
  misc_feature 1..80: note = Artificially Synthesized Probe
  source 1..80: mol_type = other DNA
tcttttggattgatacttgtcccaggttcagttaatatggtggttaaaaaggaatgactctttggtgactgctttgtaag

SEQ ID NO: 101610 - DNA, 80 bp, synthetic construct
  misc_feature 1..80: note = Artificially Synthesized Probe
  source 1..80: mol_type = other DNA
ctttggaatcaaccaaagcctacaacatggtggacatcatacactctgtaagtgccacatctgtttgtcttgcctgtcct

SEQ ID NO: 101611 - DNA, 80 bp, synthetic construct
  misc_feature 1..80: note = Artificially Synthesized Probe
  source 1..80: mol_type = other DNA
gtggcacagatggacttgagggctggagataggagtagtaagggccagcagagctcaggagtctttagaaggccctctga

SEQ ID NO: 101612 - DNA, 80 bp, synthetic construct; identical to SEQ ID NO: 35633
  misc_feature 1..80: note = Artificially Synthesized Probe
  source 1..80: mol_type = other DNA

SEQ ID NO: 101613 - DNA, 80 bp, synthetic construct
  misc_feature 1..80: note = Artificially Synthesized Probe
  source 1..80: mol_type = other DNA
tattcttgtagtctcttcctgcaccaaggattagcctgagatgtaaccttaaggtcttccttaggtcttttctgagcctt

SEQ ID NO: 101614 - DNA, 80 bp, synthetic construct
  misc_feature 1..80: note = Artificially Synthesized Probe
  source 1..80: mol_type = other DNA
cccaaagcaggagagcctcgcaacagtgtggggagttgtagcaacagtgaccacccatctctttgcacctctgtgatcag

SEQ ID NO: 101615 - DNA, 80 bp, synthetic construct; identical to SEQ ID NO: 35634
  misc_feature 1..80: note = Artificially Synthesized Probe
  source 1..80: mol_type = other DNA

SEQ ID NO: 101616 - DNA, 80 bp, synthetic construct
  misc_feature 1..80: note = Artificially Synthesized Probe
  source 1..80: mol_type = other DNA
tggaactaattaattgtgttccagggtcaggttctccttatccccacttctctctaccttttcctcgtcctatttcctta

SEQ ID NO: 101617 - DNA, 80 bp, synthetic construct
  misc_feature 1..80: note = Artificially Synthesized Probe
  source 1..80: mol_type = other DNA
tgtttgtaatttttttctgtcatttatttagggttttattttatttatttatttttattttattttattattattatact

SEQ ID NO: 101618 - DNA, 80 bp, synthetic construct
  misc_feature 1..80: note = Artificially Synthesized Probe
  source 1..80: mol_type = other DNA
tggtatttagggttttaaaaatgtggttgtatactgtctatgtataaataagagttctgtcgggtgcaggggctcatgcc

SEQ ID NO: 101619 - DNA, 80 bp, synthetic construct
  misc_feature 1..80: note = Artificially Synthesized Probe
  source 1..80: mol_type = other DNA
gaggtggctgtcgcctgtagtcccatttacttgggaggctgagatgggaggattgcttgaacccaggtgtttgaggctgt

SEQ ID NO: 101620 - DNA, 80 bp, synthetic construct; identical to SEQ ID NO: 35635
  misc_feature 1..80: note = Artificially Synthesized Probe
  source 1..80: mol_type = other DNA

SEQ ID NO: 101621 - DNA, 80 bp, synthetic construct
  misc_feature 1..80: note = Artificially Synthesized Probe
  source 1..80: mol_type = other DNA
tgagtgttgaatattgttgaatgcactttcagtgtttttggagatgatcatgtgattttcttccttagatctatttataa

SEQ ID NO: 101622 - DNA, 80 bp, synthetic construct
  misc_feature 1..80: note = Artificially Synthesized Probe
  source 1..80: mol_type = other DNA
tttacttatttatttatttaaaaaaaatttttttttgagacagagttttgctcttgtcacccaagctggaatgcggtggc

SEQ ID NO: 101623 - DNA, 80 bp, synthetic construct
  misc_feature 1..80: note = Artificially Synthesized Probe
  source 1..80: mol_type = other DNA
aacttctgacctcaggtgatccacctgccttggccccacaaagtgctgggattacaggtgtgagccaccgtgcctggcct

SEQ ID NO: 101624 - DNA, 80 bp, synthetic construct; identical to SEQ ID NO: 35636
  misc_feature 1..80: note = Artificially Synthesized Probe
  source 1..80: mol_type = other DNA

SEQ ID NO: 101625 - DNA, 80 bp, synthetic construct
  misc_feature 1..80: note = Artificially Synthesized Probe
  source 1..80: mol_type = other DNA
ccaccacatctggctaattttaaaattttttgtagagatggcaactcactatgttgcccaggctggcttttccaattatt

SEQ ID NO: 101626 - DNA, 80 bp, synthetic construct
  misc_feature 1..80: note = Artificially Synthesized Probe
  source 1..80: mol_type = other DNA
ctaattttgtttttgtatttttagtagagacggggtttcaccgtgttagccaggatagtctcgatctcccgacctcgtga

SEQ ID NO: 101627 - DNA, 80 bp, synthetic construct
  misc_feature 1..80: note = Artificially Synthesized Probe
  source 1..80: mol_type = other DNA
atgaacagcccttgctttgcttactaaattgtctgtgatgacatcactgagtgatctttgttccattgtagggaaagcta

SEQ ID NO: 101628 - DNA, 80 bp, synthetic construct
  misc_feature 1..80: note = Artificially Synthesized Probe
  source 1..80: mol_type = other DNA
gggttcaagtgattctcctgcctcaacctcctgaatagctgtgatttcaggcacccgccaccacgcttggctaatttttg

SEQ ID NO: 101629 - DNA, 80 bp, synthetic construct; identical to SEQ ID NO: 35637
  misc_feature 1..80: note = Artificially Synthesized Probe
  source 1..80: mol_type = other DNA

SEQ ID NO: 101630 - DNA, 80 bp, synthetic construct
  misc_feature 1..80: note = Artificially Synthesized Probe
  source 1..80: mol_type = other DNA
ttgtatttttagagatggggtttcgccatgttggccaggctggtctcaaactcctggcttcaagtgatccacttgcctcg

SEQ ID NO: 101631 - DNA, 80 bp, synthetic construct
  misc_feature 1..80: note = Artificially Synthesized Probe
  source 1..80: mol_type = other DNA
ttgggaggctgaggcgggtggatcacttgaggtcaggagttcgagaccagcttgaccaacacggtgaaaacctgtctcta

SEQ ID NO: 101632 - DNA, 80 bp, synthetic construct
  misc_feature 1..80: note = Artificially Synthesized Probe
  source 1..80: mol_type = other DNA
ctaaaaaaaaaaaaaaagaaagaaaaaaagtgaatatgctagaaaagagtcaaagcagtgactttagaagctacttaaga

SEQ ID NO: 101633 - DNA, 80 bp, synthetic construct; identical to SEQ ID NO: 35638
  misc_feature 1..80: note = Artificially Synthesized Probe
  source 1..80: mol_type = other DNA

SEQ ID NO: 101634 - DNA, 80 bp, synthetic construct
  misc_feature 1..80: note = Artificially Synthesized Probe
  source 1..80: mol_type = other DNA
tcatgaagcagctgactatgcttcaatctgagtgcagtagcccctgataagcatttgaggttgtaaaaatagaaaattca

SEQ ID NO: 101635 - DNA, 80 bp, synthetic construct
  misc_feature 1..80: note = Artificially Synthesized Probe
  source 1..80: mol_type = other DNA
aaaagtagataaatagcctaaaaaatgaatgaaataatataaaaaagtaaaagtagattttacattctcaccacaaaaaa

SEQ ID NO: 101636 - DNA, 80 bp, synthetic construct
  misc_feature 1..80: note = Artificially Synthesized Probe
  source 1..80: mol_type = other DNA
ttttaaaattcttagttaaatgtatgagaaaaaagtgactacaatgaaaggcaaagaagaatgaacatacatataattgg

SEQ ID NO: 101637 - DNA, 80 bp, synthetic construct
  misc_feature 1..80: note = Artificially Synthesized Probe
  source 1..80: mol_type = other DNA
tgttcgatttttaaaataaggagaaatactcaggacctttgggcagaaatcaaatgacttacaagggcaagagaataaaa

SEQ ID NO: 101638 - DNA, 80 bp, synthetic construct; identical to SEQ ID NO: 35584
  misc_feature 1..80: note = Artificially Synthesized Probe
  source 1..80: mol_type = other DNA

SEQ ID NO: 101639 - DNA, 80 bp, synthetic construct; identical to SEQ ID NO: 35639
  misc_feature 1..80: note = Artificially Synthesized Probe
  source 1..80: mol_type = other DNA

SEQ ID NO: 101640 - DNA, 80 bp, synthetic construct
  misc_feature 1..80: note = Artificially Synthesized Probe
  source 1..80: mol_type = other DNA
aaaaaatgcaactgaaaaatgggaggagaagagaggggaagaatattgcagaatcagctcactgattattgttagctaac

SEQ ID NO: 101641 - DNA, 80 bp, synthetic construct
  misc_feature 1..80: note = Artificially Synthesized Probe
  source 1..80: mol_type = other DNA
gaaaaataaaaaaaaaggtaaaagacaataaatatagaatacatagtaattataaaaaataatatgacaggccaggcgtg

SEQ ID NO: 101642 - DNA, 80 bp, synthetic construct
  misc_feature 1..80: note = Artificially Synthesized Probe
  source 1..80: mol_type = other DNA
cccgggaggctgaggcaggagaatcgcttgaacccaggaggcagaggttgtggtgagccgagattgcaccattgcactca

SEQ ID NO: 101643 - DNA, 80 bp, synthetic construct; identical to SEQ ID NO: 35640
  misc_feature 1..80: note = Artificially Synthesized Probe
  source 1..80: mol_type = other DNA

SEQ ID NO: 101644 - DNA, 80 bp, synthetic construct
  misc_feature 1..80: note = Artificially Synthesized Probe
  source 1..80: mol_type = other DNA
tgcctcagcttcccaggaaggacattttcaactgctaaaagccatagttcacaatgataatgtaaagcatatcgaatatc

SEQ ID NO: 101645 - DNA, 80 bp, synthetic construct
  misc_feature 1..80: note = Artificially Synthesized Probe
  source 1..80: mol_type = other DNA
gacaaaagtaataatttaggagacctaaataacgtaataggtagatcttacacatttcttttggactttacaccctggta

SEQ ID NO: 101646 - DNA, 80 bp, synthetic construct; identical to SEQ ID NO: 35641
  misc_feature 1..80: note = Artificially Synthesized Probe
  source 1..80: mol_type = other DNA

SEQ ID NO: 101647 - DNA, 80 bp, synthetic construct
  misc_feature 1..80: note = Artificially Synthesized Probe
  source 1..80: mol_type = other DNA
tagaatatgtttaaaacgatgaacagatgaaaatctgtttcctgaaacagtaaaaatcagagaaggaaaataaacaggcc

SEQ ID NO: 101648 - DNA, 80 bp, synthetic construct
  misc_feature 1..80: note = Artificially Synthesized Probe
  source 1..80: mol_type = other DNA
cccaggtactcaggaggctgagacaggagaatcgcttgaacctgggaggcagaggttgcagtgagcccagatcgtgccac

SEQ ID NO: 101649 - DNA, 80 bp, synthetic construct
  misc_feature 1..80: note = Artificially Synthesized Probe
  source 1..80: mol_type = other DNA
ttatgatggaaatagaagaatagctgcaattagtaaacactggctaacttcaaaaaagagacagtaaaagcagaagtatg

SEQ ID NO: 101650 - DNA, 80 bp, synthetic construct
  misc_feature 1..80: note = Artificially Synthesized Probe
  source 1..80: mol_type = other DNA
cttcatgtaagcatagagaagtggtggccctgggtcttgattgttttgcttttaggagggtacataaggcctaagatgac

SEQ ID NO: 101651 - DNA, 80 bp, synthetic construct
  misc_feature 1..80: note = Artificially Synthesized Probe
  source 1..80: mol_type = other DNA
ccctgtctctacaaaaatttttaaagttaactgggtgtggtggcatgcacctatagtcccagctacttgagaggcctcag

SEQ ID NO: 101652 - DNA, 80 bp, synthetic construct; identical to SEQ ID NO: 35642
  misc_feature 1..80: note = Artificially Synthesized Probe
  source 1..80: mol_type = other DNA

SEQ ID NO: 101653 - DNA, 80 bp, synthetic construct
  misc_feature 1..80: note = Artificially Synthesized Probe
  source 1..80: mol_type = other DNA
ctacaaaaaataaattagggccaggcaaggtggctcacacctgtaatcccgcactttgggaggccgaggtgggcggatca

SEQ ID NO: 101654 - DNA, 80 bp, synthetic construct
  misc_feature 1..80: note = Artificially Synthesized Probe
  source 1..80: mol_type = other DNA
atgagccaagatcgtgccattgcactccagcctgggcaacaagagcgaaactccatctaaaaaaaaaaaaaagccaggca

SEQ ID NO: 101655 - DNA, 80 bp, synthetic construct; identical to SEQ ID NO: 35643
  misc_feature 1..80: note = Artificially Synthesized Probe
  source 1..80: mol_type = other DNA

SEQ ID NO: 101656 - DNA, 80 bp, synthetic construct
  misc_feature 1..80: note = Artificially Synthesized Probe
  source 1..80: mol_type = other DNA
atctgtggcctactgggatgtattctaggaatgcaagattggttctaggaaactcaataatatactgtattaacacatat

SEQ ID NO: 101657 - DNA, 80 bp, synthetic construct
  misc_feature 1..80: note = Artificially Synthesized Probe
  source 1..80: mol_type = other DNA
agactagcttctactaggattaggaacaagtataggatgcccattattcccattattatttaacattgttctggaaatat

SEQ ID NO: 101658 - DNA, 80 bp, synthetic construct
  misc_feature 1..80: note = Artificially Synthesized Probe
  source 1..80: mol_type = other DNA
aacatatagaaatcttcatatacgcaagcagtaaccaattatggtagagtaaaagcctctcttacatagcaacaggaaga

SEQ ID NO: 101659 - DNA, 80 bp, synthetic construct; identical to SEQ ID NO: 35644
  misc_feature 1..80: note = Artificially Synthesized Probe
  source 1..80: mol_type = other DNA

SEQ ID NO: 101660 - DNA, 80 bp, synthetic construct
  misc_feature 1..80: note = Artificially Synthesized Probe
  source 1..80: mol_type = other DNA
atcccagcactttaggaagctgaggagggaagatcctttgagcccaggagtttgagaccatcctgggcaacatagtgaga

SEQ ID NO: 101661 - DNA, 80 bp, synthetic construct
  misc_feature 1..80: note = Artificially Synthesized Probe
  source 1..80: mol_type = other DNA
gtttatacaaaagtgcacatggaaaaataaaagtgcaagaatacctaagaatatactgcaaaagaaaagctgtaagtggg

SEQ ID NO: 101662 - DNA, 80 bp, synthetic construct
  misc_feature 1..80: note = Artificially Synthesized Probe
  source 1..80: mol_type = other DNA
agaagaagtatttggattttttaacctttatttttgcatttttctggtagtttcctggagacagcgtggtcactggacga

SEQ ID NO: 101663 - DNA, 80 bp, synthetic construct
  misc_feature 1..80: note = Artificially Synthesized Probe
  source 1..80: mol_type = other DNA
aaatgcatcattaggcagtttctttgtgcgaccatcatagagtgtacttccacaaacctagatggtataacctattacac

SEQ ID NO: 101664 - DNA, 80 bp, synthetic construct
  misc_feature 1..80: note = Artificially Synthesized Probe
  source 1..80: mol_type = other DNA
ataggcagtttgtcattgaccagaacctctttgtgtagtgcccaactgtatatgataatgatattttatcaaatctcagg

SEQ ID NO: 101665 - DNA, 80 bp, synthetic construct; identical to SEQ ID NO: 35645
  misc_feature 1..80: note = Artificially Synthesized Probe
  source 1..80: mol_type = other DNA

SEQ ID NO: 101666 - DNA, 80 bp, synthetic construct
  misc_feature 1..80: note = Artificially Synthesized Probe
  source 1..80: mol_type = other DNA
aaccaaaattgatagaaaagtgggcaaaaaaccacggatagatagctcacaaaaaagatataaaatggaccttaaacatg

SEQ ID NO: 101667 - DNA, 80 bp, synthetic construct
  misc_feature 1..80: note = Artificially Synthesized Probe
  source 1..80: mol_type = other DNA
gactctggtattatccaggactaaattagcatttgccctttaactcagcaatcccattcctagcaatttaccctgaagat

SEQ ID NO: 101668 - DNA, 80 bp, synthetic construct; identical to SEQ ID NO: 35646
  misc_feature 1..80: note = Artificially Synthesized Probe
  source 1..80: mol_type = other DNA

SEQ ID NO: 101669 - DNA, 80 bp, synthetic construct
  misc_feature 1..80: note = Artificially Synthesized Probe
  source 1..80: mol_type = other DNA
tattagtattttacatattaaaaaataaaatcaagactggggaaaacctttaaaatgaaatacaaacatgaacctgtttt

SEQ ID NO: 101670 - DNA, 80 bp, synthetic construct
  misc_feature 1..80: note = Artificially Synthesized Probe
  source 1..80: mol_type = other DNA
tttgagggtagtagcagccagattctgctatcggagaagggagttgtgaatatggcaagagaaaaaaatctagaatgaac

SEQ ID NO: 101671 - DNA, 80 bp, synthetic construct
  misc_feature 1..80: note = Artificially Synthesized Probe
  source 1..80: mol_type = other DNA
gaaagaaaccaagatgaaccagaaagtaagatacttccaaaatataaggtagtgctcaaagaatgatggggacactttag

SEQ ID NO: 101672 - DNA, 80 bp, synthetic construct; identical to SEQ ID NO: 35647
  misc_feature 1..80: note = Artificially Synthesized Probe
  source 1..80: mol_type = other DNA

SEQ ID NO: 101673 - DNA, 80 bp, synthetic construct; identical to SEQ ID NO: 35585
  misc_feature 1..80: note = Artificially Synthesized Probe
  source 1..80: mol_type = other DNA

SEQ ID NO: 101674 - DNA, 80 bp, synthetic construct
  misc_feature 1..80: note = Artificially Synthesized Probe
  source 1..80: mol_type = other DNA
attaaccaggtatggtggcatgaacctgtggtcccagctgcttgggaggctaaggtgggaagatcgcttgagcctgggag

SEQ ID NO: 101675 - DNA, 80 bp, synthetic construct
  misc_feature 1..80: note = Artificially Synthesized Probe
  source 1..80: mol_type = other DNA
ggctgcttggtggctgctaggatgctaaacctagtggatgaagaactagattaatgattaaagtttgaagaacaggattt

SEQ ID NO: 101676 - DNA, 80 bp, synthetic construct
  misc_feature 1..80: note = Artificially Synthesized Probe
  source 1..80: mol_type = other DNA
atgagaatgctccttctgtggtactcctgtggaaaggcttagctcaaaattaaacatgaagaaataccaaaggaacccaa

SEQ ID NO: 101677 - DNA, 80 bp, synthetic construct; identical to SEQ ID NO: 35648
  misc_feature 1..80: note = Artificially Synthesized Probe
  source 1..80: mol_type = other DNA

SEQ ID NO: 101678 - DNA, 80 bp, synthetic construct
  misc_feature 1..80: note = Artificially Synthesized Probe
  source 1..80: mol_type = other DNA
ggaggcttaggagaattgcttgaacccagggggcggagattgcagtgagccgagatcgtgccactgcactccatcctggg

SEQ ID NO: 101679 - DNA, 80 bp, synthetic construct
  misc_feature 1..80: note = Artificially Synthesized Probe
  source 1..80: mol_type = other DNA
tacaaaaaatataattttttttttttggtggcatatacctgtagtcctagctacttgggaggctgaggtgagagaattgc

SEQ ID NO: 101680 - DNA, 80 bp, synthetic construct
  misc_feature 1..80: note = Artificially Synthesized Probe
  source 1..80: mol_type = other DNA
atgtgtttatatatatataaaagagagagtgatggtcgggcacagtggctcacgcctgtaatcacagcatgttggaggcc

SEQ ID NO: 101681 - DNA, 80 bp, synthetic construct; identical to SEQ ID NO: 35649
  misc_feature 1..80: note = Artificially Synthesized Probe
  source 1..80: mol_type = other DNA

SEQ ID NO: 101682 - DNA, 80 bp, synthetic construct
  misc_feature 1..80: note = Artificially Synthesized Probe
  source 1..80: mol_type = other DNA
ggcttgctgcaacctctgccttccagtttaagcgattctcctgcctcagtctcctgagtagctgggattacaggtgcctg

SEQ ID NO: 101683 - DNA, 80 bp, synthetic construct
  misc_feature 1..80: note = Artificially Synthesized Probe
  source 1..80: mol_type = other DNA
tatttaggttggaaataatttcaaagtgaaaaggtaaagttgtcacaaaaattccacactcaaataggacttttaaaaca

SEQ ID NO: 101684 - DNA, 80 bp, synthetic construct
  misc_feature 1..80: note = Artificially Synthesized Probe
  source 1..80: mol_type = other DNA
aggggacttgactctcagaaccagagtccccctgagctttgggctttcatgaatatgttcagaaaattttatcagggtgc

SEQ ID NO: 101685 - DNA, 80 bp, synthetic construct
  misc_feature 1..80: note = Artificially Synthesized Probe
  source 1..80: mol_type = other DNA
tggagctgtctacctctacctctgtaattctgtaatagaaatgtcattctgtagtgtcattacatcttatacttgtcttt

SEQ ID NO: 101686 - DNA, 80 bp, synthetic construct; identical to SEQ ID NO: 35650
  misc_feature 1..80: note = Artificially Synthesized Probe
  source 1..80: mol_type = other DNA

SEQ ID NO: 101687 - DNA, 80 bp, synthetic construct
  misc_feature 1..80: note = Artificially Synthesized Probe
  source 1..80: mol_type = other DNA
aggctggagtgcagtggtgtgatctcagcacactggaccctctgcctcccagggtcaagcagtccttccacctcggcctc

SEQ ID NO: 101688 - DNA, 80 bp, synthetic construct
  misc_feature 1..80: note = Artificially Synthesized Probe
  source 1..80: mol_type = other DNA
agacatgagacaccacaactggcctataaaagctacttttaatatctcaaaatgcttctttcatactccttttcaaaggt

SEQ ID NO: 101689 - DNA, 80 bp, synthetic construct
  misc_feature 1..80: note = Artificially Synthesized Probe
  source 1..80: mol_type = other DNA
ccttcaacagtgccaggcacatagatggtacgtgacaagttaatggcatcttaccatgtctgtgccccacagctttctgg

SEQ ID NO: 101690 - DNA, 80 bp, synthetic construct; identical to SEQ ID NO: 35651
  misc_feature 1..80: note = Artificially Synthesized Probe
  source 1..80: mol_type = other DNA

SEQ ID NO: 101691 - DNA, 80 bp, synthetic construct
  misc_feature 1..80: note = Artificially Synthesized Probe
  source 1..80: mol_type = other DNA
aatacaaaaaatgagctgggcgtggtggcacgtgcctgtagtccagctacttgggaggctgaggcaggagaattgcttga

SEQ ID NO: 101692 - DNA, 80 bp, synthetic construct
  misc_feature 1..80: note = Artificially Synthesized Probe
  source 1..80: mol_type = other DNA
tatgtctgtttggcccatttaaagtagtgcaaccgcagtgattacatacaaagtgtatgcaaccatcaccactgtttcca

SEQ ID NO: 101693 - DNA, 80 bp, synthetic construct
  misc_feature 1..80: note = Artificially Synthesized Probe
  source 1..80: mol_type = other DNA
tatcaatcttatttcacttagcataatcaggcttatttcatttagcaagattcatccatattgtagcatatgttagaact

SEQ ID NO: 101694 - DNA, 80 bp, synthetic construct; identical to SEQ ID NO: 35652
  misc_feature 1..80: note = Artificially Synthesized Probe
  source 1..80: mol_type = other DNA

SEQ ID NO: 101695 - DNA, 80 bp, synthetic construct
  misc_feature 1..80: note = Artificially Synthesized Probe
  source 1..80: mol_type = other DNA
ttgccaacacttattattaatttttaaaaatagtaatcctagtggatgtgaagtgaatggaattgtgtttttgatttgca

SEQ ID NO: 101696 - DNA, 80 bp, synthetic construct
  misc_feature 1..80: note = Artificially Synthesized Probe
  source 1..80: mol_type = other DNA
tggaagagggaggtagaagaggagcttataaggatgtgatatgagaaggacatgatctgcagtacctggctttgaagatg

SEQ ID NO: 101697 - DNA, 80 bp, synthetic construct
  misc_feature 1..80: note = Artificially Synthesized Probe
  source 1..80: mol_type = other DNA
ctcttacatttgacttacaagtattttcttctgttctataggttgtccttgcactcttttgatcatgtcttttgatacac

SEQ ID NO: 101698 - DNA, 80 bp, synthetic construct
  misc_feature 1..80: note = Artificially Synthesized Probe
  source 1..80: mol_type = other DNA
gtgccaccatgctgggctaatttttgtatttttagtagagacggggtttcgccatgttggccaggctggtctcgaactcc

SEQ ID NO: 101699 - DNA, 80 bp, synthetic construct
  misc_feature 1..80: note = Artificially Synthesized Probe
  source 1..80: mol_type = other DNA
tcaaggttgtgaaggtatgttcctgttgtttttttcctgagagtattacggttttagcccttacatttagcttttaattt

SEQ ID NO: 101700 - DNA, 80 bp, synthetic construct; identical to SEQ ID NO: 35653
  misc_feature 1..80: note = Artificially Synthesized Probe
  source 1..80: mol_type = other DNA

SEQ ID NO: 101701 - DNA, 80 bp, synthetic construct
  misc_feature 1..80: note = Artificially Synthesized Probe
  source 1..80: mol_type = other DNA
tattgttgttcttaggattgttttaggcatttggggcccttttaaattccatatgaattttggtagtgactttcccattt

SEQ ID NO: 101702 - DNA, 80 bp, synthetic construct
  misc_feature 1..80: note = Artificially Synthesized Probe
  source 1..80: mol_type = other DNA
tttcagagtccaagcctatcacctctttggttaaatttattcctaaatgttttattcttctagatgtcatgtacatggaa

SEQ ID NO: 101703 - DNA, 80 bp, synthetic construct
  misc_feature 1..80: note = Artificially Synthesized Probe
  source 1..80: mol_type = other DNA
tgatctgtggacatggggtattttcaccttttagttgtgaataatgctggtgaatattgtgaatattatgaaagttgatg

SEQ ID NO: 101704 - DNA, 80 bp, synthetic construct; identical to SEQ ID NO: 35654
  misc_feature 1..80: note = Artificially Synthesized Probe
  source 1..80: mol_type = other DNA

SEQ ID NO: 101705 - DNA, 80 bp, synthetic construct
  misc_feature 1..80: note = Artificially Synthesized Probe
  source 1..80: mol_type = other DNA
gaaagggtgttggattttgtcaaatgccttttttgtgtcaattgagatgatcatgtggtttttgtccttccttttgttaa

SEQ ID NO: 101706 - DNA, 80 bp, synthetic construct
  misc_feature 1..80: note = Artificially Synthesized Probe
  source 1..80: mol_type = other DNA
ccttctgctcccacatgcacacatgcacagcctccatatgtccaaaatcctgcataagagcagtatatttgaggttaatg

SEQ ID NO: 101707 - DNA, 80 bp, synthetic construct
  misc_feature 1..80: note = Artificially Synthesized Probe
  source 1..80: mol_type = other DNA
catggcagcaggagagagaagtgcaggcaggggaaatgccagatgtttataaaaccatcagatctcatgagaactcacac

SEQ ID NO: 101708 - DNA, 80 bp, synthetic construct
  misc_feature 1..80: note = Artificially Synthesized Probe
  source 1..80: mol_type = other DNA
taagataatacatttgtgttgtttcaaggcactgaatttatattaatttgttatagcggtaatagaaaactaacacagaa

SEQ ID NO: 101709 - DNA, 80 bp, synthetic construct; identical to SEQ ID NO: 35655
  misc_feature 1..80: note = Artificially Synthesized Probe
  source 1..80: mol_type = other DNA

SEQ ID NO: 101710 - DNA, 80 bp, synthetic construct
  misc_feature 1..80: note = Artificially Synthesized Probe
  source 1..80: mol_type = other DNA
tcctgcattagccaggacttccaatacaatattgaaagatagtggtgaggggacatttggtcttagcaggaaaacttcta

SEQ ID NO: 101711 - DNA, 80 bp, synthetic construct
  misc_feature 1..80: note = Artificially Synthesized Probe
  source 1..80: mol_type = other DNA
tttttcttctttagactgttgatatgatagattacgttaattgatttttgactgttgaactaaactcacatacctgagat

SEQ ID NO: 101712 - DNA, 80 bp, synthetic construct
  misc_feature 1..80: note = Artificially Synthesized Probe
  source 1..80: mol_type = other DNA
acttctgcccgcagaatgcctggtcgagctctttagggccttagcatgcctcgccttgatgggtagcaaaggcacgtgtc

SEQ ID NO: 101713 - DNA, 80 bp, synthetic construct
  misc_feature 1..80: note = Artificially Synthesized Probe
  source 1..80: mol_type = other DNA
ctcatagaatgagttagaaagtattctttctgcttctgtcttctggaaaagattgtagagaactggtattaatatcttcc

SEQ ID NO: 101714 - DNA, 80 bp, synthetic construct; identical to SEQ ID NO: 35656
  misc_feature 1..80: note = Artificially Synthesized Probe
  source 1..80: mol_type = other DNA

SEQ ID NO: 101715 - DNA, 80 bp, synthetic construct
  misc_feature 1..80: note = Artificially Synthesized Probe
  source 1..80: mol_type = other DNA
attttaaatatgttatcctgctgtctctggctttcagagtttctgctgagaaatcactggataatcttaatgaggatttc

SEQ ID NO: 101716 - DNA, 80 bp, synthetic construct
  misc_feature 1..80: note = Artificially Synthesized Probe
  source 1..80: mol_type = other DNA
acttgggaagttttcggacattatttcatcagattatctccttgccactttctcttagtcttctcctggtgctcttatcc

SEQ ID NO: 101717 - DNA, 80 bp, synthetic construct; identical to SEQ ID NO: 35657
  misc_feature 1..80: note = Artificially Synthesized Probe
  source 1..80: mol_type = other DNA

SEQ ID NO: 101718 - DNA, 80 bp, synthetic construct
  misc_feature 1..80: note = Artificially Synthesized Probe
  source 1..80: mol_type = other DNA
accaacctagccaatgtggtgaaaccctgtccctactaaaaatacaaaaaatgagccggacgtggcagagggtgcctgta

SEQ ID NO: 101719 - DNA, 80 bp, synthetic construct
  misc_feature 1..80: note = Artificially Synthesized Probe
  source 1..80: mol_type = other DNA
ccactagtagtgttttatagtctttttctagtaagttcagtgtctatgcttacttagggatagtttcttcattttatacc

SEQ ID NO: 101720 - DNA, 80 bp, synthetic construct; identical to SEQ ID NO: 35586
  misc_feature 1..80: note = Artificially Synthesized Probe
  source 1..80: mol_type = other DNA

SEQ ID NO: 101721 - DNA, 80 bp, synthetic construct
  misc_feature 1..80: note = Artificially Synthesized Probe
  source 1..80: mol_type = other DNA
tgtttgcctagtgtctttttgcaatgacttttccagagactatattttttgtcatttgtggtcactgaagtccctgtttc

SEQ ID NO: 101722 - DNA, 80 bp, synthetic construct
  misc_feature 1..80: note = Artificially Synthesized Probe
  source 1..80: mol_type = other DNA
ttgacagaaattttcttgaacaccaggaactaaaaccaagaaacaacaaacaagaaaactcctggtcttgaaattgtctc

SEQ ID NO: 101723 - DNA, 80 bp, synthetic construct; identical to SEQ ID NO: 35658
  misc_feature 1..80: note = Artificially Synthesized Probe
  source 1..80: mol_type = other DNA

SEQ ID NO: 101724 - DNA, 80 bp, synthetic construct
  misc_feature 1..80: note = Artificially Synthesized Probe
  source 1..80: mol_type = other DNA
gtttcaacagtaatcttttgcccagacatctgcaggttgttcctctaccttaccatgatttaaagaaatgcctgctacat

SEQ ID NO: 101725 - DNA, 80 bp, synthetic construct
  misc_feature 1..80: note = Artificially Synthesized Probe
  source 1..80: mol_type = other DNA
tctgcttcctccagaaccagggaggaaatgggacaagtgtaattaaaaaggcacagagctttcataccattttcttttat

SEQ ID NO: 101726 - DNA, 80 bp, synthetic construct
  misc_feature 1..80: note = Artificially Synthesized Probe
  source 1..80: mol_type = other DNA
tttttagtagagacagggttttgccattttggccaggctggtcttgaactcctgacctcaggtgatccgcccaccttggc

SEQ ID NO: 101727 - DNA, 80 bp, synthetic construct; identical to SEQ ID NO: 35659
  misc_feature 1..80: note = Artificially Synthesized Probe
  source 1..80: mol_type = other DNA

SEQ ID NO: 101728 - DNA, 80 bp, synthetic construct
  misc_feature 1..80: note = Artificially Synthesized Probe
  source 1..80: mol_type = other DNA
atgaggtttcaccatgttggccaggctggtcttgaactcctgacctcaagtggtctgcctgcccgacctcccaaagtgct

SEQ ID NO: 101729 - DNA, 80 bp, synthetic construct
  misc_feature 1..80: note = Artificially Synthesized Probe
  source 1..80: mol_type = other DNA
attcttgggataaaccccacttggacatgatgtattactgtttttttgagatggagtgttgctctgtcacccgggctgga

SEQ ID NO: 101730 - DNA, 80 bp, synthetic construct
  misc_feature 1..80: note = Artificially Synthesized Probe
  source 1..80: mol_type = other DNA
gatggtctcgatctcttgacctcgtgatctgcccgcctcggcctcccaaagtgctgggattacggtcatgagccaccgcg

SEQ ID NO: 101731 - DNA, 80 bp, synthetic construct; identical to SEQ ID NO: 35660
  misc_feature 1..80: note = Artificially Synthesized Probe
  source 1..80: mol_type = other DNA

SEQ ID NO: 101732 - DNA, 80 bp, synthetic construct
  misc_feature 1..80: note = Artificially Synthesized Probe
  source 1..80: mol_type = other DNA
aataaaatagttatacttggttaatttaaaatctgtcgtagttagtatgcatttaccaattaaattacctttgaaatgtt

SEQ ID NO: 101733 - DNA, 80 bp, synthetic construct
  misc_feature 1..80: note = Artificially Synthesized Probe
  source 1..80: mol_type = other DNA
ctcccactgatggctccctgcggcaaggccggctgtgtctcagctggcggcagccctttggtctgtagtgagtctgtagt

SEQ ID NO: 101734 - DNA, 80 bp, synthetic construct
  misc_feature 1..80: note = Artificially Synthesized Probe
  source 1..80: mol_type = other DNA
tgtggatagaactgggaattgcctggatactcagtatggataatctctctctttctaggatgcttggatattaattcatc

SEQ ID NO: 101735 - DNA, 80 bp, synthetic construct; identical to SEQ ID NO: 35661
  misc_feature 1..80: note = Artificially Synthesized Probe
  source 1..80: mol_type = other DNA

SEQ ID NO: 101736 - DNA, 80 bp, synthetic construct
  misc_feature 1..80: note = Artificially Synthesized Probe
  source 1..80: mol_type = other DNA
tgtacccaaagtcacagtcatcaccaggaaggtgaggacctcatgttggaggccatgaccctgctcactttcctacagca

SEQ ID NO: 101737 - DNA, 80 bp, synthetic construct
  misc_feature 1..80: note = Artificially Synthesized Probe
  source 1..80: mol_type = other DNA
aaaagataatgagcattaactttgaaaggtcttacagaccgtgggccttcaggagcccagtagggctattcttgttcttt

SEQ ID NO: 101738 - DNA, 80 bp, synthetic construct
  misc_feature 1..80: note = Artificially Synthesized Probe
  source 1..80: mol_type = other DNA
cgcagagattgcagtcatgggagcaaaggtgagggcctcttgcttttccctttctgggtccaaggactcgactctaccag

SEQ ID NO: 101739 - DNA, 80 bp, synthetic construct
  misc_feature 1..80: note = Artificially Synthesized Probe
  source 1..80: mol_type = other DNA
tggtgtcttcatgccaaggtgggtgcggcaggtgaaaggaaagtgagaggggtccagagtggttttgagattgtaagtaa

SEQ ID NO: 101740 - DNA, 80 bp, synthetic construct; identical to SEQ ID NO: 35662
  misc_feature 1..80: note = Artificially Synthesized Probe
  source 1..80: mol_type = other DNA

SEQ ID NO: 101741 - DNA, 80 bp, synthetic construct
  misc_feature 1..80: note = Artificially Synthesized Probe
  source 1..80: mol_type = other DNA
ggaaaacagggctaacatctttggctcaaagaaatatgatgagtgcaaatggagatggtagaatgggctctggggagaga

SEQ ID NO: 101742 - DNA, 80 bp, synthetic construct
  misc_feature 1..80: note = Artificially Synthesized Probe
  source 1..80: mol_type = other DNA
ctttagagatggcacttcccctcagtacactgatttaccaagaaatttgcacccacacacagtgataatgagttgaagga

SEQ ID NO: 101743 - DNA, 80 bp, synthetic construct
  misc_feature 1..80: note = Artificially Synthesized Probe
  source 1..80: mol_type = other DNA
taagcagatggaagaattcactgaattgatacttttgaccacctcttatgctcatgtggtagggtgggagtgaggagaag

SEQ ID NO: 101744 - DNA, 80 bp, synthetic construct; identical to SEQ ID NO: 35663
  misc_feature 1..80: note = Artificially Synthesized Probe
  source 1..80: mol_type = other DNA

SEQ ID NO: 101745 - DNA, 80 bp, synthetic construct
  misc_feature 1..80: note = Artificially Synthesized Probe
  source 1..80: mol_type = other DNA
gtgctgtgcagaaattcaccctataactcaacagcttaaactaaccaccgtttcccccactgcttatggttctgtggggt

SEQ ID NO: 101746 - DNA, 80 bp, synthetic construct
  misc_feature 1..80: note = Artificially Synthesized Probe
  source 1..80: mol_type = other DNA
cctctcacccttgaggaggctagtccaggcttccttacatggtgtcccgagagtagcaagggggcaaagggaaactgagg

SEQ ID NO: 101747 - DNA, 80 bp, synthetic construct
  misc_feature 1..80: note = Artificially Synthesized Probe
  source 1..80: mol_type = other DNA
ttgaaaacctagatgtattttctttatttcctattgaattcattgtggcaggatggaggcattggagcaagcagggtata

SEQ ID NO: 101748 - DNA, 80 bp, synthetic construct
  misc_feature 1..80: note = Artificially Synthesized Probe
  source 1..80: mol_type = other DNA
tgcccaggctgagcagaaggttgaggggtggcatcatctcgggatgcagatgatccactcccttttctgtgcttcaccag

SEQ ID NO: 101749 - DNA, 80 bp, synthetic construct; identical to SEQ ID NO: 35664
  misc_feature 1..80: note = Artificially Synthesized Probe
  source 1..80: mol_type = other DNA

SEQ ID NO: 101750 - DNA, 80 bp, synthetic construct
  misc_feature 1..80: note = Artificially Synthesized Probe
  source 1..80: mol_type = other DNA
tcatctagagctgatttttatttcacacctctgggtattgttctttttcctctcgagttagtttttttatccataggtga

SEQ ID NO: 101751 - DNA, 80 bp, synthetic construct
  misc_feature 1..80: note = Artificially Synthesized Probe
  source 1..80: mol_type = other DNA
gtttgcaattgtggtatatgtgtttagcagtacagatgctcaataaggcatagcaccctatgttgactcaggttatttcc

SEQ ID NO: 101752 - DNA, 80 bp, synthetic construct
  misc_feature 1..80: note = Artificially Synthesized Probe
  source 1..80: mol_type = other DNA
tctccatttgctttatttcttccatacgtagatatatctaataatatataatatgcatataagatatatctaattatatt

SEQ ID NO: 101753 - DNA, 80 bp, synthetic construct; identical to SEQ ID NO: 35665
  misc_feature 1..80: note = Artificially Synthesized Probe
  source 1..80: mol_type = other DNA

SEQ ID NO: 101754 - DNA, 80 bp, synthetic construct
  misc_feature 1..80: note = Artificially Synthesized Probe
  source 1..80: mol_type = other DNA
agctttaggaacaatggggcaattgagacaggccctgaaggatactgagggtagggagtgatgagctagtgttttttaat

SEQ ID NO: 101755 - DNA, 80 bp, synthetic construct
  misc_feature 1..80: note = Artificially Synthesized Probe
  source 1..80: mol_type = other DNA
cacatggttaaggtcgtggctgcaaaggtttttccatggtagttaccattttctctttgtaactgataactaatttgtgg

SEQ ID NO: 101756 - DNA, 80 bp, synthetic construct
  misc_feature 1..80: note = Artificially Synthesized Probe
  source 1..80: mol_type = other DNA
aaaatacaaaaattagccggatgtggaggcacatgcccagctactcaggaggctgaggcaggagaatcgcttgaacctgg

SEQ ID NO: 101757 - DNA, 80 bp, synthetic construct
  misc_feature 1..80: note = Artificially Synthesized Probe
  source 1..80: mol_type = other DNA
aaatgttgagtttctaactctctcatatttattagttggaactctaggtaaggaagggagctttcttttctcctgttttt

SEQ ID NO: 101758 - DNA, 80 bp, synthetic construct
  misc_feature 1..80: note = Artificially Synthesized Probe
  source 1..80: mol_type = other DNA
cgagtagctgggactacaggtgtgtgccaccatgcccagctaatttttgtatttttagtagagacggggtttcaccatat

SEQ ID NO: 101759 - DNA, 80 bp, synthetic construct; identical to SEQ ID NO: 35666
  misc_feature 1..80: note = Artificially Synthesized Probe
  source 1..80: mol_type = other DNA

SEQ ID NO: 101760 - DNA, 80 bp, synthetic construct
  misc_feature 1..80: note = Artificially Synthesized Probe
  source 1..80: mol_type = other DNA
aatcatgagttcatactgaaacttttaatccaacaccatgggtgcttctttgccttcccccattctgtattgtctctctt

SEQ ID NO: 101761 - DNA, 80 bp, synthetic construct
  misc_feature 1..80: note = Artificially Synthesized Probe
  source 1..80: mol_type = other DNA
agatacatggttaagctacctcaattagtaactgagtggttatcaatatgaattagtcctttttgtttgtaaaccacttt

SEQ ID NO: 101762 - DNA, 80 bp, synthetic construct; identical to SEQ ID NO: 35667
  misc_feature 1..80: note = Artificially Synthesized Probe
  source 1..80: mol_type = other DNA

SEQ ID NO: 101763 - DNA, 80 bp, synthetic construct
  misc_feature 1..80: note = Artificially Synthesized Probe
  source 1..80: mol_type = other DNA
gcatctttccactctccttcagtcaccaatcctagttgggctctgaggacttttgcagcagtctcttcactgatctctgt

SEQ ID NO: 101764 - DNA, 80 bp, synthetic construct
  misc_feature 1..80: note = Artificially Synthesized Probe
  source 1..80: mol_type = other DNA
tgcctagtgagttttctgagcccacagttcttgttttcgtgatctctgctatggtccataaaagagtacatacaagctct

SEQ ID NO: 101765 - DNA, 80 bp, synthetic construct
  misc_feature 1..80: note = Artificially Synthesized Probe
  source 1..80: mol_type = other DNA
tagcagctttacggaagccttggatggtggggaaactcccgtacagaaactcagctggtcaaagaaactcaaagccacaa

SEQ ID NO: 101766 - DNA, 80 bp, synthetic construct
  misc_feature 1..80: note = Artificially Synthesized Probe
  source 1..80: mol_type = other DNA
cttgcatgttttcagcctcaccttttcctcttttaggctagcgattgtgagtttagaacccttctggttaatttccttta

SEQ ID NO: 101767 - DNA, 80 bp, synthetic construct; identical to SEQ ID NO: 35668
  misc_feature 1..80: note = Artificially Synthesized Probe
  source 1..80: mol_type = other DNA

SEQ ID NO: 101768 - DNA, 80 bp, synthetic construct
  misc_feature 1..80: note = Artificially Synthesized Probe
  source 1..80: mol_type = other DNA
agcctgtgttctgatcatttcaaagtactaccactcagctgatgaggaaggtgagatggacttctaagggttggcctaag

SEQ ID NO: 101769 - DNA, 80 bp, synthetic construct
  misc_feature 1..80: note = Artificially Synthesized Probe
  source 1..80: mol_type = other DNA
acatccacaatacacccttctaatgcttgttagaaagtgcttttgttgcaaagttcttctagcttctttttttgaccctg

SEQ ID NO: 101770 - DNA, 80 bp, synthetic construct
  misc_feature 1..80: note = Artificially Synthesized Probe
  source 1..80: mol_type = other DNA
tgactgttttgtctttctggttccaaaggatttctggagagctatgactttacccttttagaagtattggtcctcatact

SEQ ID NO: 101771 - DNA, 80 bp, synthetic construct; identical to SEQ ID NO: 35669
  misc_feature 1..80: note = Artificially Synthesized Probe
  source 1..80: mol_type = other DNA

SEQ ID NO: 101772 - DNA, 80 bp, synthetic construct
  misc_feature 1..80: note = Artificially Synthesized Probe
  source 1..80: mol_type = other DNA
ccggcctgggcaacatggtgaaagcctgtctctactaaaaatacaaaacttagctgggcgtggtggtgggtgcctgtaat

SEQ ID NO: 101773 - DNA, 80 bp, synthetic construct
  misc_feature 1..80: note = Artificially Synthesized Probe
  source 1..80: mol_type = other DNA
cctgagtggcatcaaacctttgtttcccatgaatatactagtccctgcttgatggactgttacctgggaacaggggcaaa

SEQ ID NO: 101774 - DNA, 80 bp, synthetic construct
  misc_feature 1..80: note = Artificially Synthesized Probe
  source 1..80: mol_type = other DNA
cctgacccaagcctgaaagtgctcatctagtctcatactcttgtaaccatctagatgagctgttacagaccatccttaaa

SEQ ID NO: 101775 - DNA, 80 bp, synthetic construct; identical to SEQ ID NO: 35670
  misc_feature 1..80: note = Artificially Synthesized Probe
  source 1..80: mol_type = other DNA

SEQ ID NO: 101776 - DNA, 80 bp, synthetic construct
  misc_feature 1..80: note = Artificially Synthesized Probe
  source 1..80: mol_type = other DNA
tgctacccaggctggtctcgaactcttgagctcaagtgatccactcaccttggccttccaaagtgctgggattacaggcg

SEQ ID NO: 101777 - DNA, 80 bp, synthetic construct
  misc_feature 1..80: note = Artificially Synthesized Probe
  source 1..80: mol_type = other DNA
ctcatgcaaaactcagtttgcaagagactccctcttaaaccacagatgacttggcctacacacactccagagaaatctaa

SEQ ID NO: 101778 - DNA, 80 bp, synthetic construct; identical to SEQ ID NO: 35587
  misc_feature 1..80: note = Artificially Synthesized Probe
  source 1..80: mol_type = other DNA

SEQ ID NO: 101779 - DNA, 80 bp, synthetic construct
  misc_feature 1..80: note = Artificially Synthesized Probe
  source 1..80: mol_type = other DNA
gaaattgcaaactctctcaagagccacaggacagaaaatcatctctttaaagccatacctggtagaaacaataggatgac

SEQ ID NO: 101780 - DNA, 80 bp, synthetic construct; identical to SEQ ID NO: 35671
  misc_feature 1..80: note = Artificially Synthesized Probe
  source 1..80: mol_type = other DNA

SEQ ID NO: 101781 - DNA, 80 bp, synthetic construct
  misc_feature 1..80: note = Artificially Synthesized Probe
  source 1..80: mol_type = other DNA
aaagtgaggccccagctcccctaactggagcccaagaattgctgaattagcagagaagatatttttggtgaccaggtttt

SEQ ID NO: 101782 - DNA, 80 bp, synthetic construct
  misc_feature 1..80: note = Artificially Synthesized Probe
  source 1..80: mol_type = other DNA
atgattctgttgcagctactttaaaaaccagcccagaaacagctgtggatgaattggtttggaaattctgaggcttactt

SEQ ID NO: 101783 - DNA, 80 bp, synthetic construct
  misc_feature 1..80: note = Artificially Synthesized Probe
  source 1..80: mol_type = other DNA
actgaaatgtagctgtaattcaaggtaagcttaggaacttcaccctctaagcacagacttctatgcagcacatacttcta

SEQ ID NO: 101784 - DNA, 80 bp, synthetic construct
  misc_feature 1..80: note = Artificially Synthesized Probe
  source 1..80: mol_type = other DNA
tggcagggcatgaaataagtggtaaaaacagcaaactgataacttgagaatcattttcgttttactgagaatactttatt

SEQ ID NO: 101785 - DNA, 80 bp, synthetic construct
  misc_feature 1..80: note = Artificially Synthesized Probe
  source 1..80: mol_type = other DNA
agaggttatgcccacaataagccctttacatctgaacataatgaagatccataagcagaagaagcagtgagagctctgat

SEQ ID NO: 101786 - DNA, 80 bp, synthetic construct; identical to SEQ ID NO: 35672
  misc_feature 1..80: note = Artificially Synthesized Probe
  source 1..80: mol_type = other DNA

SEQ ID NO: 101787 - DNA, 80 bp, synthetic construct
  misc_feature 1..80: note = Artificially Synthesized Probe
  source 1..80: mol_type = other DNA
actcataggtttaataaaaatggttagcttttaaaacataaaaaggcaaaatgttaaaacggtttttaaattgtacaaca

SEQ ID NO: 101788 - DNA, 80 bp, synthetic construct
  misc_feature 1..80: note = Artificially Synthesized Probe
  source 1..80: mol_type = other DNA
gaaactggcctagccaacatggcaaaactgtctctaataaaaatacaaaaattagctgggcctggtggcacgtgcctgta

SEQ ID NO: 101789 - DNA, 80 bp, synthetic construct
  misc_feature 1..80: note = Artificially Synthesized Probe
  source 1..80: mol_type = other DNA
acagaagtgcttgactgtttgatatccatagaatctgatattagagttaattctgtgtgataggttttccttcagaactg

SEQ ID NO: 101790 - DNA, 80 bp, synthetic construct; identical to SEQ ID NO: 35588
  misc_feature 1..80: note = Artificially Synthesized Probe
  source 1..80: mol_type = other DNA

SEQ ID NO: 101791 - DNA, 80 bp, synthetic construct
  misc_feature 1..80: note = Artificially Synthesized Probe
  source 1..80: mol_type = other DNA
ttgaaaccaggcttgcccagtgtgtccgtgactggtgggtgagtctggaccgttgtgctgaacgaattaaccaacgggaa

SEQ ID NO: 101792 - DNA, 80 bp, synthetic construct
  misc_feature 1..80: note = Artificially Synthesized Probe
  source 1..80: mol_type = other DNA
caagtgatcctcctgccttggcctctcaaagtcttgggattacaggtgcgagccaccatgcccgggcaactttttttgtt

SEQ ID NO: 101793 - DNA, 80 bp, synthetic construct
  misc_feature 1..80: note = Artificially Synthesized Probe
  source 1..80: mol_type = other DNA
caccatgcgcagctaacttttttctatattttttgcagatacgggcttctgccatgtcgcccaggctggtctcagactcc

SEQ ID NO: 101794 - DNA, 80 bp, synthetic construct
  misc_feature 1..80: note = Artificially Synthesized Probe
  source 1..80: mol_type = other DNA
aaaggcatcagccagtttctcaaggactaggaagtagcgtcattctgagatctcagccatttcgataaaaaatagatata

SEQ ID NO: 101795 - DNA, 80 bp, synthetic construct
  misc_feature 1..80: note = Artificially Synthesized Probe
  source 1..80: mol_type = other DNA
ctgagacaatggggttttccagatataggatcatgtcatctgcaaacaaagataatttgatttcctctcttcctatttga

SEQ ID NO: 101796 - DNA, 80 bp, synthetic construct
  misc_feature 1..80: note = Artificially Synthesized Probe
  source 1..80: mol_type = other DNA
catatatatggctcttattattttgagatatgttccttcaatacctagtttattgagcatttttaacatgaagggatgtt

SEQ ID NO: 101797 - DNA, 80 bp, synthetic construct
  misc_feature 1..80: note = Artificially Synthesized Probe
  source 1..80: mol_type = other DNA
gatgtgctgctggatttggtttgccagtatcttattgaggatttttgcattgatgcttatcagggatatcagctggaagt

SEQ ID NO: 101798 - DNA, 80 bp, synthetic construct
  misc_feature 1..80: note = Artificially Synthesized Probe
  source 1..80: mol_type = other DNA
tgtgattgagatggcactaagtttttttatgttaagtgatttttttcttgtaagagttcgtgatcatcattatcatttgt

SEQ ID NO: 101799 - DNA, 80 bp, synthetic construct; identical to SEQ ID NO: 35780
  misc_feature 1..80: note = Artificially Synthesized Probe
  source 1..80: mol_type = other DNA

SEQ ID NO: 101800 - DNA, 80 bp, synthetic construct
  misc_feature 1..80: note = Artificially Synthesized Probe
  source 1..80: mol_type = other DNA
ctcagtgagcatttagatatttatgggagtcatataaaataaattataaatgtgactgagggctttttattaaggaaaat

SEQ ID NO: 101801 - DNA, 80 bp, synthetic construct
  misc_feature 1..80: note = Artificially Synthesized Probe
  source 1..80: mol_type = other DNA
atttaaatatgtaagcactagtccccccttacctgcagtttcactctgagcagtttcagaaaataggtgagcacagtaca

SEQ ID NO: 101802 - DNA, 80 bp, synthetic construct; identical to SEQ ID NO: 35781
  misc_feature 1..80: note = Artificially Synthesized Probe
  source 1..80: mol_type = other DNA

SEQ ID NO: 101803 - DNA, 80 bp, synthetic construct
  misc_feature 1..80: note = Artificially Synthesized Probe
  source 1..80: mol_type = other DNA
gacatatacatgcacacactttcagaaatgcacttaaatattcaatcatggagtaaaaattaattatgaaatatctagac

SEQ ID NO: 101804 - DNA, 80 bp, synthetic construct
  misc_feature 1..80: note = Artificially Synthesized Probe
  source 1..80: mol_type = other DNA
gtgtattttttttcctattttgtgctgaaaagctgaagttggcatcaaccaaggcatattgttatctatgtatcaagcta

SEQ ID NO: 101805 - DNA, 80 bp, synthetic construct
  misc_feature 1..80: note = Artificially Synthesized Probe
  source 1..80: mol_type = other DNA
acaatagtgtgtagagtgtggttccattttgtaaaatgtatcagtgtgtatatttatatagcatagtcaaaagcctggag

SEQ ID NO: 101806 - DNA, 80 bp, synthetic construct
  misc_feature 1..80: note = Artificially Synthesized Probe
  source 1..80: mol_type = other DNA
ataaatcacaggaagttcacagtctgactttatcaggaatgttgctattttcttaacaggtcatcaaacattatcactga

SEQ ID NO: 101807 - DNA, 80 bp, synthetic construct; identical to SEQ ID NO: 35782
  misc_feature 1..80: note = Artificially Synthesized Probe
  source 1..80: mol_type = other DNA

SEQ ID NO: 101808 - DNA, 80 bp, synthetic construct
  misc_feature 1..80: note = Artificially Synthesized Probe
  source 1..80: mol_type = other DNA
ctgttttaatttttatatcttaaagttatcattccagtgtctttggtttactgggtttataaaagaattgaccagtagct

SEQ ID NO: 101809 - DNA, 80 bp, synthetic construct
  misc_feature 1..80: note = Artificially Synthesized Probe
  source 1..80: mol_type = other DNA
aaaaatgcagtatatatagaattcagtattatccttggtttcggacattcagcaggggtccgaaggtgggcgaggtgagc

SEQ ID NO: 101810 - DNA, 80 bp, synthetic construct
  misc_feature 1..80: note = Artificially Synthesized Probe
  source 1..80: mol_type = other DNA
gtggaacacctaaactaaatactatataccaaaaatgacacccttctttctttactgtgaataaagacagtgtttgggac

SEQ ID NO: 101811 - DNA, 80 bp, synthetic construct; identical to SEQ ID NO: 35783
  misc_feature 1..80: note = Artificially Synthesized Probe
  source 1..80: mol_type = other DNA

SEQ ID NO: 101812 - DNA, 80 bp, synthetic construct
  misc_feature 1..80: note = Artificially Synthesized Probe
  source 1..80: mol_type = other DNA
taattcagagatgctgtataaatagaatcagtactagattttttgtttcaattctatcagccaagtataacatgcttttc

SEQ ID NO: 101813 - DNA, 80 bp, synthetic construct
  misc_feature 1..80: note = Artificially Synthesized Probe
  source 1..80: mol_type = other DNA
agaacagtgtatattaacatggctaatttagaggatttatattttacccacatgataatgtattatgcctgtaactgcta

SEQ ID NO: 101814 - DNA, 80 bp, synthetic construct
  misc_feature 1..80: note = Artificially Synthesized Probe
  source 1..80: mol_type = other DNA
tgcatcatgattttgttaagtccggctgtttattattaaaaacatgtacagaagattcaattgaagtttctaaaagagaa

SEQ ID NO: 101815 - DNA, 80 bp, synthetic construct
  misc_feature 1..80: note = Artificially Synthesized Probe
  source 1..80: mol_type = other DNA
ctggagcttctgataaattccgtcacctttttgggacccagtttcttcatcaataccaacctcattagggtcctgtgaga

SEQ ID NO: 101816 - DNA, 80 bp, synthetic construct; identical to SEQ ID NO: 35784
  misc_feature 1..80: note = Artificially Synthesized Probe
  source 1..80: mol_type = other DNA

SEQ ID NO: 101817 - DNA, 80 bp, synthetic construct
  misc_feature 1..80: note = Artificially Synthesized Probe
  source 1..80: mol_type = other DNA
atgattttagtccatggctaaaatcccaagagttacagaggagaaatagggccaaacaaggtttctattaaaataagagg

SEQ ID NO: 101818 - DNA, 80 bp, synthetic construct
  misc_feature 1..80: note = Artificially Synthesized Probe
  source 1..80: mol_type = other DNA
gcaattcttgttccaaaaatgctcaatttgctgctggactgcatggacacttgctacctccttgttttgagtcattaaca

SEQ ID NO: 101819 - DNA, 80 bp, synthetic construct
  misc_feature 1..80: note = Artificially Synthesized Probe
  source 1..80: mol_type = other DNA
atgaagaaactgggtcccaaaaaggtgatggaatttatccgaagctccaggaagcttctttttaccatggctctgtttct

SEQ ID NO: 101820 - DNA, 80 bp, synthetic construct; identical to SEQ ID NO: 35785
  misc_feature 1..80: note = Artificially Synthesized Probe
  source 1..80: mol_type = other DNA

SEQ ID NO: 101821 - DNA, 80 bp, synthetic construct; identical to SEQ ID NO: 35684
  misc_feature 1..80: note = Artificially Synthesized Probe
  source 1..80: mol_type = other DNA

SEQ ID NO: 101822 - DNA, 80 bp, synthetic construct
  misc_feature 1..80: note = Artificially Synthesized Probe
  source 1..80: mol_type = other DNA
actaaagtgcccatatgaaaaacaatcttaagtctatgtggttagtttgaagttaccagtttttaattaagccggagtag

SEQ ID NO: 101823 - DNA, 80 bp, synthetic construct
  misc_feature 1..80: note = Artificially Synthesized Probe
  source 1..80: mol_type = other DNA
ctctagtcacatctgtaagttatttcagtgccttggaagatcatttatctggccacagataattgacttacttacatcag

SEQ ID NO: 101824 - DNA, 80 bp, synthetic construct
  misc_feature 1..80: note = Artificially Synthesized Probe
  source 1..80: mol_type = other DNA
taatttttttgtattttttagtagagacggggtttcaccatgttagccaggatggtctcgatctcctaaccttggcctcg

SEQ ID NO: 101825 - DNA, 80 bp, synthetic construct; identical to SEQ ID NO: 35786
  misc_feature 1..80: note = Artificially Synthesized Probe
  source 1..80: mol_type = other DNA

SEQ ID NO: 101826 - DNA, 80 bp, synthetic construct
  misc_feature 1..80: note = Artificially Synthesized Probe
  source 1..80: mol_type = other DNA
tttcagacacctcagccaactatcaataatatattagttttttagaactaaaaatgtagaggatctccccctaaaagcca

SEQ ID NO: 101827 - DNA, 80 bp, synthetic construct
  misc_feature 1..80: note = Artificially Synthesized Probe
  source 1..80: mol_type = other DNA
tggggatgcatgaagatcaggaatcctattcgtttttaacaagatggaatttttaaaaactactttggacaactctaaac

SEQ ID NO: 101828 - DNA, 80 bp, synthetic construct
  misc_feature 1..80: note = Artificially Synthesized Probe
  source 1..80: mol_type = other DNA
aacctcctctccataagatatgctctatccctatataggaaatttttctgtagcagcttgagtttactaaaaataagatc

SEQ ID NO: 101829 - DNA, 80 bp, synthetic construct; identical to SEQ ID NO: 35787
  misc_feature 1..80: note = Artificially Synthesized Probe
  source 1..80: mol_type = other DNA

SEQ ID NO: 101830 - DNA, 80 bp, synthetic construct
  misc_feature 1..80: note = Artificially Synthesized Probe
  source 1..80: mol_type = other DNA
attacagcatgtttaggaactaacttcatactctgttgctaaagtatttctgtgttttctaaaaaggtaaatctcttgtg

SEQ ID NO: 101831 - DNA, 80 bp, synthetic construct
  misc_feature 1..80: note = Artificially Synthesized Probe
  source 1..80: mol_type = other DNA
gttgatttcctatatggcatagttaaatgtgtttatccgtgtttgatatctaaagggccatgctacatatagactgccaa

SEQ ID NO: 101832 - DNA, 80 bp, synthetic construct
  misc_feature 1..80: note = Artificially Synthesized Probe
  source 1..80: mol_type = other DNA
attaaaatgagtaaagtgaagcttaggctaagtaacatgtccatagccaaacagttagtcactggcaggagtgtgactga

SEQ ID NO: 101833 - DNA, 80 bp, synthetic construct
  misc_feature 1..80: note = Artificially Synthesized Probe
  source 1..80: mol_type = other DNA
atatcagtggatgacgtgcactagtaagacattaaactatgcactctaatacttatatgactaacaggacatacaggcag

SEQ ID NO: 101834 - DNA, 80 bp, synthetic construct; identical to SEQ ID NO: 35674
  misc_feature 1..80: note = Artificially Synthesized Probe
  source 1..80: mol_type = other DNA

SEQ ID NO: 101835 - DNA, 80 bp, synthetic construct; identical to SEQ ID NO: 35788
  misc_feature 1..80: note = Artificially Synthesized Probe
  source 1..80: mol_type = other DNA

SEQ ID NO: 101836 - DNA, 80 bp, synthetic construct
  misc_feature 1..80: note = Artificially Synthesized Probe
  source 1..80: mol_type = other DNA
gaaaggagagtcctggtttttctcccaagacatgacatttgggggcttccattaaaaaattaccaagcctctgccactgt

SEQ ID NO: 101837 - DNA, 80 bp, synthetic construct
  misc_feature 1..80: note = Artificially Synthesized Probe
  source 1..80: mol_type = other DNA
cttgattccacttataagccatttattttcagaaacaagtaatgggtgaggacacaggccaggtccacaatttgtgcact

SEQ ID NO: 101838 - DNA, 80 bp, synthetic construct
  misc_feature 1..80: note = Artificially Synthesized Probe
  source 1..80: mol_type = other DNA
ggaatagattttgatgaaaattgcttcctactctgtacccttgaggaaacaaagaggacaaataagaagcagcagtgata

SEQ ID NO: 101839 - DNA, 80 bp, synthetic construct; identical to SEQ ID NO: 35789
  misc_feature 1..80: note = Artificially Synthesized Probe
  source 1..80: mol_type = other DNA

SEQ ID NO: 101840 - DNA, 80 bp, synthetic construct
  misc_feature 1..80: note = Artificially Synthesized Probe
  source 1..80: mol_type = other DNA
tttcctctgatccttctaccttctcttttactgaagtgaatttgttgtctctgtgttgcctctatagcagtacaagagga

SEQ ID NO: 101841 - DNA, 80 bp, synthetic construct
  misc_feature 1..80: note = Artificially Synthesized Probe
  source 1..80: mol_type = other DNA
tggaatccaaattccagcctggcttaggagatcaacagtaacgctcttgatttaatggttttgcagactcttgaagacat

SEQ ID NO: 101842 - DNA, 80 bp, synthetic construct; identical to SEQ ID NO: 35790
  misc_feature 1..80: note = Artificially Synthesized Probe
  source 1..80: mol_type = other DNA

SEQ ID NO: 101843 - DNA, 80 bp, synthetic construct
  misc_feature 1..80: note = Artificially Synthesized Probe
  source 1..80: mol_type = other DNA
taggagttgagcactttctgcagtacttaagagtgtccagggaagatgtgggagtcaggtgaatagttcccatcgccagt

SEQ ID NO: 101844 - DNA, 80 bp, synthetic construct
  misc_feature 1..80: note = Artificially Synthesized Probe
  source 1..80: mol_type = other DNA
ttcccagactaatctccttaaagacccgttaagcaggggagagacggtggagactggatgaactggacagtgggggtagg

SEQ ID NO: 101845 - DNA, 80 bp, synthetic construct
  misc_feature 1..80: note = Artificially Synthesized Probe
  source 1..80: mol_type = other DNA
cataatctcttcactaggggctggttgagatggtgacatctgaaatatcacagccaaaatgcaaaagatgggtcattgat

SEQ ID NO: 101846 - DNA, 80 bp, synthetic construct
  misc_feature 1..80: note = Artificially Synthesized Probe
  source 1..80: mol_type = other DNA
cctccccctctgtcttcccttctgtttccttttccctccccctggagctgtagcggcagcagcagcaggaagccgagccg

SEQ ID NO: 101847 - DNA, 80 bp, synthetic construct
  misc_feature 1..80: note = Artificially Synthesized Probe
  source 1..80: mol_type = other DNA
cggggcccgggcgtggggcacggctggggaagctgccgcctccggccctgcccggctgcctccgccgcggccagtggcta

SEQ ID NO: 101848 - DNA, 80 bp, synthetic construct; identical to SEQ ID NO: 35791
  misc_feature 1..80: note = Artificially Synthesized Probe
  source 1..80: mol_type = other DNA

SEQ ID NO: 101849 - DNA, 80 bp, synthetic construct
  misc_feature 1..80: note = Artificially Synthesized Probe
  source 1..80: mol_type = other DNA
tgaggtggaaatattggacatcaacgacaactcaccgcgtttcccgcggcccaactaccagcttcaggtaagcgaatcgg

SEQ ID NO: 101850 - DNA, 80 bp, synthetic construct
  misc_feature 1..80: note = Artificially Synthesized Probe
  source 1..80: mol_type = other DNA
cctagaccgggagcaggcagccttgcaccacctggttctcacagccgtggatgggggcatcccagcccgctcgggtacgg

SEQ ID NO: 101851 - DNA, 80 bp, synthetic construct
  misc_feature 1..80: note = Artificially Synthesized Probe
  source 1..80: mol_type = other DNA
ctccttgagcagctacacgtcggaccgggagaggcagctcttcagcatagatgccagtaccggggaagtgcgagtaattg

SEQ ID NO: 101852 - DNA, 80 bp, synthetic construct
  misc_feature 1..80: note = Artificially Synthesized Probe
  source 1..80: mol_type = other DNA
gcctgagaatgctacacccaacaccattgtggccgttctcagtgtcaatgaccaagactcaggccccaaccggaaagtga

SEQ ID NO: 101853 - DNA, 80 bp, synthetic construct; identical to SEQ ID NO: 35792
  misc_feature 1..80: note = Artificially Synthesized Probe
  source 1..80: mol_type = other DNA

SEQ ID NO: 101854 - DNA, 80 bp, synthetic construct
  misc_feature 1..80: note = Artificially Synthesized Probe
  source 1..80: mol_type = other DNA
atgtctccattaacagtgccagtggcagcctttatgctgtcaactcctttgactatgagaagtttcgggagttctttgtg

SEQ ID NO: 101855 - DNA, 80 bp, synthetic construct
  misc_feature 1..80: note = Artificially Synthesized Probe
  source 1..80: mol_type = other DNA
gctacctggtcaccaaagtcatagctatggactcagactctgggcaaaatgcttggcttttttaccatctagcccagact

SEQ ID NO: 101856 - DNA, 80 bp, synthetic construct; identical to SEQ ID NO: 35685
  misc_feature 1..80: note = Artificially Synthesized Probe
  source 1..80: mol_type = other DNA

SEQ ID NO: 101857 - DNA, 80 bp, synthetic construct; identical to SEQ ID NO: 35793
  misc_feature 1..80: note = Artificially Synthesized Probe
  source 1..80: mol_type = other DNA

SEQ ID NO: 101858 - DNA, 80 bp, synthetic construct
  misc_feature 1..80: note = Artificially Synthesized Probe
  source 1..80: mol_type = other DNA
gtaagggaaaggtcccctgcagaactgtacaaacaagccaacaacaatattgatgccaggataccgcatggcctcaaagt

SEQ ID NO: 101859 - DNA, 80 bp, synthetic construct
  misc_feature 1..80: note = Artificially Synthesized Probe
  source 1..80: mol_type = other DNA
gacagcaggaatctcacaggccaaagtggtcagaatgctgggaacctgattattctcaaaaatgaggctgtttctcaaaa

SEQ ID NO: 101860 - DNA, 80 bp, synthetic construct
  misc_feature 1..80: note = Artificially Synthesized Probe
  source 1..80: mol_type = other DNA
gcatttgttacacatcccccaatatcctgtgatttggctttattgagtcattaacagtgacaagagttatctggtaaact

SEQ ID NO: 101861 - DNA, 80 bp, synthetic construct; identical to SEQ ID NO: 35794
  misc_feature 1..80: note = Artificially Synthesized Probe
  source 1..80: mol_type = other DNA

SEQ ID NO: 101862 - DNA, 80 bp, synthetic construct
  misc_feature 1..80: note = Artificially Synthesized Probe
  source 1..80: mol_type = other DNA
tatttctggtacttgcactgaacctatgtgataggatcctctggaaatgcatgtcacaagtgataaagctgtagtattta

SEQ ID NO: 101863 - DNA, 80 bp, synthetic construct
  misc_feature 1..80: note = Artificially Synthesized Probe
  source 1..80: mol_type = other DNA
ggggatggtgaagaccaagagaagctgggattagaaggaagagaagggaaaaagaattctcccaatagtcacctttcttg

SEQ ID NO: 101864 - DNA, 80 bp, synthetic construct
  misc_feature 1..80: note = Artificially Synthesized Probe
  source 1..80: mol_type = other DNA
gcatgcattcattttctggatctaaaatttgatttgctatagcttcaaaaggctggcttggaaagtggatggcttaccct

SEQ ID NO: 101865 - DNA, 80 bp, synthetic construct; identical to SEQ ID NO: 35795
  misc_feature 1..80: note = Artificially Synthesized Probe
  source 1..80: mol_type = other DNA

SEQ ID NO: 101866 - DNA, 80 bp, synthetic construct
  misc_feature 1..80: note = Artificially Synthesized Probe
  source 1..80: mol_type = other DNA
gtacatacatattgtatgtaatatccatattgttacatttcaagttcatggtaatcttgaggaatgtaatgcacaggcac

SEQ ID NO: 101867 - DNA, 80 bp, synthetic construct
  misc_feature 1..80: note = Artificially Synthesized Probe
  source 1..80: mol_type = other DNA
attaagaaaaatgggggaataaatcaaagagtttccagaagtctttagatcgtagcatttgaaagcacgtaaaagggttt

SEQ ID NO: 101868 - DNA, 80 bp, synthetic construct
  misc_feature 1..80: note = Artificially Synthesized Probe
  source 1..80: mol_type = other DNA
ttaattttttaatacagaattttgcatttacctgaattagagttctagtgttatgacaacattgggaaaagagtaaatat

SEQ ID NO: 101869 - DNA, 80 bp, synthetic construct
  misc_feature 1..80: note = Artificially Synthesized Probe
  source 1..80: mol_type = other DNA
ccctccctctcctgactcaaagcttggggcaatttgatacataaactatttctgtcttacactgacctgtatattaatat

SEQ ID NO: 101870 - DNA, 80 bp, synthetic construct; identical to SEQ ID NO: 35796
  misc_feature 1..80: note = Artificially Synthesized Probe
  source 1..80: mol_type = other DNA

SEQ ID NO: 101871 - DNA, 80 bp, synthetic construct
  misc_feature 1..80: note = Artificially Synthesized Probe
  source 1..80: mol_type = other DNA
gagtcctggggtacaattagtaccatgtgcctacattaaaagtagatgggaattagagaggaagagtaagggaatttgta

SEQ ID NO: 101872 - DNA, 80 bp, synthetic construct
  misc_feature 1..80: note = Artificially Synthesized Probe
  source 1..80: mol_type = other DNA
aaatatttgttaacatctagcatatgaggaaataagctcagggaggttaggtaatctacacagccacactgctagtgtta

SEQ ID NO: 101873 - DNA, 80 bp, synthetic construct
  misc_feature 1..80: note = Artificially Synthesized Probe
  source 1..80: mol_type = other DNA
acctagtcgtatatattaactgcttttggaaaaagagtaatttctggcatagaagcaggtaacaaatgggaatatcagtg

SEQ ID NO: 101874 - DNA, 80 bp, synthetic construct; identical to SEQ ID NO: 35797
  misc_feature 1..80: note = Artificially Synthesized Probe
  source 1..80: mol_type = other DNA

SEQ ID NO: 101875 - DNA, 80 bp, synthetic construct
  misc_feature 1..80: note = Artificially Synthesized Probe
  source 1..80: mol_type = other DNA
ctaatctgttggtagattttacccccagtgagcttatttcataaatcacttgtgcagtgaggattctgaagtaactattt

SEQ ID NO: 101876 - DNA, 80 bp, synthetic construct
  misc_feature 1..80: note = Artificially Synthesized Probe
  source 1..80: mol_type = other DNA
atcccggctcactgcaacctccgcctcccaagttaaagtgattcttctgcctcagcctcctgagtagctgagattacagg

SEQ ID NO: 101877 - DNA, 80 bp, synthetic construct
  misc_feature 1..80: note = Artificially Synthesized Probe
  source 1..80: mol_type = other DNA
accaaatcttaaggtagattctgtgcatttgtggtcgtggtgttgtgattgttaatgagtcactttgagtactctagtag

SEQ ID NO: 101878 - DNA, 80 bp, synthetic construct; identical to SEQ ID NO: 35798
  misc_feature 1..80: note = Artificially Synthesized Probe
  source 1..80: mol_type = other DNA

SEQ ID NO: 101879 - DNA, 80 bp, synthetic construct
  misc_feature 1..80: note = Artificially Synthesized Probe
  source 1..80: mol_type = other DNA
ccactccagtttttcatcctctgatggtcactttataatgactggggctgttttagtttgcaaatttcatattggtcaca

SEQ ID NO: 101880 - DNA, 80 bp, synthetic construct
  misc_feature 1..80: note = Artificially Synthesized Probe
  source 1..80: mol_type = other DNA
tctaaatcactttctactctaaaattttgttgcatcttctttttttcctcctaaatcctaagggtatatgaaaagacaaa

SEQ ID NO: 101881 - DNA, 80 bp, synthetic construct
  misc_feature 1..80: note = Artificially Synthesized Probe
  source 1..80: mol_type = other DNA
aagaaatctatttattgtagcttgaatgtcattggcctactgtttccttctgacccaggagtgagccatcacatgggcat

SEQ ID NO: 101882 - DNA, 80 bp, synthetic construct
  misc_feature 1..80: note = Artificially Synthesized Probe
  source 1..80: mol_type = other DNA
gcaaatgtttgaggaaacattcctgtcaccaaacccagaggtttagctgaatatgatggcattttacaggtgtctttaaa

SEQ ID NO: 101883 - DNA, 80 bp, synthetic construct; identical to SEQ ID NO: 35799
  misc_feature 1..80: note = Artificially Synthesized Probe
  source 1..80: mol_type = other DNA

SEQ ID NO: 101884 - DNA, 80 bp, synthetic construct
  misc_feature 1..80: note = Artificially Synthesized Probe
  source 1..80: mol_type = other DNA
ttctgttgtactggaacccattaggtatgttctaaagttatgtttattttactttcctggtttgtaaattagcattttaa

SEQ ID NO: 101885 - DNA, 80 bp, synthetic construct
  misc_feature 1..80: note = Artificially Synthesized Probe
  source 1..80: mol_type = other DNA
ttcaagcgattctcctgcctcaacctcccgagtagctgagattacaggcatgcgccaccatgcctggctaattttgtatt

SEQ ID NO: 101886 - DNA, 80 bp, synthetic construct
  misc_feature 1..80: note = Artificially Synthesized Probe
  source 1..80: mol_type = other DNA
cccttttgccttaatgcggaacagtctatgtatcccttttctgatgatttgtaacaaattaccacaagtaagttgtttaa

SEQ ID NO: 101887 - DNA, 80 bp, synthetic construct
  misc_feature 1..80: note = Artificially Synthesized Probe
  source 1..80: mol_type = other DNA
gttgtttggggactgagatctctgttttcctacttactattggcctggggtcactctcagttcctagagaactgaggact

SEQ ID NO: 101888 - DNA, 80 bp, synthetic construct; identical to SEQ ID NO: 35800
  misc_feature 1..80: note = Artificially Synthesized Probe
  source 1..80: mol_type = other DNA

SEQ ID NO: 101889 - DNA, 80 bp, synthetic construct
  misc_feature 1..80: note = Artificially Synthesized Probe
  source 1..80: mol_type = other DNA
tatgcagtctcatgtcccagagggcaatttgttgatgtcttccacatggatttccatggtacgaagatagcatattattt

SEQ ID NO: 101890 - DNA, 80 bp, synthetic construct
  misc_feature 1..80: note = Artificially Synthesized Probe
  source 1..80: mol_type = other DNA
ttaataggaactgaagtgtattcttattcttcagtaatactacatcacccatatggactacctaattgattttttccaca

SEQ ID NO: 101891 - DNA, 80 bp, synthetic construct
  misc_feature 1..80: note = Artificially Synthesized Probe
  source 1..80: mol_type = other DNA
tcaggtacttacagaaggtataattaaaaatcacttcccttgttttccatgaacttctgctcccaaacccaaaattcttt

SEQ ID NO: 101892 - DNA, 80 bp, synthetic construct; identical to SEQ ID NO: 35801
  misc_feature 1..80: note = Artificially Synthesized Probe
  source 1..80: mol_type = other DNA

SEQ ID NO: 101893 - DNA, 80 bp, synthetic construct
  misc_feature 1..80: note = Artificially Synthesized Probe
  source 1..80: mol_type = other DNA
gaccgctgattcgtcgatttgtaaaacaagagaaggataagatggtttccagatgtagctgcctgggggtccagtgtctg

SEQ ID NO: 101894 - DNA, 80 bp, synthetic construct
  misc_feature 1..80: note = Artificially Synthesized Probe
  source 1..80: mol_type = other DNA
ttatttaaaacacagacttttggcaaggcacagtggctcaagcctgtaatcccagcactttgggaggccgaggagggtgg

SEQ ID NO: 101895 - DNA, 80 bp, synthetic construct
  misc_feature 1..80: note = Artificially Synthesized Probe
  source 1..80: mol_type = other DNA
ttgcagggagccaagatcgcgccactgcacaccagcctaaatgacagagtaagaccctatctcataaataaataaataaa

SEQ ID NO: 101896 - DNA, 80 bp, synthetic construct
  misc_feature 1..80: note = Artificially Synthesized Probe
  source 1..80: mol_type = other DNA
aacacattttaaaaacctcccagatgccagaagcctgctagactctgactatatagctacgcttttatgaatatctgaag

SEQ ID NO: 101897 - DNA, 80 bp, synthetic construct; identical to SEQ ID NO: 35802
  misc_feature 1..80: note = Artificially Synthesized Probe
  source 1..80: mol_type = other DNA

SEQ ID NO: 101898 - DNA, 80 bp, synthetic construct
  misc_feature 1..80: note = Artificially Synthesized Probe
  source 1..80: mol_type = other DNA
tcatcatgaatgttacccaatcatagaaaaattggcaacatttctcagcagatgttacagtctttctcaaaggaaggttc

SEQ ID NO: 101899 - DNA, 80 bp, synthetic construct
  misc_feature 1..80: note = Artificially Synthesized Probe
  source 1..80: mol_type = other DNA
ttcttttgttccctctaacaccgctagtagataatggaaactcctttgatttggtctgtagataattttatgctatgtta

SEQ ID NO: 101900 - DNA, 80 bp, synthetic construct
  misc_feature 1..80: note = Artificially Synthesized Probe
  source 1..80: mol_type = other DNA
tttggctaattctctgcatgccaaatatcatgtagccatccagaaatctgtctgaatattgagatggtgatcatttctct

SEQ ID NO: 101901 - DNA, 80 bp, synthetic construct
  misc_feature 1..80: note = Artificially Synthesized Probe
  source 1..80: mol_type = other DNA
acaaaatacaacttttatcccccatttttttcattcaactatacctcaatattcagtgacagggccacctcaatctccgc

SEQ ID NO: 101902 - DNA, 80 bp, synthetic construct; identical to SEQ ID NO: 35803
  misc_feature 1..80: note = Artificially Synthesized Probe
  source 1..80: mol_type = other DNA

SEQ ID NO: 101903 - DNA, 80 bp, synthetic construct
  misc_feature 1..80: note = Artificially Synthesized Probe
  source 1..80: mol_type = other DNA
ctgtcatatcattgattctgttacataaagtgctaaattttgatatctcatattatgctactatggcttacattagaaat

SEQ ID NO: 101904 - DNA, 80 bp, synthetic construct
  misc_feature 1..80: note = Artificially Synthesized Probe
  source 1..80: mol_type = other DNA
caatagtttgttttcctctccctagtatccctcttcaatcagaaaagagactgttatcagttgctggtgttatgactggg

SEQ ID NO: 101905 - DNA, 80 bp, synthetic construct
  misc_feature 1..80: note = Artificially Synthesized Probe
  source 1..80: mol_type = other DNA
aaagcagtgaaagcttttcctttctcaaagcagactgttcttcccgtagtgttttaagaacacagacatgtattgggcaa

SEQ ID NO: 101906 - DNA, 80 bp, synthetic construct
  misc_feature 1..80: note = Artificially Synthesized Probe
  source 1..80: mol_type = other DNA
atgcctggaaatatttaagggagtaactaatcaattagcagcattcctgggagaacattgtcttgtcattttaacagaaa

SEQ ID NO: 101907 - DNA, 80 bp, synthetic construct; identical to SEQ ID NO: 35804
  misc_feature 1..80: note = Artificially Synthesized Probe
  source 1..80: mol_type = other DNA

SEQ ID NO: 101908 - DNA, 80 bp, synthetic construct
  misc_feature 1..80: note = Artificially Synthesized Probe
  source 1..80: mol_type = other DNA
atgtattttctcccatcaaaatttctacagggaagtaatttcaacctccttcatccctctctacctatgctttcttttcc

SEQ ID NO: 101909 - DNA, 80 bp, synthetic construct
  misc_feature 1..80: note = Artificially Synthesized Probe
  source 1..80: mol_type = other DNA
ccctcaataattgattgctattgttgtttgtgttcacacctattagagcctcctcatctttcccatctgttgctatctta

SEQ ID NO: 101910 - DNA, 80 bp, synthetic construct; identical to SEQ ID NO: 35805
  misc_feature 1..80: note = Artificially Synthesized Probe
  source 1..80: mol_type = other DNA

SEQ ID NO: 101911 - DNA, 80 bp, synthetic construct
  misc_feature 1..80: note = Artificially Synthesized Probe
  source 1..80: mol_type = other DNA
agcccctcaaaatatctgggcaactatcaagtgaatattcaccaaacttagatcagttcgtaaagagaaagcctacaaag

SEQ ID NO: 101912 - DNA, 80 bp, synthetic construct
  misc_feature 1..80: note = Artificially Synthesized Probe
  source 1..80: mol_type = other DNA
attcagaagcaatcagtgaagggctgaagattagtagttggcttggtaagatgtcacattggaacctgggtcataatttt

SEQ ID NO: 101913 - DNA, 80 bp, synthetic construct
  misc_feature 1..80: note = Artificially Synthesized Probe
  source 1..80: mol_type = other DNA
aaagctatgagttgtgccttaaaaactacatttgaaataaaacattaaaacataacttcctggactgggcgcggtggctc

SEQ ID NO: 101914 - DNA, 80 bp, synthetic construct
  misc_feature 1..80: note = Artificially Synthesized Probe
  source 1..80: mol_type = other DNA
ggcgtgatggcatgtgcctgtagttccagctactagggaggctgaggcaggagaatcgcttgaacccgggaggcggaagt

SEQ ID NO: 101915 - DNA, 80 bp, synthetic construct; identical to SEQ ID NO: 35806
  misc_feature 1..80: note = Artificially Synthesized Probe
  source 1..80: mol_type = other DNA

SEQ ID NO: 101916 - DNA, 80 bp, synthetic construct; identical to SEQ ID NO: 35686
  misc_feature 1..80: note = Artificially Synthesized Probe
  source 1..80: mol_type = other DNA

SEQ ID NO: 101917 - DNA, 80 bp, synthetic construct
  misc_feature 1..80: note = Artificially Synthesized Probe
  source 1..80: mol_type = other DNA
gtcttggacatcatgtaactattctttaaaaaattctgctttgagctgagctggctccaggatagttacaccttcatgaa

SEQ ID NO: 101918 - DNA, 80 bp, synthetic construct
  misc_feature 1..80: note = Artificially Synthesized Probe
  source 1..80: mol_type = other DNA
gtcaaagagtgagaaaacattgaacttatatgttgccttccctctaatagttcaagtttgcctgctctgttgcctcatat

SEQ ID NO: 101919 - DNA, 80 bp, synthetic construct
  misc_feature 1..80: note = Artificially Synthesized Probe
  source 1..80: mol_type = other DNA
gttcaagaccagcctggtcaatatggtgaaaacctgtctctactaaaaatacaaaaatgagccaggcatggtggcgggtg

SEQ ID NO: 101920 - DNA, 80 bp, synthetic construct; identical to SEQ ID NO: 35807
  misc_feature 1..80: note = Artificially Synthesized Probe
  source 1..80: mol_type = other DNA

SEQ ID NO: 101921 - DNA, 80 bp, synthetic construct
  misc_feature 1..80: note = Artificially Synthesized Probe
  source 1..80: mol_type = other DNA
ctcactcccagcaatgttttatgctgaattaatctcttctgagcggggatctgtgagtggtggtgatcaagtttctctag

SEQ ID NO: 101922 - DNA, 80 bp, synthetic construct
  misc_feature 1..80: note = Artificially Synthesized Probe
  source 1..80: mol_type = other DNA
acaagagaacctgcaagagaggcttggaacttttgagaacaagccctcctcatctgcttcagtatcgagatgttaaaatg

SEQ ID NO: 101923 - DNA, 80 bp, synthetic construct
  misc_feature 1..80: note = Artificially Synthesized Probe
  source 1..80: mol_type = other DNA
tcagcagtaattgcttcagttcaagcatgagcagaatgtgttagctgcagccctggcttcatagttgtaagcaatttctg

SEQ ID NO: 101924 - DNA, 80 bp, synthetic construct; identical to SEQ ID NO: 35808
  misc_feature 1..80: note = Artificially Synthesized Probe
  source 1..80: mol_type = other DNA

SEQ ID NO: 101925 - DNA, 80 bp, synthetic construct
  misc_feature 1..80: note = Artificially Synthesized Probe
  source 1..80: mol_type = other DNA
aacactttcaggaaatgtttaaccctagtttttcatgaggccaccttaacaactgaattctctttctctctcactctgtg

SEQ ID NO: 101926 - DNA, 80 bp, synthetic construct
  misc_feature 1..80: note = Artificially Synthesized Probe
  source 1..80: mol_type = other DNA
tgtatgaagtttttggggtttgtttgtttgtttaaatcaggtacctttcaaatgcttaggtcatccaagccatgcagaga

SEQ ID NO: 101927 - DNA, 80 bp, synthetic construct
  misc_feature 1..80: note = Artificially Synthesized Probe
  source 1..80: mol_type = other DNA
attatcggaaccaaggcattgttttgagttcaagtcaaagtcaatctgcttctctctgcacatcaacaacattctgcaga

SEQ ID NO: 101928 - DNA, 80 bp, synthetic construct
  misc_feature 1..80: note = Artificially Synthesized Probe
  source 1..80: mol_type = other DNA
ttgtgtaaaaaacctaatggctgggtgagtataggaaaattgcttaaactcacatttgcttggtatccttattcttgccc

SEQ ID NO: 101929 - DNA, 80 bp, synthetic construct; identical to SEQ ID NO: 35809
  misc_feature 1..80: note = Artificially Synthesized Probe
  source 1..80: mol_type = other DNA

SEQ ID NO: 101930 - DNA, 80 bp, synthetic construct
  misc_feature 1..80: note = Artificially Synthesized Probe
  source 1..80: mol_type = other DNA
tgtaagtggcagagggtaggattcaaacccagatgtgtttagtttcaaatccaagtatatctagcacttatattcataac

SEQ ID NO: 101931 - DNA, 80 bp, synthetic construct
  misc_feature 1..80: note = Artificially Synthesized Probe
  source 1..80: mol_type = other DNA
gtaacatgcagctaagggcccatttttactggcaactttaagggcattcgttgattctaatcagccaggatttgctattt

SEQ ID NO: 101932 - DNA, 80 bp, synthetic construct
  misc_feature 1..80: note = Artificially Synthesized Probe
  source 1..80: mol_type = other DNA
acaaatctgtaccctcagtgccaacgatggagtgaagaaatgatggaggaggaagtggttttagactgccaagtgttgca

SEQ ID NO: 101933 - DNA, 80 bp, synthetic construct; identical to SEQ ID NO: 35810
  misc_feature 1..80: note = Artificially Synthesized Probe
  source 1..80: mol_type = other DNA

SEQ ID NO: 101934 - DNA, 80 bp, synthetic construct
  misc_feature 1..80: note = Artificially Synthesized Probe
  source 1..80: mol_type = other DNA
tggactgtgctggatagagcttacatcttccaactactccatggcaacctaatcatacttttcaatacatacctctgcat

SEQ ID NO: 101935 - DNA, 80 bp, synthetic construct
  misc_feature 1..80: note = Artificially Synthesized Probe
  source 1..80: mol_type = other DNA
gcttacttgctgggtgagcatagacaaactgcctgaattcatattttcttaattaccctttctgtaaattgggtgtagta

SEQ ID NO: 101936 - DNA, 80 bp, synthetic construct
  misc_feature 1..80: note = Artificially Synthesized Probe
  source 1..80: mol_type = other DNA
gctcacagcaacctctgcctcctgggttcaagtgattctcctgcctcagcctcctgagtagctgagactacaggcgtgtg

SEQ ID NO: 101937 - DNA, 80 bp, synthetic construct
  misc_feature 1..80: note = Artificially Synthesized Probe
  source 1..80: mol_type = other DNA
tggaaatatttgggggaagaaacccaaaacacgtgaaattctgtggtggtaaatgcagtgcacagtactcacagttttag

SEQ ID NO: 101938 - DNA, 80 bp, synthetic construct; identical to SEQ ID NO: 35811
  misc_feature 1..80: note = Artificially Synthesized Probe
  source 1..80: mol_type = other DNA

SEQ ID NO: 101939 - DNA, 80 bp, synthetic construct
  misc_feature 1..80: note = Artificially Synthesized Probe
  source 1..80: mol_type = other DNA
agggaaatgctccaaaaaatttggttgtttccagactcaaatagagcctgcctttcattgattctgttgcccttaaagct

SEQ ID NO: 101940 - DNA, 80 bp, synthetic construct
  misc_feature 1..80: note = Artificially Synthesized Probe
  source 1..80: mol_type = other DNA
caatggctgaataaaggaagtggggcctgccttacgctaatcctcgttcatatgtgtttcttaaagttatttttccttca

SEQ ID NO: 101941 - DNA, 80 bp, synthetic construct
  misc_feature 1..80: note = Artificially Synthesized Probe
  source 1..80: mol_type = other DNA
cgccaccactcccgtctaattttttgtatttttagtagagccggggtttcactgtgttagccaggatggtctcaatctcc

SEQ ID NO: 101942 - DNA, 80 bp, synthetic construct; identical to SEQ ID NO: 35812
  misc_feature 1..80: note = Artificially Synthesized Probe
  source 1..80: mol_type = other DNA

SEQ ID NO: 101943 - DNA, 80 bp, synthetic construct
  misc_feature 1..80: note = Artificially Synthesized Probe
  source 1..80: mol_type = other DNA
tttggggggagggacattaaagggccagtcgctcatgttacagctctttttaacttcatgagtactaatgccctgaagag

SEQ ID NO: 101944 - DNA, 80 bp, synthetic construct
  misc_feature 1..80: note = Artificially Synthesized Probe
  source 1..80: mol_type = other DNA
attggtttttccagctcctctttctacatttcaagggatctcaggccttacctaaggcaacagtacattagttttagagt

SEQ ID NO: 101945 - DNA, 80 bp, synthetic construct; identical to SEQ ID NO: 35813
  misc_feature 1..80: note = Artificially Synthesized Probe
  source 1..80: mol_type = other DNA

SEQ ID NO: 101946 - DNA, 80 bp, synthetic construct
  misc_feature 1..80: note = Artificially Synthesized Probe
  source 1..80: mol_type = other DNA
gttcgagaccagcctggtcaacatggcgaaaccccatctctactaaagttacaaaaatgagctgggcgtggtggcaggtg

SEQ ID NO: 101947 - DNA, 80 bp, synthetic construct
  misc_feature 1..80: note = Artificially Synthesized Probe
  source 1..80: mol_type = other DNA
acattctcaggaatgggacccggcagtctatgttttaacaagccttctatgtgataccaatgtactgtgaagttttaaga

SEQ ID NO: 101948 - DNA, 80 bp, synthetic construct
  misc_feature 1..80: note = Artificially Synthesized Probe
  source 1..80: mol_type = other DNA
tttctgaattctacctctgccactcagtaattgtatgttcctgggaccattacttaactttcctgattctcagtttcttt

SEQ ID NO: 101949 - DNA, 80 bp, synthetic construct; identical to SEQ ID NO: 35687
  misc_feature 1..80: note = Artificially Synthesized Probe
  source 1..80: mol_type = other DNA

SEQ ID NO: 101950 - DNA, 80 bp, synthetic construct
  misc_feature 1..80: note = Artificially Synthesized Probe
  source 1..80: mol_type = other DNA
ttcaaaatttagacccaggttgttctgagtattctctgtgggaagaatctgctatagagaagatttttttaaagtgcctg

SEQ ID NO: 101951 - DNA, 80 bp, synthetic construct
  misc_feature 1..80: note = Artificially Synthesized Probe
  source 1..80: mol_type = other DNA
ctctgacgcctcacgttccgttcaagctggtgtccacctacaagaattactactcattggtgctggacagcgctctggac

SEQ ID NO: 101952 - DNA, 80 bp, synthetic construct; identical to SEQ ID NO: 35814
  misc_feature 1..80: note = Artificially Synthesized Probe
  source 1..80: mol_type = other DNA

SEQ ID NO: 101953 - DNA, 80 bp, synthetic construct
  misc_feature 1..80: note = Artificially Synthesized Probe
  source 1..80: mol_type = other DNA
aatgacagtcctgggaggtgtgtgcatatccttattaggaaaaaaaaatgagatcagggatctatgtgagtggggcagct

SEQ ID NO: 101954 - DNA, 80 bp, synthetic construct
  misc_feature 1..80: note = Artificially Synthesized Probe
  source 1..80: mol_type = other DNA
cttatgtaaagaatttgtttgttttggattgacctgaagggaggaagcaagggtgtgggaaggggaattagcatccccta

SEQ ID NO: 101955 - DNA, 80 bp, synthetic construct
  misc_feature 1..80: note = Artificially Synthesized Probe
  source 1..80: mol_type = other DNA
tttttgtttatgaatagactctaagataattctttccctagacgctctgtattttcttggacctctcatttgccccatag

SEQ ID NO: 101956 - DNA, 80 bp, synthetic construct; identical to SEQ ID NO: 35815
  misc_feature 1..80: note = Artificially Synthesized Probe
  source 1..80: mol_type = other DNA

SEQ ID NO: 101957 - DNA, 80 bp, synthetic construct
  misc_feature 1..80: note = Artificially Synthesized Probe
  source 1..80: mol_type = other DNA
gacactttatcccttcttttgtttaagagtgttgcataaaacaggagagtttctgaattaccctcccttctagctttctt

SEQ ID NO: 101958 - DNA, 80 bp, synthetic construct
  misc_feature 1..80: note = Artificially Synthesized Probe
  source 1..80: mol_type = other DNA
gagagctttgtgggaaagatgatatggagggtggagagtctgcacttcactctgtgggaaaaattgctgaggttgtttag

SEQ ID NO: 101959 - DNA, 80 bp, synthetic construct; identical to SEQ ID NO: 35816
  misc_feature 1..80: note = Artificially Synthesized Probe
  source 1..80: mol_type = other DNA

SEQ ID NO: 101960 - DNA, 80 bp, synthetic construct
  misc_feature 1..80: note = Artificially Synthesized Probe
  source 1..80: mol_type = other DNA
actggagaggaatctttctctgcctcagcacttggagtctccgttattcacaatcagaaaaagagggagagcagagatag

SEQ ID NO: 101961 - DNA, 80 bp, synthetic construct
  misc_feature 1..80: note = Artificially Synthesized Probe
  source 1..80: mol_type = other DNA
gcctgttccgggtggcgtccaaaacacatggggaccttctggaggtaaatctgcagaatggcattttgtttgtgaattct

SEQ ID NO: 101962 - DNA, 80 bp, synthetic construct
  misc_feature 1..80: note = Artificially Synthesized Probe
  source 1..80: mol_type = other DNA
ggtaatacttaaaggaaataagggggacaaaggatgcttgtgctactattgaaacaggaaattgagagctctgtagaagt

SEQ ID NO: 101963 - DNA, 80 bp, synthetic construct
  misc_feature 1..80: note = Artificially Synthesized Probe
  source 1..80: mol_type = other DNA
tgctggataccaaacaatgtaccccgggtcttgagattatcgatgccattgtctgtaaaaaaccaaccaaacaaacttta

SEQ ID NO: 101964 - DNA, 80 bp, synthetic construct; identical to SEQ ID NO: 35817
  misc_feature 1..80: note = Artificially Synthesized Probe
  source 1..80: mol_type = other DNA

SEQ ID NO: 101965 - DNA, 80 bp, synthetic construct
  misc_feature 1..80: note = Artificially Synthesized Probe
  source 1..80: mol_type = other DNA
atgaatgatttacattagatgcacaccaagctgctttcggagagtccagatttatggggataagagcatcactaggtata

SEQ ID NO: 101966 - DNA, 80 bp, synthetic construct
  misc_feature 1..80: note = Artificially Synthesized Probe
  source 1..80: mol_type = other DNA
ggtcgttgctgggtcaagttttataagtctttaaatcccatactgttgcctcctggactgtagaaatagtctcttagaac

SEQ ID NO: 101967 - DNA, 80 bp, synthetic construct
  misc_feature 1..80: note = Artificially Synthesized Probe
  source 1..80: mol_type = other DNA
ctagtaaaaatgttttttgctcaccattgtattcccattgtcaagcaggatgcctagcacacaatgatgctcaataaatt

SEQ ID NO: 101968 - DNA, 80 bp, synthetic construct
  misc_feature 1..80: note = Artificially Synthesized Probe
  source 1..80: mol_type = other DNA
aatagcttggtaacttggaaaagactatttactgtctgagttctaggccaactgtagggtgtctgtatttatttcccatt

SEQ ID NO: 101969 - DNA, 80 bp, synthetic construct; identical to SEQ ID NO: 35818
  misc_feature 1..80: note = Artificially Synthesized Probe
  source 1..80: mol_type = other DNA

SEQ ID NO: 101970 - DNA, 80 bp, synthetic construct
  misc_feature 1..80: note = Artificially Synthesized Probe
  source 1..80: mol_type = other DNA
aaggtaatgtaggctctttctatcatgctcttcaaaattcttctagactctgcccatttcccaatctcaaggccacttcc

SEQ ID NO: 101971 - DNA, 80 bp, synthetic construct
  misc_feature 1..80: note = Artificially Synthesized Probe
  source 1..80: mol_type = other DNA
tcacaagttctaaaattagaatgcagtcattttggtggggccattattctgcctaccacccggtctttcatgttcaggca

SEQ ID NO: 101972 - DNA, 80 bp, synthetic construct
  misc_feature 1..80: note = Artificially Synthesized Probe
  source 1..80: mol_type = other DNA
catttaaatcatgctttcagtgatctatccaatcagataaactactctcccttcctgggaagagtaaggaaggaagtaga

SEQ ID NO: 101973 - DNA, 80 bp, synthetic construct
  misc_feature 1..80: note = Artificially Synthesized Probe
  source 1..80: mol_type = other DNA
ttgcggaatctaagcaatcggactcgcgttttccactagagggagcttctgatgctgacattgaagagaatgctctattg

SEQ ID NO: 101974 - DNA, 80 bp, synthetic construct; identical to SEQ ID NO: 35819
  misc_feature 1..80: note = Artificially Synthesized Probe
  source 1..80: mol_type = other DNA

SEQ ID NO: 101975 - DNA, 80 bp, synthetic construct
  misc_feature 1..80: note = Artificially Synthesized Probe
  source 1..80: mol_type = other DNA
tattgcctgccttgtatgcatctagcgtctgtgtctaagtgaaagcagattatatccagaacttccctggaaaatagaag

SEQ ID NO: 101976 - DNA, 80 bp, synthetic construct
  misc_feature 1..80: note = Artificially Synthesized Probe
  source 1..80: mol_type = other DNA
taaggatgtgtttgttttttgggaacattttgtataacaaccagtttcactctagctccctccttgatattctaaacaag

SEQ ID NO: 101977 - DNA, 80 bp, synthetic construct
  misc_feature 1..80: note = Artificially Synthesized Probe
  source 1..80: mol_type = other DNA
tcaatccaactgctgttcctgcagtctgcaatcagcagggctatgtttattcagcggtcagtgtcacatcaatttccttc

SEQ ID NO: 101978 - DNA, 80 bp, synthetic construct
  misc_feature 1..80: note = Artificially Synthesized Probe
  source 1..80: mol_type = other DNA
gatatataaattagcttctttggtcttttcttgcccagggtcacaaccttgcctccaggataataccttctaagtgtttg

SEQ ID NO: 101979 - DNA, 80 bp, synthetic construct; identical to SEQ ID NO: 35820
  misc_feature 1..80: note = Artificially Synthesized Probe
  source 1..80: mol_type = other DNA

SEQ ID NO: 101980 - DNA, 80 bp, synthetic construct
  misc_feature 1..80: note = Artificially Synthesized Probe
  source 1..80: mol_type = other DNA
gttgggaccctctatatatagtcgtgtaccaaataatgacactttggttaacaatggaccacatatgtgacagctgtccc

SEQ ID NO: 101981 - DNA, 80 bp, synthetic construct
  misc_feature 1..80: note = Artificially Synthesized Probe
  source 1..80: mol_type = other DNA
aggctatgccatctaggtttgtgtaagtacgctctatgatgtccatacaacaaaaatgcctagtgatgcatttctcagaa

SEQ ID NO: 101982 - DNA, 80 bp, synthetic construct; identical to SEQ ID NO: 35821
  misc_feature 1..80: note = Artificially Synthesized Probe
  source 1..80: mol_type = other DNA

SEQ ID NO: 101983 - DNA, 80 bp, synthetic construct
  misc_feature 1..80: note = Artificially Synthesized Probe
  source 1..80: mol_type = other DNA
atgaacagtggatgttgtgggacctcagaagatggaattggaaattcaggggactaagtcagagattatttgacatttaa

SEQ ID NO: 101984 - DNA, 80 bp, synthetic construct
  misc_feature 1..80: note = Artificially Synthesized Probe
  source 1..80: mol_type = other DNA
ccccatctctacaaaaaaaatataaaaattagccgggtgtggtggcatgcacttgtagtctcagctacttgggaggctga

SEQ ID NO: 101985 - DNA, 80 bp, synthetic construct
  misc_feature 1..80: note = Artificially Synthesized Probe
  source 1..80: mol_type = other DNA
ttactggcaccgttcggctgttagtccaagtcttggatgtcaacgacaatgatccagagtttgataaatcagaatataag

SEQ ID NO: 101986 - DNA, 80 bp, synthetic construct
  misc_feature 1..80: note = Artificially Synthesized Probe
  source 1..80: mol_type = other DNA
tccaggcaaaggaaacaatgcgtgcatgcaaaaacaaaatacaaaaaactgaattgtgtagtctgggttaataagatgag

SEQ ID NO: 101987 - DNA, 80 bp, synthetic construct
  misc_feature 1..80: note = Artificially Synthesized Probe
  source 1..80: mol_type = other DNA
atttaggaaagaagattcttttaagtttccttaactctactgaattttcaaaaatcaacctacagcaatccaaacttatc

SEQ ID NO: 101988 - DNA, 80 bp, synthetic construct; identical to SEQ ID NO: 35822
  misc_feature 1..80: note = Artificially Synthesized Probe
  source 1..80: mol_type = other DNA

SEQ ID NO: 101989 - DNA, 80 bp, synthetic construct
  misc_feature 1..80: note = Artificially Synthesized Probe
  source 1..80: mol_type = other DNA
ctaaggttgactgtgggtaactgaagcctcagaaatcaaacctcaaataaggggcgatcactgtactgaataatatgtca

SEQ ID NO: 101990 - DNA, 80 bp, synthetic construct
  misc_feature 1..80: note = Artificially Synthesized Probe
  source 1..80: mol_type = other DNA
ctggtggatttggtatatcatgtctgagaaaatgtggagagtgaagggcaggtttaaaatttgtctcatgttagtttctg

SEQ ID NO: 101991 - DNA, 80 bp, synthetic construct
  misc_feature 1..80: note = Artificially Synthesized Probe
  source 1..80: mol_type = other DNA
gtattaaatgacataatgcacgcaaaatgcttagaaccatgcttagttcatggtagccactcaaaaatgtcgtcagaact

SEQ ID NO: 101992 - DNA, 80 bp, synthetic construct; identical to SEQ ID NO: 35823
  misc_feature 1..80: note = Artificially Synthesized Probe
  source 1..80: mol_type = other DNA

SEQ ID NO: 101993 - DNA, 80 bp, synthetic construct
  misc_feature 1..80: note = Artificially Synthesized Probe
  source 1..80: mol_type = other DNA
aaaagtttgaaaacccaaccaaagtcagaagccattttgttgtcggctgaaataatgcctcatagagtttcaggtggggc

SEQ ID NO: 101994 - DNA, 80 bp, synthetic construct
  misc_feature 1..80: note = Artificially Synthesized Probe
  source 1..80: mol_type = other DNA
ataatttgttaacaagggccgcctccccccattttcatttggcaaatttcactggttcctgcaaattatgtagttaatcc

SEQ ID NO: 101995 - DNA, 80 bp, synthetic construct; identical to SEQ ID NO: 35824
  misc_feature 1..80: note = Artificially Synthesized Probe
  source 1..80: mol_type = other DNA

SEQ ID NO: 101996 - DNA, 80 bp, synthetic construct
  misc_feature 1..80: note = Artificially Synthesized Probe
  source 1..80: mol_type = other DNA
cccctttggtgaagcaaccactgttaacaattttgtgtgtatcctccaatatttttttgaaattaatgaactttactttt

SEQ ID NO: 101997 - DNA, 80 bp, synthetic construct; identical to SEQ ID NO: 35688
  misc_feature 1..80: note = Artificially Synthesized Probe
  source 1..80: mol_type = other DNA

SEQ ID NO: 101998 - DNA, 80 bp, synthetic construct
  misc_feature 1..80: note = Artificially Synthesized Probe
  source 1..80: mol_type = other DNA
attgaaactatcattaccacccaacttccatgtttactttagggttcactcttccaaatatttcttgcatcacttaacaa

SEQ ID NO: 101999 - DNA, 80 bp, synthetic construct
  misc_feature 1..80: note = Artificially Synthesized Probe
  source 1..80: mol_type = other DNA
actgaatactgtaggcaatttttacacaatgataagtatttgtgtatctcaacatacctaaacgcagaaaaagtacaata

SEQ ID NO: 102000 - DNA, 80 bp, synthetic construct
  misc_feature 1..80: note = Artificially Synthesized Probe
  source 1..80: mol_type = other DNA
gtgtgtgtgtatgttaacaaacacctttctacgtcagtacatatagatttgccacaatcttcttgagtaaggatatagca

SEQ ID NO: 102001 - DNA, 80 bp, synthetic construct; identical to SEQ ID NO: 35825
  misc_feature 1..80: note = Artificially Synthesized Probe
  source 1..80: mol_type = other DNA

SEQ ID NO: 102002 - DNA, 80 bp, synthetic construct
  misc_feature 1..80: note = Artificially Synthesized Probe
  source 1..80: mol_type = other DNA
gctagagcaaacagaggagaaaatttacttgtgaatcataatagctaacctgtactgaacagttaagccatgtgccaagt

SEQ ID NO: 102003 - DNA, 80 bp, synthetic construct
  misc_feature 1..80: note = Artificially Synthesized Probe
  source 1..80: mol_type = other DNA
tgtttgacttctgagtctgtgctcttaaccactgcacacaccgtctctagaaagtttaatgccatctttatgccaaagtt

SEQ ID NO: 102004 - DNA, 80 bp, synthetic construct; identical to SEQ ID NO: 35826
  misc_feature 1..80: note = Artificially Synthesized Probe
  source 1..80: mol_type = other DNA

SEQ ID NO: 102005 - DNA, 80 bp, synthetic construct
  misc_feature 1..80: note = Artificially Synthesized Probe
  source 1..80: mol_type = other DNA
ctaattttgtatttttagaagagacacagtttcactatgttggtcaggctggtctggaacccctgacctcaggtgatctg

SEQ ID NO: 102006 - DNA, 80 bp, synthetic construct
  misc_feature 1..80: note = Artificially Synthesized Probe
  source 1..80: mol_type = other DNA
tcctagaaaatagtagaaagcagaatgctggagctgagatttgaacccaagacttttgatacttcgtccagtgtgctttc

SEQ ID NO: 102007 - DNA, 80 bp, synthetic construct
  misc_feature 1..80: note = Artificially Synthesized Probe
  source 1..80: mol_type = other DNA
ggaagtactacatttgagaataggtggttaaagtgggagttggattagtaaaggaatactgcatagtagtaatacccatt

SEQ ID NO: 102008 - DNA, 80 bp, synthetic construct; identical to SEQ ID NO: 35827
  misc_feature 1..80: note = Artificially Synthesized Probe
  source 1..80: mol_type = other DNA

SEQ ID NO: 102009 - DNA, 80 bp, synthetic construct
  misc_feature 1..80: note = Artificially Synthesized Probe
  source 1..80: mol_type = other DNA
gacaggtgacctgctcgctgacgccccacgttcccttcaagctggtgtccaccttcaagaattactactcgttggtgctg

SEQ ID NO: 102010 - DNA, 80 bp, synthetic construct
  misc_feature 1..80: note = Artificially Synthesized Probe
  source 1..80: mol_type = other DNA
atgtgatttttttttagctaactacggagaccagccattccaatgtttgaatctgggttcgcagcacatgatgtctttat

SEQ ID NO: 102011 - DNA, 80 bp, synthetic construct
  misc_feature 1..80: note = Artificially Synthesized Probe
  source 1..80: mol_type = other DNA
aactcattccacccaaagagggtgaaatacccaggagtagcagctctagcggcctctgggtagtggtattagattggcct

SEQ ID NO: 102012 - DNA, 80 bp, synthetic construct
  misc_feature 1..80: note = Artificially Synthesized Probe
  source 1..80: mol_type = other DNA
tgagccaaggagtcaatgtgagaatagtttttcaccttcattatcaaatgcctgtgtggagctgaatgtggtggctgaca

SEQ ID NO: 102013 - DNA, 80 bp, synthetic construct; identical to SEQ ID NO: 35828
  misc_feature 1..80: note = Artificially Synthesized Probe
  source 1..80: mol_type = other DNA

SEQ ID NO: 102014 - DNA, 80 bp, synthetic construct
  misc_feature 1..80: note = Artificially Synthesized Probe
  source 1..80: mol_type = other DNA
gaactcctgacctcaggtgatccacctgcctctgcctcccaaagtgctgggattacaggcatgagccactgtgcctggcc

SEQ ID NO: 102015 - DNA, 80 bp, synthetic construct
  misc_feature 1..80: note = Artificially Synthesized Probe
  source 1..80: mol_type = other DNA
acagatatagacgctgtctctaaaaaaaaaaatcctgtgtgatttaggacaaattatcttgctgtaatttaagccttcat

SEQ ID NO: 102016 - DNA, 80 bp, synthetic construct
  misc_feature 1..80: note = Artificially Synthesized Probe
  source 1..80: mol_type = other DNA
aatgaatcttctgttgctctgatcttaataagtaaaatttaacgagtttttactttgcaccatgcacttatgctatgtgc

SEQ ID NO: 102017 - DNA, 80 bp, synthetic construct; identical to SEQ ID NO: 35829
  misc_feature 1..80: note = Artificially Synthesized Probe
  source 1..80: mol_type = other DNA

SEQ ID NO: 102018 - DNA, 80 bp, synthetic construct
  misc_feature 1..80: note = Artificially Synthesized Probe
  source 1..80: mol_type = other DNA
gatcctggacaggatttgggtttcagaccacgattctcctgtgttttgtgggctgtgattactcagattaggtttgccca

SEQ ID NO: 102019 - DNA, 80 bp, synthetic construct
  misc_feature 1..80: note = Artificially Synthesized Probe
  source 1..80: mol_type = other DNA
ttacaacctgggctgtttcagtggttgatggcggatggtttttgccttttggtcagcctgagtatatactatcattctac

SEQ ID NO: 102020 - DNA, 80 bp, synthetic construct
  misc_feature 1..80: note = Artificially Synthesized Probe
  source 1..80: mol_type = other DNA
tcgtgaaggagaacaacccaccaggctgccacatcttcacagtgtcggcgcgggacgcggacgcgcaggagaacgcgctg

SEQ ID NO: 102021 - DNA, 80 bp, synthetic construct
  misc_feature 1..80: note = Artificially Synthesized Probe
  source 1..80: mol_type = other DNA
tctgcgcggaaagcctggaagttcacttgcaaacacagaatctgcacagccttcggtgccctgactctttcctgggcatc

SEQ ID NO: 102022 - DNA, 80 bp, synthetic construct
  misc_feature 1..80: note = Artificially Synthesized Probe
  source 1..80: mol_type = other DNA
aatcaaaatgatgggttttctggaagctctttattaacctcagcactgaaatcccagagctggtaacaaagggatgaatg

SEQ ID NO: 102023 - DNA, 80 bp, synthetic construct; identical to SEQ ID NO: 35830
  misc_feature 1..80: note = Artificially Synthesized Probe
  source 1..80: mol_type = other DNA

SEQ ID NO: 102024 - DNA, 80 bp, synthetic construct
  misc_feature 1..80: note = Artificially Synthesized Probe
  source 1..80: mol_type = other DNA
atttgtttaactctgttgcacacacataggaagggcacagtaaatgttaactacatcgacaaccctgtgatgtagacagg

SEQ ID NO: 102025 - DNA, 80 bp, synthetic construct
  misc_feature 1..80: note = Artificially Synthesized Probe
  source 1..80: mol_type = other DNA
caacaccctccagcacatgcccctctgagagctttcctgaaaatagtatccttggtcaaaatgagtttatgttctattag

SEQ ID NO: 102026 - DNA, 80 bp, synthetic construct
  misc_feature 1..80: note = Artificially Synthesized Probe
  source 1..80: mol_type = other DNA
ctgaggctcaactccatcaactcaggcagccagggttagtttagcatgaaagaggaaagctggaaattttgccaaaaaga

SEQ ID NO: 102027 - DNA, 80 bp, synthetic construct; identical to SEQ ID NO: 35831
  misc_feature 1..80: note = Artificially Synthesized Probe
  source 1..80: mol_type = other DNA

SEQ ID NO: 102028 - DNA, 80 bp, synthetic construct
  misc_feature 1..80: note = Artificially Synthesized Probe
  source 1..80: mol_type = other DNA
cggccccagagggcagtttttaaagtagaagtgaagatctgtatgcatttattaaaatatatgttgttctgattttaaaa

SEQ ID NO: 102029 - DNA, 80 bp, synthetic construct
  misc_feature 1..80: note = Artificially Synthesized Probe
  source 1..80: mol_type = other DNA
agatttatatgtgtctgaaatcctccttctagcctcttaacaggcccattcatttgggtcttgactgcatcctcagtctt

SEQ ID NO: 102030 - DNA, 80 bp, synthetic construct; identical to SEQ ID NO: 35832
  misc_feature 1..80: note = Artificially Synthesized Probe
  source 1..80: mol_type = other DNA

SEQ ID NO: 102031 - DNA, 80 bp, synthetic construct
  misc_feature 1..80: note = Artificially Synthesized Probe
  source 1..80: mol_type = other DNA
tcagagatgtttgttttatacaacaaccagaacaggtgaggcacagtggtctgtgagggactggagagaccacaccttgt

SEQ ID NO: 102032 - DNA, 80 bp, synthetic construct
  misc_feature 1..80: note = Artificially Synthesized Probe
  source 1..80: mol_type = other DNA
cgcctctgagcagcaacgtgacgctgcaggtgttcgtgctggacgagaacgacaacgcgccggcactgctggcgactcag

SEQ ID NO: 102033 - DNA, 80 bp, synthetic construct
  misc_feature 1..80: note = Artificially Synthesized Probe
  source 1..80: mol_type = other DNA
cagccattaatgtcctttaactgtgcaagatgaacatatctctgtgttctgcatctccagatgacagtgcttaggcctca

SEQ ID NO: 102034 - DNA, 80 bp, synthetic construct
  misc_feature 1..80: note = Artificially Synthesized Probe
  source 1..80: mol_type = other DNA
attttaaaggtaaacaggcagattctggctgagctcaattgcagatttgattaacttagatagatcaaagtcattagtct

SEQ ID NO: 102035 - DNA, 80 bp, synthetic construct
  misc_feature 1..80: note = Artificially Synthesized Probe
  source 1..80: mol_type = other DNA
agctgcattatatataattgcccatatgtgataccatttactgaattcttgcattgtgctaaggatcaagcttagtactt

SEQ ID NO: 102036 - DNA, 80 bp, synthetic construct; identical to SEQ ID NO: 35833
  misc_feature 1..80: note = Artificially Synthesized Probe
  source 1..80: mol_type = other DNA

SEQ ID NO: 102037 - DNA, 80 bp, synthetic construct
  misc_feature 1..80: note = Artificially Synthesized Probe
  source 1..80: mol_type = other DNA
ggtcaggagatcgagaccatcctggctaacacggtgaaaccccgtctctactaaaaatacaaaaattagccgggcatggt

SEQ ID NO: 102038 - DNA, 80 bp, synthetic construct
  misc_feature 1..80: note = Artificially Synthesized Probe
  source 1..80: mol_type = other DNA
aaaagaatggatgagaaatcattcaagacaaaagcaaaccagatgtgtaaagatcctgaggcaaaaacaactccaaggag

SEQ ID NO: 102039 - DNA, 80 bp, synthetic construct; identical to SEQ ID NO: 35834
  misc_feature 1..80: note = Artificially Synthesized Probe
  source 1..80: mol_type = other DNA

SEQ ID NO: 102040 - DNA, 80 bp, synthetic construct
  misc_feature 1..80: note = Artificially Synthesized Probe
  source 1..80: mol_type = other DNA
ttttttttaaattttttatttttagatggagtcttgctctgttgcccaggctggactgcagtggcacgatctcagctcac

SEQ ID NO: 102041 - DNA, 80 bp, synthetic construct
  misc_feature 1..80: note = Artificially Synthesized Probe
  source 1..80: mol_type = other DNA
tttcactgtgttagccaggatggtctcaatctcctgacctcgagatctgcctgtctcggcctcccaaagtgctgggatta

SEQ ID NO: 102042 - DNA, 80 bp, synthetic construct
  misc_feature 1..80: note = Artificially Synthesized Probe
  source 1..80: mol_type = other DNA
ggtgtcctgaaagagtggtggcagtgaaaattgggagaagaggacagagtcaagatatatttaggaggcagaaatgacag

SEQ ID NO: 102043 - DNA, 80 bp, synthetic construct
  misc_feature 1..80: note = Artificially Synthesized Probe
  source 1..80: mol_type = other DNA
gcgtggggctgtacacgggcgagataagcacaacgcgtgccctggacgaggcagactcgccgcgccaccgacttctagta

SEQ ID NO: 102044 - DNA, 80 bp, synthetic construct; identical to SEQ ID NO: 35835
  misc_feature 1..80: note = Artificially Synthesized Probe
  source 1..80: mol_type = other DNA

SEQ ID NO: 102045 - DNA, 80 bp, synthetic construct
  misc_feature 1..80: note = Artificially Synthesized Probe
  source 1..80: mol_type = other DNA
gaggagactgacaaaggaaactgtcaaagaacagtcagagagaaaggtcaggagaatgttttgatggtgggggccagaat

SEQ ID NO: 102046 - DNA, 80 bp, synthetic construct
  misc_feature 1..80: note = Artificially Synthesized Probe
  source 1..80: mol_type = other DNA
tgatggaacaccatctctactaaaatacaaaaaaaaaaaaaaaaaaaaaaattagccaggcatggtggcatgtgcctgta

SEQ ID NO: 102047 - DNA, 80 bp, synthetic construct
  misc_feature 1..80: note = Artificially Synthesized Probe
  source 1..80: mol_type = other DNA
agatataggagaggtcttctgccctccctgtatttgcctaaaaaaccataaatttacaaagacaaaagttatcctacttc

SEQ ID NO: 102048 - DNA, 80 bp, synthetic construct
  misc_feature 1..80: note = Artificially Synthesized Probe
  source 1..80: mol_type = other DNA
atttgccttcccccaagtagctacccattagagactcaaagtccttaaaggtcttttcctttgtcttacacttctttaaa

SEQ ID NO: 102049 - DNA, 80 bp, synthetic construct; identical to SEQ ID NO: 35836
  misc_feature 1..80: note = Artificially Synthesized Probe
  source 1..80: mol_type = other DNA

SEQ ID NO: 102050 - DNA, 80 bp, synthetic construct
  misc_feature 1..80: note = Artificially Synthesized Probe
  source 1..80: mol_type = other DNA
ttgtacccaaccctaaactgtaattgaacataaacagtttatttgatggagcttttcacgtgtcaaccaaaggagcagtg

SEQ ID NO: 102051 - DNA, 80 bp, synthetic construct
  misc_feature 1..80: note = Artificially Synthesized Probe
  source 1..80: mol_type = other DNA
gaatgtcttttattgaaaactcctgtggatgcataatcattttcccaagactcagggcagatttcacctcctctggaacc

SEQ ID NO: 102052 - DNA, 80 bp, synthetic construct
  misc_feature 1..80: note = Artificially Synthesized Probe
  source 1..80: mol_type = other DNA
tagactgtgagcacactgagggaaggaatttggcttggaaagtaaaattggctcccagtgttttatctaaacaaataggc

SEQ ID NO: 102053 - DNA, 80 bp, synthetic construct; identical to SEQ ID NO: 35837
  misc_feature 1..80: note = Artificially Synthesized Probe
  source 1..80: mol_type = other DNA

SEQ ID NO: 102054 - DNA, 80 bp, synthetic construct
  misc_feature 1..80: note = Artificially Synthesized Probe
  source 1..80: mol_type = other DNA
accaaacatatgttactatgaaactagattcttggtatcctggtgaaaaaacctgccctcttgcttgtctgtaaatactg

SEQ ID NO: 102055 - DNA, 80 bp, synthetic construct; identical to SEQ ID NO: 35689
  misc_feature 1..80: note = Artificially Synthesized Probe
  source 1..80: mol_type = other DNA

SEQ ID NO: 102056 - DNA, 80 bp, synthetic construct
  misc_feature 1..80: note = Artificially Synthesized Probe
  source 1..80: mol_type = other DNA
ttgtgcctgtagttccagctacttgggaggctaagatgggaggattgattgagcacaggaggtcgaggctgcagtgactg

SEQ ID NO: 102057 - DNA, 80 bp, synthetic construct; identical to SEQ ID NO: 35838
  misc_feature 1..80: note = Artificially Synthesized Probe
  source 1..80: mol_type = other DNA

SEQ ID NO: 102058 - DNA, 80 bp, synthetic construct
  misc_feature 1..80: note = Artificially Synthesized Probe
  source 1..80: mol_type = other DNA
tgacaaaagtgacttcataaccttcggcaaaaaggaggagaccaagaaaaagaagaaaaagaagaagggtaacaagaccc

SEQ ID NO: 102059 - DNA, 80 bp, synthetic construct
  misc_feature 1..80: note = Artificially Synthesized Probe
  source 1..80: mol_type = other DNA
cctcagaaatctgcagaaagttccctgtgtctgtctagaacgcatttaacaggttttgtcgtaaaagctttactaagtct

SEQ ID NO: 102060 - DNA, 80 bp, synthetic construct
  misc_feature 1..80: note = Artificially Synthesized Probe
  source 1..80: mol_type = other DNA
ctctgccctgtgctccggggatcctgtcttgatgacacttgcagggcaggctgaaaagttttgagattgagcagcttggg

SEQ ID NO: 102061 - DNA, 80 bp, synthetic construct; identical to SEQ ID NO: 35839
  misc_feature 1..80: note = Artificially Synthesized Probe
  source 1..80: mol_type = other DNA

SEQ ID NO: 102062 - DNA, 80 bp, synthetic construct
  misc_feature 1..80: note = Artificially Synthesized Probe
  source 1..80: mol_type = other DNA
ttttaacagagaaccaccctgggaaacagaagcagatctgatgtgtttcctatacatgtcctgtgctcactttattaaaa

SEQ ID NO: 102063 - DNA, 80 bp, synthetic construct
  misc_feature 1..80: note = Artificially Synthesized Probe
  source 1..80: mol_type = other DNA
tgaatacaattcccctaaactctcctcaaaagagaattcagtctacagccatttaaatgatcattgctgctacagaagtg

SEQ ID NO: 102064 - DNA, 80 bp, synthetic construct
  misc_feature 1..80: note = Artificially Synthesized Probe
  source 1..80: mol_type = other DNA
ttctctctctctctctcttttctaagaaacaattatgtgcactttgatacacaaccttctctaaccaactatatatcaag

SEQ ID NO: 102065 - DNA, 80 bp, synthetic construct
  misc_feature 1..80: note = Artificially Synthesized Probe
  source 1..80: mol_type = other DNA
atgttacctgaaatcaatctcccatatgtatgctgtatgctatgctaagactcctgaaatatacttactctgtgcttgtg

SEQ ID NO: 102066 - DNA, 80 bp, synthetic construct
  misc_feature 1..80: note = Artificially Synthesized Probe
  source 1..80: mol_type = other DNA
aggaggaaggggaaagacaggagccagggtcaaatcaccccggacaggtgagttttctacagattccacctatcaggaag

SEQ ID NO: 102067 - DNA, 80 bp, synthetic construct; identical to SEQ ID NO: 35840
  misc_feature 1..80: note = Artificially Synthesized Probe
  source 1..80: mol_type = other DNA

SEQ ID NO: 102068 - DNA, 80 bp, synthetic construct
  misc_feature 1..80: note = Artificially Synthesized Probe
  source 1..80: mol_type = other DNA
aatgctttgaaattctaatggtatctgaaatatcagctcatagaaagtaacaaaatttgctgtcaccttaaataagacat

SEQ ID NO: 102069 - DNA, 80 bp, synthetic construct
  misc_feature 1..80: note = Artificially Synthesized Probe
  source 1..80: mol_type = other DNA
acccgccaggctgccacatcttcacggtgtctgcgtgggacgcggacgcgcaggagaacgccctggtgtcctactctctg

SEQ ID NO: 102070 - DNA, 80 bp, synthetic construct
  misc_feature 1..80: note = Artificially Synthesized Probe
  source 1..80: mol_type = other DNA
ggtgtgtaacttcagctctgcaggattgcatggggtaaaacttgttaccaacacatgtgaaccattgctacattgtaggt

SEQ ID NO: 102071 - DNA, 80 bp, synthetic construct; identical to SEQ ID NO: 35841
  misc_feature 1..80: note = Artificially Synthesized Probe
  source 1..80: mol_type = other DNA

SEQ ID NO: 102072 - DNA, 80 bp, synthetic construct
  misc_feature 1..80: note = Artificially Synthesized Probe
  source 1..80: mol_type = other DNA
gcttctttaaccaataaatgtcctatttctcttaatatttggttagcaaatcctaaaagaaatgagatgcaagagtgact

SEQ ID NO: 102073 - DNA, 80 bp, synthetic construct; identical to SEQ ID NO: 35690
  misc_feature 1..80: note = Artificially Synthesized Probe
  source 1..80: mol_type = other DNA

SEQ ID NO: 102074 - DNA, 80 bp, synthetic construct
  misc_feature 1..80: note = Artificially Synthesized Probe
  source 1..80: mol_type = other DNA
gctagaatactccattagtatgacatgatttacttttcttttttttttttacagtgttaaacgttcatcataaattcatt

SEQ ID NO: 102075 - DNA, 80 bp, synthetic construct
  misc_feature 1..80: note = Artificially Synthesized Probe
  source 1..80: mol_type = other DNA
tgtaatcccagctatttgggaggctgaggcaggagaattgcttgagcccaagagttcgaggcctgcctggacaacatagc

SEQ ID NO: 102076 - DNA, 80 bp, synthetic construct
  misc_feature 1..80: note = Artificially Synthesized Probe
  source 1..80: mol_type = other DNA
tttttttgcctgttcttgattttgttccatgaaaaggcaagagatttgtcaactattggatactcaaacaaaatggcatg

SEQ ID NO: 102077 - DNA, 80 bp, synthetic construct
  misc_feature 1..80: note = Artificially Synthesized Probe
  source 1..80: mol_type = other DNA
atgtgagtacctactgacaattatcagtttcattcatctcactttgtaactgctctatcttgtaatgccttatctctaat

SEQ ID NO: 102078 - DNA, 80 bp, synthetic construct; identical to SEQ ID NO: 35691
  misc_feature 1..80: note = Artificially Synthesized Probe
  source 1..80: mol_type = other DNA

SEQ ID NO: 102079 - DNA, 80 bp, synthetic construct
  misc_feature 1..80: note = Artificially Synthesized Probe
  source 1..80: mol_type = other DNA
acattactcatctccagatgaaatttttggaataactgaagatcttttaaagacttgggaatgttttcagtacaggttaa

SEQ ID NO: 102080 - DNA, 80 bp, synthetic construct
  misc_feature 1..80: note = Artificially Synthesized Probe
  source 1..80: mol_type = other DNA
ggttgtttaagtattaagctaaacttagatgttcctattggcttaacaatttgtttaggtcaaagagtatgtgagaacta

SEQ ID NO: 102081 - DNA, 80 bp, synthetic construct
  misc_feature 1..80: note = Artificially Synthesized Probe
  source 1..80: mol_type = other DNA
ctcctgcctcagctttccgagaagctgggactacaggcatgcaccaccactcctggctaatttttgtatttttagtagag

SEQ ID NO: 102082 - DNA, 80 bp, synthetic construct
  misc_feature 1..80: note = Artificially Synthesized Probe
  source 1..80: mol_type = other DNA
acttgacgctgcaggtgttcgtgctggacgagaacgacaacgctcccgcgctgctggcgtctcccgctggcagcgcgggc

SEQ ID NO: 102083 - DNA, 80 bp, synthetic construct; identical to SEQ ID NO: 35692
  misc_feature 1..80: note = Artificially Synthesized Probe
  source 1..80: mol_type = other DNA

SEQ ID NO: 102084 - DNA, 80 bp, synthetic construct
  misc_feature 1..80: note = Artificially Synthesized Probe
  source 1..80: mol_type = other DNA
cctggtgttgtaaaggtgtcatatttcagttgcctttattattatatgcagtaggaatgaatggcaacaaattattggtt

SEQ ID NO: 102085 - DNA, 80 bp, synthetic construct
  misc_feature 1..80: note = Artificially Synthesized Probe
  source 1..80: mol_type = other DNA
attctgattttctgaagagaagcatgtcctaactactaaatgacctgtaggggaagatttagagaaaaagcaaaaggttg

SEQ ID NO: 102086 - DNA, 80 bp, synthetic construct
  misc_feature 1..80: note = Artificially Synthesized Probe
  source 1..80: mol_type = other DNA
agtaaaactttccagaatctattcctgagatttgttttaacatgttatggaaatgagagcagttatgtgaaaagttatca

SEQ ID NO: 102087 - DNA, 80 bp, synthetic construct; identical to SEQ ID NO: 35693
  misc_feature 1..80: note = Artificially Synthesized Probe
  source 1..80: mol_type = other DNA

SEQ ID NO: 102088 - DNA, 80 bp, synthetic construct
  misc_feature 1..80: note = Artificially Synthesized Probe
  source 1..80: mol_type = other DNA
cccgcatttataaatgatccgtgaaaaataacccaaagtcgaaacattagaattaagagtgacccaggaagtggctaaac

SEQ ID NO: 102089 - DNA, 80 bp, synthetic construct
  misc_feature 1..80: note = Artificially Synthesized Probe
  source 1..80: mol_type = other DNA
ttactaaatatgtacttacagaaaagggtgactgctcataaaatacctcaggcaagcgatcccttaaaactgattgtccc

SEQ ID NO: 102090 - DNA, 80 bp, synthetic construct
  misc_feature 1..80: note = Artificially Synthesized Probe
  source 1..80: mol_type = other DNA
ggccgcatcgctcaggacctggggctggagctggcggagctggtgccgcgcctgttccgggtggcgtccaaaagacacgg

SEQ ID NO: 102091 - DNA, 80 bp, synthetic construct; identical to SEQ ID NO: 35694
  misc_feature 1..80: note = Artificially Synthesized Probe
  source 1..80: mol_type = other DNA

SEQ ID NO: 102092 - DNA, 80 bp, synthetic construct
  misc_feature 1..80: note = Artificially Synthesized Probe
  source 1..80: mol_type = other DNA
ccaaaactcaatttattgctgatggtaatcgatggcggtaaaccagaactaacagggtctgtccagattcaaataaccgt

SEQ ID NO: 102093 - DNA, 80 bp, synthetic construct; identical to SEQ ID NO: 35675
  misc_feature 1..80: note = Artificially Synthesized Probe
  source 1..80: mol_type = other DNA

SEQ ID NO: 102094 - DNA, 80 bp, synthetic construct
  misc_feature 1..80: note = Artificially Synthesized Probe
  source 1..80: mol_type = other DNA
ccagtgagtgagaaatgtatgttttcaataaatccagacacaggtgaaattagaatttatggtgaactggattttgaaga

SEQ ID NO: 102095 - DNA, 80 bp, synthetic construct; identical to SEQ ID NO: 35695
  misc_feature 1..80: note = Artificially Synthesized Probe
  source 1..80: mol_type = other DNA

SEQ ID NO: 102096 - DNA, 80 bp, synthetic construct
  misc_feature 1..80: note = Artificially Synthesized Probe
  source 1..80: mol_type = other DNA
gccgacgtgaacgacaatgcgcctgcgttcgcgcagcccgagtacacagtgttcgtgaaggagaacaacccgccgggctg

SEQ ID NO: 102097 - DNA, 80 bp, synthetic construct
  misc_feature 1..80: note = Artificially Synthesized Probe
  source 1..80: mol_type = other DNA
gaggagctggagctgctgcagttccaggtgagcgcgcgcgacgccggcgtgccgcctctgggcagcaacgtgacgctgca

SEQ ID NO: 102098 - DNA, 80 bp, synthetic construct
  misc_feature 1..80: note = Artificially Synthesized Probe
  source 1..80: mol_type = other DNA
tggctgtcctacgagttgcaaccggcggcggtcggcgcgcacatcccgttccacgtggggctgtacactggcgagatcag

SEQ ID NO: 102099 - DNA, 80 bp, synthetic construct
  misc_feature 1..80: note = Artificially Synthesized Probe
  source 1..80: mol_type = other DNA
gctgtggatcccgaagcggctctggtggatattaacgtgtacctcatcatcgccatctgtgcggtgtccagcctgctggt

SEQ ID NO: 102100 - DNA, 80 bp, synthetic construct; identical to SEQ ID NO: 35696
  misc_feature 1..80: note = Artificially Synthesized Probe
  source 1..80: mol_type = other DNA

SEQ ID NO: 102101 - DNA, 80 bp, synthetic construct
  misc_feature 1..80: note = Artificially Synthesized Probe
  source 1..80: mol_type = other DNA
ttaatgaaggaaatatgtaggtacaatggaggccatggagcaccacacttaatatttttctttttctataatattttata

SEQ ID NO: 102102 - DNA, 80 bp, synthetic construct
  misc_feature 1..80: note = Artificially Synthesized Probe
  source 1..80: mol_type = other DNA
ctcacgtgcttaggcttttaaaatagccttcttgatcactattctaatttcagtacaatctagacattttcacattatat

SEQ ID NO: 102103 - DNA, 80 bp, synthetic construct; identical to SEQ ID NO: 35697
  misc_feature 1..80: note = Artificially Synthesized Probe
  source 1..80: mol_type = other DNA

SEQ ID NO: 102104 - DNA, 80 bp, synthetic construct
  misc_feature 1..80: note = Artificially Synthesized Probe
  source 1..80: mol_type = other DNA
cataccccagcctggtagtaaaggcattaaaatttccagccttatatctactttcttacatatctttagtttaggatctg

SEQ ID NO: 102105 - DNA, 80 bp, synthetic construct
  misc_feature 1..80: note = Artificially Synthesized Probe
  source 1..80: mol_type = other DNA
gcttgctggtgctcacgctgctgctgtacactgcactgaggtgctcggcggcgcccaccgagggcgcatgtgggccggtg

SEQ ID NO: 102106 - DNA, 80 bp, synthetic construct
  misc_feature 1..80: note = Artificially Synthesized Probe
  source 1..80: mol_type = other DNA
ttttaaataaatatatggtattgaaatgtattacctggacattcccctctatcttagaaatgagagtatgccctagaaat

SEQ ID NO: 102107 - DNA, 80 bp, synthetic construct
  misc_feature 1..80: note = Artificially Synthesized Probe
  source 1..80: mol_type = other DNA
attaggtatcaagtaatggagacttaaattatggcagtagaaatgaattgaaaaagacatatacaagaggcactggcaaa

SEQ ID NO: 102108 - DNA, 80 bp, synthetic construct
  misc_feature 1..80: note = Artificially Synthesized Probe
  source 1..80: mol_type = other DNA
caggtagggaatggagatgaacatttaagaaaatgttactttgaagtcctaagagaataccgttgtgattggaaatatgg

SEQ ID NO: 102109 - DNA, 80 bp, synthetic construct; identical to SEQ ID NO: 35698
  misc_feature 1..80: note = Artificially Synthesized Probe
  source 1..80: mol_type = other DNA

SEQ ID NO: 102110 - DNA, 80 bp, synthetic construct
  misc_feature 1..80: note = Artificially Synthesized Probe
  source 1..80: mol_type = other DNA
tctcagccttctcagctttcatggtcacattgcctcctcctctccatgtctctctctatgtgttggttttacaaaggtac

SEQ ID NO: 102111 - DNA, 80 bp, synthetic construct
  misc_feature 1..80: note = Artificially Synthesized Probe
  source 1..80: mol_type = other DNA
ggcataactttttggggaccacaattcaacctattatagtaggcttaaaatcatagaaggatagacaacaggaagctgaa

SEQ ID NO: 102112 - DNA, 80 bp, synthetic construct
  misc_feature 1..80: note = Artificially Synthesized Probe
  source 1..80: mol_type = other DNA
catagtgtgagtgaaagaaacaagtaaaaaataagatactaaaaataagacaggcagcaggtgaatttagatgaaaacca

SEQ ID NO: 102113 - DNA, 80 bp, synthetic construct; identical to SEQ ID NO: 35699
  misc_feature 1..80: note = Artificially Synthesized Probe
  source 1..80: mol_type = other DNA

SEQ ID NO: 102114 - DNA, 80 bp, synthetic construct
  misc_feature 1..80: note = Artificially Synthesized Probe
  source 1..80: mol_type = other DNA
agagaaaatggattgtcagtgtaactgcgtgttggaggctaaaaagaatgttagaggagtaatataaataggtgaatgac

SEQ ID NO: 102115 - DNA, 80 bp, synthetic construct
  misc_feature 1..80: note = Artificially Synthesized Probe
  source 1..80: mol_type = other DNA
taccaaatactctgcctaaattttcagaggagagcagagctatggaaataaacccaacagtcatttcctatagagttgtg

SEQ ID NO: 102116 - DNA, 80 bp, synthetic construct
  misc_feature 1..80: note = Artificially Synthesized Probe
  source 1..80: mol_type = other DNA
agtctattggaggggaccactctaggaaggtgggttattacgttttcattttccttttgtgctttatgaataatattttc

SEQ ID NO: 102117 - DNA, 80 bp, synthetic construct
  misc_feature 1..80: note = Artificially Synthesized Probe
  source 1..80: mol_type = other DNA
tgttgtttcttggaaaattaaagtcaatttaaatgacggcaaggttttactcagtgatgatgaagtaagatggagagaga

SEQ ID NO: 102118 - DNA, 80 bp, synthetic construct; identical to SEQ ID NO: 35700
  misc_feature 1..80: note = Artificially Synthesized Probe
  source 1..80: mol_type = other DNA

SEQ ID NO: 102119 - DNA, 80 bp, synthetic construct
  misc_feature 1..80: note = Artificially Synthesized Probe
  source 1..80: mol_type = other DNA
tttggagtcaatggctgttgtgtgaggaggtcttgaaaaatattacaggaagaggacagtaccacaaaaacctacatgac

SEQ ID NO: 102120 - DNA, 80 bp, synthetic construct
  misc_feature 1..80: note = Artificially Synthesized Probe
  source 1..80: mol_type = other DNA
tttgctgtttctgggaaggtaaacatttaatcttcaattacatatttgcagtgaaaatgtcaggaaatgcaaggggcaaa

SEQ ID NO: 102121 - DNA, 80 bp, synthetic construct; identical to SEQ ID NO: 35701
  misc_feature 1..80: note = Artificially Synthesized Probe
  source 1..80: mol_type = other DNA

SEQ ID NO: 102122 - DNA, 80 bp, synthetic construct
  misc_feature 1..80: note = Artificially Synthesized Probe
  source 1..80: mol_type = other DNA
gcatcgctcaggacctggggctggagctggcggagctggtgccgcgcctgttccgggtggcgtccaaaagacacggggac

SEQ ID NO: 102123 - DNA, 80 bp, synthetic construct
  misc_feature 1..80: note = Artificially Synthesized Probe
  source 1..80: mol_type = other DNA
acgacaacccgcccatattccctgaaagcaagaaacgaataatcattgcagaatctagacctccggaaactcgatttcca

SEQ ID NO: 102124 - DNA, 80 bp, synthetic construct
  misc_feature 1..80: note = Artificially Synthesized Probe
  source 1..80: mol_type = other DNA
cttgtactgaggaaaacactggacagagaggaaattcaggaacatagtttattactgacagccagtgatggaggtaaacc

SEQ ID NO: 102125 - DNA, 80 bp, synthetic construct
  misc_feature 1..80: note = Artificially Synthesized Probe
  source 1..80: mol_type = other DNA
agtgatcaagctaaatgccacagatcctgatgatggtacaaatggagatatagtttactcatttagaaggcctgtatggc

SEQ ID NO: 102126 - DNA, 80 bp, synthetic construct; identical to SEQ ID NO: 35702
  misc_feature 1..80: note = Artificially Synthesized Probe
  source 1..80: mol_type = other DNA

SEQ ID NO: 102127 - DNA, 80 bp, synthetic construct
  misc_feature 1..80: note = Artificially Synthesized Probe
  source 1..80: mol_type = other DNA
tagtgctggacagcgccctggaccgcgagagcgtatcagcctatgaactggtggtgaccgcgcgggacgggggctcgcct

SEQ ID NO: 102128 - DNA, 80 bp, synthetic construct
  misc_feature 1..80: note = Artificially Synthesized Probe
  source 1..80: mol_type = other DNA
aatttttttaaataacaatttattctgaatacactaatattttccaatacaaatatgtgatataggttgcagttctgacg

SEQ ID NO: 102129 - DNA, 80 bp, synthetic construct
  misc_feature 1..80: note = Artificially Synthesized Probe
  source 1..80: mol_type = other DNA
acgcgctggtctcctactcgctggtggagcggcgggtgggcgagcgtgcgctgtcgagctacgtgtcggtgcacgcggag

SEQ ID NO: 102130 - DNA, 80 bp, synthetic construct
  misc_feature 1..80: note = Artificially Synthesized Probe
  source 1..80: mol_type = other DNA
cgcccggggctggcagcgcgggaggcacagtgagcgagctgatgccgcggtcggtgggtgcaggccacgtggtggcgaag

SEQ ID NO: 102131 - DNA, 80 bp, synthetic construct
  misc_feature 1..80: note = Artificially Synthesized Probe
  source 1..80: mol_type = other DNA
ttctggtgctggtgaaggaccacggtgagcccgcgctgacggccacggcaacggtgctgttgtcgctggtggagagcggc

SEQ ID NO: 102132 - DNA, 80 bp, synthetic construct; identical to SEQ ID NO: 35703
  misc_feature 1..80: note = Artificially Synthesized Probe
  source 1..80: mol_type = other DNA

SEQ ID NO: 102133 - DNA, 80 bp, synthetic construct
  misc_feature 1..80: note = Artificially Synthesized Probe
  source 1..80: mol_type = other DNA
cttagtaaacactttagccttccttgcagttgtttgtttaagacatctttcctgccaatttcaaattattctttacttta

SEQ ID NO: 102134 - DNA, 80 bp, synthetic construct
  misc_feature 1..80: note = Artificially Synthesized Probe
  source 1..80: mol_type = other DNA
tcttgcaattgagcatttacaaaaaattcctcacgttgtgagaacttaaacatttagaaaatgtttgttttaatgaggct

SEQ ID NO: 102135 - DNA, 80 bp, synthetic construct; identical to SEQ ID NO: 35704
  misc_feature 1..80: note = Artificially Synthesized Probe
  source 1..80: mol_type = other DNA

SEQ ID NO: 102136 - DNA, 80 bp, synthetic construct
  misc_feature 1..80: note = Artificially Synthesized Probe
  source 1..80: mol_type = other DNA
ctgtgtagtattccacagtgtaagtgtgcaattatatattatttacctaatgatgggcaatcactttgtgtcaagtgttc

SEQ ID NO: 102137 - DNA, 80 bp, synthetic construct
  misc_feature 1..80: note = Artificially Synthesized Probe
  source 1..80: mol_type = other DNA
gaaccaaccagttatgagcactctttctatctcaagaagcaatagtggttttactttctgctaatgtgatctctgtgaaa

SEQ ID NO: 102138 - DNA, 80 bp, synthetic construct
  misc_feature 1..80: note = Artificially Synthesized Probe
  source 1..80: mol_type = other DNA
tggaaaagttctctgtaccttatagatattaactgtttatctattttttgacatttttaattaaaatttttattttgaga

SEQ ID NO: 102139 - DNA, 80 bp, synthetic construct; identical to SEQ ID NO: 35676
  misc_feature 1..80: note = Artificially Synthesized Probe
  source 1..80: mol_type = other DNA

SEQ ID NO: 102140 - DNA, 80 bp, synthetic construct
  misc_feature 1..80: note = Artificially Synthesized Probe
  source 1..80: mol_type = other DNA
aaccagattcttgatatcacctttttatagccacatctgcttccctgcctaatgctggcaagcagtaatctgttctccat

SEQ ID NO: 102141 - DNA, 80 bp, synthetic construct; identical to SEQ ID NO: 35705
  misc_feature 1..80: note = Artificially Synthesized Probe
  source 1..80: mol_type = other DNA

SEQ ID NO: 102142 - DNA, 80 bp, synthetic construct
  misc_feature 1..80: note = Artificially Synthesized Probe
  source 1..80: mol_type = other DNA
aggagatcaggagtccgagaccagcctggccaacatggtgaaaccctgtctctactaaaaatacaaaaattagcgaggca

SEQ ID NO: 102143 - DNA, 80 bp, synthetic construct
  misc_feature 1..80: note = Artificially Synthesized Probe
  source 1..80: mol_type = other DNA
gaaaggtcttcccaactcctatattgaacattcattaattaaatgcatttaataaatacttattgagtgttctctatgtg

SEQ ID NO: 102144 - DNA, 80 bp, synthetic construct
  misc_feature 1..80: note = Artificially Synthesized Probe
  source 1..80: mol_type = other DNA
aatatctttatctctttttttttttttgagacggagtctcactctgtcgcccaggctggagtacagtggcgtgatctcgg

SEQ ID NO: 102145 - DNA, 80 bp, synthetic construct; identical to SEQ ID NO: 35706
  misc_feature 1..80: note = Artificially Synthesized Probe
  source 1..80: mol_type = other DNA

SEQ ID NO: 102146 - DNA, 80 bp, synthetic construct
  misc_feature 1..80: note = Artificially Synthesized Probe
  source 1..80: mol_type = other DNA
tcctctccccacccctcatggttactgttaaaacttttctttttatcctgacttttgcagattgattgtgatgtgcttta

SEQ ID NO: 102147 - DNA, 80 bp, synthetic construct
  misc_feature 1..80: note = Artificially Synthesized Probe
  source 1..80: mol_type = other DNA
atgacacaggtcattgaagcgttctttatttttgtccatttctttctctgtgcctcattttgaatatcttttattgacat

SEQ ID NO: 102148 - DNA, 80 bp, synthetic construct
  misc_feature 1..80: note = Artificially Synthesized Probe
  source 1..80: mol_type = other DNA
tttatctatatgtttgagcatattagtacatgtataatagatgttttaactttcttgtctgctaatttcaacatttttgt

SEQ ID NO: 102149 - DNA, 80 bp, synthetic construct; identical to SEQ ID NO: 35707
  misc_feature 1..80: note = Artificially Synthesized Probe
  source 1..80: mol_type = other DNA

SEQ ID NO: 102150 - DNA, 80 bp, synthetic construct
  misc_feature 1..80: note = Artificially Synthesized Probe
  source 1..80: mol_type = other DNA
tttacataattttatccagtagctcttcattatctgctcctttatcagcattaggcattgcttatgatattcaggtatta

SEQ ID NO: 102151 - DNA, 80 bp, synthetic construct
  misc_feature 1..80: note = Artificially Synthesized Probe
  source 1..80: mol_type = other DNA
ctctgctttaaagagtcttggacttagttctgacgtgaagttaagttgctcagtaccaatttattcctttcaaggcttca

SEQ ID NO: 102152 - DNA, 80 bp, synthetic construct
  misc_feature 1..80: note = Artificially Synthesized Probe
  source 1..80: mol_type = other DNA
gtgagctctaggaattattctacccacttttttttttaattttgaagggatagcctgatctggggaggttgatcagtgat

SEQ ID NO: 102153 - DNA, 80 bp, synthetic construct
  misc_feature 1..80: note = Artificially Synthesized Probe
  source 1..80: mol_type = other DNA
tgttgaatttatgatttatgattttcttatggcaaaccaacctctacttccttggataaccgtaatttgattataattta

SEQ ID NO: 102154 - DNA, 80 bp, synthetic construct
  misc_feature 1..80: note = Artificially Synthesized Probe
  source 1..80: mol_type = other DNA
aagaagaatagtctttgaaaacttccagaaaattttctgtttcctgtaaaagtttgtataatctttgaattacttcttat

SEQ ID NO: 102155 - DNA, 80 bp, synthetic construct; identical to SEQ ID NO: 35708
  misc_feature 1..80: note = Artificially Synthesized Probe
  source 1..80: mol_type = other DNA

SEQ ID NO: 102156 - DNA, 80 bp, synthetic construct
  misc_feature 1..80: note = Artificially Synthesized Probe
  source 1..80: mol_type = other DNA
agatgtcctcttcccagccttttattttaaaccttttagtattatgggcatattccacaagttctttgctactgtctcac

SEQ ID NO: 102157 - DNA, 80 bp, synthetic construct
  misc_feature 1..80: note = Artificially Synthesized Probe
  source 1..80: mol_type = other DNA
gaatatttgttttgggggaagcctgccaccatgtaagaattctgactaccttgagattgtcatactgtaaagaagctcaa

SEQ ID NO: 102158 - DNA, 80 bp, synthetic construct
  misc_feature 1..80: note = Artificially Synthesized Probe
  source 1..80: mol_type = other DNA
agctggctcttttactggcttatgagaactgataatgcaaatttattcccaactctggattcaatgatgtcactttggta

SEQ ID NO: 102159 - DNA, 80 bp, synthetic construct; identical to SEQ ID NO: 35709
  misc_feature 1..80: note = Artificially Synthesized Probe
  source 1..80: mol_type = other DNA

SEQ ID NO: 102160 - DNA, 80 bp, synthetic construct
  misc_feature 1..80: note = Artificially Synthesized Probe
  source 1..80: mol_type = other DNA
tttaggcacaaatatttcaattttttgtgcgttatttttgtctcaccatttttatgtctctatttccttcctttgttgat

SEQ ID NO: 102161 - DNA, 80 bp, synthetic construct
  misc_feature 1..80: note = Artificially Synthesized Probe
  source 1..80: mol_type = other DNA
aaatcaaaagttaactgaaacccttcctccttctgggaaatgcagggaccttacatttttaaaatctttttaatcccttt

SEQ ID NO: 102162 - DNA, 80 bp, synthetic construct
  misc_feature 1..80: note = Artificially Synthesized Probe
  source 1..80: mol_type = other DNA
gtttaatagcttctctagtcatcttaaacagggttgggttagatgatatagactcagaaatgaaagctaacttagttgca

SEQ ID NO: 102163 - DNA, 80 bp, synthetic construct; identical to SEQ ID NO: 35710
  misc_feature 1..80: note = Artificially Synthesized Probe
  source 1..80: mol_type = other DNA

SEQ ID NO: 102164 - DNA, 80 bp, synthetic construct
  misc_feature 1..80: note = Artificially Synthesized Probe
  source 1..80: mol_type = other DNA
cctttaaaggtattctgtttattttcctttggctgcttttcagattttctgtgtgtctgatattttgcagttttaccatg

SEQ ID NO: 102165 - DNA, 80 bp, synthetic construct
  misc_feature 1..80: note = Artificially Synthesized Probe
  source 1..80: mol_type = other DNA
cattgcaccatatttgcaatcttttatccctcgccaccccccactcttgcccccaagtccccaacgtccattgtatagga

SEQ ID NO: 102166 - DNA, 80 bp, synthetic construct
  misc_feature 1..80: note = Artificially Synthesized Probe
  source 1..80: mol_type = other DNA
cttttattttaacaccttttgctctttgggctttattgtggatagttcacccaccttaaagtttaataattctctcttct

SEQ ID NO: 102167 - DNA, 80 bp, synthetic construct; identical to SEQ ID NO: 35711
  misc_feature 1..80: note = Artificially Synthesized Probe
  source 1..80: mol_type = other DNA

SEQ ID NO: 102168 - DNA, 80 bp, synthetic construct
  misc_feature 1..80: note = Artificially Synthesized Probe
  source 1..80: mol_type = other DNA
ccaaaagacacggggaccttctggaggtaaatctgcagaatggcattttgtttgtgaattctcggattgaccgcgaggag

SEQ ID NO: 102169 - DNA, 80 bp, synthetic construct
  misc_feature 1..80: note = Artificially Synthesized Probe
  source 1..80: mol_type = other DNA
tcaaatttattgttactttgtataatttctagtttcctctcgaaactttcaagcttggcatttatatctggaacacaata

SEQ ID NO: 102170 - DNA, 80 bp, synthetic construct
  misc_feature 1..80: note = Artificially Synthesized Probe
  source 1..80: mol_type = other DNA
tcctggaaataatttggggcttataacattttctttctccagaatggattttaattgacttttgccaggcatcttggggc

SEQ ID NO: 102171 - DNA, 80 bp, synthetic construct
  misc_feature 1..80: note = Artificially Synthesized Probe
  source 1..80: mol_type = other DNA
agagattgtttaagaagttccaccatgactggtagactcaggattctgacttttgtttctctagtccttggagactgtca

SEQ ID NO: 102172 - DNA, 80 bp, synthetic construct
  misc_feature 1..80: note = Artificially Synthesized Probe
  source 1..80: mol_type = other DNA
aataaaatcagggtaattagcatattcataatctcaaacatttaccatttttgcatggtgaacatttaaaatccactctt

SEQ ID NO: 102173 - DNA, 80 bp, synthetic construct
  misc_feature 1..80: note = Artificially Synthesized Probe
  source 1..80: mol_type = other DNA
tttgtcatcttgcctatggctcttagcaattacttttttctttcctttctctttgagtatggagattgaatttgttactc

SEQ ID NO: 102174 - DNA, 80 bp, synthetic construct; identical to SEQ ID NO: 35712
  misc_feature 1..80: note = Artificially Synthesized Probe
  source 1..80: mol_type = other DNA

SEQ ID NO: 102175 - DNA, 80 bp, synthetic construct
  misc_feature 1..80: note = Artificially Synthesized Probe
  source 1..80: mol_type = other DNA
ttctttatccactcatctgttgatggatattgaggttgattccacatagtagctattgtgaatagtgctgcagtaagtat

SEQ ID NO: 102176 - DNA, 80 bp, synthetic construct
  misc_feature 1..80: note = Artificially Synthesized Probe
  source 1..80: mol_type = other DNA
gcatttatgggacagtggctcatgcctgtaatcccagcacttagggaggcagaggcaggaagatcgcttgaagccaggag

SEQ ID NO: 102177 - DNA, 80 bp, synthetic construct
  misc_feature 1..80: note = Artificially Synthesized Probe
  source 1..80: mol_type = other DNA
tttctgaagtatagctctgcttggtatagtatttttggctgatagttttaaaaaatttcagcactttggatatatcatct

SEQ ID NO: 102178 - DNA, 80 bp, synthetic construct; identical to SEQ ID NO: 35713
  misc_feature 1..80: note = Artificially Synthesized Probe
  source 1..80: mol_type = other DNA

SEQ ID NO: 102179 - DNA, 80 bp, synthetic construct
  misc_feature 1..80: note = Artificially Synthesized Probe
  source 1..80: mol_type = other DNA
ttctagctcctggtgttgcagatgagaagtttcaaataacttgaaataattcccttctatgtaattatccctgattttga

SEQ ID NO: 102180 - DNA, 80 bp, synthetic construct
  misc_feature 1..80: note = Artificially Synthesized Probe
  source 1..80: mol_type = other DNA
tatttcttctgttttattacttcagatttcttcttcaatggctccaattatatttgtattagatattctttgcttttctt

SEQ ID NO: 102181 - DNA, 80 bp, synthetic construct
  misc_feature 1..80: note = Artificially Synthesized Probe
  source 1..80: mol_type = other DNA
ccttttttttaatattttactgagttttctcatctctcttttcaaagcttttcttctccaatcatatcattactgagtct

SEQ ID NO: 102182 - DNA, 80 bp, synthetic construct; identical to SEQ ID NO: 35714
  misc_feature 1..80: note = Artificially Synthesized Probe
  source 1..80: mol_type = other DNA

SEQ ID NO: 102183 - DNA, 80 bp, synthetic construct
  misc_feature 1..80: note = Artificially Synthesized Probe
  source 1..80: mol_type = other DNA
ctgcttcatatggactcaattcctatcagttcctcctcagtataggggtttttgctacaagaagacatttgttagttgac

SEQ ID NO: 102184 - DNA, 80 bp, synthetic construct; identical to SEQ ID NO: 35677
  misc_feature 1..80: note = Artificially Synthesized Probe
  source 1..80: mol_type = other DNA

SEQ ID NO: 102185 - DNA, 80 bp, synthetic construct
  misc_feature 1..80: note = Artificially Synthesized Probe
  source 1..80: mol_type = other DNA
gctttcttttttttcttactcagggataattgaattaggaccttcgatttccccccttccacccatgactattgttctca

SEQ ID NO: 102186 - DNA, 80 bp, synthetic construct
  misc_feature 1..80: note = Artificially Synthesized Probe
  source 1..80: mol_type = other DNA
cttattggtcatttctttatcctcttcggagaaatacctattcagaacttttgcccaatttttaattggtttattcgttt

SEQ ID NO: 102187 - DNA, 80 bp, synthetic construct; identical to SEQ ID NO: 35715
  misc_feature 1..80: note = Artificially Synthesized Probe
  source 1..80: mol_type = other DNA

SEQ ID NO: 102188 - DNA, 80 bp, synthetic construct
  misc_feature 1..80: note = Artificially Synthesized Probe
  source 1..80: mol_type = other DNA
agcctcccgagtagctgggattacaggtgcctgtcaccaggcctagctaatttttgtattttaagtagagacagggtttc

SEQ ID NO: 102189 - DNA, 80 bp, synthetic construct
  misc_feature 1..80: note = Artificially Synthesized Probe
  source 1..80: mol_type = other DNA
ttatccagtgcaccattgatgggcatttaggattattctctgtctttgctattgtgaatagtgccatgatgaacatacac

SEQ ID NO: 102190 - DNA, 80 bp, synthetic construct
  misc_feature 1..80: note = Artificially Synthesized Probe
  source 1..80: mol_type = other DNA
cttttctctgcaacctcaccagcatctgttatttttgactttttagtaatagccattctgactggtgtgactgcaacctc

SEQ ID NO: 102191 - DNA, 80 bp, synthetic construct; identical to SEQ ID NO: 35716
  misc_feature 1..80: note = Artificially Synthesized Probe
  source 1..80: mol_type = other DNA

SEQ ID NO: 102192 - DNA, 80 bp, synthetic construct
  misc_feature 1..80: note = Artificially Synthesized Probe
  source 1..80: mol_type = other DNA
tgggtacataataagtgtacatatttatggggtatatgagacattttgatacaagcatgcaatgcacaataatcacatca

SEQ ID NO: 102193 - DNA, 80 bp, synthetic construct
  misc_feature 1..80: note = Artificially Synthesized Probe
  source 1..80: mol_type = other DNA
tcctcattaaaaatctccactttctgtccacaccccactaaactttctagcctttgttaaccattcttctactgtctatc

SEQ ID NO: 102194 - DNA, 80 bp, synthetic construct; identical to SEQ ID NO: 35717
  misc_feature 1..80: note = Artificially Synthesized Probe
  source 1..80: mol_type = other DNA

SEQ ID NO: 102195 - DNA, 80 bp, synthetic construct
  misc_feature 1..80: note = Artificially Synthesized Probe
  source 1..80: mol_type = other DNA
agaggccaaggtgggaggatggtttgaggccaggagttcaagaccaacctgggcgacatagggatatcttgtactgtgtg

SEQ ID NO: 102196 - DNA, 80 bp, synthetic construct
  misc_feature 1..80: note = Artificially Synthesized Probe
  source 1..80: mol_type = other DNA
tttcttaatccagtctgtcattgttggacatttgggttggttccaagtctttactattgtgtatagtgccacaataaaca

SEQ ID NO: 102197 - DNA, 80 bp, synthetic construct
  misc_feature 1..80: note = Artificially Synthesized Probe
  source 1..80: mol_type = other DNA
gtgtaaaagtgttcctatttctccacatcctctccagcacctgttgtttcctgactttttaatgattgccattctaactg

SEQ ID NO: 102198 - DNA, 80 bp, synthetic construct
  misc_feature 1..80: note = Artificially Synthesized Probe
  source 1..80: mol_type = other DNA
cttgtaaatttgtttgagttcattgtagattctggatattagccctttgtcagatgagtaggttgcgaaaattttctccc

SEQ ID NO: 102199 - DNA, 80 bp, synthetic construct; identical to SEQ ID NO: 35718
  misc_feature 1..80: note = Artificially Synthesized Probe
  source 1..80: mol_type = other DNA

SEQ ID NO: 102200 - DNA, 80 bp, synthetic construct
  misc_feature 1..80: note = Artificially Synthesized Probe
  source 1..80: mol_type = other DNA
tgttctgttccatttatctatgtctctgttttggtaccagtgccatgctgttttggttactgtagccttgtagtatagtt

SEQ ID NO: 102201 - DNA, 80 bp, synthetic construct
  misc_feature 1..80: note = Artificially Synthesized Probe
  source 1..80: mol_type = other DNA
aattaccttgggcagtatggccattttcacgatactgattcttcctacccatgagcatggaatgttcttccatttctttg

SEQ ID NO: 102202 - DNA, 80 bp, synthetic construct
  misc_feature 1..80: note = Artificially Synthesized Probe
  source 1..80: mol_type = other DNA
taagaatgcttgtgatttttgtacattgattttgtatcctgagactttgctgaagttgcttatcagcttaaggagatttt

SEQ ID NO: 102203 - DNA, 80 bp, synthetic construct
  misc_feature 1..80: note = Artificially Synthesized Probe
  source 1..80: mol_type = other DNA
agggcatccctgtcttgtggcagttttcaaagggaatacttccagtttttgcccattcagtatgatattggctgtgggtt

SEQ ID NO: 102204 - DNA, 80 bp, synthetic construct; identical to SEQ ID NO: 35719
  misc_feature 1..80: note = Artificially Synthesized Probe
  source 1..80: mol_type = other DNA

SEQ ID NO: 102205 - DNA, 80 bp, synthetic construct
  misc_feature 1..80: note = Artificially Synthesized Probe
  source 1..80: mol_type = other DNA
ttgattggaatagtttcagaaggaatggtaccagttcctccttttacctctggtataattcggctgtgaatccaatattt

SEQ ID NO: 102206 - DNA, 80 bp, synthetic construct
  misc_feature 1..80: note = Artificially Synthesized Probe
  source 1..80: mol_type = other DNA
ggaggacggcttgagcctgggaagttgaggctgcagtgacccatgattgtgccactgcactccagcctggatgacaaagt

SEQ ID NO: 102207 - DNA, 80 bp, synthetic construct
  misc_feature 1..80: note = Artificially Synthesized Probe
  source 1..80: mol_type = other DNA
cagctacttttttgattttttttgtagagatgaggtctcactttgttacccagtttggccttgaattcctgggctcaagt

SEQ ID NO: 102208 - DNA, 80 bp, synthetic construct
  misc_feature 1..80: note = Artificially Synthesized Probe
  source 1..80: mol_type = other DNA
aggttgttgcaaatgactggatcttgttttttttatggctgaatagtactccattgtgtatatgtaccacactttctttt

SEQ ID NO: 102209 - DNA, 80 bp, synthetic construct; identical to SEQ ID NO: 35720
  misc_feature 1..80: note = Artificially Synthesized Probe
  source 1..80: mol_type = other DNA

SEQ ID NO: 102210 - DNA, 80 bp, synthetic construct
  misc_feature 1..80: note = Artificially Synthesized Probe
  source 1..80: mol_type = other DNA
tgatttccgttcttttggaaagaaaggaaatcctacctagcagtgggatttctggatcacttggtagctctatttttggc

SEQ ID NO: 102211 - DNA, 80 bp, synthetic construct
  misc_feature 1..80: note = Artificially Synthesized Probe
  source 1..80: mol_type = other DNA
tagttttgatttgcatttctctgattatcagtgatgttgagtatcttttcctatacctgtttgctattagtatgtcttct

SEQ ID NO: 102212 - DNA, 80 bp, synthetic construct
  misc_feature 1..80: note = Artificially Synthesized Probe
  source 1..80: mol_type = other DNA
cactttgttgattgtttgcttttctgtgcagaaggtttttaagttgatgtgatcccatatatccatttttttcctttggt

SEQ ID NO: 102213 - DNA, 80 bp, synthetic construct; identical to SEQ ID NO: 35721
  misc_feature 1..80: note = Artificially Synthesized Probe
  source 1..80: mol_type = other DNA

SEQ ID NO: 102214 - DNA, 80 bp, synthetic construct
  misc_feature 1..80: note = Artificially Synthesized Probe
  source 1..80: mol_type = other DNA
tgttctttttgctcaagatacctttaggtattatgggtattttgtagttctatatacattttcagattgtcttttctatt

SEQ ID NO: 102215 - DNA, 80 bp, synthetic construct
  misc_feature 1..80: note = Artificially Synthesized Probe
  source 1..80: mol_type = other DNA
tatatttttcattgtggagatctttcacttctttggttaattcctaggtatatttagttttattcgtggctatcgtaaat

SEQ ID NO: 102216 - DNA, 80 bp, synthetic construct; identical to SEQ ID NO: 35722
  misc_feature 1..80: note = Artificially Synthesized Probe
  source 1..80: mol_type = other DNA

SEQ ID NO: 102217 - DNA, 80 bp, synthetic construct
  misc_feature 1..80: note = Artificially Synthesized Probe
  source 1..80: mol_type = other DNA
atttgtaagacaaacccacctttgaagaggtactgatcatacacaagaaggtataggaaaggagttggaagctcacaaag

SEQ ID NO: 102218 - DNA, 80 bp, synthetic construct
  misc_feature 1..80: note = Artificially Synthesized Probe
  source 1..80: mol_type = other DNA
aattgctctagctaagagtactatgttgaatactatgttgaataacagtggtgaaagtgggcatccttgtcatattctag

SEQ ID NO: 102219 - DNA, 80 bp, synthetic construct
  misc_feature 1..80: note = Artificially Synthesized Probe
  source 1..80: mol_type = other DNA
tacatgggtaagttatttagtggtgatttctgagattttggtgcacctgtcacccaagcagtgtacaccgtacctaatat

SEQ ID NO: 102220 - DNA, 80 bp, synthetic construct
  misc_feature 1..80: note = Artificially Synthesized Probe
  source 1..80: mol_type = other DNA
aaatggcgtccaggtccacccaagctgctgcaaaagctattattttatttagtttatggctgagtagtattgcatggtgt

SEQ ID NO: 102221 - DNA, 80 bp, synthetic construct; identical to SEQ ID NO: 35723
  misc_feature 1..80: note = Artificially Synthesized Probe
  source 1..80: mol_type = other DNA

SEQ ID NO: 102222 - DNA, 80 bp, synthetic construct
  misc_feature 1..80: note = Artificially Synthesized Probe
  source 1..80: mol_type = other DNA
ggaaaggatgcattttaaaaaacaagtttttcaaaaatatagggaggattgtggttacttctagaaacagtagtgcagtc

SEQ ID NO: 102223 - DNA, 80 bp, synthetic construct
  misc_feature 1..80: note = Artificially Synthesized Probe
  source 1..80: mol_type = other DNA
agctgtctagctggtgttggcctgataaatgcttaatacacatgaatgtgcatgcatatgtatgcatataccatatacat

SEQ ID NO: 102224 - DNA, 80 bp, synthetic construct
  misc_feature 1..80: note = Artificially Synthesized Probe
  source 1..80: mol_type = other DNA
agttctcacatgaatgtctgttggtattttcatttatcttaacaaataatatagagtaaaatgacaaagacattgaatct

SEQ ID NO: 102225 - DNA, 80 bp, synthetic construct; identical to SEQ ID NO: 35724
  misc_feature 1..80: note = Artificially Synthesized Probe
  source 1..80: mol_type = other DNA

SEQ ID NO: 102226 - DNA, 80 bp, synthetic construct
  misc_feature 1..80: note = Artificially Synthesized Probe
  source 1..80: mol_type = other DNA
gttttccattcctgagtttcttcacttagaataatggtctccagttccatccaggttgctgagaatgccattatttcatt

SEQ ID NO: 102227 - DNA, 80 bp, synthetic construct
  misc_feature 1..80: note = Artificially Synthesized Probe
  source 1..80: mol_type = other DNA
tgttcaagtatctttttcatataatgacttttttttcctctgggtagacacccagtagtgggactgctggatcaaatagt

SEQ ID NO: 102228 - DNA, 80 bp, synthetic construct
  misc_feature 1..80: note = Artificially Synthesized Probe
  source 1..80: mol_type = other DNA
cgctctgttgcccaggctggagtgcagtggcacgatctcggctcactgcaagctccgcctcccaggttcacgctattctc

SEQ ID NO: 102229 - DNA, 80 bp, synthetic construct
  misc_feature 1..80: note = Artificially Synthesized Probe
  source 1..80: mol_type = other DNA
tatcacattattgttttaatttgcattttcctgataattagtgatgttgagcatttttttatatgtttcatatcttcttc

SEQ ID NO: 102230 - DNA, 80 bp, synthetic construct
  misc_feature 1..80: note = Artificially Synthesized Probe
  source 1..80: mol_type = other DNA
aattcttttctatgcagaagctttttagtttaattaggtcccatttatttatttttgttgtagttgcactttcttttggg

SEQ ID NO: 102231 - DNA, 80 bp, synthetic construct; identical to SEQ ID NO: 35725
  misc_feature 1..80: note = Artificially Synthesized Probe
  source 1..80: mol_type = other DNA

SEQ ID NO: 102232 - DNA, 80 bp, synthetic construct
  misc_feature 1..80: note = Artificially Synthesized Probe
  source 1..80: mol_type = other DNA
ttttgttttgtattgccttggggatgtgggctcttttttggttccatatgaactttaggattgtgtttttctagtcatgt

SEQ ID NO: 102233 - DNA, 80 bp, synthetic construct
  misc_feature 1..80: note = Artificially Synthesized Probe
  source 1..80: mol_type = other DNA
tttccttgtagagatctttcacctccttggttaagtatattccgaagtgtattagtcagggttctctagagggacagaat

SEQ ID NO: 102234 - DNA, 80 bp, synthetic construct
  misc_feature 1..80: note = Artificially Synthesized Probe
  source 1..80: mol_type = other DNA
tccagcatgggagaaagatgtaggctgggaggctaagccagtctaatctctccacgttcttctgtctgcttttattctgg

SEQ ID NO: 102235 - DNA, 80 bp, synthetic construct; identical to SEQ ID NO: 35726
  misc_feature 1..80: note = Artificially Synthesized Probe
  source 1..80: mol_type = other DNA

SEQ ID NO: 102236 - DNA, 80 bp, synthetic construct
  misc_feature 1..80: note = Artificially Synthesized Probe
  source 1..80: mol_type = other DNA
aaaatgaagatattttcttagtacaaatgtataaatgcacaaacatgtttttaacaaagaaggaggaaatactcacgaca

SEQ ID NO: 102237 - DNA, 80 bp, synthetic construct
  misc_feature 1..80: note = Artificially Synthesized Probe
  source 1..80: mol_type = other DNA
atctgggccatttgtagtcctgcctggattgtgctgttgtagtttcccattgacacagggcatggtaatactaagagaca

SEQ ID NO: 102238 - DNA, 80 bp, synthetic construct; identical to SEQ ID NO: 35109
  misc_feature 1..80: note = Artificially Synthesized Probe
  source 1..80: mol_type = other DNA

SEQ ID NO: 102239 - DNA, 80 bp, synthetic construct; identical to SEQ ID NO: 35678
  misc_feature 1..80: note = Artificially Synthesized Probe
  source 1..80: mol_type = other DNA

SEQ ID NO: 102240 - DNA, 80 bp, synthetic construct; identical to SEQ ID NO: 35727
  misc_feature 1..80: note = Artificially Synthesized Probe
  source 1..80: mol_type = other DNA

SEQ ID NO: 102241 - DNA, 80 bp, synthetic construct
  misc_feature 1..80: note = Artificially Synthesized Probe
  source 1..80: mol_type = other DNA
cacgatggtggataaggcattctgtgagtccacagatggtaatcttggcagaagcaatgtgtgcaggataggcaaaccca

SEQ ID NO: 102242 - DNA, 80 bp, synthetic construct
  misc_feature 1..80: note = Artificially Synthesized Probe
  source 1..80: mol_type = other DNA
ggcactcagcagtggctgtagccaggtcagccttggtgagtggaagtccctgttgctgagcccatgtgtaacctccatcc

SEQ ID NO: 102243 - DNA, 80 bp, synthetic construct; identical to SEQ ID NO: 35728
  misc_feature 1..80: note = Artificially Synthesized Probe
  source 1..80: mol_type = other DNA

SEQ ID NO: 102244 - DNA, 80 bp, synthetic construct
  misc_feature 1..80: note = Artificially Synthesized Probe
  source 1..80: mol_type = other DNA
gctgtccttcaggtatgtcctaggaaggggctgtagtgctgcagctgtccactttcaggtggtggacatatcatgcagaa

SEQ ID NO: 102245 - DNA, 80 bp, synthetic construct
  misc_feature 1..80: note = Artificially Synthesized Probe
  source 1..80: mol_type = other DNA
aggacctgctcgagcccgatcacatatataccacttccatttgatgatggaatgctgctgtgcgcaccccactttatggc

SEQ ID NO: 102246 - DNA, 80 bp, synthetic construct
  misc_feature 1..80: note = Artificially Synthesized Probe
  source 1..80: mol_type = other DNA
gctccaaaatccttgaggtctccactgtgattcacttatgggggcctgccaaaggctccaaatagcatccctatctgcca

SEQ ID NO: 102247 - DNA, 80 bp, synthetic construct
  misc_feature 1..80: note = Artificially Synthesized Probe
  source 1..80: mol_type = other DNA
ggaactaagtctttctagtcatgaaatattgttttactaaccaaaagagaggcataattttagctgctagacaaagtggc

SEQ ID NO: 102248 - DNA, 80 bp, synthetic construct
  misc_feature 1..80: note = Artificially Synthesized Probe
  source 1..80: mol_type = other DNA
cccaaatgaggaatgtgttgcctccaaaatccaatagtcccaaataagcctctttcgtggttgtaggaggggccaaatgc

SEQ ID NO: 102249 - DNA, 80 bp, synthetic construct; identical to SEQ ID NO: 35729
  misc_feature 1..80: note = Artificially Synthesized Probe
  source 1..80: mol_type = other DNA

SEQ ID NO: 102250 - DNA, 80 bp, synthetic construct
  misc_feature 1..80: note = Artificially Synthesized Probe
  source 1..80: mol_type = other DNA
gttgcataccaggtaccaagagatgtgttaatttgttcaagcaatgaaaccacatctagtacagcagctgcaattgcagt

SEQ ID NO: 102251 - DNA, 80 bp, synthetic construct
  misc_feature 1..80: note = Artificially Synthesized Probe
  source 1..80: mol_type = other DNA
gagatgtgatatgttttttgatttactatttttctaggtagaggcagctctaattggtcttcctattttgtcttttccat

SEQ ID NO: 102252 - DNA, 80 bp, synthetic construct
  misc_feature 1..80: note = Artificially Synthesized Probe
  source 1..80: mol_type = other DNA
ccataagcccctactttaactggaggaccaccaggacgttttcggtcccctggagtcaacgtcagcttagagacactgtt

SEQ ID NO: 102253 - DNA, 80 bp, synthetic construct; identical to SEQ ID NO: 35730
  misc_feature 1..80: note = Artificially Synthesized Probe
  source 1..80: mol_type = other DNA

SEQ ID NO: 102254 - DNA, 80 bp, synthetic construct
  misc_feature 1..80: note = Artificially Synthesized Probe
  source 1..80: mol_type = other DNA
atcaacagatgccagagatctacatgagtcagactattgtgattgctgctttgcctctgctgtccattatggtagctatg

SEQ ID NO: 102255 - DNA, 80 bp, synthetic construct
  misc_feature 1..80: note = Artificially Synthesized Probe
  source 1..80: mol_type = other DNA
tcacaaatctattttgcaaagtattagtcaaggatatattttctggatcctcccagctgggatgagtaggtctaaactga

SEQ ID NO: 102256 - DNA, 80 bp, synthetic construct; identical to SEQ ID NO: 35731
  misc_feature 1..80: note = Artificially Synthesized Probe
  source 1..80: mol_type = other DNA

SEQ ID NO: 102257 - DNA, 80 bp, synthetic construct
  misc_feature 1..80: note = Artificially Synthesized Probe
  source 1..80: mol_type = other DNA
ggactttagtctagttataggtctagaagcaaacaggggtggtggggggtgggtcctgaggagaatcaacattatcttgc

SEQ ID NO: 102258 - DNA, 80 bp, synthetic construct
  misc_feature 1..80: note = Artificially Synthesized Probe
  source 1..80: mol_type = other DNA
ataccgcgcctgtttcagttggattccaaaagccgcagaaaccttctggaggtaaatctgcagaatggcatttttgtgag

SEQ ID NO: 102259 - DNA, 80 bp, synthetic construct
  misc_feature 1..80: note = Artificially Synthesized Probe
  source 1..80: mol_type = other DNA
tcagaatttataatctcagtgtccccagcttcatcagggtccttttacatatccccattccaagtttcaggatcccattc

SEQ ID NO: 102260 - DNA, 80 bp, synthetic construct
  misc_feature 1..80: note = Artificially Synthesized Probe
  source 1..80: mol_type = other DNA
ttagcaggtttgaggttcagtatctgcttctgaagctaggaattagaatccctaagttcatcattttctttcatcacttt

SEQ ID NO: 102261 - DNA, 80 bp, synthetic construct; identical to SEQ ID NO: 35732
  misc_feature 1..80: note = Artificially Synthesized Probe
  source 1..80: mol_type = other DNA

SEQ ID NO: 102262 - DNA, 80 bp, synthetic construct
  misc_feature 1..80: note = Artificially Synthesized Probe
  source 1..80: mol_type = other DNA
taactcacatgatcacaaggtcccacaataggccatctgcaagctgaggagcaagcaagccaatccaagtcccaaagctg

SEQ ID NO: 102263 - DNA, 80 bp, synthetic construct
  misc_feature 1..80: note = Artificially Synthesized Probe
  source 1..80: mol_type = other DNA
agatctgcctttcccagtccactgactcaaatgttaatctcctttgatgacaccctcacagatatacccaggaacaatac

SEQ ID NO: 102264 - DNA, 80 bp, synthetic construct
  misc_feature 1..80: note = Artificially Synthesized Probe
  source 1..80: mol_type = other DNA
gattttgtatcctggaactttactgaattcatttatcagatctaggagctttttggatgaatctttagggttttcagagt

SEQ ID NO: 102265 - DNA, 80 bp, synthetic construct
  misc_feature 1..80: note = Artificially Synthesized Probe
  source 1..80: mol_type = other DNA
tcagggggaatgctttcaacttttctccattcaatatgatgttggctgtgggtctgtcatagatggcttttattactttg

SEQ ID NO: 102266 - DNA, 80 bp, synthetic construct; identical to SEQ ID NO: 35733
  misc_feature 1..80: note = Artificially Synthesized Probe
  source 1..80: mol_type = other DNA

SEQ ID NO: 102267 - DNA, 80 bp, synthetic construct
  misc_feature 1..80: note = Artificially Synthesized Probe
  source 1..80: mol_type = other DNA
agacaacctgccagtgttctcagcaacacaaaagaatctgtttctgaaacgagagctcttgattatcgtgtttcactaga

SEQ ID NO: 102268 - DNA, 80 bp, synthetic construct
  misc_feature 1..80: note = Artificially Synthesized Probe
  source 1..80: mol_type = other DNA
tcttctttaaatgtttggtagaatttggcagtgaagccaatgggtcccaggctttactttgctgggagactttttgttac

SEQ ID NO: 102269 - DNA, 80 bp, synthetic construct
  misc_feature 1..80: note = Artificially Synthesized Probe
  source 1..80: mol_type = other DNA
ttcctgcagtatcagttgtaatgcctcctttttcagctccgattttatttacttgggtcttctctctttttttcttcatt

SEQ ID NO: 102270 - DNA, 80 bp, synthetic construct; identical to SEQ ID NO: 35734
  misc_feature 1..80: note = Artificially Synthesized Probe
  source 1..80: mol_type = other DNA

SEQ ID NO: 102271 - DNA, 80 bp, synthetic construct
  misc_feature 1..80: note = Artificially Synthesized Probe
  source 1..80: mol_type = other DNA
caaaattccccttttttatttctaattttacttcattgtggtcagagaagaatcttgatatgatatcatttttaaaaaaa

SEQ ID NO: 102272 - DNA, 80 bp, synthetic construct
  misc_feature 1..80: note = Artificially Synthesized Probe
  source 1..80: mol_type = other DNA
tgagtttttgtctgtcagttctgtccaatacggaaagtggggtgttgaattctccacctattattgtattgtgatctcta

SEQ ID NO: 102273 - DNA, 80 bp, synthetic construct
  misc_feature 1..80: note = Artificially Synthesized Probe
  source 1..80: mol_type = other DNA
attttatctgttataagtgtagttacccctgctcctgttttgtttccattagcaaggaatatcttttcccatgtctttat

SEQ ID NO: 102274 - DNA, 80 bp, synthetic construct
  misc_feature 1..80: note = Artificially Synthesized Probe
  source 1..80: mol_type = other DNA
attttgtaatttgttttctcgtggtttcatggtcatctctcccttctttccatcttctttttcatgaaaataattttctc

SEQ ID NO: 102275 - DNA, 80 bp, synthetic construct
  misc_feature 1..80: note = Artificially Synthesized Probe
  source 1..80: mol_type = other DNA
taccaagagcaggtaaaaccacttgaaggtgtattttaaaaattctttcagataggtaagtcacttcagagctactcttg

SEQ ID NO: 102276 - DNA, 80 bp, synthetic construct; identical to SEQ ID NO: 35735
  misc_feature 1..80: note = Artificially Synthesized Probe
  source 1..80: mol_type = other DNA

SEQ ID NO: 102277 - DNA, 80 bp, synthetic construct
  misc_feature 1..80: note = Artificially Synthesized Probe
  source 1..80: mol_type = other DNA
ggcacgcaccaccacaacacccacctaatttttatatttttagtagagacggggtttcaccatgttggccaggatagtct

SEQ ID NO: 102278 - DNA, 80 bp, synthetic construct
  misc_feature 1..80: note = Artificially Synthesized Probe
  source 1..80: mol_type = other DNA
atattctgtgtttttctgtatgcctattcttaccagtaagtgtctcggcattgaagagctaggtatttcttatagtcttt

SEQ ID NO: 102279 - DNA, 80 bp, synthetic construct; identical to SEQ ID NO: 35736
  misc_feature 1..80: note = Artificially Synthesized Probe
  source 1..80: mol_type = other DNA

SEQ ID NO: 102280 - DNA, 80 bp, synthetic construct
  misc_feature 1..80: note = Artificially Synthesized Probe
  source 1..80: mol_type = other DNA
cactcaaggccctagggctctaagatcagcagggggtgacaccagccaagtttgcatccttccctttagggtagcaagtt

SEQ ID NO: 102281 - DNA, 80 bp, synthetic construct
  misc_feature 1..80: note = Artificially Synthesized Probe
  source 1..80: mol_type = other DNA
ttgactctcgatttccactagaaggcgcatctgatgcggatgttggagagaacgcattgcttacttacaaactcagtcca

SEQ ID NO: 102282 - DNA, 80 bp, synthetic construct
  misc_feature 1..80: note = Artificially Synthesized Probe
  source 1..80: mol_type = other DNA
gaggtgcctctccctgtggccagtactaccactggtccacagggaatctgcctggccactgctgatgttcacttaaagct

SEQ ID NO: 102283 - DNA, 80 bp, synthetic construct
  misc_feature 1..80: note = Artificially Synthesized Probe
  source 1..80: mol_type = other DNA
gccaaactggtaccaaaggtgcaagacaaagtcccctttactttttcctctgtttctgtcaaacagaaggagtctttcac

SEQ ID NO: 102284 - DNA, 80 bp, synthetic construct
  misc_feature 1..80: note = Artificially Synthesized Probe
  source 1..80: mol_type = other DNA
ccaccaaggcaatgggttttctatttgtccagggtgtgtctagaaatgtcatccatgagctagggcctggaatgcgggcc

SEQ ID NO: 102285 - DNA, 80 bp, synthetic construct; identical to SEQ ID NO: 35679
  misc_feature 1..80: note = Artificially Synthesized Probe
  source 1..80: mol_type = other DNA

SEQ ID NO: 102286 - DNA, 80 bp, synthetic construct; identical to SEQ ID NO: 35737
  misc_feature 1..80: note = Artificially Synthesized Probe
  source 1..80: mol_type = other DNA

SEQ ID NO: 102287 - DNA, 80 bp, synthetic construct
  misc_feature 1..80: note = Artificially Synthesized Probe
  source 1..80: mol_type = other DNA
ccttcatgtgcagctgctggctgagtccagcacagtgttgttccctgctacgacagcaccgagtttaatgtaaagttccc

SEQ ID NO: 102288 - DNA, 80 bp, synthetic construct
  misc_feature 1..80: note = Artificially Synthesized Probe
  source 1..80: mol_type = other DNA
tgctcacctgatgtttggtttttgtaatgacgcttttccgtgtgcagatagttgttacaatttggtgttcatgtggcggg

SEQ ID NO: 102289 - DNA, 80 bp, synthetic construct
  misc_feature 1..80: note = Artificially Synthesized Probe
  source 1..80: mol_type = other DNA
tgcccagaatgatattttctaggttttattctacggtttgtatagttttaggttttacatttaactctttaatccatctc

SEQ ID NO: 102290 - DNA, 80 bp, synthetic construct; identical to SEQ ID NO: 35738
  misc_feature 1..80: note = Artificially Synthesized Probe
  source 1..80: mol_type = other DNA

SEQ ID NO: 102291 - DNA, 80 bp, synthetic construct
  misc_feature 1..80: note = Artificially Synthesized Probe
  source 1..80: mol_type = other DNA
gtgaattgctttggacagtatggttatcttaacaatgttgtttcttcctacccatgagcgtggaaggtctttccatttgt

SEQ ID NO: 102292 - DNA, 80 bp, synthetic construct
  misc_feature 1..80: note = Artificially Synthesized Probe
  source 1..80: mol_type = other DNA
gtacagaaatgctgatttttgtacattgattttgtatgctgaaactttgctggaggttttatcagatgtaggagcttttt

SEQ ID NO: 102293 - DNA, 80 bp, synthetic construct; identical to SEQ ID NO: 35739
  misc_feature 1..80: note = Artificially Synthesized Probe
  source 1..80: mol_type = other DNA

SEQ ID NO: 102294 - DNA, 80 bp, synthetic construct
  misc_feature 1..80: note = Artificially Synthesized Probe
  source 1..80: mol_type = other DNA
cataattaagtcatgagggcagagccctcatgaatgggattggtgcccttataaaagaggcccagagaggtgccttgcct

SEQ ID NO: 102295 - DNA, 80 bp, synthetic construct
  misc_feature 1..80: note = Artificially Synthesized Probe
  source 1..80: mol_type = other DNA
cattttgttataatatcctgaacagactaagacagatatcgtttaggttagttggtttttagtgttgttcacatctttca

SEQ ID NO: 102296 - DNA, 80 bp, synthetic construct
  misc_feature 1..80: note = Artificially Synthesized Probe
  source 1..80: mol_type = other DNA
cacagacttgatagaagtcttggacatcaatgatagtgttccagagttagcagtaagtcactatcattccctgtacagga

SEQ ID NO: 102297 - DNA, 80 bp, synthetic construct
  misc_feature 1..80: note = Artificially Synthesized Probe
  source 1..80: mol_type = other DNA
gttttggggctctattattagatgcaagtatgtttttagttgctatatcttcctgattggtccttttgtcattataaaat

SEQ ID NO: 102298 - DNA, 80 bp, synthetic construct; identical to SEQ ID NO: 35740
  misc_feature 1..80: note = Artificially Synthesized Probe
  source 1..80: mol_type = other DNA

SEQ ID NO: 102299 - DNA, 80 bp, synthetic construct
  misc_feature 1..80: note = Artificially Synthesized Probe
  source 1..80: mol_type = other DNA
actgtatcttttgagttattttcacagtagtttctctagagtttaccatatatattttagcttattggtatctgcttcag

SEQ ID NO: 102300 - DNA, 80 bp, synthetic construct
  misc_feature 1..80: note = Artificially Synthesized Probe
  source 1..80: mol_type = other DNA
tgacctcatttggaaataagtctttgaagacataattatattagagatttggggatgaaattaccctaaattttcaggtg

SEQ ID NO: 102301 - DNA, 80 bp, synthetic construct
  misc_feature 1..80: note = Artificially Synthesized Probe
  source 1..80: mol_type = other DNA
gcctctaaagggagtgcaaccttgccaacatcttgagttttaattctcctctccaaacctgggagaaaaactgtcttaag

SEQ ID NO: 102302 - DNA, 80 bp, synthetic construct
  misc_feature 1..80: note = Artificially Synthesized Probe
  source 1..80: mol_type = other DNA
agaggcactaagagaaaaaaggagaaaattatatatttatggcatttcttatttgtcattgctagttctattcatttatt

SEQ ID NO: 102303 - DNA, 80 bp, synthetic construct; identical to SEQ ID NO: 35741
  misc_feature 1..80: note = Artificially Synthesized Probe
  source 1..80: mol_type = other DNA

SEQ ID NO: 102304 - DNA, 80 bp, synthetic construct
  misc_feature 1..80: note = Artificially Synthesized Probe
  source 1..80: mol_type = other DNA
acaaacattagcttggcatggtggtgtgcgcctgcagtcccagctactcaggaggctgaggcaggagaattgcttacacc

SEQ ID NO: 102305 - DNA, 80 bp, synthetic construct
  misc_feature 1..80: note = Artificially Synthesized Probe
  source 1..80: mol_type = other DNA
tctagccctttcattctaaacactacacatgtagtactagagtataatattgtatttgcttattttttcagagtcagggt

SEQ ID NO: 102306 - DNA, 80 bp, synthetic construct
  misc_feature 1..80: note = Artificially Synthesized Probe
  source 1..80: mol_type = other DNA
cataaagcacagttttttcacaatagattgacaacgataattcacgtcttttttgctagatgatattaagccacagatca

SEQ ID NO: 102307 - DNA, 80 bp, synthetic construct; identical to SEQ ID NO: 35742
  misc_feature 1..80: note = Artificially Synthesized Probe
  source 1..80: mol_type = other DNA

SEQ ID NO: 102308 - DNA, 80 bp, synthetic construct; identical to SEQ ID NO: 35680
  misc_feature 1..80: note = Artificially Synthesized Probe
  source 1..80: mol_type = other DNA

SEQ ID NO: 102309 - DNA, 80 bp, synthetic construct
  misc_feature 1..80: note = Artificially Synthesized Probe
  source 1..80: mol_type = other DNA
gaacttaataaaaatttaacagttatcatcaaacactggccacctcaattttaaacagtaaacacacgaattactcccat

SEQ ID NO: 102310 - DNA, 80 bp, synthetic construct
  misc_feature 1..80: note = Artificially Synthesized Probe
  source 1..80: mol_type = other DNA
aaggaggataaatatatattacatgataaaacttatagtcaatataattttacacttgtaaaatcccagaaaaccaaagg

SEQ ID NO: 102311 - DNA, 80 bp, synthetic construct
  misc_feature 1..80: note = Artificially Synthesized Probe
  source 1..80: mol_type = other DNA
ctcttatcctccatgaaactcatcaaaaacaacaaaaagtacagcagacaaaaaaaaagtcttatctttaatgaaacttt

SEQ ID NO: 102312 - DNA, 80 bp, synthetic construct; identical to SEQ ID NO: 35743
  misc_feature 1..80: note = Artificially Synthesized Probe
  source 1..80: mol_type = other DNA

SEQ ID NO: 102313 - DNA, 80 bp, synthetic construct
  misc_feature 1..80: note = Artificially Synthesized Probe
  source 1..80: mol_type = other DNA
gttgccctgtagccgccagttctcatcagttgaagatatattaaaactatggtacacataagccactccatcaaacagta

SEQ ID NO: 102314 - DNA, 80 bp, synthetic construct
  misc_feature 1..80: note = Artificially Synthesized Probe
  source 1..80: mol_type = other DNA
ggagatacagcatactgctaatagatgtcctcaaagagaccaaatacatagacaaggggaaaaaatccaaagacatcatt

SEQ ID NO: 102315 - DNA, 80 bp, synthetic construct; identical to SEQ ID NO: 35744
  misc_feature 1..80: note = Artificially Synthesized Probe
  source 1..80: mol_type = other DNA

SEQ ID NO: 102316 - DNA, 80 bp, synthetic construct
  misc_feature 1..80: note = Artificially Synthesized Probe
  source 1..80: mol_type = other DNA
attagctgggcgtgggggcgcttggcctagaagttcaaggacagtttgggcaacatagtgggaccctatctttataaaat

SEQ ID NO: 102317 - DNA, 80 bp, synthetic construct
  misc_feature 1..80: note = Artificially Synthesized Probe
  source 1..80: mol_type = other DNA
caaaaaaaggacaaaatgaaatatcagcaatgaaaggtcctgctaaagagaaggtttgttaattcataattttaatgttt

SEQ ID NO: 102318 - DNA, 80 bp, synthetic construct
  misc_feature 1..80: note = Artificially Synthesized Probe
  source 1..80: mol_type = other DNA
tgggtggatggtttcttcattcttttcacaaatgaaatcttctgaaaatagacgtcagtggcagtttaaatagagaaatg

SEQ ID NO: 102319 - DNA, 80 bp, synthetic construct
  misc_feature 1..80: note = Artificially Synthesized Probe
  source 1..80: mol_type = other DNA
actcgttgatggaacagcgggtgggcgagtgcgcgctgtctagctatgtgtgggtgcacgcggagagcggcaagaggtac

SEQ ID NO: 102320 - DNA, 80 bp, synthetic construct; identical to SEQ ID NO: 35745
  misc_feature 1..80: note = Artificially Synthesized Probe
  source 1..80: mol_type = other DNA

SEQ ID NO: 102321 - DNA, 80 bp, synthetic construct
  misc_feature 1..80: note = Artificially Synthesized Probe
  source 1..80: mol_type = other DNA
gtgagatctaatgaggtctgtacttgtgactacctaataggctgacatgtttcctcctttaattttatctgagacttggt

SEQ ID NO: 102322 - DNA, 80 bp, synthetic construct
  misc_feature 1..80: note = Artificially Synthesized Probe
  source 1..80: mol_type = other DNA
tggcattatcaatcccactcttagtgttaaaaagagaatgcccgagctacccctctccccaccattttaatcagcaattt

SEQ ID NO: 102323 - DNA, 80 bp, synthetic construct
  misc_feature 1..80: note = Artificially Synthesized Probe
  source 1..80: mol_type = other DNA
ctaataaaaatacaaaaattaaccgagcatggtggtgcgcgcttgtagtcctagctacttaggaggctgaggcaagagaa

SEQ ID NO: 102324 - DNA, 80 bp, synthetic construct
  misc_feature 1..80: note = Artificially Synthesized Probe
  source 1..80: mol_type = other DNA
cagtggctcatgtctgtaatcctagcactttaggaggctgagataagatgggaggatcgcttgagcccagaagtttgaga

SEQ ID NO: 102325 - DNA, 80 bp, synthetic construct; identical to SEQ ID NO: 35746
  misc_feature 1..80: note = Artificially Synthesized Probe
  source 1..80: mol_type = other DNA

SEQ ID NO: 102326 - DNA, 80 bp, synthetic construct
  misc_feature 1..80: note = Artificially Synthesized Probe
  source 1..80: mol_type = other DNA
gtatctgttgtggctcagagatgtttctcatagaactgatcactgtcccaatatccacgcaaaagaccaaattaaaagcg

SEQ ID NO: 102327 - DNA, 80 bp, synthetic construct
  misc_feature 1..80: note = Artificially Synthesized Probe
  source 1..80: mol_type = other DNA
gggtatctagcctattcttatcctgcctcatggtgttttctaaatatttacagaaagaaaatttacagagtagtttcctg

SEQ ID NO: 102328 - DNA, 80 bp, synthetic construct; identical to SEQ ID NO: 35747
  misc_feature 1..80: note = Artificially Synthesized Probe
  source 1..80: mol_type = other DNA

SEQ ID NO: 102329 - DNA, 80 bp, synthetic construct
  misc_feature 1..80: note = Artificially Synthesized Probe
  source 1..80: mol_type = other DNA
agctcctgggatacaagagggtgcaggacagacttcaacccgcagcaggatccagcgcggaaagctctgcagcaggatcc

SEQ ID NO: 102330 - DNA, 80 bp, synthetic construct
  misc_feature 1..80: note = Artificially Synthesized Probe
  source 1..80: mol_type = other DNA
ggcgctgtgagtgagctggtgcggtattcagtggatgcaggccacttggtggcgaaggtgcgcacggtggactccagcta

SEQ ID NO: 102331 - DNA, 80 bp, synthetic construct
  misc_feature 1..80: note = Artificially Synthesized Probe
  source 1..80: mol_type = other DNA
gagcgccgggacccgacgcgcggctcccaaagggcggcaggaagagcccagctgggctcagccacagttatcagcaatct

SEQ ID NO: 102332 - DNA, 80 bp, synthetic construct
  misc_feature 1..80: note = Artificially Synthesized Probe
  source 1..80: mol_type = other DNA
gagacagcacctctcgcgcccgggcgggcggcctcgtctctgcacccctaggcggcgctgcgctcctcaacacccggccg

SEQ ID NO: 102333 - DNA, 80 bp, synthetic construct
  misc_feature 1..80: note = Artificially Synthesized Probe
  source 1..80: mol_type = other DNA
gctcgtgctctccaggagtccggagcatggtcctgggtcaccgttggtgtagcgtgttggtggaacgtggacgcctagag

SEQ ID NO: 102334 - DNA, 80 bp, synthetic construct; identical to SEQ ID NO: 35748
  misc_feature 1..80: note = Artificially Synthesized Probe
  source 1..80: mol_type = other DNA

SEQ ID NO: 102335 - DNA, 80 bp, synthetic construct
  misc_feature 1..80: note = Artificially Synthesized Probe
  source 1..80: mol_type = other DNA
catccccgagttcctgacgcccggagcccgctttactctcccgaatgcccaagatgacgacgagggaagcaatgggatac

SEQ ID NO: 102336 - DNA, 80 bp, synthetic construct
  misc_feature 1..80: note = Artificially Synthesized Probe
  source 1..80: mol_type = other DNA
ccgctcaggagacgcacaagtcaccatcattgtggtggacacaaatgacaacgcgcctgtatttgagcgctccgtatacc

SEQ ID NO: 102337 - DNA, 80 bp, synthetic construct
  misc_feature 1..80: note = Artificially Synthesized Probe
  source 1..80: mol_type = other DNA
ggtgcaagtagctgcttcactaggtccgcctgaaacgctcttggaggcatacattgaggcgagggacgaaggtgtctttg

SEQ ID NO: 102338 - DNA, 80 bp, synthetic construct; identical to SEQ ID NO: 35749
  misc_feature 1..80: note = Artificially Synthesized Probe
  source 1..80: mol_type = other DNA

SEQ ID NO: 102339 - DNA, 80 bp, synthetic construct
  misc_feature 1..80: note = Artificially Synthesized Probe
  source 1..80: mol_type = other DNA
atgacaatacaccaaactttcctcaaccccagcaggaacttttcgttgctgaaaacaatggccctggggcctctctaggc

SEQ ID NO: 102340 - DNA, 80 bp, synthetic construct
  misc_feature 1..80: note = Artificially Synthesized Probe
  source 1..80: mol_type = other DNA
gggggtttcatttccaagtagaaggccgggatggtggcattcctcccagaagtgcaacagtgactataaacttgtttgtg

SEQ ID NO: 102341 - DNA, 80 bp, synthetic construct
  misc_feature 1..80: note = Artificially Synthesized Probe
  source 1..80: mol_type = other DNA
acatctcccgggcgtctgactctagtctctttagaatttcagccaatataggtgagctccgtactgctcgcttagttctt

SEQ ID NO: 102342 - DNA, 80 bp, synthetic construct
  misc_feature 1..80: note = Artificially Synthesized Probe
  source 1..80: mol_type = other DNA
tgactgccaccgtcaccgtggtggcgtcgctggcggagagcagccaagcgaggaaggtcccatcgcgggctttggcgggc

SEQ ID NO: 102343 - DNA, 80 bp, synthetic construct; identical to SEQ ID NO: 35750
  misc_feature 1..80: note = Artificially Synthesized Probe
  source 1..80: mol_type = other DNA

SEQ ID NO: 102344 - DNA, 80 bp, synthetic construct
  misc_feature 1..80: note = Artificially Synthesized Probe
  source 1..80: mol_type = other DNA
acagttgagagactttctcagacttatctctatcgggcctctctgggacttggttctgataataacagtttgctgttgcg

SEQ ID NO: 102345 - DNA, 80 bp, synthetic construct
  misc_feature 1..80: note = Artificially Synthesized Probe
  source 1..80: mol_type = other DNA
aagcaaattttatggaatttgattcctttggcccggagatggctgctagctgtgttttgaaatatttcttagacaagcct

SEQ ID NO: 102346 - DNA, 80 bp, synthetic construct
  misc_feature 1..80: note = Artificially Synthesized Probe
  source 1..80: mol_type = other DNA
ataaaagtaatatgacataaaggtctaaaattaaaaataaaataccaaaatattttataagcaacagatgtgtaaggcac

SEQ ID NO: 102347 - DNA, 80 bp, synthetic construct; identical to SEQ ID NO: 35751
  misc_feature 1..80: note = Artificially Synthesized Probe
  source 1..80: mol_type = other DNA

SEQ ID NO: 102348 - DNA, 80 bp, synthetic construct
  misc_feature 1..80: note = Artificially Synthesized Probe
  source 1..80: mol_type = other DNA
tgatagctccatagcagtgttttgtaactgctttggagtttttgcttacacaaaaactgtaagcctctctcataacatct

SEQ ID NO: 102349 - DNA, 80 bp, synthetic construct
  misc_feature 1..80: note = Artificially Synthesized Probe
  source 1..80: mol_type = other DNA
atgtgttcaaaggtgcacttaccatccaaagtccattcaacttggatttaatttcttttattttaggggacaaatacact

SEQ ID NO: 102350 - DNA, 80 bp, synthetic construct
  misc_feature 1..80: note = Artificially Synthesized Probe
  source 1..80: mol_type = other DNA
gacaggggtctcactatgttgcccaggctggtctcaaactcctagcctcaagtgatcctcccacctaggcctcccaaagt

SEQ ID NO: 102351 - DNA, 80 bp, synthetic construct; identical to SEQ ID NO: 35752
  misc_feature 1..80: note = Artificially Synthesized Probe
  source 1..80: mol_type = other DNA

SEQ ID NO: 102352 - DNA, 80 bp, synthetic construct
  misc_feature 1..80: note = Artificially Synthesized Probe
  source 1..80: mol_type = other DNA
tatgcttagtaaatgctgactgaatgaataaatatgtgcatatatgaattggatggtaacactgttcaacacagagggaa

SEQ ID NO: 102353 - DNA, 80 bp, synthetic construct
  misc_feature 1..80: note = Artificially Synthesized Probe
  source 1..80: mol_type = other DNA
aatgctgtgtctgggactaagtatgagtccagttctacagatgacaaaggaattaataggtatgcacatcattacattgt

SEQ ID NO: 102354 - DNA, 80 bp, synthetic construct
  misc_feature 1..80: note = Artificially Synthesized Probe
  source 1..80: mol_type = other DNA
tggtgtaccgcagcgtagtgggatctggtcttactcgcagcaaaggagattttactctggagagtcgcctcccaaggtca

SEQ ID NO: 102355 - DNA, 80 bp, synthetic construct
  misc_feature 1..80: note = Artificially Synthesized Probe
  source 1..80: mol_type = other DNA
ctgtaacaaaaagagaggagaataccagtaatggctgtaaagtttgggagtgaggaattttttttagaaacacattttca

SEQ ID NO: 102356 - DNA, 80 bp, synthetic construct; identical to SEQ ID NO: 35753
  misc_feature 1..80: note = Artificially Synthesized Probe
  source 1..80: mol_type = other DNA

SEQ ID NO: 102357 - DNA, 80 bp, synthetic construct
  misc_feature 1..80: note = Artificially Synthesized Probe
  source 1..80: mol_type = other DNA
gggtatttgtaattcacaaaggcatttgttatttacttcttcctgttcaattacctattgatctgatcttaattctttag

SEQ ID NO: 102358 - DNA, 80 bp, synthetic construct
  misc_feature 1..80: note = Artificially Synthesized Probe
  source 1..80: mol_type = other DNA
atgtgtttatattttgctcaaattctaagttctttcattttagtttacggtaagtttacagtatatattaacatagcctg

SEQ ID NO: 102359 - DNA, 80 bp, synthetic construct
  misc_feature 1..80: note = Artificially Synthesized Probe
  source 1..80: mol_type = other DNA
gatgggcaatttaaattttttagaatggtatctaagagggtacctctgagatataaatttctacttattaaaaactgcat

SEQ ID NO: 102360 - DNA, 80 bp, synthetic construct; identical to SEQ ID NO: 35754
  misc_feature 1..80: note = Artificially Synthesized Probe
  source 1..80: mol_type = other DNA

SEQ ID NO: 102361 - DNA, 80 bp, synthetic construct
  misc_feature 1..80: note = Artificially Synthesized Probe
  source 1..80: mol_type = other DNA
taaaaaactcatatagacaacacaataatattgtataatatagaccctcaaatcagtaaaaaggaaagaaaaagaacatt

SEQ ID NO: 102362 - DNA, 80 bp, synthetic construct
  misc_feature 1..80: note = Artificially Synthesized Probe
  source 1..80: mol_type = other DNA
agctaggttggaatgaaggtggactaaattgctgaaaggtttttacaatgctcaaatgcatgtcatatgaatatcggaaa

SEQ ID NO: 102363 - DNA, 80 bp, synthetic construct
  misc_feature 1..80: note = Artificially Synthesized Probe
  source 1..80: mol_type = other DNA
taaaggtagatagccactcattttgttcccaattttaattgatggcataagataatggttcaggatataaataaattaca

SEQ ID NO: 102364 - DNA, 80 bp, synthetic construct; identical to SEQ ID NO: 35755
  misc_feature 1..80: note = Artificially Synthesized Probe
  source 1..80: mol_type = other DNA

SEQ ID NO: 102365 - DNA, 80 bp, synthetic construct; identical to SEQ ID NO: 35681
  misc_feature 1..80: note = Artificially Synthesized Probe
  source 1..80: mol_type = other DNA

SEQ ID NO: 102366 - DNA, 80 bp, synthetic construct
  misc_feature 1..80: note = Artificially Synthesized Probe
  source 1..80: mol_type = other DNA
gtcttaatagtgggtttttaggttgatttgtctttttcttttcttattaggttaggctggccctgttaaacaagttggaa

SEQ ID NO: 102367 - DNA, 80 bp, synthetic construct
  misc_feature 1..80: note = Artificially Synthesized Probe
  source 1..80: mol_type = other DNA
cctacagttttctttgtaggaaaattttaattgagatcaaatttctttgtatttttattgctcctatttcattcctgtac

SEQ ID NO: 102368 - DNA, 80 bp, synthetic construct
  misc_feature 1..80: note = Artificially Synthesized Probe
  source 1..80: mol_type = other DNA
tgactagacttggaagtagtttattaatgatattagtctttccaaggctaacttttggtgttttgggttcgctttgttgt

SEQ ID NO: 102369 - DNA, 80 bp, synthetic construct
  misc_feature 1..80: note = Artificially Synthesized Probe
  source 1..80: mol_type = other DNA
atcaaaattaataataatcagtgcttcatcaagggcattcttactggtatttttcttactgcaaatgtccaatcatgaat

SEQ ID NO: 102370 - DNA, 80 bp, synthetic construct; identical to SEQ ID NO: 35756
  misc_feature 1..80: note = Artificially Synthesized Probe
  source 1..80: mol_type = other DNA

SEQ ID NO: 102371 - DNA, 80 bp, synthetic construct
  misc_feature 1..80: note = Artificially Synthesized Probe
  source 1..80: mol_type = other DNA
aattgattcctggccatcttacaaaaaggaccaaggccttttttaggtgtcattatgaactcattgacttaaacatattt

SEQ ID NO: 102372 - DNA, 80 bp, synthetic construct
  misc_feature 1..80: note = Artificially Synthesized Probe
  source 1..80: mol_type = other DNA
tacaaaactagtatagagagatcccatgtgcttgtcacccacttttccccagtgataacaccctgaatccttttcatgtg

SEQ ID NO: 102373 - DNA, 80 bp, synthetic construct; identical to SEQ ID NO: 35757
  misc_feature 1..80: note = Artificially Synthesized Probe
  source 1..80: mol_type = other DNA

SEQ ID NO: 102374 - DNA, 80 bp, synthetic construct
  misc_feature 1..80: note = Artificially Synthesized Probe
  source 1..80: mol_type = other DNA
atttctcccatacgtcaaatcccagttttcattaacgtcaacagaattactcatttgttatcccacgggactcaaacaat

SEQ ID NO: 102375 - DNA, 80 bp, synthetic construct
  misc_feature 1..80: note = Artificially Synthesized Probe
  source 1..80: mol_type = other DNA
tgtgtagttaagccaccagctagatacagagctaggcttttttcaagtcgctttcaaatttagggcttgctttttaaatt

SEQ ID NO: 102376 - DNA, 80 bp, synthetic construct
  misc_feature 1..80: note = Artificially Synthesized Probe
  source 1..80: mol_type = other DNA
tagtagtatagtatttacacatattccatactgcttaatggtgtcttttgattagcaattaatgagctccaatttatcaa

SEQ ID NO: 102377 - DNA, 80 bp, synthetic construct
  misc_feature 1..80: note = Artificially Synthesized Probe
  source 1..80: mol_type = other DNA
ctactcaggaggctgaggcacaagaattgcttgaacctaggaggcagaggttgcggtgagcctagattaggccactgcac

SEQ ID NO: 102378 - DNA, 80 bp, synthetic construct
  misc_feature 1..80: note = Artificially Synthesized Probe
  source 1..80: mol_type = other DNA
acacccggctaatttttatacttttagtagagacagggtttcaccatgttggccaggctggtctcgaactcctgacctta

SEQ ID NO: 102379 - DNA, 80 bp, synthetic construct; identical to SEQ ID NO: 35758
  misc_feature 1..80: note = Artificially Synthesized Probe
  source 1..80: mol_type = other DNA

SEQ ID NO: 102380 - DNA, 80 bp, synthetic construct
  misc_feature 1..80: note = Artificially Synthesized Probe
  source 1..80: mol_type = other DNA
tttgaatatagtgcaatgtagaagtcaagatttatattttccacttgtaaatccagttagattgcctactttcctcgctg

SEQ ID NO: 102381 - DNA, 80 bp, synthetic construct
  misc_feature 1..80: note = Artificially Synthesized Probe
  source 1..80: mol_type = other DNA
gttctctcactttgttattctgcttcaagattaacttagctatttttggccctttgcatttctatataaattgtagattc

SEQ ID NO: 102382 - DNA, 80 bp, synthetic construct; identical to SEQ ID NO: 35759
  misc_feature 1..80: note = Artificially Synthesized Probe
  source 1..80: mol_type = other DNA

SEQ ID NO: 102383 - DNA, 80 bp, synthetic construct
  misc_feature 1..80: note = Artificially Synthesized Probe
  source 1..80: mol_type = other DNA
aggatggtctcgatctcctgacctcgtgattcacccgcttcggcctcccaaagtgctgggattacaggcgtgagccaccg

SEQ ID NO: 102384 - DNA, 80 bp, synthetic construct
  misc_feature 1..80: note = Artificially Synthesized Probe
  source 1..80: mol_type = other DNA
atacccgtaatcccagctactcaggaggctgaggcaggagaattgcttgaacctgcgaggcagaggttgcagtgagctgg

SEQ ID NO: 102385 - DNA, 80 bp, synthetic construct
  misc_feature 1..80: note = Artificially Synthesized Probe
  source 1..80: mol_type = other DNA
cggtgaaaccccgtctctactaaaaatacaaaaaattagtcgggcgtggtggcgggcgtatgtagtcccagctactcggg

SEQ ID NO: 102386 - DNA, 80 bp, synthetic construct
  misc_feature 1..80: note = Artificially Synthesized Probe
  source 1..80: mol_type = other DNA
ataatactgattttatgttaactttgtatccaatgttcttgctaaatagtaaaatctcatatttttatattttgggtttt

SEQ ID NO: 102387 - DNA, 80 bp, synthetic construct; identical to SEQ ID NO: 35760
  misc_feature 1..80: note = Artificially Synthesized Probe
  source 1..80: mol_type = other DNA

SEQ ID NO: 102388 - DNA, 80 bp, synthetic construct
  misc_feature 1..80: note = Artificially Synthesized Probe
  source 1..80: mol_type = other DNA
tggctgtttcctgtaaatgagaaagttaaatcttaccggaaggatcatgatgaataatgatccttatgagaaggtcaaat

SEQ ID NO: 102389 - DNA, 80 bp, synthetic construct
  misc_feature 1..80: note = Artificially Synthesized Probe
  source 1..80: mol_type = other DNA
cctttgttttttaatttattatgttttttaaaaatcatgaataggcattgaatttatcacatattttctgttattgaatg

SEQ ID NO: 102390 - DNA, 80 bp, synthetic construct
  misc_feature 1..80: note = Artificially Synthesized Probe
  source 1..80: mol_type = other DNA
tttttaaatatatgtttatgatagaaacgcgtttctacagaaaaaaataattatttttaaaggcatagttattgggtact

SEQ ID NO: 102391 - DNA, 80 bp, synthetic construct
  misc_feature 1..80: note = Artificially Synthesized Probe
  source 1..80: mol_type = other DNA
ttaactttccattcttataatgctctagtcggagtttggcatcaaggctatcctggctttatatagtaagttaagaagtg

SEQ ID NO: 102392 - DNA, 80 bp, synthetic construct; identical to SEQ ID NO: 35761
  misc_feature 1..80: note = Artificially Synthesized Probe
  source 1..80: mol_type = other DNA

SEQ ID NO: 102393 - DNA, 80 bp, synthetic construct
  misc_feature 1..80: note = Artificially Synthesized Probe
  source 1..80: mol_type = other DNA
aatcatctctacaaaagccctacctcctaatatcataatcttaggggttagcatttcaacttatgattgcaaaggaggag

SEQ ID NO: 102394 - DNA, 80 bp, synthetic construct
  misc_feature 1..80: note = Artificially Synthesized Probe
  source 1..80: mol_type = other DNA
atacagagcctctatttcttgttgtattagtttggttaatcaaaatggaaaattttaacataccttgctcaaaaacagaa

SEQ ID NO: 102395 - DNA, 80 bp, synthetic construct
  misc_feature 1..80: note = Artificially Synthesized Probe
  source 1..80: mol_type = other DNA
gggtgtgaatggtcaatttctataaatgttctgcatgttcaagaaaaagcagtattctgacattgcttgttgttgtgttc

SEQ ID NO: 102396 - DNA, 80 bp, synthetic construct
  misc_feature 1..80: note = Artificially Synthesized Probe
  source 1..80: mol_type = other DNA
gatgaatagtgaattgtttctccttggattttgtcaattttttgtgtcatatgttttaaggctattttattttattagat

SEQ ID NO: 102397 - DNA, 80 bp, synthetic construct; identical to SEQ ID NO: 35673
  misc_feature 1..80: note = Artificially Synthesized Probe
  source 1..80: mol_type = other DNA

SEQ ID NO: 102398 - DNA, 80 bp, synthetic construct; identical to SEQ ID NO: 35762
  misc_feature 1..80: note = Artificially Synthesized Probe
  source 1..80: mol_type = other DNA

SEQ ID NO: 102399 - DNA, 80 bp, synthetic construct
  misc_feature 1..80: note = Artificially Synthesized Probe
  source 1..80: mol_type = other DNA
aaattataattattactgatcaagtctgccatgatattttttataggtttctgttccctgcaattttttttttcaagaca

SEQ ID NO: 102400 - DNA, 80 bp, synthetic construct
  misc_feature 1..80: note = Artificially Synthesized Probe
  source 1..80: mol_type = other DNA
taaatatattaaatcttcatctgataattccagagtctgaagtctgcaagtgtatacctgctgtgtgctgtttcagctgg

SEQ ID NO: 102401 - DNA, 80 bp, synthetic construct; identical to SEQ ID NO: 35682
  misc_feature 1..80: note = Artificially Synthesized Probe
  source 1..80: mol_type = other DNA

SEQ ID NO: 102402 - DNA, 80 bp, synthetic construct
  misc_feature 1..80: note = Artificially Synthesized Probe
  source 1..80: mol_type = other DNA
aaccactttaaatcaagttcaagacttgaagctccttggctacttagactacgtattctcagataaaaatatgcaggata

SEQ ID NO: 102403 - DNA, 80 bp, synthetic construct; identical to SEQ ID NO: 35763
  misc_feature 1..80: note = Artificially Synthesized Probe
  source 1..80: mol_type = other DNA

SEQ ID NO: 102404 - DNA, 80 bp, synthetic construct
  misc_feature 1..80: note = Artificially Synthesized Probe
  source 1..80: mol_type = other DNA
gtgtagtgacaggattttggctcactgcaacctccgcctcccgggttcaagcaattctctgcctcagcctcgggagtagc

SEQ ID NO: 102405 - DNA, 80 bp, synthetic construct
  misc_feature 1..80: note = Artificially Synthesized Probe
  source 1..80: mol_type = other DNA
cccagcccatcctgcttcttaatttctgtcttcctacaacttatgtccaattttatgtcaagttcaatattctgtttacc

SEQ ID NO: 102406 - DNA, 80 bp, synthetic construct; identical to SEQ ID NO: 35764
  misc_feature 1..80: note = Artificially Synthesized Probe
  source 1..80: mol_type = other DNA

SEQ ID NO: 102407 - DNA, 80 bp, synthetic construct
  misc_feature 1..80: note = Artificially Synthesized Probe
  source 1..80: mol_type = other DNA
gaaatgtttgctaattgagccaagagagcacatgcattcatctaaaacattcatataatcaaactttattaaaggtgata

SEQ ID NO: 102408 - DNA, 80 bp, synthetic construct
  misc_feature 1..80: note = Artificially Synthesized Probe
  source 1..80: mol_type = other DNA
taatcctagctacttgggaggtcgaggcacaagaatcacttgaaccagagggaggcggaggttgcagttaacggagattg

SEQ ID NO: 102409 - DNA, 80 bp, synthetic construct
  misc_feature 1..80: note = Artificially Synthesized Probe
  source 1..80: mol_type = other DNA
actcagtatggtggggggtagggggttgaggcagaaaaatcttcccatataggatgtcacatataattatagtgtttata

SEQ ID NO: 102410 - DNA, 80 bp, synthetic construct; identical to SEQ ID NO: 35765
  misc_feature 1..80: note = Artificially Synthesized Probe
  source 1..80: mol_type = other DNA

SEQ ID NO: 102411 - DNA, 80 bp, synthetic construct
  misc_feature 1..80: note = Artificially Synthesized Probe
  source 1..80: mol_type = other DNA
gcactttgggaggctgaggtgggtggatcatttgaggtcaggagttcaagaacagcctgaccaacatggtgaaatcctgc

SEQ ID NO: 102412 - DNA, 80 bp, synthetic construct
  misc_feature 1..80: note = Artificially Synthesized Probe
  source 1..80: mol_type = other DNA
ttgttcttttttaaaaagaaaacaaaacaaaacaatgtcagctctacttaattacctgttgacttaattgctgctgtcct

SEQ ID NO: 102413 - DNA, 80 bp, synthetic construct
  misc_feature 1..80: note = Artificially Synthesized Probe
  source 1..80: mol_type = other DNA
agatcatgccactgcactccagcctgggtcacagagtgagactctgtctcaaaaaaaaaaaaaaaaaaaagaaagaaaga

SEQ ID NO: 102414 - DNA, 80 bp, synthetic construct
  misc_feature 1..80: note = Artificially Synthesized Probe
  source 1..80: mol_type = other DNA
gataaggctaaatgtgggagatacagtaaaataataaatagatgctatcaaggttcatggaaatgttgagttcagtatgc

SEQ ID NO: 102415 - DNA, 80 bp, synthetic construct; identical to SEQ ID NO: 35766
  misc_feature 1..80: note = Artificially Synthesized Probe
  source 1..80: mol_type = other DNA

SEQ ID NO: 102416 - DNA, 80 bp, synthetic construct
  misc_feature 1..80: note = Artificially Synthesized Probe
  source 1..80: mol_type = other DNA
tcattatgatgtcatgagcactttagcatgagcagctttagaagtgtggttataggagaagcagtgaattaaagagttaa

SEQ ID NO: 102417 - DNA, 80 bp, synthetic construct
  misc_feature 1..80: note = Artificially Synthesized Probe
  source 1..80: mol_type = other DNA
taagtttatatctcatgggaaaatggtaccagagaagaaaaggttgaagattagaagagttgaaaattaaagggccaagg

SEQ ID NO: 102418 - DNA, 80 bp, synthetic construct
  misc_feature 1..80: note = Artificially Synthesized Probe
  source 1..80: mol_type = other DNA
caagcacgtgccaccacacctggctaatttttaattttttatagagatggagtctcactgtgttatccaggctggtctcg

SEQ ID NO: 102419 - DNA, 80 bp, synthetic construct
  misc_feature 1..80: note = Artificially Synthesized Probe
  source 1..80: mol_type = other DNA
atttaagtatttaaagatcatagttttcctggcaacttactgtagagatcacttcagaatttccctgggtagagtagtgt

SEQ ID NO: 102420 - DNA, 80 bp, synthetic construct; identical to SEQ ID NO: 35767
  misc_feature 1..80: note = Artificially Synthesized Probe
  source 1..80: mol_type = other DNA

SEQ ID NO: 102421 - DNA, 80 bp, synthetic construct
  misc_feature 1..80: note = Artificially Synthesized Probe
  source 1..80: mol_type = other DNA
ccttctttagatgattgtgaataagagtattatcttaacctctctggtgggtctacttctgtaacggttgtgggtcatga

SEQ ID NO: 102422 - DNA, 80 bp, synthetic construct
  misc_feature 1..80: note = Artificially Synthesized Probe
  source 1..80: mol_type = other DNA
tcacacttatttgggctttaagtataagagagtcttcccatacatgatgaagggtgataccattgtctgtgttcattaag

SEQ ID NO: 102423 - DNA, 80 bp, synthetic construct
  misc_feature 1..80: note = Artificially Synthesized Probe
  source 1..80: mol_type = other DNA
aaaaataaatcaagaaaaccatgctatttacaatagctatgagaaaataaaaatacttaggaataaatttaaccaagagg

SEQ ID NO: 102424 - DNA, 80 bp, synthetic construct; identical to SEQ ID NO: 35768
  misc_feature 1..80: note = Artificially Synthesized Probe
  source 1..80: mol_type = other DNA

SEQ ID NO: 102425 - DNA, 80 bp, synthetic construct
  misc_feature 1..80: note = Artificially Synthesized Probe
  source 1..80: mol_type = other DNA
agcagaatacagctcccagaaataaatccacacagttactgtccactgatttgcaacaaaagtatcaagaatatacaatg

SEQ ID NO: 102426 - DNA, 80 bp, synthetic construct
  misc_feature 1..80: note = Artificially Synthesized Probe
  source 1..80: mol_type = other DNA
cacagtgggaaagatgaaagatcaataacactgatctgagcaatgatgttttttatatgaccctgaaagcacaggcaata

SEQ ID NO: 102427 - DNA, 80 bp, synthetic construct
  misc_feature 1..80: note = Artificially Synthesized Probe
  source 1..80: mol_type = other DNA
caatagtaagaaaacaaataacacgatttaaaagatgggtaaaggatgtgaatagacatttctcaaaagaaagcacacaa

SEQ ID NO: 102428 - DNA, 80 bp, synthetic construct; identical to SEQ ID NO: 35769
  misc_feature 1..80: note = Artificially Synthesized Probe
  source 1..80: mol_type = other DNA

SEQ ID NO: 102429 - DNA, 80 bp, synthetic construct
  misc_feature 1..80: note = Artificially Synthesized Probe
  source 1..80: mol_type = other DNA
tgaaatatatatatatatatatatacaatggaatactcatcagccattagaaagaatgaaatcctgtcattcgtgacaat

SEQ ID NO: 102430 - DNA, 80 bp, synthetic construct
  misc_feature 1..80: note = Artificially Synthesized Probe
  source 1..80: mol_type = other DNA
agagattgaggagaggttggtcaatgggtacgaagttacaattagataggaagaataagttctggtgttttattgaacag

SEQ ID NO: 102431 - DNA, 80 bp, synthetic construct
  misc_feature 1..80: note = Artificially Synthesized Probe
  source 1..80: mol_type = other DNA
gtagcccataaataggtacgtgtcaattaaaataataaaaatagtaaaatgtatagttacttccacggggtagaaaatgt

SEQ ID NO: 102432 - DNA, 80 bp, synthetic construct; identical to SEQ ID NO: 35770
  misc_feature 1..80: note = Artificially Synthesized Probe
  source 1..80: mol_type = other DNA

SEQ ID NO: 102433 - DNA, 80 bp, synthetic construct
  misc_feature 1..80: note = Artificially Synthesized Probe
  source 1..80: mol_type = other DNA
ttgtttttaataacttaagtataagaaccatgggatattaataaaggcacttccacttgacaattgtggtgttaattata

SEQ ID NO: 102434 - DNA, 80 bp, synthetic construct
  misc_feature 1..80: note = Artificially Synthesized Probe
  source 1..80: mol_type = other DNA
ttcaatttctacaaagaattccgctgggatttatattgggaatgtttttaacatttagatcaatttagggaagatttggt

SEQ ID NO: 102435 - DNA, 80 bp, synthetic construct
  misc_feature 1..80: note = Artificially Synthesized Probe
  source 1..80: mol_type = other DNA
gtaatacctattcttatgtattttatggtttaaaaaattctattgtaaatggattttaaacagacttttaatttgcagag

SEQ ID NO: 102436 - DNA, 80 bp, synthetic construct
  misc_feature 1..80: note = Artificially Synthesized Probe
  source 1..80: mol_type = other DNA
gctactcataggtttttcccaaatactttattaaatttaggaagtaccctttctggtttgctcagagttttatcatgatt

SEQ ID NO: 102437 - DNA, 80 bp, synthetic construct
  misc_feature 1..80: note = Artificially Synthesized Probe
  source 1..80: mol_type = other DNA
tcctagggtaaatcccacttagtcatgatatattatcttttcaaacattgttagatttaacttgtattttagtaaatatt

SEQ ID NO: 102438 - DNA, 80 bp, synthetic construct; identical to SEQ ID NO: 35771
  misc_feature 1..80: note = Artificially Synthesized Probe
  source 1..80: mol_type = other DNA

SEQ ID NO: 102439 - DNA, 80 bp, synthetic construct
  misc_feature 1..80: note = Artificially Synthesized Probe
  source 1..80: mol_type = other DNA
ggcacaaagttgttaataatattctctcatcttttaacgtctgtataatctgtagtgataacatctttttcatttttgat

SEQ ID NO: 102440 - DNA, 80 bp, synthetic construct
  misc_feature 1..80: note = Artificially Synthesized Probe
  source 1..80: mol_type = other DNA
gccttcttatattacttcgggtttactttgctctcttttagattttaagtggattcttaggtaactgattaggtaactga

SEQ ID NO: 102441 - DNA, 80 bp, synthetic construct
  misc_feature 1..80: note = Artificially Synthesized Probe
  source 1..80: mol_type = other DNA
aggagtgtgatcaagtttacaaatatttttggttttcctagctatcttgttgcttttgatttctaatctaattctctttt

SEQ ID NO: 102442 - DNA, 80 bp, synthetic construct; identical to SEQ ID NO: 35772
  misc_feature 1..80: note = Artificially Synthesized Probe
  source 1..80: mol_type = other DNA

SEQ ID NO: 102443 - DNA, 80 bp, synthetic construct
  misc_feature 1..80: note = Artificially Synthesized Probe
  source 1..80: mol_type = other DNA
tagtagcttttgtgtgatattaatgtggccattctagtctcatgttttctgttttcatggcatattgctttttgttcatt

SEQ ID NO: 102444 - DNA, 80 bp, synthetic construct
  misc_feature 1..80: note = Artificially Synthesized Probe
  source 1..80: mol_type = other DNA
tgctttctatttgtcccctctgattttgttcttctgtttccgcttatctgttgtcttttgaattatttgggtattcctca

SEQ ID NO: 102445 - DNA, 80 bp, synthetic construct
  misc_feature 1..80: note = Artificially Synthesized Probe
  source 1..80: mol_type = other DNA
ctttttggctctaattacaaatgagatggcctttaattctgtgtaaagaaatagtatatttacatattgcaggataacca

SEQ ID NO: 102446 - DNA, 80 bp, synthetic construct; identical to SEQ ID NO: 35773
  misc_feature 1..80: note = Artificially Synthesized Probe
  source 1..80: mol_type = other DNA

SEQ ID NO: 102447 - DNA, 80 bp, synthetic construct
  misc_feature 1..80: note = Artificially Synthesized Probe
  source 1..80: mol_type = other DNA
aagagctgagtttatccataatgtctttttgcttcaacctgaaaaactttacttagcagtttttgtaatgcatatatgct

SEQ ID NO: 102448 - DNA, 80 bp, synthetic construct
  misc_feature 1..80: note = Artificially Synthesized Probe
  source 1..80: mol_type = other DNA
gtcatttaagtcattattccctgtgtgcgatatgattgtttttgttgctcttgcatggctggggggacacttattttaag

SEQ ID NO: 102449 - DNA, 80 bp, synthetic construct
  misc_feature 1..80: note = Artificially Synthesized Probe
  source 1..80: mol_type = other DNA
ttaatcctaatttctctctatcctttctggactccaattacatacatatggtactttttaaatattgtctggttttacca

SEQ ID NO: 102450 - DNA, 80 bp, synthetic construct
  misc_feature 1..80: note = Artificially Synthesized Probe
  source 1..80: mol_type = other DNA
attcattgacttttgcctcttttagctccatttttcccaagatcaggcagtgagttttaatttcaaatattatattttta

SEQ ID NO: 102451 - DNA, 80 bp, synthetic construct; identical to SEQ ID NO: 35774
  misc_feature 1..80: note = Artificially Synthesized Probe
  source 1..80: mol_type = other DNA

SEQ ID NO: 102452 - DNA, 80 bp, synthetic construct
  misc_feature 1..80: note = Artificially Synthesized Probe
  source 1..80: mol_type = other DNA
attggctcacagttccacaggctgtaggaagcatgatgccggccatctgcttggcttctggggagccttcaagaatcatg

SEQ ID NO: 102453 - DNA, 80 bp, synthetic construct
  misc_feature 1..80: note = Artificially Synthesized Probe
  source 1..80: mol_type = other DNA
tcccaccagggcctgcctacaaaattggggattacaatgtgacatgagctttgggcggggacacagatccaaaccatgtc

SEQ ID NO: 102454 - DNA, 80 bp, synthetic construct
  misc_feature 1..80: note = Artificially Synthesized Probe
  source 1..80: mol_type = other DNA
tgcctatgagcctgtaaaataaaaaacaagttagttactcccaagatacagtgcgggtacaggcattgggtaaatactcc

SEQ ID NO: 102455 - DNA, 80 bp, synthetic construct; identical to SEQ ID NO: 35683
  misc_feature 1..80: note = Artificially Synthesized Probe
  source 1..80: mol_type = other DNA

SEQ ID NO: 102456 - DNA, 80 bp, synthetic construct; identical to SEQ ID NO: 35775
  misc_feature 1..80: note = Artificially Synthesized Probe
  source 1..80: mol_type = other DNA

SEQ ID NO: 102457 - DNA, 80 bp, synthetic construct
  misc_feature 1..80: note = Artificially Synthesized Probe
  source 1..80: mol_type = other DNA
ttcctctgccaggtaccctaaactcatcattctcaaatttaatgttccgcagattcctacagcacaggcataatacagcc

SEQ ID NO: 102458 - DNA, 80 bp, synthetic construct
  misc_feature 1..80: note = Artificially Synthesized Probe
  source 1..80: mol_type = other DNA
tcccaatcattcaagtagtctctaggaagttctaagctctccctcatcttccctccacactattccaacctgtgcctggt

SEQ ID NO: 102459 - DNA, 80 bp, synthetic construct
  misc_feature 1..80: note = Artificially Synthesized Probe
  source 1..80: mol_type = other DNA
atttagaaagaaaagaggtttaactggctcgcagttctgcaggctgtacaggaagcatgatgctggccatctgcttgtct

SEQ ID NO: 102460 - DNA, 80 bp, synthetic construct; identical to SEQ ID NO: 35776
  misc_feature 1..80: note = Artificially Synthesized Probe
  source 1..80: mol_type = other DNA

SEQ ID NO: 102461 - DNA, 80 bp, synthetic construct
  misc_feature 1..80: note = Artificially Synthesized Probe
  source 1..80: mol_type = other DNA
ttagttcttttagctttagcctttgctctttatatgtgattcagggacggcagagatgtgggaagaatttgatcatagaa

SEQ ID NO: 102462 - DNA, 80 bp, synthetic construct
  misc_feature 1..80: note = Artificially Synthesized Probe
  source 1..80: mol_type = other DNA
ttatctgtcagagttttaacttcctcatgctgtgtcacaaccttgatcagctattaggccaaagcaacaaaaacgggaaa

SEQ ID NO: 102463 - DNA, 80 bp, synthetic construct; identical to SEQ ID NO: 35777
  misc_feature 1..80: note = Artificially Synthesized Probe
  source 1..80: mol_type = other DNA

SEQ ID NO: 102464 - DNA, 80 bp, synthetic construct
  misc_feature 1..80: note = Artificially Synthesized Probe
  source 1..80: mol_type = other DNA
aggtattaagcccagcatccattaggtattcttcctgatgctctccctcccattgctcccccaacaggccccagtgtgtg

SEQ ID NO: 102465 - DNA, 80 bp, synthetic construct
  misc_feature 1..80: note = Artificially Synthesized Probe
  source 1..80: mol_type = other DNA
ggatgcatagtattccatggtgtatatgtaccacattttctttatccagtctatcattgatgggcatttgggttgatccc

SEQ ID NO: 102466 - DNA, 80 bp, synthetic construct
  misc_feature 1..80: note = Artificially Synthesized Probe
  source 1..80: mol_type = other DNA
tgtatctattttatccagtgccagtacatggtggagatattattcaaatgtgtatctttcaggcttcagactcattcttt

SEQ ID NO: 102467 - DNA, 80 bp, synthetic construct
  misc_feature 1..80: note = Artificially Synthesized Probe
  source 1..80: mol_type = other DNA
ccacaatgagtgaactaatttacaaccccaccaacagggtaaaggtgttcctttttctccatctgttgtttctggacttg

SEQ ID NO: 102468 - DNA, 80 bp, synthetic construct; identical to SEQ ID NO: 35778
  misc_feature 1..80: note = Artificially Synthesized Probe
  source 1..80: mol_type = other DNA

SEQ ID NO: 102469 - DNA, 80 bp, synthetic construct
  misc_feature 1..80: note = Artificially Synthesized Probe
  source 1..80: mol_type = other DNA
tgcctatgtcctgaatggtattgcctagcttttcttctagggtttttatagtttcatacttttatgaattacgtctttaa

SEQ ID NO: 102470 - DNA, 80 bp, synthetic construct
  misc_feature 1..80: note = Artificially Synthesized Probe
  source 1..80: mol_type = other DNA
gtgtggtgttatttctgagttctctattctgttccactggtctacacgtctgtttttgtaccagtaccgtgctgttttgg

SEQ ID NO: 102471 - DNA, 80 bp, synthetic construct
  misc_feature 1..80: note = Artificially Synthesized Probe
  source 1..80: mol_type = other DNA
tcccataatccccacatgttgtgagagggacccagtgggaggtaattgaatcatgggggcaattatcccatacagttctc

SEQ ID NO: 102472 - DNA, 80 bp, synthetic construct
  misc_feature 1..80: note = Artificially Synthesized Probe
  source 1..80: mol_type = other DNA
tgtgagtcaattaaacctctttcttttataaattacccagtctcaggcagttctttatagcagtgtgagaacaaattaat

SEQ ID NO: 102473 - DNA, 80 bp, synthetic construct; identical to SEQ ID NO: 35779
  misc_feature 1..80: note = Artificially Synthesized Probe
  source 1..80: mol_type = other DNA

SEQ ID NO: 102474 - DNA, 80 bp, synthetic construct
  misc_feature 1..80: note = Artificially Synthesized Probe
  source 1..80: mol_type = other DNA
catcccgccgtcccgctcggtgaccggagacacagccgggaacgcgactgatcaggctaccgagccgggccgcagggcga

SEQ ID NO: 102475 - DNA, 80 bp, synthetic construct
  misc_feature 1..80: note = Artificially Synthesized Probe
  source 1..80: mol_type = other DNA
agtttctatatgacttgaaatctatctgcagcttattttctttctttctttctttcttttttttgagatggagttttgtt

SEQ ID NO: 102476 - DNA, 80 bp, synthetic construct
  misc_feature 1..80: note = Artificially Synthesized Probe
  source 1..80: mol_type = other DNA
tttcaccatattggccaggctggtctcaaactcctgacctcaggtgatccacccacctcggcctcccaaagtgctgggat

SEQ ID NO: 102477 - DNA, 80 bp, synthetic construct
  misc_feature 1..80: note = Artificially Synthesized Probe
  source 1..80: mol_type = other DNA
taactcagcagttcttacaaatgcctttcatagccatccctttcaccatattttcattgataccatcccagcccaggttc

SEQ ID NO: 102478 - DNA, 80 bp, synthetic construct
  misc_feature 1..80: note = Artificially Synthesized Probe
  source 1..80: mol_type = other DNA
actgtatcaggtgtaaacaccttttgcttacctttccaggcctttttagagtcttatatagcttactcccatgctccaac

SEQ ID NO: 102479 - DNA, 80 bp, synthetic construct; identical to SEQ ID NO: 35853
  misc_feature 1..80: note = Artificially Synthesized Probe
  source 1..80: mol_type = other DNA

SEQ ID NO: 102480 - DNA, 80 bp, synthetic construct
  misc_feature 1..80: note = Artificially Synthesized Probe
  source 1..80: mol_type = other DNA
tcgagaccatcttggctaacactgtgaaaccctgtctctactaaaaatacaaaaaatagctgggcatggtggtgcatgcc

SEQ ID NO: 102481 - DNA, 80 bp, synthetic construct
  misc_feature 1..80: note = Artificially Synthesized Probe
  source 1..80: mol_type = other DNA
tgtatccataatttctacgtatgttccattgacaagaacttaattgtaagagttcacataatcacagggagactaattgg

SEQ ID NO: 102482 - DNA, 80 bp, synthetic construct
  misc_feature 1..80: note = Artificially Synthesized Probe
  source 1..80: mol_type = other DNA
gaaggaaggggataggtttgtgttgtgtaaatactcatccatcttggcaggaggtcagcagatgatgtctaaagtagata

SEQ ID NO: 102483 - DNA, 80 bp, synthetic construct
  misc_feature 1..80: note = Artificially Synthesized Probe
  source 1..80: mol_type = other DNA
tatatacacatacatactatctatgataggagaattgagaatattaatttttaatcaagtaatatatgtacatatttaaa

SEQ ID NO: 102484 - DNA, 80 bp, synthetic construct
  misc_feature 1..80: note = Artificially Synthesized Probe
  source 1..80: mol_type = other DNA
agagggttgtgtgtctgatgttctaacttttttcagggctaccataggctttaaaaaccttatgtggagtttctttatat

SEQ ID NO: 102485 - DNA, 80 bp, synthetic construct
  misc_feature 1..80: note = Artificially Synthesized Probe
  source 1..80: mol_type = other DNA
aatcatatgcttaaactgatgtttcatgttttatctactttagacatcatctgctgacctcctgccaagatggatgagta

SEQ ID NO: 102486 - DNA, 80 bp, synthetic construct; identical to SEQ ID NO: 35854
  misc_feature 1..80: note = Artificially Synthesized Probe
  source 1..80: mol_type = other DNA

SEQ ID NO: 102487 - DNA, 80 bp, synthetic construct
  misc_feature 1..80: note = Artificially Synthesized Probe
  source 1..80: mol_type = other DNA
tgtattgagtttattccttgccctttgtttcctatattacagacctttctgctattgaagactgtcaaatgtttttcctt

SEQ ID NO: 102488 - DNA, 80 bp, synthetic construct
  misc_feature 1..80: note = Artificially Synthesized Probe
  source 1..80: mol_type = other DNA
tgcccgttttcacccacgcttcaagttgggaaaagaaacatatttttcttaccatgaccctaattttttcaaggttttta

SEQ ID NO: 102489 - DNA, 80 bp, synthetic construct; identical to SEQ ID NO: 35855
  misc_feature 1..80: note = Artificially Synthesized Probe
  source 1..80: mol_type = other DNA

SEQ ID NO: 102490 - DNA, 80 bp, synthetic construct
  misc_feature 1..80: note = Artificially Synthesized Probe
  source 1..80: mol_type = other DNA
atgatatatatatatctatgatatatatatatctatgatatatatatgatatatatatctatgatatatatatatctatg

SEQ ID NO: 102491 - DNA, 80 bp, synthetic construct
  misc_feature 1..80: note = Artificially Synthesized Probe
  source 1..80: mol_type = other DNA
atatatatctatgatatatatatctatgatatatatgttatatatatctatgatatatatctatgatatatatatctatg

SEQ ID NO: 102492 - DNA, 80 bp, synthetic construct
  misc_feature 1..80: note = Artificially Synthesized Probe
  source 1..80: mol_type = other DNA
gatatatatgatatatatatctatgatatgtatatctatgatatatatgatatatatatctatgatatatatctatgata

SEQ ID NO: 102493 - DNA, 80 bp, synthetic construct
  misc_feature 1..80: note = Artificially Synthesized Probe
  source 1..80: mol_type = other DNA
aatgacagaaaaattatttaatagcttagtaaatatataatagtttggtttaagcatcttttagaacatgggatcctggg

SEQ ID NO: 102494 - DNA, 80 bp, synthetic construct; identical to SEQ ID NO: 35843
  misc_feature 1..80: note = Artificially Synthesized Probe
  source 1..80: mol_type = other DNA

SEQ ID NO: 102495 - DNA, 80 bp, synthetic construct; identical to SEQ ID NO: 35856
  misc_feature 1..80: note = Artificially Synthesized Probe
  source 1..80: mol_type = other DNA

SEQ ID NO: 102496 - DNA, 80 bp, synthetic construct
  misc_feature 1..80: note = Artificially Synthesized Probe
  source 1..80: mol_type = other DNA
gcagtgttgagtgaagctgcctaacctgaaaaaaataaagctggaggtagtcctgatttatctttatgtaaaaaatggtt

SEQ ID NO: 102497 - DNA, 80 bp, synthetic construct
  misc_feature 1..80: note = Artificially Synthesized Probe
  source 1..80: mol_type = other DNA
cttttagaagagaatatggtaccaatttatgaagttagactcaatggctcctaaagcctcttgtgactttgagagtctat

SEQ ID NO: 102498 - DNA, 80 bp, synthetic construct
  misc_feature 1..80: note = Artificially Synthesized Probe
  source 1..80: mol_type = other DNA
gtgatcatagaaatctaacatcttaatttgaataaccctaccccttatttgctctgttatcttggactacttaactagtc

SEQ ID NO: 102499 - DNA, 80 bp, synthetic construct; identical to SEQ ID NO: 35857
  misc_feature 1..80: note = Artificially Synthesized Probe
  source 1..80: mol_type = other DNA

SEQ ID NO: 102500 - DNA, 80 bp, synthetic construct
  misc_feature 1..80: note = Artificially Synthesized Probe
  source 1..80: mol_type = other DNA
catgcacatgtaggcctaggtgttggggtggctaaggcaggaagagcactggaactcaggagtctgaggttataataaac

SEQ ID NO: 102501 - DNA, 80 bp, synthetic construct
  misc_feature 1..80: note = Artificially Synthesized Probe
  source 1..80: mol_type = other DNA
tggctaacacagtgaaaccccgtctctactaaaaatacaaaaaattagccagtcgtggtggcgggtgcctgtagtcccag

SEQ ID NO: 102502 - DNA, 80 bp, synthetic construct
  misc_feature 1..80: note = Artificially Synthesized Probe
  source 1..80: mol_type = other DNA
ggtggctcacgcctgtaatcctagcactttgggaggccgaggcgggcggatccacgaggtcaggagatcgagaccatcct

SEQ ID NO: 102503 - DNA, 80 bp, synthetic construct; identical to SEQ ID NO: 35858
  misc_feature 1..80: note = Artificially Synthesized Probe
  source 1..80: mol_type = other DNA

SEQ ID NO: 102504 - DNA, 80 bp, synthetic construct
  misc_feature 1..80: note = Artificially Synthesized Probe
  source 1..80: mol_type = other DNA
ttttttgctaattttaaaaaatattcattgttacttggaaagtttgtatttataccctttatagtgtcgttaattgacct

SEQ ID NO: 102505 - DNA, 80 bp, synthetic construct
  misc_feature 1..80: note = Artificially Synthesized Probe
  source 1..80: mol_type = other DNA
aatacaatattagctgggtgtggcggtgggcatctgtaatcccagctacttaggaggctgaggcaggagaattgcttgaa

SEQ ID NO: 102506 - DNA, 80 bp, synthetic construct
  misc_feature 1..80: note = Artificially Synthesized Probe
  source 1..80: mol_type = other DNA
gggtggattacctgagttcaggagttcgagaccagccaggccgacatggtgaaaccccatctctactaaaaatacaaaaa

SEQ ID NO: 102507 - DNA, 80 bp, synthetic construct
  misc_feature 1..80: note = Artificially Synthesized Probe
  source 1..80: mol_type = other DNA
gtacagcagtcagtgatctaattatactttcccttttttcctcctcccattgtttttagttgtattctttctactttgtc

SEQ ID NO: 102508 - DNA, 80 bp, synthetic construct; identical to SEQ ID NO: 35859
  misc_feature 1..80: note = Artificially Synthesized Probe
  source 1..80: mol_type = other DNA

SEQ ID NO: 102509 - DNA, 80 bp, synthetic construct
  misc_feature 1..80: note = Artificially Synthesized Probe
  source 1..80: mol_type = other DNA
taagaatacaatttgaaaaatgtgacaaacagaaagtgtaacccccaacttcattatgatgtggaacatgggtcagcaaa

SEQ ID NO: 102510 - DNA, 80 bp, synthetic construct
  misc_feature 1..80: note = Artificially Synthesized Probe
  source 1..80: mol_type = other DNA
agtgtttctggctgttcttgcatcacagtggtagtgcttagtagttgcaacagagattacacggcttgcaaatcctaaaa

SEQ ID NO: 102511 - DNA, 80 bp, synthetic construct
  misc_feature 1..80: note = Artificially Synthesized Probe
  source 1..80: mol_type = other DNA
aactacagacgggccttctaccactatggttttggcttttctagaatgtgttaaaaatggaatcatgtagtctcctcacc

SEQ ID NO: 102512 - DNA, 80 bp, synthetic construct; identical to SEQ ID NO: 35860
  misc_feature 1..80: note = Artificially Synthesized Probe
  source 1..80: mol_type = other DNA

SEQ ID NO: 102513 - DNA, 80 bp, synthetic construct
  misc_feature 1..80: note = Artificially Synthesized Probe
  source 1..80: mol_type = other DNA
aggctcaagtgatcctcctaccttggcctcccacagtgctggaattataggcatgagtcaccgcacccagccgttcactc

SEQ ID NO: 102514 - DNA, 80 bp, synthetic construct
  misc_feature 1..80: note = Artificially Synthesized Probe
  source 1..80: mol_type = other DNA
ctgcagccttgacctcccaagctcaagcaatcctcccacctcagtcccctgagtagctgggtctacaggtatgcgtcact

SEQ ID NO: 102515 - DNA, 80 bp, synthetic construct
  misc_feature 1..80: note = Artificially Synthesized Probe
  source 1..80: mol_type = other DNA
aagaaatctgtagtgacctaattttttgttcgtttgtttgttttgagatgacgtcttgctctgtcacccaggctggagtg

SEQ ID NO: 102516 - DNA, 80 bp, synthetic construct; identical to SEQ ID NO: 35861
  misc_feature 1..80: note = Artificially Synthesized Probe
  source 1..80: mol_type = other DNA

SEQ ID NO: 102517 - DNA, 80 bp, synthetic construct
  misc_feature 1..80: note = Artificially Synthesized Probe
  source 1..80: mol_type = other DNA
acctggctaattttcaaatttttttaaagaaacggggtctccctatgttgcccaggctggtcttgagctcctaggcttaa

SEQ ID NO: 102518 - DNA, 80 bp, synthetic construct
  misc_feature 1..80: note = Artificially Synthesized Probe
  source 1..80: mol_type = other DNA
atttttttttgaattttctctaagaatttaacagtcatccctttttttcataaatgcccattaaatgtccgttatatgcc

SEQ ID NO: 102519 - DNA, 80 bp, synthetic construct
  misc_feature 1..80: note = Artificially Synthesized Probe
  source 1..80: mol_type = other DNA
gtcactcaggctggagcgcagtggcatgatcttgactcactgcaacctccgcctcccaggctcaagtgatcctcctacct

SEQ ID NO: 102520 - DNA, 80 bp, synthetic construct
  misc_feature 1..80: note = Artificially Synthesized Probe
  source 1..80: mol_type = other DNA
gcgattcttgtgcctcggcctccttaggagctgggattacaggcatgtgccaccacgcccagctaatttttgtattttta

SEQ ID NO: 102521 - DNA, 80 bp, synthetic construct
  misc_feature 1..80: note = Artificially Synthesized Probe
  source 1..80: mol_type = other DNA
tttcctttaaaatctaatagtttcattagaatgtattttgaagttaattcttcctggtaatatgtttactccctggcaca

SEQ ID NO: 102522 - DNA, 80 bp, synthetic construct; identical to SEQ ID NO: 35862
  misc_feature 1..80: note = Artificially Synthesized Probe
  source 1..80: mol_type = other DNA

SEQ ID NO: 102523 - DNA, 80 bp, synthetic construct
  misc_feature 1..80: note = Artificially Synthesized Probe
  source 1..80: mol_type = other DNA
ggttcaagcagttctcccgtctcagcctcctgagtagctgggattacaggggtgcgccaccacacctggctaatttttgt

SEQ ID NO: 102524 - DNA, 80 bp, synthetic construct
  misc_feature 1..80: note = Artificially Synthesized Probe
  source 1..80: mol_type = other DNA
gagtgcagtggtatgatcatacctcactataatctcaaactcctgggctcaagcaattctcccacctcagcctcctgagt

SEQ ID NO: 102525 - DNA, 80 bp, synthetic construct; identical to SEQ ID NO: 35863
  misc_feature 1..80: note = Artificially Synthesized Probe
  source 1..80: mol_type = other DNA

SEQ ID NO: 102526 - DNA, 80 bp, synthetic construct
  misc_feature 1..80: note = Artificially Synthesized Probe
  source 1..80: mol_type = other DNA
tttagttgccatccataataaatagaaatctttattctagatctctttcctgagctccagatccatgtgtccagctgact

SEQ ID NO: 102527 - DNA, 80 bp, synthetic construct
  misc_feature 1..80: note = Artificially Synthesized Probe
  source 1..80: mol_type = other DNA
ccatccccaaatccagtcagtcaggtatatattacctaccaaatataactcattatccttctagttttctgtgtccttgc

SEQ ID NO: 102528 - DNA, 80 bp, synthetic construct
  misc_feature 1..80: note = Artificially Synthesized Probe
  source 1..80: mol_type = other DNA
aaccccatccctactaaaaatacaaaaaattagctgggcgtggtggcatgcacctgtagtcgcagctacttgggaggctg

SEQ ID NO: 102529 - DNA, 80 bp, synthetic construct
  misc_feature 1..80: note = Artificially Synthesized Probe
  source 1..80: mol_type = other DNA
gcctcccaggttcaaacaattgtcctgtctcagcctcctgagtggctgggactacaggcgcctgccagcacgcctggcta

SEQ ID NO: 102530 - DNA, 80 bp, synthetic construct
  misc_feature 1..80: note = Artificially Synthesized Probe
  source 1..80: mol_type = other DNA
ccaaggtgagcagatcacaaggtcaggagatcgagaccatcctggctaacatggtgaaaccctgtttctaaaatacaaaa

SEQ ID NO: 102531 - DNA, 80 bp, synthetic construct; identical to SEQ ID NO: 35864
  misc_feature 1..80: note = Artificially Synthesized Probe
  source 1..80: mol_type = other DNA

SEQ ID NO: 102532 - DNA, 80 bp, synthetic construct
  misc_feature 1..80: note = Artificially Synthesized Probe
  source 1..80: mol_type = other DNA
gattctccacaatcaataggtaagctttagatttctgaaaatatcatagttttcatcatttactttatgatttttggaag

SEQ ID NO: 102533 - DNA, 80 bp, synthetic construct
  misc_feature 1..80: note = Artificially Synthesized Probe
  source 1..80: mol_type = other DNA
acattttttgaaataaaatattttagtgaaaaaaacttttgtatttggagacggagtctcattctatcatccaggctgga

SEQ ID NO: 102534 - DNA, 80 bp, synthetic construct
  misc_feature 1..80: note = Artificially Synthesized Probe
  source 1..80: mol_type = other DNA
gctggtctcggaactcctgagctcaggcaaaccacccgtgttggcctcccaaagcactaggattacaggcatgagccacc

SEQ ID NO: 102535 - DNA, 80 bp, synthetic construct; identical to SEQ ID NO: 35865
  misc_feature 1..80: note = Artificially Synthesized Probe
  source 1..80: mol_type = other DNA

SEQ ID NO: 102536 - DNA, 80 bp, synthetic construct
  misc_feature 1..80: note = Artificially Synthesized Probe
  source 1..80: mol_type = other DNA
accgctcagtgaaacttgcttcagaggcagaaagaagcaggtaaataagttttgagaaagcaacaccacaagaaaagaaa

SEQ ID NO: 102537 - DNA, 80 bp, synthetic construct
  misc_feature 1..80: note = Artificially Synthesized Probe
  source 1..80: mol_type = other DNA
aagttgacagaaatatgaagcaatttaattttgcacagactttgtatacctattacatatgaaaacttatttttaaaaaa

SEQ ID NO: 102538 - DNA, 80 bp, synthetic construct; identical to SEQ ID NO: 35866
  misc_feature 1..80: note = Artificially Synthesized Probe
  source 1..80: mol_type = other DNA

SEQ ID NO: 102539 - DNA, 80 bp, synthetic construct
  misc_feature 1..80: note = Artificially Synthesized Probe
  source 1..80: mol_type = other DNA
gggcctgtagtcccagctactcgggaggctgaggcagtagaatggcgtgaacctgggaggcggagcttgcagtgagccaa

SEQ ID NO: 102540 - DNA, 80 bp, synthetic construct; identical to SEQ ID NO: 35844
  misc_feature 1..80: note = Artificially Synthesized Probe
  source 1..80: mol_type = other DNA

SEQ ID NO: 102541 - DNA, 80 bp, synthetic construct
  misc_feature 1..80: note = Artificially Synthesized Probe
  source 1..80: mol_type = other DNA
tcttttgcaggtttccaagcaacaatcagtgctccacacatggtaagttaagtttgttcacttggttacaaatggattac

SEQ ID NO: 102542 - DNA, 80 bp, synthetic construct
  misc_feature 1..80: note = Artificially Synthesized Probe
  source 1..80: mol_type = other DNA
tttgttttgttttgttttgttttgtttttgagatggagtctcgctctgtcgcccaggctagagtgcagtggcacaatctc

SEQ ID NO: 102543 - DNA, 80 bp, synthetic construct
  misc_feature 1..80: note = Artificially Synthesized Probe
  source 1..80: mol_type = other DNA
aagccgcgcggcgtcacagagcgcatgcgtgccgcgggggatgccgggagcgcgcagtggcggcagcggcggcgacggca

SEQ ID NO: 102544 - DNA, 80 bp, synthetic construct
  misc_feature 1..80: note = Artificially Synthesized Probe
  source 1..80: mol_type = other DNA
gaccctcgtgatccgcctgcctcggcctcccaaagtgctgggattacaggcgtgagccactgcgcttggcccagaaggag

SEQ ID NO: 102545 - DNA, 80 bp, synthetic construct; identical to SEQ ID NO: 35867
  misc_feature 1..80: note = Artificially Synthesized Probe
  source 1..80: mol_type = other DNA

SEQ ID NO: 102546 - DNA, 80 bp, synthetic construct
  misc_feature 1..80: note = Artificially Synthesized Probe
  source 1..80: mol_type = other DNA
catgcagtcctcccacctcagcctcctaaagtgctaggattacaggcatgagccactgtgcccaaccttttcttagggtt

SEQ ID NO: 102547 - DNA, 80 bp, synthetic construct
  misc_feature 1..80: note = Artificially Synthesized Probe
  source 1..80: mol_type = other DNA
ctcctgggttcaagtgattctcctgcctcagcctcctgagtaactagcattacaggtgcccgccaccacactcagcttat

SEQ ID NO: 102548 - DNA, 80 bp, synthetic construct
  misc_feature 1..80: note = Artificially Synthesized Probe
  source 1..80: mol_type = other DNA
cgttcttgtgcccaggctggagtgcaatattgtcatctctgctcactgcaacctccacctcctaggttcaagtaattctc

SEQ ID NO: 102549 - DNA, 80 bp, synthetic construct; identical to SEQ ID NO: 35868
  misc_feature 1..80: note = Artificially Synthesized Probe
  source 1..80: mol_type = other DNA

SEQ ID NO: 102550 - DNA, 80 bp, synthetic construct
  misc_feature 1..80: note = Artificially Synthesized Probe
  source 1..80: mol_type = other DNA
ttggccaggctggttttgaactcctgacctcaggtgatccactcgcctttgcctcccaaaatgctgggattataggcatg

SEQ ID NO: 102551 - DNA, 80 bp, synthetic construct
  misc_feature 1..80: note = Artificially Synthesized Probe
  source 1..80: mol_type = other DNA
gaatagtaatgtcttcttgaaacatgacagaaaacacagaagccattaaaaaaacctgatacattttgaaacttacatat

SEQ ID NO: 102552 - DNA, 80 bp, synthetic construct
  misc_feature 1..80: note = Artificially Synthesized Probe
  source 1..80: mol_type = other DNA
tttttggtagtttatgagatggggtcttgctatgttgcccaggctggtcttgaactcctggactcaagcaatttgttgga

SEQ ID NO: 102553 - DNA, 80 bp, synthetic construct; identical to SEQ ID NO: 35869
  misc_feature 1..80: note = Artificially Synthesized Probe
  source 1..80: mol_type = other DNA

SEQ ID NO: 102554 - DNA, 80 bp, synthetic construct
  misc_feature 1..80: note = Artificially Synthesized Probe
  source 1..80: mol_type = other DNA
atatgtagacatgtatgcatacatttgtgtttgtgtgtatcctgttaataagtgaaagaccggtaagcccaaaagaaaat

SEQ ID NO: 102555 - DNA, 80 bp, synthetic construct
  misc_feature 1..80: note = Artificially Synthesized Probe
  source 1..80: mol_type = other DNA
aattagctgggcgtggtggcgcatgcctgtaatcccagctacttgggaggctgaggcaggagaatcgcttgaacccggga

SEQ ID NO: 102556 - DNA, 80 bp, synthetic construct
  misc_feature 1..80: note = Artificially Synthesized Probe
  source 1..80: mol_type = other DNA
ttaaatttttttttttttgaggcagagtcttgctctgttgcccaggctggagtgcagtggcatgatctcggctcactgca

SEQ ID NO: 102557 - DNA, 80 bp, synthetic construct
  misc_feature 1..80: note = Artificially Synthesized Probe
  source 1..80: mol_type = other DNA
acctcaagtgatctcctgacctcaagtgatccacccgccttggcctcccagagtgctgggattacaggtgtgagccactg

SEQ ID NO: 102558 - DNA, 80 bp, synthetic construct; identical to SEQ ID NO: 35870
  misc_feature 1..80: note = Artificially Synthesized Probe
  source 1..80: mol_type = other DNA

SEQ ID NO: 102559 - DNA, 80 bp, synthetic construct
  misc_feature 1..80: note = Artificially Synthesized Probe
  source 1..80: mol_type = other DNA
catgagtgcagagtgacttaagttatttattgacgtcttatttattataattacaaaaagcaatgtccacaaatggtgga

SEQ ID NO: 102560 - DNA, 80 bp, synthetic construct
  misc_feature 1..80: note = Artificially Synthesized Probe
  source 1..80: mol_type = other DNA
cacttacgttagcctacagttgggcaaaatcaactaacacaaagtctgttttataataaaatggtgaatatcacatgtaa

SEQ ID NO: 102561 - DNA, 80 bp, synthetic construct
  misc_feature 1..80: note = Artificially Synthesized Probe
  source 1..80: mol_type = other DNA
gagtattgtgaaactgttaaaagaactctgcaagtacaaatatgacaaagtcttcaagaaatgcagtataatacttacag

SEQ ID NO: 102562 - DNA, 80 bp, synthetic construct; identical to SEQ ID NO: 35871
  misc_feature 1..80: note = Artificially Synthesized Probe
  source 1..80: mol_type = other DNA

SEQ ID NO: 102563 - DNA, 80 bp, synthetic construct
  misc_feature 1..80: note = Artificially Synthesized Probe
  source 1..80: mol_type = other DNA
cctgggttcaagcgattcttctgcctcagcctcccgagtagctgggattacaggcacccactaccacgcctggctaattt

SEQ ID NO: 102564 - DNA, 80 bp, synthetic construct
  misc_feature 1..80: note = Artificially Synthesized Probe
  source 1..80: mol_type = other DNA
gtgcagtggggtgatcttggcttactgcaacctctgcctcccggattcaagtgattctcctgcctcagcctctcagatag

SEQ ID NO: 102565 - DNA, 80 bp, synthetic construct
  misc_feature 1..80: note = Artificially Synthesized Probe
  source 1..80: mol_type = other DNA
tgtctggcgtgttatcaatttctttattccttttgcttaattttttttaacattttaattttttattattattatttttg

SEQ ID NO: 102566 - DNA, 80 bp, synthetic construct
  misc_feature 1..80: note = Artificially Synthesized Probe
  source 1..80: mol_type = other DNA
tagtagagatgggatttcaccgtgttggccaggctggtctcaaactcctgacctcaagcgatccaccctccttggcctcc

SEQ ID NO: 102567 - DNA, 80 bp, synthetic construct; identical to SEQ ID NO: 35872
  misc_feature 1..80: note = Artificially Synthesized Probe
  source 1..80: mol_type = other DNA

SEQ ID NO: 102568 - DNA, 80 bp, synthetic construct
  misc_feature 1..80: note = Artificially Synthesized Probe
  source 1..80: mol_type = other DNA
ctattcaataagtgattaaaaagaaaagttatagtcttaagataatctgcaaacagtttgaactactactgaagggggaa

SEQ ID NO: 102569 - DNA, 80 bp, synthetic construct
  misc_feature 1..80: note = Artificially Synthesized Probe
  source 1..80: mol_type = other DNA
aactgcttatccctcctctatgcgcagagaggcttatctgtgttccatcgttttacattccttgaggcacagcgagttct

SEQ ID NO: 102570 - DNA, 80 bp, synthetic construct
  misc_feature 1..80: note = Artificially Synthesized Probe
  source 1..80: mol_type = other DNA
aacatatggtgtaacaaatgtaaaagagtaattaactgcctttgatctcgcttctgcaagtacccttcctgcagcacgta

SEQ ID NO: 102571 - DNA, 80 bp, synthetic construct; identical to SEQ ID NO: 35873
  misc_feature 1..80: note = Artificially Synthesized Probe
  source 1..80: mol_type = other DNA

SEQ ID NO: 102572 - DNA, 80 bp, synthetic construct
  misc_feature 1..80: note = Artificially Synthesized Probe
  source 1..80: mol_type = other DNA
taatcccagctactcaggagcctgagacaagagaatcacttggacctggggagggtgcaggttgcagtgagccaagatcg

SEQ ID NO: 102573 - DNA, 80 bp, synthetic construct
  misc_feature 1..80: note = Artificially Synthesized Probe
  source 1..80: mol_type = other DNA
ttttttctttcccctgaagtttggtctgggtgtccagttcattgctgaacaaagcatagcagttacttcatggcaaaaga

SEQ ID NO: 102574 - DNA, 80 bp, synthetic construct; identical to SEQ ID NO: 35874
  misc_feature 1..80: note = Artificially Synthesized Probe
  source 1..80: mol_type = other DNA

SEQ ID NO: 102575 - DNA, 80 bp, synthetic construct
  misc_feature 1..80: note = Artificially Synthesized Probe
  source 1..80: mol_type = other DNA
aggttcattttatggaatgatgcttgattggaaatggacatttatgtgctacaacagtagtatgaagtatgatttgggtt

SEQ ID NO: 102576 - DNA, 80 bp, synthetic construct
  misc_feature 1..80: note = Artificially Synthesized Probe
  source 1..80: mol_type = other DNA
agtttttagtttattcagagttacacaaacatcagcactctctaatatgaggttttcatcactgcagaaagaaaccttcc

SEQ ID NO: 102577 - DNA, 80 bp, synthetic construct
  misc_feature 1..80: note = Artificially Synthesized Probe
  source 1..80: mol_type = other DNA
aatgttttcaagattgatccctgttgtagtgtgaatcagtacttctgtcctttttatgactgaataatatccgattgtat

SEQ ID NO: 102578 - DNA, 80 bp, synthetic construct
  misc_feature 1..80: note = Artificially Synthesized Probe
  source 1..80: mol_type = other DNA
tgaaaactctatgtttaacattttgtggaatggccaaaccgtttttcaaagcagctgcaccattttacagtcccactagc

SEQ ID NO: 102579 - DNA, 80 bp, synthetic construct; identical to SEQ ID NO: 35875
  misc_feature 1..80: note = Artificially Synthesized Probe
  source 1..80: mol_type = other DNA

SEQ ID NO: 102580 - DNA, 80 bp, synthetic construct
  misc_feature 1..80: note = Artificially Synthesized Probe
  source 1..80: mol_type = other DNA
aggcatgcaccaccacacctggctaatttttgtatttttagtagagacaaggtttcaccgtgttggccaggctggtcttg

SEQ ID NO: 102581 - DNA, 80 bp, synthetic construct
  misc_feature 1..80: note = Artificially Synthesized Probe
  source 1..80: mol_type = other DNA
tgcctctcaaagtgctgggattacaagcacgagccaccataactggcctcttgaccatttcttaattgggttatttgtct

SEQ ID NO: 102582 - DNA, 80 bp, synthetic construct
  misc_feature 1..80: note = Artificially Synthesized Probe
  source 1..80: mol_type = other DNA
catcttgcaaaactaacactctatactcattcaataacaatttcccacttttctcattctttctttacctcagcccctgg

SEQ ID NO: 102583 - DNA, 80 bp, synthetic construct
  misc_feature 1..80: note = Artificially Synthesized Probe
  source 1..80: mol_type = other DNA
ttatgtcagaattttctcccaaagctgatgcatttttaattacttatattttctgagccatctatgactgttaataagga

SEQ ID NO: 102584 - DNA, 80 bp, synthetic construct; identical to SEQ ID NO: 35876
  misc_feature 1..80: note = Artificially Synthesized Probe
  source 1..80: mol_type = other DNA

SEQ ID NO: 102585 - DNA, 80 bp, synthetic construct
  misc_feature 1..80: note = Artificially Synthesized Probe
  source 1..80: mol_type = other DNA
cactgcttactaaaagagtcaagtgctccttggagtagtgactgacatctgtcaagtgaggaagtactcaaaggctgagg

SEQ ID NO: 102586 - DNA, 80 bp, synthetic construct; identical to SEQ ID NO: 35845
  misc_feature 1..80: note = Artificially Synthesized Probe
  source 1..80: mol_type = other DNA

SEQ ID NO: 102587 - DNA, 80 bp, synthetic construct
  misc_feature 1..80: note = Artificially Synthesized Probe
  source 1..80: mol_type = other DNA
aaagagcaagacagggaaaaaagcgaaaatgatttttttcagaaaaacagaagaatgttaatgaataaatgtggaaggaa

SEQ ID NO: 102588 - DNA, 80 bp, synthetic construct; identical to SEQ ID NO: 35877
  misc_feature 1..80: note = Artificially Synthesized Probe
  source 1..80: mol_type = other DNA

SEQ ID NO: 102589 - DNA, 80 bp, synthetic construct
  misc_feature 1..80: note = Artificially Synthesized Probe
  source 1..80: mol_type = other DNA
tcagcctcccaaatagctgggattacaggcatgcaccaccatgcctggataatttctgtagttttagtagagacggggtt

SEQ ID NO: 102590 - DNA, 80 bp, synthetic construct
  misc_feature 1..80: note = Artificially Synthesized Probe
  source 1..80: mol_type = other DNA
tgaccacatttactgagtggttgaggttgacatgtccggtggtgtggtggtccaatattatatacttcttaatgtgatgc

SEQ ID NO: 102591 - DNA, 80 bp, synthetic construct
  misc_feature 1..80: note = Artificially Synthesized Probe
  source 1..80: mol_type = other DNA
tctgttgcccaggctggagtgcaaagatcatagctcactataacctcaagctcttcagctccagtgatcttcctgcctct

SEQ ID NO: 102592 - DNA, 80 bp, synthetic construct; identical to SEQ ID NO: 35878
  misc_feature 1..80: note = Artificially Synthesized Probe
  source 1..80: mol_type = other DNA

SEQ ID NO: 102593 - DNA, 80 bp, synthetic construct
  misc_feature 1..80: note = Artificially Synthesized Probe
  source 1..80: mol_type = other DNA
tggattatgtgaggctgtatctattcaaggccttctctccatatataagttgggggaaaagatagctttaactttttaaa

SEQ ID NO: 102594 - DNA, 80 bp, synthetic construct
  misc_feature 1..80: note = Artificially Synthesized Probe
  source 1..80: mol_type = other DNA
tactaatcttgttttatttaactctctctttttttttttttgaggcagagtcatgctctgtggcccaggctggaatgtag

SEQ ID NO: 102595 - DNA, 80 bp, synthetic construct
  misc_feature 1..80: note = Artificially Synthesized Probe
  source 1..80: mol_type = other DNA
tcctgaacttaagcaatccacccacctcggcctcccaaagactgggattacaggctatgaaccactgctcctagtgtaac

SEQ ID NO: 102596 - DNA, 80 bp, synthetic construct
  misc_feature 1..80: note = Artificially Synthesized Probe
  source 1..80: mol_type = other DNA
caaagtttgccaggtgcttaaaaatttttatagttaattcgcttaaatcagtatccacacagagtctatacattgcatat

SEQ ID NO: 102597 - DNA, 80 bp, synthetic construct
  misc_feature 1..80: note = Artificially Synthesized Probe
  source 1..80: mol_type = other DNA
tggtaagaggaaattagagtagaatagttgtttagcctcttttgtaacacttgtgcaactttagtttcaacttcttgctg

SEQ ID NO: 102598 - DNA, 80 bp, synthetic construct; identical to SEQ ID NO: 35879
  misc_feature 1..80: note = Artificially Synthesized Probe
  source 1..80: mol_type = other DNA

SEQ ID NO: 102599 - DNA, 80 bp, synthetic construct
  misc_feature 1..80: note = Artificially Synthesized Probe
  source 1..80: mol_type = other DNA
ggtcatccacttttagtgactggaataagtagttgttaatttttttttaattgttccatggaatagggcattttcgttct

SEQ ID NO: 102600 - DNA, 80 bp, synthetic construct
  misc_feature 1..80: note = Artificially Synthesized Probe
  source 1..80: mol_type = other DNA
gagggaaggtcagcagataaacaagtgaacaaaggtctctggttttcctaggcagaggaccctgaggccttccgcagtgt

SEQ ID NO: 102601 - DNA, 80 bp, synthetic construct
  misc_feature 1..80: note = Artificially Synthesized Probe
  source 1..80: mol_type = other DNA
ggtcacagatcaacaggatcccaaggcagaagaatttttcttagtacagaacaaaatgaaaagtctcccatgtctacttc

SEQ ID NO: 102602 - DNA, 80 bp, synthetic construct
  misc_feature 1..80: note = Artificially Synthesized Probe
  source 1..80: mol_type = other DNA
ttcccagtaggggcggccgggcagaggcgcccctcacctcccggacggggcggctggccgggcggggggctgaccccccc

SEQ ID NO: 102603 - DNA, 80 bp, synthetic construct
  misc_feature 1..80: note = Artificially Synthesized Probe
  source 1..80: mol_type = other DNA
gggggctgacccccccacctccctcccagacgggacagggcggctggccgggcgggggtgctgaccccccccacctccct

SEQ ID NO: 102604 - DNA, 80 bp, synthetic construct
  misc_feature 1..80: note = Artificially Synthesized Probe
  source 1..80: mol_type = other DNA
gctgggcggagacgctcctcacttcccagacggggtggctgccaggcggaggggctcctcacttctcagacggggcggct

SEQ ID NO: 102605 - DNA, 80 bp, synthetic construct; identical to SEQ ID NO: 35881
  misc_feature 1..80: note = Artificially Synthesized Probe
  source 1..80: mol_type = other DNA

SEQ ID NO: 102606 - DNA, 80 bp, synthetic construct
  misc_feature 1..80: note = Artificially Synthesized Probe
  source 1..80: mol_type = other DNA
ggctgggaggtagaggttgtagctagccgagatcacgccactgcactccagcctgggcaccattgagcactgagtgagcg

SEQ ID NO: 102607 - DNA, 80 bp, synthetic construct
  misc_feature 1..80: note = Artificially Synthesized Probe
  source 1..80: mol_type = other DNA
ctcggcaggctgaggcaggagaatcaggcagggagattgcagtgagttgagatggcggcagtacagtccagcttcggctc

SEQ ID NO: 102608 - DNA, 80 bp, synthetic construct
  misc_feature 1..80: note = Artificially Synthesized Probe
  source 1..80: mol_type = other DNA
ccaggctggagtgcagtggcgccatcttggctcactgcaacatccacctcccgggttcaagcgattctcctgcttcagct

SEQ ID NO: 102609 - DNA, 80 bp, synthetic construct
  misc_feature 1..80: note = Artificially Synthesized Probe
  source 1..80: mol_type = other DNA
cttagaaaaatataaaaatgtgattgtgttgatgttgaaatgaaaaggggcctgcttactagaaggggaaggaaattaca

SEQ ID NO: 102610 - DNA, 80 bp, synthetic construct; identical to SEQ ID NO: 35882
  misc_feature 1..80: note = Artificially Synthesized Probe
  source 1..80: mol_type = other DNA

SEQ ID NO: 102611 - DNA, 80 bp, synthetic construct
  misc_feature 1..80: note = Artificially Synthesized Probe
  source 1..80: mol_type = other DNA
taaattacaggcataatgctctttacctttaactttttttgagatggagtcttgctctgtcgcccaggctggggtgcagt

SEQ ID NO: 102612 - DNA, 80 bp, synthetic construct
  misc_feature 1..80: note = Artificially Synthesized Probe
  source 1..80: mol_type = other DNA
aggatggtctcgatctcctgacctcgtgatccgcctcggcctcccaaagtgctgggattacaggtgtgagccactgtgcc

SEQ ID NO: 102613 - DNA, 80 bp, synthetic construct
  misc_feature 1..80: note = Artificially Synthesized Probe
  source 1..80: mol_type = other DNA
gaaaatagtagattgtgagttttatttgattgtcatgtctttttagtttcctttaaagaatgactgagaaatggttcctt

SEQ ID NO: 102614 - DNA, 80 bp, synthetic construct; identical to SEQ ID NO: 35883
  misc_feature 1..80: note = Artificially Synthesized Probe
  source 1..80: mol_type = other DNA

SEQ ID NO: 102615 - DNA, 80 bp, synthetic construct
  misc_feature 1..80: note = Artificially Synthesized Probe
  source 1..80: mol_type = other DNA
tcaatcagttattattgagatggctgcccaaaggctgattttcttaattttttctatgtgcattcattatgtatctatat

SEQ ID NO: 102616 - DNA, 80 bp, synthetic construct
  misc_feature 1..80: note = Artificially Synthesized Probe
  source 1..80: mol_type = other DNA
ttttgagatggagtctcgctctgttacagcccaggctggagtgcagtggcatgatctcggatcactgcaatctccccgtc

SEQ ID NO: 102617 - DNA, 80 bp, synthetic construct
  misc_feature 1..80: note = Artificially Synthesized Probe
  source 1..80: mol_type = other DNA
agcctcccaaagtgctggaatgtcaggcctgagccaccacgcccagcctgatctgattatttttaataatgagaatactg

SEQ ID NO: 102618 - DNA, 80 bp, synthetic construct
  misc_feature 1..80: note = Artificially Synthesized Probe
  source 1..80: mol_type = other DNA
atatgcaaagaatctattccttcctttttggaaggagtcacaagaaactagtaatattggttacctttacagagtgaaac

SEQ ID NO: 102619 - DNA, 80 bp, synthetic construct; identical to SEQ ID NO: 35884
  misc_feature 1..80: note = Artificially Synthesized Probe
  source 1..80: mol_type = other DNA

SEQ ID NO: 102620 - DNA, 80 bp, synthetic construct
  misc_feature 1..80: note = Artificially Synthesized Probe
  source 1..80: mol_type = other DNA
acacccagctaattttgtatttttagtagagacaaggtttctccatgttggtcagctggtcttgaattcccaacctcagg

SEQ ID NO: 102621 - DNA, 80 bp, synthetic construct
  misc_feature 1..80: note = Artificially Synthesized Probe
  source 1..80: mol_type = other DNA
ttgcacgtatggtaagagttttatttctcactctggccccaacagaagaatattatatgatttggctgtatgttttttta

SEQ ID NO: 102622 - DNA, 80 bp, synthetic construct
  misc_feature 1..80: note = Artificially Synthesized Probe
  source 1..80: mol_type = other DNA
ggggtgtatacggtctgttgtgtggctggatttagaagagcagatgttgttattgacgatagggttctctctgtttcttg

SEQ ID NO: 102623 - DNA, 80 bp, synthetic construct; identical to SEQ ID NO: 35885
  misc_feature 1..80: note = Artificially Synthesized Probe
  source 1..80: mol_type = other DNA

SEQ ID NO: 102624 - DNA, 80 bp, synthetic construct
  misc_feature 1..80: note = Artificially Synthesized Probe
  source 1..80: mol_type = other DNA
ggaggcttaggcaggcagatcacatgaggccaggagttcgagaccagcctggccaacgtggtgaaaccccatctctacta

SEQ ID NO: 102625 - DNA, 80 bp, synthetic construct
  misc_feature 1..80: note = Artificially Synthesized Probe
  source 1..80: mol_type = other DNA
actgaggcacagtgtggggggtgggcttagcatggagagggggtcaggcttagccccgacaactcagaattctacttcct

SEQ ID NO: 102626 - DNA, 80 bp, synthetic construct
  misc_feature 1..80: note = Artificially Synthesized Probe
  source 1..80: mol_type = other DNA
gcctggtttctaaacattcctgcagatttaccaggatgaaggtaaaacttctgcattagaaaaagtgctcttagaaaaat

SEQ ID NO: 102627 - DNA, 80 bp, synthetic construct; identical to SEQ ID NO: 35886
  misc_feature 1..80: note = Artificially Synthesized Probe
  source 1..80: mol_type = other DNA

SEQ ID NO: 102628 - DNA, 80 bp, synthetic construct
  misc_feature 1..80: note = Artificially Synthesized Probe
  source 1..80: mol_type = other DNA
tattttctcagatgttttgctcattttgtagaggttaagtcctcattaatggatatcagtgattttttttaaggttagaa

SEQ ID NO: 102629 - DNA, 80 bp, synthetic construct
  misc_feature 1..80: note = Artificially Synthesized Probe
  source 1..80: mol_type = other DNA
tgttaagaatattttgttttccttttgtattaaaatctatcataataggactgtggttgtatgatttcatagttgatgca

SEQ ID NO: 102630 - DNA, 80 bp, synthetic construct
  misc_feature 1..80: note = Artificially Synthesized Probe
  source 1..80: mol_type = other DNA
ttcacacatttaccatgtgtgaaagtactttgtgttttaagcactagagcctgtgttctaagtgctaccccatttttatg

SEQ ID NO: 102631 - DNA, 80 bp, synthetic construct
  misc_feature 1..80: note = Artificially Synthesized Probe
  source 1..80: mol_type = other DNA
aacatggtgaaaccccgtctccactaaaaatacaaaaattagctgggtgtggtggcacacgcctgtaatcccagctattt

SEQ ID NO: 102632 - DNA, 80 bp, synthetic construct; identical to SEQ ID NO: 35887
  misc_feature 1..80: note = Artificially Synthesized Probe
  source 1..80: mol_type = other DNA

SEQ ID NO: 102633 - DNA, 80 bp, synthetic construct
  misc_feature 1..80: note = Artificially Synthesized Probe
  source 1..80: mol_type = other DNA
agtggcacgatctcaactcactgcagcctctgcctcccaggctcaagtgatcctcacaccacatcagcctcctaagtagc

SEQ ID NO: 102634 - DNA, 80 bp, synthetic construct
  misc_feature 1..80: note = Artificially Synthesized Probe
  source 1..80: mol_type = other DNA
tgtatatattttcatgttttctactaaaagcagtagaaacaagtgtagaaattccttcccatcaggcgggaggcagggtg

SEQ ID NO: 102635 - DNA, 80 bp, synthetic construct
  misc_feature 1..80: note = Artificially Synthesized Probe
  source 1..80: mol_type = other DNA
agctactcaggaggctgaggcaggagaattgcttgaacctgggaggcagaggttgcagtgagctgagatcgtgccactgt

SEQ ID NO: 102636 - DNA, 80 bp, synthetic construct
  misc_feature 1..80: note = Artificially Synthesized Probe
  source 1..80: mol_type = other DNA
cttcaaagttctagatttaatctaagaaagatataatttttcttagtattacaagttttattcaatgagagtgatagttg

SEQ ID NO: 102637 - DNA, 80 bp, synthetic construct; identical to SEQ ID NO: 35888
  misc_feature 1..80: note = Artificially Synthesized Probe
  source 1..80: mol_type = other DNA

SEQ ID NO: 102638 - DNA, 80 bp, synthetic construct
  misc_feature 1..80: note = Artificially Synthesized Probe
  source 1..80: mol_type = other DNA
tttttacaatcacttttaagtactaaaaaataaaaacgattatttttgctcacctagtgtgtattttgcagccatctctt

SEQ ID NO: 102639 - DNA, 80 bp, synthetic construct; identical to SEQ ID NO: 35846
  misc_feature 1..80: note = Artificially Synthesized Probe
  source 1..80: mol_type = other DNA

SEQ ID NO: 102640 - DNA, 80 bp, synthetic construct
  misc_feature 1..80: note = Artificially Synthesized Probe
  source 1..80: mol_type = other DNA
atacatttcttctcccatctgaggtgtgccttttcatcttattggtacccttttgataatagaaattcttaattttaatg

SEQ ID NO: 102641 - DNA, 80 bp, synthetic construct
  misc_feature 1..80: note = Artificially Synthesized Probe
  source 1..80: mol_type = other DNA
tgaggtaaaggtgcagttatatgtttttgtgtatgaatatccagttgtattccccagacacactcagttttgtttaaaag

SEQ ID NO: 102642 - DNA, 80 bp, synthetic construct
  misc_feature 1..80: note = Artificially Synthesized Probe
  source 1..80: mol_type = other DNA
cacgcctgtagtcctagctactcgggaggctgaggcaggagaatcgcttgaacccgagaggtggaggttgcagtaagctg

SEQ ID NO: 102643 - DNA, 80 bp, synthetic construct; identical to SEQ ID NO: 35889
  misc_feature 1..80: note = Artificially Synthesized Probe
  source 1..80: mol_type = other DNA

SEQ ID NO: 102644 - DNA, 80 bp, synthetic construct
  misc_feature 1..80: note = Artificially Synthesized Probe
  source 1..80: mol_type = other DNA
ggcggatcacttgtcaggagttcgagaccagcctggccaacatggtgaaaccccgtctctactaaaaatacagaaataag

SEQ ID NO: 102645 - DNA, 80 bp, synthetic construct
  misc_feature 1..80: note = Artificially Synthesized Probe
  source 1..80: mol_type = other DNA
gaaatgttaacttctccaacacgacagcgccatgttgcatgagaaaaagatcacagttcctctcgtccaagcagtccttg

SEQ ID NO: 102646 - DNA, 80 bp, synthetic construct; identical to SEQ ID NO: 35890
  misc_feature 1..80: note = Artificially Synthesized Probe
  source 1..80: mol_type = other DNA

SEQ ID NO: 102647 - DNA, 80 bp, synthetic construct
  misc_feature 1..80: note = Artificially Synthesized Probe
  source 1..80: mol_type = other DNA
aaaataggaattacctgttgtcctgatggcataactgttcctgaattgagagaagcatgggactatctatgtatgtcttt

SEQ ID NO: 102648 - DNA, 80 bp, synthetic construct
  misc_feature 1..80: note = Artificially Synthesized Probe
  source 1..80: mol_type = other DNA
acttttcagttccgttatctccagtgccgtttcatgctttagagtgagtcacgtgcagggagtgtgaacgtcagaggtgg

SEQ ID NO: 102649 - DNA, 80 bp, synthetic construct
  misc_feature 1..80: note = Artificially Synthesized Probe
  source 1..80: mol_type = other DNA
gttcaaaaaaaagagttgtgagataggaaaatgaagcgcttttcatttactaaatgattgttaactccagtttttcatca

SEQ ID NO: 102650 - DNA, 80 bp, synthetic construct
  misc_feature 1..80: note = Artificially Synthesized Probe
  source 1..80: mol_type = other DNA
tctctatattgtccagtgtggtagctactagctacatgtggcatttaacatttgaaatgtggacaactgaagaaccgaaa

SEQ ID NO: 102651 - DNA, 80 bp, synthetic construct; identical to SEQ ID NO: 35891
  misc_feature 1..80: note = Artificially Synthesized Probe
  source 1..80: mol_type = other DNA

SEQ ID NO: 102652 - DNA, 80 bp, synthetic construct
  misc_feature 1..80: note = Artificially Synthesized Probe
  source 1..80: mol_type = other DNA
tgtaccccaggcggtgagtcgggattttttctgtttgtgtgtttttattcaactaaaactctacaagacttaaatagaaa

SEQ ID NO: 102653 - DNA, 80 bp, synthetic construct
  misc_feature 1..80: note = Artificially Synthesized Probe
  source 1..80: mol_type = other DNA
ctaaaccccagtttgtggcgctcatatttgatccaggtaagaactaggacaacagtagaattgggaaaatccctctggag

SEQ ID NO: 102654 - DNA, 80 bp, synthetic construct
  misc_feature 1..80: note = Artificially Synthesized Probe
  source 1..80: mol_type = other DNA
cttagcctcccgagtagctgggataacaggcgcccgccaccacgcccagctaatttttgtatttttagtagagacggggt

SEQ ID NO: 102655 - DNA, 80 bp, synthetic construct
  misc_feature 1..80: note = Artificially Synthesized Probe
  source 1..80: mol_type = other DNA
taaatagcagaatatgtaaggctgtatttggtgtatgggagatatgagaaagtatttgccatacattatattctcacaaa

SEQ ID NO: 102656 - DNA, 80 bp, synthetic construct; identical to SEQ ID NO: 35892
  misc_feature 1..80: note = Artificially Synthesized Probe
  source 1..80: mol_type = other DNA

SEQ ID NO: 102657 - DNA, 80 bp, synthetic construct
  misc_feature 1..80: note = Artificially Synthesized Probe
  source 1..80: mol_type = other DNA
ccactcggagctaatccacaatctccgcagtaagtgccacctccgcccgttgtagggcagctggggcaggctgggcctgg

SEQ ID NO: 102658 - DNA, 80 bp, synthetic construct
  misc_feature 1..80: note = Artificially Synthesized Probe
  source 1..80: mol_type = other DNA
actctggaggctgaggtgggagaattgcttgagcccaagctgttgaggctgcattgagccatgtttgtgccatggcactg

SEQ ID NO: 102659 - DNA, 80 bp, synthetic construct
  misc_feature 1..80: note = Artificially Synthesized Probe
  source 1..80: mol_type = other DNA
gtcattgacttgctgcttattggccaagtgactgggaaaatgacttaattgctttggccctgttgattatctgtttaaaa

SEQ ID NO: 102660 - DNA, 80 bp, synthetic construct
  misc_feature 1..80: note = Artificially Synthesized Probe
  source 1..80: mol_type = other DNA
tactcaagaggctgaggtgggaggatagcttggattgcgtgagcctgacaggttgaggctgcagtgagccatgcttgtac

SEQ ID NO: 102661 - DNA, 80 bp, synthetic construct
  misc_feature 1..80: note = Artificially Synthesized Probe
  source 1..80: mol_type = other DNA
atgtgctcgtgaaacaaattagcttaatttgaaaccgtgagcctgcttaatccagggaatgtgactatttaaataatgtt

SEQ ID NO: 102662 - DNA, 80 bp, synthetic construct
  misc_feature 1..80: note = Artificially Synthesized Probe
  source 1..80: mol_type = other DNA
ccaatgggtttttaacttttcaaaaaaaatattgataacctagagtgaacagttaaaatctgaaatagaactgtgcttaa

SEQ ID NO: 102663 - DNA, 80 bp, synthetic construct; identical to SEQ ID NO: 35893
  misc_feature 1..80: note = Artificially Synthesized Probe
  source 1..80: mol_type = other DNA

SEQ ID NO: 102664 - DNA, 80 bp, synthetic construct
  misc_feature 1..80: note = Artificially Synthesized Probe
  source 1..80: mol_type = other DNA
gtttgcactgcaaaactctgaaaaggcttaggaattggtggcatcaagaccttgaaaatcataggtaaaacatgggtctg

SEQ ID NO: 102665 - DNA, 80 bp, synthetic construct
  misc_feature 1..80: note = Artificially Synthesized Probe
  source 1..80: mol_type = other DNA
aaagaacaaccatatcatttatattcagaatattaggggataaagagaagattctgaaagcctctagaggccaggtgtgg

SEQ ID NO: 102666 - DNA, 80 bp, synthetic construct
  misc_feature 1..80: note = Artificially Synthesized Probe
  source 1..80: mol_type = other DNA
ggaggctgaggtgggaggattgcttgagcccaggaagttgagatttcagtgaaccatgattgcaccactgtattccagcc

SEQ ID NO: 102667 - DNA, 80 bp, synthetic construct; identical to SEQ ID NO: 35894
  misc_feature 1..80: note = Artificially Synthesized Probe
  source 1..80: mol_type = other DNA

SEQ ID NO: 102668 - DNA, 80 bp, synthetic construct
  misc_feature 1..80: note = Artificially Synthesized Probe
  source 1..80: mol_type = other DNA
aatgagggaagagacagatagtaggaaaaaccaaaagaggaaaccacatagggcatcttaatcaggcagaggcatggaag

SEQ ID NO: 102669 - DNA, 80 bp, synthetic construct
  misc_feature 1..80: note = Artificially Synthesized Probe
  source 1..80: mol_type = other DNA
attttaataaaaaatgattggttggattgggggaaggaagcaaaatgtagattaagggagttcaatccttatctagcgta

SEQ ID NO: 102670 - DNA, 80 bp, synthetic construct; identical to SEQ ID NO: 35895
  misc_feature 1..80: note = Artificially Synthesized Probe
  source 1..80: mol_type = other DNA

SEQ ID NO: 102671 - DNA, 80 bp, synthetic construct; identical to SEQ ID NO: 35847
  misc_feature 1..80: note = Artificially Synthesized Probe
  source 1..80: mol_type = other DNA

SEQ ID NO: 102672 - DNA, 80 bp, synthetic construct
  misc_feature 1..80: note = Artificially Synthesized Probe
  source 1..80: mol_type = other DNA
gctcggtggtgggcacctgtaatcccagctacttgggaggctgaggcatgagaattgcttgaacctgggaggcggaggtt

SEQ ID NO: 102673 - DNA, 80 bp, synthetic construct
  misc_feature 1..80: note = Artificially Synthesized Probe
  source 1..80: mol_type = other DNA
atgaaaatggtaacatgatttaaaagttttctgactgtaagagcttccattgagtactcttggttcttcattgacaggag

SEQ ID NO: 102674 - DNA, 80 bp, synthetic construct
  misc_feature 1..80: note = Artificially Synthesized Probe
  source 1..80: mol_type = other DNA
acaataataggatagggattccttgctgattttctacacttcctctcctcccctcctccttccttcaaacccacaaagat

SEQ ID NO: 102675 - DNA, 80 bp, synthetic construct; identical to SEQ ID NO: 35896
  misc_feature 1..80: note = Artificially Synthesized Probe
  source 1..80: mol_type = other DNA

SEQ ID NO: 102676 - DNA, 80 bp, synthetic construct
  misc_feature 1..80: note = Artificially Synthesized Probe
  source 1..80: mol_type = other DNA
tctaaacataaaactcatttatgttatacctcttatacacatagcctgaaggtaattttgtataatatttcaaataattt

SEQ ID NO: 102677 - DNA, 80 bp, synthetic construct
  misc_feature 1..80: note = Artificially Synthesized Probe
  source 1..80: mol_type = other DNA
tactatgtatttatttttaagacggagtctcgctctgtcacccaggctggagtgtggtggcgtgatcttggctaactgca

SEQ ID NO: 102678 - DNA, 80 bp, synthetic construct
  misc_feature 1..80: note = Artificially Synthesized Probe
  source 1..80: mol_type = other DNA
tctgcccaccttggcctcccaaagtgctgggatcacaggcgtgagccaccgtgtctggccttaatttgtatatactaaat

SEQ ID NO: 102679 - DNA, 80 bp, synthetic construct
  misc_feature 1..80: note = Artificially Synthesized Probe
  source 1..80: mol_type = other DNA
agaccagtgtggccaatatggtgaaaccttgtctctactaaaaatacaaaaattagctgggcatggtggcgtgtgcctgt

SEQ ID NO: 102680 - DNA, 80 bp, synthetic construct; identical to SEQ ID NO: 35897
  misc_feature 1..80: note = Artificially Synthesized Probe
  source 1..80: mol_type = other DNA

SEQ ID NO: 102681 - DNA, 80 bp, synthetic construct
  misc_feature 1..80: note = Artificially Synthesized Probe
  source 1..80: mol_type = other DNA
acatgcaaggtgaaagggtgtggattttaagacattagactacaagagctgtttttggttgtcacctttatgctcctcca

SEQ ID NO: 102682 - DNA, 80 bp, synthetic construct
  misc_feature 1..80: note = Artificially Synthesized Probe
  source 1..80: mol_type = other DNA
tcagcttcaattcagtactttgtaaggattttttcttcattatcagccactctgtttttatgtttttaaattatttttat

SEQ ID NO: 102683 - DNA, 80 bp, synthetic construct
  misc_feature 1..80: note = Artificially Synthesized Probe
  source 1..80: mol_type = other DNA
agcatatctatgctgtctacacctgcccgtttgtcacttagtagcctatttggttagcagtgactgtcatagtatcacag

SEQ ID NO: 102684 - DNA, 80 bp, synthetic construct
  misc_feature 1..80: note = Artificially Synthesized Probe
  source 1..80: mol_type = other DNA
gtttgagactagcctggccaacatggtgaaaccccgtctctattaaaaatacaaaatcagctgggcgtgatggcacaggc

SEQ ID NO: 102685 - DNA, 80 bp, synthetic construct; identical to SEQ ID NO: 35898
  misc_feature 1..80: note = Artificially Synthesized Probe
  source 1..80: mol_type = other DNA

SEQ ID NO: 102686 - DNA, 80 bp, synthetic construct
  misc_feature 1..80: note = Artificially Synthesized Probe
  source 1..80: mol_type = other DNA
ccccattctatagaataggccagccactgtttaagctattctggctaaattcctaggaagaggcaaggattctacaagtt

SEQ ID NO: 102687 - DNA, 80 bp, synthetic construct
  misc_feature 1..80: note = Artificially Synthesized Probe
  source 1..80: mol_type = other DNA
cccactcccttccatgagagagagtgacatcagtacataacagtgccattagctcaaattacttgaaattaaatgccaaa

SEQ ID NO: 102688 - DNA, 80 bp, synthetic construct; identical to SEQ ID NO: 35899
  misc_feature 1..80: note = Artificially Synthesized Probe
  source 1..80: mol_type = other DNA

SEQ ID NO: 102689 - DNA, 80 bp, synthetic construct
  misc_feature 1..80: note = Artificially Synthesized Probe
  source 1..80: mol_type = other DNA
aaaattagctgggcatgttggcttgcatctgtagtcccaggcactcaggaggctgaggcaggagaattgtttgaacccag

SEQ ID NO: 102690 - DNA, 80 bp, synthetic construct
  misc_feature 1..80: note = Artificially Synthesized Probe
  source 1..80: mol_type = other DNA
aactaaaaccttccttcactttgcttctagtatggtttatacaattacataattgtgagattattgtagtataaaagggg

SEQ ID NO: 102691 - DNA, 80 bp, synthetic construct
  misc_feature 1..80: note = Artificially Synthesized Probe
  source 1..80: mol_type = other DNA
ttttatgactagaggtagatttactgtgaagctaacaaagctgaagctgcagagcccttgcttgtctaggttttctctga

SEQ ID NO: 102692 - DNA, 80 bp, synthetic construct
  misc_feature 1..80: note = Artificially Synthesized Probe
  source 1..80: mol_type = other DNA
ggttcaagcaattctcctgcctcagcttcccaagtagctgagagtataggcgcccagctaaattttgtatttttagtaga

SEQ ID NO: 102693 - DNA, 80 bp, synthetic construct; identical to SEQ ID NO: 35900
  misc_feature 1..80: note = Artificially Synthesized Probe
  source 1..80: mol_type = other DNA

SEQ ID NO: 102694 - DNA, 80 bp, synthetic construct
  misc_feature 1..80: note = Artificially Synthesized Probe
  source 1..80: mol_type = other DNA
cctgggaaacatagtgagacctcgtatctactaaaaatttaagaactagccaggcgtagtggtgtgcacctctagttctg

SEQ ID NO: 102695 - DNA, 80 bp, synthetic construct
  misc_feature 1..80: note = Artificially Synthesized Probe
  source 1..80: mol_type = other DNA
cgtataggaagaaaacaacatacagatggtccctgacttaacagtggtttgacttacaagttttttactttactggatgt

SEQ ID NO: 102696 - DNA, 80 bp, synthetic construct
  misc_feature 1..80: note = Artificially Synthesized Probe
  source 1..80: mol_type = other DNA
gaataatttttaaatttatggacaattagtcatctgctaaacattaaatgtatacctgcttttaggctgggcgcagtggc

SEQ ID NO: 102697 - DNA, 80 bp, synthetic construct
  misc_feature 1..80: note = Artificially Synthesized Probe
  source 1..80: mol_type = other DNA
ggaggctgaagcaggagaatggcgtgaacctgggaggccgagcttgcagtgagctgagatcgcgccattgcactccagcc

SEQ ID NO: 102698 - DNA, 80 bp, synthetic construct; identical to SEQ ID NO: 35901
  misc_feature 1..80: note = Artificially Synthesized Probe
  source 1..80: mol_type = other DNA

SEQ ID NO: 102699 - DNA, 80 bp, synthetic construct
  misc_feature 1..80: note = Artificially Synthesized Probe
  source 1..80: mol_type = other DNA
ttacatgttcgcactatcagaaaaaaaaaaaatttctccaggtgtaccaggaggactttctaatttttctgttgtagatg

SEQ ID NO: 102700 - DNA, 80 bp, synthetic construct
  misc_feature 1..80: note = Artificially Synthesized Probe
  source 1..80: mol_type = other DNA
aggagtcatcagctgtgaatttgaaactgactgctctcatggagcttacagtaacgtaggagatgcaaagaccaagatga

SEQ ID NO: 102701 - DNA, 80 bp, synthetic construct
  misc_feature 1..80: note = Artificially Synthesized Probe
  source 1..80: mol_type = other DNA
ggatgaaatgatggtctgcattaaggcagtgttagtaaggatagagagaagtgggtggatagctacatctaaaatactgt

SEQ ID NO: 102702 - DNA, 80 bp, synthetic construct
  misc_feature 1..80: note = Artificially Synthesized Probe
  source 1..80: mol_type = other DNA
ggcatgatctctgctcactgcagcctcaacctcctgggctcaagcgatcccccctgcctcagccttctgagtagctggga

SEQ ID NO: 102703 - DNA, 80 bp, synthetic construct; identical to SEQ ID NO: 35902
  misc_feature 1..80: note = Artificially Synthesized Probe
  source 1..80: mol_type = other DNA

SEQ ID NO: 102704 - DNA, 80 bp, synthetic construct
  misc_feature 1..80: note = Artificially Synthesized Probe
  source 1..80: mol_type = other DNA
tgagtctttttacacttggaaagatgtcacttgtaattttggtggattaatagaaggggagacaatgccagatctatagg

SEQ ID NO: 102705 - DNA, 80 bp, synthetic construct
  misc_feature 1..80: note = Artificially Synthesized Probe
  source 1..80: mol_type = other DNA
ttatttatttatagatatttttgagacagagtcttgctctgtcacccaggctggagtgcagtgatgcgatcttggctcac

SEQ ID NO: 102706 - DNA, 80 bp, synthetic construct
  misc_feature 1..80: note = Artificially Synthesized Probe
  source 1..80: mol_type = other DNA
ctctacaaaaaataaacaaaattagctgggcattatggtgcatgcctgtagtctcagctacatgagctacgtgggaggct

SEQ ID NO: 102707 - DNA, 80 bp, synthetic construct
  misc_feature 1..80: note = Artificially Synthesized Probe
  source 1..80: mol_type = other DNA
tgatccacccgcctcagcctccaaaactgctggaattacaggtgtgagccaccacacccagactatttttgtttttagta

SEQ ID NO: 102708 - DNA, 80 bp, synthetic construct; identical to SEQ ID NO: 35903
  misc_feature 1..80: note = Artificially Synthesized Probe
  source 1..80: mol_type = other DNA

SEQ ID NO: 102709 - DNA, 80 bp, synthetic construct
  misc_feature 1..80: note = Artificially Synthesized Probe
  source 1..80: mol_type = other DNA
atccatgaaattattagaaaacgttcatggattttgattgttgtttccttatagtatatcttttcatttattcttggtaa

SEQ ID NO: 102710 - DNA, 80 bp, synthetic construct
  misc_feature 1..80: note = Artificially Synthesized Probe
  source 1..80: mol_type = other DNA
tagtacatactattttttattgtaaatgatctatacatgtaagtcagataaagaaatggtcatacagaattttgaacatt

SEQ ID NO: 102711 - DNA, 80 bp, synthetic construct; identical to SEQ ID NO: 35904
  misc_feature 1..80: note = Artificially Synthesized Probe
  source 1..80: mol_type = other DNA

SEQ ID NO: 102712 - DNA, 80 bp, synthetic construct
  misc_feature 1..80: note = Artificially Synthesized Probe
  source 1..80: mol_type = other DNA
ctaggattacaggtgcatgccaccacacccggctaattatttgtatttttagtagagacgaggtttcaccatgttagcca

SEQ ID NO: 102713 - DNA, 80 bp, synthetic construct
  misc_feature 1..80: note = Artificially Synthesized Probe
  source 1..80: mol_type = other DNA
actttgggaggctgaggtgggcagatcacttgaggtcaggagttcgagaccagcctgagcaacgtggtgaaaccctgtct

SEQ ID NO: 102714 - DNA, 80 bp, synthetic construct
  misc_feature 1..80: note = Artificially Synthesized Probe
  source 1..80: mol_type = other DNA
gactctgtctcaaaaaaaaaaaaaaaaaaaaaaagccaaaacaagaaaaacaatatcttcagttcatattctaaaaagca

SEQ ID NO: 102715 - DNA, 80 bp, synthetic construct
  misc_feature 1..80: note = Artificially Synthesized Probe
  source 1..80: mol_type = other DNA
ttaatagataatccaatactataggataaaggcagcttattggagaaatgattttaaaaatattttcttgcacaatttac

SEQ ID NO: 102716 - DNA, 80 bp, synthetic construct; identical to SEQ ID NO: 35905
  misc_feature 1..80: note = Artificially Synthesized Probe
  source 1..80: mol_type = other DNA

SEQ ID NO: 102717 - DNA, 80 bp, synthetic construct; identical to SEQ ID NO: 35848
  misc_feature 1..80: note = Artificially Synthesized Probe
  source 1..80: mol_type = other DNA

SEQ ID NO: 102718 - DNA, 80 bp, synthetic construct
  misc_feature 1..80: note = Artificially Synthesized Probe
  source 1..80: mol_type = other DNA
tactgaggtataactgagataccatacagtttattttagactgcatttttattccttccttcctctcactggcagttgct

SEQ ID NO: 102719 - DNA, 80 bp, synthetic construct
  misc_feature 1..80: note = Artificially Synthesized Probe
  source 1..80: mol_type = other DNA
ggttgagattgacccactccacaattgctagtggacattctgagcaaaagaccacatttctgtccaattttgtgaatgta

SEQ ID NO: 102720 - DNA, 80 bp, synthetic construct; identical to SEQ ID NO: 35906
  misc_feature 1..80: note = Artificially Synthesized Probe
  source 1..80: mol_type = other DNA

SEQ ID NO: 102721 - DNA, 80 bp, synthetic construct
  misc_feature 1..80: note = Artificially Synthesized Probe
  source 1..80: mol_type = other DNA
agtataaaattacagtggattgctcatctcagtcctcaaagctttttgaaaaccaacaccatcacagcttgttttggact

SEQ ID NO: 102722 - DNA, 80 bp, synthetic construct
  misc_feature 1..80: note = Artificially Synthesized Probe
  source 1..80: mol_type = other DNA
agggttctgtaaaatggaaaacttagtttgtgaattgattttgaggagtggtttttcttttcttggacacttaattctgt

SEQ ID NO: 102723 - DNA, 80 bp, synthetic construct
  misc_feature 1..80: note = Artificially Synthesized Probe
  source 1..80: mol_type = other DNA
agatacaatcagctgctttgttaccttaaaactaggcatttgtaaatattaaaccataagatggcaggtgatgtcctgta

SEQ ID NO: 102724 - DNA, 80 bp, synthetic construct; identical to SEQ ID NO: 35907
  misc_feature 1..80: note = Artificially Synthesized Probe
  source 1..80: mol_type = other DNA

SEQ ID NO: 102725 - DNA, 80 bp, synthetic construct
  misc_feature 1..80: note = Artificially Synthesized Probe
  source 1..80: mol_type = other DNA
atttgtcatttagtcagctgatattttagtgctttctatatgacaggcactggggatacagcagtgaacaaaacaaacat

SEQ ID NO: 102726 - DNA, 80 bp, synthetic construct
  misc_feature 1..80: note = Artificially Synthesized Probe
  source 1..80: mol_type = other DNA
tagacacatatcacgcaggtagacttgggataagcattccaggcagaagaaatagcgaattccagatttggatttaggat

SEQ ID NO: 102727 - DNA, 80 bp, synthetic construct
  misc_feature 1..80: note = Artificially Synthesized Probe
  source 1..80: mol_type = other DNA
gaggaggggactgtgggagatcagattattttgaggaatgcttttcttataagacatttaagtcgagatttttagtaggc

SEQ ID NO: 102728 - DNA, 80 bp, synthetic construct
  misc_feature 1..80: note = Artificially Synthesized Probe
  source 1..80: mol_type = other DNA
agacagagcctctttctgtcgcccaagctggagtgccgtggcgtgatcttagctcactgcaacctctgtttcctgggttc

SEQ ID NO: 102729 - DNA, 80 bp, synthetic construct; identical to SEQ ID NO: 35849
  misc_feature 1..80: note = Artificially Synthesized Probe
  source 1..80: mol_type = other DNA

SEQ ID NO: 102730 - DNA, 80 bp, synthetic construct
  misc_feature 1..80: note = Artificially Synthesized Probe
  source 1..80: mol_type = other DNA
aaagagccaggggccgctgctggtgggggcaggggcagtcgtctccctgcaggccctgggggagggagtgcagtacaggt

SEQ ID NO: 102731 - DNA, 80 bp, synthetic construct
  misc_feature 1..80: note = Artificially Synthesized Probe
  source 1..80: mol_type = other DNA
aaattatataaaaataaataaaattggccgggcgtggtgggtcatgcctgtaatcctagcactttgggaggccgaggtgg

SEQ ID NO: 102732 - DNA, 80 bp, synthetic construct
  misc_feature 1..80: note = Artificially Synthesized Probe
  source 1..80: mol_type = other DNA
agtttgcagtgacctgagatcgctccattgtaccccagcctgggtgaaaaagcgaaactgcctcaaaataaatacataaa

SEQ ID NO: 102733 - DNA, 80 bp, synthetic construct
  misc_feature 1..80: note = Artificially Synthesized Probe
  source 1..80: mol_type = other DNA
ctgtattacattctggttaatgagatcttaggctgtaggaggggaaagattcgattgtgctgttacaaaaatatttttat

SEQ ID NO: 102734 - DNA, 80 bp, synthetic construct; identical to SEQ ID NO: 35850
  misc_feature 1..80: note = Artificially Synthesized Probe
  source 1..80: mol_type = other DNA

SEQ ID NO: 102735 - DNA, 80 bp, synthetic construct
  misc_feature 1..80: note = Artificially Synthesized Probe
  source 1..80: mol_type = other DNA
gacccttccaaatccaagattctgtgatttttttccccagtggtcccttgtacctagattttatgatttaaaaaatattt

SEQ ID NO: 102736 - DNA, 80 bp, synthetic construct
  misc_feature 1..80: note = Artificially Synthesized Probe
  source 1..80: mol_type = other DNA
taatttttgtacttttagtagagatggggtttcaccatgttggccaggatggcctcaaactcctgacctcaagtgatcca

SEQ ID NO: 102737 - DNA, 80 bp, synthetic construct
  misc_feature 1..80: note = Artificially Synthesized Probe
  source 1..80: mol_type = other DNA
gcaacctccgcctccccggttcaagcaattctcctgcctcagcctcctgagtagctaggattacaggcatatgctaccac

SEQ ID NO: 102738 - DNA, 80 bp, synthetic construct; identical to SEQ ID NO: 35851
  misc_feature 1..80: note = Artificially Synthesized Probe
  source 1..80: mol_type = other DNA

SEQ ID NO: 102739 - DNA, 80 bp, synthetic construct
  misc_feature 1..80: note = Artificially Synthesized Probe
  source 1..80: mol_type = other DNA
attgattggcagaggaaggtacatattttaaaataatctctggtacttagagaatatgctttaccgtaacttgccatcac

SEQ ID NO: 102740 - DNA, 80 bp, synthetic construct
  misc_feature 1..80: note = Artificially Synthesized Probe
  source 1..80: mol_type = other DNA
ctgggattacaggcacatgccaccatgcccagctagtttttgtatttttagtagagacagggtttcaccaagttggccag

SEQ ID NO: 102741 - DNA, 80 bp, synthetic construct; identical to SEQ ID NO: 35842
  misc_feature 1..80: note = Artificially Synthesized Probe
  source 1..80: mol_type = other DNA

SEQ ID NO: 102742 - DNA, 80 bp, synthetic construct; identical to SEQ ID NO: 35852
  misc_feature 1..80: note = Artificially Synthesized Probe
  source 1..80: mol_type = other DNA

SEQ ID NO: 102743 - DNA, 80 bp, synthetic construct; identical to SEQ ID NO: 35909
  misc_feature 1..80: note = Artificially Synthesized Probe
  source 1..80: mol_type = other DNA

SEQ ID NO: 102744 - DNA, 80 bp, synthetic construct
  misc_feature 1..80: note = Artificially Synthesized Probe
  source 1..80: mol_type = other DNA
tcggagctgcaatctagtcctgacttccatccaccatgatcctgagttttccttttagcttagtgattttgggagcccaa

SEQ ID NO: 102745 - DNA, 80 bp, synthetic construct
  misc_feature 1..80: note = Artificially Synthesized Probe
  source 1..80: mol_type = other DNA
ggagcagatcccttagaggtggggagcagtattgttctaaggcttgttctttccaaccccttctagtctgtgggattgtg

SEQ ID NO: 102746 - DNA, 80 bp, synthetic construct; identical to SEQ ID NO: 36014
  misc_feature 1..80: note = Artificially Synthesized Probe
  source 1..80: mol_type = other DNA

SEQ ID NO: 102747 - DNA, 80 bp, synthetic construct
  misc_feature 1..80: note = Artificially Synthesized Probe
  source 1..80: mol_type = other DNA
tttgcagctactttatctgcagaagaggtttctagacccaggtcttgtcccatcttctggtattaaattcttcctactct

SEQ ID NO: 102748 - DNA, 80 bp, synthetic construct
  misc_feature 1..80: note = Artificially Synthesized Probe
  source 1..80: mol_type = other DNA
tacacatatttaatttcaaccatataatagtcctatgaagtgggtgtcttgttcccatttttcacaggatgaaatttgcc

SEQ ID NO: 102749 - DNA, 80 bp, synthetic construct; identical to SEQ ID NO: 36015
  misc_feature 1..80: note = Artificially Synthesized Probe
  source 1..80: mol_type = other DNA

SEQ ID NO: 102750 - DNA, 80 bp, synthetic construct
  misc_feature 1..80: note = Artificially Synthesized Probe
  source 1..80: mol_type = other DNA
aaataggaaattcgttaaaccaaactaaaaaggttagaaaatgaggcttatgtgaaaagggcaatggaattgggattttt

SEQ ID NO: 102751 - DNA, 80 bp, synthetic construct
  misc_feature 1..80: note = Artificially Synthesized Probe
  source 1..80: mol_type = other DNA
atatgtactaagcccctactgtgttctagtttctattggaggtgactggagtatatatcaatatattcatgtataagtct

SEQ ID NO: 102752 - DNA, 80 bp, synthetic construct; identical to SEQ ID NO: 35919
  misc_feature 1..80: note = Artificially Synthesized Probe
  source 1..80: mol_type = other DNA

SEQ ID NO: 102753 - DNA, 80 bp, synthetic construct
  misc_feature 1..80: note = Artificially Synthesized Probe
  source 1..80: mol_type = other DNA
tgaaagtcctcttggggcaggggaaggagagcatttaaatgcttcccatttatttctgatcagctcttgatagaaaaaaa

SEQ ID NO: 102754 - DNA, 80 bp, synthetic construct; identical to SEQ ID NO: 36016
  misc_feature 1..80: note = Artificially Synthesized Probe
  source 1..80: mol_type = other DNA

SEQ ID NO: 102755 - DNA, 80 bp, synthetic construct
  misc_feature 1..80: note = Artificially Synthesized Probe
  source 1..80: mol_type = other DNA
agagaaatgcaagtcaaaaccacaatgagacaccattgcacaccagtcagaatgcctactgtgaaaaacaaaaaataagg

SEQ ID NO: 102756 - DNA, 80 bp, synthetic construct
  misc_feature 1..80: note = Artificially Synthesized Probe
  source 1..80: mol_type = other DNA
taaattgttctaccaaaaagacacatgcacttacatgttcactgcagcactatccacaatagcaaaggcatggaatcaac

SEQ ID NO: 102757 - DNA, 80 bp, synthetic construct
  misc_feature 1..80: note = Artificially Synthesized Probe
  source 1..80: mol_type = other DNA
aaatactgcatgttctcacttataagtgagagcaaaactttgagacatggacacaaagatgggaacaataagcactgggg

SEQ ID NO: 102758 - DNA, 80 bp, synthetic construct
  misc_feature 1..80: note = Artificially Synthesized Probe
  source 1..80: mol_type = other DNA
aaatgttgaaaaaaaattacaggagtggagagcaggttgcagtattaaggagtggccaggagaggccgtgtttagaaagc

SEQ ID NO: 102759 - DNA, 80 bp, synthetic construct; identical to SEQ ID NO: 36017
  misc_feature 1..80: note = Artificially Synthesized Probe
  source 1..80: mol_type = other DNA

SEQ ID NO: 102760 - DNA, 80 bp, synthetic construct
  misc_feature 1..80: note = Artificially Synthesized Probe
  source 1..80: mol_type = other DNA
cacttcaagtcagcaaggagaggctctagagcaaatctgcaagcaagagagccttgaaatttaatataatcacaggagtg

SEQ ID NO: 102761 - DNA, 80 bp, synthetic construct
  misc_feature 1..80: note = Artificially Synthesized Probe
  source 1..80: mol_type = other DNA
acacggtagtttgtggaccacactaccttttactttttttttttgaaaggatgggatggaaagggaagcaaataaacatg

SEQ ID NO: 102762 - DNA, 80 bp, synthetic construct
  misc_feature 1..80: note = Artificially Synthesized Probe
  source 1..80: mol_type = other DNA
tttactcattctttgcacttggcagtttgcattgccacttgctatgtcattttagtttttcctttcatgttttgtttaaa

SEQ ID NO: 102763 - DNA, 80 bp, synthetic construct; identical to SEQ ID NO: 36018
  misc_feature 1..80: note = Artificially Synthesized Probe
  source 1..80: mol_type = other DNA

SEQ ID NO: 102764 - DNA, 80 bp, synthetic construct
  misc_feature 1..80: note = Artificially Synthesized Probe
  source 1..80: mol_type = other DNA
aatctgattctcttgtgtggttcttaccccaaccttggtagtttcctgatataccgatcagtattcagctgaatattcaa

SEQ ID NO: 102765 - DNA, 80 bp, synthetic construct
  misc_feature 1..80: note = Artificially Synthesized Probe
  source 1..80: mol_type = other DNA
cagtaacaggctattatggattaagctgctatgaatattcatgtaacaagtctttgttttatttcttttgggtaaatgcc

SEQ ID NO: 102766 - DNA, 80 bp, synthetic construct
  misc_feature 1..80: note = Artificially Synthesized Probe
  source 1..80: mol_type = other DNA
atttatttatgtttcatatacaccttgtacacatagcctgaaggtaattatgtttttctcttggggatgctgaataaact

SEQ ID NO: 102767 - DNA, 80 bp, synthetic construct
  misc_feature 1..80: note = Artificially Synthesized Probe
  source 1..80: mol_type = other DNA
tctgaatagatactgtctaactatttttcaaagtggctatgccatagaaaataattttcaaatagcaacttgaaggagat

SEQ ID NO: 102768 - DNA, 80 bp, synthetic construct; identical to SEQ ID NO: 36019
  misc_feature 1..80: note = Artificially Synthesized Probe
  source 1..80: mol_type = other DNA

SEQ ID NO: 102769 - DNA, 80 bp, synthetic construct
  misc_feature 1..80: note = Artificially Synthesized Probe
  source 1..80: mol_type = other DNA
agtggtgaaggtagcaaatctaaaaggattttgccaatggattggatacagaatgggagagaaataaaggaatcaaggaa

SEQ ID NO: 102770 - DNA, 80 bp, synthetic construct
  misc_feature 1..80: note = Artificially Synthesized Probe
  source 1..80: mol_type = other DNA
agtaagcagttgaatacgtaagtctaaagttcaggaaatagagtagggctagagacataaatttgggagttatcagcaaa

SEQ ID NO: 102771 - DNA, 80 bp, synthetic construct; identical to SEQ ID NO: 36020
  misc_feature 1..80: note = Artificially Synthesized Probe
  source 1..80: mol_type = other DNA

SEQ ID NO: 102772 - DNA, 80 bp, synthetic construct
  misc_feature 1..80: note = Artificially Synthesized Probe
  source 1..80: mol_type = other DNA
gagaccagcctgaccaacatggtgaaacccggtctctactgaaaatacaaaaattagctggacatggtggcgcatgcctg

SEQ ID NO: 102773 - DNA, 80 bp, synthetic construct
  misc_feature 1..80: note = Artificially Synthesized Probe
  source 1..80: mol_type = other DNA
cattagtgatcttgattaaagtaattctggtggagtggtgaagacaaaagcctgcttgcagtgggtttaagaaacaatgt

SEQ ID NO: 102774 - DNA, 80 bp, synthetic construct
  misc_feature 1..80: note = Artificially Synthesized Probe
  source 1..80: mol_type = other DNA
cattagaaagtgaaatattgataaagagaagcaggggagaccttctaggtgttgcctttgagaggtagggggaataggac

SEQ ID NO: 102775 - DNA, 80 bp, synthetic construct
  misc_feature 1..80: note = Artificially Synthesized Probe
  source 1..80: mol_type = other DNA
aagtaggacagttgtatggcttactttgcttgtttctctcttctcttggataactttcctatgttgtctgacatccagtg

SEQ ID NO: 102776 - DNA, 80 bp, synthetic construct; identical to SEQ ID NO: 36021
  misc_feature 1..80: note = Artificially Synthesized Probe
  source 1..80: mol_type = other DNA

SEQ ID NO: 102777 - DNA, 80 bp, synthetic construct
  misc_feature 1..80: note = Artificially Synthesized Probe
  source 1..80: mol_type = other DNA
tgatccgcccacctcggcctcccaaagtgctgggattacaggcgtgagccaccacacctgacccaggtgggccttttctt

SEQ ID NO: 102778 - DNA, 80 bp, synthetic construct
  misc_feature 1..80: note = Artificially Synthesized Probe
  source 1..80: mol_type = other DNA
aattgagaaaagaaacagtaagaagaggaagttcttgcagggagaattgtttttcaagagagctatatttttattttgaa

SEQ ID NO: 102779 - DNA, 80 bp, synthetic construct
  misc_feature 1..80: note = Artificially Synthesized Probe
  source 1..80: mol_type = other DNA
tgttaagtacagtgcctgttatcatccctgcccagtggttttgcttcacttataattacctagagtcattttggtatttt

SEQ ID NO: 102780 - DNA, 80 bp, synthetic construct
  misc_feature 1..80: note = Artificially Synthesized Probe
  source 1..80: mol_type = other DNA
taagccatacatgtaatttaaatttttctgatggccacattaaaaaaagtaaaaagaaatatgtgaaattaatgttaata

SEQ ID NO: 102781 - DNA, 80 bp, synthetic construct; identical to SEQ ID NO: 36022
  misc_feature 1..80: note = Artificially Synthesized Probe
  source 1..80: mol_type = other DNA

SEQ ID NO: 102782 - DNA, 80 bp, synthetic construct
  misc_feature 1..80: note = Artificially Synthesized Probe
  source 1..80: mol_type = other DNA
gcaaaacaccagtgactggctttgtcctttttagagaacagatcaaagtatgtttcaatccagaattgaaagctgaattt

SEQ ID NO: 102783 - DNA, 80 bp, synthetic construct
  misc_feature 1..80: note = Artificially Synthesized Probe
  source 1..80: mol_type = other DNA
catttatgtgagaagttaaggaagtaaagggtggttcctgtgagctccagttcctaaatagctgagaaaaacaaacattc

SEQ ID NO: 102784 - DNA, 80 bp, synthetic construct
  misc_feature 1..80: note = Artificially Synthesized Probe
  source 1..80: mol_type = other DNA
cagccgagtgagagagattggttctgctaaggaatgtcctggggaggggagagaatcgctgagatcatgggtatttatgt

SEQ ID NO: 102785 - DNA, 80 bp, synthetic construct
  misc_feature 1..80: note = Artificially Synthesized Probe
  source 1..80: mol_type = other DNA
tatcttgggaactctgtgctcagagtctaaataaaacaagcagaacacctcattttccctcatttttctttttgtttaaa

SEQ ID NO: 102786 - DNA, 80 bp, synthetic construct
  misc_feature 1..80: note = Artificially Synthesized Probe
  source 1..80: mol_type = other DNA
tagaattatttgggggaggtctttaaaaagctgatgtaaggcttcattccagaccaattaaatcagactttttcagattg

SEQ ID NO: 102787 - DNA, 80 bp, synthetic construct; identical to SEQ ID NO: 36023
  misc_feature 1..80: note = Artificially Synthesized Probe
  source 1..80: mol_type = other DNA

SEQ ID NO: 102788 - DNA, 80 bp, synthetic construct
  misc_feature 1..80: note = Artificially Synthesized Probe
  source 1..80: mol_type = other DNA
aacatttattgaacacccactatatgtcaggtatttttttttaacatcttttcatttacaaccctgaaaggtaggggtat

SEQ ID NO: 102789 - DNA, 80 bp, synthetic construct
  misc_feature 1..80: note = Artificially Synthesized Probe
  source 1..80: mol_type = other DNA
tatatggttcaacctaatagaatgtgagagggctcatatttgaacccaggccaatttagttcaaaagcctatactttgca

SEQ ID NO: 102790 - DNA, 80 bp, synthetic construct; identical to SEQ ID NO: 36024
  misc_feature 1..80: note = Artificially Synthesized Probe
  source 1..80: mol_type = other DNA

SEQ ID NO: 102791 - DNA, 80 bp, synthetic construct
  misc_feature 1..80: note = Artificially Synthesized Probe
  source 1..80: mol_type = other DNA
gctgtaaattctctgaagactgtgattctgtctgttttgctctttctagtacctattaaagtgttggcacataccaagta

SEQ ID NO: 102792 - DNA, 80 bp, synthetic construct
  misc_feature 1..80: note = Artificially Synthesized Probe
  source 1..80: mol_type = other DNA
tgtgtctatccaaacacctaatctccttagcactcatccatggtctcagtgcttactcagacatgggtgtctgtgtttgt

SEQ ID NO: 102793 - DNA, 80 bp, synthetic construct
  misc_feature 1..80: note = Artificially Synthesized Probe
  source 1..80: mol_type = other DNA
agccttatattgaataaactgaaacttttccacttggttttttccatctctttggagaacaggactggacactaaagcag

SEQ ID NO: 102794 - DNA, 80 bp, synthetic construct; identical to SEQ ID NO: 36025
  misc_feature 1..80: note = Artificially Synthesized Probe
  source 1..80: mol_type = other DNA

SEQ ID NO: 102795 - DNA, 80 bp, synthetic construct
  misc_feature 1..80: note = Artificially Synthesized Probe
  source 1..80: mol_type = other DNA
taaggtcacacagggagttaatgttagccagatatctagacccactaaggcttcatttttgctctaatacttatgaatgg

SEQ ID NO: 102796 - DNA, 80 bp, synthetic construct; identical to SEQ ID NO: 35920
  misc_feature 1..80: note = Artificially Synthesized Probe
  source 1..80: mol_type = other DNA

SEQ ID NO: 102797 - DNA, 80 bp, synthetic construct
  misc_feature 1..80: note = Artificially Synthesized Probe
  source 1..80: mol_type = other DNA
cattgatgtcagagaagcctggagaaaaattcactctgcatacaaaaaattcgtatgtactacacttttcctagaagaga

SEQ ID NO: 102798 - DNA, 80 bp, synthetic construct
  misc_feature 1..80: note = Artificially Synthesized Probe
  source 1..80: mol_type = other DNA
attgattaggatgggatttggtcatattgatttttgtcccaaataaagactcttttgtggaatgccagctcttctctggc

SEQ ID NO: 102799 - DNA, 80 bp, synthetic construct
  misc_feature 1..80: note = Artificially Synthesized Probe
  source 1..80: mol_type = other DNA
taggttttggcaatctttaatctccaatactttcttgtcgactttatcaatgaatgtatgctggtatgctgtcaagattt

SEQ ID NO: 102800 - DNA, 80 bp, synthetic construct; identical to SEQ ID NO: 36026
  misc_feature 1..80: note = Artificially Synthesized Probe
  source 1..80: mol_type = other DNA

SEQ ID NO: 102801 - DNA, 80 bp, synthetic construct
  misc_feature 1..80: note = Artificially Synthesized Probe
  source 1..80: mol_type = other DNA
tattttttgagtggctgctcttagcccagcagcaaactttgagggatataagcttgcagatgagttgaaatgcatacaca

SEQ ID NO: 102802 - DNA, 80 bp, synthetic construct
  misc_feature 1..80: note = Artificially Synthesized Probe
  source 1..80: mol_type = other DNA
ataaaacctagaaggggaggcagacattttaaataagcaatgtaaggcagagtcgggtgagtgctatactaaacatcaga

SEQ ID NO: 102803 - DNA, 80 bp, synthetic construct; identical to SEQ ID NO: 36027
  misc_feature 1..80: note = Artificially Synthesized Probe
  source 1..80: mol_type = other DNA

SEQ ID NO: 102804 - DNA, 80 bp, synthetic construct
  misc_feature 1..80: note = Artificially Synthesized Probe
  source 1..80: mol_type = other DNA
tatcatcactcagaactctagttatcagaaaaaatggctgctaggtaatgactgatgtcattgtcatcctgtgtcagatc

SEQ ID NO: 102805 - DNA, 80 bp, synthetic construct
  misc_feature 1..80: note = Artificially Synthesized Probe
  source 1..80: mol_type = other DNA
tctttaaacaaatcttgtttttaatttatttctgcatctcttctttcctccctgtatcccatactctgttgtattctgag

SEQ ID NO: 102806 - DNA, 80 bp, synthetic construct
  misc_feature 1..80: note = Artificially Synthesized Probe
  source 1..80: mol_type = other DNA
taattccagaaatgaaaatgaaaaaataaaaaagaatatggacatttacctttttgggatgaaaatgccccttttgactt

SEQ ID NO: 102807 - DNA, 80 bp, synthetic construct
  misc_feature 1..80: note = Artificially Synthesized Probe
  source 1..80: mol_type = other DNA
gcgaggaagagataggttggagaatttgagttagaactgataggattttttgattaattgagtgtgggaaatgagggaga

SEQ ID NO: 102808 - DNA, 80 bp, synthetic construct; identical to SEQ ID NO: 36028
  misc_feature 1..80: note = Artificially Synthesized Probe
  source 1..80: mol_type = other DNA

SEQ ID NO: 102809 - DNA, 80 bp, synthetic construct
  misc_feature 1..80: note = Artificially Synthesized Probe
  source 1..80: mol_type = other DNA
tttctgagctccaatgtagtgcacaggagtaggatgtttagcccttcttacggagagcatgagcagtagaagaggaggct

SEQ ID NO: 102810 - DNA, 80 bp, synthetic construct
  misc_feature 1..80: note = Artificially Synthesized Probe
  source 1..80: mol_type = other DNA
ggagatcgagaccattctgcctaacacggtgaaaccctgtctctacaaaaaatacaaaaaaattatccgggcgtggtggc

SEQ ID NO: 102811 - DNA, 80 bp, synthetic construct
  misc_feature 1..80: note = Artificially Synthesized Probe
  source 1..80: mol_type = other DNA
tctttatttatctacttatttgagatggagtctcgctctgtcacccgggctggagtgcagtggcgcgatctcagcgcatt

SEQ ID NO: 102812 - DNA, 80 bp, synthetic construct; identical to SEQ ID NO: 36029
  misc_feature 1..80: note = Artificially Synthesized Probe
  source 1..80: mol_type = other DNA

SEQ ID NO: 102813 - DNA, 80 bp, synthetic construct
  misc_feature 1..80: note = Artificially Synthesized Probe
  source 1..80: mol_type = other DNA
gtagctgggattacaggcacccaccaccacgcctggctaatttttgtatttttagtagagacagcgtttcaccagtttgt

SEQ ID NO: 102814 - DNA, 80 bp, synthetic construct
  misc_feature 1..80: note = Artificially Synthesized Probe
  source 1..80: mol_type = other DNA
ttaccttctcactcattcaacaaacgtatcattgttagtccacttccgcctcttgtcatctattccttctttgttctctt

SEQ ID NO: 102815 - DNA, 80 bp, synthetic construct
  misc_feature 1..80: note = Artificially Synthesized Probe
  source 1..80: mol_type = other DNA
ctcactgcaagctccgcctcccgggttcacgccattctcctgcctcagcctctcaagtagctgggactacaggagcccgc

SEQ ID NO: 102816 - DNA, 80 bp, synthetic construct
  misc_feature 1..80: note = Artificially Synthesized Probe
  source 1..80: mol_type = other DNA
tatcagacattgtgctgggtactttacataaattcatttattcctcactacaaactttgaggtaatttttgcaaacccta

SEQ ID NO: 102817 - DNA, 80 bp, synthetic construct; identical to SEQ ID NO: 36030
  misc_feature 1..80: note = Artificially Synthesized Probe
  source 1..80: mol_type = other DNA

SEQ ID NO: 102818 - DNA, 80 bp, synthetic construct
  misc_feature 1..80: note = Artificially Synthesized Probe
  source 1..80: mol_type = other DNA
gtttgggatatccaaaaggatatctcatggaactgtctcctgacctctagtttattctgaatcataggacagagaagaca

SEQ ID NO: 102819 - DNA, 80 bp, synthetic construct
  misc_feature 1..80: note = Artificially Synthesized Probe
  source 1..80: mol_type = other DNA
atgatgtggcaccaagaagcatagggcatgtttgggaaatccagttaggctagcagataataatggaagataaagctgga

SEQ ID NO: 102820 - DNA, 80 bp, synthetic construct
  misc_feature 1..80: note = Artificially Synthesized Probe
  source 1..80: mol_type = other DNA
ggaatgaaataaccagagctatgctttaggaaaaatttaagtagtagagggactgaggttggggaaaccagatatgagac

SEQ ID NO: 102821 - DNA, 80 bp, synthetic construct; identical to SEQ ID NO: 36031
  misc_feature 1..80: note = Artificially Synthesized Probe
  source 1..80: mol_type = other DNA

SEQ ID NO: 102822 - DNA, 80 bp, synthetic construct
  misc_feature 1..80: note = Artificially Synthesized Probe
  source 1..80: mol_type = other DNA
tgatgtaagattattgcttttaccttgaaaacccttctggatttcagctatcctagttagagagggtaaattgttattgt

SEQ ID NO: 102823 - DNA, 80 bp, synthetic construct
  misc_feature 1..80: note = Artificially Synthesized Probe
  source 1..80: mol_type = other DNA
agagggcaggtgacttgtcaagcccccttctcgccttcagagcctatgctcttgaccactgtacttactgcctccatata

SEQ ID NO: 102824 - DNA, 80 bp, synthetic construct
  misc_feature 1..80: note = Artificially Synthesized Probe
  source 1..80: mol_type = other DNA
aacccttctggatttcaatttccttgtctttaaactaagagaactagaacacagaaatgctgaggtcttcaaatctgtga

SEQ ID NO: 102825 - DNA, 80 bp, synthetic construct
  misc_feature 1..80: note = Artificially Synthesized Probe
  source 1..80: mol_type = other DNA
atgaagggaaagtgaatcaaggttgttgcacagctgtgtgcaaggcattgttctatgcttatcatgcacattgtctcatt

SEQ ID NO: 102826 - DNA, 80 bp, synthetic construct; identical to SEQ ID NO: 36032
  misc_feature 1..80: note = Artificially Synthesized Probe
  source 1..80: mol_type = other DNA

SEQ ID NO: 102827 - DNA, 80 bp, synthetic construct
  misc_feature 1..80: note = Artificially Synthesized Probe
  source 1..80: mol_type = other DNA
gctccagtcatttgagacctcacgtatttttagatatgagatttttaaaaaatctgctcaagcagttttggcttatctga

SEQ ID NO: 102828 - DNA, 80 bp, synthetic construct
  misc_feature 1..80: note = Artificially Synthesized Probe
  source 1..80: mol_type = other DNA
tagcagaattttacccaaggtcacagaagtgaatcaattggtggcagaaataataataaacttaggagtcctctttctca

SEQ ID NO: 102829 - DNA, 80 bp, synthetic construct
  misc_feature 1..80: note = Artificially Synthesized Probe
  source 1..80: mol_type = other DNA
cggcgcgatctggctcactgcaagctccgcctcctgggttcacgccactctcctgcctcagcctcccgaatagctgagac

SEQ ID NO: 102830 - DNA, 80 bp, synthetic construct
  misc_feature 1..80: note = Artificially Synthesized Probe
  source 1..80: mol_type = other DNA
agtcctttacatgtattgatttatttatgcctcacgatcctctcaggtaggtttatgaatgaggaaaatacaattatctg

SEQ ID NO: 102831 - DNA, 80 bp, synthetic construct; identical to SEQ ID NO: 36033
  misc_feature 1..80: note = Artificially Synthesized Probe
  source 1..80: mol_type = other DNA

SEQ ID NO: 102832 - DNA, 80 bp, synthetic construct
  misc_feature 1..80: note = Artificially Synthesized Probe
  source 1..80: mol_type = other DNA
aatattgcaaaggatatacttctaatgaaacaaattatttgttgtttatctgaaatttaaattgaagtagatatcttata

SEQ ID NO: 102833 - DNA, 80 bp, synthetic construct
  misc_feature 1..80: note = Artificially Synthesized Probe
  source 1..80: mol_type = other DNA
cctacttatgaggggaacaaacattcttctcagtatgtcactaaaaacatactagtaatatgatctaaaatgccttgagt

SEQ ID NO: 102834 - DNA, 80 bp, synthetic construct; identical to SEQ ID NO: 36034
  misc_feature 1..80: note = Artificially Synthesized Probe
  source 1..80: mol_type = other DNA

SEQ ID NO: 102835 - DNA, 80 bp, synthetic construct
  misc_feature 1..80: note = Artificially Synthesized Probe
  source 1..80: mol_type = other DNA
taacgtttaagctgaaataaagtaatccctcaattaacattttgcagaaacctccttaggttcccctacaaacctgcccc

SEQ ID NO: 102836 - DNA, 80 bp, synthetic construct
  misc_feature 1..80: note = Artificially Synthesized Probe
  source 1..80: mol_type = other DNA
aaatggcttttgagtctttctccctgtacctcttgtccttagacagtccccctccctattctggttagttgcccctgacc

SEQ ID NO: 102837 - DNA, 80 bp, synthetic construct; identical to SEQ ID NO: 35910
  misc_feature 1..80: note = Artificially Synthesized Probe
  source 1..80: mol_type = other DNA

SEQ ID NO: 102838 - DNA, 80 bp, synthetic construct
  misc_feature 1..80: note = Artificially Synthesized Probe
  source 1..80: mol_type = other DNA
gctggagtgcagcagcatgatcttggctgactgcaacctccacctcctgggttcaagcgattctcctgtttcagcctccc

SEQ ID NO: 102839 - DNA, 80 bp, synthetic construct
  misc_feature 1..80: note = Artificially Synthesized Probe
  source 1..80: mol_type = other DNA
ccaccgtggccggcctatctagttgtcttagcaggattttcacaaactagttgcaaactattttctatactccttaccac

SEQ ID NO: 102840 - DNA, 80 bp, synthetic construct; identical to SEQ ID NO: 36035
  misc_feature 1..80: note = Artificially Synthesized Probe
  source 1..80: mol_type = other DNA

SEQ ID NO: 102841 - DNA, 80 bp, synthetic construct
  misc_feature 1..80: note = Artificially Synthesized Probe
  source 1..80: mol_type = other DNA
cctgcaatggtttagagaacgaatagacttaagcagtgttcatgatccaggggtaatgataaataggttgggaaaattga

SEQ ID NO: 102842 - DNA, 80 bp, synthetic construct; identical to SEQ ID NO: 35921
  misc_feature 1..80: note = Artificially Synthesized Probe
  source 1..80: mol_type = other DNA

SEQ ID NO: 102843 - DNA, 80 bp, synthetic construct
  misc_feature 1..80: note = Artificially Synthesized Probe
  source 1..80: mol_type = other DNA
ggaaagagtgtctgtggcagttaataacgattaatgcctgtgtgtttttcagaacattgagctgaaggttgaagtggaga

SEQ ID NO: 102844 - DNA, 80 bp, synthetic construct
  misc_feature 1..80: note = Artificially Synthesized Probe
  source 1..80: mol_type = other DNA
ctgattcaggaactgaaacaatagattttcatatgctgtgtttcccttgggctctttctctattactaggtcagatggac

SEQ ID NO: 102845 - DNA, 80 bp, synthetic construct; identical to SEQ ID NO: 36036
  misc_feature 1..80: note = Artificially Synthesized Probe
  source 1..80: mol_type = other DNA

SEQ ID NO: 102846 - DNA, 80 bp, synthetic construct
  misc_feature 1..80: note = Artificially Synthesized Probe
  source 1..80: mol_type = other DNA
tcattagttgtaatggcaaaaaactagaaacaattatccatcaatagggcattgattgaataaattttggtattactaca

SEQ ID NO: 102847 - DNA, 80 bp, synthetic construct
  misc_feature 1..80: note = Artificially Synthesized Probe
  source 1..80: mol_type = other DNA
tttttctttatatacatttatattgctaaaatggttacttttataatttacagttttttaaaagcttagtgttaaatgac

SEQ ID NO: 102848 - DNA, 80 bp, synthetic construct; identical to SEQ ID NO: 36037
  misc_feature 1..80: note = Artificially Synthesized Probe
  source 1..80: mol_type = other DNA

SEQ ID NO: 102849 - DNA, 80 bp, synthetic construct
  misc_feature 1..80: note = Artificially Synthesized Probe
  source 1..80: mol_type = other DNA
acaccaataacattcaagctgagagccaaatcaagaatgcaatcccatttacaatatctgctaaaaaaaaaaaaaaatac

SEQ ID NO: 102850 - DNA, 80 bp, synthetic construct
  misc_feature 1..80: note = Artificially Synthesized Probe
  source 1..80: mol_type = other DNA
tctacagattcaacactattcctatcaaactaccaatgtcattcatcaaatgaccaagatcaaagccagaggcatcacac

SEQ ID NO: 102851 - DNA, 80 bp, synthetic construct
  misc_feature 1..80: note = Artificially Synthesized Probe
  source 1..80: mol_type = other DNA
agtggggaaagcactcccctattcgatggtggtgggatagataactggctagccatatgcaaaagaatgaaactgggccc

SEQ ID NO: 102852 - DNA, 80 bp, synthetic construct; identical to SEQ ID NO: 36038
  misc_feature 1..80: note = Artificially Synthesized Probe
  source 1..80: mol_type = other DNA

SEQ ID NO: 102853 - DNA, 80 bp, synthetic construct
  misc_feature 1..80: note = Artificially Synthesized Probe
  source 1..80: mol_type = other DNA
ggctgaggcaggagaatcacttgaacccaggaggcgtaggttgcagtgagccagatcgcgccactgcactccagcctgga

SEQ ID NO: 102854 - DNA, 80 bp, synthetic construct
  misc_feature 1..80: note = Artificially Synthesized Probe
  source 1..80: mol_type = other DNA
ccaccaaatatatgaaaaattgctccacatcactaatcatcagagaaatataaatcaaaaccacaatgagataccatctc

SEQ ID NO: 102855 - DNA, 80 bp, synthetic construct
  misc_feature 1..80: note = Artificially Synthesized Probe
  source 1..80: mol_type = other DNA
tccacttgctaaactgtatgtctggctctgattggctaatgctctgtggttttagggctgatgtggagaatctcaacagt

SEQ ID NO: 102856 - DNA, 80 bp, synthetic construct
  misc_feature 1..80: note = Artificially Synthesized Probe
  source 1..80: mol_type = other DNA
taggtaggggttctcttttattaacactcctcttcctactgctctgccttctggcattcaccttttccgtctctactttc

SEQ ID NO: 102857 - DNA, 80 bp, synthetic construct
  misc_feature 1..80: note = Artificially Synthesized Probe
  source 1..80: mol_type = other DNA
gagctctcagagaaactgaagggagtcaccaaaaactgggaagatgtaccaggagaccaggtcaagcccgaccaatacac

SEQ ID NO: 102858 - DNA, 80 bp, synthetic construct; identical to SEQ ID NO: 36039
  misc_feature 1..80: note = Artificially Synthesized Probe
  source 1..80: mol_type = other DNA

SEQ ID NO: 102859 - DNA, 80 bp, synthetic construct
  misc_feature 1..80: note = Artificially Synthesized Probe
  source 1..80: mol_type = other DNA
atggggtgctctggggaaatattggagggtcatccattccacattaaaagagcaagttgtctgctgtggtctgaatgttt

SEQ ID NO: 102860 - DNA, 80 bp, synthetic construct
  misc_feature 1..80: note = Artificially Synthesized Probe
  source 1..80: mol_type = other DNA
cttgtaaaagagaccccagagagctagttagcccattctaccatgtgaggatatagtgggaatgcaccgttatgagccag

SEQ ID NO: 102861 - DNA, 80 bp, synthetic construct; identical to SEQ ID NO: 36040
  misc_feature 1..80: note = Artificially Synthesized Probe
  source 1..80: mol_type = other DNA

SEQ ID NO: 102862 - DNA, 80 bp, synthetic construct
  misc_feature 1..80: note = Artificially Synthesized Probe
  source 1..80: mol_type = other DNA
ctgttttgagaataggggtctgattgtgccagctttgtataccattataaggaacttggactttgtcctgaaggtaactg

SEQ ID NO: 102863 - DNA, 80 bp, synthetic construct
  misc_feature 1..80: note = Artificially Synthesized Probe
  source 1..80: mol_type = other DNA
tgggtgtgtccattcctcccttctttggacaataaccctactttttttttggggggggggtggctagaattgtcttcttt

SEQ ID NO: 102864 - DNA, 80 bp, synthetic construct
  misc_feature 1..80: note = Artificially Synthesized Probe
  source 1..80: mol_type = other DNA
ttagcctcttaggtgcataagactgtggtggtataaaaagctttaaggagcttttaactgaataggcaaaaaccacatgt

SEQ ID NO: 102865 - DNA, 80 bp, synthetic construct
  misc_feature 1..80: note = Artificially Synthesized Probe
  source 1..80: mol_type = other DNA
tcacccaccaccattccttaacttcattcatgccaggctagtaataataatgatggctaagctttgttgagctcttacca

SEQ ID NO: 102866 - DNA, 80 bp, synthetic construct; identical to SEQ ID NO: 36041
  misc_feature 1..80: note = Artificially Synthesized Probe
  source 1..80: mol_type = other DNA

SEQ ID NO: 102867 - DNA, 80 bp, synthetic construct
  misc_feature 1..80: note = Artificially Synthesized Probe
  source 1..80: mol_type = other DNA
ttcagattttccctactaggttccccaagacagtgtcatatttgaaccccaattaaaaaaaactgaactaaaaaccaaaa

SEQ ID NO: 102868 - DNA, 80 bp, synthetic construct
  misc_feature 1..80: note = Artificially Synthesized Probe
  source 1..80: mol_type = other DNA
agtgcagataccatgagggaatttcatatggagtccacattcctccttctcgtcatcattgcagtttacatttgtataat

SEQ ID NO: 102869 - DNA, 80 bp, synthetic construct
  misc_feature 1..80: note = Artificially Synthesized Probe
  source 1..80: mol_type = other DNA
aggcgtgcaccaccacgcccagctaatttttgtatttttagtagagacagggtttcactatgttggtcaggctgatctca

SEQ ID NO: 102870 - DNA, 80 bp, synthetic construct; identical to SEQ ID NO: 36042
  misc_feature 1..80: note = Artificially Synthesized Probe
  source 1..80: mol_type = other DNA

SEQ ID NO: 102871 - DNA, 80 bp, synthetic construct
  misc_feature 1..80: note = Artificially Synthesized Probe
  source 1..80: mol_type = other DNA
aatcacaactggaaacatttcatttagtacccagcagattttcaaggacctggaaggttcatgttccaatatatacaaac

SEQ ID NO: 102872 - DNA, 80 bp, synthetic construct
  misc_feature 1..80: note = Artificially Synthesized Probe
  source 1..80: mol_type = other DNA
cttcccaaattgtacactgggtcttcatgcctttgttcctttgttcaatctcctccttctgagcctggaaaaccacccaa

SEQ ID NO: 102873 - DNA, 80 bp, synthetic construct
  misc_feature 1..80: note = Artificially Synthesized Probe
  source 1..80: mol_type = other DNA
gctttttgttctttgaggaatcaccatactgctttctacagtggttgaactaatttaacactcccaccaacagtgtataa

SEQ ID NO: 102874 - DNA, 80 bp, synthetic construct
  misc_feature 1..80: note = Artificially Synthesized Probe
  source 1..80: mol_type = other DNA
cagtggggcgatctcggctcactgcaggctccgccccctggggttcacgccattgtcttgcctcagcctccagagtaact

SEQ ID NO: 102875 - DNA, 80 bp, synthetic construct; identical to SEQ ID NO: 36043
  misc_feature 1..80: note = Artificially Synthesized Probe
  source 1..80: mol_type = other DNA

SEQ ID NO: 102876 - DNA, 80 bp, synthetic construct
  misc_feature 1..80: note = Artificially Synthesized Probe
  source 1..80: mol_type = other DNA
gcatcgctatactccttcaagtcaaatgaattatttctttatctttcatcctatagctctatggcagcactcaatgtact

SEQ ID NO: 102877 - DNA, 80 bp, synthetic construct
  misc_feature 1..80: note = Artificially Synthesized Probe
  source 1..80: mol_type = other DNA
ccttgatgggataggctactgcacacctaggctatatggtatagcctatggcttctgggctacaaacctgtatgacatat

SEQ ID NO: 102878 - DNA, 80 bp, synthetic construct
  misc_feature 1..80: note = Artificially Synthesized Probe
  source 1..80: mol_type = other DNA
gggtgatttagcgagtgagtagtgaagtggatgaatgtgaaggcctaaaacacattttgtagtcatataaaaatattttc

SEQ ID NO: 102879 - DNA, 80 bp, synthetic construct
  misc_feature 1..80: note = Artificially Synthesized Probe
  source 1..80: mol_type = other DNA
catcttgtccgctggaaggtcttcagggacaataacacacatggagctgtcatctcctatgataacaatgccttcttctg

SEQ ID NO: 102880 - DNA, 80 bp, synthetic construct; identical to SEQ ID NO: 36044
  misc_feature 1..80: note = Artificially Synthesized Probe
  source 1..80: mol_type = other DNA

SEQ ID NO: 102881 - DNA, 80 bp, synthetic construct
  misc_feature 1..80: note = Artificially Synthesized Probe
  source 1..80: mol_type = other DNA
catgctggtggaatttaaatttttgcaaaacagcgattgtttcttttccaacttcatatttccagtacttggtagagtgc

SEQ ID NO: 102882 - DNA, 80 bp, synthetic construct
  misc_feature 1..80: note = Artificially Synthesized Probe
  source 1..80: mol_type = other DNA
tggattaacttcaggaggtccatgaacgtggtgaaaatgtaagcaaaaagttgtttgtgtatatatttgggggctgggca

SEQ ID NO: 102883 - DNA, 80 bp, synthetic construct
  misc_feature 1..80: note = Artificially Synthesized Probe
  source 1..80: mol_type = other DNA
atcatgatcataattactgtccttacttttcctttgcttcaggagaattgaagaactgaatcagagcctggctgcccagg

SEQ ID NO: 102884 - DNA, 80 bp, synthetic construct
  misc_feature 1..80: note = Artificially Synthesized Probe
  source 1..80: mol_type = other DNA
cctcccaatgatctgattttttgagcattgcatcatcagtggaacaacataagagtagcaaaaagtggccagaaccaatc

SEQ ID NO: 102885 - DNA, 80 bp, synthetic construct; identical to SEQ ID NO: 36045
  misc_feature 1..80: note = Artificially Synthesized Probe
  source 1..80: mol_type = other DNA

SEQ ID NO: 102886 - DNA, 80 bp, synthetic construct
  misc_feature 1..80: note = Artificially Synthesized Probe
  source 1..80: mol_type = other DNA
tcaagagtccagatatggcttagctgagatctgtttggagtctcataagtgtgaaatcaagatgtagactgggctctttt

SEQ ID NO: 102887 - DNA, 80 bp, synthetic construct
  misc_feature 1..80: note = Artificially Synthesized Probe
  source 1..80: mol_type = other DNA
aagagtctgttacttttctcacttctagactttcttttaaggggctcattagggcaggcccaccagcataatatcccttt

SEQ ID NO: 102888 - DNA, 80 bp, synthetic construct
  misc_feature 1..80: note = Artificially Synthesized Probe
  source 1..80: mol_type = other DNA
cacaaagatgtgatggccagtgggtgagaattatagggaccaccttagaatttgccagccacatcaagtgatttataatt

SEQ ID NO: 102889 - DNA, 80 bp, synthetic construct; identical to SEQ ID NO: 36046
  misc_feature 1..80: note = Artificially Synthesized Probe
  source 1..80: mol_type = other DNA

SEQ ID NO: 102890 - DNA, 80 bp, synthetic construct
  misc_feature 1..80: note = Artificially Synthesized Probe
  source 1..80: mol_type = other DNA
tgcaacctctgcctcagcctcccgagtagctgggattacaggtgcatgccaccacacccagcaatatttgtatttttagt

SEQ ID NO: 102891 - DNA, 80 bp, synthetic construct
  misc_feature 1..80: note = Artificially Synthesized Probe
  source 1..80: mol_type = other DNA
atgtagttttaatattgaaaagagaactcactgtggtaaaaaataattgcattgattttctgggaagttacctcgaaggg

SEQ ID NO: 102892 - DNA, 80 bp, synthetic construct
  misc_feature 1..80: note = Artificially Synthesized Probe
  source 1..80: mol_type = other DNA
gtcttagactactgataagacaaaatgtgggtggtttactttactggttcacatatggaaaggttggggtcaagataaaa

SEQ ID NO: 102893 - DNA, 80 bp, synthetic construct; identical to SEQ ID NO: 36047
  misc_feature 1..80: note = Artificially Synthesized Probe
  source 1..80: mol_type = other DNA

SEQ ID NO: 102894 - DNA, 80 bp, synthetic construct
  misc_feature 1..80: note = Artificially Synthesized Probe
  source 1..80: mol_type = other DNA
tttccatcctgattatttaagctgataagaacagatactacacttgatcttagccaaaaggccgagaagcgattccatcc

SEQ ID NO: 102895 - DNA, 80 bp, synthetic construct; identical to SEQ ID NO: 35922
  misc_feature 1..80: note = Artificially Synthesized Probe
  source 1..80: mol_type = other DNA

SEQ ID NO: 102896 - DNA, 80 bp, synthetic construct
  misc_feature 1..80: note = Artificially Synthesized Probe
  source 1..80: mol_type = other DNA
atttacatgaatattatttctttcaaaatgttcaccttctgaaatgaaatcacttttattgctccttttgtatttacagg

SEQ ID NO: 102897 - DNA, 80 bp, synthetic construct
  misc_feature 1..80: note = Artificially Synthesized Probe
  source 1..80: mol_type = other DNA
aagagactaaattatttatattctactctaaaaggatgcttagaacaagaataagtacagcatccaggggataatattgc

SEQ ID NO: 102898 - DNA, 80 bp, synthetic construct
  misc_feature 1..80: note = Artificially Synthesized Probe
  source 1..80: mol_type = other DNA
tcctaccctttttcatagaaaattcattttcataggaaatgagtgtacatctatggtattctgaaataagtgcccatggc

SEQ ID NO: 102899 - DNA, 80 bp, synthetic construct; identical to SEQ ID NO: 36048
  misc_feature 1..80: note = Artificially Synthesized Probe
  source 1..80: mol_type = other DNA

SEQ ID NO: 102900 - DNA, 80 bp, synthetic construct
  misc_feature 1..80: note = Artificially Synthesized Probe
  source 1..80: mol_type = other DNA
attccaaaagtcatttggaatttggtacaatactttgtcctgtaacatcccttgcctcacttatcatcgtgacaacatca

SEQ ID NO: 102901 - DNA, 80 bp, synthetic construct
  misc_feature 1..80: note = Artificially Synthesized Probe
  source 1..80: mol_type = other DNA
ctggtatgtaaacaaagaactaaaatacagtgtgataaatgaggagacagaaatacacgcatggtgctaaaggaacccac

SEQ ID NO: 102902 - DNA, 80 bp, synthetic construct; identical to SEQ ID NO: 36049
  misc_feature 1..80: note = Artificially Synthesized Probe
  source 1..80: mol_type = other DNA

SEQ ID NO: 102903 - DNA, 80 bp, synthetic construct
  misc_feature 1..80: note = Artificially Synthesized Probe
  source 1..80: mol_type = other DNA
caagtctgttctttgaattggttggggaaaagaatattataaaaccaattacaaagcactttgtctctcccctctgcata

SEQ ID NO: 102904 - DNA, 80 bp, synthetic construct
  misc_feature 1..80: note = Artificially Synthesized Probe
  source 1..80: mol_type = other DNA
ccttacaatgtggaaggtaaaagttcaatttctaagctctgggcctgttcttcagaggctaaagaatctcctcatctcca

SEQ ID NO: 102905 - DNA, 80 bp, synthetic construct
  misc_feature 1..80: note = Artificially Synthesized Probe
  source 1..80: mol_type = other DNA
ttctaggtctgaattgtccaagtgaagaacgctaatttactccacatcccacagataactatctctcaagtgatcccagt

SEQ ID NO: 102906 - DNA, 80 bp, synthetic construct
  misc_feature 1..80: note = Artificially Synthesized Probe
  source 1..80: mol_type = other DNA
aggtgaaagaactgcaaaacccctaaggtagaaataagcttagtgtgtttgaggaagaaaatggccagtgcagctggagc

SEQ ID NO: 102907 - DNA, 80 bp, synthetic construct
  misc_feature 1..80: note = Artificially Synthesized Probe
  source 1..80: mol_type = other DNA
attgatcttacagtctttctagctgttttccttttccattctaccaaaacattctacaacattcattttagtgggagtgc

SEQ ID NO: 102908 - DNA, 80 bp, synthetic construct; identical to SEQ ID NO: 36050
  misc_feature 1..80: note = Artificially Synthesized Probe
  source 1..80: mol_type = other DNA

SEQ ID NO: 102909 - DNA, 80 bp, synthetic construct
  misc_feature 1..80: note = Artificially Synthesized Probe
  source 1..80: mol_type = other DNA
tctacagaatgttagaagcttcatctcaatgaaggttttaaatgaaaccagacctggagggtgtgaaggcagaaaaaatg

SEQ ID NO: 102910 - DNA, 80 bp, synthetic construct
  misc_feature 1..80: note = Artificially Synthesized Probe
  source 1..80: mol_type = other DNA
ttggcttataaaatgagacaggataacacaattagggagaggcccacattaagtaagtgagaccttcccactcacacaaa

SEQ ID NO: 102911 - DNA, 80 bp, synthetic construct; identical to SEQ ID NO: 36051
  misc_feature 1..80: note = Artificially Synthesized Probe
  source 1..80: mol_type = other DNA

SEQ ID NO: 102912 - DNA, 80 bp, synthetic construct
  misc_feature 1..80: note = Artificially Synthesized Probe
  source 1..80: mol_type = other DNA
ttagcagctaaagcaatcattgctctaatccttttgagcagcaaaggaagtggaaaaataggcagctgctttacaactta

SEQ ID NO: 102913 - DNA, 80 bp, synthetic construct
  misc_feature 1..80: note = Artificially Synthesized Probe
  source 1..80: mol_type = other DNA
tgatgaaaaaaatacaaggcagtacagaaaggaaaaatcatcatggactggggtcagaagcaaagattttggtctctgag

SEQ ID NO: 102914 - DNA, 80 bp, synthetic construct
  misc_feature 1..80: note = Artificially Synthesized Probe
  source 1..80: mol_type = other DNA
ttataaacaatagaaattcatttctcacagttctggaggctgggaagtccaagatcaaggcactggcattttcagtgtct

SEQ ID NO: 102915 - DNA, 80 bp, synthetic construct
  misc_feature 1..80: note = Artificially Synthesized Probe
  source 1..80: mol_type = other DNA
gaatttggaggggaatacaaactttcaaaccatagcagataccaagatgagaaagctgtggttccttttcttaagtagct

SEQ ID NO: 102916 - DNA, 80 bp, synthetic construct
  misc_feature 1..80: note = Artificially Synthesized Probe
  source 1..80: mol_type = other DNA
aggaacatcatatgatctgaaaaatgttaaaaagtcactttgctattggaaaacagaccttaggaggccaagagtggaag

SEQ ID NO: 102917 - DNA, 80 bp, synthetic construct; identical to SEQ ID NO: 36052
  misc_feature 1..80: note = Artificially Synthesized Probe
  source 1..80: mol_type = other DNA

SEQ ID NO: 102918 - DNA, 80 bp, synthetic construct
  misc_feature 1..80: note = Artificially Synthesized Probe
  source 1..80: mol_type = other DNA
ctgaaaggaggatagagtagagggcaaagaaattgaggggactcattattttagcactcttgttacttaagatatgaagt

SEQ ID NO: 102919 - DNA, 80 bp, synthetic construct
  misc_feature 1..80: note = Artificially Synthesized Probe
  source 1..80: mol_type = other DNA
cctgtaatcccagctactggggaggctgaggcaggagaattgcttgaacccgggaggtggaggttgtagtgagccaagat

SEQ ID NO: 102920 - DNA, 80 bp, synthetic construct; identical to SEQ ID NO: 36053
  misc_feature 1..80: note = Artificially Synthesized Probe
  source 1..80: mol_type = other DNA

SEQ ID NO: 102921 - DNA, 80 bp, synthetic construct
  misc_feature 1..80: note = Artificially Synthesized Probe
  source 1..80: mol_type = other DNA
agggccagatagtaaataagctttgcaggctgtaaagtttctgccattgttgcataaaaacagccacacacaacacataa

SEQ ID NO: 102922 - DNA, 80 bp, synthetic construct
  misc_feature 1..80: note = Artificially Synthesized Probe
  source 1..80: mol_type = other DNA
tcctacggtaattttgagatgtctatgacacatccacatgcagatatcaaataggtaaccaggtatttgagagtggcact

SEQ ID NO: 102923 - DNA, 80 bp, synthetic construct
  misc_feature 1..80: note = Artificially Synthesized Probe
  source 1..80: mol_type = other DNA
aaggtagtcatcaatttaaagcccctgtctgaatcaggatggtgagaaattcaatttcatacgtttgatatttcctcctc

SEQ ID NO: 102924 - DNA, 80 bp, synthetic construct; identical to SEQ ID NO: 36054
  misc_feature 1..80: note = Artificially Synthesized Probe
  source 1..80: mol_type = other DNA

SEQ ID NO: 102925 - DNA, 80 bp, synthetic construct
  misc_feature 1..80: note = Artificially Synthesized Probe
  source 1..80: mol_type = other DNA
caatgggacatctggctcaatctttgcagtgggcttagaatttcataaaagtctagaaatgcagttggcttcaaacagcc

SEQ ID NO: 102926 - DNA, 80 bp, synthetic construct; identical to SEQ ID NO: 35923
  misc_feature 1..80: note = Artificially Synthesized Probe
  source 1..80: mol_type = other DNA

SEQ ID NO: 102927 - DNA, 80 bp, synthetic construct
  misc_feature 1..80: note = Artificially Synthesized Probe
  source 1..80: mol_type = other DNA
ttgggaggccaggagttcaaggccagcctggccaacacggtgaaacctcatctctattgaaaaaaataaataaataaata

SEQ ID NO: 102928 - DNA, 80 bp, synthetic construct
  misc_feature 1..80: note = Artificially Synthesized Probe
  source 1..80: mol_type = other DNA
aaaaaaaaaaaaaggaagtaccatccatcctgttgcctgggtaatcttcctaaaaaaaggttttcatcatgtcattgtct

SEQ ID NO: 102929 - DNA, 80 bp, synthetic construct; identical to SEQ ID NO: 36055
  misc_feature 1..80: note = Artificially Synthesized Probe
  source 1..80: mol_type = other DNA

SEQ ID NO: 102930 - DNA, 80 bp, synthetic construct
  misc_feature 1..80: note = Artificially Synthesized Probe
  source 1..80: mol_type = other DNA
ctgtattcacactaaatttaattcagtaccatttagtttaccagtcaattgttctaactgtagcgtgcaccttttctccc

SEQ ID NO: 102931 - DNA, 80 bp, synthetic construct
  misc_feature 1..80: note = Artificially Synthesized Probe
  source 1..80: mol_type = other DNA
tgaaagactctaatgtttactattagatggattttgctgagaagcatactactataatctgcagatgaaccggaaatctc

SEQ ID NO: 102932 - DNA, 80 bp, synthetic construct
  misc_feature 1..80: note = Artificially Synthesized Probe
  source 1..80: mol_type = other DNA
ccacaaagcctaactggctttactttgacattcttgcattttctcatctgccttagtttctctgccagaatcacattttt

SEQ ID NO: 102933 - DNA, 80 bp, synthetic construct; identical to SEQ ID NO: 36056
  misc_feature 1..80: note = Artificially Synthesized Probe
  source 1..80: mol_type = other DNA

SEQ ID NO: 102934 - DNA, 80 bp, synthetic construct
  misc_feature 1..80: note = Artificially Synthesized Probe
  source 1..80: mol_type = other DNA
ttctgatctgttgtctgatacagcttaggatagttctcattcagtggttttcaaagtgtgattcccagatagcagcatca

SEQ ID NO: 102935 - DNA, 80 bp, synthetic construct
  misc_feature 1..80: note = Artificially Synthesized Probe
  source 1..80: mol_type = other DNA
catatttcattgtagattaggaaattaaaagccagatataagtgacttaacctaggccataaagcaagtaaatgcttgta

SEQ ID NO: 102936 - DNA, 80 bp, synthetic construct
  misc_feature 1..80: note = Artificially Synthesized Probe
  source 1..80: mol_type = other DNA
ggtcactcaaatgaaaaggaccctggatagtattaagaatatcttcacacagggttgcatatggtgaccaaatggtggta

SEQ ID NO: 102937 - DNA, 80 bp, synthetic construct
  misc_feature 1..80: note = Artificially Synthesized Probe
  source 1..80: mol_type = other DNA
ctcaccttaacaacatgccttcctccaatcataagtgtttggtgtacatatgcatataaaatattatcctaaggtggggc

SEQ ID NO: 102938 - DNA, 80 bp, synthetic construct
  misc_feature 1..80: note = Artificially Synthesized Probe
  source 1..80: mol_type = other DNA
tgggctatattttatagcatttccctaattttcaaaactgttcttaaagtgcgggtgactttctaccaaagaaatccctc

SEQ ID NO: 102939 - DNA, 80 bp, synthetic construct; identical to SEQ ID NO: 36057
  misc_feature 1..80: note = Artificially Synthesized Probe
  source 1..80: mol_type = other DNA

SEQ ID NO: 102940 - DNA, 80 bp, synthetic construct
  misc_feature 1..80: note = Artificially Synthesized Probe
  source 1..80: mol_type = other DNA
acacaggatgtactcatttgcatatggcttgtttcacttaaaatgttttcaagatgtatccacgttgcatgtatctgagt

SEQ ID NO: 102941 - DNA, 80 bp, synthetic construct
  misc_feature 1..80: note = Artificially Synthesized Probe
  source 1..80: mol_type = other DNA
aagcagtaagtacttaaagttatttaaagtatgtaatacataatgtaaaaaattatagaaaataaggaaaaaagaaaata

SEQ ID NO: 102942 - DNA, 80 bp, synthetic construct; identical to SEQ ID NO: 36058
  misc_feature 1..80: note = Artificially Synthesized Probe
  source 1..80: mol_type = other DNA

SEQ ID NO: 102943 - DNA, 80 bp, synthetic construct
  misc_feature 1..80: note = Artificially Synthesized Probe
  source 1..80: mol_type = other DNA
ggtaaccagttcaactgcaaactcttgaccacaagataataatggtaaggaccaaggagtgcaaaattgattatcacata

SEQ ID NO: 102944 - DNA, 80 bp, synthetic construct
  misc_feature 1..80: note = Artificially Synthesized Probe
  source 1..80: mol_type = other DNA
tttctctggaagtgaacagagtgccatcttcgaatattctgattgctgagtagtttattcccatctgtttttggaagtct

SEQ ID NO: 102945 - DNA, 80 bp, synthetic construct
  misc_feature 1..80: note = Artificially Synthesized Probe
  source 1..80: mol_type = other DNA
cttttgaggaacagagaataacccaaaatataattcagggtttgctcttgaagagcactttgtttcattcacattttcct

SEQ ID NO: 102946 - DNA, 80 bp, synthetic construct; identical to SEQ ID NO: 36059
  misc_feature 1..80: note = Artificially Synthesized Probe
  source 1..80: mol_type = other DNA

SEQ ID NO: 102947 - DNA, 80 bp, synthetic construct
  misc_feature 1..80: note = Artificially Synthesized Probe
  source 1..80: mol_type = other DNA
tagaggcaggcaaaaatgcagctgtggttttacttgaactgcttttctattcttggtttttgagtcagaatatacatagt

SEQ ID NO: 102948 - DNA, 80 bp, synthetic construct
  misc_feature 1..80: note = Artificially Synthesized Probe
  source 1..80: mol_type = other DNA
cacctcctgtcgatcagcagaccagcagctgcattcaattctcataggaacgggaaccctattgtgaactgggcatatga

SEQ ID NO: 102949 - DNA, 80 bp, synthetic construct
  misc_feature 1..80: note = Artificially Synthesized Probe
  source 1..80: mol_type = other DNA
tctggggaggcttcaggaaggcgaagggggagcaaacaagtcacatggccagagcaggagcaagatggagcggtggaggc

SEQ ID NO: 102950 - DNA, 80 bp, synthetic construct
  misc_feature 1..80: note = Artificially Synthesized Probe
  source 1..80: mol_type = other DNA
gccatatattcaaatcatatcacctactaagcccaaagctctaagaactgtccttttctcttacaatggagctacaagat

SEQ ID NO: 102951 - DNA, 80 bp, synthetic construct
  misc_feature 1..80: note = Artificially Synthesized Probe
  source 1..80: mol_type = other DNA
tagtcttcaataagaagtttgggggcttattatgaactctcagagatggcatttggatgtcttcaggcttaggagtatgg

SEQ ID NO: 102952 - DNA, 80 bp, synthetic construct; identical to SEQ ID NO: 36060
  misc_feature 1..80: note = Artificially Synthesized Probe
  source 1..80: mol_type = other DNA

SEQ ID NO: 102953 - DNA, 80 bp, synthetic construct
  misc_feature 1..80: note = Artificially Synthesized Probe
  source 1..80: mol_type = other DNA
gagctgcattcccagacactccagctcttacggaaagaagcactgtcttttgcgctagtgtttgtctaccgtcccctgtc

SEQ ID NO: 102954 - DNA, 80 bp, synthetic construct
  misc_feature 1..80: note = Artificially Synthesized Probe
  source 1..80: mol_type = other DNA
accagattcacattgtatgtgccggactctttctcaggtgactgctctgtgcttttttatctaaagaagggcaagtcacc

SEQ ID NO: 102955 - DNA, 80 bp, synthetic construct
  misc_feature 1..80: note = Artificially Synthesized Probe
  source 1..80: mol_type = other DNA
ggcggggcggggccgggaaaggtgaggctgctggcgggaagcgggggcggcgcgcagcggtacctagcggcgctgccccg

SEQ ID NO: 102956 - DNA, 80 bp, synthetic construct
  misc_feature 1..80: note = Artificially Synthesized Probe
  source 1..80: mol_type = other DNA
cagcctctgagctaacgggtctgtaaaaagttacttcatttctctaggcctcagtttcccatgcataaaattggaatttg

SEQ ID NO: 102957 - DNA, 80 bp, synthetic construct
  misc_feature 1..80: note = Artificially Synthesized Probe
  source 1..80: mol_type = other DNA
tgtggcccgcgccagtagtgctttctgctccgcactcgccgtgagccaggtgtgcaaccggatttggggcgagggtcgcg

SEQ ID NO: 102958 - DNA, 80 bp, synthetic construct; identical to SEQ ID NO: 36061
  misc_feature 1..80: note = Artificially Synthesized Probe
  source 1..80: mol_type = other DNA

SEQ ID NO: 102959 - DNA, 80 bp, synthetic construct
  misc_feature 1..80: note = Artificially Synthesized Probe
  source 1..80: mol_type = other DNA
tgctgaccggagaccaccgaggcgggagacagagcgcggcgaagagccattgagtggtcacccagtagccgccgccgccg

SEQ ID NO: 102960 - DNA, 80 bp, synthetic construct
  misc_feature 1..80: note = Artificially Synthesized Probe
  source 1..80: mol_type = other DNA
cccgcgatggcaaagccgagttcgcttgcagcaagtgtgctttcatgcttgatcgaatctatcgattcgacacagttatt

SEQ ID NO: 102961 - DNA, 80 bp, synthetic construct
  misc_feature 1..80: note = Artificially Synthesized Probe
  source 1..80: mol_type = other DNA
agttgcctgttctcttagatttatttgctagagcagcctcataactataggtgattcatactaggtctcacaggagttcc

SEQ ID NO: 102962 - DNA, 80 bp, synthetic construct; identical to SEQ ID NO: 36062
  misc_feature 1..80: note = Artificially Synthesized Probe
  source 1..80: mol_type = other DNA

SEQ ID NO: 102963 - DNA, 80 bp, synthetic construct
  misc_feature 1..80: note = Artificially Synthesized Probe
  source 1..80: mol_type = other DNA
aaggtggccagaagtatctcctgcggcccttctagcaggtggtcgaccagcatttgcactgaagaaccagcgttgtctga

SEQ ID NO: 102964 - DNA, 80 bp, synthetic construct
  misc_feature 1..80: note = Artificially Synthesized Probe
  source 1..80: mol_type = other DNA
ggaaagtgtgactgttgttcagatgatcaggctccgcagcatgggtgtaatcacaagctggaattagctcttagcatgat

SEQ ID NO: 102965 - DNA, 80 bp, synthetic construct
  misc_feature 1..80: note = Artificially Synthesized Probe
  source 1..80: mol_type = other DNA
tttccttaacaggtctttgaaacccctttacaagacacctgtgagttatcccttggagctttcagacctgcaggagctgt

SEQ ID NO: 102966 - DNA, 80 bp, synthetic construct
  misc_feature 1..80: note = Artificially Synthesized Probe
  source 1..80: mol_type = other DNA
ccatttttgctgcaccttttgctctgtctcatttagtaaacgtgatttgcactcagataatttgattttcacaatccttt

SEQ ID NO: 102967 - DNA, 80 bp, synthetic construct; identical to SEQ ID NO: 36063
  misc_feature 1..80: note = Artificially Synthesized Probe
  source 1..80: mol_type = other DNA

SEQ ID NO: 102968 - DNA, 80 bp, synthetic construct
  misc_feature 1..80: note = Artificially Synthesized Probe
  source 1..80: mol_type = other DNA
ttcataaaagagacaggaattcaagtattcaagtacagtattgtcagtcaaaagattaaggcataaactgttcacagcca

SEQ ID NO: 102969 - DNA, 80 bp, synthetic construct
  misc_feature 1..80: note = Artificially Synthesized Probe
  source 1..80: mol_type = other DNA
tcgtgtctgcccaattgattctgtaccaaccttttaaattcaactatggtagtttgtttctatagcaacagtaaatgcta

SEQ ID NO: 102970 - DNA, 80 bp, synthetic construct; identical to SEQ ID NO: 36064
  misc_feature 1..80: note = Artificially Synthesized Probe
  source 1..80: mol_type = other DNA

SEQ ID NO: 102971 - DNA, 80 bp, synthetic construct
  misc_feature 1..80: note = Artificially Synthesized Probe
  source 1..80: mol_type = other DNA
ttttctttcagtggagcctcgcagctaaatttgggctttacagtatttctgtgactagacataggtgttacaaattaaac

SEQ ID NO: 102972 - DNA, 80 bp, synthetic construct
  misc_feature 1..80: note = Artificially Synthesized Probe
  source 1..80: mol_type = other DNA
atttaattttcactataattctgtgagaaagatgctatcgtgatcccgttttatagagaggttaagtaatttgacaagat

SEQ ID NO: 102973 - DNA, 80 bp, synthetic construct
  misc_feature 1..80: note = Artificially Synthesized Probe
  source 1..80: mol_type = other DNA
aataaaatactatattttggtgactggattttggagtggagaaggattttaaagatcatcttcaggcagtctctcaattt

SEQ ID NO: 102974 - DNA, 80 bp, synthetic construct
  misc_feature 1..80: note = Artificially Synthesized Probe
  source 1..80: mol_type = other DNA
atttaagtaagtacttattttaaaccaggagccctctttctctaacctaaggatgctcggaggattctttagagattatg

SEQ ID NO: 102975 - DNA, 80 bp, synthetic construct
  misc_feature 1..80: note = Artificially Synthesized Probe
  source 1..80: mol_type = other DNA
ctgctgtgacttgacttacattgtttactgtttctagaaaaacaaaaattaggaggtgggagaaaatgtcattcagcttc

SEQ ID NO: 102976 - DNA, 80 bp, synthetic construct; identical to SEQ ID NO: 36065
  misc_feature 1..80: note = Artificially Synthesized Probe
  source 1..80: mol_type = other DNA

SEQ ID NO: 102977 - DNA, 80 bp, synthetic construct
  misc_feature 1..80: note = Artificially Synthesized Probe
  source 1..80: mol_type = other DNA
ttgttctgtaaggttattttgattcctttgtttaatcctccacttaccatattttatgcactattaaatattgacatcag

SEQ ID NO: 102978 - DNA, 80 bp, synthetic construct
  misc_feature 1..80: note = Artificially Synthesized Probe
  source 1..80: mol_type = other DNA
gtatgaggacctaaggctgttcagatatctaaagaaaggtttgaagccttcttctagctggtaattcccttctttattgt

SEQ ID NO: 102979 - DNA, 80 bp, synthetic construct
  misc_feature 1..80: note = Artificially Synthesized Probe
  source 1..80: mol_type = other DNA
tggtaaatttatcccactcttattttagttatgtgaagtggatcaggccctttggaagatgttggcattagatgctggta

SEQ ID NO: 102980 - DNA, 80 bp, synthetic construct; identical to SEQ ID NO: 36066
  misc_feature 1..80: note = Artificially Synthesized Probe
  source 1..80: mol_type = other DNA

SEQ ID NO: 102981 - DNA, 80 bp, synthetic construct
  misc_feature 1..80: note = Artificially Synthesized Probe
  source 1..80: mol_type = other DNA
tacttgatacttcacaagaattcattatgttgttggcttagtgggacttgctaagtgctctttcagcagactgttacctg

SEQ ID NO: 102982 - DNA, 80 bp, synthetic construct
  misc_feature 1..80: note = Artificially Synthesized Probe
  source 1..80: mol_type = other DNA
ttttcctgtggcattctttggctttaaagttgctgttcgaatatatgttatatacagtcttatttctaagagagccacta

SEQ ID NO: 102983 - DNA, 80 bp, synthetic construct; identical to SEQ ID NO: 36067
  misc_feature 1..80: note = Artificially Synthesized Probe
  source 1..80: mol_type = other DNA

SEQ ID NO: 102984 - DNA, 80 bp, synthetic construct; identical to SEQ ID NO: 35924
  misc_feature 1..80: note = Artificially Synthesized Probe
  source 1..80: mol_type = other DNA

SEQ ID NO: 102985 - DNA, 80 bp, synthetic construct
  misc_feature 1..80: note = Artificially Synthesized Probe
  source 1..80: mol_type = other DNA
gatggttagtttataaagtttccttcaccactgtaagattgtttggtttaaagtaaataaatatgaccaccttccttgcc

SEQ ID NO: 102986 - DNA, 80 bp, synthetic construct
  misc_feature 1..80: note = Artificially Synthesized Probe
  source 1..80: mol_type = other DNA
ttagaatcattgtaaacatctattaatgtggttactttgcccatggtgtgacatagttcatattgcctcaggtgaaggct

SEQ ID NO: 102987 - DNA, 80 bp, synthetic construct
  misc_feature 1..80: note = Artificially Synthesized Probe
  source 1..80: mol_type = other DNA
aaacatatccatatctatccatttatttccccctccctttactaaccaccaggatccaagctactattgtctttcacctg

SEQ ID NO: 102988 - DNA, 80 bp, synthetic construct
  misc_feature 1..80: note = Artificially Synthesized Probe
  source 1..80: mol_type = other DNA
ctattctcatttcaattaaaatgaaatccagttcattaactttgttgtctgaagctggatgtgacctggtgcctgcctgc

SEQ ID NO: 102989 - DNA, 80 bp, synthetic construct; identical to SEQ ID NO: 36068
  misc_feature 1..80: note = Artificially Synthesized Probe
  source 1..80: mol_type = other DNA

SEQ ID NO: 102990 - DNA, 80 bp, synthetic construct
  misc_feature 1..80: note = Artificially Synthesized Probe
  source 1..80: mol_type = other DNA
attatatttctactggagagtgctattctagccacagaggcctttctcttttccaggctcatattccattagctgttctt

SEQ ID NO: 102991 - DNA, 80 bp, synthetic construct
  misc_feature 1..80: note = Artificially Synthesized Probe
  source 1..80: mol_type = other DNA
cactctgtattatgctttcctgttttgccgcacagggcttgtccataatattttttgcatttccttgtttgtttatcatg

SEQ ID NO: 102992 - DNA, 80 bp, synthetic construct
  misc_feature 1..80: note = Artificially Synthesized Probe
  source 1..80: mol_type = other DNA
atgtcagcattgtattcctcacagtgcctcacatggtgctttgcttattatagcatttagtaggtgttagaaaagttgat

SEQ ID NO: 102993 - DNA, 80 bp, synthetic construct; identical to SEQ ID NO: 36069
  misc_feature 1..80: note = Artificially Synthesized Probe
  source 1..80: mol_type = other DNA

SEQ ID NO: 102994 - DNA, 80 bp, synthetic construct
  misc_feature 1..80: note = Artificially Synthesized Probe
  source 1..80: mol_type = other DNA
ttgatattcctataaaatatatctctttcccatttcactatggattatttatctgtgcttatgctataaatctgccttta

SEQ ID NO: 102995 - DNA, 80 bp, synthetic construct
  misc_feature 1..80: note = Artificially Synthesized Probe
  source 1..80: mol_type = other DNA
gaaaggaagtgtacctgggcacgaccaagaatctatcaaaaaagcatcagaaagctccatattaaggttaataaaaatag

SEQ ID NO: 102996 - DNA, 80 bp, synthetic construct
  misc_feature 1..80: note = Artificially Synthesized Probe
  source 1..80: mol_type = other DNA
ccactgtctgtatttgcacagtattttttaaaaattcttgaaccatttgagaattagttgtagatagtatactcctttac

SEQ ID NO: 102997 - DNA, 80 bp, synthetic construct
  misc_feature 1..80: note = Artificially Synthesized Probe
  source 1..80: mol_type = other DNA
tgttgtaagaaaggtagccggaatgtaacttctctcaggaagtgtaagtttgatgagtatgccttttcaactccttgatt

SEQ ID NO: 102998 - DNA, 80 bp, synthetic construct
  misc_feature 1..80: note = Artificially Synthesized Probe
  source 1..80: mol_type = other DNA
tggtacagaaaagtggagagggaagctggggagcatagtacaaatggaggtgaatcagtgttcttaataaggaacagacc

SEQ ID NO: 102999 - DNA, 80 bp, synthetic construct; identical to SEQ ID NO: 36070
  misc_feature 1..80: note = Artificially Synthesized Probe
  source 1..80: mol_type = other DNA

SEQ ID NO: 103000 - DNA, 80 bp, synthetic construct
  misc_feature 1..80: note = Artificially Synthesized Probe
  source 1..80: mol_type = other DNA
ttgtaggacttgggagatgaatactgtgtactccttgtgctctagggaatatttcatgtaaaagtgtagttcttctcttt

SEQ ID NO: 103001 - DNA, 80 bp, synthetic construct
  misc_feature 1..80: note = Artificially Synthesized Probe
  source 1..80: mol_type = other DNA
gaccagcctggccaacatggtgaaaccctgtctctactaaaaaataaaaaaaaattagccaggcgttgtggcagacacct

SEQ ID NO: 103002 - DNA, 80 bp, synthetic construct; identical to SEQ ID NO: 36071
  misc_feature 1..80: note = Artificially Synthesized Probe
  source 1..80: mol_type = other DNA

SEQ ID NO: 103003 - DNA, 80 bp, synthetic construct
  misc_feature 1..80: note = Artificially Synthesized Probe
  source 1..80: mol_type = other DNA
tggctgccatcatagagagatcacagtgcgtgaaaattgagacaatttagtattgaaggaagtatttcatttctcctgct

SEQ ID NO: 103004 - DNA, 80 bp, synthetic construct
  misc_feature 1..80: note = Artificially Synthesized Probe
  source 1..80: mol_type = other DNA
tgctgaattcagattcttcaagagaaacttaatgaaatgagctatgaactaaagtgtgctcaggagtcgtctcaaaagca

SEQ ID NO: 103005 - DNA, 80 bp, synthetic construct
  misc_feature 1..80: note = Artificially Synthesized Probe
  source 1..80: mol_type = other DNA
gcctggagaagttgtagcttaatctcaattgatattttggaatagtcctgttactaaaatgtgtacaggtgatataatgg

SEQ ID NO: 103006 - DNA, 80 bp, synthetic construct
  misc_feature 1..80: note = Artificially Synthesized Probe
  source 1..80: mol_type = other DNA
caacaccagctccgagaaagtggatgcaatgaaggaaatgttaacatgagcagtgaccctagtgtacaaacaatatcaaa

SEQ ID NO: 103007 - DNA, 80 bp, synthetic construct
  misc_feature 1..80: note = Artificially Synthesized Probe
  source 1..80: mol_type = other DNA
taggacaggagagacttcagttggggatgtgccattttggttgcagtcttgattttatttttagtctttgtgggagctca

SEQ ID NO: 103008 - DNA, 80 bp, synthetic construct; identical to SEQ ID NO: 36072
  misc_feature 1..80: note = Artificially Synthesized Probe
  source 1..80: mol_type = other DNA

SEQ ID NO: 103009 - DNA, 80 bp, synthetic construct
  misc_feature 1..80: note = Artificially Synthesized Probe
  source 1..80: mol_type = other DNA
agtatttcagttcaacacttgctgcccttgtaccatatgctagttacagtagtccctctttatccacagtttcactttcc

SEQ ID NO: 103010 - DNA, 80 bp, synthetic construct
  misc_feature 1..80: note = Artificially Synthesized Probe
  source 1..80: mol_type = other DNA
tgtattcatgccattctcccacttcagcctccagagtagctgggactacaggcgcccgccaccatgcctggctaatgttg

SEQ ID NO: 103011 - DNA, 80 bp, synthetic construct
  misc_feature 1..80: note = Artificially Synthesized Probe
  source 1..80: mol_type = other DNA
taatttgtatgtaaacctttatcatagttatctatgcacaggaaaaaacagtatacacaggcttcagtgctatctggttt

SEQ ID NO: 103012 - DNA, 80 bp, synthetic construct; identical to SEQ ID NO: 36073
  misc_feature 1..80: note = Artificially Synthesized Probe
  source 1..80: mol_type = other DNA

SEQ ID NO: 103013 - DNA, 80 bp, synthetic construct
  misc_feature 1..80: note = Artificially Synthesized Probe
  source 1..80: mol_type = other DNA
tcttttcttttcttttctttctttcctctctctttctttccttctttttttttttttttttttttttgagacagagtctc

SEQ ID NO: 103014 - DNA, 80 bp, synthetic construct
  misc_feature 1..80: note = Artificially Synthesized Probe
  source 1..80: mol_type = other DNA
agacagggtttcatcgtgttagccaggatggtctcgatgtcctgacctcgtgatccgcccgcctcagcctcccaaagtgc

SEQ ID NO: 103015 - DNA, 80 bp, synthetic construct
  misc_feature 1..80: note = Artificially Synthesized Probe
  source 1..80: mol_type = other DNA
ctgcaacctccacctcccgggttcaagcgattctcctgcttcagcctcctggtagctgggattacaggcatgcgccacca

SEQ ID NO: 103016 - DNA, 80 bp, synthetic construct; identical to SEQ ID NO: 36074
  misc_feature 1..80: note = Artificially Synthesized Probe
  source 1..80: mol_type = other DNA

SEQ ID NO: 103017 - DNA, 80 bp, synthetic construct
  misc_feature 1..80: note = Artificially Synthesized Probe
  source 1..80: mol_type = other DNA
agaaaaaaaagtgtgcttggtagtaatcaaaagcacattctcgagtgagcatgctttggtggtatattctacagactggg

SEQ ID NO: 103018 - DNA, 80 bp, synthetic construct
  misc_feature 1..80: note = Artificially Synthesized Probe
  source 1..80: mol_type = other DNA
ggtgggtggatcatgtggtcagtagttcaagaccagcctggccaagatggtgaaaccccgtctctactaaaaatacaaaa

SEQ ID NO: 103019 - DNA, 80 bp, synthetic construct
  misc_feature 1..80: note = Artificially Synthesized Probe
  source 1..80: mol_type = other DNA
atattaaaatttcagatgtctgggcagggtcggggagtggtggagggatggaggtagaaataattcttaactttttgtta

SEQ ID NO: 103020 - DNA, 80 bp, synthetic construct; identical to SEQ ID NO: 36075
  misc_feature 1..80: note = Artificially Synthesized Probe
  source 1..80: mol_type = other DNA

SEQ ID NO: 103021 - DNA, 80 bp, synthetic construct
  misc_feature 1..80: note = Artificially Synthesized Probe
  source 1..80: mol_type = other DNA
aatacttctatagcaattttaataatggcaccctctgctcctctttcagtttatataccttgaaaattttaaggcctctg

SEQ ID NO: 103022 - DNA, 80 bp, synthetic construct
  misc_feature 1..80: note = Artificially Synthesized Probe
  source 1..80: mol_type = other DNA
ggaacaaaacatccagcacctaaaccatagtctgagtcacaaggagcagttgcttcaggtgagtttacatgatttcaatg

SEQ ID NO: 103023 - DNA, 80 bp, synthetic construct
  misc_feature 1..80: note = Artificially Synthesized Probe
  source 1..80: mol_type = other DNA
caagtataagaaacagtacatatagccctgacttaagcagtcttttatgaagtcttttataaagacttaatattcagaaa

SEQ ID NO: 103024 - DNA, 80 bp, synthetic construct; identical to SEQ ID NO: 36076
  misc_feature 1..80: note = Artificially Synthesized Probe
  source 1..80: mol_type = other DNA

SEQ ID NO: 103025 - DNA, 80 bp, synthetic construct
  misc_feature 1..80: note = Artificially Synthesized Probe
  source 1..80: mol_type = other DNA
gcatcctgtgttcccctggtggctagcgtatgttgcagaacagttaattctatgtgttgtgtctgttgtatgttgcagaa

SEQ ID NO: 103026 - DNA, 80 bp, synthetic construct
  misc_feature 1..80: note = Artificially Synthesized Probe
  source 1..80: mol_type = other DNA
atttcgggagctcctacagtatcgagataactcagacaaaacccttgaagcaaatgaaatgttgcttgagaaacttcgcc

SEQ ID NO: 103027 - DNA, 80 bp, synthetic construct
  misc_feature 1..80: note = Artificially Synthesized Probe
  source 1..80: mol_type = other DNA
agtgatcaggatagtaaatcttacagagctttaggagtcttcctttccttgcagcgggctatagatgaaaaattctctgc

SEQ ID NO: 103028 - DNA, 80 bp, synthetic construct; identical to SEQ ID NO: 35925
  misc_feature 1..80: note = Artificially Synthesized Probe
  source 1..80: mol_type = other DNA

SEQ ID NO: 103029 - DNA, 80 bp, synthetic construct; identical to SEQ ID NO: 36077
  misc_feature 1..80: note = Artificially Synthesized Probe
  source 1..80: mol_type = other DNA

SEQ ID NO: 103030 - DNA, 80 bp, synthetic construct
  misc_feature 1..80: note = Artificially Synthesized Probe
  source 1..80: mol_type = other DNA
catacacacacgctcttctctctctctcttacttttactgaagcattaccagggtgcaattattaaattgtgtcttctac

SEQ ID NO: 103031 - DNA, 80 bp, synthetic construct
  misc_feature 1..80: note = Artificially Synthesized Probe
  source 1..80: mol_type = other DNA
gaaatcctttatagcatagtgcacttcctccaaaatacttccttttatcatatattctatatttaatctctccacaaact

SEQ ID NO: 103032 - DNA, 80 bp, synthetic construct
  misc_feature 1..80: note = Artificially Synthesized Probe
  source 1..80: mol_type = other DNA
tttatcctgaggagtatggggtaatcattttgactgattattgctctctttatggctgtagagtatggagagtctcctga

SEQ ID NO: 103033 - DNA, 80 bp, synthetic construct
  misc_feature 1..80: note = Artificially Synthesized Probe
  source 1..80: mol_type = other DNA
ggcaagacttcagttaactttaaggcagttggttcagtgattatgtaatctcagccttggattaggactcttcagattgg

SEQ ID NO: 103034 - DNA, 80 bp, synthetic construct; identical to SEQ ID NO: 36078
  misc_feature 1..80: note = Artificially Synthesized Probe
  source 1..80: mol_type = other DNA

SEQ ID NO: 103035 - DNA, 80 bp, synthetic construct
  misc_feature 1..80: note = Artificially Synthesized Probe
  source 1..80: mol_type = other DNA
tcaacctaggcagtatggctccattcctccaccatgtgccatcagttagtacagaaatagaaaccatcgctatgatagca

SEQ ID NO: 103036 - DNA, 80 bp, synthetic construct
  misc_feature 1..80: note = Artificially Synthesized Probe
  source 1..80: mol_type = other DNA
aacaatatgtatgtaagtggccaccagagatagttttctgtatggtttgtattcattcctgggacatgtatttagagact

SEQ ID NO: 103037 - DNA, 80 bp, synthetic construct; identical to SEQ ID NO: 36079
  misc_feature 1..80: note = Artificially Synthesized Probe
  source 1..80: mol_type = other DNA

SEQ ID NO: 103038 - DNA, 80 bp, synthetic construct
  misc_feature 1..80: note = Artificially Synthesized Probe
  source 1..80: mol_type = other DNA
gtagtgcatttatagtctgcaaataggaagcatttgcagactatagatgtgtgtatatttatatattttaccgtcaactc

SEQ ID NO: 103039 - DNA, 80 bp, synthetic construct
  misc_feature 1..80: note = Artificially Synthesized Probe
  source 1..80: mol_type = other DNA
tgtgagctgctgcgcctggccttagaccacagttttacattaatcatcaaagtatgacacatttcttgaaaaccttgcat

SEQ ID NO: 103040 - DNA, 80 bp, synthetic construct
  misc_feature 1..80: note = Artificially Synthesized Probe
  source 1..80: mol_type = other DNA
agactcacgcacacggtatttggcaggctttagttcctgtccacacaataggtctgcttataacatggtagcttagttcc

SEQ ID NO: 103041 - DNA, 80 bp, synthetic construct
  misc_feature 1..80: note = Artificially Synthesized Probe
  source 1..80: mol_type = other DNA
tcaaggtatgggaaaacttacactcaacatgtttactcttagtttttgtaaaatctgagttaagagggaaaaaagatcgc

SEQ ID NO: 103042 - DNA, 80 bp, synthetic construct
  misc_feature 1..80: note = Artificially Synthesized Probe
  source 1..80: mol_type = other DNA
caacctctgcctcctgggttcaagcaattcttctgcttcagcctcccaagtagctgggattacaggcatgcaccaccatg

SEQ ID NO: 103043 - DNA, 80 bp, synthetic construct; identical to SEQ ID NO: 36080
  misc_feature 1..80: note = Artificially Synthesized Probe
  source 1..80: mol_type = other DNA

SEQ ID NO: 103044 - DNA, 80 bp, synthetic construct
  misc_feature 1..80: note = Artificially Synthesized Probe
  source 1..80: mol_type = other DNA
gttaggcccactgaagtaaatacacatctttctagaaaggtcctgctgtgtgcttcagaaattgtttctaaaatagacct

SEQ ID NO: 103045 - DNA, 80 bp, synthetic construct
  misc_feature 1..80: note = Artificially Synthesized Probe
  source 1..80: mol_type = other DNA
gcactgctggtaatagaataatggagatgatggaaattacaggagatttttcaactcaagaagattaatggttgtattct

SEQ ID NO: 103046 - DNA, 80 bp, synthetic construct
  misc_feature 1..80: note = Artificially Synthesized Probe
  source 1..80: mol_type = other DNA
caggttcggggactgcattggaggagcactgctaaaaactcttaaatactacgagaaaaggagtgccaaggcagatagag

SEQ ID NO: 103047 - DNA, 80 bp, synthetic construct; identical to SEQ ID NO: 36081
  misc_feature 1..80: note = Artificially Synthesized Probe
  source 1..80: mol_type = other DNA

SEQ ID NO: 103048 - DNA, 80 bp, synthetic construct
  misc_feature 1..80: note = Artificially Synthesized Probe
  source 1..80: mol_type = other DNA
agtgtgtcatcatctgtcttagaaaactgggatttgaaatgaaacaagctgagttgggtgattttgaggttgagattatc

SEQ ID NO: 103049 - DNA, 80 bp, synthetic construct
  misc_feature 1..80: note = Artificially Synthesized Probe
  source 1..80: mol_type = other DNA
cctttaggaaacttacattccatgtaggggaagcagagagagagatctattagataatggtaagtgcatcgaaaaaaaat

SEQ ID NO: 103050 - DNA, 80 bp, synthetic construct
  misc_feature 1..80: note = Artificially Synthesized Probe
  source 1..80: mol_type = other DNA
aattaacacatccgtcactacacattttatgcgtgtatggtgaaaccacttaagatctactctcttagcaaatttcaagt

SEQ ID NO: 103051 - DNA, 80 bp, synthetic construct
  misc_feature 1..80: note = Artificially Synthesized Probe
  source 1..80: mol_type = other DNA
aaggcgagggaattacacaagggtttgatgaccagggatcactggggaccaacttagagactgcctattacagtctgcat

SEQ ID NO: 103052 - DNA, 80 bp, synthetic construct; identical to SEQ ID NO: 36082
  misc_feature 1..80: note = Artificially Synthesized Probe
  source 1..80: mol_type = other DNA

SEQ ID NO: 103053 - DNA, 80 bp, synthetic construct
  misc_feature 1..80: note = Artificially Synthesized Probe
  source 1..80: mol_type = other DNA
tttccattcacttaactctgtttttccctgtaaactgaaagcaaggaaactatttcctaaggacccactgttttttgttg

SEQ ID NO: 103054 - DNA, 80 bp, synthetic construct
  misc_feature 1..80: note = Artificially Synthesized Probe
  source 1..80: mol_type = other DNA
tctttataatgttatttgtgatttcctcttactaggctgctgcagagaagttggtgcaagccttaatggaaagaaattca

SEQ ID NO: 103055 - DNA, 80 bp, synthetic construct
  misc_feature 1..80: note = Artificially Synthesized Probe
  source 1..80: mol_type = other DNA
agttacccccactggccgtcttggaaaacagactgatcaagtaagaactatagacttacataattcatgctgattccatt

SEQ ID NO: 103056 - DNA, 80 bp, synthetic construct; identical to SEQ ID NO: 36083
  misc_feature 1..80: note = Artificially Synthesized Probe
  source 1..80: mol_type = other DNA

SEQ ID NO: 103057 - DNA, 80 bp, synthetic construct
  misc_feature 1..80: note = Artificially Synthesized Probe
  source 1..80: mol_type = other DNA
tcacaattcggcccagagaaattctatccttactctccttttcagatagctttgcagggattcagaaatgcaggaggtaa

SEQ ID NO: 103058 - DNA, 80 bp, synthetic construct
  misc_feature 1..80: note = Artificially Synthesized Probe
  source 1..80: mol_type = other DNA
tgattaccttttgctttacctgcctcagtcccagaatcagccattatcctaaagagctccctggttccttttggtgggta

SEQ ID NO: 103059 - DNA, 80 bp, synthetic construct
  misc_feature 1..80: note = Artificially Synthesized Probe
  source 1..80: mol_type = other DNA
gactacaggcgccagccaccacacccagctaatttttttgtatttttagtagagacggggtttcaccgtgttagccagga

SEQ ID NO: 103060 - DNA, 80 bp, synthetic construct; identical to SEQ ID NO: 36084
  misc_feature 1..80: note = Artificially Synthesized Probe
  source 1..80: mol_type = other DNA

SEQ ID NO: 103061 - DNA, 80 bp, synthetic construct
  misc_feature 1..80: note = Artificially Synthesized Probe
  source 1..80: mol_type = other DNA
tccttaggatattttgcactgacagtgttcagttagagtagtagtgagttcaaaaattatttggattaatttttttatta

SEQ ID NO: 103062 - DNA, 80 bp, synthetic construct
  misc_feature 1..80: note = Artificially Synthesized Probe
  source 1..80: mol_type = other DNA
atttacacagttcaaaactctagtatataaaatgatatactcagatgtccaatattttcctgttccttctctcctgtttc

SEQ ID NO: 103063 - DNA, 80 bp, synthetic construct
  misc_feature 1..80: note = Artificially Synthesized Probe
  source 1..80: mol_type = other DNA
cccctttttcctaatagaaaacctactactttagatgtattcttaagcacatagcttgtttttacttaacatattcttaa

SEQ ID NO: 103064 - DNA, 80 bp, synthetic construct; identical to SEQ ID NO: 35926
  misc_feature 1..80: note = Artificially Synthesized Probe
  source 1..80: mol_type = other DNA

SEQ ID NO: 103065 - DNA, 80 bp, synthetic construct; identical to SEQ ID NO: 36085
  misc_feature 1..80: note = Artificially Synthesized Probe
  source 1..80: mol_type = other DNA

SEQ ID NO: 103066 - DNA, 80 bp, synthetic construct
  misc_feature 1..80: note = Artificially Synthesized Probe
  source 1..80: mol_type = other DNA
agaactgagtaatgccaaagaggaacttgaactcatggctaaaaaagaaagagaaagtcaggtgagttttttagttaagt

SEQ ID NO: 103067 - DNA, 80 bp, synthetic construct
  misc_feature 1..80: note = Artificially Synthesized Probe
  source 1..80: mol_type = other DNA
tgctcctgtttttagattgggaccattaaaacttattaaatgctggaaaaacgtaaccctctctccccattgctaactgg

SEQ ID NO: 103068 - DNA, 80 bp, synthetic construct
  misc_feature 1..80: note = Artificially Synthesized Probe
  source 1..80: mol_type = other DNA
atatgacgaaaccccgtctctactaaaaatacaaaaattagccaggtgtagtggcgggcgcctgtaatcccagctactcg

SEQ ID NO: 103069 - DNA, 80 bp, synthetic construct; identical to SEQ ID NO: 36086
  misc_feature 1..80: note = Artificially Synthesized Probe
  source 1..80: mol_type = other DNA

SEQ ID NO: 103070 - DNA, 80 bp, synthetic construct
  misc_feature 1..80: note = Artificially Synthesized Probe
  source 1..80: mol_type = other DNA
agtcatgtaactaataaatgccagagctatgattcaaactcaagccttttgtgacttcacatacttcctaagaagattca

SEQ ID NO: 103071 - DNA, 80 bp, synthetic construct
  misc_feature 1..80: note = Artificially Synthesized Probe
  source 1..80: mol_type = other DNA
taggaccacagctcagagttacagactgaaactaaaagcttgtttgttactatgctggcatctcttttagaagatcactc

SEQ ID NO: 103072 - DNA, 80 bp, synthetic construct
  misc_feature 1..80: note = Artificially Synthesized Probe
  source 1..80: mol_type = other DNA
aatgtcatggcttcctaaattcagtttagctagctagtccaaatagctcttagtttttttctaccttttgccatagctag

SEQ ID NO: 103073 - DNA, 80 bp, synthetic construct
  misc_feature 1..80: note = Artificially Synthesized Probe
  source 1..80: mol_type = other DNA
aaaatcccctagtcccccttcctttttgtggttctaccttagccattatctgattattcatgtcagatattttagtttcc

SEQ ID NO: 103074 - DNA, 80 bp, synthetic construct
  misc_feature 1..80: note = Artificially Synthesized Probe
  source 1..80: mol_type = other DNA
agttaatagagcttaaataaatcacatgtcttctaaggaacccataataaattactgctcctaagaaagaattaagcaaa

SEQ ID NO: 103075 - DNA, 80 bp, synthetic construct; identical to SEQ ID NO: 36087
  misc_feature 1..80: note = Artificially Synthesized Probe
  source 1..80: mol_type = other DNA

SEQ ID NO: 103076 - DNA, 80 bp, synthetic construct
  misc_feature 1..80: note = Artificially Synthesized Probe
  source 1..80: mol_type = other DNA
ttgtgaggattcactcattcattcattagctatatggggaccttctctaagcttgggctagtgctggggatgaggtaggt

SEQ ID NO: 103077 - DNA, 80 bp, synthetic construct
  misc_feature 1..80: note = Artificially Synthesized Probe
  source 1..80: mol_type = other DNA
ttaatagtttgagaggcaagaagtcgggccccaggttcccaccatgaggaactaggaagccatagaaggaaaatgcaaat

SEQ ID NO: 103078 - DNA, 80 bp, synthetic construct
  misc_feature 1..80: note = Artificially Synthesized Probe
  source 1..80: mol_type = other DNA
caaagaaggcttctctgagcagatgacacgtaagctgggacctaaggatgaaaaggaggcagccctgagaaagatatttc

SEQ ID NO: 103079 - DNA, 80 bp, synthetic construct; identical to SEQ ID NO: 36088
  misc_feature 1..80: note = Artificially Synthesized Probe
  source 1..80: mol_type = other DNA

SEQ ID NO: 103080 - DNA, 80 bp, synthetic construct
  misc_feature 1..80: note = Artificially Synthesized Probe
  source 1..80: mol_type = other DNA
ggattacagacacacaccaccacgctcggctagtttttgtatttttagtagagatgggtttcaccatgttggtcaggctg

SEQ ID NO: 103081 - DNA, 80 bp, synthetic construct
  misc_feature 1..80: note = Artificially Synthesized Probe
  source 1..80: mol_type = other DNA
cttgtcattttctgatgagaacactgaaagtttagggcatgtagtgccaacttttggcagtatttcttcacaggtggtgg

SEQ ID NO: 103082 - DNA, 80 bp, synthetic construct
  misc_feature 1..80: note = Artificially Synthesized Probe
  source 1..80: mol_type = other DNA
aaaaacttcatctcttcttgcttctgctaatggtaaccattctttttcagtatcataataagcttgttaaacaaatttga

SEQ ID NO: 103083 - DNA, 80 bp, synthetic construct; identical to SEQ ID NO: 36089
  misc_feature 1..80: note = Artificially Synthesized Probe
  source 1..80: mol_type = other DNA

SEQ ID NO: 103084 - DNA, 80 bp, synthetic construct
  misc_feature 1..80: note = Artificially Synthesized Probe
  source 1..80: mol_type = other DNA
ctgtagggcctcttcagacaatatttgcacacatcgaatcccttggccagtgattatccatatcccacttgaaagtatag

SEQ ID NO: 103085 - DNA, 80 bp, synthetic construct
  misc_feature 1..80: note = Artificially Synthesized Probe
  source 1..80: mol_type = other DNA
tacttcttcgggaaaaagttgcttcagtagaatcccagggtcaagaaatttcaggaaaccgaagacaacaggtaagttac

SEQ ID NO: 103086 - DNA, 80 bp, synthetic construct
  misc_feature 1..80: note = Artificially Synthesized Probe
  source 1..80: mol_type = other DNA
atcctcctcggcccctcaaagtgctggaattacatacaagcatgagtcaccacattgagacaaggtctcactgtgtcacc

SEQ ID NO: 103087 - DNA, 80 bp, synthetic construct; identical to SEQ ID NO: 36090
  misc_feature 1..80: note = Artificially Synthesized Probe
  source 1..80: mol_type = other DNA

SEQ ID NO: 103088 - DNA, 80 bp, synthetic construct
  misc_feature 1..80: note = Artificially Synthesized Probe
  source 1..80: mol_type = other DNA
agttatccctcacactcatacctaagtcacctccctcaactgaatctttctcttttatctgcatttaaccatgttcagat

SEQ ID NO: 103089 - DNA, 80 bp, synthetic construct
  misc_feature 1..80: note = Artificially Synthesized Probe
  source 1..80: mol_type = other DNA
cagggggcacctgcagatggttttcattgtcacaaaattaggtttggtacttggggatgagcagctattcacagtagaga

SEQ ID NO: 103090 - DNA, 80 bp, synthetic construct
  misc_feature 1..80: note = Artificially Synthesized Probe
  source 1..80: mol_type = other DNA
ctactcaccccactgcattctggcttttaactgtaccttaaacaactctgttgattatacattgtcatagctcattatct

SEQ ID NO: 103091 - DNA, 80 bp, synthetic construct
  misc_feature 1..80: note = Artificially Synthesized Probe
  source 1..80: mol_type = other DNA
cctattatatacatttccctcttgtccatcctgtttccctcttactcctttttcttagctgctttcctgtgcttccagct

SEQ ID NO: 103092 - DNA, 80 bp, synthetic construct
  misc_feature 1..80: note = Artificially Synthesized Probe
  source 1..80: mol_type = other DNA
tgcattttcttgtttcttattcatgtctcactgtgccatttgcgtattgcttcctctctcttctttactcagttgctgct

SEQ ID NO: 103093 - DNA, 80 bp, synthetic construct; identical to SEQ ID NO: 36091
  misc_feature 1..80: note = Artificially Synthesized Probe
  source 1..80: mol_type = other DNA

SEQ ID NO: 103094 - DNA, 80 bp, synthetic construct
  misc_feature 1..80: note = Artificially Synthesized Probe
  source 1..80: mol_type = other DNA
caatgtatgttcatttcttttctgtgatccatgtcctgttaaaggctgttctattataaacgtaaggctatgccctgtct

SEQ ID NO: 103095 - DNA, 80 bp, synthetic construct
  misc_feature 1..80: note = Artificially Synthesized Probe
  source 1..80: mol_type = other DNA
tcacaccactgcactccatcctgggcaacagagcgagactccgtctcaaaaaaaaagaaaaagagtaaggctataatggg

SEQ ID NO: 103096 - DNA, 80 bp, synthetic construct; identical to SEQ ID NO: 36092
  misc_feature 1..80: note = Artificially Synthesized Probe
  source 1..80: mol_type = other DNA

SEQ ID NO: 103097 - DNA, 80 bp, synthetic construct
  misc_feature 1..80: note = Artificially Synthesized Probe
  source 1..80: mol_type = other DNA
gagctttagtttttatgaaccagattccttttcagcacaccatcccaccgtcaagtttggtaacaaatgagaaaacaaat

SEQ ID NO: 103098 - DNA, 80 bp, synthetic construct
  misc_feature 1..80: note = Artificially Synthesized Probe
  source 1..80: mol_type = other DNA
ctataggggtgtgagataagtcttaggagctataattttatgtgaaattggcccagaatctagcataaggggcaagcttt

SEQ ID NO: 103099 - DNA, 80 bp, synthetic construct
  misc_feature 1..80: note = Artificially Synthesized Probe
  source 1..80: mol_type = other DNA
gttgatggctaatccactttccttccatgtggcatgtttaatcagctctgagagagaccgaactctgcaggtggaactgg

SEQ ID NO: 103100 - DNA, 80 bp, synthetic construct
  misc_feature 1..80: note = Artificially Synthesized Probe
  source 1..80: mol_type = other DNA
aaataagagttggggctcaaggttttcttaaaaaagatagactcttgaaaaattgcactctagttacattagtgccaact

SEQ ID NO: 103101 - DNA, 80 bp, synthetic construct; identical to SEQ ID NO: 36093
  misc_feature 1..80: note = Artificially Synthesized Probe
  source 1..80: mol_type = other DNA

SEQ ID NO: 103102 - DNA, 80 bp, synthetic construct
  misc_feature 1..80: note = Artificially Synthesized Probe
  source 1..80: mol_type = other DNA
gcacattttaaatcattctgttttagtttttccacttttattcattcttatccctagccccttctcgttccctcatccct

SEQ ID NO: 103103 - DNA, 80 bp, synthetic construct
  misc_feature 1..80: note = Artificially Synthesized Probe
  source 1..80: mol_type = other DNA
tgagagcattttttaaatcaaaagcatgcaagttttaagatgagagagcgggaaagagattgagagtctataagaatgac

SEQ ID NO: 103104 - DNA, 80 bp, synthetic construct
  misc_feature 1..80: note = Artificially Synthesized Probe
  source 1..80: mol_type = other DNA
ggaaggccaagttaaagaacagaggcaagaactatgaaagtgatcatagtcaacttttatctccaatactgtctcagagt

SEQ ID NO: 103105 - DNA, 80 bp, synthetic construct
  misc_feature 1..80: note = Artificially Synthesized Probe
  source 1..80: mol_type = other DNA
cttctagaatggtcttccagagtcagaattctctgtttacaaagataatttcaaatgtagtatccctctttacattcagt

SEQ ID NO: 103106 - DNA, 80 bp, synthetic construct; identical to SEQ ID NO: 36094
  misc_feature 1..80: note = Artificially Synthesized Probe
  source 1..80: mol_type = other DNA

SEQ ID NO: 103107 - DNA, 80 bp, synthetic construct
  misc_feature 1..80: note = Artificially Synthesized Probe
  source 1..80: mol_type = other DNA
ctaggttagaagctgaggtttcagttactttaaatatggaatttgggaacagggattgaggctttctagcacagtaaatg

SEQ ID NO: 103108 - DNA, 80 bp, synthetic construct
  misc_feature 1..80: note = Artificially Synthesized Probe
  source 1..80: mol_type = other DNA
catctgtttctgtaactttagctgtgtctataacagatagagcatcagtcaaactagagtggacagggagaaaatgctct

SEQ ID NO: 103109 - DNA, 80 bp, synthetic construct
  misc_feature 1..80: note = Artificially Synthesized Probe
  source 1..80: mol_type = other DNA
tttaaggaaggagataggaagtgtaggccgatccatccacttttcttagtctcccaattttaagagaccctttcttgcac

SEQ ID NO: 103110 - DNA, 80 bp, synthetic construct
  misc_feature 1..80: note = Artificially Synthesized Probe
  source 1..80: mol_type = other DNA
aattttactaatagaccaaccaaggaagccttctgaatcgctagtaagattcagctctgggtgattcttcatttctaatg

SEQ ID NO: 103111 - DNA, 80 bp, synthetic construct; identical to SEQ ID NO: 36095
  misc_feature 1..80: note = Artificially Synthesized Probe
  source 1..80: mol_type = other DNA

SEQ ID NO: 103112 - DNA, 80 bp, synthetic construct
  misc_feature 1..80: note = Artificially Synthesized Probe
  source 1..80: mol_type = other DNA
ctggattattttacctttgacagtcatttttcaatgacagtaattttaaataaagcatcgtgtgcttatagaacctgtgc

SEQ ID NO: 103113 - DNA, 80 bp, synthetic construct; identical to SEQ ID NO: 35927
  misc_feature 1..80: note = Artificially Synthesized Probe
  source 1..80: mol_type = other DNA

SEQ ID NO: 103114 - DNA, 80 bp, synthetic construct
  misc_feature 1..80: note = Artificially Synthesized Probe
  source 1..80: mol_type = other DNA
ggttctaagagttcagggtagatgaagtctgtaggttttagaagtatagagttgaaaagaacctccaagaggacttattt

SEQ ID NO: 103115 - DNA, 80 bp, synthetic construct; identical to SEQ ID NO: 36096
  misc_feature 1..80: note = Artificially Synthesized Probe
  source 1..80: mol_type = other DNA

SEQ ID NO: 103116 - DNA, 80 bp, synthetic construct
  misc_feature 1..80: note = Artificially Synthesized Probe
  source 1..80: mol_type = other DNA
cctcttctcttcattcagttgtggacagcagtaattttttcaggacctttgcttcttagaggaaatacatttttccttat

SEQ ID NO: 103117 - DNA, 80 bp, synthetic construct
  misc_feature 1..80: note = Artificially Synthesized Probe
  source 1..80: mol_type = other DNA
aaactctgtggccgatgtacataaaaaaacctatcacttttatgctcattcatcctcctaattcagtgtctgggtcatga

SEQ ID NO: 103118 - DNA, 80 bp, synthetic construct
  misc_feature 1..80: note = Artificially Synthesized Probe
  source 1..80: mol_type = other DNA
gagctacctaaagtcactttcctttggactgtaagccttagagagaacaataatacctttgcttttcttgaggtagtatt

SEQ ID NO: 103119 - DNA, 80 bp, synthetic construct; identical to SEQ ID NO: 36097
  misc_feature 1..80: note = Artificially Synthesized Probe
  source 1..80: mol_type = other DNA

SEQ ID NO: 103120 - DNA, 80 bp, synthetic construct
  misc_feature 1..80: note = Artificially Synthesized Probe
  source 1..80: mol_type = other DNA
tgtaccgtagaaagaatagctggaaatatggaactccaatgtggcaatacagtaataaacagaaggaatgagtcagtagg

SEQ ID NO: 103121 - DNA, 80 bp, synthetic construct
  misc_feature 1..80: note = Artificially Synthesized Probe
  source 1..80: mol_type = other DNA
taacaagcctgttgcttttaagtaatctaagtattaacagaaggtaagtcttcaacttctccctgttctcacctgggcca

SEQ ID NO: 103122 - DNA, 80 bp, synthetic construct
  misc_feature 1..80: note = Artificially Synthesized Probe
  source 1..80: mol_type = other DNA
aaggtaagtcttcaacttctccctgttctcacctgggccaagatcaattttctaaataaaaaatagctttgtaatttgtc

SEQ ID NO: 103123 - DNA, 80 bp, synthetic construct
  misc_feature 1..80: note = Artificially Synthesized Probe
  source 1..80: mol_type = other DNA
aaaaatctttatcatactgttttcctcttactaaaactggaagggtaaaatagaaagttcagcaacatcagaaaatgttg

SEQ ID NO: 103124 - DNA, 80 bp, synthetic construct; identical to SEQ ID NO: 36098
  misc_feature 1..80: note = Artificially Synthesized Probe
  source 1..80: mol_type = other DNA

SEQ ID NO: 103125 - DNA, 80 bp, synthetic construct
  misc_feature 1..80: note = Artificially Synthesized Probe
  source 1..80: mol_type = other DNA
tgatattttgttcattgcggattttttttgcgttactatttttctaaaatattgcattaaaatatgatttatcttgatta

SEQ ID NO: 103126 - DNA, 80 bp, synthetic construct
  misc_feature 1..80: note = Artificially Synthesized Probe
  source 1..80: mol_type = other DNA
aacatcagatgaagaaggaggtgagtgatatgttaaatgatcagaaacttggcattacattatttccaggaccatttccc

SEQ ID NO: 103127 - DNA, 80 bp, synthetic construct
  misc_feature 1..80: note = Artificially Synthesized Probe
  source 1..80: mol_type = other DNA
aggccaacagaaactatttggttttattcttaagatatttataaaaaaagtagagaaagcttgtatcttttttttcctta

SEQ ID NO: 103128 - DNA, 80 bp, synthetic construct
  misc_feature 1..80: note = Artificially Synthesized Probe
  source 1..80: mol_type = other DNA
taggctactttaccttaaaaaccctccttgctttctttgctgtaggagaatagcagaaagcacgacagaggtttcaggag

SEQ ID NO: 103129 - DNA, 80 bp, synthetic construct
  misc_feature 1..80: note = Artificially Synthesized Probe
  source 1..80: mol_type = other DNA
gggagtcctaatttacatgtgccttggttagcctaaggatagaagactgtagttgtattgaataattacccttttggaga

SEQ ID NO: 103130 - DNA, 80 bp, synthetic construct; identical to SEQ ID NO: 36099
  misc_feature 1..80: note = Artificially Synthesized Probe
  source 1..80: mol_type = other DNA

SEQ ID NO: 103131 - DNA, 80 bp, synthetic construct
  misc_feature 1..80: note = Artificially Synthesized Probe
  source 1..80: mol_type = other DNA
caatagttggttcatgacgtgaaaatgtgagcgttcttgtaatgaacgcatggcagtgtacctgggagtcagagtgaaat

SEQ ID NO: 103132 - DNA, 80 bp, synthetic construct
  misc_feature 1..80: note = Artificially Synthesized Probe
  source 1..80: mol_type = other DNA
actccttttctgtttatcccatattagtggcttaaaggaagataatgactacagagtagaattggggggaaatggtcttg

SEQ ID NO: 103133 - DNA, 80 bp, synthetic construct; identical to SEQ ID NO: 36100
  misc_feature 1..80: note = Artificially Synthesized Probe
  source 1..80: mol_type = other DNA

SEQ ID NO: 103134 - DNA, 80 bp, synthetic construct
  misc_feature 1..80: note = Artificially Synthesized Probe
  source 1..80: mol_type = other DNA
tcctgctggggaaacaagtattcagaaatgaagaagtgcaggtagaatcagtcaagatcattcagatagtaacatcaagt

SEQ ID NO: 103135 - DNA, 80 bp, synthetic construct
  misc_feature 1..80: note = Artificially Synthesized Probe
  source 1..80: mol_type = other DNA
ttctaagcacttcaaaatcagcaaaccctttaaagttcacaacagtatggagtgggtaacactcttaaccctaattatta

SEQ ID NO: 103136 - DNA, 80 bp, synthetic construct
  misc_feature 1..80: note = Artificially Synthesized Probe
  source 1..80: mol_type = other DNA
cctctatctcctaagaatgtaccgaagccagcaaataaaggatgcaataattctcttctgtataccacaagctctgagcc

SEQ ID NO: 103137 - DNA, 80 bp, synthetic construct
  misc_feature 1..80: note = Artificially Synthesized Probe
  source 1..80: mol_type = other DNA
cttcagtgataagaataccttatatttgcataacgcttacattttcacccaaggattttatggtcttatgttttagaggt

SEQ ID NO: 103138 - DNA, 80 bp, synthetic construct; identical to SEQ ID NO: 36101
  misc_feature 1..80: note = Artificially Synthesized Probe
  source 1..80: mol_type = other DNA

SEQ ID NO: 103139 - DNA, 80 bp, synthetic construct
  misc_feature 1..80: note = Artificially Synthesized Probe
  source 1..80: mol_type = other DNA
ttcgttgtgcagtaaaagtttagaaaagggtatcacacaagagaagttctctcatttatttaaaaaaatggaaaatggta

SEQ ID NO: 103140 - DNA, 80 bp, synthetic construct
  misc_feature 1..80: note = Artificially Synthesized Probe
  source 1..80: mol_type = other DNA
attcaaattggtaaaaggctgagcaacccttaaagctgccataatggaagaagactgtgagctagcttaaaaaagagaga

SEQ ID NO: 103141 - DNA, 80 bp, synthetic construct
  misc_feature 1..80: note = Artificially Synthesized Probe
  source 1..80: mol_type = other DNA
aggctgccaaagataagtggagggcagaaagtgtcagataaaaaccttcaagaccagtgatagtcaccctttccaattct

SEQ ID NO: 103142 - DNA, 80 bp, synthetic construct
  misc_feature 1..80: note = Artificially Synthesized Probe
  source 1..80: mol_type = other DNA
ggatccttctctagccccatgttcaaaagagaaacaatgtgaacagtctgttttttgtcactgagtgagacaattcattt

SEQ ID NO: 103143 - DNA, 80 bp, synthetic construct; identical to SEQ ID NO: 36102
  misc_feature 1..80: note = Artificially Synthesized Probe
  source 1..80: mol_type = other DNA

SEQ ID NO: 103144 - DNA, 80 bp, synthetic construct
  misc_feature 1..80: note = Artificially Synthesized Probe
  source 1..80: mol_type = other DNA
ctgttatcacagcatacttactacctcttagcacttccatgagatcagcctgggccattgcaaatatatagatgtgaact

SEQ ID NO: 103145 - DNA, 80 bp, synthetic construct
  misc_feature 1..80: note = Artificially Synthesized Probe
  source 1..80: mol_type = other DNA
tgagatgagcatttatttgtctccgtcgaattccttacggagataaggtaagccccttatctgtattgggtagtgaatgc

SEQ ID NO: 103146 - DNA, 80 bp, synthetic construct; identical to SEQ ID NO: 36103
  misc_feature 1..80: note = Artificially Synthesized Probe
  source 1..80: mol_type = other DNA

SEQ ID NO: 103147 - DNA, 80 bp, synthetic construct
  misc_feature 1..80: note = Artificially Synthesized Probe
  source 1..80: mol_type = other DNA
catagctcttggtcttaaaatgtatgaacagtcttaattttaatcaatataaggaggaagacacaccctagatttgtgct

SEQ ID NO: 103148 - DNA, 80 bp, synthetic construct
  misc_feature 1..80: note = Artificially Synthesized Probe
  source 1..80: mol_type = other DNA
aatgttttgttttggtttttgagacagcgtctggctctttcacccaggctggagcgcagtagcacagtctccactcactg

SEQ ID NO: 103149 - DNA, 80 bp, synthetic construct
  misc_feature 1..80: note = Artificially Synthesized Probe
  source 1..80: mol_type = other DNA
agaacattgctgtcattgcagaaagtcctcttggtcagtgctgccttagacctttgcccataccacaaactgcagctact

SEQ ID NO: 103150 - DNA, 80 bp, synthetic construct
  misc_feature 1..80: note = Artificially Synthesized Probe
  source 1..80: mol_type = other DNA
gaagggaggttagaggaagaaattagggaacaactgaatcctttggtgtcttgaatcttgactagacctgaaccttacta

SEQ ID NO: 103151 - DNA, 80 bp, synthetic construct; identical to SEQ ID NO: 36104
  misc_feature 1..80: note = Artificially Synthesized Probe
  source 1..80: mol_type = other DNA

SEQ ID NO: 103152 - DNA, 80 bp, synthetic construct
  misc_feature 1..80: note = Artificially Synthesized Probe
  source 1..80: mol_type = other DNA
gaagaaatcagagtcagcgggcaaaaagagtataatttaacctgctgtctggaagccatctgtgaagggaatcacttttc

SEQ ID NO: 103153 - DNA, 80 bp, synthetic construct
  misc_feature 1..80: note = Artificially Synthesized Probe
  source 1..80: mol_type = other DNA
tctgaggtctgatagtctcctgcagcccttgcggacttagtgagaagatatctttttacataaactacttctcagtcatc

SEQ ID NO: 103154 - DNA, 80 bp, synthetic construct
  misc_feature 1..80: note = Artificially Synthesized Probe
  source 1..80: mol_type = other DNA
agaagcatttttacttgcaagacgatggacacattccccttgggctttttgtaactgaaacgcaccacagaagacaggga

SEQ ID NO: 103155 - DNA, 80 bp, synthetic construct
  misc_feature 1..80: note = Artificially Synthesized Probe
  source 1..80: mol_type = other DNA
actcagtgatcagcagatggtacttcaacagcaatcccctgtcaaacctcagaacttgaggctgaaacattgcttccacc

SEQ ID NO: 103156 - DNA, 80 bp, synthetic construct; identical to SEQ ID NO: 36105
  misc_feature 1..80: note = Artificially Synthesized Probe
  source 1..80: mol_type = other DNA

SEQ ID NO: 103157 - DNA, 80 bp, synthetic construct
  misc_feature 1..80: note = Artificially Synthesized Probe
  source 1..80: mol_type = other DNA
aatcttttgggatttggcacttggggacatgagtagttgtctgggatacgtcatattctcaacagtttctttgtagtagt

SEQ ID NO: 103158 - DNA, 80 bp, synthetic construct
  misc_feature 1..80: note = Artificially Synthesized Probe
  source 1..80: mol_type = other DNA
tgagctccacttttccttttgcttgaacagcttctcctgagtcctccttaccgatggttgtgactttaattatatacatc

SEQ ID NO: 103159 - DNA, 80 bp, synthetic construct
  misc_feature 1..80: note = Artificially Synthesized Probe
  source 1..80: mol_type = other DNA
taacttcagaataaatgaacaggagacacagatatgaagaaagtttctgattgatatggtctgaagtactcctggtattg

SEQ ID NO: 103160 - DNA, 80 bp, synthetic construct
  misc_feature 1..80: note = Artificially Synthesized Probe
  source 1..80: mol_type = other DNA
ccatctgcctgcctcacctccgacagtgctgggattacaggcatgaggcgtggcaccctacccctatggcattaactcct

SEQ ID NO: 103161 - DNA, 80 bp, synthetic construct; identical to SEQ ID NO: 36106
  misc_feature 1..80: note = Artificially Synthesized Probe
  source 1..80: mol_type = other DNA

SEQ ID NO: 103162 - DNA, 80 bp, synthetic construct
  misc_feature 1..80: note = Artificially Synthesized Probe
  source 1..80: mol_type = other DNA
aagaatctcttgggcgagcaccatttttctttccatcacctttccttgaaaatatatcttcagctttgggtaggaggaat

SEQ ID NO: 103163 - DNA, 80 bp, synthetic construct
  misc_feature 1..80: note = Artificially Synthesized Probe
  source 1..80: mol_type = other DNA
aaatttgtttgcttgtttccaggaaaatggtcccttaaaggtagattttgagcttctccttgttatgtccttggaaggta

SEQ ID NO: 103164 - DNA, 80 bp, synthetic construct
  misc_feature 1..80: note = Artificially Synthesized Probe
  source 1..80: mol_type = other DNA
cttgctccttatgttttggactcagccacctcaggaagcctcaagtctggccatgatagtaattttccctagattatctc

SEQ ID NO: 103165 - DNA, 80 bp, synthetic construct
  misc_feature 1..80: note = Artificially Synthesized Probe
  source 1..80: mol_type = other DNA
aagttaatcaagaataaagattcaggcccaggtagtgtgcatctatagttgcagctactcaggaggctgaggcaagagaa

SEQ ID NO: 103166 - DNA, 80 bp, synthetic construct; identical to SEQ ID NO: 36107
  misc_feature 1..80: note = Artificially Synthesized Probe
  source 1..80: mol_type = other DNA

SEQ ID NO: 103167 - DNA, 80 bp, synthetic construct
  misc_feature 1..80: note = Artificially Synthesized Probe
  source 1..80: mol_type = other DNA
attccccctactctccctccccactccaccagcctctagtaaccaccattctactctttgcttctatgagttcaacttca

SEQ ID NO: 103168 - DNA, 80 bp, synthetic construct
  misc_feature 1..80: note = Artificially Synthesized Probe
  source 1..80: mol_type = other DNA
ttctttacccatttatctactgatggacctaggttggctctacatcttaacataaattatgaataatgctgtaatgaaca

SEQ ID NO: 103169 - DNA, 80 bp, synthetic construct
  misc_feature 1..80: note = Artificially Synthesized Probe
  source 1..80: mol_type = other DNA
aatgtctgtgttccgtttcctctgcattatctctaacatatcattcacctttttgataaatgccactccaacaggtgtga

SEQ ID NO: 103170 - DNA, 80 bp, synthetic construct; identical to SEQ ID NO: 36108
  misc_feature 1..80: note = Artificially Synthesized Probe
  source 1..80: mol_type = other DNA

SEQ ID NO: 103171 - DNA, 80 bp, synthetic construct
  misc_feature 1..80: note = Artificially Synthesized Probe
  source 1..80: mol_type = other DNA
agaaatacttgctttcatacatgatcaaaactaatgaaaaggctagatcctgagttacttttcaggcatttacatttaaa

SEQ ID NO: 103172 - DNA, 80 bp, synthetic construct; identical to SEQ ID NO: 35928
  misc_feature 1..80: note = Artificially Synthesized Probe
  source 1..80: mol_type = other DNA

SEQ ID NO: 103173 - DNA, 80 bp, synthetic construct
  misc_feature 1..80: note = Artificially Synthesized Probe
  source 1..80: mol_type = other DNA
gttagccaaagaaagtccactttgagatggaaatatgaaaacccaaattagcctggggaaaaatgagatccctaggcaat

SEQ ID NO: 103174 - DNA, 80 bp, synthetic construct; identical to SEQ ID NO: 36109
  misc_feature 1..80: note = Artificially Synthesized Probe
  source 1..80: mol_type = other DNA

SEQ ID NO: 103175 - DNA, 80 bp, synthetic construct
  misc_feature 1..80: note = Artificially Synthesized Probe
  source 1..80: mol_type = other DNA
aaataagggatgggattgtaagctttcagaagtggttttatttggtcccccttcctttattttgtcacaaatgctggggg

SEQ ID NO: 103176 - DNA, 80 bp, synthetic construct
  misc_feature 1..80: note = Artificially Synthesized Probe
  source 1..80: mol_type = other DNA
cttgagtggctttgtctaaggatctttcttctttgacctgggtgcgcatgtcttcacaacctcaactgctatgctactga

SEQ ID NO: 103177 - DNA, 80 bp, synthetic construct
  misc_feature 1..80: note = Artificially Synthesized Probe
  source 1..80: mol_type = other DNA
gtcagtcgttgatccatataagctgttctgggccctgctctcttcaatgtattggtgacctgaatggagatataaagcat

SEQ ID NO: 103178 - DNA, 80 bp, synthetic construct
  misc_feature 1..80: note = Artificially Synthesized Probe
  source 1..80: mol_type = other DNA
agagataaaagaaaacaacatgactcagcaacagctgtgggggaggggtggaaaattcagaggccaaaattgacccaaag

SEQ ID NO: 103179 - DNA, 80 bp, synthetic construct; identical to SEQ ID NO: 36110
  misc_feature 1..80: note = Artificially Synthesized Probe
  source 1..80: mol_type = other DNA

SEQ ID NO: 103180 - DNA, 80 bp, synthetic construct
  misc_feature 1..80: note = Artificially Synthesized Probe
  source 1..80: mol_type = other DNA
atttgtagagagagtttgtctggcagcatcagcacaaagataataaccaaaaagtgaggttggctgcttggcaggatggc

SEQ ID NO: 103181 - DNA, 80 bp, synthetic construct
  misc_feature 1..80: note = Artificially Synthesized Probe
  source 1..80: mol_type = other DNA
ggagttggagttacaggcagggccttaggctttgcgccctgatatcttaagccatcatctcccgccatccaggactcaag

SEQ ID NO: 103182 - DNA, 80 bp, synthetic construct; identical to SEQ ID NO: 36111
  misc_feature 1..80: note = Artificially Synthesized Probe
  source 1..80: mol_type = other DNA

SEQ ID NO: 103183 - DNA, 80 bp, synthetic construct
  misc_feature 1..80: note = Artificially Synthesized Probe
  source 1..80: mol_type = other DNA
taatggcctaacttcttcaaaccatgattttcttttagcttgtcaaggtggctttggagaaaagtctggcaactgtggag

SEQ ID NO: 103184 - DNA, 80 bp, synthetic construct
  misc_feature 1..80: note = Artificially Synthesized Probe
  source 1..80: mol_type = other DNA
ctgattttagttaagtaattcactgctgagacttcagattatgatgtaaagtgttctgcttaatagtgataaaagctgac

SEQ ID NO: 103185 - DNA, 80 bp, synthetic construct
  misc_feature 1..80: note = Artificially Synthesized Probe
  source 1..80: mol_type = other DNA
aagcaggattctcctcagtgtcccacatcaggtaggacattcttcccagggaaggggagcttgcaggtcatgaggcacca

SEQ ID NO: 103186 - DNA, 80 bp, synthetic construct
  misc_feature 1..80: note = Artificially Synthesized Probe
  source 1..80: mol_type = other DNA
gtcatacatatgacagtcatggtggaaacctccttgttacatgaccagtattgctgtttttaattgaccaaaacgtataa

SEQ ID NO: 103187 - DNA, 80 bp, synthetic construct; identical to SEQ ID NO: 36112
  misc_feature 1..80: note = Artificially Synthesized Probe
  source 1..80: mol_type = other DNA

SEQ ID NO: 103188 - DNA, 80 bp, synthetic construct
  misc_feature 1..80: note = Artificially Synthesized Probe
  source 1..80: mol_type = other DNA
ccctccctctcctctcagctctcactcataagtccttcaatcatagagtatcaattttaatcatctctgctgctttagta

SEQ ID NO: 103189 - DNA, 80 bp, synthetic construct
  misc_feature 1..80: note = Artificially Synthesized Probe
  source 1..80: mol_type = other DNA
attcactcccaggactataatcatcactgcctgtttaaagtacagctgtatgacttctaaatcatgccctgttgtttccc

SEQ ID NO: 103190 - DNA, 80 bp, synthetic construct
  misc_feature 1..80: note = Artificially Synthesized Probe
  source 1..80: mol_type = other DNA
tgacttgctcaaggttgcataatatctgtggctcccaatttctaacgtctaaaccttgcttctatactacatactttgtc

SEQ ID NO: 103191 - DNA, 80 bp, synthetic construct
  misc_feature 1..80: note = Artificially Synthesized Probe
  source 1..80: mol_type = other DNA
atctcttttgattctattgttgaacctacaatcaaaccatctatagctatccctgtggattattttcctttgtcctcaga

SEQ ID NO: 103192 - DNA, 80 bp, synthetic construct; identical to SEQ ID NO: 36113
  misc_feature 1..80: note = Artificially Synthesized Probe
  source 1..80: mol_type = other DNA

SEQ ID NO: 103193 - DNA, 80 bp, synthetic construct
  misc_feature 1..80: note = Artificially Synthesized Probe
  source 1..80: mol_type = other DNA
cctggattctgagaaattcaatctaggtgcatagcccactgctgatccttcaagttgtgaattacccatttcctgtgcat

SEQ ID NO: 103194 - DNA, 80 bp, synthetic construct
  misc_feature 1..80: note = Artificially Synthesized Probe
  source 1..80: mol_type = other DNA
taatctgaatgtgtatttataattccaaggctccttaatcaccttacgcacacggggtgaattcttcttatctggaaagc

SEQ ID NO: 103195 - DNA, 80 bp, synthetic construct
  misc_feature 1..80: note = Artificially Synthesized Probe
  source 1..80: mol_type = other DNA
tcgctgctaaaaatacaaaagttagctgggcgtggtggcacgtgcctgtagtcccagctactcgggaggctgaggcagca

SEQ ID NO: 103196 - DNA, 80 bp, synthetic construct
  misc_feature 1..80: note = Artificially Synthesized Probe
  source 1..80: mol_type = other DNA
gctgggaccacaggcacccgccaccacgtccagctaattttttgtatttttagtagagatggggtttcaccgtgttagcc

SEQ ID NO: 103197 - DNA, 80 bp, synthetic construct
  misc_feature 1..80: note = Artificially Synthesized Probe
  source 1..80: mol_type = other DNA
ccttagctctacagctttttaaacaagcaccttatgggattctgctgttggtatttcttaggtctgcagctagtacagca

SEQ ID NO: 103198 - DNA, 80 bp, synthetic construct; identical to SEQ ID NO: 36114
  misc_feature 1..80: note = Artificially Synthesized Probe
  source 1..80: mol_type = other DNA

SEQ ID NO: 103199 - DNA, 80 bp, synthetic construct
  misc_feature 1..80: note = Artificially Synthesized Probe
  source 1..80: mol_type = other DNA
gaataggacagacacagtcctgctctcaagaaggttatctctatcacgtgagccagacataaagcaaacaattatctaag

SEQ ID NO: 103200 - DNA, 80 bp, synthetic construct
  misc_feature 1..80: note = Artificially Synthesized Probe
  source 1..80: mol_type = other DNA
actctggtttattccagaggctactaaaaattagaacatatgaggctatggggcacaagtaaagaaaactagcctgcatg

SEQ ID NO: 103201 - DNA, 80 bp, synthetic construct; identical to SEQ ID NO: 36115
  misc_feature 1..80: note = Artificially Synthesized Probe
  source 1..80: mol_type = other DNA

SEQ ID NO: 103202 - DNA, 80 bp, synthetic construct
  misc_feature 1..80: note = Artificially Synthesized Probe
  source 1..80: mol_type = other DNA
cttcaggctgagttcagaaagctccagggaaaactgaagaatgcccacaatatcatcaacctcctcaaagaacaacttgt

SEQ ID NO: 103203 - DNA, 80 bp, synthetic construct
  misc_feature 1..80: note = Artificially Synthesized Probe
  source 1..80: mol_type = other DNA
atgcccacaatatcatcaacctcctcaaagaacaacttgtgctgagtagcaaggaagggaatagtaaacttactccagag

SEQ ID NO: 103204 - DNA, 80 bp, synthetic construct
  misc_feature 1..80: note = Artificially Synthesized Probe
  source 1..80: mol_type = other DNA
aagtaagtgtgggcttagattgagtgaaaaacaattggagaagggcttgagatgacagtgtttaccttaaaacattctcc

SEQ ID NO: 103205 - DNA, 80 bp, synthetic construct
  misc_feature 1..80: note = Artificially Synthesized Probe
  source 1..80: mol_type = other DNA
aaaaccaatggctgcccctgagatacttaatattgtcgggaaagatggcacacaaacaggtaattttaacaggatgtggt

SEQ ID NO: 103206 - DNA, 80 bp, synthetic construct; identical to SEQ ID NO: 36116
  misc_feature 1..80: note = Artificially Synthesized Probe
  source 1..80: mol_type = other DNA

SEQ ID NO: 103207 - DNA, 80 bp, synthetic construct
  misc_feature 1..80: note = Artificially Synthesized Probe
  source 1..80: mol_type = other DNA
tctggaaagcaagtcactgccaaatggcatgagaagtgctgtgacagacttgagtaaagtccacagggttcagaaggggc

SEQ ID NO: 103208 - DNA, 80 bp, synthetic construct
  misc_feature 1..80: note = Artificially Synthesized Probe
  source 1..80: mol_type = other DNA
caaacaacgctatcaagatctccaggagaagctgctgctatcagaagccactgtctttgctcaggctaacgagctggaga

SEQ ID NO: 103209 - DNA, 80 bp, synthetic construct
  misc_feature 1..80: note = Artificially Synthesized Probe
  source 1..80: mol_type = other DNA
atatttaggggtgaagaatctacatcttactctcaaatggttcatcaaaataatactaatgattgtgtctgtgtgcttgt

SEQ ID NO: 103210 - DNA, 80 bp, synthetic construct
  misc_feature 1..80: note = Artificially Synthesized Probe
  source 1..80: mol_type = other DNA
ggctagtgcaacttggacatttggttttatttaattttagttgatgtagtataaagtggccatatgtggctgctaactac

SEQ ID NO: 103211 - DNA, 80 bp, synthetic construct; identical to SEQ ID NO: 36117
  misc_feature 1..80: note = Artificially Synthesized Probe
  source 1..80: mol_type = other DNA

SEQ ID NO: 103212 - DNA, 80 bp, synthetic construct
  misc_feature 1..80: note = Artificially Synthesized Probe
  source 1..80: mol_type = other DNA
ctgtaacacctgcttctcttcccaagcaggtgaatccttggtgaagcaggacagcaagcagatccaggtggacctccagg

SEQ ID NO: 103213 - DNA, 80 bp, synthetic construct
  misc_feature 1..80: note = Artificially Synthesized Probe
  source 1..80: mol_type = other DNA
agaggaggacaggaggttaataggagaaatcttacccaaaatgaggctgagtataagtttgaatttctacaattagtttt

SEQ ID NO: 103214 - DNA, 80 bp, synthetic construct
  misc_feature 1..80: note = Artificially Synthesized Probe
  source 1..80: mol_type = other DNA
ccacccaccacattgaaaaccagaagagaagaaaaacacaatctctctcattcttgaggcagtgtagtgtggcagttaag

SEQ ID NO: 103215 - DNA, 80 bp, synthetic construct
  misc_feature 1..80: note = Artificially Synthesized Probe
  source 1..80: mol_type = other DNA
cagtgcctggcatctggtaaaatgccatggattagttctcattctgactaccactgccctaatacactgatgttaacatg

SEQ ID NO: 103216 - DNA, 80 bp, synthetic construct; identical to SEQ ID NO: 36118
  misc_feature 1..80: note = Artificially Synthesized Probe
  source 1..80: mol_type = other DNA

SEQ ID NO: 103217 - DNA, 80 bp, synthetic construct
  misc_feature 1..80: note = Artificially Synthesized Probe
  source 1..80: mol_type = other DNA
ttgtatttgaatgcctagtacagtgtcagggttgaataaagtactacttcaactttttccctagtaattattgtcctcat

SEQ ID NO: 103218 - DNA, 80 bp, synthetic construct
  misc_feature 1..80: note = Artificially Synthesized Probe
  source 1..80: mol_type = other DNA
aacactggctagttcctctgagaggaagcccttggagaaccagctagggaagcaggaagagttccgggtatatggaaagt

SEQ ID NO: 103219 - DNA, 80 bp, synthetic construct; identical to SEQ ID NO: 36119
  misc_feature 1..80: note = Artificially Synthesized Probe
  source 1..80: mol_type = other DNA

SEQ ID NO: 103220 - DNA, 80 bp, synthetic construct; identical to SEQ ID NO: 35929
  misc_feature 1..80: note = Artificially Synthesized Probe
  source 1..80: mol_type = other DNA

SEQ ID NO: 103221 - DNA, 80 bp, synthetic construct
  misc_feature 1..80: note = Artificially Synthesized Probe
  source 1..80: mol_type = other DNA
cttgattgaaaatgtgtaagttcatgcttggcgtagggtagctcaggcagttggaagaaagaacatgtctgggtattcac

SEQ ID NO: 103222 - DNA, 80 bp, synthetic construct
  misc_feature 1..80: note = Artificially Synthesized Probe
  source 1..80: mol_type = other DNA
gatatattagtaaagatggtatagtatagtagtaatactggaatcagactacctacctctggtgcttactacccatgcaa

SEQ ID NO: 103223 - DNA, 80 bp, synthetic construct
  misc_feature 1..80: note = Artificially Synthesized Probe
  source 1..80: mol_type = other DNA
ggtagaacacctgaggtcaggtgttcgagaccagcctacccaacacggtgaaaccccatctctactaaaaatacaaagat

SEQ ID NO: 103224 - DNA, 80 bp, synthetic construct; identical to SEQ ID NO: 36120
  misc_feature 1..80: note = Artificially Synthesized Probe
  source 1..80: mol_type = other DNA

SEQ ID NO: 103225 - DNA, 80 bp, synthetic construct
  misc_feature 1..80: note = Artificially Synthesized Probe
  source 1..80: mol_type = other DNA
gggtctcttgttttgggtcccatcagttgatggtatgagcgtttaaatgatggccatcattgcaaaatgtagtcagccac

SEQ ID NO: 103226 - DNA, 80 bp, synthetic construct
  misc_feature 1..80: note = Artificially Synthesized Probe
  source 1..80: mol_type = other DNA
ctatgtgatactggtgctgtaagggatgtaaaatgcagaactatgtttattctcacagaccttatgatttatctagggac

SEQ ID NO: 103227 - DNA, 80 bp, synthetic construct
  misc_feature 1..80: note = Artificially Synthesized Probe
  source 1..80: mol_type = other DNA
cgagtagctgggattacaggcatgtgccactatgctcagctcattttttttgtatttttagtagaggcagggtttcacca

SEQ ID NO: 103228 - DNA, 80 bp, synthetic construct
  misc_feature 1..80: note = Artificially Synthesized Probe
  source 1..80: mol_type = other DNA
actttatcagggtagaatttactcttaaatacctcctatggcttatgtgccagaattcagcttgggggagttccttagag

SEQ ID NO: 103229 - DNA, 80 bp, synthetic construct; identical to SEQ ID NO: 36121
  misc_feature 1..80: note = Artificially Synthesized Probe
  source 1..80: mol_type = other DNA

SEQ ID NO: 103230 - DNA, 80 bp, synthetic construct
  misc_feature 1..80: note = Artificially Synthesized Probe
  source 1..80: mol_type = other DNA
catctccactgcaactttttatcctaaggtcctgtttctatttcatttcctggggctaatacaggatcaagactgctcag

SEQ ID NO: 103231 - DNA, 80 bp, synthetic construct
  misc_feature 1..80: note = Artificially Synthesized Probe
  source 1..80: mol_type = other DNA
agtaggggacatgagatggaagggctttgttataggaggaagagccctgaaccaagaactacaagactcaagctctggcc

SEQ ID NO: 103232 - DNA, 80 bp, synthetic construct
  misc_feature 1..80: note = Artificially Synthesized Probe
  source 1..80: mol_type = other DNA
gtgatcctcccacctcagcctccagagtagctggaactagtggtttgcactaccatccctagataatttttaaatttttt

SEQ ID NO: 103233 - DNA, 80 bp, synthetic construct
  misc_feature 1..80: note = Artificially Synthesized Probe
  source 1..80: mol_type = other DNA
taggcactggctgcagtagttcaagggctacattggttattattggggtcttctactcagaatttccagcgactatccaa

SEQ ID NO: 103234 - DNA, 80 bp, synthetic construct; identical to SEQ ID NO: 36122
  misc_feature 1..80: note = Artificially Synthesized Probe
  source 1..80: mol_type = other DNA

SEQ ID NO: 103235 - DNA, 80 bp, synthetic construct
  misc_feature 1..80: note = Artificially Synthesized Probe
  source 1..80: mol_type = other DNA
aatgcgggaagtgggaccagcctaatttcttatcgtctctttctaaatttggtttacagaggatcataaaagtgagaaag

SEQ ID NO: 103236 - DNA, 80 bp, synthetic construct
  misc_feature 1..80: note = Artificially Synthesized Probe
  source 1..80: mol_type = other DNA
acctcactgttgtttttaactaaattctttcttcccttttggttgaatcatattggcacattaattctccaggcttagta

SEQ ID NO: 103237 - DNA, 80 bp, synthetic construct; identical to SEQ ID NO: 36123
  misc_feature 1..80: note = Artificially Synthesized Probe
  source 1..80: mol_type = other DNA

SEQ ID NO: 103238 - DNA, 80 bp, synthetic construct
  misc_feature 1..80: note = Artificially Synthesized Probe
  source 1..80: mol_type = other DNA
tacgggctcagagtccgttgtagccactagttggggttctttgtgtcatgcttgtgtctcagactacataaatgcttctg

SEQ ID NO: 103239 - DNA, 80 bp, synthetic construct
  misc_feature 1..80: note = Artificially Synthesized Probe
  source 1..80: mol_type = other DNA
tcttggatgttgggacagtggtttgttctgtgtttctcaatgcttgctttcaatttttatacttgtcttgttggagatgg

SEQ ID NO: 103240 - DNA, 80 bp, synthetic construct
  misc_feature 1..80: note = Artificially Synthesized Probe
  source 1..80: mol_type = other DNA
tccctaagcagaggtgggttatttccataattatctgcaggcatggtccccttggcttacttggcttttcctatgagcca

SEQ ID NO: 103241 - DNA, 80 bp, synthetic construct; identical to SEQ ID NO: 36124
  misc_feature 1..80: note = Artificially Synthesized Probe
  source 1..80: mol_type = other DNA

SEQ ID NO: 103242 - DNA, 80 bp, synthetic construct
  misc_feature 1..80: note = Artificially Synthesized Probe
  source 1..80: mol_type = other DNA
caagtgccatgcacaggcaccagtggatcaggatctttgctctgctcctgactctacaagttacctctgtcaccgtggcc

SEQ ID NO: 103243 - DNA, 80 bp, synthetic construct
  misc_feature 1..80: note = Artificially Synthesized Probe
  source 1..80: mol_type = other DNA
tgagcagtgttccctaagtatatttgggtgtccacagatgctgctagtcttgcctgatatttttggagttgccattttca

SEQ ID NO: 103244 - DNA, 80 bp, synthetic construct
  misc_feature 1..80: note = Artificially Synthesized Probe
  source 1..80: mol_type = other DNA
atctgaactaggatcatgcattccatttagttattgttatcactatggatttttaaagcagtctagattgattgacacat

SEQ ID NO: 103245 - DNA, 80 bp, synthetic construct
  misc_feature 1..80: note = Artificially Synthesized Probe
  source 1..80: mol_type = other DNA
caggattccagttctctgtagaacatcatacgttttctttcattcatggattttatagattccatccatcattcgagtca

SEQ ID NO: 103246 - DNA, 80 bp, synthetic construct; identical to SEQ ID NO: 36125
  misc_feature 1..80: note = Artificially Synthesized Probe
  source 1..80: mol_type = other DNA

SEQ ID NO: 103247 - DNA, 80 bp, synthetic construct
  misc_feature 1..80: note = Artificially Synthesized Probe
  source 1..80: mol_type = other DNA
tcattttatcctgggagcaaagaggcaaaatgtttctcccaggattacaacagccataggatgaaaagaaattcacatct

SEQ ID NO: 103248 - DNA, 80 bp, synthetic construct
  misc_feature 1..80: note = Artificially Synthesized Probe
  source 1..80: mol_type = other DNA
accattaatggatgtatgaatggattggcagtccttgatatgtacatagtgcatatcttgggggcagttaaaggggtgca

SEQ ID NO: 103249 - DNA, 80 bp, synthetic construct
  misc_feature 1..80: note = Artificially Synthesized Probe
  source 1..80: mol_type = other DNA
tagaggtgctcccagaaagcacagtgctttcttctgctgccctcatttccctgaaagcaattcaactaaaatcttaagga

SEQ ID NO: 103250 - DNA, 80 bp, synthetic construct; identical to SEQ ID NO: 36126
  misc_feature 1..80: note = Artificially Synthesized Probe
  source 1..80: mol_type = other DNA

SEQ ID NO: 103251 - DNA, 80 bp, synthetic construct
  misc_feature 1..80: note = Artificially Synthesized Probe
  source 1..80: mol_type = other DNA
attgcttttagggaagaggaaacaattttaaacattgaaccttgccagggtttctaaaaacctgtctgtagatgggctgc

SEQ ID NO: 103252 - DNA, 80 bp, synthetic construct
  misc_feature 1..80: note = Artificially Synthesized Probe
  source 1..80: mol_type = other DNA
gcctagacagaatcaagaaggcctaaagaatctacatatattagaagtttttgctatgtgatttaaatgcccagaaggat

SEQ ID NO: 103253 - DNA, 80 bp, synthetic construct
  misc_feature 1..80: note = Artificially Synthesized Probe
  source 1..80: mol_type = other DNA
taatgaaaatttccccacagcctttgttcacatctctcctactcaggatgggacctgatgctgtcaaagaggagttctag

SEQ ID NO: 103254 - DNA, 80 bp, synthetic construct
  misc_feature 1..80: note = Artificially Synthesized Probe
  source 1..80: mol_type = other DNA
ctggtcccagaaatgtatttattgaccctaacatcagtcccttcaatttttgagaactgatatctatgttcaaatcaagg

SEQ ID NO: 103255 - DNA, 80 bp, synthetic construct
  misc_feature 1..80: note = Artificially Synthesized Probe
  source 1..80: mol_type = other DNA
ctcaataatgccaccttaccttctttagccaattgctttcaagatgaacacagaggatatatgcaggatagccctggcag

SEQ ID NO: 103256 - DNA, 80 bp, synthetic construct; identical to SEQ ID NO: 36127
  misc_feature 1..80: note = Artificially Synthesized Probe
  source 1..80: mol_type = other DNA

SEQ ID NO: 103257 - DNA, 80 bp, synthetic construct
  misc_feature 1..80: note = Artificially Synthesized Probe
  source 1..80: mol_type = other DNA
gctacagatgctgcagaagcagttgggagaaagtgagcacttctgcatttgtgtgcttgcgattggcagccccacactgt

SEQ ID NO: 103258 - DNA, 80 bp, synthetic construct
  misc_feature 1..80: note = Artificially Synthesized Probe
  source 1..80: mol_type = other DNA
atgttcacgaggctctagacctggtgctctcacactgtagacagtgttggataccaccaagtatgctgaatccctgacag

SEQ ID NO: 103259 - DNA, 80 bp, synthetic construct; identical to SEQ ID NO: 36128
  misc_feature 1..80: note = Artificially Synthesized Probe
  source 1..80: mol_type = other DNA

SEQ ID NO: 103260 - DNA, 80 bp, synthetic construct
  misc_feature 1..80: note = Artificially Synthesized Probe
  source 1..80: mol_type = other DNA
tgtatttgtaggctggatgctcatcataaatttagtgtgctggtggtcactgatagcttagaaaaaaatgacaaccttca

SEQ ID NO: 103261 - DNA, 80 bp, synthetic construct
  misc_feature 1..80: note = Artificially Synthesized Probe
  source 1..80: mol_type = other DNA
aacagccaagaatttgcatccccctccctacagccccaaatgtcatgtggaccagcatatttctttccttcttcctcttt

SEQ ID NO: 103262 - DNA, 80 bp, synthetic construct
  misc_feature 1..80: note = Artificially Synthesized Probe
  source 1..80: mol_type = other DNA
acctggctaatttttgtattttttgtagagacagggtttcgccatgttgccaagactggtctagagctcctgagctcaag

SEQ ID NO: 103263 - DNA, 80 bp, synthetic construct; identical to SEQ ID NO: 35930
  misc_feature 1..80: note = Artificially Synthesized Probe
  source 1..80: mol_type = other DNA

SEQ ID NO: 103264 - DNA, 80 bp, synthetic construct; identical to SEQ ID NO: 36129
  misc_feature 1..80: note = Artificially Synthesized Probe
  source 1..80: mol_type = other DNA

SEQ ID NO: 103265 - DNA, 80 bp, synthetic construct
  misc_feature 1..80: note = Artificially Synthesized Probe
  source 1..80: mol_type = other DNA
taaaacttgttattttagcagttctggcaccaacaatgaatgggcaacaaatgtgtcccatgacaaatggcaagagtatt

SEQ ID NO: 103266 - DNA, 80 bp, synthetic construct
  misc_feature 1..80: note = Artificially Synthesized Probe
  source 1..80: mol_type = other DNA
tttgggttaaattggaattacatcaagtctgaggccattgaccggagttcaaatggtcccagcctagatgaggaagattg

SEQ ID NO: 103267 - DNA, 80 bp, synthetic construct
  misc_feature 1..80: note = Artificially Synthesized Probe
  source 1..80: mol_type = other DNA
ctttgcatggtttagagcatgtactgtgtattgtgtggccaatggactggaacatgagaatactgatcattgttactgat

SEQ ID NO: 103268 - DNA, 80 bp, synthetic construct
  misc_feature 1..80: note = Artificially Synthesized Probe
  source 1..80: mol_type = other DNA
cggatggggttgaaggcagtttgaaagaggtaggaaatcatgtatttgttgcattccttctaaaatgtaggtgcttaaat

SEQ ID NO: 103269 - DNA, 80 bp, synthetic construct; identical to SEQ ID NO: 36130
  misc_feature 1..80: note = Artificially Synthesized Probe
  source 1..80: mol_type = other DNA

SEQ ID NO: 103270 - DNA, 80 bp, synthetic construct
  misc_feature 1..80: note = Artificially Synthesized Probe
  source 1..80: mol_type = other DNA
gcttctgaattttctcctaaactgtgtctctgcccacctctttcctcatctcccccatgctaggcttctttttacagaga

SEQ ID NO: 103271 - DNA, 80 bp, synthetic construct
  misc_feature 1..80: note = Artificially Synthesized Probe
  source 1..80: mol_type = other DNA
caggagtgatgacattttgcagctccttgagtcatgttggatgggatccaaataaatacttgccttacataggcccttcc

SEQ ID NO: 103272 - DNA, 80 bp, synthetic construct; identical to SEQ ID NO: 36131
  misc_feature 1..80: note = Artificially Synthesized Probe
  source 1..80: mol_type = other DNA

SEQ ID NO: 103273 - DNA, 80 bp, synthetic construct
  misc_feature 1..80: note = Artificially Synthesized Probe
  source 1..80: mol_type = other DNA
agccttagtctaattagtataccaaagtgaactgggatctctgacattccacatgtctccttttagtctctattcttagc

SEQ ID NO: 103274 - DNA, 80 bp, synthetic construct
  misc_feature 1..80: note = Artificially Synthesized Probe
  source 1..80: mol_type = other DNA
aatgaatgagataatgcatcagaaatactgtgtacattttaaggcattgtcccagttgtctattcctgcataaacacaca

SEQ ID NO: 103275 - DNA, 80 bp, synthetic construct
  misc_feature 1..80: note = Artificially Synthesized Probe
  source 1..80: mol_type = other DNA
cagcctcactctcctccaaggggcaccatagaactgggaagaatcctagagcctgggtacctgggcagcagtggcaagtg

SEQ ID NO: 103276 - DNA, 80 bp, synthetic construct
  misc_feature 1..80: note = Artificially Synthesized Probe
  source 1..80: mol_type = other DNA
ggactatttcattcctcctccatccctggctcacagagtggatataaaatgcaagagctgtatcagggctcaatcctttc

SEQ ID NO: 103277 - DNA, 80 bp, synthetic construct
  misc_feature 1..80: note = Artificially Synthesized Probe
  source 1..80: mol_type = other DNA
tctttgcagcccactctcttagacccttccagaatgccaggcatagatgggactttcttccatcagtcaggacttgtcac

SEQ ID NO: 103278 - DNA, 80 bp, synthetic construct; identical to SEQ ID NO: 36132
  misc_feature 1..80: note = Artificially Synthesized Probe
  source 1..80: mol_type = other DNA

SEQ ID NO: 103279 - DNA, 80 bp, synthetic construct
  misc_feature 1..80: note = Artificially Synthesized Probe
  source 1..80: mol_type = other DNA
ttctttctaagggtgggaggaagggctttgtcccttgctaaagaatgctcactcacgtgtcagtaagaagaaaggtagag

SEQ ID NO: 103280 - DNA, 80 bp, synthetic construct
  misc_feature 1..80: note = Artificially Synthesized Probe
  source 1..80: mol_type = other DNA
tgactgtcatgtgtttgaaagcacattgactgtttaaacaaaactaccattcttttgggtgtccgtgtgagaggacacag

SEQ ID NO: 103281 - DNA, 80 bp, synthetic construct; identical to SEQ ID NO: 36133
  misc_feature 1..80: note = Artificially Synthesized Probe
  source 1..80: mol_type = other DNA

SEQ ID NO: 103282 - DNA, 80 bp, synthetic construct
  misc_feature 1..80: note = Artificially Synthesized Probe
  source 1..80: mol_type = other DNA
tatctgagtttagagagtaactctctttaaggcagaactacgtctgatgcccagagtcacctgacttctcaccccatact

SEQ ID NO: 103283 - DNA, 80 bp, synthetic construct
  misc_feature 1..80: note = Artificially Synthesized Probe
  source 1..80: mol_type = other DNA
tattcagcttccttgccaatgctttggtctcacatgataaatcagaaagatgagaaatggaaaatctgggtcactggcct

SEQ ID NO: 103284 - DNA, 80 bp, synthetic construct
  misc_feature 1..80: note = Artificially Synthesized Probe
  source 1..80: mol_type = other DNA
tctttccatatgttgttgtcctgcctataccacagcagcagctgtttagggagatcgagcctcctgcaccattgcagtta

SEQ ID NO: 103285 - DNA, 80 bp, synthetic construct
  misc_feature 1..80: note = Artificially Synthesized Probe
  source 1..80: mol_type = other DNA
gggcagtatctttgagagataacgaatgggaaacttttgaaagtttctgttacccaaatgtctactttctgggacaggat

SEQ ID NO: 103286 - DNA, 80 bp, synthetic construct
  misc_feature 1..80: note = Artificially Synthesized Probe
  source 1..80: mol_type = other DNA
cgaagacttcaggctcaactgagtcatgtttccagaggtacgtggtcaaaacccacaaactgtggtcactcttaagtttc

SEQ ID NO: 103287 - DNA, 80 bp, synthetic construct
  misc_feature 1..80: note = Artificially Synthesized Probe
  source 1..80: mol_type = other DNA
tccccagaagcgaagagctctaggaaatccatcatttctgtacaagcccacctgcatatatccagagtcacaagctatca

SEQ ID NO: 103288 - DNA, 80 bp, synthetic construct; identical to SEQ ID NO: 36134
  misc_feature 1..80: note = Artificially Synthesized Probe
  source 1..80: mol_type = other DNA

SEQ ID NO: 103289 - DNA, 80 bp, synthetic construct
  misc_feature 1..80: note = Artificially Synthesized Probe
  source 1..80: mol_type = other DNA
gcgctcacaggtgggcatcatttctcgtgtggctgggaggcagctgaccttggtgttagtctacttgatcagatcaatgt

SEQ ID NO: 103290 - DNA, 80 bp, synthetic construct
  misc_feature 1..80: note = Artificially Synthesized Probe
  source 1..80: mol_type = other DNA
atttaattaattgatttctgtattagcgagaagatttgagaggaaaggtcactgctgggggacgataacaaaagttaaca

SEQ ID NO: 103291 - DNA, 80 bp, synthetic construct; identical to SEQ ID NO: 36135
  misc_feature 1..80: note = Artificially Synthesized Probe
  source 1..80: mol_type = other DNA

SEQ ID NO: 103292 - DNA, 80 bp, synthetic construct
  misc_feature 1..80: note = Artificially Synthesized Probe
  source 1..80: mol_type = other DNA
cagaatttctctaagagcaaggtaggacagattaaataagtggcatgaagggttttgcaaagagagagaggcaccatgct

SEQ ID NO: 103293 - DNA, 80 bp, synthetic construct
  misc_feature 1..80: note = Artificially Synthesized Probe
  source 1..80: mol_type = other DNA
agagcactcccaggaaacagaaagcctgagggaggctctgctgtcctctcgatcccaccttcaagagctggaaaaggagc

SEQ ID NO: 103294 - DNA, 80 bp, synthetic construct; identical to SEQ ID NO: 36136
  misc_feature 1..80: note = Artificially Synthesized Probe
  source 1..80: mol_type = other DNA

SEQ ID NO: 103295 - DNA, 80 bp, synthetic construct; identical to SEQ ID NO: 35931
  misc_feature 1..80: note = Artificially Synthesized Probe
  source 1..80: mol_type = other DNA

SEQ ID NO: 103296 - DNA, 80 bp, synthetic construct
  misc_feature 1..80: note = Artificially Synthesized Probe
  source 1..80: mol_type = other DNA
cttcagtatatcagagacatgaaaaagaagggttcccatgcttccaattagatataggacattagtctcaccatcaccta

SEQ ID NO: 103297 - DNA, 80 bp, synthetic construct
  misc_feature 1..80: note = Artificially Synthesized Probe
  source 1..80: mol_type = other DNA
ttgacctccctcagcctccatttccatatctgcgaaataaaagtgatagtcttcatgaccccctgagttgacatctgggg

SEQ ID NO: 103298 - DNA, 80 bp, synthetic construct
  misc_feature 1..80: note = Artificially Synthesized Probe
  source 1..80: mol_type = other DNA
tgaagagaaacagcagctctttgagtccctccagtcagagctacaaatctacgaggcactttatggcaattccaagaagg

SEQ ID NO: 103299 - DNA, 80 bp, synthetic construct; identical to SEQ ID NO: 36137
  misc_feature 1..80: note = Artificially Synthesized Probe
  source 1..80: mol_type = other DNA

SEQ ID NO: 103300 - DNA, 80 bp, synthetic construct
  misc_feature 1..80: note = Artificially Synthesized Probe
  source 1..80: mol_type = other DNA
tccctagtgacatctggcgctcagcttattgccctctcatgtaattttcataaatcctgatttagtttcctgattttcta

SEQ ID NO: 103301 - DNA, 80 bp, synthetic construct
  misc_feature 1..80: note = Artificially Synthesized Probe
  source 1..80: mol_type = other DNA
ttaaaagacacaaaaacaaaaacaaaaaaaccttatagaaataccactaataggacctaaatttcaatcctggatttaaa

SEQ ID NO: 103302 - DNA, 80 bp, synthetic construct
  misc_feature 1..80: note = Artificially Synthesized Probe
  source 1..80: mol_type = other DNA
agtcacagcaggctggaacagaggacgacatcaatgtcgtgaaatttagcaaagataaaaagcaaaatcctgagcttgat

SEQ ID NO: 103303 - DNA, 80 bp, synthetic construct; identical to SEQ ID NO: 36138
  misc_feature 1..80: note = Artificially Synthesized Probe
  source 1..80: mol_type = other DNA

SEQ ID NO: 103304 - DNA, 80 bp, synthetic construct
  misc_feature 1..80: note = Artificially Synthesized Probe
  source 1..80: mol_type = other DNA
gtattttatgtccctccagaaggctaaacaaagagtgaagggcagtggaagttagattagaattatcataaatcctgatt

SEQ ID NO: 103305 - DNA, 80 bp, synthetic construct
  misc_feature 1..80: note = Artificially Synthesized Probe
  source 1..80: mol_type = other DNA
ggatggtggagcagagtcaccaaatcttgaaagctcacaggtcagggtaaaagttgacattctgtatagtagataatgaa

SEQ ID NO: 103306 - DNA, 80 bp, synthetic construct
  misc_feature 1..80: note = Artificially Synthesized Probe
  source 1..80: mol_type = other DNA
ggtctagtgatattctggcacattaagagatgacagtctaatataaggtgctattgggaagatgaaagggtatagataga

SEQ ID NO: 103307 - DNA, 80 bp, synthetic construct
  misc_feature 1..80: note = Artificially Synthesized Probe
  source 1..80: mol_type = other DNA
ttaggcactcactcacaggagaccgggaatatttttccttctaccagagaaaaataaaattgttttcatcaatactgttt

SEQ ID NO: 103308 - DNA, 80 bp, synthetic construct
  misc_feature 1..80: note = Artificially Synthesized Probe
  source 1..80: mol_type = other DNA
aaaattggttcatcctgagctacctttcctttcatgcttttctccctgccttttaggactcatttcaaagctacaaccac

SEQ ID NO: 103309 - DNA, 80 bp, synthetic construct; identical to SEQ ID NO: 36139
  misc_feature 1..80: note = Artificially Synthesized Probe
  source 1..80: mol_type = other DNA

SEQ ID NO: 103310 - DNA, 80 bp, synthetic construct
  misc_feature 1..80: note = Artificially Synthesized Probe
  source 1..80: mol_type = other DNA
tagccatgtggtgaatggaggtaaatatatatacatatatatatttatatatatgtgcatgtatatatatgtgtgtacat

SEQ ID NO: 103311 - DNA, 80 bp, synthetic construct
  misc_feature 1..80: note = Artificially Synthesized Probe
  source 1..80: mol_type = other DNA
tgtgtgcacatatatatgtacatgtatatgtgtgtacatatatatgtacatgtatatgtgtgcacatatatatgtacatg

SEQ ID NO: 103312 - DNA, 80 bp, synthetic construct; identical to SEQ ID NO: 36140
  misc_feature 1..80: note = Artificially Synthesized Probe
  source 1..80: mol_type = other DNA

SEQ ID NO: 103313 - DNA, 80 bp, synthetic construct; identical to SEQ ID NO: 35911
  misc_feature 1..80: note = Artificially Synthesized Probe
  source 1..80: mol_type = other DNA

SEQ ID NO: 103314 - DNA, 80 bp, synthetic construct
  misc_feature 1..80: note = Artificially Synthesized Probe
  source 1..80: mol_type = other DNA
gacttatcttcatctgccaatcaaatgctctataggtgcatgtgtgtaacttaagccgcagggaagtttcagactggatg

SEQ ID NO: 103315 - DNA, 80 bp, synthetic construct
  misc_feature 1..80: note = Artificially Synthesized Probe
  source 1..80: mol_type = other DNA
ccagactccttctctctcagcttacagcctggatgcctgtcaccaaatccctttgagcagtgacctgagccacctggtgg

SEQ ID NO: 103316 - DNA, 80 bp, synthetic construct
  misc_feature 1..80: note = Artificially Synthesized Probe
  source 1..80: mol_type = other DNA
caagcagctgctcctccaaggtaggaaggaaaagggacttagaaagcccttggccagtggggagatcaccaggaagttct

SEQ ID NO: 103317 - DNA, 80 bp, synthetic construct; identical to SEQ ID NO: 36141
  misc_feature 1..80: note = Artificially Synthesized Probe
  source 1..80: mol_type = other DNA

SEQ ID NO: 103318 - DNA, 80 bp, synthetic construct
  misc_feature 1..80: note = Artificially Synthesized Probe
  source 1..80: mol_type = other DNA
gctatctctgtatttcacataagaaaacttaggtcctgagatattaacagacaagcggggatttagagaagttatagaca

SEQ ID NO: 103319 - DNA, 80 bp, synthetic construct
  misc_feature 1..80: note = Artificially Synthesized Probe
  source 1..80: mol_type = other DNA
ggaactcagtgtatggtaaaatgttcctgcccctaaggaaacagggctctggggaagtcctggatggtgggtgatttatt

SEQ ID NO: 103320 - DNA, 80 bp, synthetic construct
  misc_feature 1..80: note = Artificially Synthesized Probe
  source 1..80: mol_type = other DNA
ttatattgctagcatacttcagtactctactcagatgctaccttctttagaaaaacttttctggtggaatttaattaatc

SEQ ID NO: 103321 - DNA, 80 bp, synthetic construct
  misc_feature 1..80: note = Artificially Synthesized Probe
  source 1..80: mol_type = other DNA
atttctacttcctctgtccttttctccttttgatacaccgtttagtacaccatctccactcacctccatggccatacctt

SEQ ID NO: 103322 - DNA, 80 bp, synthetic construct; identical to SEQ ID NO: 36142
  misc_feature 1..80: note = Artificially Synthesized Probe
  source 1..80: mol_type = other DNA

SEQ ID NO: 103323 - DNA, 80 bp, synthetic construct
  misc_feature 1..80: note = Artificially Synthesized Probe
  source 1..80: mol_type = other DNA
ctgcccctctttctctagcaccccggaggcctgagctggaaagcaggcactgggccacacttgcctgagcaggacctttt

SEQ ID NO: 103324 - DNA, 80 bp, synthetic construct
  misc_feature 1..80: note = Artificially Synthesized Probe
  source 1..80: mol_type = other DNA
cccccatgaatccattcattccttgattctttgattctagattttaatatgtactatgtatatttatacatattacattt

SEQ ID NO: 103325 - DNA, 80 bp, synthetic construct
  misc_feature 1..80: note = Artificially Synthesized Probe
  source 1..80: mol_type = other DNA
ctcagtgactcataggcttttgattttgctttggcttgtggggtatggataattctgtaagaggagagtcctgccacctt

SEQ ID NO: 103326 - DNA, 80 bp, synthetic construct
  misc_feature 1..80: note = Artificially Synthesized Probe
  source 1..80: mol_type = other DNA
ttcctctactcctggctcagaaacgcccataatcaacagagcaaatggtaaatatggcaactaaagggcccagggactga

SEQ ID NO: 103327 - DNA, 80 bp, synthetic construct; identical to SEQ ID NO: 36143
  misc_feature 1..80: note = Artificially Synthesized Probe
  source 1..80: mol_type = other DNA

SEQ ID NO: 103328 - DNA, 80 bp, synthetic construct
  misc_feature 1..80: note = Artificially Synthesized Probe
  source 1..80: mol_type = other DNA
tgtacattcccaggcttcctttcttgttcccggcctcgtccttttcttgttccctacctcttttttagttggagcaaact

SEQ ID NO: 103329 - DNA, 80 bp, synthetic construct
  misc_feature 1..80: note = Artificially Synthesized Probe
  source 1..80: mol_type = other DNA
cacattgatgactacagtgccctaagacagcagattgcggagggcaagctgctggtcaaaaagatagtgtctcttgtgag

SEQ ID NO: 103330 - DNA, 80 bp, synthetic construct
  misc_feature 1..80: note = Artificially Synthesized Probe
  source 1..80: mol_type = other DNA
acttcctcttccatgtatagcagccaggccctttcttctctatctcctattttcactgtgagttctgctctgttccagat

SEQ ID NO: 103331 - DNA, 80 bp, synthetic construct
  misc_feature 1..80: note = Artificially Synthesized Probe
  source 1..80: mol_type = other DNA
aatgaatgaaggtaaccacactgtccttgagttttaccaactgtggaaataaaattaagtcccatgagcattagctgcct

SEQ ID NO: 103332 - DNA, 80 bp, synthetic construct; identical to SEQ ID NO: 36144
  misc_feature 1..80: note = Artificially Synthesized Probe
  source 1..80: mol_type = other DNA

SEQ ID NO: 103333 - DNA, 80 bp, synthetic construct
  misc_feature 1..80: note = Artificially Synthesized Probe
  source 1..80: mol_type = other DNA
agtaaggggctacaggcacagtatgagaagtcatcctctgtgctgtgagagctccaatacaaatgtggtcatttatctca

SEQ ID NO: 103334 - DNA, 80 bp, synthetic construct
  misc_feature 1..80: note = Artificially Synthesized Probe
  source 1..80: mol_type = other DNA
ggcccatgttctatgcctcactcacaaaggaagcttgagcccatgcagggggaagaaagtaatctctccgctcctgtggt

SEQ ID NO: 103335 - DNA, 80 bp, synthetic construct
  misc_feature 1..80: note = Artificially Synthesized Probe
  source 1..80: mol_type = other DNA
taagatgccagtgccctttcttggttcaaacccagttctcctgccctccaatactgttctgtctcctcaatgtcacagct

SEQ ID NO: 103336 - DNA, 80 bp, synthetic construct; identical to SEQ ID NO: 36145
  misc_feature 1..80: note = Artificially Synthesized Probe
  source 1..80: mol_type = other DNA

SEQ ID NO: 103337 - DNA, 80 bp, synthetic construct
  misc_feature 1..80: note = Artificially Synthesized Probe
  source 1..80: mol_type = other DNA
gggaaagtcagccacccctcaggatctgctcagagctcaggctaactctgattggcagaccctcatgtaggcaggtttca

SEQ ID NO: 103338 - DNA, 80 bp, synthetic construct
  misc_feature 1..80: note = Artificially Synthesized Probe
  source 1..80: mol_type = other DNA
taacacttctgaactctcaatcttacctgtgaagggagagtgacagaactgatatcaggactaaagcaaggtcctcttca

SEQ ID NO: 103339 - DNA, 80 bp, synthetic construct; identical to SEQ ID NO: 36146
  misc_feature 1..80: note = Artificially Synthesized Probe
  source 1..80: mol_type = other DNA

SEQ ID NO: 103340 - DNA, 80 bp, synthetic construct
  misc_feature 1..80: note = Artificially Synthesized Probe
  source 1..80: mol_type = other DNA
gagcatctgaagaacgccaaccagcagaaggagagcatggagcagttcatcgtcagccagcgtaggttccctgagaggga

SEQ ID NO: 103341 - DNA, 80 bp, synthetic construct
  misc_feature 1..80: note = Artificially Synthesized Probe
  source 1..80: mol_type = other DNA
gtggatagaaggagactccaagctgaatagccagaaagaaataaatgctttagaattctcatgctaagcaagtagggtta

SEQ ID NO: 103342 - DNA, 80 bp, synthetic construct; identical to SEQ ID NO: 35932
  misc_feature 1..80: note = Artificially Synthesized Probe
  source 1..80: mol_type = other DNA

SEQ ID NO: 103343 - DNA, 80 bp, synthetic construct
  misc_feature 1..80: note = Artificially Synthesized Probe
  source 1..80: mol_type = other DNA
ggcaccaagcctgtcccccacccatcaccatccgttagcagatcttgtaggtgacccttggcctgctttggccttccagg

SEQ ID NO: 103344 - DNA, 80 bp, synthetic construct; identical to SEQ ID NO: 36147
  misc_feature 1..80: note = Artificially Synthesized Probe
  source 1..80: mol_type = other DNA

SEQ ID NO: 103345 - DNA, 80 bp, synthetic construct
  misc_feature 1..80: note = Artificially Synthesized Probe
  source 1..80: mol_type = other DNA
actgatttcactgcacattcccgggttaagaacagcaatttgattttgctatatctttaagtaacatgacaaaagagatc

SEQ ID NO: 103346 - DNA, 80 bp, synthetic construct
  misc_feature 1..80: note = Artificially Synthesized Probe
  source 1..80: mol_type = other DNA
tgaaatggttaaaaatcagaaactaaaccttttaacatggacatcaaagctttgccataagcaattcagcatattcctag

SEQ ID NO: 103347 - DNA, 80 bp, synthetic construct
  misc_feature 1..80: note = Artificially Synthesized Probe
  source 1..80: mol_type = other DNA
aggattgcctctgtaaagccttattcctgtcccagaaaaggtaatccaaaaagtctctagtatccactaaaaggtaaccc

SEQ ID NO: 103348 - DNA, 80 bp, synthetic construct
  misc_feature 1..80: note = Artificially Synthesized Probe
  source 1..80: mol_type = other DNA
gtggctttggcttgtcccttagtctctgtgagactgctgcaccctcatctgtcaaagatggaactggacttagttgagct

SEQ ID NO: 103349 - DNA, 80 bp, synthetic construct; identical to SEQ ID NO: 36148
  misc_feature 1..80: note = Artificially Synthesized Probe
  source 1..80: mol_type = other DNA

SEQ ID NO: 103350 - DNA, 80 bp, synthetic construct
  misc_feature 1..80: note = Artificially Synthesized Probe
  source 1..80: mol_type = other DNA
actggctctcaccgtgctcctggctttggtcaccacgtagctctcactccagcttcaggtagccatcagtagggcctggc

SEQ ID NO: 103351 - DNA, 80 bp, synthetic construct
  misc_feature 1..80: note = Artificially Synthesized Probe
  source 1..80: mol_type = other DNA
ttttgtgcagctacctatctgctgaggagcatctgggcctcattcctccaagtccacgggagggtccagaagagggagtc

SEQ ID NO: 103352 - DNA, 80 bp, synthetic construct; identical to SEQ ID NO: 36149
  misc_feature 1..80: note = Artificially Synthesized Probe
  source 1..80: mol_type = other DNA

SEQ ID NO: 103353 - DNA, 80 bp, synthetic construct
  misc_feature 1..80: note = Artificially Synthesized Probe
  source 1..80: mol_type = other DNA
tctgcactgtagcacctgtgttctttgagttcacatcatgaatgtggtgacttcccagataccatctcaggcttaaccta

SEQ ID NO: 103354 - DNA, 80 bp, synthetic construct
  misc_feature 1..80: note = Artificially Synthesized Probe
  source 1..80: mol_type = other DNA
ccccaaacaggccccagtgtgtgatgttccccttcctgtgtctatgtgttctcattgttcaattcccacctatgagtgag

SEQ ID NO: 103355 - DNA, 80 bp, synthetic construct
  misc_feature 1..80: note = Artificially Synthesized Probe
  source 1..80: mol_type = other DNA
tttaagtggcatgggagaggccccaagcctagtaaagcctagtctgtgtcttcacagtgctggtagaatgtgtttgtgtg

SEQ ID NO: 103356 - DNA, 80 bp, synthetic construct
  misc_feature 1..80: note = Artificially Synthesized Probe
  source 1..80: mol_type = other DNA
tgtgtataaagaaataaatagtttttctttcactgctttgtttcccatttctgcaccaatcccttgacagtataaagaac

SEQ ID NO: 103357 - DNA, 80 bp, synthetic construct
  misc_feature 1..80: note = Artificially Synthesized Probe
  source 1..80: mol_type = other DNA
aaaatatgaaagaatggttcttaaacttggtgtgcctgagaagcagctgtggagattataggagctacctcctggtctcc

SEQ ID NO: 103358 - DNA, 80 bp, synthetic construct; identical to SEQ ID NO: 36150
  misc_feature 1..80: note = Artificially Synthesized Probe
  source 1..80: mol_type = other DNA

SEQ ID NO: 103359 - DNA, 80 bp, synthetic construct
  misc_feature 1..80: note = Artificially Synthesized Probe
  source 1..80: mol_type = other DNA
actttcacaagggctagccaggtgagagatcatagcacccgcttttaacttgctaacaagaaaagatgcattgaagaagg

SEQ ID NO: 103360 - DNA, 80 bp, synthetic construct
  misc_feature 1..80: note = Artificially Synthesized Probe
  source 1..80: mol_type = other DNA
caaccacaggaaattctctgagagagaatctaatggcttggggacaagggggaaagtgtgagactttatattgaaactta

SEQ ID NO: 103361 - DNA, 80 bp, synthetic construct
  misc_feature 1..80: note = Artificially Synthesized Probe
  source 1..80: mol_type = other DNA
ccagcaggaagaacccagcaaagttctggccggctttatcactggaaatttcttgggcttcaaataaatttcagtggcag

SEQ ID NO: 103362 - DNA, 80 bp, synthetic construct; identical to SEQ ID NO: 36151
  misc_feature 1..80: note = Artificially Synthesized Probe
  source 1..80: mol_type = other DNA

SEQ ID NO: 103363 - DNA, 80 bp, synthetic construct
  misc_feature 1..80: note = Artificially Synthesized Probe
  source 1..80: mol_type = other DNA
caaacaagacctgactgcaaaggctggaataaataccttatccttcaatgcccagatactgacaaacatcaacagtatca

SEQ ID NO: 103364 - DNA, 80 bp, synthetic construct
  misc_feature 1..80: note = Artificially Synthesized Probe
  source 1..80: mol_type = other DNA
tatatcagaaatttaacaagattactgaagtaagagaaaaaaatcaaatgctggagctggaaaatacattagtgggtctc

SEQ ID NO: 103365 - DNA, 80 bp, synthetic construct; identical to SEQ ID NO: 36152
  misc_feature 1..80: note = Artificially Synthesized Probe
  source 1..80: mol_type = other DNA

SEQ ID NO: 103366 - DNA, 80 bp, synthetic construct
  misc_feature 1..80: note = Artificially Synthesized Probe
  source 1..80: mol_type = other DNA
attgatggacatttggcttggttccaagtctttgctattgtgaatagtccctcaataaacatacgtgtgcatgtgtcttt

SEQ ID NO: 103367 - DNA, 80 bp, synthetic construct
  misc_feature 1..80: note = Artificially Synthesized Probe
  source 1..80: mol_type = other DNA
ctcatcatttacattaggtatttctcctaacgctatccctcccccagcctcctaccccacaacaggccccggtgtgtgat

SEQ ID NO: 103368 - DNA, 80 bp, synthetic construct
  misc_feature 1..80: note = Artificially Synthesized Probe
  source 1..80: mol_type = other DNA
gctgcatagtattctttggtgtatatgtgccacattttctttatctagtctattattgatggacatttgggttagttcca

SEQ ID NO: 103369 - DNA, 80 bp, synthetic construct
  misc_feature 1..80: note = Artificially Synthesized Probe
  source 1..80: mol_type = other DNA
cacaatggttgaactaatttatactcccaccaagagtgtaaaagcgttcctatttctccacatcctctacagcatctgtt

SEQ ID NO: 103370 - DNA, 80 bp, synthetic construct
  misc_feature 1..80: note = Artificially Synthesized Probe
  source 1..80: mol_type = other DNA
ttgccctctttttgatggggttgttttttttcctgtaaatttgtttgagttctttgtagattctggatattagccctttg

SEQ ID NO: 103371 - DNA, 80 bp, synthetic construct; identical to SEQ ID NO: 36153
  misc_feature 1..80: note = Artificially Synthesized Probe
  source 1..80: mol_type = other DNA

SEQ ID NO: 103372 - DNA, 80 bp, synthetic construct
  misc_feature 1..80: note = Artificially Synthesized Probe
  source 1..80: mol_type = other DNA
tgtagatgtgtggtgttatttctaagggctctgttctgttccattggtctgtatctccgttttggtaccagtaccatgct

SEQ ID NO: 103373 - DNA, 80 bp, synthetic construct
  misc_feature 1..80: note = Artificially Synthesized Probe
  source 1..80: mol_type = other DNA
gtagcttgatggggatggcattgaatctataaattaccttgggcagtatggccattttcacgatattgtttattcctctc

SEQ ID NO: 103374 - DNA, 80 bp, synthetic construct
  misc_feature 1..80: note = Artificially Synthesized Probe
  source 1..80: mol_type = other DNA
tttggctctctgtttgtctgttgttggtgtataagaatgcttgtgatttttgcacattgattttgtaacctgagactttg

SEQ ID NO: 103375 - DNA, 80 bp, synthetic construct; identical to SEQ ID NO: 36154
  misc_feature 1..80: note = Artificially Synthesized Probe
  source 1..80: mol_type = other DNA

SEQ ID NO: 103376 - DNA, 80 bp, synthetic construct
  misc_feature 1..80: note = Artificially Synthesized Probe
  source 1..80: mol_type = other DNA
gtcgaaggccttttcagcctccattgaaatactcgtggtttttgtcattggttctgtttatatgctggattacgtttatt

SEQ ID NO: 103377 - DNA, 80 bp, synthetic construct
  misc_feature 1..80: note = Artificially Synthesized Probe
  source 1..80: mol_type = other DNA
ccacatcctctccagcacctgttttttcctgactttttaatgatcgccattctaactggtgtgagatggtatctcattgt

SEQ ID NO: 103378 - DNA, 80 bp, synthetic construct
  misc_feature 1..80: note = Artificially Synthesized Probe
  source 1..80: mol_type = other DNA
ttgttttgtctctgccaggctttggtatcaggatgatgctggcctcataaaatgagttagggaggattctctctttttct

SEQ ID NO: 103379 - DNA, 80 bp, synthetic construct; identical to SEQ ID NO: 36155
  misc_feature 1..80: note = Artificially Synthesized Probe
  source 1..80: mol_type = other DNA

SEQ ID NO: 103380 - DNA, 80 bp, synthetic construct
  misc_feature 1..80: note = Artificially Synthesized Probe
  source 1..80: mol_type = other DNA
accagctcctggattcattgattttttgaagggatttttgtgtctctatatccttcagctctgctctgatcttagttatt

SEQ ID NO: 103381 - DNA, 80 bp, synthetic construct
  misc_feature 1..80: note = Artificially Synthesized Probe
  source 1..80: mol_type = other DNA
tctgatttgttgtgtctttgttcccgtggattccaaagaacctctttatttctgccttcatttcattatttacccagtag

SEQ ID NO: 103382 - DNA, 80 bp, synthetic construct
  misc_feature 1..80: note = Artificially Synthesized Probe
  source 1..80: mol_type = other DNA
ggtcaattttggaataggtgcagtgtggtgctgagaataatgtatattctgttgatttgtggtggagagttctgtagatg

SEQ ID NO: 103383 - DNA, 80 bp, synthetic construct; identical to SEQ ID NO: 36156
  misc_feature 1..80: note = Artificially Synthesized Probe
  source 1..80: mol_type = other DNA

SEQ ID NO: 103384 - DNA, 80 bp, synthetic construct
  misc_feature 1..80: note = Artificially Synthesized Probe
  source 1..80: mol_type = other DNA
gatggttttcctgaatgcagcacactgatgggtcttgactctttatccaatatgccagtctgtgtcttttaattggagca

SEQ ID NO: 103385 - DNA, 80 bp, synthetic construct
  misc_feature 1..80: note = Artificially Synthesized Probe
  source 1..80: mol_type = other DNA
tcctttccatatttagtgcttccttcaggagctcttttagggcaggcctggtggtgacaaaatttctcagcatttgcttg

SEQ ID NO: 103386 - DNA, 80 bp, synthetic construct
  misc_feature 1..80: note = Artificially Synthesized Probe
  source 1..80: mol_type = other DNA
gcttccctttgtgggtatcccgacctttctctctggctgcccttaacattttttccttcatttcaactttggtgaatctg

SEQ ID NO: 103387 - DNA, 80 bp, synthetic construct
  misc_feature 1..80: note = Artificially Synthesized Probe
  source 1..80: mol_type = other DNA
tttcaggtacaccaattagacatagatttggtcttttcacatagtcccatatttcttggaggctttgttcatttcttttt

SEQ ID NO: 103388 - DNA, 80 bp, synthetic construct
  misc_feature 1..80: note = Artificially Synthesized Probe
  source 1..80: mol_type = other DNA
ttgtagattctggatattagccctttgtcagataagtagattgcaaaaattttctcccattctgtagggcctgttcactc

SEQ ID NO: 103389 - DNA, 80 bp, synthetic construct; identical to SEQ ID NO: 36157
  misc_feature 1..80: note = Artificially Synthesized Probe
  source 1..80: mol_type = other DNA

SEQ ID NO: 103390 - DNA, 80 bp, synthetic construct
  misc_feature 1..80: note = Artificially Synthesized Probe
  source 1..80: mol_type = other DNA
tctttttttcccccatctttgtggttttatctacctgtagtctttgatgatagtgacatacagatggggttttggtgtgc

SEQ ID NO: 103391 - DNA, 80 bp, synthetic construct
  misc_feature 1..80: note = Artificially Synthesized Probe
  source 1..80: mol_type = other DNA
gatcgttcctctggaggttttgtctcagaggggtacccggccgtgtgaggtgtcagtctgcccctactgggggatgcctc

SEQ ID NO: 103392 - DNA, 80 bp, synthetic construct
  misc_feature 1..80: note = Artificially Synthesized Probe
  source 1..80: mol_type = other DNA
cctgcccccagaggtggagtctacagaggcaggcaggcctccttgagctgcagtgggctccacccagtttgaacttccct

SEQ ID NO: 103393 - DNA, 80 bp, synthetic construct; identical to SEQ ID NO: 36158
  misc_feature 1..80: note = Artificially Synthesized Probe
  source 1..80: mol_type = other DNA

SEQ ID NO: 103394 - DNA, 80 bp, synthetic construct
  misc_feature 1..80: note = Artificially Synthesized Probe
  source 1..80: mol_type = other DNA
cagaaatcacccatcttccgcatcactcatgctgggagctgtagactggagctgttcctattcagccatcttggaacagc

SEQ ID NO: 103395 - DNA, 80 bp, synthetic construct
  misc_feature 1..80: note = Artificially Synthesized Probe
  source 1..80: mol_type = other DNA
ggagtctcgctctgtcacccaggctggagtgcagtggtgtgatctcggctcactgcaagctccaccttccaggttcacac

SEQ ID NO: 103396 - DNA, 80 bp, synthetic construct; identical to SEQ ID NO: 36159
  misc_feature 1..80: note = Artificially Synthesized Probe
  source 1..80: mol_type = other DNA

SEQ ID NO: 103397 - DNA, 80 bp, synthetic construct
  misc_feature 1..80: note = Artificially Synthesized Probe
  source 1..80: mol_type = other DNA
tgaagcttcatttggctggatatgaaattctggattgaaaattcttttctttaagaatgttgaatattggtccccactct

SEQ ID NO: 103398 - DNA, 80 bp, synthetic construct
  misc_feature 1..80: note = Artificially Synthesized Probe
  source 1..80: mol_type = other DNA
atgagtatcttgtggtgttctctgtatgtcttgaatttgaatgttggccttccttgctaggatggggaagttctcctgaa

SEQ ID NO: 103399 - DNA, 80 bp, synthetic construct; identical to SEQ ID NO: 35933
  misc_feature 1..80: note = Artificially Synthesized Probe
  source 1..80: mol_type = other DNA

SEQ ID NO: 103400 - DNA, 80 bp, synthetic construct
  misc_feature 1..80: note = Artificially Synthesized Probe
  source 1..80: mol_type = other DNA
tatttcattaatttgatcttcaatcactgatatcctttattccgcttgattgaattggctattgaatcttgtttatgctt

SEQ ID NO: 103401 - DNA, 80 bp, synthetic construct; identical to SEQ ID NO: 36160
  misc_feature 1..80: note = Artificially Synthesized Probe
  source 1..80: mol_type = other DNA

SEQ ID NO: 103402 - DNA, 80 bp, synthetic construct
  misc_feature 1..80: note = Artificially Synthesized Probe
  source 1..80: mol_type = other DNA
tgctattcctttctgtttgttaatccttctaaccaggcaggtccctcagctgcaggtctgttggagtttgctggaggtcc

SEQ ID NO: 103403 - DNA, 80 bp, synthetic construct
  misc_feature 1..80: note = Artificially Synthesized Probe
  source 1..80: mol_type = other DNA
gtggtcagagacccacttgaggaggctgtctgtccattatcagagctcaaatgccacgctgggagaactactgctgcctt

SEQ ID NO: 103404 - DNA, 80 bp, synthetic construct
  misc_feature 1..80: note = Artificially Synthesized Probe
  source 1..80: mol_type = other DNA
tgaccatggaaccaagtactcgagcctcagcagtggcagaaccccctctccctgccatgctccaatgtcgcaggttgatc

SEQ ID NO: 103405 - DNA, 80 bp, synthetic construct
  misc_feature 1..80: note = Artificially Synthesized Probe
  source 1..80: mol_type = other DNA
cttcccttggctaggaaaaagaaatcccccaaccccttgcacttcccaggtgaggtgacaccccaccctgctttggctca

SEQ ID NO: 103406 - DNA, 80 bp, synthetic construct; identical to SEQ ID NO: 36161
  misc_feature 1..80: note = Artificially Synthesized Probe
  source 1..80: mol_type = other DNA

SEQ ID NO: 103407 - DNA, 80 bp, synthetic construct
  misc_feature 1..80: note = Artificially Synthesized Probe
  source 1..80: mol_type = other DNA
cagtcccctcactcatcacaagtgcttcctcacccctccctagtttctctcttcccacacacagttacatttcttctgtg

SEQ ID NO: 103408 - DNA, 80 bp, synthetic construct
  misc_feature 1..80: note = Artificially Synthesized Probe
  source 1..80: mol_type = other DNA
tggtaaaaatacatgtacacttttaaaaaccgcaattaatgggttgtggtatattgagaaattggagtggcatcaacttg

SEQ ID NO: 103409 - DNA, 80 bp, synthetic construct; identical to SEQ ID NO: 36162
  misc_feature 1..80: note = Artificially Synthesized Probe
  source 1..80: mol_type = other DNA

SEQ ID NO: 103410 - DNA, 80 bp, synthetic construct
  misc_feature 1..80: note = Artificially Synthesized Probe
  source 1..80: mol_type = other DNA
gtttaccaaaaatctctgttttggtaccagtaccatgctgttttggttactgtagccttgtagtatagtttgaagtcagg

SEQ ID NO: 103411 - DNA, 80 bp, synthetic construct
  misc_feature 1..80: note = Artificially Synthesized Probe
  source 1..80: mol_type = other DNA
caaagggaaaagagggaaggcaaaaagaatatagcactacggtttgcagaaatttccccttggtacaggaaactctggta

SEQ ID NO: 103412 - DNA, 80 bp, synthetic construct
  misc_feature 1..80: note = Artificially Synthesized Probe
  source 1..80: mol_type = other DNA
agagggcagagagaaagaggatgactcctctctcacaggtccaccttccttggtgttgcttgagggatcagaagaaatgc

SEQ ID NO: 103413 - DNA, 80 bp, synthetic construct
  misc_feature 1..80: note = Artificially Synthesized Probe
  source 1..80: mol_type = other DNA
agagttcaagtctcactgggacctttctgtataattccagtgaggttcctctctattgctctataagcagaatgggggaa

SEQ ID NO: 103414 - DNA, 80 bp, synthetic construct; identical to SEQ ID NO: 36163
  misc_feature 1..80: note = Artificially Synthesized Probe
  source 1..80: mol_type = other DNA

SEQ ID NO: 103415 - DNA, 80 bp, synthetic construct
  misc_feature 1..80: note = Artificially Synthesized Probe
  source 1..80: mol_type = other DNA
gatgctgctcttgtcccaaatcctgacacctccctccagccaattgcctcccttagcctcctaaatcagccaatatttag

SEQ ID NO: 103416 - DNA, 80 bp, synthetic construct
  misc_feature 1..80: note = Artificially Synthesized Probe
  source 1..80: mol_type = other DNA
tgccttaggaccagatcagatggacactcttgttctcttctcatcagcagaaaaatttaggcaagagctctggaggacct

SEQ ID NO: 103417 - DNA, 80 bp, synthetic construct
  misc_feature 1..80: note = Artificially Synthesized Probe
  source 1..80: mol_type = other DNA
aggagggaggagagaaggagggagggggagaaagggtgtgtgagggccaggagccaggattcaccctgacagttcagtga

SEQ ID NO: 103418 - DNA, 80 bp, synthetic construct
  misc_feature 1..80: note = Artificially Synthesized Probe
  source 1..80: mol_type = other DNA
ggtatataggtttgcaagtgactaggagctaagtcaggaccttgtggagccactcagagttaactgtcaagtagcctcct

SEQ ID NO: 103419 - DNA, 80 bp, synthetic construct; identical to SEQ ID NO: 36164
  misc_feature 1..80: note = Artificially Synthesized Probe
  source 1..80: mol_type = other DNA

SEQ ID NO: 103420 - DNA, 80 bp, synthetic construct
  misc_feature 1..80: note = Artificially Synthesized Probe
  source 1..80: mol_type = other DNA
cctttccttaaggagatgtcctgttctttctttcccaccagaactgccctggcccagaccccatttctgtctggtgacca

SEQ ID NO: 103421 - DNA, 80 bp, synthetic construct
  misc_feature 1..80: note = Artificially Synthesized Probe
  source 1..80: mol_type = other DNA
tactgcatgctcccctcacagaacagactaatttttgtgtgtgtgtccttgttttgcctacctgtaccccagatagactt

SEQ ID NO: 103422 - DNA, 80 bp, synthetic construct
  misc_feature 1..80: note = Artificially Synthesized Probe
  source 1..80: mol_type = other DNA
ggcagcatggccattttcacgatattgattcttcctgtccatgagcatggaatgttcttccatttctttgtatcctcttt

SEQ ID NO: 103423 - DNA, 80 bp, synthetic construct; identical to SEQ ID NO: 36165
  misc_feature 1..80: note = Artificially Synthesized Probe
  source 1..80: mol_type = other DNA

SEQ ID NO: 103424 - DNA, 80 bp, synthetic construct
  misc_feature 1..80: note = Artificially Synthesized Probe
  source 1..80: mol_type = other DNA
gtggtgatgagcaagtatgtgaaggagaggtagtgcctaaacttgaaaatcaaaaagtaataatatctatttagacataa

SEQ ID NO: 103425 - DNA, 80 bp, synthetic construct
  misc_feature 1..80: note = Artificially Synthesized Probe
  source 1..80: mol_type = other DNA
attgtattttgaagataaatttttacacagtcatgttaatcgctttcatttaaggatttgagtttgaggtcttgcataca

SEQ ID NO: 103426 - DNA, 80 bp, synthetic construct
  misc_feature 1..80: note = Artificially Synthesized Probe
  source 1..80: mol_type = other DNA
aaaagtatgacatgttatatcttcttttcacagtaatttagacagaaattagcaaaatcaaacatgtataaatactttgg

SEQ ID NO: 103427 - DNA, 80 bp, synthetic construct; identical to SEQ ID NO: 36166
  misc_feature 1..80: note = Artificially Synthesized Probe
  source 1..80: mol_type = other DNA

SEQ ID NO: 103428 - DNA, 80 bp, synthetic construct
  misc_feature 1..80: note = Artificially Synthesized Probe
  source 1..80: mol_type = other DNA
ttatacttggggagtggtgtttttggtacgattttctaactctcaatcaactaaaaaatgtaaaaaagcagccttgcacg

SEQ ID NO: 103429 - DNA, 80 bp, synthetic construct
  misc_feature 1..80: note = Artificially Synthesized Probe
  source 1..80: mol_type = other DNA
ttagcccattggacagatagaaatggaggcacagaagattcatgtgtttaacttcaaaccctggcagattaggtttttca

SEQ ID NO: 103430 - DNA, 80 bp, synthetic construct
  misc_feature 1..80: note = Artificially Synthesized Probe
  source 1..80: mol_type = other DNA
cagggaactgacggggatgctcagccaggcccagaggatgcgccctggcagtcccggaaaacaccaggaaaacaagcagg

SEQ ID NO: 103431 - DNA, 80 bp, synthetic construct; identical to SEQ ID NO: 35934
  misc_feature 1..80: note = Artificially Synthesized Probe
  source 1..80: mol_type = other DNA

SEQ ID NO: 103432 - DNA, 80 bp, synthetic construct
  misc_feature 1..80: note = Artificially Synthesized Probe
  source 1..80: mol_type = other DNA
ttgtgccagttttcaaagagaatgcttccagtttttgcccattcagtatgatattgcctgtgggtttgtcatagatagct

SEQ ID NO: 103433 - DNA, 80 bp, synthetic construct
  misc_feature 1..80: note = Artificially Synthesized Probe
  source 1..80: mol_type = other DNA
catatgttgaaccagcctttgcatcccagggatgaagcccacttgatcatggtggataagctttttgatgtgctgctgga

SEQ ID NO: 103434 - DNA, 80 bp, synthetic construct
  misc_feature 1..80: note = Artificially Synthesized Probe
  source 1..80: mol_type = other DNA
atcggaatagtttcagaaggaatggtaccagctcttccttgtacctctgatagaattcggctgtgaatccatctgttcct

SEQ ID NO: 103435 - DNA, 80 bp, synthetic construct; identical to SEQ ID NO: 35935
  misc_feature 1..80: note = Artificially Synthesized Probe
  source 1..80: mol_type = other DNA

SEQ ID NO: 103436 - DNA, 80 bp, synthetic construct
  misc_feature 1..80: note = Artificially Synthesized Probe
  source 1..80: mol_type = other DNA
gccttctgctagcttttgaatgtgtttgctcttgcttctctagttcttttaattgtgatgttagggtgtcaattttagat

SEQ ID NO: 103437 - DNA, 80 bp, synthetic construct
  misc_feature 1..80: note = Artificially Synthesized Probe
  source 1..80: mol_type = other DNA
tcaggagcaggttattcagtttccatgtagttgagcggttttgagtgagtttcttaatcctgagttctagtttgattgca

SEQ ID NO: 103438 - DNA, 80 bp, synthetic construct
  misc_feature 1..80: note = Artificially Synthesized Probe
  source 1..80: mol_type = other DNA
ttaggtccacttggtgcagaggtgagttcaattcctggatatccttgttgactttctgtctcgttgatctgtctactgtt

SEQ ID NO: 103439 - DNA, 80 bp, synthetic construct
  misc_feature 1..80: note = Artificially Synthesized Probe
  source 1..80: mol_type = other DNA
tgtaatggccttctttgtctcttttgatctttgttggtttaaagtctgttttatcagagactaggattgcaacccctgcc

SEQ ID NO: 103440 - DNA, 80 bp, synthetic construct; identical to SEQ ID NO: 35936
  misc_feature 1..80: note = Artificially Synthesized Probe
  source 1..80: mol_type = other DNA

SEQ ID NO: 103441 - DNA, 80 bp, synthetic construct
  misc_feature 1..80: note = Artificially Synthesized Probe
  source 1..80: mol_type = other DNA
actgtagacctctctctctctctctctctctctctctctccctctctctctctctctctctatttctccaaggaaagctg

SEQ ID NO: 103442 - DNA, 80 bp, synthetic construct
  misc_feature 1..80: note = Artificially Synthesized Probe
  source 1..80: mol_type = other DNA
taaagtattttatttctccttcacttatgaagcttcatttggctggatatgaaattctggttgaaaattcttttctttaa

SEQ ID NO: 103443 - DNA, 80 bp, synthetic construct
  misc_feature 1..80: note = Artificially Synthesized Probe
  source 1..80: mol_type = other DNA
tatttgtcttggagttgctcttctcaaggagtatctttgtggcattctctgtatttcctgaatttgaatgttggcctgcc

SEQ ID NO: 103444 - DNA, 80 bp, synthetic construct
  misc_feature 1..80: note = Artificially Synthesized Probe
  source 1..80: mol_type = other DNA
tttttctttaaacttctcttcttgcttcatttcattcatttcatcttccatcactgataccctttcttccagttgatcga

SEQ ID NO: 103445 - DNA, 80 bp, synthetic construct
  misc_feature 1..80: note = Artificially Synthesized Probe
  source 1..80: mol_type = other DNA
ctcctttagctcggagtagtttgattgtctgaagccttcttccctcaacttgtcaaagtcattctccatccagctttgtt

SEQ ID NO: 103446 - DNA, 80 bp, synthetic construct; identical to SEQ ID NO: 35937
  misc_feature 1..80: note = Artificially Synthesized Probe
  source 1..80: mol_type = other DNA

SEQ ID NO: 103447 - DNA, 80 bp, synthetic construct
  misc_feature 1..80: note = Artificially Synthesized Probe
  source 1..80: mol_type = other DNA
aggctacttgggggtcagggaccaacctaaggaggcagtctgtccattctcagatctcaagctgtgtgctgggagaacca

SEQ ID NO: 103448 - DNA, 80 bp, synthetic construct
  misc_feature 1..80: note = Artificially Synthesized Probe
  source 1..80: mol_type = other DNA
ttgtttacctactccagcctcggcaatggcaggtgcccctcccccagcctcgctgccgccttgcagttcgatctcagtct

SEQ ID NO: 103449 - DNA, 80 bp, synthetic construct
  misc_feature 1..80: note = Artificially Synthesized Probe
  source 1..80: mol_type = other DNA
tgactaggaaagggaattccctgaccccttgtgcctcccgggtgaggtgatgcttcgccctcctttggctcatgctgggt

SEQ ID NO: 103450 - DNA, 80 bp, synthetic construct; identical to SEQ ID NO: 35938
  misc_feature 1..80: note = Artificially Synthesized Probe
  source 1..80: mol_type = other DNA

SEQ ID NO: 103451 - DNA, 80 bp, synthetic construct
  misc_feature 1..80: note = Artificially Synthesized Probe
  source 1..80: mol_type = other DNA
gctgggatgctcccttgacatgcttcacttatctttatcgcccttatcaccatctggcatattgtagttattcctttact

SEQ ID NO: 103452 - DNA, 80 bp, synthetic construct
  misc_feature 1..80: note = Artificially Synthesized Probe
  source 1..80: mol_type = other DNA
gcaatcatagctccctgcagtctccaactcctgggctcaagggatcctcttgccttggcctcccaagtagctgagatcac

SEQ ID NO: 103453 - DNA, 80 bp, synthetic construct
  misc_feature 1..80: note = Artificially Synthesized Probe
  source 1..80: mol_type = other DNA
atactgtgtccattttaaggcatggtctcagttgtctattcctgcataaacaatctaccccacaattcagtagctcaaaa

SEQ ID NO: 103454 - DNA, 80 bp, synthetic construct; identical to SEQ ID NO: 35939
  misc_feature 1..80: note = Artificially Synthesized Probe
  source 1..80: mol_type = other DNA

SEQ ID NO: 103455 - DNA, 80 bp, synthetic construct
  misc_feature 1..80: note = Artificially Synthesized Probe
  source 1..80: mol_type = other DNA
gagaagtagcaaaaaatttgtagccatcttgaatctaccacattccttttcctctggccacagacattattaccacaagc

SEQ ID NO: 103456 - DNA, 80 bp, synthetic construct
  misc_feature 1..80: note = Artificially Synthesized Probe
  source 1..80: mol_type = other DNA
gggctctcacacccaagaaacaatgggacagagataggataaccataataggcactcccattcgaagagtcagagaacac

SEQ ID NO: 103457 - DNA, 80 bp, synthetic construct
  misc_feature 1..80: note = Artificially Synthesized Probe
  source 1..80: mol_type = other DNA
cctctgggctcttggttccattctttgagccgttcttctttttccctaagaagtaatccttgtttttggctgggtaactt

SEQ ID NO: 103458 - DNA, 80 bp, synthetic construct; identical to SEQ ID NO: 35940
  misc_feature 1..80: note = Artificially Synthesized Probe
  source 1..80: mol_type = other DNA

SEQ ID NO: 103459 - DNA, 80 bp, synthetic construct
  misc_feature 1..80: note = Artificially Synthesized Probe
  source 1..80: mol_type = other DNA
tttcttattttgaaagctttccctgtctagagagattgaggatgagaagcagtttgatgtttgaacccagcaaagtctac

SEQ ID NO: 103460 - DNA, 80 bp, synthetic construct
  misc_feature 1..80: note = Artificially Synthesized Probe
  source 1..80: mol_type = other DNA
gaaacctctttgtagttttgaaattctgctgaaaatctccttagccagatcctcccattcattgggcaccttttctattt

SEQ ID NO: 103461 - DNA, 80 bp, synthetic construct
  misc_feature 1..80: note = Artificially Synthesized Probe
  source 1..80: mol_type = other DNA
ttctgtggcaaccaggtacaaagtcattgccatttgttttcagttttcgttatagtgaaagtccactttcagataccaaa

SEQ ID NO: 103462 - DNA, 80 bp, synthetic construct
  misc_feature 1..80: note = Artificially Synthesized Probe
  source 1..80: mol_type = other DNA
ccagctgatgggagactgcttcacacataatgcctggcaccctgatgggaactgctggtcgttgtgctcagctaggcccc

SEQ ID NO: 103463 - DNA, 80 bp, synthetic construct
  misc_feature 1..80: note = Artificially Synthesized Probe
  source 1..80: mol_type = other DNA
agccaagtctgtttcttaaactgataaatcacaggactactatataaacccagaataacaaattactaatttataatgag

SEQ ID NO: 103464 - DNA, 80 bp, synthetic construct; identical to SEQ ID NO: 35941
  misc_feature 1..80: note = Artificially Synthesized Probe
  source 1..80: mol_type = other DNA

SEQ ID NO: 103465 - DNA, 80 bp, synthetic construct
  misc_feature 1..80: note = Artificially Synthesized Probe
  source 1..80: mol_type = other DNA
ctgactaaccaggtgatcacagggatcactgaagtgacagatgttgcagacatattgtcctcctatctaagtcccagcca

SEQ ID NO: 103466 - DNA, 80 bp, synthetic construct
  misc_feature 1..80: note = Artificially Synthesized Probe
  source 1..80: mol_type = other DNA
agtgggcattaactagagcctacctcaaaagactgctgcgaggatgaaaagagttagtatacacacaattgttagaggag

SEQ ID NO: 103467 - DNA, 80 bp, synthetic construct; identical to SEQ ID NO: 35942
  misc_feature 1..80: note = Artificially Synthesized Probe
  source 1..80: mol_type = other DNA

SEQ ID NO: 103468 - DNA, 80 bp, synthetic construct
  misc_feature 1..80: note = Artificially Synthesized Probe
  source 1..80: mol_type = other DNA
gcgatctcggctcgctgcaggctccgcctcccaggttcacgccattctcctgcctcaacctcccgtgtagttgggactat

SEQ ID NO: 103469 - DNA, 80 bp, synthetic construct
  misc_feature 1..80: note = Artificially Synthesized Probe
  source 1..80: mol_type = other DNA
ttatttgagttctaagccagaaaactgagagcagacacacacataacgatacttggttgcaaaatggaaataaaaagcaa

SEQ ID NO: 103470 - DNA, 80 bp, synthetic construct
  misc_feature 1..80: note = Artificially Synthesized Probe
  source 1..80: mol_type = other DNA
agcttcatcttattgatcttcaaggatcaataaaacagcggaaactgaaaagggccaattatgtactagctcttaaaaat

SEQ ID NO: 103471 - DNA, 80 bp, synthetic construct; identical to SEQ ID NO: 35943
  misc_feature 1..80: note = Artificially Synthesized Probe
  source 1..80: mol_type = other DNA

SEQ ID NO: 103472 - DNA, 80 bp, synthetic construct
  misc_feature 1..80: note = Artificially Synthesized Probe
  source 1..80: mol_type = other DNA
gacagacttaaaccaatccatacctaaactatagatccttgagggagaaatggatgtgtgttgtataatactgagattgg

SEQ ID NO: 103473 - DNA, 80 bp, synthetic construct
  misc_feature 1..80: note = Artificially Synthesized Probe
  source 1..80: mol_type = other DNA
agatggtgttacattattagtatactagctagatatagaactaaaatataactatccaattatttacaaattaaataaga

SEQ ID NO: 103474 - DNA, 80 bp, synthetic construct; identical to SEQ ID NO: 35912
  misc_feature 1..80: note = Artificially Synthesized Probe
  source 1..80: mol_type = other DNA

SEQ ID NO: 103475 - DNA, 80 bp, synthetic construct
  misc_feature 1..80: note = Artificially Synthesized Probe
  source 1..80: mol_type = other DNA
tctgaaggctggaccaagatcaaggtgctggcagattcagtgtctggaagagcttgctctctgctcccaagatggctcct

SEQ ID NO: 103476 - DNA, 80 bp, synthetic construct
  misc_feature 1..80: note = Artificially Synthesized Probe
  source 1..80: mol_type = other DNA
ccctgtagtactataacactcggtgttaagtaccaatgtatgaattttgaaggcatacatacattcaaccatagcataat

SEQ ID NO: 103477 - DNA, 80 bp, synthetic construct; identical to SEQ ID NO: 35944
  misc_feature 1..80: note = Artificially Synthesized Probe
  source 1..80: mol_type = other DNA

SEQ ID NO: 103478 - DNA, 80 bp, synthetic construct
  misc_feature 1..80: note = Artificially Synthesized Probe
  source 1..80: mol_type = other DNA
aaacaacaaggaaatttctcttctcaagaatatacccatgtgtgtaagaaagagttggtgtttggattaaaagatgcatt

SEQ ID NO: 103479 - DNA, 80 bp, synthetic construct
  misc_feature 1..80: note = Artificially Synthesized Probe
  source 1..80: mol_type = other DNA
ctagcgtcacttctgagaccccacagctcacctagttagtgctatcatttcttgaatccagtgagctgcctgtagacaga

SEQ ID NO: 103480 - DNA, 80 bp, synthetic construct; identical to SEQ ID NO: 35945
  misc_feature 1..80: note = Artificially Synthesized Probe
  source 1..80: mol_type = other DNA

SEQ ID NO: 103481 - DNA, 80 bp, synthetic construct
  misc_feature 1..80: note = Artificially Synthesized Probe
  source 1..80: mol_type = other DNA
ctccccacagtctcaccaatacccaggcatgccaggttcttcctgagttaaatgcctaggaggcctgaaagaataaattc

SEQ ID NO: 103482 - DNA, 80 bp, synthetic construct
  misc_feature 1..80: note = Artificially Synthesized Probe
  source 1..80: mol_type = other DNA
cattgccacatgtgggcactataaagcctttttcagataaaaaaaaaggtcagtgatagtgctaataataacagtgatta

SEQ ID NO: 103483 - DNA, 80 bp, synthetic construct
  misc_feature 1..80: note = Artificially Synthesized Probe
  source 1..80: mol_type = other DNA
taaaacagtcacaagggagtgtcgaggtcctgatggctactgtcttgaggcttttctagtgttctgggagtcaggaagct

SEQ ID NO: 103484 - DNA, 80 bp, synthetic construct
  misc_feature 1..80: note = Artificially Synthesized Probe
  source 1..80: mol_type = other DNA
ggattaatggtgaaactggcatgtcacatctctaggaagacaacatcgtgttccatgaccacgtagggtatacatctgca

SEQ ID NO: 103485 - DNA, 80 bp, synthetic construct
  misc_feature 1..80: note = Artificially Synthesized Probe
  source 1..80: mol_type = other DNA
attttctttaagaaaaaataatgatggggtagggaggtggggctggggtaccatattacagcccctacatgctggcaata

SEQ ID NO: 103486 - DNA, 80 bp, synthetic construct; identical to SEQ ID NO: 35946
  misc_feature 1..80: note = Artificially Synthesized Probe
  source 1..80: mol_type = other DNA

SEQ ID NO: 103487 - DNA, 80 bp, synthetic construct
  misc_feature 1..80: note = Artificially Synthesized Probe
  source 1..80: mol_type = other DNA
ccgggcagccgctggctccagctcacgaaacagccccgggcgccgcgccgctctgagtccagcctcctactgagaacagt

SEQ ID NO: 103488 - DNA, 80 bp, synthetic construct
  misc_feature 1..80: note = Artificially Synthesized Probe
  source 1..80: mol_type = other DNA
ttctcattttcccaggctgcttcccctcccgggtgaggagcgtcctgagactaaggaaagagcctggaaaatggagcaga

SEQ ID NO: 103489 - DNA, 80 bp, synthetic construct; identical to SEQ ID NO: 35947
  misc_feature 1..80: note = Artificially Synthesized Probe
  source 1..80: mol_type = other DNA

SEQ ID NO: 103490 - DNA, 80 bp, synthetic construct
  misc_feature 1..80: note = Artificially Synthesized Probe
  source 1..80: mol_type = other DNA
tgccacgttttccttctcagcctcatctgtcactactcacacaaaggcaaagggactgagtgagcagagcccagcagcac

SEQ ID NO: 103491 - DNA, 80 bp, synthetic construct
  misc_feature 1..80: note = Artificially Synthesized Probe
  source 1..80: mol_type = other DNA
tcccccagacacactttaaaatgaagccccattcaaggaaagggtaaggataagagaccatgtattgagacaaagacttc

SEQ ID NO: 103492 - DNA, 80 bp, synthetic construct
  misc_feature 1..80: note = Artificially Synthesized Probe
  source 1..80: mol_type = other DNA
taaatttggggcttatgcaaaagacttgggtgcttttagttgattgctaagctcaacaggagtgaatggtataatgtgaa

SEQ ID NO: 103493 - DNA, 80 bp, synthetic construct; identical to SEQ ID NO: 35948
  misc_feature 1..80: note = Artificially Synthesized Probe
  source 1..80: mol_type = other DNA

SEQ ID NO: 103494 - DNA, 80 bp, synthetic construct
  misc_feature 1..80: note = Artificially Synthesized Probe
  source 1..80: mol_type = other DNA
ggattgaatcacattagaatctcttaggaggacagaacaaccgatgcaagcgagttgttgggaggcgagttatggctcag

SEQ ID NO: 103495 - DNA, 80 bp, synthetic construct
  misc_feature 1..80: note = Artificially Synthesized Probe
  source 1..80: mol_type = other DNA
gtggtcgcacgtgcctgtaatcccagctactccggaggctgaggcaggagaatcgcttgaacccgggaggagaagtttgt

SEQ ID NO: 103496 - DNA, 80 bp, synthetic construct
  misc_feature 1..80: note = Artificially Synthesized Probe
  source 1..80: mol_type = other DNA
aggagattgagaccatcctggctaacacagtgaagccccgtctctactaaaaacacaaaaaaaattagccgggcgtggtg

SEQ ID NO: 103497 - DNA, 80 bp, synthetic construct
  misc_feature 1..80: note = Artificially Synthesized Probe
  source 1..80: mol_type = other DNA
catcactaatgaaaatacaaagaattagctgggtgtggtggtgcgcctgtcatcccagctactcagaaggctgaggaagg

SEQ ID NO: 103498 - DNA, 80 bp, synthetic construct
  misc_feature 1..80: note = Artificially Synthesized Probe
  source 1..80: mol_type = other DNA
acaagttagctgcctgggcagtatgggcagtaaagagattgttgaccctggagttactcaggcaaaggctagatgaccac

SEQ ID NO: 103499 - DNA, 80 bp, synthetic construct; identical to SEQ ID NO: 35949
  misc_feature 1..80: note = Artificially Synthesized Probe
  source 1..80: mol_type = other DNA

SEQ ID NO: 103500 - DNA, 80 bp, synthetic construct
  misc_feature 1..80: note = Artificially Synthesized Probe
  source 1..80: mol_type = other DNA
tctatactgttatatggtactgtagtccatttattcttgcttttaaataggcttctatagtgtataaatatatcaaattt

SEQ ID NO: 103501 - DNA, 80 bp, synthetic construct
  misc_feature 1..80: note = Artificially Synthesized Probe
  source 1..80: mol_type = other DNA
atgcatgttcagatttagtaaatactgccagattgtttttttttaaacagattacaaaagagatttctaaagcgggtatc

SEQ ID NO: 103502 - DNA, 80 bp, synthetic construct
  misc_feature 1..80: note = Artificially Synthesized Probe
  source 1..80: mol_type = other DNA
gtagtcccagctactcgggaggctgaggcaggagaatggcctgaacctgggaggcggagcttgcagtgagccgagatcgc

SEQ ID NO: 103503 - DNA, 80 bp, synthetic construct; identical to SEQ ID NO: 35950
  misc_feature 1..80: note = Artificially Synthesized Probe
  source 1..80: mol_type = other DNA

SEQ ID NO: 103504 - DNA, 80 bp, synthetic construct
  misc_feature 1..80: note = Artificially Synthesized Probe
  source 1..80: mol_type = other DNA
tttctttaaaaataaaatgttggctctgattcactgaatttatttctccacctaatgggtcacagttggaaaaatcctat

SEQ ID NO: 103505 - DNA, 80 bp, synthetic construct
  misc_feature 1..80: note = Artificially Synthesized Probe
  source 1..80: mol_type = other DNA
tcgagaccagtctggccaacgtgctgaaaccccatctctactaaaaatacaaaaattagccgggtgtggtgcctgcacct

SEQ ID NO: 103506 - DNA, 80 bp, synthetic construct
  misc_feature 1..80: note = Artificially Synthesized Probe
  source 1..80: mol_type = other DNA
caaacaggtcagacgctgtgctagatgctaagaataaaacaatgaatgcaatgaatgagactgggtctctgcctttaatg

SEQ ID NO: 103507 - DNA, 80 bp, synthetic construct; identical to SEQ ID NO: 35951
  misc_feature 1..80: note = Artificially Synthesized Probe
  source 1..80: mol_type = other DNA

SEQ ID NO: 103508 - DNA, 80 bp, synthetic construct
  misc_feature 1..80: note = Artificially Synthesized Probe
  source 1..80: mol_type = other DNA
tgaatttttgtctggcttgacaagataacaaagccaggttgagtgggaagaaaattttgccaaaagaacacaagcagatt

SEQ ID NO: 103509 - DNA, 80 bp, synthetic construct
  misc_feature 1..80: note = Artificially Synthesized Probe
  source 1..80: mol_type = other DNA
ttatgacttgtttctgaagctagctacttgctcaatttacccacaaaggacaaggtgcttggtattttagttctcaaagt

SEQ ID NO: 103510 - DNA, 80 bp, synthetic construct
  misc_feature 1..80: note = Artificially Synthesized Probe
  source 1..80: mol_type = other DNA
atatactggcattacaaaaagctgatttggtcaccagctttcagatttatttccgtgaacagggcgagagttgtcaaaag

SEQ ID NO: 103511 - DNA, 80 bp, synthetic construct; identical to SEQ ID NO: 35952
  misc_feature 1..80: note = Artificially Synthesized Probe
  source 1..80: mol_type = other DNA

SEQ ID NO: 103512 - DNA, 80 bp, synthetic construct
  misc_feature 1..80: note = Artificially Synthesized Probe
  source 1..80: mol_type = other DNA
agtagagacggggtttcaccatgttggcctggctggtctcaaactcctgacctcaagtgatccacccgccttggcctccc

SEQ ID NO: 103513 - DNA, 80 bp, synthetic construct
  misc_feature 1..80: note = Artificially Synthesized Probe
  source 1..80: mol_type = other DNA
cttctagaggctctaaaggagaatttgttccttgcccttcatggcttcgagagactgcccacattctgggttcatagccc

SEQ ID NO: 103514 - DNA, 80 bp, synthetic construct
  misc_feature 1..80: note = Artificially Synthesized Probe
  source 1..80: mol_type = other DNA
caaagccctctcttgctatggaaagtggcatatacacaggatctggggattaggaatgtggacattcttataaggccatt

SEQ ID NO: 103515 - DNA, 80 bp, synthetic construct
  misc_feature 1..80: note = Artificially Synthesized Probe
  source 1..80: mol_type = other DNA
aaaagagtgaactagaaatgtttaagggcaaactataagactgaaggttaaaaaaggaaagcaaattagtctgttttgtt

SEQ ID NO: 103516 - DNA, 80 bp, synthetic construct; identical to SEQ ID NO: 35953
  misc_feature 1..80: note = Artificially Synthesized Probe
  source 1..80: mol_type = other DNA

SEQ ID NO: 103517 - DNA, 80 bp, synthetic construct
  misc_feature 1..80: note = Artificially Synthesized Probe
  source 1..80: mol_type = other DNA
ttcacacaactagtatgtgttgtatgaaggcctagttaattccagtacctttacttattatggtgctggtgctttgcatg

SEQ ID NO: 103518 - DNA, 80 bp, synthetic construct
  misc_feature 1..80: note = Artificially Synthesized Probe
  source 1..80: mol_type = other DNA
gcctatacttggatttcggcttggggaatttgccagaatcaatgctttcactcctacttgcttattttccacacactaga

SEQ ID NO: 103519 - DNA, 80 bp, synthetic construct; identical to SEQ ID NO: 35913
  misc_feature 1..80: note = Artificially Synthesized Probe
  source 1..80: mol_type = other DNA

SEQ ID NO: 103520 - DNA, 80 bp, synthetic construct; identical to SEQ ID NO: 35954
  misc_feature 1..80: note = Artificially Synthesized Probe
  source 1..80: mol_type = other DNA

SEQ ID NO: 103521 - DNA, 80 bp, synthetic construct
  misc_feature 1..80: note = Artificially Synthesized Probe
  source 1..80: mol_type = other DNA
aaatgcactgaggacttgttttcctctgcctcagagcattttctgagttctgtggccagcaagacaagcatgatctgaat

SEQ ID NO: 103522 - DNA, 80 bp, synthetic construct
  misc_feature 1..80: note = Artificially Synthesized Probe
  source 1..80: mol_type = other DNA
cattccacagaaacgtctttctttcttgtcttttccaaggccagtgagggaagaggtaacttgcaactagtgtcttctta

SEQ ID NO: 103523 - DNA, 80 bp, synthetic construct
  misc_feature 1..80: note = Artificially Synthesized Probe
  source 1..80: mol_type = other DNA
catgttgaaaccccatctctactaaagatacaaaaattagtgggcatggtggggggtgcctgtaatcccagctaatcggg

SEQ ID NO: 103524 - DNA, 80 bp, synthetic construct
  misc_feature 1..80: note = Artificially Synthesized Probe
  source 1..80: mol_type = other DNA
aaattgaataatttctagcatttcacacaatttaagaatgaatttattttccacttcataatgtggtatattatcattca

SEQ ID NO: 103525 - DNA, 80 bp, synthetic construct; identical to SEQ ID NO: 35955
  misc_feature 1..80: note = Artificially Synthesized Probe
  source 1..80: mol_type = other DNA

SEQ ID NO: 103526 - DNA, 80 bp, synthetic construct
  misc_feature 1..80: note = Artificially Synthesized Probe
  source 1..80: mol_type = other DNA
tgttgctgttaatctctattactatcctgaaacgtttcctgaaatgataataaacagaaaattttaacataagaaagtaa

SEQ ID NO: 103527 - DNA, 80 bp, synthetic construct
  misc_feature 1..80: note = Artificially Synthesized Probe
  source 1..80: mol_type = other DNA
gaagaagttcacatttgtgtctaccaaatgacaacatgtaaagtttggaattgagttggttttaggtttttctgtgtatc

SEQ ID NO: 103528 - DNA, 80 bp, synthetic construct
  misc_feature 1..80: note = Artificially Synthesized Probe
  source 1..80: mol_type = other DNA
atataccagttgttcccacctacacatctagccttgcctttgctgggataaatttgtatacccttcagaggttagattca

SEQ ID NO: 103529 - DNA, 80 bp, synthetic construct; identical to SEQ ID NO: 35956
  misc_feature 1..80: note = Artificially Synthesized Probe
  source 1..80: mol_type = other DNA

SEQ ID NO: 103530 - DNA, 80 bp, synthetic construct
  misc_feature 1..80: note = Artificially Synthesized Probe
  source 1..80: mol_type = other DNA
gtatatacctgtgaaatcatcaccacaatcaagatgacgaacttatccatgatcccaaaaaggttccttctgcccttttt

SEQ ID NO: 103531 - DNA, 80 bp, synthetic construct
  misc_feature 1..80: note = Artificially Synthesized Probe
  source 1..80: mol_type = other DNA
tcctatgatctagacttctttaatgctggacagatgatagtgaatgatctaaaaaccctcccttccagagactgacattc

SEQ ID NO: 103532 - DNA, 80 bp, synthetic construct
  misc_feature 1..80: note = Artificially Synthesized Probe
  source 1..80: mol_type = other DNA
ttcttgaccacaggtcaagtcccccacttcctcattctttctgaatgttgtttactgcgtcatgtattccagttcctcaa

SEQ ID NO: 103533 - DNA, 80 bp, synthetic construct
  misc_feature 1..80: note = Artificially Synthesized Probe
  source 1..80: mol_type = other DNA
tcctagaggattctatgagtgttgttttagtatgttataaaaccgcactgagaagagagactctagattcattcttgcta

SEQ ID NO: 103534 - DNA, 80 bp, synthetic construct; identical to SEQ ID NO: 35957
  misc_feature 1..80: note = Artificially Synthesized Probe
  source 1..80: mol_type = other DNA

SEQ ID NO: 103535 - DNA, 80 bp, synthetic construct
  misc_feature 1..80: note = Artificially Synthesized Probe
  source 1..80: mol_type = other DNA
taggtggaaaggggaaaaaaatcacctgtttcttaacattcagtctagggctctagaaagattgagccaactgcaatata

SEQ ID NO: 103536 - DNA, 80 bp, synthetic construct
  misc_feature 1..80: note = Artificially Synthesized Probe
  source 1..80: mol_type = other DNA
catgtcttcttttgaaagagtgatacctatgtcttggctgatgcaggggaggtagaggaaaatttattagatatttggat

SEQ ID NO: 103537 - DNA, 80 bp, synthetic construct
  misc_feature 1..80: note = Artificially Synthesized Probe
  source 1..80: mol_type = other DNA
tcccgaaacttaaagaaattgttgtggatgcacgatgattttgtagctcactgtagctattggggacttagcactccaga

SEQ ID NO: 103538 - DNA, 80 bp, synthetic construct
  misc_feature 1..80: note = Artificially Synthesized Probe
  source 1..80: mol_type = other DNA
cctctgggagctttgccaattaagcatcctcacttgcagaggttataatgatagatcttgagatgagaaaaaatgataat

SEQ ID NO: 103539 - DNA, 80 bp, synthetic construct; identical to SEQ ID NO: 35958
  misc_feature 1..80: note = Artificially Synthesized Probe
  source 1..80: mol_type = other DNA

SEQ ID NO: 103540 - DNA, 80 bp, synthetic construct
  misc_feature 1..80: note = Artificially Synthesized Probe
  source 1..80: mol_type = other DNA
cacactagccacttccgttttgggattttaattattttgtcacatggcatctgttacaccagtactcaaatactcaagtg

SEQ ID NO: 103541 - DNA, 80 bp, synthetic construct
  misc_feature 1..80: note = Artificially Synthesized Probe
  source 1..80: mol_type = other DNA
tcagtagctcatttccttttgttgctgagtagtatttcattgtatgaatgtgctacacgttattgattcaccattcgttg

SEQ ID NO: 103542 - DNA, 80 bp, synthetic construct
  misc_feature 1..80: note = Artificially Synthesized Probe
  source 1..80: mol_type = other DNA
cagtccccacggcagaccccgagccgggaaagacggcgcccggagccagccgggagctgggcagcagcggccgaggagga

SEQ ID NO: 103543 - DNA, 80 bp, synthetic construct
  misc_feature 1..80: note = Artificially Synthesized Probe
  source 1..80: mol_type = other DNA
aggttccctgtaaatgtgtggttagaaatagggcatattgggaagagtaaaagtttggagtcaaatagacagttttcaag

SEQ ID NO: 103544 - DNA, 80 bp, synthetic construct
  misc_feature 1..80: note = Artificially Synthesized Probe
  source 1..80: mol_type = other DNA
actgaatgaactgatgcctagaaagtatcaggcattcagtaaattgcagaggcagcattggtggtgagtggtgatggttg

SEQ ID NO: 103545 - DNA, 80 bp, synthetic construct; identical to SEQ ID NO: 35959
  misc_feature 1..80: note = Artificially Synthesized Probe
  source 1..80: mol_type = other DNA

SEQ ID NO: 103546 - DNA, 80 bp, synthetic construct
  misc_feature 1..80: note = Artificially Synthesized Probe
  source 1..80: mol_type = other DNA
aattggaacacaatctgcatttggttcaatgcctactcctgtgaggaccccaagaaagagcaaacttcagcagtcttgct

SEQ ID NO: 103547 - DNA, 80 bp, synthetic construct
  misc_feature 1..80: note = Artificially Synthesized Probe
  source 1..80: mol_type = other DNA
tagtaagaaaaaaagggggaggatgctcagtatattttccgccactctaaacctccggactttttatttctctgcgttct

SEQ ID NO: 103548 - DNA, 80 bp, synthetic construct
  misc_feature 1..80: note = Artificially Synthesized Probe
  source 1..80: mol_type = other DNA
ttcacgccattctcctgcctcagcctcccgagtagctgggactacaggcgcccgccaccgcgcccggctaattttttgta

SEQ ID NO: 103549 - DNA, 80 bp, synthetic construct; identical to SEQ ID NO: 35960
  misc_feature 1..80: note = Artificially Synthesized Probe
  source 1..80: mol_type = other DNA

SEQ ID NO: 103550 - DNA, 80 bp, synthetic construct
  misc_feature 1..80: note = Artificially Synthesized Probe
  source 1..80: mol_type = other DNA
aacacaccgttcattttcctataattgggtctttgttatgtttccttgtgtatttacacccatcctttaagacctagatt

SEQ ID NO: 103551 - DNA, 80 bp, synthetic construct; identical to SEQ ID NO: 35914
  misc_feature 1..80: note = Artificially Synthesized Probe
  source 1..80: mol_type = other DNA

SEQ ID NO: 103552 - DNA, 80 bp, synthetic construct
  misc_feature 1..80: note = Artificially Synthesized Probe
  source 1..80: mol_type = other DNA
gcttccctcaatagattctgagtactttaaccacagggtatatatactttttcacctttgtatttccagtacctggcata

SEQ ID NO: 103553 - DNA, 80 bp, synthetic construct; identical to SEQ ID NO: 35961
  misc_feature 1..80: note = Artificially Synthesized Probe
  source 1..80: mol_type = other DNA

SEQ ID NO: 103554 - DNA, 80 bp, synthetic construct
  misc_feature 1..80: note = Artificially Synthesized Probe
  source 1..80: mol_type = other DNA
agagaagaaagtatggagcctagacaggcatcagtaccttagaaatagttttagtggtgattttggtcctagaatacaaa

SEQ ID NO: 103555 - DNA, 80 bp, synthetic construct
  misc_feature 1..80: note = Artificially Synthesized Probe
  source 1..80: mol_type = other DNA
gtttacggaggaaggtctatacctgccttatagaaaatatctctctctgcaggctcctaagcaagaagaaacccaagtgt

SEQ ID NO: 103556 - DNA, 80 bp, synthetic construct
  misc_feature 1..80: note = Artificially Synthesized Probe
  source 1..80: mol_type = other DNA
tggaagaaatcatcacaggacagtttgagaatgtcagaatatcagggggtggcagatggccttcagagaagcaattattt

SEQ ID NO: 103557 - DNA, 80 bp, synthetic construct
  misc_feature 1..80: note = Artificially Synthesized Probe
  source 1..80: mol_type = other DNA
aacagcttgtgagtaggttgtacttggaaaatgcttggtacttccgaaagcaaaataatgtcctggtgagaatattaata

SEQ ID NO: 103558 - DNA, 80 bp, synthetic construct; identical to SEQ ID NO: 35962
  misc_feature 1..80: note = Artificially Synthesized Probe
  source 1..80: mol_type = other DNA

SEQ ID NO: 103559 - DNA, 80 bp, synthetic construct
  misc_feature 1..80: note = Artificially Synthesized Probe
  source 1..80: mol_type = other DNA
ctgtctctaccataccccaattctccttgcactttggtttatcaaatgttgtcacaaattgcaaccccttagacttatac

SEQ ID NO: 103560 - DNA, 80 bp, synthetic construct
  misc_feature 1..80: note = Artificially Synthesized Probe
  source 1..80: mol_type = other DNA
agtatgcttattaactcagtacccatctaaagtgacctctctatccttccagttattgattcatatcaggcaggcagtgt

SEQ ID NO: 103561 - DNA, 80 bp, synthetic construct
  misc_feature 1..80: note = Artificially Synthesized Probe
  source 1..80: mol_type = other DNA
tattaaaatgggttttatgcttaagcatctattagaatagaactgcataattactgcaaggaaccttagaaagtcatgtc

SEQ ID NO: 103562 - DNA, 80 bp, synthetic construct; identical to SEQ ID NO: 35963
  misc_feature 1..80: note = Artificially Synthesized Probe
  source 1..80: mol_type = other DNA

SEQ ID NO: 103563 - DNA, 80 bp, synthetic construct
  misc_feature 1..80: note = Artificially Synthesized Probe
  source 1..80: mol_type = other DNA
tcttgaaatattttgcccattttccattgagttgtttgggtttcactgagttcattgggttcatttcatattctaaatgc

SEQ ID NO: 103564 - DNA, 80 bp, synthetic construct
  misc_feature 1..80: note = Artificially Synthesized Probe
  source 1..80: mol_type = other DNA
cccaagagcagttagaagtgggtcaaacttgtgtgggctaaataaaacatgtcggatgggctgaatttggcctgagggtt

SEQ ID NO: 103565 - DNA, 80 bp, synthetic construct
  misc_feature 1..80: note = Artificially Synthesized Probe
  source 1..80: mol_type = other DNA
agaggggagtgcatacgtagtacattcctctttggcattgtttactctcagggaaagcttttaaggaggagaagggaaag

SEQ ID NO: 103566 - DNA, 80 bp, synthetic construct; identical to SEQ ID NO: 35964
  misc_feature 1..80: note = Artificially Synthesized Probe
  source 1..80: mol_type = other DNA

SEQ ID NO: 103567 - DNA, 80 bp, synthetic construct
  misc_feature 1..80: note = Artificially Synthesized Probe
  source 1..80: mol_type = other DNA
gcaggcacctgtaatcccagctactggggaggctggggcaggagaatcgcttgaacctgggaggcggaggttgtggtgag

SEQ ID NO: 103568 - DNA, 80 bp, synthetic construct
  misc_feature 1..80: note = Artificially Synthesized Probe
  source 1..80: mol_type = other DNA
tctttctgtagggttattgaaatcatctgtttctgacatccccatcagacagtcagttgtcaagacagtagatagtcccc

SEQ ID NO: 103569 - DNA, 80 bp, synthetic construct
  misc_feature 1..80: note = Artificially Synthesized Probe
  source 1..80: mol_type = other DNA
cactgcacccagccactaactagcatgctccctcttatgggcctttgcattttatgttctctgcttagaagactctttcc

SEQ ID NO: 103570 - DNA, 80 bp, synthetic construct
  misc_feature 1..80: note = Artificially Synthesized Probe
  source 1..80: mol_type = other DNA
tttttatagcacttgttcccaactgctactatacaatttatttattgtctccccttactgtaaaaattccatgagtgcag

SEQ ID NO: 103571 - DNA, 80 bp, synthetic construct; identical to SEQ ID NO: 35965
  misc_feature 1..80: note = Artificially Synthesized Probe
  source 1..80: mol_type = other DNA

SEQ ID NO: 103572 - DNA, 80 bp, synthetic construct
  misc_feature 1..80: note = Artificially Synthesized Probe
  source 1..80: mol_type = other DNA
ctgatcattgccattctttccttaatttaaaatccttcattgatttcccgtagcttttcacattagactcagtggcctta

SEQ ID NO: 103573 - DNA, 80 bp, synthetic construct
  misc_feature 1..80: note = Artificially Synthesized Probe
  source 1..80: mol_type = other DNA
catctacgtttaaatgttcctttccctgagtttctctgagtccctgtgctagttaagttccctctgcattttccttcaca

SEQ ID NO: 103574 - DNA, 80 bp, synthetic construct
  misc_feature 1..80: note = Artificially Synthesized Probe
  source 1..80: mol_type = other DNA
tatctaagaaatcattacttaatccagattacaaaaatattctatttttttctagaagttttatagttttgcatttttac

SEQ ID NO: 103575 - DNA, 80 bp, synthetic construct
  misc_feature 1..80: note = Artificially Synthesized Probe
  source 1..80: mol_type = other DNA
tccctgatacataatagaagcttagtaaatacttgcagagagataaacagaaatgacaaataggtaggtgtcttctcctc

SEQ ID NO: 103576 - DNA, 80 bp, synthetic construct; identical to SEQ ID NO: 35966
  misc_feature 1..80: note = Artificially Synthesized Probe
  source 1..80: mol_type = other DNA

SEQ ID NO: 103577 - DNA, 80 bp, synthetic construct
  misc_feature 1..80: note = Artificially Synthesized Probe
  source 1..80: mol_type = other DNA
caatacacccactccagctttccaaagtgtgtgagagaaattggcacttggccaattcttggttttctattgatcttaat

SEQ ID NO: 103578 - DNA, 80 bp, synthetic construct
  misc_feature 1..80: note = Artificially Synthesized Probe
  source 1..80: mol_type = other DNA
gatacttatgtgaattcttcatacttttaacggttctgtaattgcaaggctaaactcacttgtacaatgattaaaataaa

SEQ ID NO: 103579 - DNA, 80 bp, synthetic construct
  misc_feature 1..80: note = Artificially Synthesized Probe
  source 1..80: mol_type = other DNA
aaccccatctctaccaaaaatacaaaaattagctaggcatggtggcccacgcctgtaatcccagctacacaggaggctga

SEQ ID NO: 103580 - DNA, 80 bp, synthetic construct; identical to SEQ ID NO: 35967
  misc_feature 1..80: note = Artificially Synthesized Probe
  source 1..80: mol_type = other DNA

SEQ ID NO: 103581 - DNA, 80 bp, synthetic construct
  misc_feature 1..80: note = Artificially Synthesized Probe
  source 1..80: mol_type = other DNA
ctcgacctgagggttttacttccttgctaagttctttgcctttttcataacagcctggaagcacagattgtttatatgca

SEQ ID NO: 103582 - DNA, 80 bp, synthetic construct
  misc_feature 1..80: note = Artificially Synthesized Probe
  source 1..80: mol_type = other DNA
tgtcaatattctacattttgaggcaaaaattgaaggactagggcaaaaatgtgaggggaatggataaaatgcttactaca

SEQ ID NO: 103583 - DNA, 80 bp, synthetic construct; identical to SEQ ID NO: 35968
  misc_feature 1..80: note = Artificially Synthesized Probe
  source 1..80: mol_type = other DNA

SEQ ID NO: 103584 - DNA, 80 bp, synthetic construct
  misc_feature 1..80: note = Artificially Synthesized Probe
  source 1..80: mol_type = other DNA
gtggtgccgtctcggctcactgcaacctccgcctcccaggttcaagcaattctcctgcctcagcctcccgagtagctggg

SEQ ID NO: 103585 - DNA, 80 bp, synthetic construct
  misc_feature 1..80: note = Artificially Synthesized Probe
  source 1..80: mol_type = other DNA
cctttgttcaaatcaattgaccacatatataatcgtctgtatctgggtttctattgtgtttgactgatttatttatctgc

SEQ ID NO: 103586 - DNA, 80 bp, synthetic construct
  misc_feature 1..80: note = Artificially Synthesized Probe
  source 1..80: mol_type = other DNA
agcctctaattacttttaattaaaaattttgcatttacgtataaacattcagaatatcaccaaaacaggggcaatatcat

SEQ ID NO: 103587 - DNA, 80 bp, synthetic construct
  misc_feature 1..80: note = Artificially Synthesized Probe
  source 1..80: mol_type = other DNA
aatttctgttctagtttaaaccccgaaacagtaccaggcaaggttagtggctattgaaaatatcattaaggacagggtta

SEQ ID NO: 103588 - DNA, 80 bp, synthetic construct; identical to SEQ ID NO: 35969
  misc_feature 1..80: note = Artificially Synthesized Probe
  source 1..80: mol_type = other DNA

SEQ ID NO: 103589 - DNA, 80 bp, synthetic construct
  misc_feature 1..80: note = Artificially Synthesized Probe
  source 1..80: mol_type = other DNA
tcccagaatacagcaatagcctttatatctataatcttaaaagcctttctttcctcaaggctgtatattatctgcagcag

SEQ ID NO: 103590 - DNA, 80 bp, synthetic construct
  misc_feature 1..80: note = Artificially Synthesized Probe
  source 1..80: mol_type = other DNA
ctttctctctctcgtttccttgtagacagaatatagatttttgtttctttcttataatgggcctgttcaccttcaccctg

SEQ ID NO: 103591 - DNA, 80 bp, synthetic construct
  misc_feature 1..80: note = Artificially Synthesized Probe
  source 1..80: mol_type = other DNA
ggagagaggagggagggaaggaaggaaggaaggaaggaaggaaggaaggaaggaaggaaggaagggagggagggagggag

SEQ ID NO: 103592 - DNA, 80 bp, synthetic construct
  misc_feature 1..80: note = Artificially Synthesized Probe
  source 1..80: mol_type = other DNA
tgcctcttactcccttggatctcctttccccaagtgtctagttaacttttcctcagccaggcagtcacccagtacctgtt

SEQ ID NO: 103593 - DNA, 80 bp, synthetic construct; identical to SEQ ID NO: 35970
  misc_feature 1..80: note = Artificially Synthesized Probe
  source 1..80: mol_type = other DNA

SEQ ID NO: 103594 - DNA, 80 bp, synthetic construct
  misc_feature 1..80: note = Artificially Synthesized Probe
  source 1..80: mol_type = other DNA
catactgctaagaaagacagatggagaaaagatgggattggttctgccactttttagcaatgtgatcttggtcaagcaaa

SEQ ID NO: 103595 - DNA, 80 bp, synthetic construct
  misc_feature 1..80: note = Artificially Synthesized Probe
  source 1..80: mol_type = other DNA
actaaatagtaacctgaaaaattatcggtagagatagtttgctagcagcttggttctttccttgagactgttttggttac

SEQ ID NO: 103596 - DNA, 80 bp, synthetic construct; identical to SEQ ID NO: 35971
  misc_feature 1..80: note = Artificially Synthesized Probe
  source 1..80: mol_type = other DNA

SEQ ID NO: 103597 - DNA, 80 bp, synthetic construct
  misc_feature 1..80: note = Artificially Synthesized Probe
  source 1..80: mol_type = other DNA
tgatttggttacagtagctttatacgttttgaaatcacgtagtcaaattcttgagctttgctcttcttgttcaaaattgt

SEQ ID NO: 103598 - DNA, 80 bp, synthetic construct
  misc_feature 1..80: note = Artificially Synthesized Probe
  source 1..80: mol_type = other DNA
tggcttgactgagactgaaggtctcagacagccttgctcacatgtctggcaggtggtgactgtcagctggggcatcttca

SEQ ID NO: 103599 - DNA, 80 bp, synthetic construct
  misc_feature 1..80: note = Artificially Synthesized Probe
  source 1..80: mol_type = other DNA
gcaagccactttgccaacccagattcaagagttggggaaataggctctacttcttaatggcaggagtatcacattgcaaa

SEQ ID NO: 103600 - DNA, 80 bp, synthetic construct
  misc_feature 1..80: note = Artificially Synthesized Probe
  source 1..80: mol_type = other DNA
tgttattatataaacctttttttttgttgttctgtttcattgacagcttttcttagtgacactaaagatcgaggccctcc

SEQ ID NO: 103601 - DNA, 80 bp, synthetic construct; identical to SEQ ID NO: 35972
  misc_feature 1..80: note = Artificially Synthesized Probe
  source 1..80: mol_type = other DNA

SEQ ID NO: 103602 - DNA, 80 bp, synthetic construct
  misc_feature 1..80: note = Artificially Synthesized Probe
  source 1..80: mol_type = other DNA
ttaggataaagtttaatttataaattaaatgttaatgaggctaacagtagttaataataacatagaacaattataacaat

SEQ ID NO: 103603 - DNA, 80 bp, synthetic construct
  misc_feature 1..80: note = Artificially Synthesized Probe
  source 1..80: mol_type = other DNA
attcaagggtgagatagagtggatggcacgagatttcatcatgctgctcagaacaatgtgcaatttaaaatttatgagtt

SEQ ID NO: 103604 - DNA, 80 bp, synthetic construct
  misc_feature 1..80: note = Artificially Synthesized Probe
  source 1..80: mol_type = other DNA
atcacctacacccttggtttacttctcagataaactcaggaagtttaaatggcattctgagaatctgtagctgcaacata

SEQ ID NO: 103605 - DNA, 80 bp, synthetic construct
  misc_feature 1..80: note = Artificially Synthesized Probe
  source 1..80: mol_type = other DNA
agtgctgcatgctctgcttcttcatatgtttgtccttagatttgaccaaaaacaataactgataatgtaatacagattcc

SEQ ID NO: 103606 - DNA, 80 bp, synthetic construct; identical to SEQ ID NO: 35973
  misc_feature 1..80: note = Artificially Synthesized Probe
  source 1..80: mol_type = other DNA

SEQ ID NO: 103607 - DNA, 80 bp, synthetic construct
  misc_feature 1..80: note = Artificially Synthesized Probe
  source 1..80: mol_type = other DNA
accaatactttctgtacatcctaccagatatttctgtgggcaaagaatatgcaccatataacgtgtgcctaagaattaac

SEQ ID NO: 103608 - DNA, 80 bp, synthetic construct; identical to SEQ ID NO: 35915
  misc_feature 1..80: note = Artificially Synthesized Probe
  source 1..80: mol_type = other DNA

SEQ ID NO: 103609 - DNA, 80 bp, synthetic construct
  misc_feature 1..80: note = Artificially Synthesized Probe
  source 1..80: mol_type = other DNA
aaccccctcctttttttgttttttttttttcaccttttggatctgctgtgatgcagaaagggcaagcagagctgcagagc

SEQ ID NO: 103610 - DNA, 80 bp, synthetic construct; identical to SEQ ID NO: 35974
  misc_feature 1..80: note = Artificially Synthesized Probe
  source 1..80: mol_type = other DNA

SEQ ID NO: 103611 - DNA, 80 bp, synthetic construct
  misc_feature 1..80: note = Artificially Synthesized Probe
  source 1..80: mol_type = other DNA
acgtttgttcattttcatatccattcatccatcctgtggactctgaatgacagcacctaaaatacaaaacgcctccatga

SEQ ID NO: 103612 - DNA, 80 bp, synthetic construct
  misc_feature 1..80: note = Artificially Synthesized Probe
  source 1..80: mol_type = other DNA
agcagtactcagagagaggaggggacatgctaaatgttttttgccaaagtagggttgactcctccagggcttaaagacaa

SEQ ID NO: 103613 - DNA, 80 bp, synthetic construct
  misc_feature 1..80: note = Artificially Synthesized Probe
  source 1..80: mol_type = other DNA
ggcaagtgctttcatagagataaggacagtacactctgagatcttgagagaaaatgtctacttttattaaaggagtaggg

SEQ ID NO: 103614 - DNA, 80 bp, synthetic construct
  misc_feature 1..80: note = Artificially Synthesized Probe
  source 1..80: mol_type = other DNA
ttgggggaaggaagagagatatgttcaaataagagactggactatagagaggtaagaaaaagagagttagaacaggagag

SEQ ID NO: 103615 - DNA, 80 bp, synthetic construct; identical to SEQ ID NO: 35975
  misc_feature 1..80: note = Artificially Synthesized Probe
  source 1..80: mol_type = other DNA

SEQ ID NO: 103616 - DNA, 80 bp, synthetic construct
  misc_feature 1..80: note = Artificially Synthesized Probe
  source 1..80: mol_type = other DNA
ggtattacactccatgatgaaaggagggcattgcttagcatatatgcttcatttgtatttttgaatgagtgagtgattta

SEQ ID NO: 103617 - DNA, 80 bp, synthetic construct
  misc_feature 1..80: note = Artificially Synthesized Probe
  source 1..80: mol_type = other DNA
ttataagacacggaacaagcatcactctccccattttttaagtgagggaaccaggactcacggaaattgtgactttttca

SEQ ID NO: 103618 - DNA, 80 bp, synthetic construct; identical to SEQ ID NO: 35976
  misc_feature 1..80: note = Artificially Synthesized Probe
  source 1..80: mol_type = other DNA

SEQ ID NO: 103619 - DNA, 80 bp, synthetic construct
  misc_feature 1..80: note = Artificially Synthesized Probe
  source 1..80: mol_type = other DNA
aaaagacagtgtgacaattcttcaaggatctagaactagaaatgccatttgacccagcaatcccattactgggtatatac

SEQ ID NO: 103620 - DNA, 80 bp, synthetic construct
  misc_feature 1..80: note = Artificially Synthesized Probe
  source 1..80: mol_type = other DNA
ataatatctttctaagggaacagttaaatcaacttcatttggtcttccatggacatgagtttcaagtggctttctggcct

SEQ ID NO: 103621 - DNA, 80 bp, synthetic construct
  misc_feature 1..80: note = Artificially Synthesized Probe
  source 1..80: mol_type = other DNA
ccataaaaaaagaatgagttcatgtcctttgcagggacgtggatgaagctggaaaccatcattctcagcaaactaacaca

SEQ ID NO: 103622 - DNA, 80 bp, synthetic construct
  misc_feature 1..80: note = Artificially Synthesized Probe
  source 1..80: mol_type = other DNA
ggttgatgggtgtggcaaaccaacatggcacacgtatactgtgcaacaaacctgcacgttctgcacatgtatcccagaac

SEQ ID NO: 103623 - DNA, 80 bp, synthetic construct; identical to SEQ ID NO: 35977
  misc_feature 1..80: note = Artificially Synthesized Probe
  source 1..80: mol_type = other DNA

SEQ ID NO: 103624 - DNA, 80 bp, synthetic construct
  misc_feature 1..80: note = Artificially Synthesized Probe
  source 1..80: mol_type = other DNA
cctgctgttccctctgccttgaaaaccttttctctcctattgtttatttggttaaagtttactcatccttcaagattcag

SEQ ID NO: 103625 - DNA, 80 bp, synthetic construct
  misc_feature 1..80: note = Artificially Synthesized Probe
  source 1..80: mol_type = other DNA
agtaagtgctcagtaaatattcatcaactaaactagctgaaaagtattaaaaattagatatcctattggatttgtatctc

SEQ ID NO: 103626 - DNA, 80 bp, synthetic construct
  misc_feature 1..80: note = Artificially Synthesized Probe
  source 1..80: mol_type = other DNA
tgtgtcacccaggctggagtgcagtggtgcaatctcagctcactgcagcctctgcctcctggattcaagcagttctcctg

SEQ ID NO: 103627 - DNA, 80 bp, synthetic construct
  misc_feature 1..80: note = Artificially Synthesized Probe
  source 1..80: mol_type = other DNA
cgaactacgcgcctggcctcttttccactttaaatggaatgataaaactaaaaatgaaaaggacgggagagaaagagtct

SEQ ID NO: 103628 - DNA, 80 bp, synthetic construct; identical to SEQ ID NO: 35978
  misc_feature 1..80: note = Artificially Synthesized Probe
  source 1..80: mol_type = other DNA

SEQ ID NO: 103629 - DNA, 80 bp, synthetic construct
  misc_feature 1..80: note = Artificially Synthesized Probe
  source 1..80: mol_type = other DNA
ggctataaaatcaagagggggcctccactgccctgtcctgtttacacatttttctaataatgttgtctttaacaagaaaa

SEQ ID NO: 103630 - DNA, 80 bp, synthetic construct
  misc_feature 1..80: note = Artificially Synthesized Probe
  source 1..80: mol_type = other DNA
cttgaatcttgaagtctttggggagaaaaaaggaaaaaaaaagtgctaaaagcagaaggctttttcattttggggagttt

SEQ ID NO: 103631 - DNA, 80 bp, synthetic construct
  misc_feature 1..80: note = Artificially Synthesized Probe
  source 1..80: mol_type = other DNA
aggactttcttatgaactcagatggaaagtgtcctgaaatttgtccttttaaaaatatctgtgcatttttttgtgctatg

SEQ ID NO: 103632 - DNA, 80 bp, synthetic construct
  misc_feature 1..80: note = Artificially Synthesized Probe
  source 1..80: mol_type = other DNA
atttaaaaaaaatgcattcattcttccaaaccacagtgtcccaaacatactggttttgttttcactggtatcttaagaca

SEQ ID NO: 103633 - DNA, 80 bp, synthetic construct; identical to SEQ ID NO: 35979
  misc_feature 1..80: note = Artificially Synthesized Probe
  source 1..80: mol_type = other DNA

SEQ ID NO: 103634 - DNA, 80 bp, synthetic construct
  misc_feature 1..80: note = Artificially Synthesized Probe
  source 1..80: mol_type = other DNA
tgtttttaaaacttaaatatggcgaggtgtggtgatcatgcctgtaattgcagcactttgggaggctgaggtgagcgaat

SEQ ID NO: 103635 - DNA, 80 bp, synthetic construct
  misc_feature 1..80: note = Artificially Synthesized Probe
  source 1..80: mol_type = other DNA
gcagtaagccgagatcgagccactgcactccagcctgggcgacaaagcgagactctgtctcaaataaataaataaatctt

SEQ ID NO: 103636 - DNA, 80 bp, synthetic construct; identical to SEQ ID NO: 35980
  misc_feature 1..80: note = Artificially Synthesized Probe
  source 1..80: mol_type = other DNA

SEQ ID NO: 103637 - DNA, 80 bp, synthetic construct
  misc_feature 1..80: note = Artificially Synthesized Probe
  source 1..80: mol_type = other DNA
caaagatcatgataccaattaatatttgtaagtgcttacagtgtgccaagttctgagaatgcacttgaccttattatctt

SEQ ID NO: 103638 - DNA, 80 bp, synthetic construct
  misc_feature 1..80: note = Artificially Synthesized Probe
  source 1..80: mol_type = other DNA
tttattatgcttactgatagctgacccccttattcatttgtttgttaatccactcatccatttatgagtgcatcgtgggt

SEQ ID NO: 103639 - DNA, 80 bp, synthetic construct
  misc_feature 1..80: note = Artificially Synthesized Probe
  source 1..80: mol_type = other DNA
ccaacatggtaaaaccctgtctctcctaaaaatacaaaaattagccaggtgtggtggtgcacacctgtaatcccagctac

SEQ ID NO: 103640 - DNA, 80 bp, synthetic construct; identical to SEQ ID NO: 35981
  misc_feature 1..80: note = Artificially Synthesized Probe
  source 1..80: mol_type = other DNA

SEQ ID NO: 103641 - DNA, 80 bp, synthetic construct
  misc_feature 1..80: note = Artificially Synthesized Probe
  source 1..80: mol_type = other DNA
atattgattatgtctggatgatggaattagcctattgccttctttataactgagtattatatttattttaattatctatt

SEQ ID NO: 103642 - DNA, 80 bp, synthetic construct
  misc_feature 1..80: note = Artificially Synthesized Probe
  source 1..80: mol_type = other DNA
aacagtaaggtagatctcagatccaccaccattaaaaataaataaataaataaataaataaataaataaataaaatagta

SEQ ID NO: 103643 - DNA, 80 bp, synthetic construct
  misc_feature 1..80: note = Artificially Synthesized Probe
  source 1..80: mol_type = other DNA
atggaatatataactgggcacttactcaatctgaagagattgggggattcagggaaagtttcctagaggaaactgcatct

SEQ ID NO: 103644 - DNA, 80 bp, synthetic construct
  misc_feature 1..80: note = Artificially Synthesized Probe
  source 1..80: mol_type = other DNA
gagaactgaaaccagagaaaagagagaggagtcatcatacagagtcttgcaagttatgtaaaggcttttaaattttatct

SEQ ID NO: 103645 - DNA, 80 bp, synthetic construct
  misc_feature 1..80: note = Artificially Synthesized Probe
  source 1..80: mol_type = other DNA
tgccagtataaaaattagagaaatggacaggtgaaagaaatttcagaggcagaattgatagagctaagccattgactgga

SEQ ID NO: 103646 - DNA, 80 bp, synthetic construct; identical to SEQ ID NO: 35982
  misc_feature 1..80: note = Artificially Synthesized Probe
  source 1..80: mol_type = other DNA

SEQ ID NO: 103647 - DNA, 80 bp, synthetic construct
  misc_feature 1..80: note = Artificially Synthesized Probe
  source 1..80: mol_type = other DNA
acagcaacacaaacaaaaaacagtaaagcgatttctgtttttggaagaaaagtaaagaagattcttcctgttgttaagga

SEQ ID NO: 103648 - DNA, 80 bp, synthetic construct
  misc_feature 1..80: note = Artificially Synthesized Probe
  source 1..80: mol_type = other DNA
tagatccttatgggtgagttgggattagttaagtgagagatgggtgggaattaaagagaagtgaaattctaggctaatgc

SEQ ID NO: 103649 - DNA, 80 bp, synthetic construct; identical to SEQ ID NO: 35983
  misc_feature 1..80: note = Artificially Synthesized Probe
  source 1..80: mol_type = other DNA

SEQ ID NO: 103650 - DNA, 80 bp, synthetic construct
  misc_feature 1..80: note = Artificially Synthesized Probe
  source 1..80: mol_type = other DNA
ttatttatttgagatggagtttcactcttgttgcgcaggctggagtgcaatggcgtgatctccactcactgcaacctctg

SEQ ID NO: 103651 - DNA, 80 bp, synthetic construct
  misc_feature 1..80: note = Artificially Synthesized Probe
  source 1..80: mol_type = other DNA
cttggcctccctaagtgccactgcgcctggcctgtttttttattttttgtagagatggggtctcactgtgttgcccaggc

SEQ ID NO: 103652 - DNA, 80 bp, synthetic construct
  misc_feature 1..80: note = Artificially Synthesized Probe
  source 1..80: mol_type = other DNA
aaaaaatggagaaaggattatttaaaatctagagaaaaaggtgagcccataagtcactctctctgaattccagaagctca

SEQ ID NO: 103653 - DNA, 80 bp, synthetic construct; identical to SEQ ID NO: 35916
  misc_feature 1..80: note = Artificially Synthesized Probe
  source 1..80: mol_type = other DNA

SEQ ID NO: 103654 - DNA, 80 bp, synthetic construct
  misc_feature 1..80: note = Artificially Synthesized Probe
  source 1..80: mol_type = other DNA
tgcctctggcagcactatttctggctgggccatctatttttggtggccagggaagttgttatttgtttcgttttgttttg

SEQ ID NO: 103655 - DNA, 80 bp, synthetic construct; identical to SEQ ID NO: 35984
  misc_feature 1..80: note = Artificially Synthesized Probe
  source 1..80: mol_type = other DNA

SEQ ID NO: 103656 - DNA, 80 bp, synthetic construct
  misc_feature 1..80: note = Artificially Synthesized Probe
  source 1..80: mol_type = other DNA
cgcctgagaggggttggcgctgagtgactactgcttggagaagggtagggaggtaatggggcccgtggtggaggcaggag

SEQ ID NO: 103657 - DNA, 80 bp, synthetic construct
  misc_feature 1..80: note = Artificially Synthesized Probe
  source 1..80: mol_type = other DNA
ctttgtggaattcatagtcagttttctgaagcaggtatcagtagttggcttctgagacaagggcagaaacaccatgttgg

SEQ ID NO: 103658 - DNA, 80 bp, synthetic construct
  misc_feature 1..80: note = Artificially Synthesized Probe
  source 1..80: mol_type = other DNA
gttatcacaaaactttacctttttgtaaaacttaatctgtgaatattcagtactgagagccacttagagcatacttcgtc

SEQ ID NO: 103659 - DNA, 80 bp, synthetic construct
  misc_feature 1..80: note = Artificially Synthesized Probe
  source 1..80: mol_type = other DNA
gttagttacttctctcagctttggtttatttctttgtcttcttttaaaaacaaagctttattcaaacgattaacacgcta

SEQ ID NO: 103660 - DNA, 80 bp, synthetic construct; identical to SEQ ID NO: 35985
  misc_feature 1..80: note = Artificially Synthesized Probe
  source 1..80: mol_type = other DNA

SEQ ID NO: 103661 - DNA, 80 bp, synthetic construct
  misc_feature 1..80: note = Artificially Synthesized Probe
  source 1..80: mol_type = other DNA
cttccaattttggctattatgagtaatgctgctatgaacatttgtatataagatttcgtgtggccatatgttttcaattt

SEQ ID NO: 103662 - DNA, 80 bp, synthetic construct
  misc_feature 1..80: note = Artificially Synthesized Probe
  source 1..80: mol_type = other DNA
caccaccaggaagattatttacagtgaaggacactttttgaaaaggtatagggggcctgaggtagaagagggaataccca

SEQ ID NO: 103663 - DNA, 80 bp, synthetic construct; identical to SEQ ID NO: 35986
  misc_feature 1..80: note = Artificially Synthesized Probe
  source 1..80: mol_type = other DNA

SEQ ID NO: 103664 - DNA, 80 bp, synthetic construct
  misc_feature 1..80: note = Artificially Synthesized Probe
  source 1..80: mol_type = other DNA
cacagagatgtattataaataaaatatgtgtatgtaaaataaaccagccgtctcttctccctgccccatctcttcttgtc

SEQ ID NO: 103665 - DNA, 80 bp, synthetic construct
  misc_feature 1..80: note = Artificially Synthesized Probe
  source 1..80: mol_type = other DNA
ctcaaaaaaaaaaaaaaaaaaaagaactaaataaactcttcttcccccacaaatttaccagtttagccattttaagtgta

SEQ ID NO: 103666 - DNA, 80 bp, synthetic construct
  misc_feature 1..80: note = Artificially Synthesized Probe
  source 1..80: mol_type = other DNA
tcatccttgagtcattgttactgcttttgtcttagaaatatggcgtcctttacatgcacttactgcttctgtagcacaag

SEQ ID NO: 103667 - DNA, 80 bp, synthetic construct
  misc_feature 1..80: note = Artificially Synthesized Probe
  source 1..80: mol_type = other DNA
agcgtttctatgagaaaacgtgtttcaagcatagaatttcgggatggccaaagatcttaaaagccctctagagctaactc

SEQ ID NO: 103668 - DNA, 80 bp, synthetic construct
  misc_feature 1..80: note = Artificially Synthesized Probe
  source 1..80: mol_type = other DNA
ttacatctaactctactagagaattcatccttatatctaattgataactgcctccctgtaattcctactttcattccctt

SEQ ID NO: 103669 - DNA, 80 bp, synthetic construct; identical to SEQ ID NO: 35987
  misc_feature 1..80: note = Artificially Synthesized Probe
  source 1..80: mol_type = other DNA

SEQ ID NO: 103670 - DNA, 80 bp, synthetic construct
  misc_feature 1..80: note = Artificially Synthesized Probe
  source 1..80: mol_type = other DNA
ggttacttaaagcactactcttctgtttttctatttgccatattaacttatttttaaaatatttttattttcaaggaagg

SEQ ID NO: 103671 - DNA, 80 bp, synthetic construct
  misc_feature 1..80: note = Artificially Synthesized Probe
  source 1..80: mol_type = other DNA
agtacatacattatatgagctagctggggggtctgaatatgatgaagcaaatgtcaagctgggttttttaaaggcagact

SEQ ID NO: 103672 - DNA, 80 bp, synthetic construct; identical to SEQ ID NO: 35988
  misc_feature 1..80: note = Artificially Synthesized Probe
  source 1..80: mol_type = other DNA

SEQ ID NO: 103673 - DNA, 80 bp, synthetic construct
  misc_feature 1..80: note = Artificially Synthesized Probe
  source 1..80: mol_type = other DNA
aagtttccacatgcagcgctgatgtttgttaaagctgcaagaaaacaaataagtaaaacaaaacctaagcaatacacaaa

SEQ ID NO: 103674 - DNA, 80 bp, synthetic construct
  misc_feature 1..80: note = Artificially Synthesized Probe
  source 1..80: mol_type = other DNA
gacggctttttatttcccctcatctctgtggcctatttcaggacagtatgtgccctttgctttggcctggtgggcacact

SEQ ID NO: 103675 - DNA, 80 bp, synthetic construct
  misc_feature 1..80: note = Artificially Synthesized Probe
  source 1..80: mol_type = other DNA
tttctgagacggagtcttgctctgtcacccaggctggagtgcagtggcatgatctccgctcactgcaacctctactttcc

SEQ ID NO: 103676 - DNA, 80 bp, synthetic construct
  misc_feature 1..80: note = Artificially Synthesized Probe
  source 1..80: mol_type = other DNA
ctggctctatgaatttgactactctagccaccttttatacatgggatcatatatttgttgttttgtctccagcctatttc

SEQ ID NO: 103677 - DNA, 80 bp, synthetic construct
  misc_feature 1..80: note = Artificially Synthesized Probe
  source 1..80: mol_type = other DNA
gcctcccaaagtgctgggattacaggcataagccaccgtgcctggcccagtttttactatttgtacagttcatattgtcc

SEQ ID NO: 103678 - DNA, 80 bp, synthetic construct; identical to SEQ ID NO: 35989
  misc_feature 1..80: note = Artificially Synthesized Probe
  source 1..80: mol_type = other DNA

SEQ ID NO: 103679 - DNA, 80 bp, synthetic construct
  misc_feature 1..80: note = Artificially Synthesized Probe
  source 1..80: mol_type = other DNA
tattttagaaggtgatagtgctacggaataaaaaacaatgaagggggattcggagagctgggatgaggcatggggtgcct

SEQ ID NO: 103680 - DNA, 80 bp, synthetic construct
  misc_feature 1..80: note = Artificially Synthesized Probe
  source 1..80: mol_type = other DNA
ataacaaagagaaacagtgtggctacagcagagaacagagggagagtggtaggaagaagtagaggaggtaataggagagg

SEQ ID NO: 103681 - DNA, 80 bp, synthetic construct; identical to SEQ ID NO: 35990
  misc_feature 1..80: note = Artificially Synthesized Probe
  source 1..80: mol_type = other DNA

SEQ ID NO: 103682 - DNA, 80 bp, synthetic construct
  misc_feature 1..80: note = Artificially Synthesized Probe
  source 1..80: mol_type = other DNA
ctataatgtagaatatacatagtaagatttacagacagatgatatgtaggagagagaatgaatcaagaaatgactcaaag

SEQ ID NO: 103683 - DNA, 80 bp, synthetic construct
  misc_feature 1..80: note = Artificially Synthesized Probe
  source 1..80: mol_type = other DNA
atcaattggagttcagggaaaagatcagggtgggcatgtaaacttagaaatgtaagtgaacaaaacgtcatttttctacg

SEQ ID NO: 103684 - DNA, 80 bp, synthetic construct
  misc_feature 1..80: note = Artificially Synthesized Probe
  source 1..80: mol_type = other DNA
ttccacaaatatttagggagtgcttcctgagtactatgcaacaagaatacaaggacacaaaatatgccttgtcagctctc

SEQ ID NO: 103685 - DNA, 80 bp, synthetic construct
  misc_feature 1..80: note = Artificially Synthesized Probe
  source 1..80: mol_type = other DNA
ttagtcattgactttttccttgggcagcttcagactagttggaaagatcaaacacacaaaaagtcgcgtaactctaaaag

SEQ ID NO: 103686 - DNA, 80 bp, synthetic construct; identical to SEQ ID NO: 35991
  misc_feature 1..80: note = Artificially Synthesized Probe
  source 1..80: mol_type = other DNA

SEQ ID NO: 103687 - DNA, 80 bp, synthetic construct
  misc_feature 1..80: note = Artificially Synthesized Probe
  source 1..80: mol_type = other DNA
ccacattggcctcccaaatggctgggattacaagcaatttttttgatatttttgtagagatggggtctcagtttgttgct

SEQ ID NO: 103688 - DNA, 80 bp, synthetic construct
  misc_feature 1..80: note = Artificially Synthesized Probe
  source 1..80: mol_type = other DNA
agatatcatggaggaaataagcataaatgtccaacagaaatctaggatgcataagaataccctggattcatacacagttt

SEQ ID NO: 103689 - DNA, 80 bp, synthetic construct
  misc_feature 1..80: note = Artificially Synthesized Probe
  source 1..80: mol_type = other DNA
aggtgatattaactgggttatcaccttgaagagcttagaccaggaaagggccttaaaaatcactaattttggccagacgc

SEQ ID NO: 103690 - DNA, 80 bp, synthetic construct
  misc_feature 1..80: note = Artificially Synthesized Probe
  source 1..80: mol_type = other DNA
actcaggaggctgaagcaggagaatggcttgaacccaggaggcagaggttgcagtgagttgagattgcaccactgcactc

SEQ ID NO: 103691 - DNA, 80 bp, synthetic construct; identical to SEQ ID NO: 35992
  misc_feature 1..80: note = Artificially Synthesized Probe
  source 1..80: mol_type = other DNA

SEQ ID NO: 103692 - DNA, 80 bp, synthetic construct
  misc_feature 1..80: note = Artificially Synthesized Probe
  source 1..80: mol_type = other DNA
ttttatttttcaaggcaaagtgcaaattcaactcctaatgaagctttctctgatcaccccagtaagaactgactactctt

SEQ ID NO: 103693 - DNA, 80 bp, synthetic construct
  misc_feature 1..80: note = Artificially Synthesized Probe
  source 1..80: mol_type = other DNA
ttcagttaagagtgtatgcatatgtactagatggcaatgtaacatacaaaagttgaaaaacacaggtttggaggatcata

SEQ ID NO: 103694 - DNA, 80 bp, synthetic construct; identical to SEQ ID NO: 35993
  misc_feature 1..80: note = Artificially Synthesized Probe
  source 1..80: mol_type = other DNA

SEQ ID NO: 103695 - DNA, 80 bp, synthetic construct
  misc_feature 1..80: note = Artificially Synthesized Probe
  source 1..80: mol_type = other DNA
tttaggagcaagatctggtgatgagtgcccggctccacttggcaggtgccagagttaagaaccagtgactgcctgaaatc

SEQ ID NO: 103696 - DNA, 80 bp, synthetic construct
  misc_feature 1..80: note = Artificially Synthesized Probe
  source 1..80: mol_type = other DNA
tctttctttgcgggtagctatggtgtgtttcgggggaaggctcatggcaataaaggctattagttgaactgcctcagagc

SEQ ID NO: 103697 - DNA, 80 bp, synthetic construct
  misc_feature 1..80: note = Artificially Synthesized Probe
  source 1..80: mol_type = other DNA
acatggtcttttctatagcaaccttatttcttgcttctggccacactccttttggtcttatagtccaaatcagccacaag

SEQ ID NO: 103698 - DNA, 80 bp, synthetic construct; identical to SEQ ID NO: 35917
  misc_feature 1..80: note = Artificially Synthesized Probe
  source 1..80: mol_type = other DNA

SEQ ID NO: 103699 - DNA, 80 bp, synthetic construct; identical to SEQ ID NO: 35994
  misc_feature 1..80: note = Artificially Synthesized Probe
  source 1..80: mol_type = other DNA

SEQ ID NO: 103700 - DNA, 80 bp, synthetic construct
  misc_feature 1..80: note = Artificially Synthesized Probe
  source 1..80: mol_type = other DNA
gccggctggcttcatgctgcggtgcagctgcaccatgttcctgggttgagggggcaatcgggcacgctcctccccatggg

SEQ ID NO: 103701 - DNA, 80 bp, synthetic construct
  misc_feature 1..80: note = Artificially Synthesized Probe
  source 1..80: mol_type = other DNA
gggcccgcttctccgaggcaggggcaggggcaggggacggtttggcctgccagttggtcgctattctaggctcttcctag

SEQ ID NO: 103702 - DNA, 80 bp, synthetic construct
  misc_feature 1..80: note = Artificially Synthesized Probe
  source 1..80: mol_type = other DNA
aaacactgacgtggaactgtgcggaacaatcaccttgggagctggtttaaaatgtagattccatgcctcaccctagggat

SEQ ID NO: 103703 - DNA, 80 bp, synthetic construct; identical to SEQ ID NO: 35995
  misc_feature 1..80: note = Artificially Synthesized Probe
  source 1..80: mol_type = other DNA

SEQ ID NO: 103704 - DNA, 80 bp, synthetic construct
  misc_feature 1..80: note = Artificially Synthesized Probe
  source 1..80: mol_type = other DNA
tatgcctgtagtccaagctacttgggaggctgaggcaggagaattgcttgaacccaggaggcggaggttgcggtgagacg

SEQ ID NO: 103705 - DNA, 80 bp, synthetic construct
  misc_feature 1..80: note = Artificially Synthesized Probe
  source 1..80: mol_type = other DNA
ggtattataggcatgagccactttgcctgggaaaatatgcatttttaagcaagatccctgaggtggctctgaagcagatc

SEQ ID NO: 103706 - DNA, 80 bp, synthetic construct
  misc_feature 1..80: note = Artificially Synthesized Probe
  source 1..80: mol_type = other DNA
gacagaatcttaggcatttttagtctttggaatagcttgccttaaaatgaagaagagagtaacctgtgggatagcagttg

SEQ ID NO: 103707 - DNA, 80 bp, synthetic construct; identical to SEQ ID NO: 35996
  misc_feature 1..80: note = Artificially Synthesized Probe
  source 1..80: mol_type = other DNA

SEQ ID NO: 103708 - DNA, 80 bp, synthetic construct
  misc_feature 1..80: note = Artificially Synthesized Probe
  source 1..80: mol_type = other DNA
atcttggatcagggaaatagctggtgtctatgagacccaaatgattatttagttaattcaattaatgtgtatagctaaat

SEQ ID NO: 103709 - DNA, 80 bp, synthetic construct
  misc_feature 1..80: note = Artificially Synthesized Probe
  source 1..80: mol_type = other DNA
cattgtggttttgatttgcatttccttactgattagtgatgtaaaagatatttttaaagtttcatatttactgacatatt

SEQ ID NO: 103710 - DNA, 80 bp, synthetic construct
  misc_feature 1..80: note = Artificially Synthesized Probe
  source 1..80: mol_type = other DNA
agggttggtaacagagagatggcgagagacggaggatgagtgggaggttttgccttagggttagggtaggaatagtggat

SEQ ID NO: 103711 - DNA, 80 bp, synthetic construct
  misc_feature 1..80: note = Artificially Synthesized Probe
  source 1..80: mol_type = other DNA
tggcacgatctcagctcactgcaacctccgcctcctgggttcaagcgattctctggagtagctgggactacagacccctg

SEQ ID NO: 103712 - DNA, 80 bp, synthetic construct
  misc_feature 1..80: note = Artificially Synthesized Probe
  source 1..80: mol_type = other DNA
ttttttttaaagctgaatcagatggctgtctggatcatttgatctcactctctgctccgccctagcgaaagatctttagg

SEQ ID NO: 103713 - DNA, 80 bp, synthetic construct; identical to SEQ ID NO: 35997
  misc_feature 1..80: note = Artificially Synthesized Probe
  source 1..80: mol_type = other DNA

SEQ ID NO: 103714 - DNA, 80 bp, synthetic construct
  misc_feature 1..80: note = Artificially Synthesized Probe
  source 1..80: mol_type = other DNA
gaacacataaagccattatcaatcattcagagttgaaattagtttaccacactatgtcatgatgagtgattgataggaac

SEQ ID NO: 103715 - DNA, 80 bp, synthetic construct
  misc_feature 1..80: note = Artificially Synthesized Probe
  source 1..80: mol_type = other DNA
caccacacctggctaattatttatatatatatgtgtgtgtctgtgtgtgtgtgtgtgtgtgtgtgtgtgtgtgtgtgtat

SEQ ID NO: 103716 - DNA, 80 bp, synthetic construct; identical to SEQ ID NO: 35998
  misc_feature 1..80: note = Artificially Synthesized Probe
  source 1..80: mol_type = other DNA

SEQ ID NO: 103717 - DNA, 80 bp, synthetic construct
  misc_feature 1..80: note = Artificially Synthesized Probe
  source 1..80: mol_type = other DNA
gtagtaattatatttctactagtagttatagttattataaaatttaaatatggggacaaggtttgactctttataatctc

SEQ ID NO: 103718 - DNA, 80 bp, synthetic construct
  misc_feature 1..80: note = Artificially Synthesized Probe
  source 1..80: mol_type = other DNA
agtaacagaagtttgatttttctgttgctaagaaacagaattttcttgattctgatttttttccttagcgttggaaggac

SEQ ID NO: 103719 - DNA, 80 bp, synthetic construct
  misc_feature 1..80: note = Artificially Synthesized Probe
  source 1..80: mol_type = other DNA
tgtgcatatttatgctaccgggaatttttgttgagctgtttgtacttaagagtgaaaaattactcttagcgagaaacaat

SEQ ID NO: 103720 - DNA, 80 bp, synthetic construct
  misc_feature 1..80: note = Artificially Synthesized Probe
  source 1..80: mol_type = other DNA
gatattcttgctggttatcaggactgactacatactttgtggggctcaatgcaaaataaaaatgtagacccctctgttca

SEQ ID NO: 103721 - DNA, 80 bp, synthetic construct
  misc_feature 1..80: note = Artificially Synthesized Probe
  source 1..80: mol_type = other DNA
tataaggattttaaattataagaggagttgtcaaagctagagagttatgttaaaaacctaagagtatcaacctcaaagca

SEQ ID NO: 103722 - DNA, 80 bp, synthetic construct; identical to SEQ ID NO: 35999
  misc_feature 1..80: note = Artificially Synthesized Probe
  source 1..80: mol_type = other DNA

SEQ ID NO: 103723 - DNA, 80 bp, synthetic construct
  misc_feature 1..80: note = Artificially Synthesized Probe
  source 1..80: mol_type = other DNA
gtgagtggtccacagctgagtatggcccactcctagggagactggcttgttagcatttctggactgcagctgctgtggta

SEQ ID NO: 103724 - DNA, 80 bp, synthetic construct
  misc_feature 1..80: note = Artificially Synthesized Probe
  source 1..80: mol_type = other DNA
acaaaaccatcatccactgggttttgccccctgatgactacttgttcaacttgtgtgaattaagtttccattctaagaat

SEQ ID NO: 103725 - DNA, 80 bp, synthetic construct
  misc_feature 1..80: note = Artificially Synthesized Probe
  source 1..80: mol_type = other DNA
ttgcgttgttttatgacccttaagctgcctgacttctctgagattgaaacttctttggttttctcatctttgagattgga

SEQ ID NO: 103726 - DNA, 80 bp, synthetic construct; identical to SEQ ID NO: 36000
  misc_feature 1..80: note = Artificially Synthesized Probe
  source 1..80: mol_type = other DNA

SEQ ID NO: 103727 - DNA, 80 bp, synthetic construct
  misc_feature 1..80: note = Artificially Synthesized Probe
  source 1..80: mol_type = other DNA
attcatgctggactattttttattccaaatcagtttctttttcctcaatagtggacttgggaccatttgtcctatttgtc

SEQ ID NO: 103728 - DNA, 80 bp, synthetic construct
  misc_feature 1..80: note = Artificially Synthesized Probe
  source 1..80: mol_type = other DNA
tgattttctttggtcctagcctgatttctttaggctttgggcaacatgatgaggaacaatatacctgcagacttacaagg

SEQ ID NO: 103729 - DNA, 80 bp, synthetic construct; identical to SEQ ID NO: 36001
  misc_feature 1..80: note = Artificially Synthesized Probe
  source 1..80: mol_type = other DNA

SEQ ID NO: 103730 - DNA, 80 bp, synthetic construct
  misc_feature 1..80: note = Artificially Synthesized Probe
  source 1..80: mol_type = other DNA
ttgtcttcttatatgtagcagagtttgctcttcttttacacttggatgccttatttaattagtggctatgtttttttctc

SEQ ID NO: 103731 - DNA, 80 bp, synthetic construct
  misc_feature 1..80: note = Artificially Synthesized Probe
  source 1..80: mol_type = other DNA
taaagatgttgctctgttgtcttttttttttttctgagatggagtttcgctcttgttgcccaggctagagtgcaatgatg

SEQ ID NO: 103732 - DNA, 80 bp, synthetic construct
  misc_feature 1..80: note = Artificially Synthesized Probe
  source 1..80: mol_type = other DNA
gccaattccccattctcagccttctgaggttcgtgaggtcatgcttacctatttcttctttcagggaatgaaagttggca

SEQ ID NO: 103733 - DNA, 80 bp, synthetic construct
  misc_feature 1..80: note = Artificially Synthesized Probe
  source 1..80: mol_type = other DNA
cttgcacattgctagaaagaatgtgaaatggtgcaggtgctgtgaaaaccagtatggagtttctcaaaaaattaaacata

SEQ ID NO: 103734 - DNA, 80 bp, synthetic construct; identical to SEQ ID NO: 36002
  misc_feature 1..80: note = Artificially Synthesized Probe
  source 1..80: mol_type = other DNA

SEQ ID NO: 103735 - DNA, 80 bp, synthetic construct
  misc_feature 1..80: note = Artificially Synthesized Probe
  source 1..80: mol_type = other DNA
ctacagtttcatttgggaaaaagttctggagatggatagtgatatttgaacaactatgtgaatgtacttaatgccataga

SEQ ID NO: 103736 - DNA, 80 bp, synthetic construct
  misc_feature 1..80: note = Artificially Synthesized Probe
  source 1..80: mol_type = other DNA
cagcctgggaaacatagcaagactgcatctctgtaaatttttttttttttaattagctgacatagtggtgtgtggctgtg

SEQ ID NO: 103737 - DNA, 80 bp, synthetic construct
  misc_feature 1..80: note = Artificially Synthesized Probe
  source 1..80: mol_type = other DNA
acacatacacacagaaaaaaaaatgcttaaagcaactttccccaaaaaagtcagttgcttataaaaatagtggaactctt

SEQ ID NO: 103738 - DNA, 80 bp, synthetic construct; identical to SEQ ID NO: 36003
  misc_feature 1..80: note = Artificially Synthesized Probe
  source 1..80: mol_type = other DNA

SEQ ID NO: 103739 - DNA, 80 bp, synthetic construct
  misc_feature 1..80: note = Artificially Synthesized Probe
  source 1..80: mol_type = other DNA
tttgcgcatatgcattggtatattcagtcaaacgtctattgattatctactatatgccagctactgtgctagattctggt

SEQ ID NO: 103740 - DNA, 80 bp, synthetic construct
  misc_feature 1..80: note = Artificially Synthesized Probe
  source 1..80: mol_type = other DNA
gaaaaggcatttcttttttcttcttttttttttttttttgagatggagtctcactttgtggcccaggctggagtgcagtg

SEQ ID NO: 103741 - DNA, 80 bp, synthetic construct
  misc_feature 1..80: note = Artificially Synthesized Probe
  source 1..80: mol_type = other DNA
agagatggggtttctccatgttggtcaggctggtctcgaactgctgacctcaggtgatctgccctcctcagcctcccaaa

SEQ ID NO: 103742 - DNA, 80 bp, synthetic construct
  misc_feature 1..80: note = Artificially Synthesized Probe
  source 1..80: mol_type = other DNA
atctcctgacctcgtgatccacccacttcggcctcccaaagtgctgagattacaggcatgagccaccatgcctggaaaat

SEQ ID NO: 103743 - DNA, 80 bp, synthetic construct
  misc_feature 1..80: note = Artificially Synthesized Probe
  source 1..80: mol_type = other DNA
ccatgcccggctaatttttgtatttttagtagagatggggtttcgccatgctggccagggtggtctcaaactccttacct

SEQ ID NO: 103744 - DNA, 80 bp, synthetic construct; identical to SEQ ID NO: 36004
  misc_feature 1..80: note = Artificially Synthesized Probe
  source 1..80: mol_type = other DNA

SEQ ID NO: 103745 - DNA, 80 bp, synthetic construct
  misc_feature 1..80: note = Artificially Synthesized Probe
  source 1..80: mol_type = other DNA
cccaaatgaatagagtggatggaaagaaaatctgcaaaggattattcgtgatgacccctgaactttgtcttcaaagggga

SEQ ID NO: 103746 - DNA, 80 bp, synthetic construct
  misc_feature 1..80: note = Artificially Synthesized Probe
  source 1..80: mol_type = other DNA
gacacagtcttttgtgccattttaaagagtgtagactttatcctgaagaagacaaggcaccactgatgggctttaagctg

SEQ ID NO: 103747 - DNA, 80 bp, synthetic construct
  misc_feature 1..80: note = Artificially Synthesized Probe
  source 1..80: mol_type = other DNA
tttaagaggtaaaatatttgtaggacttgatgattgatcaggacgggagaattgagggaaaggaatcaagaggaaggcca

SEQ ID NO: 103748 - DNA, 80 bp, synthetic construct; identical to SEQ ID NO: 36005
  misc_feature 1..80: note = Artificially Synthesized Probe
  source 1..80: mol_type = other DNA

SEQ ID NO: 103749 - DNA, 80 bp, synthetic construct
  misc_feature 1..80: note = Artificially Synthesized Probe
  source 1..80: mol_type = other DNA
tacttgtttgaaagaacaaagtgggtatggatggggtgtttttaaatgtgttttagataatttaaattttgccctaggta

SEQ ID NO: 103750 - DNA, 80 bp, synthetic construct
  misc_feature 1..80: note = Artificially Synthesized Probe
  source 1..80: mol_type = other DNA
tattcagaggtagagaggatcttgaagataatctacataatcctttcactttttaagaaaaccatttatttaaaaataat

SEQ ID NO: 103751 - DNA, 80 bp, synthetic construct
  misc_feature 1..80: note = Artificially Synthesized Probe
  source 1..80: mol_type = other DNA
agactagaatccaggagccctaactacctgttcaggctgcttacaatgacctctgggaccttcaacaaaaattcaagaaa

SEQ ID NO: 103752 - DNA, 80 bp, synthetic construct; identical to SEQ ID NO: 35918
  misc_feature 1..80: note = Artificially Synthesized Probe
  source 1..80: mol_type = other DNA

SEQ ID NO: 103753 - DNA, 80 bp, synthetic construct; identical to SEQ ID NO: 36006
  misc_feature 1..80: note = Artificially Synthesized Probe
  source 1..80: mol_type = other DNA

SEQ ID NO: 103754 - DNA, 80 bp, synthetic construct
  misc_feature 1..80: note = Artificially Synthesized Probe
  source 1..80: mol_type = other DNA
ttctgtggagagctaagtaatagtcatgtggctttttgccaagcaactttagaagtgacattgggccacagtgggcagtt

SEQ ID NO: 103755 - DNA, 80 bp, synthetic construct
  misc_feature 1..80: note = Artificially Synthesized Probe
  source 1..80: mol_type = other DNA
gctacaagccacctcttcatgcacacagggctttagaaagcccacccagaggcttgggaagaggaagcccttctttaagg

SEQ ID NO: 103756 - DNA, 80 bp, synthetic construct; identical to SEQ ID NO: 36007
  misc_feature 1..80: note = Artificially Synthesized Probe
  source 1..80: mol_type = other DNA

SEQ ID NO: 103757 - DNA, 80 bp, synthetic construct
  misc_feature 1..80: note = Artificially Synthesized Probe
  source 1..80: mol_type = other DNA
gtacattctagggagacatgagacatcaatcaatgtatgtaagaagtacattggttcggtctggaaaggcgggacaactt

SEQ ID NO: 103758 - DNA, 80 bp, synthetic construct
  misc_feature 1..80: note = Artificially Synthesized Probe
  source 1..80: mol_type = other DNA
ggaggcaggtttgccctaaacagtttccagcttgagttttccttttattttttgtattttcatttccataggttattggg

SEQ ID NO: 103759 - DNA, 80 bp, synthetic construct
  misc_feature 1..80: note = Artificially Synthesized Probe
  source 1..80: mol_type = other DNA
tcattcttatgcctttgtatccttatagcttagctcccacttatgagtgagaacatacaatgtttggttttcctttcctg

SEQ ID NO: 103760 - DNA, 80 bp, synthetic construct; identical to SEQ ID NO: 36008
  misc_feature 1..80: note = Artificially Synthesized Probe
  source 1..80: mol_type = other DNA

SEQ ID NO: 103761 - DNA, 80 bp, synthetic construct
  misc_feature 1..80: note = Artificially Synthesized Probe
  source 1..80: mol_type = other DNA
tcccattgatcactgatgctctgttcactttttgtcttctttctcttgttttatttttggatcattttcattgctatgtc

SEQ ID NO: 103762 - DNA, 80 bp, synthetic construct
  misc_feature 1..80: note = Artificially Synthesized Probe
  source 1..80: mol_type = other DNA
agtgtagaagtgttccctgttcactgcatccacatccatatctactatttttttatttttttgattatggccattcttgc

SEQ ID NO: 103763 - DNA, 80 bp, synthetic construct
  misc_feature 1..80: note = Artificially Synthesized Probe
  source 1..80: mol_type = other DNA
ttcttgctgatttgtttgagtttgttgtagattctggatgttagtcctttgtcagatgtacagactgtgaagattttctc

SEQ ID NO: 103764 - DNA, 80 bp, synthetic construct
  misc_feature 1..80: note = Artificially Synthesized Probe
  source 1..80: mol_type = other DNA
ttttcgatgataccttctagaatttttatagtttcagaacttagatttaaatccttaatccatcttgagctgatttctgt

SEQ ID NO: 103765 - DNA, 80 bp, synthetic construct; identical to SEQ ID NO: 36009
  misc_feature 1..80: note = Artificially Synthesized Probe
  source 1..80: mol_type = other DNA

SEQ ID NO: 103766 - DNA, 80 bp, synthetic construct
  misc_feature 1..80: note = Artificially Synthesized Probe
  source 1..80: mol_type = other DNA
tagattgcttttggcagtatggtcattttcacaatattgattctacccatccatgagcatgggatgtgtttccattcatt

SEQ ID NO: 103767 - DNA, 80 bp, synthetic construct
  misc_feature 1..80: note = Artificially Synthesized Probe
  source 1..80: mol_type = other DNA
cacatgactcagaaggctataccaggatggaaacatcagagatgggcatgaaagttgaaggatcgggaagtgcacccgga

SEQ ID NO: 103768 - DNA, 80 bp, synthetic construct
  misc_feature 1..80: note = Artificially Synthesized Probe
  source 1..80: mol_type = other DNA
tgttggtgtatagaagagctactgattcgcatgcattaattttgtatccagaaattttgctgaattgttttatcagttct

SEQ ID NO: 103769 - DNA, 80 bp, synthetic construct
  misc_feature 1..80: note = Artificially Synthesized Probe
  source 1..80: mol_type = other DNA
gtgagtgggcatccttgtcttgtttcagttctcagaggaaatgcttttaacttttcccccagtcattattacgttggctg

SEQ ID NO: 103770 - DNA, 80 bp, synthetic construct
  misc_feature 1..80: note = Artificially Synthesized Probe
  source 1..80: mol_type = other DNA
ggtgtaccacatttattgacttgcgtatgttaaacctccctgcatccctggtatgaaacccacttgatcatggtggatta

SEQ ID NO: 103771 - DNA, 80 bp, synthetic construct; identical to SEQ ID NO: 36010
  misc_feature 1..80: note = Artificially Synthesized Probe
  source 1..80: mol_type = other DNA

SEQ ID NO: 103772 - DNA, 80 bp, synthetic construct
  misc_feature 1..80: note = Artificially Synthesized Probe
  source 1..80: mol_type = other DNA
tttttttttttttttttgagatggagtcttgctctgtcgcctaggctggagtgcagtggtgcgatctcggctcactacaa

SEQ ID NO: 103773 - DNA, 80 bp, synthetic construct
  misc_feature 1..80: note = Artificially Synthesized Probe
  source 1..80: mol_type = other DNA
aatgttacggtctcagctccttgcaacctgcaatctctgcctcccgggtacaagcaattctcctgtctcagcctcctgag

SEQ ID NO: 103774 - DNA, 80 bp, synthetic construct
  misc_feature 1..80: note = Artificially Synthesized Probe
  source 1..80: mol_type = other DNA
gtacatgtgcacaacgtgcaggttagctacatatgtatacatgtgccatgctggtgtgctgcacccattaactcgtcatt

SEQ ID NO: 103775 - DNA, 80 bp, synthetic construct; identical to SEQ ID NO: 36011
  misc_feature 1..80: note = Artificially Synthesized Probe
  source 1..80: mol_type = other DNA

SEQ ID NO: 103776 - DNA, 80 bp, synthetic construct
  misc_feature 1..80: note = Artificially Synthesized Probe
  source 1..80: mol_type = other DNA
gctttatttatcttttcaaagaaccaggttttcatttcatttatcttttgtattttttgtttgtttgtttcagtttcatt

SEQ ID NO: 103777 - DNA, 80 bp, synthetic construct
  misc_feature 1..80: note = Artificially Synthesized Probe
  source 1..80: mol_type = other DNA
ctgactttgctgtattccagaagttttgataggttgtatcactatttttgttcaatttgaagatttttttaatttccatc

SEQ ID NO: 103778 - DNA, 80 bp, synthetic construct
  misc_feature 1..80: note = Artificially Synthesized Probe
  source 1..80: mol_type = other DNA
taccatgtggtctatcttggagaaagttccatgcactgttgaatagaatgtatattctgcagttgttggatggaatgttc

SEQ ID NO: 103779 - DNA, 80 bp, synthetic construct; identical to SEQ ID NO: 36012
  misc_feature 1..80: note = Artificially Synthesized Probe
  source 1..80: mol_type = other DNA

SEQ ID NO: 103780 - DNA, 80 bp, synthetic construct
  misc_feature 1..80: note = Artificially Synthesized Probe
  source 1..80: mol_type = other DNA
ctgtactaaacctatctgtactaaaaatacaaaaattagctgggcatggtggtgcacacctgtagttccagctacttggg

SEQ ID NO: 103781 - DNA, 80 bp, synthetic construct
  misc_feature 1..80: note = Artificially Synthesized Probe
  source 1..80: mol_type = other DNA
ggtgtccatttgcatgaaatgtctttttccacccctttaccttaagtttatgtgagtccttatgtgtcagataagtctct

SEQ ID NO: 103782 - DNA, 80 bp, synthetic construct
  misc_feature 1..80: note = Artificially Synthesized Probe
  source 1..80: mol_type = other DNA
ctgtataccttggttttttgggttttgtttttgtttttttgaattgtatttttgttttataggtcctgtgagatttatat

SEQ ID NO: 103783 - DNA, 80 bp, synthetic construct
  misc_feature 1..80: note = Artificially Synthesized Probe
  source 1..80: mol_type = other DNA
actggatacaaaattctcggctaataattgttttgttttaggatgctgaagataggggcccaatcccttctggcttgtag

SEQ ID NO: 103784 - DNA, 80 bp, synthetic construct
  misc_feature 1..80: note = Artificially Synthesized Probe
  source 1..80: mol_type = other DNA
tgccccgcccatgtattaatattttacttcattttatcaatctttgttctactttcttgaacatttaaaatactataata

SEQ ID NO: 103785 - DNA, 80 bp, synthetic construct; identical to SEQ ID NO: 36013
  misc_feature 1..80: note = Artificially Synthesized Probe
  source 1..80: mol_type = other DNA

SEQ ID NO: 103786 - DNA, 80 bp, synthetic construct
  misc_feature 1..80: note = Artificially Synthesized Probe
  source 1..80: mol_type = other DNA
cgagctctgaatttctttcttctacttgtttgattctatggctgagactttccagaccattttgcatttctataagtaaa

SEQ ID NO: 103787 - DNA, 80 bp, synthetic construct
  misc_feature 1..80: note = Artificially Synthesized Probe
  source 1..80: mol_type = other DNA
agtccatgcgtgcctggagcagcagcgtctccagggacaggcagccaccatgagcctcagtgaggagcaggcccggagct

SEQ ID NO: 103788 - DNA, 80 bp, synthetic construct
  misc_feature 1..80: note = Artificially Synthesized Probe
  source 1..80: mol_type = other DNA
ctgggctccacgtgctcatctgcacatcgctgtgctcctgtgtgtctgtgcacacctgtctgtgtgtaagagagagagat

SEQ ID NO: 103789 - DNA, 80 bp, synthetic construct; identical to SEQ ID NO: 36177
  misc_feature 1..80: note = Artificially Synthesized Probe
  source 1..80: mol_type = other DNA

SEQ ID NO: 103790 - DNA, 80 bp, synthetic construct
  misc_feature 1..80: note = Artificially Synthesized Probe
  source 1..80: mol_type = other DNA
gctcaggggagaggagggctccatggcttctgtggctgtgctgagctgcaatggccagacccatctgccacctgcctgcc

SEQ ID NO: 103791 - DNA, 80 bp, synthetic construct
  misc_feature 1..80: note = Artificially Synthesized Probe
  source 1..80: mol_type = other DNA
gggcaggtccggccctgactgagagagggtgtaggggcaggtccggccctggctgagagagggtacgggggcaggtctgg

SEQ ID NO: 103792 - DNA, 80 bp, synthetic construct; identical to SEQ ID NO: 36178
  misc_feature 1..80: note = Artificially Synthesized Probe
  source 1..80: mol_type = other DNA

SEQ ID NO: 103793 - DNA, 80 bp, synthetic construct
  misc_feature 1..80: note = Artificially Synthesized Probe
  source 1..80: mol_type = other DNA
tgcctcaggggcagtctggaaaggcggtcagggcccctggggcatccagccatccagccagtggacacctgtgagaaaac

SEQ ID NO: 103794 - DNA, 80 bp, synthetic construct
  misc_feature 1..80: note = Artificially Synthesized Probe
  source 1..80: mol_type = other DNA
tatgtcagtgtggacttatgagtattgtatgcttaggttataattcaatatgattttatttattttcttgctcacgtgag

SEQ ID NO: 103795 - DNA, 80 bp, synthetic construct
  misc_feature 1..80: note = Artificially Synthesized Probe
  source 1..80: mol_type = other DNA
gttttgttttgtttttgagacagggtccatctgggctcgctacaacctctgcccccccggttcaaacgatttcctgcctc

SEQ ID NO: 103796 - DNA, 80 bp, synthetic construct; identical to SEQ ID NO: 36179
  misc_feature 1..80: note = Artificially Synthesized Probe
  source 1..80: mol_type = other DNA

SEQ ID NO: 103797 - DNA, 80 bp, synthetic construct
  misc_feature 1..80: note = Artificially Synthesized Probe
  source 1..80: mol_type = other DNA
gggcagacgcttcccgaggacagaggcggtcctggcgggactggagaacaagaggggtgtgaggtgcctgccagactggg

SEQ ID NO: 103798 - DNA, 80 bp, synthetic construct
  misc_feature 1..80: note = Artificially Synthesized Probe
  source 1..80: mol_type = other DNA
tcccctgcgtgtgcgcagagctgcaaatgttcctgcacgtgaccatcgcgctcgagctgacgtctccaaccctggtccac

SEQ ID NO: 103799 - DNA, 80 bp, synthetic construct
  misc_feature 1..80: note = Artificially Synthesized Probe
  source 1..80: mol_type = other DNA
cagtgttatcaagtagaatacggggttgatgaagagtttcttttgccttcagtcttactgaggccagaaggcggcttgct

SEQ ID NO: 103800 - DNA, 80 bp, synthetic construct
  misc_feature 1..80: note = Artificially Synthesized Probe
  source 1..80: mol_type = other DNA
cccctaatgacagatgatgtcgcacgtctattcatttacatatttgccatctgtacatcttaatctttggtgaggtgtct

SEQ ID NO: 103801 - DNA, 80 bp, synthetic construct
  misc_feature 1..80: note = Artificially Synthesized Probe
  source 1..80: mol_type = other DNA
aatagtgaaatcttggctcactgcaacctccgcctcccaggttcaagcgattctcctgcctcagcctccagagtagctgg

SEQ ID NO: 103802 - DNA, 80 bp, synthetic construct; identical to SEQ ID NO: 36180
  misc_feature 1..80: note = Artificially Synthesized Probe
  source 1..80: mol_type = other DNA

SEQ ID NO: 103803 - DNA, 80 bp, synthetic construct
  misc_feature 1..80: note = Artificially Synthesized Probe
  source 1..80: mol_type = other DNA
agtgggcagcctcgtgcctaattatccagccctcaaccaggggctcactcacacaggaaacttgttcatattggcaggtg

SEQ ID NO: 103804 - DNA, 80 bp, synthetic construct
  misc_feature 1..80: note = Artificially Synthesized Probe
  source 1..80: mol_type = other DNA
tagctcttcagatggaagcacaaattcagtccaccactgtgataggaaacacgtgcaaagatttttactacaggtcctgg

SEQ ID NO: 103805 - DNA, 80 bp, synthetic construct
  misc_feature 1..80: note = Artificially Synthesized Probe
  source 1..80: mol_type = other DNA
cctcagcctcccaagcagctgggactacaggtgcaccccaccacacctgggtaattattttttttttagagacagggtct

SEQ ID NO: 103806 - DNA, 80 bp, synthetic construct; identical to SEQ ID NO: 36181
  misc_feature 1..80: note = Artificially Synthesized Probe
  source 1..80: mol_type = other DNA

SEQ ID NO: 103807 - DNA, 80 bp, synthetic construct
  misc_feature 1..80: note = Artificially Synthesized Probe
  source 1..80: mol_type = other DNA
cggtggctcatgtctgcaatcccagcacttagggaggccgaggcgggcagatcacctgaggtcaagagtttgagaccagc

SEQ ID NO: 103808 - DNA, 80 bp, synthetic construct
  misc_feature 1..80: note = Artificially Synthesized Probe
  source 1..80: mol_type = other DNA
cagtgagccgagatcaccccactgtactccagcctgggcgacagagcgagactccatctccaaaaaaataaaaaaagtga

SEQ ID NO: 103809 - DNA, 80 bp, synthetic construct
  misc_feature 1..80: note = Artificially Synthesized Probe
  source 1..80: mol_type = other DNA
ggcccaggcagcctccgctcttgctggatgagccttgggaattacccaccaggctgccagcccaggggcaggtgtggtcc

SEQ ID NO: 103810 - DNA, 80 bp, synthetic construct; identical to SEQ ID NO: 36182
  misc_feature 1..80: note = Artificially Synthesized Probe
  source 1..80: mol_type = other DNA

SEQ ID NO: 103811 - DNA, 80 bp, synthetic construct
  misc_feature 1..80: note = Artificially Synthesized Probe
  source 1..80: mol_type = other DNA
aaaatatgaaaattagccaggcatggtggcgggcacctgtaatcccagttactcaggaggctgaggcaagagaatcactt

SEQ ID NO: 103812 - DNA, 80 bp, synthetic construct
  misc_feature 1..80: note = Artificially Synthesized Probe
  source 1..80: mol_type = other DNA
acccaaggtcacctacattttctcttattgtctgctagaggttgtatagatttgtattttacgttagatgtgtgattcat

SEQ ID NO: 103813 - DNA, 80 bp, synthetic construct
  misc_feature 1..80: note = Artificially Synthesized Probe
  source 1..80: mol_type = other DNA
tttctgaaaggtgtgtaaggactgcatctagattaattttttgtgttgttgttggcatgtggaagtccagttgatccagc

SEQ ID NO: 103814 - DNA, 80 bp, synthetic construct; identical to SEQ ID NO: 36183
  misc_feature 1..80: note = Artificially Synthesized Probe
  source 1..80: mol_type = other DNA

SEQ ID NO: 103815 - DNA, 80 bp, synthetic construct
  misc_feature 1..80: note = Artificially Synthesized Probe
  source 1..80: mol_type = other DNA
cttagaaataatgtatcttccaattgataaacacagaatatctcttcatttatttagatctttgattccttttatcagaa

SEQ ID NO: 103816 - DNA, 80 bp, synthetic construct
  misc_feature 1..80: note = Artificially Synthesized Probe
  source 1..80: mol_type = other DNA
gttataaagcaaagcaatggacctttgtatgttaactttgtatcctgggcagagaagaggtgagggtgaggcggtcagcg

SEQ ID NO: 103817 - DNA, 80 bp, synthetic construct
  misc_feature 1..80: note = Artificially Synthesized Probe
  source 1..80: mol_type = other DNA
ctcctgggggacccatgaggccctgaccacagccccgcacacagccgtcagagacacacgttttttgttttttgtttttt

SEQ ID NO: 103818 - DNA, 80 bp, synthetic construct
  misc_feature 1..80: note = Artificially Synthesized Probe
  source 1..80: mol_type = other DNA
tgtatttttagtagagatggggtttcaccatgttggccaggctggtcttaaactcctgacctcaggtgatctgcccacat

SEQ ID NO: 103819 - DNA, 80 bp, synthetic construct; identical to SEQ ID NO: 36184
  misc_feature 1..80: note = Artificially Synthesized Probe
  source 1..80: mol_type = other DNA

SEQ ID NO: 103820 - DNA, 80 bp, synthetic construct
  misc_feature 1..80: note = Artificially Synthesized Probe
  source 1..80: mol_type = other DNA
acccccatctctactaaaaatacaaaaaattagccaggcatggtggtgcatgcctataattccagctacttgggaggctg

SEQ ID NO: 103821 - DNA, 80 bp, synthetic construct
  misc_feature 1..80: note = Artificially Synthesized Probe
  source 1..80: mol_type = other DNA
gccttggcctcctgagtagctaggactagaggtgcccgccaccacacccggctaatttttgtatttttaatagagacaga

SEQ ID NO: 103822 - DNA, 80 bp, synthetic construct
  misc_feature 1..80: note = Artificially Synthesized Probe
  source 1..80: mol_type = other DNA
aatcccagcactccggaaggctaaggcaggcagatagcttgagcccaggagcttgagaccagcctgggcaacatggcgaa

SEQ ID NO: 103823 - DNA, 80 bp, synthetic construct; identical to SEQ ID NO: 36185
  misc_feature 1..80: note = Artificially Synthesized Probe
  source 1..80: mol_type = other DNA

SEQ ID NO: 103824 - DNA, 80 bp, synthetic construct
  misc_feature 1..80: note = Artificially Synthesized Probe
  source 1..80: mol_type = other DNA
ggcatctataagccgggtgtggtggctcacacctataatcccagcactttgggaggttgaggcgggcggatcacgaggtc

SEQ ID NO: 103825 - DNA, 80 bp, synthetic construct
  misc_feature 1..80: note = Artificially Synthesized Probe
  source 1..80: mol_type = other DNA
agatcatgccactgcactccagccagggagacagagcgagattccatctcaaaaaaagaaaaaaaaaaagaatttttgca

SEQ ID NO: 103826 - DNA, 80 bp, synthetic construct
  misc_feature 1..80: note = Artificially Synthesized Probe
  source 1..80: mol_type = other DNA
cctaaatgtttggtcagattcaccagtgaaactattagggactggtgctttctttttggatgattattaattattgattc

SEQ ID NO: 103827 - DNA, 80 bp, synthetic construct; identical to SEQ ID NO: 36186
  misc_feature 1..80: note = Artificially Synthesized Probe
  source 1..80: mol_type = other DNA

SEQ ID NO: 103828 - DNA, 80 bp, synthetic construct
  misc_feature 1..80: note = Artificially Synthesized Probe
  source 1..80: mol_type = other DNA
gtgggatctcggctcactgcaacctccacctcccgggttcatgccattctcctgcctcagcctcccgagtagctggaact

SEQ ID NO: 103829 - DNA, 80 bp, synthetic construct
  misc_feature 1..80: note = Artificially Synthesized Probe
  source 1..80: mol_type = other DNA
tcaaaatcttttaaaaggtctcttcagactctggcccatctgttatttggaagtgtgttgttaaatccattttaaatttt

SEQ ID NO: 103830 - DNA, 80 bp, synthetic construct
  misc_feature 1..80: note = Artificially Synthesized Probe
  source 1..80: mol_type = other DNA
attgtgctgttggtggatgaggtaaattatagatgtcaattatgtccattcgaataacagtgtttttgttttttttattt

SEQ ID NO: 103831 - DNA, 80 bp, synthetic construct
  misc_feature 1..80: note = Artificially Synthesized Probe
  source 1..80: mol_type = other DNA
ttttatatttttagtagagacgggatttccccatgttgcccaggttggtctcgaactcccagcctcagatgatccgccca

SEQ ID NO: 103832 - DNA, 80 bp, synthetic construct; identical to SEQ ID NO: 36168
  misc_feature 1..80: note = Artificially Synthesized Probe
  source 1..80: mol_type = other DNA

SEQ ID NO: 103833 - DNA, 80 bp, synthetic construct; identical to SEQ ID NO: 36187
  misc_feature 1..80: note = Artificially Synthesized Probe
  source 1..80: mol_type = other DNA

SEQ ID NO: 103834 - DNA, 80 bp, synthetic construct
  misc_feature 1..80: note = Artificially Synthesized Probe
  source 1..80: mol_type = other DNA
gtgtgtctttatacttacagtgggttttttatagacaacatatatagggtcaggtcttagttctttttatccgctctgaa

SEQ ID NO: 103835 - DNA, 80 bp, synthetic construct
  misc_feature 1..80: note = Artificially Synthesized Probe
  source 1..80: mol_type = other DNA
ctccacgtcccaggttcacgccattctcctgcctcagcctcccgagtagctgggactacaggcgcccgccaccacgcccg

SEQ ID NO: 103836 - DNA, 80 bp, synthetic construct
  misc_feature 1..80: note = Artificially Synthesized Probe
  source 1..80: mol_type = other DNA
agccaccgcgcccggccaggctagtcacatttaaagtgattattgatatagttggattaatatataccatattcttaaac

SEQ ID NO: 103837 - DNA, 80 bp, synthetic construct; identical to SEQ ID NO: 36188
  misc_feature 1..80: note = Artificially Synthesized Probe
  source 1..80: mol_type = other DNA

SEQ ID NO: 103838 - DNA, 80 bp, synthetic construct
  misc_feature 1..80: note = Artificially Synthesized Probe
  source 1..80: mol_type = other DNA
tttatttattttctgctgctcttccttttttcacgcatatgcaagtttctgatctatctcattcttcctgtttccaagga

SEQ ID NO: 103839 - DNA, 80 bp, synthetic construct
  misc_feature 1..80: note = Artificially Synthesized Probe
  source 1..80: mol_type = other DNA
ttataagttagcacatttttttctcaacacttccaatacttcactctcctcttgctcgcatcgtttctgatgagatgttt

SEQ ID NO: 103840 - DNA, 80 bp, synthetic construct; identical to SEQ ID NO: 36189
  misc_feature 1..80: note = Artificially Synthesized Probe
  source 1..80: mol_type = other DNA

SEQ ID NO: 103841 - DNA, 80 bp, synthetic construct
  misc_feature 1..80: note = Artificially Synthesized Probe
  source 1..80: mol_type = other DNA
tcctgtactccagcgcgccttgtccttcccagagcgtccatctctttgcttatgttaccatctgctccggtgcgctgcct

SEQ ID NO: 103842 - DNA, 80 bp, synthetic construct
  misc_feature 1..80: note = Artificially Synthesized Probe
  source 1..80: mol_type = other DNA
ctcctgagtagctgggattacaggtgcccaccaccgcggcccggctaatttttgtatttttagtagagatgagtgtcacc

SEQ ID NO: 103843 - DNA, 80 bp, synthetic construct
  misc_feature 1..80: note = Artificially Synthesized Probe
  source 1..80: mol_type = other DNA
ttcctcctgcacacaatccccaagacaacttctcatccccaccctgtcccaaatctgggctgtgtctttcttgcccccag

SEQ ID NO: 103844 - DNA, 80 bp, synthetic construct
  misc_feature 1..80: note = Artificially Synthesized Probe
  source 1..80: mol_type = other DNA
ctggttctgaggcttgctttgcctttttggactgttgctttttcttgccttttagcatgacttataatttttggccaaag

SEQ ID NO: 103845 - DNA, 80 bp, synthetic construct; identical to SEQ ID NO: 36190
  misc_feature 1..80: note = Artificially Synthesized Probe
  source 1..80: mol_type = other DNA

SEQ ID NO: 103846 - DNA, 80 bp, synthetic construct
  misc_feature 1..80: note = Artificially Synthesized Probe
  source 1..80: mol_type = other DNA
agggcttcacagatgcatggggggaggggcacgcaatctagtacacagcgggaaccacccagcaacagacctcagtttta

SEQ ID NO: 103847 - DNA, 80 bp, synthetic construct
  misc_feature 1..80: note = Artificially Synthesized Probe
  source 1..80: mol_type = other DNA
ccccatctctagtaaaaaatacaaaaaattagctgggcgtggtggtgcatgcctataaccccagctactcaggaggctga

SEQ ID NO: 103848 - DNA, 80 bp, synthetic construct
  misc_feature 1..80: note = Artificially Synthesized Probe
  source 1..80: mol_type = other DNA
ccccagccctaaaccaggcaacaagtgaattaccaacacctaggaaactccttgtttccagcctctcagtctgcaggcat

SEQ ID NO: 103849 - DNA, 80 bp, synthetic construct; identical to SEQ ID NO: 36191
  misc_feature 1..80: note = Artificially Synthesized Probe
  source 1..80: mol_type = other DNA

SEQ ID NO: 103850 - DNA, 80 bp, synthetic construct
  misc_feature 1..80: note = Artificially Synthesized Probe
  source 1..80: mol_type = other DNA
aggcaccctccagctggaggcccctgccattccctttctgaaaagcctctcggacactcccatcagagccaacagaggcc

SEQ ID NO: 103851 - DNA, 80 bp, synthetic construct
  misc_feature 1..80: note = Artificially Synthesized Probe
  source 1..80: mol_type = other DNA
ctgcatgaaaggcctgtgggtgcagggctgcagctctcaccttcaggccggccatgcgtcaggacccggtggctcgctgc

SEQ ID NO: 103852 - DNA, 80 bp, synthetic construct
  misc_feature 1..80: note = Artificially Synthesized Probe
  source 1..80: mol_type = other DNA
gcgggagcctgttgagctggccaacttcggacttagggccccaccatgatgagccagatggagctgtggggagatccacg

SEQ ID NO: 103853 - DNA, 80 bp, synthetic construct
  misc_feature 1..80: note = Artificially Synthesized Probe
  source 1..80: mol_type = other DNA
cctggcctgttccccagggctgttctaggtcctgccacccccacccccagtgccatggccgcacctgccccaggactgac

SEQ ID NO: 103854 - DNA, 80 bp, synthetic construct; identical to SEQ ID NO: 36192
  misc_feature 1..80: note = Artificially Synthesized Probe
  source 1..80: mol_type = other DNA

SEQ ID NO: 103855 - DNA, 80 bp, synthetic construct
  misc_feature 1..80: note = Artificially Synthesized Probe
  source 1..80: mol_type = other DNA
cctgctgctgctttgaaagtgaaggagcgccattcttggattccccaggcactcgctggggtcccttatgctgaccacag

SEQ ID NO: 103856 - DNA, 80 bp, synthetic construct
  misc_feature 1..80: note = Artificially Synthesized Probe
  source 1..80: mol_type = other DNA
ggatatgcaggagagcatcaacatggagcgcgtggtcttcaaggtcctgcggcgcctctgcaccctcctgcaggccgacc

SEQ ID NO: 103857 - DNA, 80 bp, synthetic construct
  misc_feature 1..80: note = Artificially Synthesized Probe
  source 1..80: mol_type = other DNA
cagggctcagggtcggggggagactctggccctactccactggctgggcagccagtggggatcccatctgccctggcccc

SEQ ID NO: 103858 - DNA, 80 bp, synthetic construct
  misc_feature 1..80: note = Artificially Synthesized Probe
  source 1..80: mol_type = other DNA
tcaccctggagcattaaacctgaccccagtcaatgcaggagggacacaacctcagcttccatgcagcccagaagcccagg

SEQ ID NO: 103859 - DNA, 80 bp, synthetic construct; identical to SEQ ID NO: 36193
  misc_feature 1..80: note = Artificially Synthesized Probe
  source 1..80: mol_type = other DNA

SEQ ID NO: 103860 - DNA, 80 bp, synthetic construct
  misc_feature 1..80: note = Artificially Synthesized Probe
  source 1..80: mol_type = other DNA
tccacacaggcaacagcctccatcagaggcctcagggctccccttcgatctggagttggaattgagggatgctgcccagg

SEQ ID NO: 103861 - DNA, 80 bp, synthetic construct
  misc_feature 1..80: note = Artificially Synthesized Probe
  source 1..80: mol_type = other DNA
actcccagcagtcaggacagaaacagctccgacacccacacacagggaggggggccggcagggagggctggcgtctggag

SEQ ID NO: 103862 - DNA, 80 bp, synthetic construct
  misc_feature 1..80: note = Artificially Synthesized Probe
  source 1..80: mol_type = other DNA
cacgctgaagacgcctgcacttcagtcagttgctgtgtgcaccagcaggcttttaaccggaaaattaaaaatgaaaacaa

SEQ ID NO: 103863 - DNA, 80 bp, synthetic construct
  misc_feature 1..80: note = Artificially Synthesized Probe
  source 1..80: mol_type = other DNA
gcaggggctgaggtggcgatgtcaacagcagtggggccgtcacaggcaggacagggctgaggcgccgatgtcaacagcag

SEQ ID NO: 103864 - DNA, 80 bp, synthetic construct; identical to SEQ ID NO: 36169
  misc_feature 1..80: note = Artificially Synthesized Probe
  source 1..80: mol_type = other DNA

SEQ ID NO: 103865 - DNA, 80 bp, synthetic construct; identical to SEQ ID NO: 36194
  misc_feature 1..80: note = Artificially Synthesized Probe
  source 1..80: mol_type = other DNA

SEQ ID NO: 103866 - DNA, 80 bp, synthetic construct
  misc_feature 1..80: note = Artificially Synthesized Probe
  source 1..80: mol_type = other DNA
attccacacatctacagcgagtctcctgagccgcaggcgccggggctgtggagagccgtctccattcagcaggcgccagg

SEQ ID NO: 103867 - DNA, 80 bp, synthetic construct
  misc_feature 1..80: note = Artificially Synthesized Probe
  source 1..80: mol_type = other DNA
cctgttctggacccactaactccagtgactgagctgacttcttcacacgggcatggggccaaagctcctgaccagtgcag

SEQ ID NO: 103868 - DNA, 80 bp, synthetic construct
  misc_feature 1..80: note = Artificially Synthesized Probe
  source 1..80: mol_type = other DNA
gtccacacccatcggtgaggcaggagtcagggtaggctgcagacccgggcggagattgcgaggcaggggtcagggtcact

SEQ ID NO: 103869 - DNA, 80 bp, synthetic construct; identical to SEQ ID NO: 36195
  misc_feature 1..80: note = Artificially Synthesized Probe
  source 1..80: mol_type = other DNA

SEQ ID NO: 103870 - DNA, 80 bp, synthetic construct
  misc_feature 1..80: note = Artificially Synthesized Probe
  source 1..80: mol_type = other DNA
gtacacagggtgctcggtaagtgcagttctgcttccgaggatttatgatgtgggaaaagttttaaattaaaaataagaat

SEQ ID NO: 103871 - DNA, 80 bp, synthetic construct
  misc_feature 1..80: note = Artificially Synthesized Probe
  source 1..80: mol_type = other DNA
gttatcagagcggcgtcctggaaccaatttccctgaggatgccgagggatgactgtattgtataccaaattgctagaaaa

SEQ ID NO: 103872 - DNA, 80 bp, synthetic construct; identical to SEQ ID NO: 36196
  misc_feature 1..80: note = Artificially Synthesized Probe
  source 1..80: mol_type = other DNA

SEQ ID NO: 103873 - DNA, 80 bp, synthetic construct
  misc_feature 1..80: note = Artificially Synthesized Probe
  source 1..80: mol_type = other DNA
ggccagttcaggagagcagctcgtggctgtggtggaagagtccctcagacggggcgtgggtggccagcacgcaacacccg

SEQ ID NO: 103874 - DNA, 80 bp, synthetic construct
  misc_feature 1..80: note = Artificially Synthesized Probe
  source 1..80: mol_type = other DNA
ggggcctgggtctgggccttgaccaaggaggcagagaaaggtggcccaaggagggccctggggtgagtctgagcctggtg

SEQ ID NO: 103875 - DNA, 80 bp, synthetic construct
  misc_feature 1..80: note = Artificially Synthesized Probe
  source 1..80: mol_type = other DNA
ccctgctcgccgcaggtggttctggagcagccgggcggaggaagggctggtcggatgtttgcctgtcaagctcaaagcga

SEQ ID NO: 103876 - DNA, 80 bp, synthetic construct
  misc_feature 1..80: note = Artificially Synthesized Probe
  source 1..80: mol_type = other DNA
accaatcagggtctgtgccaggctccacggctgggcaggtggtcagatcagggagcgcacctgtgtcaggcttgagttaa

SEQ ID NO: 103877 - DNA, 80 bp, synthetic construct; identical to SEQ ID NO: 36197
  misc_feature 1..80: note = Artificially Synthesized Probe
  source 1..80: mol_type = other DNA

SEQ ID NO: 103878 - DNA, 80 bp, synthetic construct
  misc_feature 1..80: note = Artificially Synthesized Probe
  source 1..80: mol_type = other DNA
gggcctgtccacacgcctctgtttccctgactccaactccagggcaggagagggagggataggggtggggtttagggagg

SEQ ID NO: 103879 - DNA, 80 bp, synthetic construct
  misc_feature 1..80: note = Artificially Synthesized Probe
  source 1..80: mol_type = other DNA
cgtgaagacccacgtcggctctgattgtgggggctcctgctgccccatctccccacgtgggacctcctgtgcacgtgtag

SEQ ID NO: 103880 - DNA, 80 bp, synthetic construct
  misc_feature 1..80: note = Artificially Synthesized Probe
  source 1..80: mol_type = other DNA
tgtggacatgggtgtgagtgcacccgcattcgtagaatacctgcgcacggcggagacatctgttcacgtgtgtacacatg

SEQ ID NO: 103881 - DNA, 80 bp, synthetic construct; identical to SEQ ID NO: 36198
  misc_feature 1..80: note = Artificially Synthesized Probe
  source 1..80: mol_type = other DNA

SEQ ID NO: 103882 - DNA, 80 bp, synthetic construct
  misc_feature 1..80: note = Artificially Synthesized Probe
  source 1..80: mol_type = other DNA
acctgtggtgctctgtgtgccgtggggcatagtggagttgggggtgagacagaagccgactcactgttctgggagatggt

SEQ ID NO: 103883 - DNA, 80 bp, synthetic construct
  misc_feature 1..80: note = Artificially Synthesized Probe
  source 1..80: mol_type = other DNA
gcctccagccaggaggccgagtcttggccccgtggggctggaagaggaggggaactccagtccggaggtcagggcaggac

SEQ ID NO: 103884 - DNA, 80 bp, synthetic construct
  misc_feature 1..80: note = Artificially Synthesized Probe
  source 1..80: mol_type = other DNA
agaaagcaggctgaagccatacggcctccggagagggaggggttcccaagagggaggggccccagcacggcagcctgggg

SEQ ID NO: 103885 - DNA, 80 bp, synthetic construct
  misc_feature 1..80: note = Artificially Synthesized Probe
  source 1..80: mol_type = other DNA
gcaggcaggccccgggtaacccgctcctccctgagctgcaagcgtccatcctcctggagctgagggtgccagcccagggt

SEQ ID NO: 103886 - DNA, 80 bp, synthetic construct
  misc_feature 1..80: note = Artificially Synthesized Probe
  source 1..80: mol_type = other DNA
cacctacatccagcgcagcctggcccctctgacccctgcacacacacgtgcagcccagaccagcccctctgacccctgca

SEQ ID NO: 103887 - DNA, 80 bp, synthetic construct; identical to SEQ ID NO: 36199
  misc_feature 1..80: note = Artificially Synthesized Probe
  source 1..80: mol_type = other DNA

SEQ ID NO: 103888 - DNA, 80 bp, synthetic construct
  misc_feature 1..80: note = Artificially Synthesized Probe
  source 1..80: mol_type = other DNA
ggccattttagatcataacagaccttccgctgttttggatgaaatcgtttttctgatgctttttcagatttgtaacatca

SEQ ID NO: 103889 - DNA, 80 bp, synthetic construct
  misc_feature 1..80: note = Artificially Synthesized Probe
  source 1..80: mol_type = other DNA
gcctgtaatcccagcactttgggaggctgaggcgggtggatcacctggggctgtgaccacagcccccacacacgcccgca

SEQ ID NO: 103890 - DNA, 80 bp, synthetic construct; identical to SEQ ID NO: 36200
  misc_feature 1..80: note = Artificially Synthesized Probe
  source 1..80: mol_type = other DNA

SEQ ID NO: 103891 - DNA, 80 bp, synthetic construct
  misc_feature 1..80: note = Artificially Synthesized Probe
  source 1..80: mol_type = other DNA
tggctcatcaagaatgtgctgtccatgcccatcgtcaacaagaaggaggagattgtgggagtcgccacattttacaacag

SEQ ID NO: 103892 - DNA, 80 bp, synthetic construct
  misc_feature 1..80: note = Artificially Synthesized Probe
  source 1..80: mol_type = other DNA
gcggtatgcatgcggccagggagaggacgacaaagggcccccccgggagcaggagcctctgcagagcacccgggagaccc

SEQ ID NO: 103893 - DNA, 80 bp, synthetic construct
  misc_feature 1..80: note = Artificially Synthesized Probe
  source 1..80: mol_type = other DNA
gtgatgaacaccgacacctacgacaagatgaacaagctggagaaccgcaaggacatcgcacaggacatggtcctttacca

SEQ ID NO: 103894 - DNA, 80 bp, synthetic construct
  misc_feature 1..80: note = Artificially Synthesized Probe
  source 1..80: mol_type = other DNA
caggggtcacggctgtgcggtgggggcaggtcgtccaggggtcacccaggggtcacggctgtgcggtgggggcaggtcgt

SEQ ID NO: 103895 - DNA, 80 bp, synthetic construct; identical to SEQ ID NO: 36201
  misc_feature 1..80: note = Artificially Synthesized Probe
  source 1..80: mol_type = other DNA

SEQ ID NO: 103896 - DNA, 80 bp, synthetic construct
  misc_feature 1..80: note = Artificially Synthesized Probe
  source 1..80: mol_type = other DNA
ttcagctgatggctccaagtccctgtctgctcccagaaccccacgactacacatgttgtgtgtcacggcagccccttggg

SEQ ID NO: 103897 - DNA, 80 bp, synthetic construct
  misc_feature 1..80: note = Artificially Synthesized Probe
  source 1..80: mol_type = other DNA
tggctctgcggcgggggcaggtcaccaggggtcacagctgtgcggtggggacaggtcaccaggggtcatggctgtatggt

SEQ ID NO: 103898 - DNA, 80 bp, synthetic construct
  misc_feature 1..80: note = Artificially Synthesized Probe
  source 1..80: mol_type = other DNA
ctgtgtggtgggggcaggtcacccaggggtcacaggtgtgcggggcaggtcgtccaggggtcacggctgtgtggcagggg

SEQ ID NO: 103899 - DNA, 80 bp, synthetic construct
  misc_feature 1..80: note = Artificially Synthesized Probe
  source 1..80: mol_type = other DNA
gggccagagctgagtacagccctggcatgcccccgaggtccctctgtctgcacggccctggcatcccttccctgtgctca

SEQ ID NO: 103900 - DNA, 80 bp, synthetic construct; identical to SEQ ID NO: 36202
  misc_feature 1..80: note = Artificially Synthesized Probe
  source 1..80: mol_type = other DNA

SEQ ID NO: 103901 - DNA, 80 bp, synthetic construct
  misc_feature 1..80: note = Artificially Synthesized Probe
  source 1..80: mol_type = other DNA
cgtgtgaggctgggaggaagagttctgcattctccgggacccgacggtgctttgcacacacggtcatcagggatgttggt

SEQ ID NO: 103902 - DNA, 80 bp, synthetic construct
  misc_feature 1..80: note = Artificially Synthesized Probe
  source 1..80: mol_type = other DNA
ctctgtgctttgccagatgtttagttttcaccggatgtttagtgggcctgacttggactctgtgtccatctatgtcatct

SEQ ID NO: 103903 - DNA, 80 bp, synthetic construct
  misc_feature 1..80: note = Artificially Synthesized Probe
  source 1..80: mol_type = other DNA
cgtctgcacaggtgtgtacatgtgtgcacatgtgggtgtgtgtgtgcacatgtgggtatgtgtgtgcgtgtgtgcattgt

SEQ ID NO: 103904 - DNA, 80 bp, synthetic construct; identical to SEQ ID NO: 36203
  misc_feature 1..80: note = Artificially Synthesized Probe
  source 1..80: mol_type = other DNA

SEQ ID NO: 103905 - DNA, 80 bp, synthetic construct
  misc_feature 1..80: note = Artificially Synthesized Probe
  source 1..80: mol_type = other DNA
cgtgagtctgcacgtgtgtgcctgcatgtctgtgggtgtgcctgggtgctcatgtgtgtgcctgtgtgtccacaccggtg

SEQ ID NO: 103906 - DNA, 80 bp, synthetic construct
  misc_feature 1..80: note = Artificially Synthesized Probe
  source 1..80: mol_type = other DNA
gccacagggtacaagaggggagagtgaggctgagccaggggggcgtgtgagcagcctgggatacaggctggagcgccagg

SEQ ID NO: 103907 - DNA, 80 bp, synthetic construct; identical to SEQ ID NO: 36170
  misc_feature 1..80: note = Artificially Synthesized Probe
  source 1..80: mol_type = other DNA

SEQ ID NO: 103908 - DNA, 80 bp, synthetic construct
  misc_feature 1..80: note = Artificially Synthesized Probe
  source 1..80: mol_type = other DNA
acatctacgaattccacttctctgacctggagtgcaccgaactggacctggtcaaatgtggcatccagatgtactacgag

SEQ ID NO: 103909 - DNA, 80 bp, synthetic construct; identical to SEQ ID NO: 36204
  misc_feature 1..80: note = Artificially Synthesized Probe
  source 1..80: mol_type = other DNA

SEQ ID NO: 103910 - DNA, 80 bp, synthetic construct
  misc_feature 1..80: note = Artificially Synthesized Probe
  source 1..80: mol_type = other DNA
ggaaggccaacaggcaagcagaaagaaacaaaggaagaataaatgaatggatgggtggatgccaatggtagttggatagt

SEQ ID NO: 103911 - DNA, 80 bp, synthetic construct
  misc_feature 1..80: note = Artificially Synthesized Probe
  source 1..80: mol_type = other DNA
gagaagtgggtggatgagtgatagatgagtaggtgggtcaattaatgaattaatagatgggtcaatgaatgggtgaatgg

SEQ ID NO: 103912 - DNA, 80 bp, synthetic construct
  misc_feature 1..80: note = Artificially Synthesized Probe
  source 1..80: mol_type = other DNA
cacatcatctggcaataacaggggatttggtgtggggtgctgaggagatagaagcatcccatcacctaaacagaaagcac

SEQ ID NO: 103913 - DNA, 80 bp, synthetic construct; identical to SEQ ID NO: 36205
  misc_feature 1..80: note = Artificially Synthesized Probe
  source 1..80: mol_type = other DNA

SEQ ID NO: 103914 - DNA, 80 bp, synthetic construct
  misc_feature 1..80: note = Artificially Synthesized Probe
  source 1..80: mol_type = other DNA
gttctcccaccccagcctgcagcccacacattctgctcattcaaatgtccatgcctaaaaccaacatcttaaaatatgct

SEQ ID NO: 103915 - DNA, 80 bp, synthetic construct
  misc_feature 1..80: note = Artificially Synthesized Probe
  source 1..80: mol_type = other DNA
atgtggcagcccctacccaggaaggccagcagaggccagtgggaaacgcagggatggggaagatcgggaagtccaggaga

SEQ ID NO: 103916 - DNA, 80 bp, synthetic construct
  misc_feature 1..80: note = Artificially Synthesized Probe
  source 1..80: mol_type = other DNA
aatcacctaccacaactggcgccacggcttcaacgtggcccagacgatgttcacgctgctcatggtacgtggctgccaga

SEQ ID NO: 103917 - DNA, 80 bp, synthetic construct
  misc_feature 1..80: note = Artificially Synthesized Probe
  source 1..80: mol_type = other DNA
tccaacccgacgcctaggtcatcccaacccctcaccactccccaccctgctggagccaggaccggtgagcaaggtggccc

SEQ ID NO: 103918 - DNA, 80 bp, synthetic construct; identical to SEQ ID NO: 36206
  misc_feature 1..80: note = Artificially Synthesized Probe
  source 1..80: mol_type = other DNA

SEQ ID NO: 103919 - DNA, 80 bp, synthetic construct
  misc_feature 1..80: note = Artificially Synthesized Probe
  source 1..80: mol_type = other DNA
cacccctttgtggctcctcagacctgcaagagttcacagcgagggcagctgggatggacgatcctggtgggctggtgggg

SEQ ID NO: 103920 - DNA, 80 bp, synthetic construct
  misc_feature 1..80: note = Artificially Synthesized Probe
  source 1..80: mol_type = other DNA
gaggctgaggtgggaggatcacttgagcccaggaggtcaaggctgtattgagccatgattgcaccactgcactccagagt

SEQ ID NO: 103921 - DNA, 80 bp, synthetic construct
  misc_feature 1..80: note = Artificially Synthesized Probe
  source 1..80: mol_type = other DNA
ttttggagcggcaccacctggagtttgggaagttcctgctctcggaggaggttggtatactcaccctcggtttctgctgt

SEQ ID NO: 103922 - DNA, 80 bp, synthetic construct; identical to SEQ ID NO: 36207
  misc_feature 1..80: note = Artificially Synthesized Probe
  source 1..80: mol_type = other DNA

SEQ ID NO: 103923 - DNA, 80 bp, synthetic construct
  misc_feature 1..80: note = Artificially Synthesized Probe
  source 1..80: mol_type = other DNA
ctgagcagcaggcggattaggggtcccgcccaccgagggcccgagggcgggggcgtgagaggcacaggcagccgaggcgg

SEQ ID NO: 103924 - DNA, 80 bp, synthetic construct
  misc_feature 1..80: note = Artificially Synthesized Probe
  source 1..80: mol_type = other DNA
ccctgtacttcaagtgcgcgccttccgggagggggcgcctcgcggggcgggcgggtagcctgggacccccggcagacacg

SEQ ID NO: 103925 - DNA, 80 bp, synthetic construct
  misc_feature 1..80: note = Artificially Synthesized Probe
  source 1..80: mol_type = other DNA
tgttccctgggttcaggaagagagcgatgtttcagaagatcgtggatgagtccaagaactaccaggacaagaagagctgg

SEQ ID NO: 103926 - DNA, 80 bp, synthetic construct; identical to SEQ ID NO: 36208
  misc_feature 1..80: note = Artificially Synthesized Probe
  source 1..80: mol_type = other DNA

SEQ ID NO: 103927 - DNA, 80 bp, synthetic construct
  misc_feature 1..80: note = Artificially Synthesized Probe
  source 1..80: mol_type = other DNA
ggccgaggggagtggatcacctgaggtcaggagttcgagatcagcctggccaacatggtgaaaccccgtctctaccgaaa

SEQ ID NO: 103928 - DNA, 80 bp, synthetic construct
  misc_feature 1..80: note = Artificially Synthesized Probe
  source 1..80: mol_type = other DNA
acatataaaccacctgccctcaggagacgcccatcagcactcgtgcccggtttgtgtctgcagggccatgatgatgacag

SEQ ID NO: 103929 - DNA, 80 bp, synthetic construct
  misc_feature 1..80: note = Artificially Synthesized Probe
  source 1..80: mol_type = other DNA
gccacctcggggccaggccagggcggcaaggatgggggtactgcagtgtgtctacatggctcaaccggagccctgtgtgg

SEQ ID NO: 103930 - DNA, 80 bp, synthetic construct
  misc_feature 1..80: note = Artificially Synthesized Probe
  source 1..80: mol_type = other DNA
atgggaacccatcccaaaggcccgtcccgggaccctggtgggtcccctgccccctgccccaaaacacctcatcacggggt

SEQ ID NO: 103931 - DNA, 80 bp, synthetic construct; identical to SEQ ID NO: 36209
  misc_feature 1..80: note = Artificially Synthesized Probe
  source 1..80: mol_type = other DNA

SEQ ID NO: 103932 - DNA, 80 bp, synthetic construct
  misc_feature 1..80: note = Artificially Synthesized Probe
  source 1..80: mol_type = other DNA
tgggtacagctgtggcttgggtgatgcttatgcagaggtgacgtcgttggcactggaggaaccagggccacccgctcatc

SEQ ID NO: 103933 - DNA, 80 bp, synthetic construct
  misc_feature 1..80: note = Artificially Synthesized Probe
  source 1..80: mol_type = other DNA
cagcagcggggtctggatacctcctggcagcaggagaggtgccagcaaatgggagagtcaggataggcgccaggaacagg

SEQ ID NO: 103934 - DNA, 80 bp, synthetic construct
  misc_feature 1..80: note = Artificially Synthesized Probe
  source 1..80: mol_type = other DNA
gccccacaggggaaggacaggcagcaggtccatcccccgcgcccggcctctagagtcctgcatggttcaccctccaccag

SEQ ID NO: 103935 - DNA, 80 bp, synthetic construct
  misc_feature 1..80: note = Artificially Synthesized Probe
  source 1..80: mol_type = other DNA
catccccctccccgcctctccccagctgcagtaagggtccccagagccaagagggggctgccctcaggggaccacgggct

SEQ ID NO: 103936 - DNA, 80 bp, synthetic construct; identical to SEQ ID NO: 36210
  misc_feature 1..80: note = Artificially Synthesized Probe
  source 1..80: mol_type = other DNA

SEQ ID NO: 103937 - DNA, 80 bp, synthetic construct
  misc_feature 1..80: note = Artificially Synthesized Probe
  source 1..80: mol_type = other DNA
ctcacacgggcccggcggtgtcctcactggagtagggatgccagtgccagcttcgtgccgctcttgagtggggcaaatgg

SEQ ID NO: 103938 - DNA, 80 bp, synthetic construct
  misc_feature 1..80: note = Artificially Synthesized Probe
  source 1..80: mol_type = other DNA
cactgttttgggggccttggctgcagctctgtgggttcatttgttccatgtttgtgaaccctcgaggcggggctgggtcg

SEQ ID NO: 103939 - DNA, 80 bp, synthetic construct; identical to SEQ ID NO: 36211
  misc_feature 1..80: note = Artificially Synthesized Probe
  source 1..80: mol_type = other DNA

SEQ ID NO: 103940 - DNA, 80 bp, synthetic construct
  misc_feature 1..80: note = Artificially Synthesized Probe
  source 1..80: mol_type = other DNA
ccccaccccgccacactccatgtgtgatgtgcgcgagtgcacgcgtgtgctgtgcttgcatgatgtgtgccgtgtgtgtg

SEQ ID NO: 103941 - DNA, 80 bp, synthetic construct
  misc_feature 1..80: note = Artificially Synthesized Probe
  source 1..80: mol_type = other DNA
gcagaggaggtgtggggcttgggcagttggaggtgctttggagaagccacagtgggtgtgaaggccccagagcgaggccc

SEQ ID NO: 103942 - DNA, 80 bp, synthetic construct
  misc_feature 1..80: note = Artificially Synthesized Probe
  source 1..80: mol_type = other DNA
cctgcaacactgcaccctaagcatgcataccctaaagctcccggcttcaatgtcaccaacacagcccccgaggtttctcc

SEQ ID NO: 103943 - DNA, 80 bp, synthetic construct
  misc_feature 1..80: note = Artificially Synthesized Probe
  source 1..80: mol_type = other DNA
gttctctcgtttccacgaagagatcctgcccatgttcgaccgactgcagaacaataggaaagagtggaaggcgctggctg

SEQ ID NO: 103944 - DNA, 80 bp, synthetic construct
  misc_feature 1..80: note = Artificially Synthesized Probe
  source 1..80: mol_type = other DNA
aaaatgaaaagacagggcacagagcagagttaaaatggagaaaagcagagccactttcaagaagcctcgaggtggacagg

SEQ ID NO: 103945 - DNA, 80 bp, synthetic construct; identical to SEQ ID NO: 36212
  misc_feature 1..80: note = Artificially Synthesized Probe
  source 1..80: mol_type = other DNA

SEQ ID NO: 103946 - DNA, 80 bp, synthetic construct
  misc_feature 1..80: note = Artificially Synthesized Probe
  source 1..80: mol_type = other DNA
ctattcccctaccccatgctagtaccactaccccatgctattcccgctaccccatgctattcccctaccccatgctagta

SEQ ID NO: 103947 - DNA, 80 bp, synthetic construct
  misc_feature 1..80: note = Artificially Synthesized Probe
  source 1..80: mol_type = other DNA
tgctattcccctaccccatgctattcccctaccccatgctgctcccactaccccacgctattcccctaccccatgctgct

SEQ ID NO: 103948 - DNA, 80 bp, synthetic construct
  misc_feature 1..80: note = Artificially Synthesized Probe
  source 1..80: mol_type = other DNA
tgctgctcccactaccccacgctattcccctaccccatgctattcccgctatgccatgctattcccgctaccccatgcta

SEQ ID NO: 103949 - DNA, 80 bp, synthetic construct; identical to SEQ ID NO: 36213
  misc_feature 1..80: note = Artificially Synthesized Probe
  source 1..80: mol_type = other DNA

SEQ ID NO: 103950 - DNA, 80 bp, synthetic construct
  misc_feature 1..80: note = Artificially Synthesized Probe
  source 1..80: mol_type = other DNA
cccatgctattcccactacgccatgctattcccgctaccccatgctattcccactaccccatgctattcccgctacccca

SEQ ID NO: 103951 - DNA, 80 bp, synthetic construct
  misc_feature 1..80: note = Artificially Synthesized Probe
  source 1..80: mol_type = other DNA
cgctaccccatgctattcccgctaccccatgctattcccgctaccccatgctattcccctaccccatgctatccccctac

SEQ ID NO: 103952 - DNA, 80 bp, synthetic construct
  misc_feature 1..80: note = Artificially Synthesized Probe
  source 1..80: mol_type = other DNA
tgtccttcctcctgcaggggttggtagaggtcacaccaggcaggagggaaggaatagggctggtgtgcacaggtggttcc

SEQ ID NO: 103953 - DNA, 80 bp, synthetic construct; identical to SEQ ID NO: 36171
  misc_feature 1..80: note = Artificially Synthesized Probe
  source 1..80: mol_type = other DNA

SEQ ID NO: 103954 - DNA, 80 bp, synthetic construct; identical to SEQ ID NO: 36214
  misc_feature 1..80: note = Artificially Synthesized Probe
  source 1..80: mol_type = other DNA

SEQ ID NO: 103955 - DNA, 80 bp, synthetic construct
  misc_feature 1..80: note = Artificially Synthesized Probe
  source 1..80: mol_type = other DNA
gactacaggcgcccaccaccacacatggctaatttttgtattttcagtacagatggggtttcaccatattgggcaggctg

SEQ ID NO: 103956 - DNA, 80 bp, synthetic construct
  misc_feature 1..80: note = Artificially Synthesized Probe
  source 1..80: mol_type = other DNA
ggagacctttgaaaagggtccatgaactctgaaatcactgagaacatttgcagccacacatgtacatatgtgtacacagg

SEQ ID NO: 103957 - DNA, 80 bp, synthetic construct
  misc_feature 1..80: note = Artificially Synthesized Probe
  source 1..80: mol_type = other DNA
agaacatttgcagccacacatgtacatatgtgtacacaggtagacagatggacacaggccgtttctcatccagtttagga

SEQ ID NO: 103958 - DNA, 80 bp, synthetic construct
  misc_feature 1..80: note = Artificially Synthesized Probe
  source 1..80: mol_type = other DNA
ctgtcatctcaggaagtgaaggctgggctggggtcgggctgctgggccacgaggggcagcgggagggagccgctgaggct

SEQ ID NO: 103959 - DNA, 80 bp, synthetic construct
  misc_feature 1..80: note = Artificially Synthesized Probe
  source 1..80: mol_type = other DNA
gaccaaaaagatggtgaacgtcgaggacgtggccgaggtgggtctgtgcggagcctcagggaggcggctgtgtgcatctc

SEQ ID NO: 103960 - DNA, 80 bp, synthetic construct
  misc_feature 1..80: note = Artificially Synthesized Probe
  source 1..80: mol_type = other DNA
tcgatggcagacttacaaaaaagtaaacattccctgtggtgttagggaagctgaggagggcagagggcagagtgcaagcc

SEQ ID NO: 103961 - DNA, 80 bp, synthetic construct
  misc_feature 1..80: note = Artificially Synthesized Probe
  source 1..80: mol_type = other DNA
caattccggctgcctgctctggacctctaaggagctgttcctctcggtcctaagggtgtgggggctggtgagacacaaag

SEQ ID NO: 103962 - DNA, 80 bp, synthetic construct
  misc_feature 1..80: note = Artificially Synthesized Probe
  source 1..80: mol_type = other DNA
ctgaaatggagccaggtgcctgctgagaccagtgacgcagccaggaaggcaggggacccaggagcagctgtgaaggagaa

SEQ ID NO: 103963 - DNA, 80 bp, synthetic construct; identical to SEQ ID NO: 36172
  misc_feature 1..80: note = Artificially Synthesized Probe
  source 1..80: mol_type = other DNA

SEQ ID NO: 103964 - DNA, 80 bp, synthetic construct
  misc_feature 1..80: note = Artificially Synthesized Probe
  source 1..80: mol_type = other DNA
agggttacattgtgtggatccctgtggcgctgtctgaaggtcatgttatgtggatctgtgtgacaccgtctgagggttac

SEQ ID NO: 103965 - DNA, 80 bp, synthetic construct
  misc_feature 1..80: note = Artificially Synthesized Probe
  source 1..80: mol_type = other DNA
gtggatttatgtgtgggaccatcaaagggtcatgagggtcacattgtgtgggtccatgtggcaccatctgagggtcacat

SEQ ID NO: 103966 - DNA, 80 bp, synthetic construct
  misc_feature 1..80: note = Artificially Synthesized Probe
  source 1..80: mol_type = other DNA
tcacattgcatggattcatgtgtcaccatctgagggtcatcctgtgtggaactgtgtggcaccatctgctatctcagggt

SEQ ID NO: 103967 - DNA, 80 bp, synthetic construct; identical to SEQ ID NO: 36173
  misc_feature 1..80: note = Artificially Synthesized Probe
  source 1..80: mol_type = other DNA

SEQ ID NO: 103968 - DNA, 80 bp, synthetic construct
  misc_feature 1..80: note = Artificially Synthesized Probe
  source 1..80: mol_type = other DNA
atcacatgtggatccatgaggcaccgtctgaggatcatgttgtgtggatccatgtggtgccgtctgagggttatgagggt

SEQ ID NO: 103969 - DNA, 80 bp, synthetic construct
  misc_feature 1..80: note = Artificially Synthesized Probe
  source 1..80: mol_type = other DNA
gtgtggtgctgtctcagggtcacgttgtgtggatccgtgtggcaccatctctggatcacctgtggatctgcgtggtgctg

SEQ ID NO: 103970 - DNA, 80 bp, synthetic construct; identical to SEQ ID NO: 36167
  misc_feature 1..80: note = Artificially Synthesized Probe
  source 1..80: mol_type = other DNA

SEQ ID NO: 103971 - DNA, 80 bp, synthetic construct
  misc_feature 1..80: note = Artificially Synthesized Probe
  source 1..80: mol_type = other DNA
gatctgtgtggtgccgtctgagggtcatgttgtgctctttccataatcactggtatatgtccaggtgtcatgctgtgaag

SEQ ID NO: 103972 - DNA, 80 bp, synthetic construct; identical to SEQ ID NO: 36174
  misc_feature 1..80: note = Artificially Synthesized Probe
  source 1..80: mol_type = other DNA

SEQ ID NO: 103973 - DNA, 80 bp, synthetic construct
  misc_feature 1..80: note = Artificially Synthesized Probe
  source 1..80: mol_type = other DNA
ctcactcacccgtcttcctgctccaccatcttttaaatgctggttttccttcaatgccagcccacatggctatgggcagc

SEQ ID NO: 103974 - DNA, 80 bp, synthetic construct
  misc_feature 1..80: note = Artificially Synthesized Probe
  source 1..80: mol_type = other DNA
tgctgcagggccaccgtccctagaaacagcaggagatgtgaggcgcatcccaggagctcccattcagctggcgcagtggc

SEQ ID NO: 103975 - DNA, 80 bp, synthetic construct; identical to SEQ ID NO: 36175
  misc_feature 1..80: note = Artificially Synthesized Probe
  source 1..80: mol_type = other DNA

SEQ ID NO: 103976 - DNA, 80 bp, synthetic construct
  misc_feature 1..80: note = Artificially Synthesized Probe
  source 1..80: mol_type = other DNA
tggtgggagtgagggtaggagtgagggtgggtgggtaccccctgggagccagaggcaggcaaagttctcatcacggtggg

SEQ ID NO: 103977 - DNA, 80 bp, synthetic construct
  misc_feature 1..80: note = Artificially Synthesized Probe
  source 1..80: mol_type = other DNA
aaagtgtccgacgaacaagcccccaattagaatgggcccatcccacaccctaccaatggctgtctctcagggaagagtgt

SEQ ID NO: 103978 - DNA, 80 bp, synthetic construct
  misc_feature 1..80: note = Artificially Synthesized Probe
  source 1..80: mol_type = other DNA
ggcctgtccaagtctgctggactgagcactggggggcaccagcatcctccgcacaggggtgcatggagccaggctggagc

SEQ ID NO: 103979 - DNA, 80 bp, synthetic construct; identical to SEQ ID NO: 36176
  misc_feature 1..80: note = Artificially Synthesized Probe
  source 1..80: mol_type = other DNA

SEQ ID NO: 103980 - DNA, 80 bp, synthetic construct
  misc_feature 1..80: note = Artificially Synthesized Probe
  source 1..80: mol_type = other DNA
gtgctgcgcatccacctctttacctgcctgcccgcctgcccgtgtgttctctgctgcgtgtctgcctccttacctgcctg

SEQ ID NO: 103981 - DNA, 80 bp, synthetic construct
  misc_feature 1..80: note = Artificially Synthesized Probe
  source 1..80: mol_type = other DNA
cctccttacctgcctgcccgcgtgttctgtgctgcgcgtccacctccttacctgcctgcccgcctgcccgcgtgttctgt

SEQ ID NO: 103982 - DNA, 80 bp, synthetic construct
  misc_feature 1..80: note = Artificially Synthesized Probe
  source 1..80: mol_type = other DNA
aaggtggtgcagacgcccacagggagggagagccaggggaaccccaaacttccactgtggcagaagcagctttatcccat

SEQ ID NO: 103983 - DNA, 80 bp, synthetic construct
  misc_feature 1..80: note = Artificially Synthesized Probe
  source 1..80: mol_type = other DNA
cgtctgcctccctgcctgcctgcccgtgtgttctgtgctgtgcgtccacctccttacctgcctgcctgcctgcctgcgtg

SEQ ID NO: 103984 - DNA, 80 bp, synthetic construct
  misc_feature 1..80: note = Artificially Synthesized Probe
  source 1..80: mol_type = other DNA
ttgatctcaaaagtctgttttatttttttaatagctttgttagtgaatgcatgtgttggcacaggagttgcaatgtcaaa

SEQ ID NO: 103985 - DNA, 80 bp, synthetic construct
  misc_feature 1..80: note = Artificially Synthesized Probe
  source 1..80: mol_type = other DNA
gttagtgtacatgttaaaatatgattgggttctctcattgaaatgttgattttatttgaattcaatgaatgccacttcat

SEQ ID NO: 103986 - DNA, 80 bp, synthetic construct
  misc_feature 1..80: note = Artificially Synthesized Probe
  source 1..80: mol_type = other DNA
cagggtcaacagtatatgcatatgtgtgtactatgtaattttagttaaacatgcattcccagttcctttatcaatcaggc

SEQ ID NO: 103987 - DNA, 80 bp, synthetic construct; identical to SEQ ID NO: 36226
  misc_feature 1..80: note = Artificially Synthesized Probe
  source 1..80: mol_type = other DNA

SEQ ID NO: 103988 - DNA, 80 bp, synthetic construct
  misc_feature 1..80: note = Artificially Synthesized Probe
  source 1..80: mol_type = other DNA
tctaaaataccttacatatgtatttaattgtagctttacccttaaaaattttacatatttgtatatgaaaacaccagtct

SEQ ID NO: 103989 - DNA, 80 bp, synthetic construct
  misc_feature 1..80: note = Artificially Synthesized Probe
  source 1..80: mol_type = other DNA
aatcttggctcaccgcaacctctgcctccagcttcaagtgattctcatgcctcagcctcctgaatagctgcaattacagg

SEQ ID NO: 103990 - DNA, 80 bp, synthetic construct
  misc_feature 1..80: note = Artificially Synthesized Probe
  source 1..80: mol_type = other DNA
catgtccaacttacttttgattaaagaagttcattaacagtgtagttacagggtgactatagttaacaacaattatttgt

SEQ ID NO: 103991 - DNA, 80 bp, synthetic construct; identical to SEQ ID NO: 36227
  misc_feature 1..80: note = Artificially Synthesized Probe
  source 1..80: mol_type = other DNA

SEQ ID NO: 103992 - DNA, 80 bp, synthetic construct
  misc_feature 1..80: note = Artificially Synthesized Probe
  source 1..80: mol_type = other DNA
gatctcagctcactacaacctccgcctcccaggctcaggcgattctcctgcctcagcctccccagtagctgggattacag

SEQ ID NO: 103993 - DNA, 80 bp, synthetic construct
  misc_feature 1..80: note = Artificially Synthesized Probe
  source 1..80: mol_type = other DNA
aattctttaagatttgtgcactggcatctgttttttaagcaaaccttctcatttctgtttctctccttctctcttccaaa

SEQ ID NO: 103994 - DNA, 80 bp, synthetic construct
  misc_feature 1..80: note = Artificially Synthesized Probe
  source 1..80: mol_type = other DNA
ttttagtaaaggcaggatatgtgttactctaacgtatcactttattcaagccttctgaagccccagagcttgtgtgggtg

SEQ ID NO: 103995 - DNA, 80 bp, synthetic construct; identical to SEQ ID NO: 36215
  misc_feature 1..80: note = Artificially Synthesized Probe
  source 1..80: mol_type = other DNA

SEQ ID NO: 103996 - DNA, 80 bp, synthetic construct
  misc_feature 1..80: note = Artificially Synthesized Probe
  source 1..80: mol_type = other DNA
ttattggggttgggttggggtggggaagctgttgaaagtggagaaacggaaaagatgcagatgagaacagagtatgaacg

SEQ ID NO: 103997 - DNA, 80 bp, synthetic construct; identical to SEQ ID NO: 36228
  misc_feature 1..80: note = Artificially Synthesized Probe
  source 1..80: mol_type = other DNA

SEQ ID NO: 103998 - DNA, 80 bp, synthetic construct; identical to SEQ ID NO: 36216
  misc_feature 1..80: note = Artificially Synthesized Probe
  source 1..80: mol_type = other DNA

SEQ ID NO: 103999 - DNA, 80 bp, synthetic construct
  misc_feature 1..80: note = Artificially Synthesized Probe
  source 1..80: mol_type = other DNA
gcctgtagcttcctgaaaggtctggacatggaaatcatacataagggatgacctgctatccgcagcttatgacaggagtc

SEQ ID NO: 104000 - DNA, 80 bp, synthetic construct
  misc_feature 1..80: note = Artificially Synthesized Probe
  source 1..80: mol_type = other DNA
aataaaacatgcctgtgaaataaatccacctatgggccatcagtttgcaacagctgcggtaaatcatattcaatgttcct

SEQ ID NO: 104001 - DNA, 80 bp, synthetic construct; identical to SEQ ID NO: 36229
  misc_feature 1..80: note = Artificially Synthesized Probe
  source 1..80: mol_type = other DNA

SEQ ID NO: 104002 - DNA, 80 bp, synthetic construct
  misc_feature 1..80: note = Artificially Synthesized Probe
  source 1..80: mol_type = other DNA
tataaatacacgtggtgattgcatacaatttcacagctctgtcatcttgtcaatatttactcttggaaatgcaagttatt

SEQ ID NO: 104003 - DNA, 80 bp, synthetic construct
  misc_feature 1..80: note = Artificially Synthesized Probe
  source 1..80: mol_type = other DNA
atgacctgcttcggcccgggatcacgaaaggtttgggccgaatattatgcttgtgttcaaagtagttcccgtcctgtgaa

SEQ ID NO: 104004 - DNA, 80 bp, synthetic construct
  misc_feature 1..80: note = Artificially Synthesized Probe
  source 1..80: mol_type = other DNA
ccgctaaacggtcaggcactggcggattggaccccacaacaattagaacatgttttagatgcttgtctttaaaagagaaa

SEQ ID NO: 104005 - DNA, 80 bp, synthetic construct
  misc_feature 1..80: note = Artificially Synthesized Probe
  source 1..80: mol_type = other DNA
agcgcatcttgtatattgctagttgaatagagcccaattggcgagttataggaagcgctcactacctgtcttttgtcatc

SEQ ID NO: 104006 - DNA, 80 bp, synthetic construct; identical to SEQ ID NO: 36230
  misc_feature 1..80: note = Artificially Synthesized Probe
  source 1..80: mol_type = other DNA

SEQ ID NO: 104007 - DNA, 80 bp, synthetic construct
  misc_feature 1..80: note = Artificially Synthesized Probe
  source 1..80: mol_type = other DNA
gcacctcttatctgcccctgacttcttcatctatagctttaagaaattctaatgactcatttgaatacagacattttgtg

SEQ ID NO: 104008 - DNA, 80 bp, synthetic construct
  misc_feature 1..80: note = Artificially Synthesized Probe
  source 1..80: mol_type = other DNA
caaaacaaggagaatgagcatttacgaataattagctacactgaatcatttaaactaagccaggtgaaaactcgtttttg

SEQ ID NO: 104009 - DNA, 80 bp, synthetic construct
  misc_feature 1..80: note = Artificially Synthesized Probe
  source 1..80: mol_type = other DNA
cctcaataaacaataggataaaggtctaaagccttgactttagatttggagttgacaatctgcacaatccttctgcccaa

SEQ ID NO: 104010 - DNA, 80 bp, synthetic construct; identical to SEQ ID NO: 36231
  misc_feature 1..80: note = Artificially Synthesized Probe
  source 1..80: mol_type = other DNA

SEQ ID NO: 104011 - DNA, 80 bp, synthetic construct
  misc_feature 1..80: note = Artificially Synthesized Probe
  source 1..80: mol_type = other DNA
tctaagcaacagaagaaaaccaaaagggaatgctcaattacaggtcagctgattctctttccaaatctttttttttaata

SEQ ID NO: 104012 - DNA, 80 bp, synthetic construct
  misc_feature 1..80: note = Artificially Synthesized Probe
  source 1..80: mol_type = other DNA
caagtagctgggattacaggtgtgtgccaccacacccagataatttttgtatttttagtagagacagggtttcaccacgt

SEQ ID NO: 104013 - DNA, 80 bp, synthetic construct
  misc_feature 1..80: note = Artificially Synthesized Probe
  source 1..80: mol_type = other DNA
ttcacatcaacttcatttactttcgtgaatgtggcaccagtgttccagatttgaaatcgtacaaacatatataattattt

SEQ ID NO: 104014 - DNA, 80 bp, synthetic construct; identical to SEQ ID NO: 36232
  misc_feature 1..80: note = Artificially Synthesized Probe
  source 1..80: mol_type = other DNA

SEQ ID NO: 104015 - DNA, 80 bp, synthetic construct
  misc_feature 1..80: note = Artificially Synthesized Probe
  source 1..80: mol_type = other DNA
accccaaatctcaggggatctgagaatctgtgatggggtaaagaacagcatttctctcaccaaccttggacagcatatgt

SEQ ID NO: 104016 - DNA, 80 bp, synthetic construct
  misc_feature 1..80: note = Artificially Synthesized Probe
  source 1..80: mol_type = other DNA
ttaggtagaatgacccaaaccatcaaatgtagctttagaaaaatgcctaatcctagatcctgtgaaaatgtgtgtagcta

SEQ ID NO: 104017 - DNA, 80 bp, synthetic construct
  misc_feature 1..80: note = Artificially Synthesized Probe
  source 1..80: mol_type = other DNA
atatgagagaagacagcacactaattgcctaactgcctagttaagttttggtggattacaagtctctcaggctaattaaa

SEQ ID NO: 104018 - DNA, 80 bp, synthetic construct; identical to SEQ ID NO: 36233
  misc_feature 1..80: note = Artificially Synthesized Probe
  source 1..80: mol_type = other DNA

SEQ ID NO: 104019 - DNA, 80 bp, synthetic construct
  misc_feature 1..80: note = Artificially Synthesized Probe
  source 1..80: mol_type = other DNA
ttttacattcagatcataaaaggaagtgtttctaatacaggctgcaaacatttttatttaggctttgcaaagcattagtt

SEQ ID NO: 104020 - DNA, 80 bp, synthetic construct
  misc_feature 1..80: note = Artificially Synthesized Probe
  source 1..80: mol_type = other DNA
atgaagaagtagcccttttgcttgaggttgaggttgcagtcggcacacacgaagcactcagggtgccggtacttatcccg

SEQ ID NO: 104021 - DNA, 80 bp, synthetic construct
  misc_feature 1..80: note = Artificially Synthesized Probe
  source 1..80: mol_type = other DNA
ctgttccactttaattcatttttatttttcctggaaaaatcacaagtaactgaaaatgccagttaaaaaagtgtatacaa

SEQ ID NO: 104022 - DNA, 80 bp, synthetic construct
  misc_feature 1..80: note = Artificially Synthesized Probe
  source 1..80: mol_type = other DNA
attaatggaatgctagagctgccccagtgaaagctaagtaacttgacagaactctgctgatgttaagaggatccaaccat

SEQ ID NO: 104023 - DNA, 80 bp, synthetic construct
  misc_feature 1..80: note = Artificially Synthesized Probe
  source 1..80: mol_type = other DNA
atatacacacatatatgtatacacatatatatttatatataatatgtatacatatgtgtatataaaatcaaatcatatat

SEQ ID NO: 104024 - DNA, 80 bp, synthetic construct; identical to SEQ ID NO: 36234
  misc_feature 1..80: note = Artificially Synthesized Probe
  source 1..80: mol_type = other DNA

SEQ ID NO: 104025 - DNA, 80 bp, synthetic construct
  misc_feature 1..80: note = Artificially Synthesized Probe
  source 1..80: mol_type = other DNA
ttatttagataagaaccatttttgtttctgaaagcatctttcttgtattgtgacaggcacagtatacctttgagttgttc

SEQ ID NO: 104026 - DNA, 80 bp, synthetic construct
  misc_feature 1..80: note = Artificially Synthesized Probe
  source 1..80: mol_type = other DNA
gtgttcaggattgcatggaaggcatttattcaggtgctgggagttgatctaaacaacaactaacgtgccctttaagccta

SEQ ID NO: 104027 - DNA, 80 bp, synthetic construct
  misc_feature 1..80: note = Artificially Synthesized Probe
  source 1..80: mol_type = other DNA
aagtgattctcctgcctcagcctccccagtagctgggaccacaggcgtgtgccaccacatctggctaattttttgtattt

SEQ ID NO: 104028 - DNA, 80 bp, synthetic construct
  misc_feature 1..80: note = Artificially Synthesized Probe
  source 1..80: mol_type = other DNA
tattcctataaccatataagaaaatgtctccttagcttaaacctattcacaggggaaaaaaacccccagaaataaacata

SEQ ID NO: 104029 - DNA, 80 bp, synthetic construct; identical to SEQ ID NO: 36235
  misc_feature 1..80: note = Artificially Synthesized Probe
  source 1..80: mol_type = other DNA

SEQ ID NO: 104030 - DNA, 80 bp, synthetic construct
  misc_feature 1..80: note = Artificially Synthesized Probe
  source 1..80: mol_type = other DNA
ttttctctcgtctcagtccacaagtgaaactcactgtttgacttttatcagcacgttttgttctggtttacgctaaagga

SEQ ID NO: 104031 - DNA, 80 bp, synthetic construct
  misc_feature 1..80: note = Artificially Synthesized Probe
  source 1..80: mol_type = other DNA
gtagaaatcctttggttcattagtagaactgaattgttcttatcttggagcatttcaaacaccggcctcttggagaggat

SEQ ID NO: 104032 - DNA, 80 bp, synthetic construct; identical to SEQ ID NO: 36217
  misc_feature 1..80: note = Artificially Synthesized Probe
  source 1..80: mol_type = other DNA

SEQ ID NO: 104033 - DNA, 80 bp, synthetic construct
  misc_feature 1..80: note = Artificially Synthesized Probe
  source 1..80: mol_type = other DNA
caaatgtaggacacaagggctaatacatgcttgacaagaggtcagagtatttaaaattaggattatgccttaaaatccca

SEQ ID NO: 104034 - DNA, 80 bp, synthetic construct; identical to SEQ ID NO: 36236
  misc_feature 1..80: note = Artificially Synthesized Probe
  source 1..80: mol_type = other DNA

SEQ ID NO: 104035 - DNA, 80 bp, synthetic construct
  misc_feature 1..80: note = Artificially Synthesized Probe
  source 1..80: mol_type = other DNA
ggtccaggtaatgataagaggctgagtggtcaataagtgcatgtctattgactttaattcttaaaagcaccatatagtct

SEQ ID NO: 104036 - DNA, 80 bp, synthetic construct
  misc_feature 1..80: note = Artificially Synthesized Probe
  source 1..80: mol_type = other DNA
tagaggtgtcattattcaccagcccacctagtatgtcagggggagtcgccatcagcattcagatcccttctcattatatt

SEQ ID NO: 104037 - DNA, 80 bp, synthetic construct
  misc_feature 1..80: note = Artificially Synthesized Probe
  source 1..80: mol_type = other DNA
cagctcactgcagcctcgacatcctgggctcaagcactcctcccacctcagccttctgtgtagctgggacttacaggtgt

SEQ ID NO: 104038 - DNA, 80 bp, synthetic construct; identical to SEQ ID NO: 36237
  misc_feature 1..80: note = Artificially Synthesized Probe
  source 1..80: mol_type = other DNA

SEQ ID NO: 104039 - DNA, 80 bp, synthetic construct
  misc_feature 1..80: note = Artificially Synthesized Probe
  source 1..80: mol_type = other DNA
aaggttcctgccttcatgaacatattctctgtcctgctcactccttttggggcttattttctcctacttttgcttttagt

SEQ ID NO: 104040 - DNA, 80 bp, synthetic construct
  misc_feature 1..80: note = Artificially Synthesized Probe
  source 1..80: mol_type = other DNA
tcgtaatagcaatgaagaaggcattcctagcctctaggatgtcctatcatgtaggcagctaactatctcaccagcaagaa

SEQ ID NO: 104041 - DNA, 80 bp, synthetic construct; identical to SEQ ID NO: 36238
  misc_feature 1..80: note = Artificially Synthesized Probe
  source 1..80: mol_type = other DNA

SEQ ID NO: 104042 - DNA, 80 bp, synthetic construct
  misc_feature 1..80: note = Artificially Synthesized Probe
  source 1..80: mol_type = other DNA
tatctctaaacctttagagcttctatgtagaggtcataaaatgcttttcttaattagatttatgagtacatcacaatcaa

SEQ ID NO: 104043 - DNA, 80 bp, synthetic construct
  misc_feature 1..80: note = Artificially Synthesized Probe
  source 1..80: mol_type = other DNA
caatgaagagtctctctgattgctttccgtctgcgtggtccagcctctattcaatggagcaagagaaaacagatcaaaga

SEQ ID NO: 104044 - DNA, 80 bp, synthetic construct
  misc_feature 1..80: note = Artificially Synthesized Probe
  source 1..80: mol_type = other DNA
ctcttttcttagagtaaatttaattacagaatcccagaaatgagaattaaagaagaatgtagaatgagatctgggtgaag

SEQ ID NO: 104045 - DNA, 80 bp, synthetic construct
  misc_feature 1..80: note = Artificially Synthesized Probe
  source 1..80: mol_type = other DNA
tggactctgtagatttagccaaattctttctgatgggagcatattttgtctttcaacaagatgttcacataggaacactt

SEQ ID NO: 104046 - DNA, 80 bp, synthetic construct; identical to SEQ ID NO: 36239
  misc_feature 1..80: note = Artificially Synthesized Probe
  source 1..80: mol_type = other DNA

SEQ ID NO: 104047 - DNA, 80 bp, synthetic construct
  misc_feature 1..80: note = Artificially Synthesized Probe
  source 1..80: mol_type = other DNA
ttattctgtattttcccacataattagtcttccccccccctttttttttcttttaatgttgtctccctctgtcaaccagg

SEQ ID NO: 104048 - DNA, 80 bp, synthetic construct
  misc_feature 1..80: note = Artificially Synthesized Probe
  source 1..80: mol_type = other DNA
ccaggctggtcatgaactctggacctcaagtgatccgcccagttcggcctcccaaagcgctaggattacaggcgggagcc

SEQ ID NO: 104049 - DNA, 80 bp, synthetic construct
  misc_feature 1..80: note = Artificially Synthesized Probe
  source 1..80: mol_type = other DNA
ccaccaggcaagctccctagacctccctacttccctccagtcctactgaggccactgcagaagacagtgagtgatctgcc

SEQ ID NO: 104050 - DNA, 80 bp, synthetic construct; identical to SEQ ID NO: 36240
  misc_feature 1..80: note = Artificially Synthesized Probe
  source 1..80: mol_type = other DNA

SEQ ID NO: 104051 - DNA, 80 bp, synthetic construct
  misc_feature 1..80: note = Artificially Synthesized Probe
  source 1..80: mol_type = other DNA
ttctgggctgaattctgtacaaaacagccaatggcagacaggatattagcaaccagttttaatataattacagtcaggca

SEQ ID NO: 104052 - DNA, 80 bp, synthetic construct
  misc_feature 1..80: note = Artificially Synthesized Probe
  source 1..80: mol_type = other DNA
aaaaaatacaaaaaaattagccgggcgtgggcacctgtagtcccagctactcgggaggctgaggcaggagaatggtgtga

SEQ ID NO: 104053 - DNA, 80 bp, synthetic construct
  misc_feature 1..80: note = Artificially Synthesized Probe
  source 1..80: mol_type = other DNA
ttcttttagcctcttttattattctaacattccagagaatcctttttagaaatgatttgtcaacaactgctagattgact

SEQ ID NO: 104054 - DNA, 80 bp, synthetic construct
  misc_feature 1..80: note = Artificially Synthesized Probe
  source 1..80: mol_type = other DNA
cagatcagatttaagcaccattagttaagaagcacctgtcaattttgagacacagctggtgagctgctgctttaatcctg

SEQ ID NO: 104055 - DNA, 80 bp, synthetic construct; identical to SEQ ID NO: 36241
  misc_feature 1..80: note = Artificially Synthesized Probe
  source 1..80: mol_type = other DNA

SEQ ID NO: 104056 - DNA, 80 bp, synthetic construct
  misc_feature 1..80: note = Artificially Synthesized Probe
  source 1..80: mol_type = other DNA
ttattttttatttttcatcacccagaagtctctatttgggaatagagttttactatatttaggcatcttttacattcagg

SEQ ID NO: 104057 - DNA, 80 bp, synthetic construct
  misc_feature 1..80: note = Artificially Synthesized Probe
  source 1..80: mol_type = other DNA
aattaggtcagaagtgaggagccctcatgaatgggattagtgcccttatgaaaaaggcctcagagagagctctcagctct

SEQ ID NO: 104058 - DNA, 80 bp, synthetic construct
  misc_feature 1..80: note = Artificially Synthesized Probe
  source 1..80: mol_type = other DNA
gcactttgtttagaaatctgtagagactaacaagaagaggccagataatacacaaaattataacttctcttgaacccttc

SEQ ID NO: 104059 - DNA, 80 bp, synthetic construct; identical to SEQ ID NO: 36242
  misc_feature 1..80: note = Artificially Synthesized Probe
  source 1..80: mol_type = other DNA

SEQ ID NO: 104060 - DNA, 80 bp, synthetic construct
  misc_feature 1..80: note = Artificially Synthesized Probe
  source 1..80: mol_type = other DNA
aaaaaacagagactatcaaactaggtgaagaagtgagatccaattttatgctgtccacatgtttttcaggggcaggaata

SEQ ID NO: 104061 - DNA, 80 bp, synthetic construct
  misc_feature 1..80: note = Artificially Synthesized Probe
  source 1..80: mol_type = other DNA
caactatacacctctgtctagacctcacatgggtcttaccttgcctacttctctcatatcatcttacattattcctgctc

SEQ ID NO: 104062 - DNA, 80 bp, synthetic construct
  misc_feature 1..80: note = Artificially Synthesized Probe
  source 1..80: mol_type = other DNA
tgcactctcagaaagacttcgccaaacatctgaagtagcttctctagtcctcccctcatcatttttcaccattacatcct

SEQ ID NO: 104063 - DNA, 80 bp, synthetic construct
  misc_feature 1..80: note = Artificially Synthesized Probe
  source 1..80: mol_type = other DNA
ggtggattggcttctactgtgaacagtttattccaacttaggcacaatgattgcttctggtaacgtcaggcactgttgta

SEQ ID NO: 104064 - DNA, 80 bp, synthetic construct
  misc_feature 1..80: note = Artificially Synthesized Probe
  source 1..80: mol_type = other DNA
tcaattaaaaagcatttgtcagagcttatataaaaaagaactagtccctatatacccaaagattatggcttttaatgtca

SEQ ID NO: 104065 - DNA, 80 bp, synthetic construct; identical to SEQ ID NO: 36243
  misc_feature 1..80: note = Artificially Synthesized Probe
  source 1..80: mol_type = other DNA

SEQ ID NO: 104066 - DNA, 80 bp, synthetic construct
  misc_feature 1..80: note = Artificially Synthesized Probe
  source 1..80: mol_type = other DNA
ggattattatatcttagcctttgggaggcatttcatagccgttttccatttagaaacattctcagacccagaactgttag

SEQ ID NO: 104067 - DNA, 80 bp, synthetic construct
  misc_feature 1..80: note = Artificially Synthesized Probe
  source 1..80: mol_type = other DNA
catgcctgtaatcccagtgctttgggaggctgaggtggaaggattgcttgaggctaggagtttgagaccagcctgggcaa

SEQ ID NO: 104068 - DNA, 80 bp, synthetic construct
  misc_feature 1..80: note = Artificially Synthesized Probe
  source 1..80: mol_type = other DNA
gcctgggcaacagaggtagacctcctcctctcaccaaaaacaaaacaaaacaaacaaacaaacaaacaaaacacacaagc

SEQ ID NO: 104069 - DNA, 80 bp, synthetic construct; identical to SEQ ID NO: 36244
  misc_feature 1..80: note = Artificially Synthesized Probe
  source 1..80: mol_type = other DNA

SEQ ID NO: 104070 - DNA, 80 bp, synthetic construct
  misc_feature 1..80: note = Artificially Synthesized Probe
  source 1..80: mol_type = other DNA
atcttatacttatgcaaaatgttacatttgcaaagctccttctcacacgtttgaccattacaactctctaagacaggctg

SEQ ID NO: 104071 - DNA, 80 bp, synthetic construct
  misc_feature 1..80: note = Artificially Synthesized Probe
  source 1..80: mol_type = other DNA
tcaacctggttattgctgtcctgagacctctaaggagacagttgatgagaaaaaggaaatagagagaggaatgagagaga

SEQ ID NO: 104072 - DNA, 80 bp, synthetic construct
  misc_feature 1..80: note = Artificially Synthesized Probe
  source 1..80: mol_type = other DNA
cttattatattactttgtattagcatgcacagtttattactgttttcccaaattagaagagagagctgaaatgaggcata

SEQ ID NO: 104073 - DNA, 80 bp, synthetic construct; identical to SEQ ID NO: 36245
  misc_feature 1..80: note = Artificially Synthesized Probe
  source 1..80: mol_type = other DNA

SEQ ID NO: 104074 - DNA, 80 bp, synthetic construct
  misc_feature 1..80: note = Artificially Synthesized Probe
  source 1..80: mol_type = other DNA
ttaataaaaacgactgaaatagttatggagcaagacaagcacacactgaagcactgcacggtaggcacggaccaaaatca

SEQ ID NO: 104075 - DNA, 80 bp, synthetic construct; identical to SEQ ID NO: 36218
  misc_feature 1..80: note = Artificially Synthesized Probe
  source 1..80: mol_type = other DNA

SEQ ID NO: 104076 - DNA, 80 bp, synthetic construct
  misc_feature 1..80: note = Artificially Synthesized Probe
  source 1..80: mol_type = other DNA
tcagaagtcacatgggcggctttaacatgctgccagggctgggaaccatcaccgtattactattgagaactattatctca

SEQ ID NO: 104077 - DNA, 80 bp, synthetic construct; identical to SEQ ID NO: 36246
  misc_feature 1..80: note = Artificially Synthesized Probe
  source 1..80: mol_type = other DNA

SEQ ID NO: 104078 - DNA, 80 bp, synthetic construct
  misc_feature 1..80: note = Artificially Synthesized Probe
  source 1..80: mol_type = other DNA
agttacacatgaaccagtacttccacgtagacacggtctgtgttagaacaaaattgaacaggtttttatttacatcaacc

SEQ ID NO: 104079 - DNA, 80 bp, synthetic construct
  misc_feature 1..80: note = Artificially Synthesized Probe
  source 1..80: mol_type = other DNA
ttaaagtcatacactgttctatcttaaagcctgtacaaattaggaacacactaactttttctatattggtactcaagctc

SEQ ID NO: 104080 - DNA, 80 bp, synthetic construct
  misc_feature 1..80: note = Artificially Synthesized Probe
  source 1..80: mol_type = other DNA
acactagcctccccttattcacggttttattttctgcagtttcagttatccgagaccaactgcagcctacaaatagtaat

SEQ ID NO: 104081 - DNA, 80 bp, synthetic construct
  misc_feature 1..80: note = Artificially Synthesized Probe
  source 1..80: mol_type = other DNA
gtcttagttatcagatcggctgtcacagtattgcagtgcttgggttcaagcaacccttatttcacttaataatggcccca

SEQ ID NO: 104082 - DNA, 80 bp, synthetic construct; identical to SEQ ID NO: 36247
  misc_feature 1..80: note = Artificially Synthesized Probe
  source 1..80: mol_type = other DNA

SEQ ID NO: 104083 - DNA, 80 bp, synthetic construct
  misc_feature 1..80: note = Artificially Synthesized Probe
  source 1..80: mol_type = other DNA
aaatgcttaggccagttatacacggtgtttaacaactccctcccctaaactgaacatccaaaactgaaattttatattgc

SEQ ID NO: 104084 - DNA, 80 bp, synthetic construct
  misc_feature 1..80: note = Artificially Synthesized Probe
  source 1..80: mol_type = other DNA
acaattacgggcatgagggccctgtgtcctaattttgtgaactgtaatttcaattgatggaggcagtcatatttgtcact

SEQ ID NO: 104085 - DNA, 80 bp, synthetic construct; identical to SEQ ID NO: 36248
  misc_feature 1..80: note = Artificially Synthesized Probe
  source 1..80: mol_type = other DNA

SEQ ID NO: 104086 - DNA, 80 bp, synthetic construct
  misc_feature 1..80: note = Artificially Synthesized Probe
  source 1..80: mol_type = other DNA
caaaaatacaaaaattagccaggtgtggtggtgggtccctgtaatctcagctactggggaggctgaggcaggagaatcgc

SEQ ID NO: 104087 - DNA, 80 bp, synthetic construct
  misc_feature 1..80: note = Artificially Synthesized Probe
  source 1..80: mol_type = other DNA
ctacttggaaggctgaggcaggagaatcgcttgaacccaggaggcagaggttgcagtgaggcgagatcgcgccactgcac

SEQ ID NO: 104088 - DNA, 80 bp, synthetic construct
  misc_feature 1..80: note = Artificially Synthesized Probe
  source 1..80: mol_type = other DNA
tctagtcaatcattcataccgtgtctatatttattctacaacacatatgctctactaggcactgtgctaggccctgaatg

SEQ ID NO: 104089 - DNA, 80 bp, synthetic construct
  misc_feature 1..80: note = Artificially Synthesized Probe
  source 1..80: mol_type = other DNA
catgacataaggaggggttatacaggccgaaagctacagtaatcaaccggatgagatggttgttactgaaagaaggcttg

SEQ ID NO: 104090 - DNA, 80 bp, synthetic construct
  misc_feature 1..80: note = Artificially Synthesized Probe
  source 1..80: mol_type = other DNA
aaagggagaggaaagaaatgaagttagcaactcaaattgggataggagatggtgaaaagtcatgaatgttgtgcaaagac

SEQ ID NO: 104091 - DNA, 80 bp, synthetic construct
  misc_feature 1..80: note = Artificially Synthesized Probe
  source 1..80: mol_type = other DNA
ggttccccatggtttgaacctgaggggacagtttcagaagttcctgtacgtccccagtgggggacatggaaagtaggtga

SEQ ID NO: 104092 - DNA, 80 bp, synthetic construct; identical to SEQ ID NO: 36249
  misc_feature 1..80: note = Artificially Synthesized Probe
  source 1..80: mol_type = other DNA

SEQ ID NO: 104093 - DNA, 80 bp, synthetic construct
  misc_feature 1..80: note = Artificially Synthesized Probe
  source 1..80: mol_type = other DNA
ggatgtcactactgctactctcctaaagattattgtgagatttcagtgagttcgtgcacataaaaggttcccatcaatgc

SEQ ID NO: 104094 - DNA, 80 bp, synthetic construct
  misc_feature 1..80: note = Artificially Synthesized Probe
  source 1..80: mol_type = other DNA
acaaatttcaatattcttatcatttcagtgaaaatattctgaattaggtgttcactaaagcataaaagttcttattgaat

SEQ ID NO: 104095 - DNA, 80 bp, synthetic construct; identical to SEQ ID NO: 36250
  misc_feature 1..80: note = Artificially Synthesized Probe
  source 1..80: mol_type = other DNA

SEQ ID NO: 104096 - DNA, 80 bp, synthetic construct
  misc_feature 1..80: note = Artificially Synthesized Probe
  source 1..80: mol_type = other DNA
attgacatacgattatactataatagcaaaatatttcttttataaacaccttaaaagttttcgtgacaaaattattttgg

SEQ ID NO: 104097 - DNA, 80 bp, synthetic construct
  misc_feature 1..80: note = Artificially Synthesized Probe
  source 1..80: mol_type = other DNA
tgttggtaaatctataataggaattgcttggcccaggtcactgaagcattttctgcttactttacttaggaacgtttttg

SEQ ID NO: 104098 - DNA, 80 bp, synthetic construct
  misc_feature 1..80: note = Artificially Synthesized Probe
  source 1..80: mol_type = other DNA
taggcatatataaataaaacagaatttaaaaggtattaccttgttcaaaatctgtatgagcagatcaatcagattataac

SEQ ID NO: 104099 - DNA, 80 bp, synthetic construct
  misc_feature 1..80: note = Artificially Synthesized Probe
  source 1..80: mol_type = other DNA
tgggtaaggataatgtattttaagtaacatcctgttgcctgtatttgtttccctgtgtttatacagaggaggatactatg

SEQ ID NO: 104100 - DNA, 80 bp, synthetic construct
  misc_feature 1..80: note = Artificially Synthesized Probe
  source 1..80: mol_type = other DNA
tgtgttagaaaaaaaccagctagaccaaataatgctttagaattaattctacaaatttactgacaggagagaaaccctga

SEQ ID NO: 104101 - DNA, 80 bp, synthetic construct; identical to SEQ ID NO: 36251
  misc_feature 1..80: note = Artificially Synthesized Probe
  source 1..80: mol_type = other DNA

SEQ ID NO: 104102 - DNA, 80 bp, synthetic construct
  misc_feature 1..80: note = Artificially Synthesized Probe
  source 1..80: mol_type = other DNA
cacccgggacccatcatttgttacggaagggcgatggggtgtgttttatttctgttatcacatataaaacatttaaaacc

SEQ ID NO: 104103 - DNA, 80 bp, synthetic construct
  misc_feature 1..80: note = Artificially Synthesized Probe
  source 1..80: mol_type = other DNA
ctgagccgctccgcagccacttgacggagttgccgccgcccccggagctgggcgccgaagcccgggagccagcagcgccc

SEQ ID NO: 104104 - DNA, 80 bp, synthetic construct; identical to SEQ ID NO: 36252
  misc_feature 1..80: note = Artificially Synthesized Probe
  source 1..80: mol_type = other DNA

SEQ ID NO: 104105 - DNA, 80 bp, synthetic construct
  misc_feature 1..80: note = Artificially Synthesized Probe
  source 1..80: mol_type = other DNA
caaaattgctgactcatgtgatgtgacaatttggaggtatatctaaggagtgacagtcacaatgtgctaaatgttgggga

SEQ ID NO: 104106 - DNA, 80 bp, synthetic construct; identical to SEQ ID NO: 36219
  misc_feature 1..80: note = Artificially Synthesized Probe
  source 1..80: mol_type = other DNA

SEQ ID NO: 104107 - DNA, 80 bp, synthetic construct
  misc_feature 1..80: note = Artificially Synthesized Probe
  source 1..80: mol_type = other DNA
gctggccgcagcctgtgcttggcttctattttaaagtgtgcactttaacctgaagttgcatctgcaccgtcattccgaga

SEQ ID NO: 104108 - DNA, 80 bp, synthetic construct
  misc_feature 1..80: note = Artificially Synthesized Probe
  source 1..80: mol_type = other DNA
ataaaatttaccattttcaccatggttaggggtgcaattcaatgacattaggtacatccaaaatgttgtgcaagcactgc

SEQ ID NO: 104109 - DNA, 80 bp, synthetic construct
  misc_feature 1..80: note = Artificially Synthesized Probe
  source 1..80: mol_type = other DNA
tctcaaataaatggaatcatacaatatttgcctctttgtgtctggcttctttcacttcacataatgtttgcaaagttcat

SEQ ID NO: 104110 - DNA, 80 bp, synthetic construct
  misc_feature 1..80: note = Artificially Synthesized Probe
  source 1..80: mol_type = other DNA
tgggcgtggtggctcacgcctgtaatcccagcactctgggaggccgaggcgggtggaccacgaggtcaggagttcgagac

SEQ ID NO: 104111 - DNA, 80 bp, synthetic construct; identical to SEQ ID NO: 36220
  misc_feature 1..80: note = Artificially Synthesized Probe
  source 1..80: mol_type = other DNA

SEQ ID NO: 104112 - DNA, 80 bp, synthetic construct
  misc_feature 1..80: note = Artificially Synthesized Probe
  source 1..80: mol_type = other DNA
tacttgttattctccatgtctgccacaatagccaccctaatgggacattttgcatttttgtgtggcttttaaaggacagt

SEQ ID NO: 104113 - DNA, 80 bp, synthetic construct
  misc_feature 1..80: note = Artificially Synthesized Probe
  source 1..80: mol_type = other DNA
aggctcacctccccaagttcctgtgaggattacatgatactgtatgcaaaatactttgcacagaacatggaacacagtaa

SEQ ID NO: 104114 - DNA, 80 bp, synthetic construct
  misc_feature 1..80: note = Artificially Synthesized Probe
  source 1..80: mol_type = other DNA
ggtggtagtggaggtgttattattgcctggcctcaactatgtcaagaaaacagaccacagatcacaagtgaaaccaagga

SEQ ID NO: 104115 - DNA, 80 bp, synthetic construct; identical to SEQ ID NO: 36221
  misc_feature 1..80: note = Artificially Synthesized Probe
  source 1..80: mol_type = other DNA

SEQ ID NO: 104116 - DNA, 80 bp, synthetic construct
  misc_feature 1..80: note = Artificially Synthesized Probe
  source 1..80: mol_type = other DNA
tggagcactctgaaggagcccgactggcgaggctgtgtgggctcattccgattgtcgtggagcatccggtacacgtccga

SEQ ID NO: 104117 - DNA, 80 bp, synthetic construct
  misc_feature 1..80: note = Artificially Synthesized Probe
  source 1..80: mol_type = other DNA
tgaatctctagtatagttaaaagcataatgtgaattcaaatggctgccttggaaatgtcattgaacaacaaatcggggag

SEQ ID NO: 104118 - DNA, 80 bp, synthetic construct
  misc_feature 1..80: note = Artificially Synthesized Probe
  source 1..80: mol_type = other DNA
tgacagaaagtgcagcagtgagcactcagattattctcagtcatcaaattgtcggtaaaattcacattcacttttgatat

SEQ ID NO: 104119 - DNA, 80 bp, synthetic construct; identical to SEQ ID NO: 36222
  misc_feature 1..80: note = Artificially Synthesized Probe
  source 1..80: mol_type = other DNA

SEQ ID NO: 104120 - DNA, 80 bp, synthetic construct
  misc_feature 1..80: note = Artificially Synthesized Probe
  source 1..80: mol_type = other DNA
tactattagttcaatgtgttcatcccaagagatagctttgggatatcactatttaacactctgaagcattataataattt

SEQ ID NO: 104121 - DNA, 80 bp, synthetic construct
  misc_feature 1..80: note = Artificially Synthesized Probe
  source 1..80: mol_type = other DNA
cattaacagcctgagggtattcacctaaaaacctttatgcacaataaacattgtaaatgagtaaataatgacctctccac

SEQ ID NO: 104122 - DNA, 80 bp, synthetic construct
  misc_feature 1..80: note = Artificially Synthesized Probe
  source 1..80: mol_type = other DNA
ttcgagagacatatacatttggtccttacctgatttcattttattgctatctgacacataaagctctacagataattcct

SEQ ID NO: 104123 - DNA, 80 bp, synthetic construct
  misc_feature 1..80: note = Artificially Synthesized Probe
  source 1..80: mol_type = other DNA
aaagcttttcacatagctttctttccattaagacaatgttaaaagacaccagtaaagctgacattgcccacgtgtttagt

SEQ ID NO: 104124 - DNA, 80 bp, synthetic construct
  misc_feature 1..80: note = Artificially Synthesized Probe
  source 1..80: mol_type = other DNA
attgagcctaagaaacagcagtgatggactttgaaccttcaatttgactgaatattgatctgaaagagatatttaaattg

SEQ ID NO: 104125 - DNA, 80 bp, synthetic construct; identical to SEQ ID NO: 36223
  misc_feature 1..80: note = Artificially Synthesized Probe
  source 1..80: mol_type = other DNA

SEQ ID NO: 104126 - DNA, 80 bp, synthetic construct
  misc_feature 1..80: note = Artificially Synthesized Probe
  source 1..80: mol_type = other DNA
aacacagagaacacgtacagagaggttaaaaggaattgaagacaaaagtgagaggtgaattacatcaaaataaaaccaaa

SEQ ID NO: 104127 - DNA, 80 bp, synthetic construct
  misc_feature 1..80: note = Artificially Synthesized Probe
  source 1..80: mol_type = other DNA
aggtacaggtgatactgcattttttggctctgtttcactaggcaatgtgtaatttgagggttacatgtagaaaagttgta

SEQ ID NO: 104128 - DNA, 80 bp, synthetic construct
  misc_feature 1..80: note = Artificially Synthesized Probe
  source 1..80: mol_type = other DNA
aatatgcagcatgaagatgcaatcacatatttgggctcaacatttcaaaatcagaagtatatttcagtaatacggttgaa

SEQ ID NO: 104129 - DNA, 80 bp, synthetic construct; identical to SEQ ID NO: 36224
  misc_feature 1..80: note = Artificially Synthesized Probe
  source 1..80: mol_type = other DNA

SEQ ID NO: 104130 - DNA, 80 bp, synthetic construct
  misc_feature 1..80: note = Artificially Synthesized Probe
  source 1..80: mol_type = other DNA
ctatttggaaactggataggggtcagttaacaactgacatgctagtgactaaaaagtccatttttccacatgcatgagag

SEQ ID NO: 104131 - DNA, 80 bp, synthetic construct
  misc_feature 1..80: note = Artificially Synthesized Probe
  source 1..80: mol_type = other DNA
gtctctggtctcaagtatggccccatatctgcatttactctctagaggtattaatgctaacttcagcccatataaagata

SEQ ID NO: 104132 - DNA, 80 bp, synthetic construct
  misc_feature 1..80: note = Artificially Synthesized Probe
  source 1..80: mol_type = other DNA
accagcttgctccttcacttcctgccttttgagaacctattgaaaacccaatctgtacattgtttagatcacataccaaa

SEQ ID NO: 104133 - DNA, 80 bp, synthetic construct; identical to SEQ ID NO: 36225
  misc_feature 1..80: note = Artificially Synthesized Probe
  source 1..80: mol_type = other DNA

SEQ ID NO: 104134 - DNA, 80 bp, synthetic construct
  misc_feature 1..80: note = Artificially Synthesized Probe
  source 1..80: mol_type = other DNA
aatagcctactgttgaaccgaagttttacagataaacagtctattagcacacaaatagactactacctatgtgtattgta

SEQ ID NO: 104135 - DNA, 80 bp, synthetic construct
  misc_feature 1..80: note = Artificially Synthesized Probe
  source 1..80: mol_type = other DNA
cggcgggcgacggggcgggcgcaggatgagggcggccattgctggggctccgcttcggggaggaggacgctgaggaggcg

SEQ ID NO: 104136 - DNA, 80 bp, synthetic construct
  misc_feature 1..80: note = Artificially Synthesized Probe
  source 1..80: mol_type = other DNA
catccaaactctgagaccttttggacaaaacatgccaaagaagttggtggtagtaagaaattcatactaaacttgttctg

SEQ ID NO: 104137 - DNA, 80 bp, synthetic construct
  misc_feature 1..80: note = Artificially Synthesized Probe
  source 1..80: mol_type = other DNA
agtttacctgaagctctcaaagtagcctcctaacaaaaattattgaaaacatcaactattttggaatacttttaggtatg

SEQ ID NO: 104138 - DNA, 80 bp, synthetic construct
  misc_feature 1..80: note = Artificially Synthesized Probe
  source 1..80: mol_type = other DNA
cagttttcctcctgatgtccttgctgtcccaggaccccgccccggtgccacatcgcatcgcgttgtcctgtctcattcgc

SEQ ID NO: 104139 - DNA, 80 bp, synthetic construct; identical to SEQ ID NO: 36264
  misc_feature 1..80: note = Artificially Synthesized Probe
  source 1..80: mol_type = other DNA

SEQ ID NO: 104140 - DNA, 80 bp, synthetic construct
  misc_feature 1..80: note = Artificially Synthesized Probe
  source 1..80: mol_type = other DNA
tacgtgccactgtgtctggcaaaattagttttactttaccaaaaggaagcacataggcctgctctgctctctgctacttg

SEQ ID NO: 104141 - DNA, 80 bp, synthetic construct
  misc_feature 1..80: note = Artificially Synthesized Probe
  source 1..80: mol_type = other DNA
tgctttctgcaggcatgcatgctcctgggacactctgcagggacagagccatccccagcaaggcagactgacagggctgg

SEQ ID NO: 104142 - DNA, 80 bp, synthetic construct
  misc_feature 1..80: note = Artificially Synthesized Probe
  source 1..80: mol_type = other DNA
gtgcagtggcgcgatctcagctcactgcaacctctgcctcccaggttcaagtggtactcctgcctcagcctcccaagtag

SEQ ID NO: 104143 - DNA, 80 bp, synthetic construct; identical to SEQ ID NO: 36265
  misc_feature 1..80: note = Artificially Synthesized Probe
  source 1..80: mol_type = other DNA

SEQ ID NO: 104144 - DNA, 80 bp, synthetic construct
  misc_feature 1..80: note = Artificially Synthesized Probe
  source 1..80: mol_type = other DNA
attctcctgccacagcctcctgagtagctgggattacaggcgtatgccaccatgcccggctaatttttgtatttttagta

SEQ ID NO: 104145 - DNA, 80 bp, synthetic construct
  misc_feature 1..80: note = Artificially Synthesized Probe
  source 1..80: mol_type = other DNA
ggattctgcttcagaattgcgtgtgacctcactgtggagtgtttgactggacaaaagcctgctgtatactcagtgtcccc

SEQ ID NO: 104146 - DNA, 80 bp, synthetic construct
  misc_feature 1..80: note = Artificially Synthesized Probe
  source 1..80: mol_type = other DNA
aacagcatttaaagttatacctataaggggcacacagaagatatatggagagtttaaagaatgaaaataaactcacacgt

SEQ ID NO: 104147 - DNA, 80 bp, synthetic construct; identical to SEQ ID NO: 36266
  misc_feature 1..80: note = Artificially Synthesized Probe
  source 1..80: mol_type = other DNA

SEQ ID NO: 104148 - DNA, 80 bp, synthetic construct
  misc_feature 1..80: note = Artificially Synthesized Probe
  source 1..80: mol_type = other DNA
ccctgggtaagtgagaggctccttgggaggccagtggagatggctgtgggaggacagattgagtagctgtccttggagct

SEQ ID NO: 104149 - DNA, 80 bp, synthetic construct
  misc_feature 1..80: note = Artificially Synthesized Probe
  source 1..80: mol_type = other DNA
ggtgaccacttgcctgctgtgggccagctccccgtggccaaggaccagcgtgggcagggccttcgggcacgggttgctgg

SEQ ID NO: 104150 - DNA, 80 bp, synthetic construct
  misc_feature 1..80: note = Artificially Synthesized Probe
  source 1..80: mol_type = other DNA
atgtcattagcctcattttagagaagagtcttgatgggtcggagagcggtggcttacccacaggtaagctgtaaatctgg

SEQ ID NO: 104151 - DNA, 80 bp, synthetic construct; identical to SEQ ID NO: 36267
  misc_feature 1..80: note = Artificially Synthesized Probe
  source 1..80: mol_type = other DNA

SEQ ID NO: 104152 - DNA, 80 bp, synthetic construct
  misc_feature 1..80: note = Artificially Synthesized Probe
  source 1..80: mol_type = other DNA
cacacactgccatttaaaggtagcttagctttctgttcgggatcctttctcttgctggctgaagtgttcatctgcgtgac

SEQ ID NO: 104153 - DNA, 80 bp, synthetic construct
  misc_feature 1..80: note = Artificially Synthesized Probe
  source 1..80: mol_type = other DNA
agcctcccgagtagctgggattatagctgcacaccaccacacccagctaatgtttgtatctttagtagagacggggtttc

SEQ ID NO: 104154 - DNA, 80 bp, synthetic construct; identical to SEQ ID NO: 36254
  misc_feature 1..80: note = Artificially Synthesized Probe
  source 1..80: mol_type = other DNA

SEQ ID NO: 104155 - DNA, 80 bp, synthetic construct
  misc_feature 1..80: note = Artificially Synthesized Probe
  source 1..80: mol_type = other DNA
gggtctcactgtgttgcccaggctagtgttgaactcctggcctcaggtgattctcctgcctcagcctcacaggtagctag

SEQ ID NO: 104156 - DNA, 80 bp, synthetic construct; identical to SEQ ID NO: 36268
  misc_feature 1..80: note = Artificially Synthesized Probe
  source 1..80: mol_type = other DNA

SEQ ID NO: 104157 - DNA, 80 bp, synthetic construct
  misc_feature 1..80: note = Artificially Synthesized Probe
  source 1..80: mol_type = other DNA
atgcccagtttacccatgggctacatttttacaagttccaatttgtttaaaactcagggtttgttttcctatcagaggtg

SEQ ID NO: 104158 - DNA, 80 bp, synthetic construct
  misc_feature 1..80: note = Artificially Synthesized Probe
  source 1..80: mol_type = other DNA
ggacttgggggatggcacctggtagctttaaggacctaacctgttgatggtgcttattctcccagccacattctgttgag

SEQ ID NO: 104159 - DNA, 80 bp, synthetic construct
  misc_feature 1..80: note = Artificially Synthesized Probe
  source 1..80: mol_type = other DNA
ggactgagaagggggtgtggaaagacgtggttggcaggaggctcctggtgggaaagaagccgcactgacctgggcaggcc

SEQ ID NO: 104160 - DNA, 80 bp, synthetic construct
  misc_feature 1..80: note = Artificially Synthesized Probe
  source 1..80: mol_type = other DNA
accccacacctgtgaggtgggcactggtgtttttggtggacttctcttgtgaggagcttttttttttaaaaaaaaaaaag

SEQ ID NO: 104161 - DNA, 80 bp, synthetic construct; identical to SEQ ID NO: 36269
  misc_feature 1..80: note = Artificially Synthesized Probe
  source 1..80: mol_type = other DNA

SEQ ID NO: 104162 - DNA, 80 bp, synthetic construct
  misc_feature 1..80: note = Artificially Synthesized Probe
  source 1..80: mol_type = other DNA
tcctgccttggcctcccaaaatgggagattacaggcatgagccaccacgcctagcccatttcattagggaggacaaggat

SEQ ID NO: 104163 - DNA, 80 bp, synthetic construct
  misc_feature 1..80: note = Artificially Synthesized Probe
  source 1..80: mol_type = other DNA
aggcccagagtcgctggcctccctgaggctgtgctgcctccatgggactgagtgctgggacggggcgttttgggagcctg

SEQ ID NO: 104164 - DNA, 80 bp, synthetic construct; identical to SEQ ID NO: 36270
  misc_feature 1..80: note = Artificially Synthesized Probe
  source 1..80: mol_type = other DNA

SEQ ID NO: 104165 - DNA, 80 bp, synthetic construct
  misc_feature 1..80: note = Artificially Synthesized Probe
  source 1..80: mol_type = other DNA
tgctgtggccgaggcaggaaggaagttgcagaattccacgaaggcagaagactaccagtaggcaggtcccatgtcatcac

SEQ ID NO: 104166 - DNA, 80 bp, synthetic construct
  misc_feature 1..80: note = Artificially Synthesized Probe
  source 1..80: mol_type = other DNA
cgctatttcgacatgtgtggctgtacaccagagtggcccgggtaacataaaaacatgaattaggcggattggccaggctc

SEQ ID NO: 104167 - DNA, 80 bp, synthetic construct
  misc_feature 1..80: note = Artificially Synthesized Probe
  source 1..80: mol_type = other DNA
cagaagtgaccccagaaagggttctctgaggtgctgcggtccctacccagcagccaggggctctgtctggaagtggccgt

SEQ ID NO: 104168 - DNA, 80 bp, synthetic construct
  misc_feature 1..80: note = Artificially Synthesized Probe
  source 1..80: mol_type = other DNA
aaatagtcctgttctctttgcctgctttatttttctcatagtaatcatcatcatctgacacgctgtgcattttcctgctc

SEQ ID NO: 104169 - DNA, 80 bp, synthetic construct; identical to SEQ ID NO: 36271
  misc_feature 1..80: note = Artificially Synthesized Probe
  source 1..80: mol_type = other DNA

SEQ ID NO: 104170 - DNA, 80 bp, synthetic construct
  misc_feature 1..80: note = Artificially Synthesized Probe
  source 1..80: mol_type = other DNA
cagcctggtgtggtggctcaggtctgtaatccagcactttgggaggccaaggatggcggatcactcgagccctggagttt

SEQ ID NO: 104171 - DNA, 80 bp, synthetic construct
  misc_feature 1..80: note = Artificially Synthesized Probe
  source 1..80: mol_type = other DNA
ccagcctgggagacagagtgagaccccgtctcaaaacagaaaaaaagtcaccaggcatggtggcacatgcctgtaattgc

SEQ ID NO: 104172 - DNA, 80 bp, synthetic construct
  misc_feature 1..80: note = Artificially Synthesized Probe
  source 1..80: mol_type = other DNA
tttctggacatgagtgtgatcctccctgctcttgcagtgccatctaagctgtcatcagttttcctgggcgagtgatgcat

SEQ ID NO: 104173 - DNA, 80 bp, synthetic construct; identical to SEQ ID NO: 36272
  misc_feature 1..80: note = Artificially Synthesized Probe
  source 1..80: mol_type = other DNA

SEQ ID NO: 104174 - DNA, 80 bp, synthetic construct
  misc_feature 1..80: note = Artificially Synthesized Probe
  source 1..80: mol_type = other DNA
gacaggcacatgccaccgtacctggttaatttttatatttttagtagaggtgaggttttgctgtgtttgcccaggctggt

SEQ ID NO: 104175 - DNA, 80 bp, synthetic construct
  misc_feature 1..80: note = Artificially Synthesized Probe
  source 1..80: mol_type = other DNA
aagcgattctcctgcctcagcctcccaagtagctggcattacaggcatgcgccaacaagcccggctagtttttttgtatt

SEQ ID NO: 104176 - DNA, 80 bp, synthetic construct
  misc_feature 1..80: note = Artificially Synthesized Probe
  source 1..80: mol_type = other DNA
ttggtcaggctgatcttgaactcccgaccgcaggggatccacccgcctcatccacccaaactgctgggactacaggcatg

SEQ ID NO: 104177 - DNA, 80 bp, synthetic construct
  misc_feature 1..80: note = Artificially Synthesized Probe
  source 1..80: mol_type = other DNA
ttctcatggccttggcagttccacatgatggacatttcatatctgcagttttcttcgcatgagatggcttttttgcacaa

SEQ ID NO: 104178 - DNA, 80 bp, synthetic construct
  misc_feature 1..80: note = Artificially Synthesized Probe
  source 1..80: mol_type = other DNA
tttgagtggggagttgtatcggaaaccaccatcagcgcgcctgagctcgcctcgcattgttcttctgtagtgcggggggc

SEQ ID NO: 104179 - DNA, 80 bp, synthetic construct; identical to SEQ ID NO: 36273
  misc_feature 1..80: note = Artificially Synthesized Probe
  source 1..80: mol_type = other DNA

SEQ ID NO: 104180 - DNA, 80 bp, synthetic construct
  misc_feature 1..80: note = Artificially Synthesized Probe
  source 1..80: mol_type = other DNA
ggttaccttggccttgggatgagttggctggaggctcaggcagcgcgagggacaggaggagggcgaggcgctgcctggtg

SEQ ID NO: 104181 - DNA, 80 bp, synthetic construct
  misc_feature 1..80: note = Artificially Synthesized Probe
  source 1..80: mol_type = other DNA
tgccttgagccttacttccttttcctctttgtcgcctagtatgacgccgtgcccatccagtccagcgtggtgttatgttc

SEQ ID NO: 104182 - DNA, 80 bp, synthetic construct
  misc_feature 1..80: note = Artificially Synthesized Probe
  source 1..80: mol_type = other DNA
aagaagcggcctgaggacttcaagtttgggaaaatccttggggaaggctctttttccacggtgagtatttgctgctgctg

SEQ ID NO: 104183 - DNA, 80 bp, synthetic construct; identical to SEQ ID NO: 36274
  misc_feature 1..80: note = Artificially Synthesized Probe
  source 1..80: mol_type = other DNA

SEQ ID NO: 104184 - DNA, 80 bp, synthetic construct
  misc_feature 1..80: note = Artificially Synthesized Probe
  source 1..80: mol_type = other DNA
acctcttcttatttctctgttttgtttttttgaatacataaaacagtacgctctggacatttgctggagacacagcctcc

SEQ ID NO: 104185 - DNA, 80 bp, synthetic construct
  misc_feature 1..80: note = Artificially Synthesized Probe
  source 1..80: mol_type = other DNA
gctgacatgggacgttttgctgacgtgggacccatgaagccgtgtgtggttgtggatttagtgaaggttgtaacaggttc

SEQ ID NO: 104186 - DNA, 80 bp, synthetic construct
  misc_feature 1..80: note = Artificially Synthesized Probe
  source 1..80: mol_type = other DNA
ttcctgaataattctttcttgcctgacctttgtgaagaaaccgtaggtgaggtttattttccttttttctcttttttaca

SEQ ID NO: 104187 - DNA, 80 bp, synthetic construct; identical to SEQ ID NO: 36275
  misc_feature 1..80: note = Artificially Synthesized Probe
  source 1..80: mol_type = other DNA

SEQ ID NO: 104188 - DNA, 80 bp, synthetic construct
  misc_feature 1..80: note = Artificially Synthesized Probe
  source 1..80: mol_type = other DNA
tgatcctggattttcacctgaggatggatagatcttcagggttcaagtgggtttgcatctggactttagggtggccctgt

SEQ ID NO: 104189 - DNA, 80 bp, synthetic construct
  misc_feature 1..80: note = Artificially Synthesized Probe
  source 1..80: mol_type = other DNA
tgggctcaagtgatcctcttacctcagcctcccaagtagctgcagttacaggaatgcaccaccgtgcccagctaattgta

SEQ ID NO: 104190 - DNA, 80 bp, synthetic construct
  misc_feature 1..80: note = Artificially Synthesized Probe
  source 1..80: mol_type = other DNA
ttggcctcagttttacttccttgtatgtctctttttaatttaactttattttattatgtatgtatttatccttttagaaa

SEQ ID NO: 104191 - DNA, 80 bp, synthetic construct; identical to SEQ ID NO: 36276
  misc_feature 1..80: note = Artificially Synthesized Probe
  source 1..80: mol_type = other DNA

SEQ ID NO: 104192 - DNA, 80 bp, synthetic construct
  misc_feature 1..80: note = Artificially Synthesized Probe
  source 1..80: mol_type = other DNA
gtgttaccctcagttctttctcagctttcctgaaatggagatcacataaaagttgatttccaggggagggggaaaggaca

SEQ ID NO: 104193 - DNA, 80 bp, synthetic construct
  misc_feature 1..80: note = Artificially Synthesized Probe
  source 1..80: mol_type = other DNA
aacggaaagatcacatcagtatccccttagaaagggttccactaaatatcggtgctcgttcacaattctttcttcctctt

SEQ ID NO: 104194 - DNA, 80 bp, synthetic construct
  misc_feature 1..80: note = Artificially Synthesized Probe
  source 1..80: mol_type = other DNA
tccatgcgtggcgtattcctctgggaagaccttgagtatgtagagtccccagaatccaacttcattcttcttgagtgcca

SEQ ID NO: 104195 - DNA, 80 bp, synthetic construct
  misc_feature 1..80: note = Artificially Synthesized Probe
  source 1..80: mol_type = other DNA
cttcctgccagcccccaggaatgtcacgggacaggtttcctctgctccctgctcctcaggccgtccccctgtgggtgtct

SEQ ID NO: 104196 - DNA, 80 bp, synthetic construct; identical to SEQ ID NO: 36277
  misc_feature 1..80: note = Artificially Synthesized Probe
  source 1..80: mol_type = other DNA

SEQ ID NO: 104197 - DNA, 80 bp, synthetic construct
  misc_feature 1..80: note = Artificially Synthesized Probe
  source 1..80: mol_type = other DNA
tacaaaatgtatgataacagttatttccaaaaacgaaacttcagggcagcctttgcaatgaatgtatactagaaggacat

SEQ ID NO: 104198 - DNA, 80 bp, synthetic construct
  misc_feature 1..80: note = Artificially Synthesized Probe
  source 1..80: mol_type = other DNA
gagagatggatatgttttctcttagctgttagaacacatcaacacgagcattggcttttagctctacttgtcagtacaag

SEQ ID NO: 104199 - DNA, 80 bp, synthetic construct
  misc_feature 1..80: note = Artificially Synthesized Probe
  source 1..80: mol_type = other DNA
acctccagagaatatgcgagtgagtatgggctgcagggagctgtgcgtccgggagcagggcaagcggctccgtgcagggc

SEQ ID NO: 104200 - DNA, 80 bp, synthetic construct
  misc_feature 1..80: note = Artificially Synthesized Probe
  source 1..80: mol_type = other DNA
actcaagacaggcgcttccctaggtactttcacacctcattgcgaggtaggtgttgttcccattttacgggtgcagaagc

SEQ ID NO: 104201 - DNA, 80 bp, synthetic construct; identical to SEQ ID NO: 36278
  misc_feature 1..80: note = Artificially Synthesized Probe
  source 1..80: mol_type = other DNA

SEQ ID NO: 104202 - DNA, 80 bp, synthetic construct
  misc_feature 1..80: note = Artificially Synthesized Probe
  source 1..80: mol_type = other DNA
cccacaagcagcccccgctccctgccgagtggggtccctcaggccgctgacattcagggaggcagccgaggcagcgccag

SEQ ID NO: 104203 - DNA, 80 bp, synthetic construct
  misc_feature 1..80: note = Artificially Synthesized Probe
  source 1..80: mol_type = other DNA
ggggtcccgagggccgggtgcctccttacctgcagccgggcggccgggccggggatggcgggcgccggccgagggcgctg

SEQ ID NO: 104204 - DNA, 80 bp, synthetic construct
  misc_feature 1..80: note = Artificially Synthesized Probe
  source 1..80: mol_type = other DNA
aaggcccggtggaagttggggtgggccccacctctgccccatccagctgacctgtgggcctgccagtggctgggctggcc

SEQ ID NO: 104205 - DNA, 80 bp, synthetic construct; identical to SEQ ID NO: 36279
  misc_feature 1..80: note = Artificially Synthesized Probe
  source 1..80: mol_type = other DNA

SEQ ID NO: 104206 - DNA, 80 bp, synthetic construct
  misc_feature 1..80: note = Artificially Synthesized Probe
  source 1..80: mol_type = other DNA
gatgcgctgccaagagtcttagggctgggtaggggctggcggcagtgtggggctctttcagctcctgggcaggagtgtgt

SEQ ID NO: 104207 - DNA, 80 bp, synthetic construct
  misc_feature 1..80: note = Artificially Synthesized Probe
  source 1..80: mol_type = other DNA
gtcgaggtctgatgaacagaccggtcaagagaatggagtcaggggcggctcctgggaggtggccctcaagcctagtgcac

SEQ ID NO: 104208 - DNA, 80 bp, synthetic construct
  misc_feature 1..80: note = Artificially Synthesized Probe
  source 1..80: mol_type = other DNA
aggctgcccagaggttggctcctctgtgagtggagcctgggttccccccagtgcaggggtgaacacgaggaggggcccac

SEQ ID NO: 104209 - DNA, 80 bp, synthetic construct; identical to SEQ ID NO: 36280
  misc_feature 1..80: note = Artificially Synthesized Probe
  source 1..80: mol_type = other DNA

SEQ ID NO: 104210 - DNA, 80 bp, synthetic construct
  misc_feature 1..80: note = Artificially Synthesized Probe
  source 1..80: mol_type = other DNA
tgcctctgtctcccactctcagtggcttcttcacggtatgttctgtctctcaccttcacgttccccggggccctgcacgt

SEQ ID NO: 104211 - DNA, 80 bp, synthetic construct
  misc_feature 1..80: note = Artificially Synthesized Probe
  source 1..80: mol_type = other DNA
ctgactgatttccaaatgggattggccagagcggtgcaggtagtgggaactccaggtctttgtccagtggtccatgttgc

SEQ ID NO: 104212 - DNA, 80 bp, synthetic construct; identical to SEQ ID NO: 36255
  misc_feature 1..80: note = Artificially Synthesized Probe
  source 1..80: mol_type = other DNA

SEQ ID NO: 104213 - DNA, 80 bp, synthetic construct
  misc_feature 1..80: note = Artificially Synthesized Probe
  source 1..80: mol_type = other DNA
tgcaagtcccttcgcttctgggtttctcttcgttgccctgaagcttcaggttcatccttggtgggagatgatggtgccct

SEQ ID NO: 104214 - DNA, 80 bp, synthetic construct; identical to SEQ ID NO: 36281
  misc_feature 1..80: note = Artificially Synthesized Probe
  source 1..80: mol_type = other DNA

SEQ ID NO: 104215 - DNA, 80 bp, synthetic construct
  misc_feature 1..80: note = Artificially Synthesized Probe
  source 1..80: mol_type = other DNA
gggcagatcacgaggataagagatggagactatcctggccaacctggggaaaccccgtctctactaaaaataccaaaact

SEQ ID NO: 104216 - DNA, 80 bp, synthetic construct
  misc_feature 1..80: note = Artificially Synthesized Probe
  source 1..80: mol_type = other DNA
aaacaaaatgtgtcactttatccacggaaggagactgcatggaaggggcagtgccacgcgtggatgcgtagcacataaag

SEQ ID NO: 104217 - DNA, 80 bp, synthetic construct
  misc_feature 1..80: note = Artificially Synthesized Probe
  source 1..80: mol_type = other DNA
gccaggggccagaggggcagtcggggctgagaggctctgttcctgtttcctcgagaccgtgtaatggcgttcttaatgag

SEQ ID NO: 104218 - DNA, 80 bp, synthetic construct; identical to SEQ ID NO: 36282
  misc_feature 1..80: note = Artificially Synthesized Probe
  source 1..80: mol_type = other DNA

SEQ ID NO: 104219 - DNA, 80 bp, synthetic construct
  misc_feature 1..80: note = Artificially Synthesized Probe
  source 1..80: mol_type = other DNA
caaaacgaaacaagagatttttacacttccttaactgcacgatattcagatttcggccttagttatgccaaaaatggaga

SEQ ID NO: 104220 - DNA, 80 bp, synthetic construct
  misc_feature 1..80: note = Artificially Synthesized Probe
  source 1..80: mol_type = other DNA
gatcagggccagtgaccgtttggctcacaggccacggctgatgcccagatggcccccgcccttgaggtcagccaggttgg

SEQ ID NO: 104221 - DNA, 80 bp, synthetic construct
  misc_feature 1..80: note = Artificially Synthesized Probe
  source 1..80: mol_type = other DNA
accatcttgactgatgctttttatctttttcagttgtagcttctgtgtgtacttctttctggtctcgtttttcatgactt

SEQ ID NO: 104222 - DNA, 80 bp, synthetic construct
  misc_feature 1..80: note = Artificially Synthesized Probe
  source 1..80: mol_type = other DNA
gaggcttgaaatcctccctttggaacaaagaaacatgtaatgattttgctgaaggtagaattgggggactaggcagagtg

SEQ ID NO: 104223 - DNA, 80 bp, synthetic construct
  misc_feature 1..80: note = Artificially Synthesized Probe
  source 1..80: mol_type = other DNA
gtagccctggttgtcagcctgtaaggatcatatacattcattcgttcattttgttttcagcaaaatttagagtacgtaat

SEQ ID NO: 104224 - DNA, 80 bp, synthetic construct; identical to SEQ ID NO: 36283
  misc_feature 1..80: note = Artificially Synthesized Probe
  source 1..80: mol_type = other DNA

SEQ ID NO: 104225 - DNA, 80 bp, synthetic construct
  misc_feature 1..80: note = Artificially Synthesized Probe
  source 1..80: mol_type = other DNA
agtgggaggtcgctggttctcctcggcgcctgctctggttcatcctccctactcgtcttctggacagtgtggggggccac

SEQ ID NO: 104226 - DNA, 80 bp, synthetic construct
  misc_feature 1..80: note = Artificially Synthesized Probe
  source 1..80: mol_type = other DNA
gtttgtcatcacaaagcctccgagtcctgttcccaagggtagtttctagcctcggaccatgttgtgacaactccatcgga

SEQ ID NO: 104227 - DNA, 80 bp, synthetic construct; identical to SEQ ID NO: 36284
  misc_feature 1..80: note = Artificially Synthesized Probe
  source 1..80: mol_type = other DNA

SEQ ID NO: 104228 - DNA, 80 bp, synthetic construct
  misc_feature 1..80: note = Artificially Synthesized Probe
  source 1..80: mol_type = other DNA
gacgcgagtgcaggtttgttggtggaggaaagattcagacagaagtgaccgtgttgttgtagctgctctcgtgtggaaaa

SEQ ID NO: 104229 - DNA, 80 bp, synthetic construct
  misc_feature 1..80: note = Artificially Synthesized Probe
  source 1..80: mol_type = other DNA
cactctggactcagctcggcttttctgtttcttaggaattggccctgtattctgtgtgctgggaggtacccagctggtgc

SEQ ID NO: 104230 - DNA, 80 bp, synthetic construct
  misc_feature 1..80: note = Artificially Synthesized Probe
  source 1..80: mol_type = other DNA
tcagttggtgctttcatctctgcacagtcatggaggccctaagaccttgtcttggatctgggaacttctctcagaatcct

SEQ ID NO: 104231 - DNA, 80 bp, synthetic construct; identical to SEQ ID NO: 36285
  misc_feature 1..80: note = Artificially Synthesized Probe
  source 1..80: mol_type = other DNA

SEQ ID NO: 104232 - DNA, 80 bp, synthetic construct
  misc_feature 1..80: note = Artificially Synthesized Probe
  source 1..80: mol_type = other DNA
tctctactaaaaatataaaaaattagctgggcgtggtggtgcgcgcctgtagtcttagctactcgggaggctgaggcagg

SEQ ID NO: 104233 - DNA, 80 bp, synthetic construct
  misc_feature 1..80: note = Artificially Synthesized Probe
  source 1..80: mol_type = other DNA
gatgtattcctgtacgcaacgttgccctgacagccagtccaagctgagtctagagctggcaaggtgagctcccagtggta

SEQ ID NO: 104234 - DNA, 80 bp, synthetic construct
  misc_feature 1..80: note = Artificially Synthesized Probe
  source 1..80: mol_type = other DNA
cttgttgtctaaggtggcttagtcctgctgccgtccgctgccttttgtagccccgttcccctccccgtccagtggcatgc

SEQ ID NO: 104235 - DNA, 80 bp, synthetic construct
  misc_feature 1..80: note = Artificially Synthesized Probe
  source 1..80: mol_type = other DNA
ctccctcagtgttgtctgtgacaaagttgaaccaaacaggaacttctgtctcgtaagctttcttaggatctgtcagtgtc

SEQ ID NO: 104236 - DNA, 80 bp, synthetic construct
  misc_feature 1..80: note = Artificially Synthesized Probe
  source 1..80: mol_type = other DNA
gggcatttttcccttcgtgtggattttctttctttttttttcccctcccttattgcaaggctttatttattcataatttc

SEQ ID NO: 104237 - DNA, 80 bp, synthetic construct; identical to SEQ ID NO: 36286
  misc_feature 1..80: note = Artificially Synthesized Probe
  source 1..80: mol_type = other DNA

SEQ ID NO: 104238 - DNA, 80 bp, synthetic construct
  misc_feature 1..80: note = Artificially Synthesized Probe
  source 1..80: mol_type = other DNA
aaacaaaaattagctgggcgtgctagtgcgtgcctgtagtcccagctactcaggaggctgaggtgggaggatcacctgag

SEQ ID NO: 104239 - DNA, 80 bp, synthetic construct
  misc_feature 1..80: note = Artificially Synthesized Probe
  source 1..80: mol_type = other DNA
gggccagttgcttgtgcgtatagatgagttggtggttcttttccccttgtttgaggaaaaggaaaaaactataatttatg

SEQ ID NO: 104240 - DNA, 80 bp, synthetic construct
  misc_feature 1..80: note = Artificially Synthesized Probe
  source 1..80: mol_type = other DNA
cccgcgcagcagctgtgccacgccctcctcctagagggaggcaggttttcccatcgttcctgtggggtgggtagggtggc

SEQ ID NO: 104241 - DNA, 80 bp, synthetic construct; identical to SEQ ID NO: 36287
  misc_feature 1..80: note = Artificially Synthesized Probe
  source 1..80: mol_type = other DNA

SEQ ID NO: 104242 - DNA, 80 bp, synthetic construct
  misc_feature 1..80: note = Artificially Synthesized Probe
  source 1..80: mol_type = other DNA
gggctggctggagagggtggatgccgtgggcttcagtcactacagtggctcctctgtcctcatctgtgcatggccatcgt

SEQ ID NO: 104243 - DNA, 80 bp, synthetic construct
  misc_feature 1..80: note = Artificially Synthesized Probe
  source 1..80: mol_type = other DNA
gcatgatggaaagtggagtttgcacaataaaagagagagtccccattctcccatcaccaagagcagctcttcccatcttc

SEQ ID NO: 104244 - DNA, 80 bp, synthetic construct
  misc_feature 1..80: note = Artificially Synthesized Probe
  source 1..80: mol_type = other DNA
gtgtcgctaaaatacaaatctttttaaaagcgtaaccacaataccatactgtttgatatgtaaaaatgaacggtaattgc

SEQ ID NO: 104245 - DNA, 80 bp, synthetic construct; identical to SEQ ID NO: 36256
  misc_feature 1..80: note = Artificially Synthesized Probe
  source 1..80: mol_type = other DNA

SEQ ID NO: 104246 - DNA, 80 bp, synthetic construct; identical to SEQ ID NO: 36288
  misc_feature 1..80: note = Artificially Synthesized Probe
  source 1..80: mol_type = other DNA

SEQ ID NO: 104247 - DNA, 80 bp, synthetic construct
  misc_feature 1..80: note = Artificially Synthesized Probe
  source 1..80: mol_type = other DNA
tcattagagagtgcagaaaggtcacagcctgatacattcatgagatgcaattcattaaagagcaacttctccccagcaac

SEQ ID NO: 104248 - DNA, 80 bp, synthetic construct
  misc_feature 1..80: note = Artificially Synthesized Probe
  source 1..80: mol_type = other DNA
aaagctcactccagggccaggcgcggtggctcacatctgtaatcgcagcactttgggaggctgaggcgagtggatcacct

SEQ ID NO: 104249 - DNA, 80 bp, synthetic construct; identical to SEQ ID NO: 36289
  misc_feature 1..80: note = Artificially Synthesized Probe
  source 1..80: mol_type = other DNA

SEQ ID NO: 104250 - DNA, 80 bp, synthetic construct
  misc_feature 1..80: note = Artificially Synthesized Probe
  source 1..80: mol_type = other DNA
ctcctgtaatcccagctacttgcgaggctgaggcaggagaatcgctggaacctggtaggcggaggttgcggtgagccaag

SEQ ID NO: 104251 - DNA, 80 bp, synthetic construct
  misc_feature 1..80: note = Artificially Synthesized Probe
  source 1..80: mol_type = other DNA
agcgggcagaccacttgaggtcaggagttcgcgaccagctgcccatctctagtaaaaatacaaaaattagccaggcatgg

SEQ ID NO: 104252 - DNA, 80 bp, synthetic construct
  misc_feature 1..80: note = Artificially Synthesized Probe
  source 1..80: mol_type = other DNA
tgcgttagaggtctgaatgtaagggcgaagactatgacactcttagaagaaattataggattaaatgtgacaattgggtt

SEQ ID NO: 104253 - DNA, 80 bp, synthetic construct; identical to SEQ ID NO: 36290
  misc_feature 1..80: note = Artificially Synthesized Probe
  source 1..80: mol_type = other DNA

SEQ ID NO: 104254 - DNA, 80 bp, synthetic construct
  misc_feature 1..80: note = Artificially Synthesized Probe
  source 1..80: mol_type = other DNA
caggagggctgtgatgagaagacagataataacaaacgttagcaacgacgtaggggactggaacccacgtatgctgtggg

SEQ ID NO: 104255 - DNA, 80 bp, synthetic construct
  misc_feature 1..80: note = Artificially Synthesized Probe
  source 1..80: mol_type = other DNA
atcatgcacagtagccaaaaggtggaaacgacgcacgtgtcatcgaatgagtggatgaacgagtggcgtgtccacacgac

SEQ ID NO: 104256 - DNA, 80 bp, synthetic construct
  misc_feature 1..80: note = Artificially Synthesized Probe
  source 1..80: mol_type = other DNA
acgtggtgctgcagttctgtgtggggcaggttgtggctgcagagaagccctgggtgcagaaacagtcccccaagcaggtg

SEQ ID NO: 104257 - DNA, 80 bp, synthetic construct
  misc_feature 1..80: note = Artificially Synthesized Probe
  source 1..80: mol_type = other DNA
cacgttaagtcttctgagccatcaccatgggctgtctttctgtttatttagatctttctttcaaaaacactttgtagttt

SEQ ID NO: 104258 - DNA, 80 bp, synthetic construct; identical to SEQ ID NO: 36291
  misc_feature 1..80: note = Artificially Synthesized Probe
  source 1..80: mol_type = other DNA

SEQ ID NO: 104259 - DNA, 80 bp, synthetic construct
  misc_feature 1..80: note = Artificially Synthesized Probe
  source 1..80: mol_type = other DNA
cgctcttgttgcccaagctggagtgcggtggcgcgatctcggctcactgcaacctccgcctcccgggttcaagcgattct

SEQ ID NO: 104260 - DNA, 80 bp, synthetic construct
  misc_feature 1..80: note = Artificially Synthesized Probe
  source 1..80: mol_type = other DNA
gctgggattgtgaatttcatttctgggttgctcctggaaattgtgcggaaatgcagttggtttttccctgccccgcaccc

SEQ ID NO: 104261 - DNA, 80 bp, synthetic construct
  misc_feature 1..80: note = Artificially Synthesized Probe
  source 1..80: mol_type = other DNA
tcgagctagttttatttgttccctttcaacctggctgccttttgtcttcttccctaattgtcctggctgagacctctagt

SEQ ID NO: 104262 - DNA, 80 bp, synthetic construct; identical to SEQ ID NO: 36292
  misc_feature 1..80: note = Artificially Synthesized Probe
  source 1..80: mol_type = other DNA

SEQ ID NO: 104263 - DNA, 80 bp, synthetic construct
  misc_feature 1..80: note = Artificially Synthesized Probe
  source 1..80: mol_type = other DNA
aaagggtagtcacgttttgcggagcgtttttctgtgcttctttgtgggtttatggataacatggcagccggcacccttgg

SEQ ID NO: 104264 - DNA, 80 bp, synthetic construct
  misc_feature 1..80: note = Artificially Synthesized Probe
  source 1..80: mol_type = other DNA
gtctctttccccagcgtcggtagtcccgtggcatgcgggggcatcagcagccagtgcggggctctgggcctgagtttcca

SEQ ID NO: 104265 - DNA, 80 bp, synthetic construct
  misc_feature 1..80: note = Artificially Synthesized Probe
  source 1..80: mol_type = other DNA
ttttcactaacctttcagcaaagcgtaccatttccttccattatgaacatcagcaacaaacatctgtcatcagaagtcac

SEQ ID NO: 104266 - DNA, 80 bp, synthetic construct; identical to SEQ ID NO: 36293
  misc_feature 1..80: note = Artificially Synthesized Probe
  source 1..80: mol_type = other DNA

SEQ ID NO: 104267 - DNA, 80 bp, synthetic construct
  misc_feature 1..80: note = Artificially Synthesized Probe
  source 1..80: mol_type = other DNA
tcttttcagccgtgcattcttctacagcagaattgcattattcacttgctcagtgtgataccatgtcctttaaaaaatta

SEQ ID NO: 104268 - DNA, 80 bp, synthetic construct
  misc_feature 1..80: note = Artificially Synthesized Probe
  source 1..80: mol_type = other DNA
agggagagggggaagacccttggggagctaggaggagctgaggttggagagggcagggagggattccaggagatccgagc

SEQ ID NO: 104269 - DNA, 80 bp, synthetic construct
  misc_feature 1..80: note = Artificially Synthesized Probe
  source 1..80: mol_type = other DNA
ccgcgtgctgcacgacgacctcagtcatttaattatgcattatatacatctctccagaggacaaaaacctagacttttta

SEQ ID NO: 104270 - DNA, 80 bp, synthetic construct
  misc_feature 1..80: note = Artificially Synthesized Probe
  source 1..80: mol_type = other DNA
gagggagctgcagggtctgggaggcaaacatctttgtgacttctgatgctcattggaaagttgcccccagaagcgacgcc

SEQ ID NO: 104271 - DNA, 80 bp, synthetic construct
  misc_feature 1..80: note = Artificially Synthesized Probe
  source 1..80: mol_type = other DNA
tttgattctttgcagggttgaatggcttcgtttgtttttggcccttggtttggttgtctttcctctaggccggcaggggc

SEQ ID NO: 104272 - DNA, 80 bp, synthetic construct; identical to SEQ ID NO: 36294
  misc_feature 1..80: note = Artificially Synthesized Probe
  source 1..80: mol_type = other DNA

SEQ ID NO: 104273 - DNA, 80 bp, synthetic construct
  misc_feature 1..80: note = Artificially Synthesized Probe
  source 1..80: mol_type = other DNA
agaaaagtcattcactgaagggattgagtccccgcagcagaggctgggaggttctctcagcgtggccggaggagggcagg

SEQ ID NO: 104274 - DNA, 80 bp, synthetic construct
  misc_feature 1..80: note = Artificially Synthesized Probe
  source 1..80: mol_type = other DNA
cctcagctcccaagctgtttgtgatggaaaggaggtttttctggcctgcaactgtttattgtgtgcctaggcacgtttgg

SEQ ID NO: 104275 - DNA, 80 bp, synthetic construct; identical to SEQ ID NO: 36295
  misc_feature 1..80: note = Artificially Synthesized Probe
  source 1..80: mol_type = other DNA

SEQ ID NO: 104276 - DNA, 80 bp, synthetic construct
  misc_feature 1..80: note = Artificially Synthesized Probe
  source 1..80: mol_type = other DNA
accactttcatctaagccgtgcttcccttttctttaacacagaaattaatatttgagagagtgaatttggtggcctttaa

SEQ ID NO: 104277 - DNA, 80 bp, synthetic construct
  misc_feature 1..80: note = Artificially Synthesized Probe
  source 1..80: mol_type = other DNA
tagtgttgtgttctaagcttcctgggtttgctgatgctttctggttgcagattgaatcgtttgggttttttttgtttttg

SEQ ID NO: 104278 - DNA, 80 bp, synthetic construct
  misc_feature 1..80: note = Artificially Synthesized Probe
  source 1..80: mol_type = other DNA
gattgttgtatttttggtagagacggggtttcaccatgttggctaggatggtctcgatctcttgagctcgtgatctgcca

SEQ ID NO: 104279 - DNA, 80 bp, synthetic construct
  misc_feature 1..80: note = Artificially Synthesized Probe
  source 1..80: mol_type = other DNA
tctgtacctgatgttggttgcacaaagtccgtttccattctcttagtctagacaattttcctgatatttaaactggaatt

SEQ ID NO: 104280 - DNA, 80 bp, synthetic construct
  misc_feature 1..80: note = Artificially Synthesized Probe
  source 1..80: mol_type = other DNA
cccggccttcgggttgctcggccacacaccagctgcagtgggacagcgtcccgcagagcgcagggaggccctggagggtg

SEQ ID NO: 104281 - DNA, 80 bp, synthetic construct; identical to SEQ ID NO: 36296
  misc_feature 1..80: note = Artificially Synthesized Probe
  source 1..80: mol_type = other DNA

SEQ ID NO: 104282 - DNA, 80 bp, synthetic construct
  misc_feature 1..80: note = Artificially Synthesized Probe
  source 1..80: mol_type = other DNA
tgctctcgtgagtcgacaggaccacaggagtcccatgctgccactctcctgctccgccaggttacaaggggccaccttcc

SEQ ID NO: 104283 - DNA, 80 bp, synthetic construct
  misc_feature 1..80: note = Artificially Synthesized Probe
  source 1..80: mol_type = other DNA
cgtctccaggcgttttcggttttgttgttttaacttttttcaaccagcagatactgagttgtcttttcattattattgaa

SEQ ID NO: 104284 - DNA, 80 bp, synthetic construct
  misc_feature 1..80: note = Artificially Synthesized Probe
  source 1..80: mol_type = other DNA
ctgctttaggtcagagcttcccaactggagtgattctgctccccaggggacacttggccctgtctggacagttttagttg

SEQ ID NO: 104285 - DNA, 80 bp, synthetic construct; identical to SEQ ID NO: 36297
  misc_feature 1..80: note = Artificially Synthesized Probe
  source 1..80: mol_type = other DNA

SEQ ID NO: 104286 - DNA, 80 bp, synthetic construct
  misc_feature 1..80: note = Artificially Synthesized Probe
  source 1..80: mol_type = other DNA
ttgtctatggggtgagggaacaggtttatgaggaaggcatttctgcatctctttttatgcttttgaattttttaatcatg

SEQ ID NO: 104287 - DNA, 80 bp, synthetic construct
  misc_feature 1..80: note = Artificially Synthesized Probe
  source 1..80: mol_type = other DNA
gagttcgagaccagcatggccaacgtggcgagaccctgtctctactaaaagtaacaaaaattagctgggcctggtggcga

SEQ ID NO: 104288 - DNA, 80 bp, synthetic construct; identical to SEQ ID NO: 36298
  misc_feature 1..80: note = Artificially Synthesized Probe
  source 1..80: mol_type = other DNA

SEQ ID NO: 104289 - DNA, 80 bp, synthetic construct
  misc_feature 1..80: note = Artificially Synthesized Probe
  source 1..80: mol_type = other DNA
gaacagattgtggttcatgggcctgtttctgtactgttgtgcgttgaaggggtttccatggattcacacactggcgtgtg

SEQ ID NO: 104290 - DNA, 80 bp, synthetic construct
  misc_feature 1..80: note = Artificially Synthesized Probe
  source 1..80: mol_type = other DNA
attttggctcactgcaacctccgcctcatgggttcaagtgattctcgtgcctcaggctcccaagtagctgggattacagg

SEQ ID NO: 104291 - DNA, 80 bp, synthetic construct
  misc_feature 1..80: note = Artificially Synthesized Probe
  source 1..80: mol_type = other DNA
cttgttctaactgaacgtttatttgatacgcccttggtacatgtgttttccagaagtgtaatactggcttccccttccat

SEQ ID NO: 104292 - DNA, 80 bp, synthetic construct
  misc_feature 1..80: note = Artificially Synthesized Probe
  source 1..80: mol_type = other DNA
ggcacccctcttctctctgctgcttccacactgaaaggcggaggctctgctgcctgttttcttttgttgctccccatttt

SEQ ID NO: 104293 - DNA, 80 bp, synthetic construct
  misc_feature 1..80: note = Artificially Synthesized Probe
  source 1..80: mol_type = other DNA
ccatcctgccccctgcctggtctgtagccacgtggtgccaggagtgagctctgctctgcttcaggatgacaggcgtgtgt

SEQ ID NO: 104294 - DNA, 80 bp, synthetic construct; identical to SEQ ID NO: 36299
  misc_feature 1..80: note = Artificially Synthesized Probe
  source 1..80: mol_type = other DNA

SEQ ID NO: 104295 - DNA, 80 bp, synthetic construct
  misc_feature 1..80: note = Artificially Synthesized Probe
  source 1..80: mol_type = other DNA
gtccctcccagcctcgaggtgggtgggggagggcagcacttggtgccgtgcccaggtggggggctctcggcgtgcggggc

SEQ ID NO: 104296 - DNA, 80 bp, synthetic construct
  misc_feature 1..80: note = Artificially Synthesized Probe
  source 1..80: mol_type = other DNA
attcttccctaaggcaagagacctcgtggagaaacttttggtaaatatcgtgaatttccttttagaaaggtgatccggga

SEQ ID NO: 104297 - DNA, 80 bp, synthetic construct
  misc_feature 1..80: note = Artificially Synthesized Probe
  source 1..80: mol_type = other DNA
gaggcaggtggatcacctgaggtcaggagtttgagactagcctggcctctatggtgaaaccacgtctctagtaaaaatat

SEQ ID NO: 104298 - DNA, 80 bp, synthetic construct; identical to SEQ ID NO: 36300
  misc_feature 1..80: note = Artificially Synthesized Probe
  source 1..80: mol_type = other DNA

SEQ ID NO: 104299 - DNA, 80 bp, synthetic construct
  misc_feature 1..80: note = Artificially Synthesized Probe
  source 1..80: mol_type = other DNA
tatagttaaaaatcctaaaacaagaaacactgagtaattaacaaagggagcgaatcatcactgggaccagcacgctcctg

SEQ ID NO: 104300 - DNA, 80 bp, synthetic construct
  misc_feature 1..80: note = Artificially Synthesized Probe
  source 1..80: mol_type = other DNA
aggactgagcccgctcccagagtcgtggtaaggagggacgtccagggccaaaagcacaggaaggtcaggagacttctgtt

SEQ ID NO: 104301 - DNA, 80 bp, synthetic construct; identical to SEQ ID NO: 36257
  misc_feature 1..80: note = Artificially Synthesized Probe
  source 1..80: mol_type = other DNA

SEQ ID NO: 104302 - DNA, 80 bp, synthetic construct; identical to SEQ ID NO: 36301
  misc_feature 1..80: note = Artificially Synthesized Probe
  source 1..80: mol_type = other DNA

SEQ ID NO: 104303 - DNA, 80 bp, synthetic construct
  misc_feature 1..80: note = Artificially Synthesized Probe
  source 1..80: mol_type = other DNA
atcgtggctcaccgcaaattctgcctcccgggttcaagcgattctcctccctcagcctcccgagtagctgggattatagg

SEQ ID NO: 104304 - DNA, 80 bp, synthetic construct
  misc_feature 1..80: note = Artificially Synthesized Probe
  source 1..80: mol_type = other DNA
ggtttgggtttctttggtcagaatcacgttttcaccctggcagtgacttgtcttgattgttacttaaggttttagatgcc

SEQ ID NO: 104305 - DNA, 80 bp, synthetic construct
  misc_feature 1..80: note = Artificially Synthesized Probe
  source 1..80: mol_type = other DNA
atgtaagctggccgggatggcgggcgaggcaggtggcactgggtcctccgtgcactgggcttcatgcccgtgcgccagac

SEQ ID NO: 104306 - DNA, 80 bp, synthetic construct
  misc_feature 1..80: note = Artificially Synthesized Probe
  source 1..80: mol_type = other DNA
cccacagggtgccgctagaaccggacgccgagcacccccggcactggccccggggtcccacgtacggggcctcctgcccg

SEQ ID NO: 104307 - DNA, 80 bp, synthetic construct; identical to SEQ ID NO: 36302
  misc_feature 1..80: note = Artificially Synthesized Probe
  source 1..80: mol_type = other DNA

SEQ ID NO: 104308 - DNA, 80 bp, synthetic construct
  misc_feature 1..80: note = Artificially Synthesized Probe
  source 1..80: mol_type = other DNA
gtgctgttatcatgagatccatttttctggtttgacttctgtcgccatggcttattctaactggcaccgtgtacggagtt

SEQ ID NO: 104309 - DNA, 80 bp, synthetic construct
  misc_feature 1..80: note = Artificially Synthesized Probe
  source 1..80: mol_type = other DNA
ttcaagcgattctcctgtctcgccctcccgactagcgggaactgcaggtgtgcaccaccatgcccggctaatttttgtat

SEQ ID NO: 104310 - DNA, 80 bp, synthetic construct
  misc_feature 1..80: note = Artificially Synthesized Probe
  source 1..80: mol_type = other DNA
agctgggaattctagattttatctaaaagtcatccacagctaaatttctgctagtgtcaaagtttcccaacgcccctacc

SEQ ID NO: 104311 - DNA, 80 bp, synthetic construct
  misc_feature 1..80: note = Artificially Synthesized Probe
  source 1..80: mol_type = other DNA
cactcagctgctcctgcgtggtgtttggttacggctggcaggtgccacggggctgcagtgctctccctgctgggcctgct

SEQ ID NO: 104312 - DNA, 80 bp, synthetic construct; identical to SEQ ID NO: 36303
  misc_feature 1..80: note = Artificially Synthesized Probe
  source 1..80: mol_type = other DNA

SEQ ID NO: 104313 - DNA, 80 bp, synthetic construct
  misc_feature 1..80: note = Artificially Synthesized Probe
  source 1..80: mol_type = other DNA
ccgtgctgggaccggcccaatctgtgtttcaagtcagcttgtagcacgcagggattcgaaatatttaaagatgaggtttg

SEQ ID NO: 104314 - DNA, 80 bp, synthetic construct
  misc_feature 1..80: note = Artificially Synthesized Probe
  source 1..80: mol_type = other DNA
caaacggtgtcaagcatggaaggagacttcagggctgtacctcctccctccctgcagggccgcaccccctccttcatggg

SEQ ID NO: 104315 - DNA, 80 bp, synthetic construct
  misc_feature 1..80: note = Artificially Synthesized Probe
  source 1..80: mol_type = other DNA
gggcaggcccacaccccgtggaggggtcggcgtggaggggccggcgtggaggggccggcagcgtcgggcgtttccaccat

SEQ ID NO: 104316 - DNA, 80 bp, synthetic construct
  misc_feature 1..80: note = Artificially Synthesized Probe
  source 1..80: mol_type = other DNA
aggacgtggaagggcatgccgcactcttatcctagccattgctcgtggcaccttttctttccccttgtccttggcctcca

SEQ ID NO: 104317 - DNA, 80 bp, synthetic construct
  misc_feature 1..80: note = Artificially Synthesized Probe
  source 1..80: mol_type = other DNA
gccgagcctccagggttacctttcggttctgtctgtagaggaaccgccctgggcttccacctggaacggggtccttggcg

SEQ ID NO: 104318 - DNA, 80 bp, synthetic construct; identical to SEQ ID NO: 36304
  misc_feature 1..80: note = Artificially Synthesized Probe
  source 1..80: mol_type = other DNA

SEQ ID NO: 104319 - DNA, 80 bp, synthetic construct
  misc_feature 1..80: note = Artificially Synthesized Probe
  source 1..80: mol_type = other DNA
caggcctccttgggccccttctcttcccagcaggcatcccagcccccacctccggggggcagcactggcattcacggggc

SEQ ID NO: 104320 - DNA, 80 bp, synthetic construct
  misc_feature 1..80: note = Artificially Synthesized Probe
  source 1..80: mol_type = other DNA
ccaccctgtcgccttgcgccttgctgtgtgcgagctcccaaggcctgacagcggcagtgcgggaggggctggggttttag

SEQ ID NO: 104321 - DNA, 80 bp, synthetic construct; identical to SEQ ID NO: 36305
  misc_feature 1..80: note = Artificially Synthesized Probe
  source 1..80: mol_type = other DNA

SEQ ID NO: 104322 - DNA, 80 bp, synthetic construct
  misc_feature 1..80: note = Artificially Synthesized Probe
  source 1..80: mol_type = other DNA
cctccctcagcagccttggacgcttggccaaggagcacatcgtaagtgcacagttggaaacaggtgcttaggaggcagcc

SEQ ID NO: 104323 - DNA, 80 bp, synthetic construct
  misc_feature 1..80: note = Artificially Synthesized Probe
  source 1..80: mol_type = other DNA
acttgggagtttatgaggtttgctgttgtagcccctcttttccacatagctttccccacttgtccatttatgtcttctaa

SEQ ID NO: 104324 - DNA, 80 bp, synthetic construct
  misc_feature 1..80: note = Artificially Synthesized Probe
  source 1..80: mol_type = other DNA
ttgaggcagatgtctcctgtgttcatgaccatttgtgtttcttttttgaggtactttgtgtcctttgactattctttctt

SEQ ID NO: 104325 - DNA, 80 bp, synthetic construct
  misc_feature 1..80: note = Artificially Synthesized Probe
  source 1..80: mol_type = other DNA
ttttttgcaataaattcatcgttaaagtcccattctttaacctgttttttcccttttggaattaattcgactgcagtagg

SEQ ID NO: 104326 - DNA, 80 bp, synthetic construct; identical to SEQ ID NO: 36306
  misc_feature 1..80: note = Artificially Synthesized Probe
  source 1..80: mol_type = other DNA

SEQ ID NO: 104327 - DNA, 80 bp, synthetic construct
  misc_feature 1..80: note = Artificially Synthesized Probe
  source 1..80: mol_type = other DNA
ctggtaagacgggcttcccccctaatatttttacctgcttttcccttttgtgtgggcagagaggagcccaagggggtggg

SEQ ID NO: 104328 - DNA, 80 bp, synthetic construct
  misc_feature 1..80: note = Artificially Synthesized Probe
  source 1..80: mol_type = other DNA
ccacggctctatgcggttcgccacacctgtctctagaaaacctgtgcagagatgctggcaggcagcaacagtctacagct

SEQ ID NO: 104329 - DNA, 80 bp, synthetic construct
  misc_feature 1..80: note = Artificially Synthesized Probe
  source 1..80: mol_type = other DNA
gtgtgtgctggggtccccacgaagggctgctgtggccactccaagtacttggccaggagcgctctctctgcagatcccag

SEQ ID NO: 104330 - DNA, 80 bp, synthetic construct
  misc_feature 1..80: note = Artificially Synthesized Probe
  source 1..80: mol_type = other DNA
ttcctttgtcttcaggtttctctttccccttcccacttccttcagattttaggtccttttgggaagctgatgactcctga

SEQ ID NO: 104331 - DNA, 80 bp, synthetic construct; identical to SEQ ID NO: 36307
  misc_feature 1..80: note = Artificially Synthesized Probe
  source 1..80: mol_type = other DNA

SEQ ID NO: 104332 - DNA, 80 bp, synthetic construct
  misc_feature 1..80: note = Artificially Synthesized Probe
  source 1..80: mol_type = other DNA
tgccaccacgtccagctaatttttgtatttttagtagagaaggggtttcaccatgttggccagtctggtttcgaactcct

SEQ ID NO: 104333 - DNA, 80 bp, synthetic construct
  misc_feature 1..80: note = Artificially Synthesized Probe
  source 1..80: mol_type = other DNA
tatcatccactgaatcattattttgaaatcctgaagttttccttgtgcctacatgagaatacggtaagttaagttcagga

SEQ ID NO: 104334 - DNA, 80 bp, synthetic construct
  misc_feature 1..80: note = Artificially Synthesized Probe
  source 1..80: mol_type = other DNA
gaggttgaggtaggaggattacctgagccttggaagttgaagctgcagtgagcagagagcttgccactgccccccagcct

SEQ ID NO: 104335 - DNA, 80 bp, synthetic construct; identical to SEQ ID NO: 36308
  misc_feature 1..80: note = Artificially Synthesized Probe
  source 1..80: mol_type = other DNA

SEQ ID NO: 104336 - DNA, 80 bp, synthetic construct; identical to SEQ ID NO: 36258
  misc_feature 1..80: note = Artificially Synthesized Probe
  source 1..80: mol_type = other DNA

SEQ ID NO: 104337 - DNA, 80 bp, synthetic construct
  misc_feature 1..80: note = Artificially Synthesized Probe
  source 1..80: mol_type = other DNA
tctacagacagcctggacctgtcgcttggcctgtgtcccctggcttctcatcacggatgatgttcttttttttttgaggc

SEQ ID NO: 104338 - DNA, 80 bp, synthetic construct
  misc_feature 1..80: note = Artificially Synthesized Probe
  source 1..80: mol_type = other DNA
tgaagacagggtttcactatgacttgaggccatggcaccaagcagtgccagggcaatagtcatatcttcacagcactcac

SEQ ID NO: 104339 - DNA, 80 bp, synthetic construct
  misc_feature 1..80: note = Artificially Synthesized Probe
  source 1..80: mol_type = other DNA
ccacaggaagagagagaggaaagaaaccagtctcgcttctgagcctttgttaaaaatgttgaatgttgtgaatactttgt

SEQ ID NO: 104340 - DNA, 80 bp, synthetic construct; identical to SEQ ID NO: 36309
  misc_feature 1..80: note = Artificially Synthesized Probe
  source 1..80: mol_type = other DNA

SEQ ID NO: 104341 - DNA, 80 bp, synthetic construct
  misc_feature 1..80: note = Artificially Synthesized Probe
  source 1..80: mol_type = other DNA
aaaagaaagagacaagctctcactatgttacccaggctggtctcgaactgctgggctgaagcattcctctcgcttatgac

SEQ ID NO: 104342 - DNA, 80 bp, synthetic construct
  misc_feature 1..80: note = Artificially Synthesized Probe
  source 1..80: mol_type = other DNA
gcatttctcctgcctcagcctcccgaggagctgggattacaggcgtgtaccaccacacccggctgagttttgtgtttata

SEQ ID NO: 104343 - DNA, 80 bp, synthetic construct
  misc_feature 1..80: note = Artificially Synthesized Probe
  source 1..80: mol_type = other DNA
tgatatccatgaattgatctgtggaaaccgtagaatgaaatttgtcaacgtttggaagctttacatcattcagcccccat

SEQ ID NO: 104344 - DNA, 80 bp, synthetic construct; identical to SEQ ID NO: 36310
  misc_feature 1..80: note = Artificially Synthesized Probe
  source 1..80: mol_type = other DNA

SEQ ID NO: 104345 - DNA, 80 bp, synthetic construct
  misc_feature 1..80: note = Artificially Synthesized Probe
  source 1..80: mol_type = other DNA
ctccttatcagccgaacaggagaggcctgtgcagcgcacagagtggcacactctcctcattcattatttttgttttggaa

SEQ ID NO: 104346 - DNA, 80 bp, synthetic construct
  misc_feature 1..80: note = Artificially Synthesized Probe
  source 1..80: mol_type = other DNA
tgtctcagttttaatttcctgcgtagtacatatcagttgatctgaaagctctttggggtcttccacagaggtaaagagtg

SEQ ID NO: 104347 - DNA, 80 bp, synthetic construct
  misc_feature 1..80: note = Artificially Synthesized Probe
  source 1..80: mol_type = other DNA
gggcgtggcaggtgctttgccagtggctttgggcttggatccttgacaatgctctttttggggtctgggtgagggagggt

SEQ ID NO: 104348 - DNA, 80 bp, synthetic construct; identical to SEQ ID NO: 36311
  misc_feature 1..80: note = Artificially Synthesized Probe
  source 1..80: mol_type = other DNA

SEQ ID NO: 104349 - DNA, 80 bp, synthetic construct
  misc_feature 1..80: note = Artificially Synthesized Probe
  source 1..80: mol_type = other DNA
gagggagggctccaaggacttgctggctggtccccagatgccagcactcctgcatcttcccctcctctcctggcctgtca

SEQ ID NO: 104350 - DNA, 80 bp, synthetic construct
  misc_feature 1..80: note = Artificially Synthesized Probe
  source 1..80: mol_type = other DNA
gggtacctgtaatcccagctactcaggaggctgagacaggagaatcgcttgaacccaggaggcagaggttacactgggcc

SEQ ID NO: 104351 - DNA, 80 bp, synthetic construct
  misc_feature 1..80: note = Artificially Synthesized Probe
  source 1..80: mol_type = other DNA
ccagtggagctttgcccgcagtctctgtccatgcaccctgggccaccggggagtggaattgtccatttcattgtctctct

SEQ ID NO: 104352 - DNA, 80 bp, synthetic construct; identical to SEQ ID NO: 36312
  misc_feature 1..80: note = Artificially Synthesized Probe
  source 1..80: mol_type = other DNA

SEQ ID NO: 104353 - DNA, 80 bp, synthetic construct
  misc_feature 1..80: note = Artificially Synthesized Probe
  source 1..80: mol_type = other DNA
ttgtgtcactgaattcctcttctgggaatttttagtttgtgtcattttgttgagttttctgttgggttccaagcctctcg

SEQ ID NO: 104354 - DNA, 80 bp, synthetic construct
  misc_feature 1..80: note = Artificially Synthesized Probe
  source 1..80: mol_type = other DNA
ctctcagccaggaaggcggcccctcccacacaggttgcagggatgggctgctgtgttcttctggtttttctctccttcga

SEQ ID NO: 104355 - DNA, 80 bp, synthetic construct
  misc_feature 1..80: note = Artificially Synthesized Probe
  source 1..80: mol_type = other DNA
gcctgccccggtgtaatttatgatgaattttcctttgttgttcctctgcgctgttgcctggtcacaggcctgtctgtcag

SEQ ID NO: 104356 - DNA, 80 bp, synthetic construct
  misc_feature 1..80: note = Artificially Synthesized Probe
  source 1..80: mol_type = other DNA
cctggtgcgagaggagggctgcacttgcccgcatgccacacactcctcttgcttcagacccacaggatgggatgtgtgtg

SEQ ID NO: 104357 - DNA, 80 bp, synthetic construct; identical to SEQ ID NO: 36313
  misc_feature 1..80: note = Artificially Synthesized Probe
  source 1..80: mol_type = other DNA

SEQ ID NO: 104358 - DNA, 80 bp, synthetic construct
  misc_feature 1..80: note = Artificially Synthesized Probe
  source 1..80: mol_type = other DNA
aatacaaaaaattagctgggcgtggtggtgcgcacctgtagtcccagctacttgggaggctgaggcaggagcatcaatca

SEQ ID NO: 104359 - DNA, 80 bp, synthetic construct
  misc_feature 1..80: note = Artificially Synthesized Probe
  source 1..80: mol_type = other DNA
cagatagaacacaaaccagtaactgttagctttaaccacatgaggtaaactgcagacattaaaatagtatcttggggccg

SEQ ID NO: 104360 - DNA, 80 bp, synthetic construct
  misc_feature 1..80: note = Artificially Synthesized Probe
  source 1..80: mol_type = other DNA
tacatggaaacccctgtggctgtacagtcttttctgaccagtctgctgggttttttgttatttgttttttgtttttgaga

SEQ ID NO: 104361 - DNA, 80 bp, synthetic construct
  misc_feature 1..80: note = Artificially Synthesized Probe
  source 1..80: mol_type = other DNA
tacaaaaaaattagcctggcgggcacagtggctcacgcctataatcccagcactttgggaggccgaggcgggtggatcac

SEQ ID NO: 104362 - DNA, 80 bp, synthetic construct; identical to SEQ ID NO: 36314
  misc_feature 1..80: note = Artificially Synthesized Probe
  source 1..80: mol_type = other DNA

SEQ ID NO: 104363 - DNA, 80 bp, synthetic construct
  misc_feature 1..80: note = Artificially Synthesized Probe
  source 1..80: mol_type = other DNA
tttctgccgtctctgaataaaagtgttttactatgatggaaaaaccagaggagatgttcttacgtccaacttgggtctgt

SEQ ID NO: 104364 - DNA, 80 bp, synthetic construct
  misc_feature 1..80: note = Artificially Synthesized Probe
  source 1..80: mol_type = other DNA
gcagcaatgacctgtgtcacctgcccgtttctacagcacggtcctcccccaccttttccccgctgtgtggatgtcactgg

SEQ ID NO: 104365 - DNA, 80 bp, synthetic construct
  misc_feature 1..80: note = Artificially Synthesized Probe
  source 1..80: mol_type = other DNA
gctatggggagttcgtgtggcaggaggagcgtggagaatttctgtttgtgattgtcatgggagcatctctttcttgtttc

SEQ ID NO: 104366 - DNA, 80 bp, synthetic construct; identical to SEQ ID NO: 36315
  misc_feature 1..80: note = Artificially Synthesized Probe
  source 1..80: mol_type = other DNA

SEQ ID NO: 104367 - DNA, 80 bp, synthetic construct
  misc_feature 1..80: note = Artificially Synthesized Probe
  source 1..80: mol_type = other DNA
aagggttgttctttatttttttctttgagatggagtcttgctctgtcccccaggctagagtgcagtggcgcgatctcggc

SEQ ID NO: 104368 - DNA, 80 bp, synthetic construct
  misc_feature 1..80: note = Artificially Synthesized Probe
  source 1..80: mol_type = other DNA
gacctcgtgatccacccgtctcagccttccaaagtgctgggattacaggcgtgagccacggcgcccggccgggttgttct

SEQ ID NO: 104369 - DNA, 80 bp, synthetic construct; identical to SEQ ID NO: 36316
  misc_feature 1..80: note = Artificially Synthesized Probe
  source 1..80: mol_type = other DNA

SEQ ID NO: 104370 - DNA, 80 bp, synthetic construct
  misc_feature 1..80: note = Artificially Synthesized Probe
  source 1..80: mol_type = other DNA
tctgcgccatctcagcagcagaggcctgtgctgcatcccctgtgaccttagaaactgggcctggtggggcaggaagtccc

SEQ ID NO: 104371 - DNA, 80 bp, synthetic construct
  misc_feature 1..80: note = Artificially Synthesized Probe
  source 1..80: mol_type = other DNA
cagctgttgctcacagaaggaccacatttatattatgtggatcctgtcaacaaagttctgaaaggtgaaattccttggtc

SEQ ID NO: 104372 - DNA, 80 bp, synthetic construct
  misc_feature 1..80: note = Artificially Synthesized Probe
  source 1..80: mol_type = other DNA
tttgtaattttagtagagaccgggttttgccatgttggccaggctggtctcgagctcctgacctcaggtgatccgcccac

SEQ ID NO: 104373 - DNA, 80 bp, synthetic construct
  misc_feature 1..80: note = Artificially Synthesized Probe
  source 1..80: mol_type = other DNA
ctgcctcgccctttccgacatcccagacgcccacactagtggctcagtcctgagggggcaggggacaccctgtgcttgtt

SEQ ID NO: 104374 - DNA, 80 bp, synthetic construct
  misc_feature 1..80: note = Artificially Synthesized Probe
  source 1..80: mol_type = other DNA
aacactaaacggcttctgtcttcgcagcctaacaggacgtattatctgatggaccccagcgggaacgcacacaagtggtg

SEQ ID NO: 104375 - DNA, 80 bp, synthetic construct; identical to SEQ ID NO: 36317
  misc_feature 1..80: note = Artificially Synthesized Probe
  source 1..80: mol_type = other DNA

SEQ ID NO: 104376 - DNA, 80 bp, synthetic construct
  misc_feature 1..80: note = Artificially Synthesized Probe
  source 1..80: mol_type = other DNA
ttttcctagcatcagtccgaaccatgcgcccgccctgccccaactgtgtgctggtcctgctgtggccgaggggaccgggt

SEQ ID NO: 104377 - DNA, 80 bp, synthetic construct
  misc_feature 1..80: note = Artificially Synthesized Probe
  source 1..80: mol_type = other DNA
cattacatatccctgtggtggctctggtggcagctttctgtggcccctgctgtgttggcaggcaggtttgcgtggtgagg

SEQ ID NO: 104378 - DNA, 80 bp, synthetic construct
  misc_feature 1..80: note = Artificially Synthesized Probe
  source 1..80: mol_type = other DNA
gctggctcactgcacgagagagtcctgccccgagccctaggtggggccaggaggtgccttggagaagccagccagagcag

SEQ ID NO: 104379 - DNA, 80 bp, synthetic construct; identical to SEQ ID NO: 36318
  misc_feature 1..80: note = Artificially Synthesized Probe
  source 1..80: mol_type = other DNA

SEQ ID NO: 104380 - DNA, 80 bp, synthetic construct
  misc_feature 1..80: note = Artificially Synthesized Probe
  source 1..80: mol_type = other DNA
tgctttggtggccttgccccgctctgcagcacagacaggccagatgcatttgtcctttgcctagctactccccaggtaga

SEQ ID NO: 104381 - DNA, 80 bp, synthetic construct
  misc_feature 1..80: note = Artificially Synthesized Probe
  source 1..80: mol_type = other DNA
tcacaggtgactcagcagtgaccctgtgtgccaggccagatccaaactgagagggaaggtgtcgtttttacactgctaat

SEQ ID NO: 104382 - DNA, 80 bp, synthetic construct; identical to SEQ ID NO: 36319
  misc_feature 1..80: note = Artificially Synthesized Probe
  source 1..80: mol_type = other DNA

SEQ ID NO: 104383 - DNA, 80 bp, synthetic construct
  misc_feature 1..80: note = Artificially Synthesized Probe
  source 1..80: mol_type = other DNA
atccatgcatgtggagtcaacctatggttggggatggcagactgtatgtactctcctgataggtggttacaaagtgtttc

SEQ ID NO: 104384 - DNA, 80 bp, synthetic construct
  misc_feature 1..80: note = Artificially Synthesized Probe
  source 1..80: mol_type = other DNA
tcagggcgtctggttatagggaaacaagtggagcagggacgtggctttaattggagcactcggctgggctgcttggggag

SEQ ID NO: 104385 - DNA, 80 bp, synthetic construct
  misc_feature 1..80: note = Artificially Synthesized Probe
  source 1..80: mol_type = other DNA
tctgtgggtcacctttctcctcacccagccccttgctcttcccttttgaaaggcccgtgtgttttctttccttaccctgt

SEQ ID NO: 104386 - DNA, 80 bp, synthetic construct
  misc_feature 1..80: note = Artificially Synthesized Probe
  source 1..80: mol_type = other DNA
ttcacctgctgtttaatagacttggggccatgtgcctccccacacatgggcaaggacaggtggaatgtcgggaccacact

SEQ ID NO: 104387 - DNA, 80 bp, synthetic construct
  misc_feature 1..80: note = Artificially Synthesized Probe
  source 1..80: mol_type = other DNA
gtgtagagcacaagcctctccaccctagagaaatgcctctgtaccacggctaccatgtggaaccttaacttgcagaaggc

SEQ ID NO: 104388 - DNA, 80 bp, synthetic construct; identical to SEQ ID NO: 36320
  misc_feature 1..80: note = Artificially Synthesized Probe
  source 1..80: mol_type = other DNA

SEQ ID NO: 104389 - DNA, 80 bp, synthetic construct
  misc_feature 1..80: note = Artificially Synthesized Probe
  source 1..80: mol_type = other DNA
agtcattgtccatttactataatttatctgaccatttccctactgtaaaatacttaagacggtttctgatttttccacta

SEQ ID NO: 104390 - DNA, 80 bp, synthetic construct
  misc_feature 1..80: note = Artificially Synthesized Probe
  source 1..80: mol_type = other DNA
gcagaaccaccttagttgtgtcttacagattctgaacaaatcggtttctgataagccatgtgttccaaagaatgtctgaa

SEQ ID NO: 104391 - DNA, 80 bp, synthetic construct
  misc_feature 1..80: note = Artificially Synthesized Probe
  source 1..80: mol_type = other DNA
tggcagaatcttgtacttcgtgtccacaatggtactgaatttgcatctgcacagtcagcagagataacaagtgttgaact

SEQ ID NO: 104392 - DNA, 80 bp, synthetic construct; identical to SEQ ID NO: 36321
  misc_feature 1..80: note = Artificially Synthesized Probe
  source 1..80: mol_type = other DNA

SEQ ID NO: 104393 - DNA, 80 bp, synthetic construct
  misc_feature 1..80: note = Artificially Synthesized Probe
  source 1..80: mol_type = other DNA
accacccaaatttggttggattcttcatttctccactgtagttggggtccattgattgtgcaggggaacgtgcaggaggt

SEQ ID NO: 104394 - DNA, 80 bp, synthetic construct; identical to SEQ ID NO: 36259
  misc_feature 1..80: note = Artificially Synthesized Probe
  source 1..80: mol_type = other DNA

SEQ ID NO: 104395 - DNA, 80 bp, synthetic construct
  misc_feature 1..80: note = Artificially Synthesized Probe
  source 1..80: mol_type = other DNA
gctgtgagaatacggtgaaggtactttgttctggaagatgttgtcatacacttttccccagttattttcaaacttgacat

SEQ ID NO: 104396 - DNA, 80 bp, synthetic construct; identical to SEQ ID NO: 36322
  misc_feature 1..80: note = Artificially Synthesized Probe
  source 1..80: mol_type = other DNA

SEQ ID NO: 104397 - DNA, 80 bp, synthetic construct
  misc_feature 1..80: note = Artificially Synthesized Probe
  source 1..80: mol_type = other DNA
gcctctattacgactgtaagtaagttggatgttggcaaaattaaattgttacagtatttagagctgctgtagctgttcct

SEQ ID NO: 104398 - DNA, 80 bp, synthetic construct
  misc_feature 1..80: note = Artificially Synthesized Probe
  source 1..80: mol_type = other DNA
tacacttttgtatttttattcttatataaggttatttgctggctattgttggcctctagttcagtctgtgttatttaaat

SEQ ID NO: 104399 - DNA, 80 bp, synthetic construct
  misc_feature 1..80: note = Artificially Synthesized Probe
  source 1..80: mol_type = other DNA
tataatttaatgaatctgtttatcctttttttttttccaaatacttgtgctttaggtgtagttaccagatgatgaatttt

SEQ ID NO: 104400 - DNA, 80 bp, synthetic construct
  misc_feature 1..80: note = Artificially Synthesized Probe
  source 1..80: mol_type = other DNA
atatccctagccttttcacctggattctaccagttgttaaccttttccatatttgcttgtatacattaccccctcacctc

SEQ ID NO: 104401 - DNA, 80 bp, synthetic construct
  misc_feature 1..80: note = Artificially Synthesized Probe
  source 1..80: mol_type = other DNA
cggctaatttttttgtatttttagtagagacggggtttcaccctgttagctaggatggaattgatctcctgacctcgtga

SEQ ID NO: 104402 - DNA, 80 bp, synthetic construct; identical to SEQ ID NO: 36260
  misc_feature 1..80: note = Artificially Synthesized Probe
  source 1..80: mol_type = other DNA

SEQ ID NO: 104403 - DNA, 80 bp, synthetic construct; identical to SEQ ID NO: 36253
  misc_feature 1..80: note = Artificially Synthesized Probe
  source 1..80: mol_type = other DNA

SEQ ID NO: 104404 - DNA, 80 bp, synthetic construct
  misc_feature 1..80: note = Artificially Synthesized Probe
  source 1..80: mol_type = other DNA
ggtggaattttattgtaacgtggcattttctaatgcaaaggtgacgtgcagccttcctcagtggtcacctgtcctcctca

SEQ ID NO: 104405 - DNA, 80 bp, synthetic construct
  misc_feature 1..80: note = Artificially Synthesized Probe
  source 1..80: mol_type = other DNA
gctgggactataggcctgtgccaccacacctggctaattttttttgtttgagacggagtctggctctgttccccaggctg

SEQ ID NO: 104406 - DNA, 80 bp, synthetic construct
  misc_feature 1..80: note = Artificially Synthesized Probe
  source 1..80: mol_type = other DNA
tttatattttcagtagagacggcgttttaccatcttggctaggctggtcgcgaactcctaatgtcatgattcacccgcct

SEQ ID NO: 104407 - DNA, 80 bp, synthetic construct; identical to SEQ ID NO: 36261
  misc_feature 1..80: note = Artificially Synthesized Probe
  source 1..80: mol_type = other DNA

SEQ ID NO: 104408 - DNA, 80 bp, synthetic construct
  misc_feature 1..80: note = Artificially Synthesized Probe
  source 1..80: mol_type = other DNA
tacaggattcacaatctggatttgtctcattgtttccttgttagattaggttcaggctaagtatttatggcaagaatact

SEQ ID NO: 104409 - DNA, 80 bp, synthetic construct
  misc_feature 1..80: note = Artificially Synthesized Probe
  source 1..80: mol_type = other DNA
caagtgcctaccactgcgcccggctaatttttgtgtttttagtagagacggggtttcaccatcttggttaggctaatctt

SEQ ID NO: 104410 - DNA, 80 bp, synthetic construct
  misc_feature 1..80: note = Artificially Synthesized Probe
  source 1..80: mol_type = other DNA
gctgggattacaggctcctgccaccatgctgggctaatttgtgtatttttagtagagatggggtttcaccatgttggcca

SEQ ID NO: 104411 - DNA, 80 bp, synthetic construct
  misc_feature 1..80: note = Artificially Synthesized Probe
  source 1..80: mol_type = other DNA
ctgcttgggcaaggtgccatgaggcttttcctaggccttgactttgctgtagcttctaaggtgtcctgtggcggcaaaag

SEQ ID NO: 104412 - DNA, 80 bp, synthetic construct; identical to SEQ ID NO: 36262
  misc_feature 1..80: note = Artificially Synthesized Probe
  source 1..80: mol_type = other DNA

SEQ ID NO: 104413 - DNA, 80 bp, synthetic construct
  misc_feature 1..80: note = Artificially Synthesized Probe
  source 1..80: mol_type = other DNA
acgagctaggaaggctgacggctgctcatttccccccatgtggacctcatcagggggtccttcctgagggcgagcgctag

SEQ ID NO: 104414 - DNA, 80 bp, synthetic construct
  misc_feature 1..80: note = Artificially Synthesized Probe
  source 1..80: mol_type = other DNA
ttgtctttcatggcttttttccatcggtcagaattacagtcttttgattgtatgtacgtacctggttattatcagatatc

SEQ ID NO: 104415 - DNA, 80 bp, synthetic construct
  misc_feature 1..80: note = Artificially Synthesized Probe
  source 1..80: mol_type = other DNA
tatgccttgtatgcgatgtgcagtgggtgatggaagaacgtctacatggctttaacatttgatttaaaaggcaaatattt

SEQ ID NO: 104416 - DNA, 80 bp, synthetic construct; identical to SEQ ID NO: 36263
  misc_feature 1..80: note = Artificially Synthesized Probe
  source 1..80: mol_type = other DNA

SEQ ID NO: 104417 - DNA, 80 bp, synthetic construct
  misc_feature 1..80: note = Artificially Synthesized Probe
  source 1..80: mol_type = other DNA
ccggcctttgtggggctgcttcagagagccgggcagagtctgggccccaacgtggactagcaggggaggagctctcctgg

SEQ ID NO: 104418 - DNA, 80 bp, synthetic construct
  misc_feature 1..80: note = Artificially Synthesized Probe
  source 1..80: mol_type = other DNA
ccgaccatggcctcgcgctggtggcggtggcggcgcggctgctcctggaagccggcggcgcggagccccgggcccggctc

SEQ ID NO: 104419 - DNA, 80 bp, synthetic construct
  misc_feature 1..80: note = Artificially Synthesized Probe
  source 1..80: mol_type = other DNA
tgtccctctccttcccctctatgtccttctagtctgcctcttgtcagtccccactgccccaggccaggcaattccatgcc

SEQ ID NO: 104420 - DNA, 80 bp, synthetic construct
  misc_feature 1..80: note = Artificially Synthesized Probe
  source 1..80: mol_type = other DNA
gtcttactttacctttgtgacctctgtgtctgttacagtgcctggcactaagtcggtaatttactgaatgaacgatgggc

SEQ ID NO: 104421 - DNA, 80 bp, synthetic construct; identical to SEQ ID NO: 36334
  misc_feature 1..80: note = Artificially Synthesized Probe
  source 1..80: mol_type = other DNA

SEQ ID NO: 104422 - DNA, 80 bp, synthetic construct
  misc_feature 1..80: note = Artificially Synthesized Probe
  source 1..80: mol_type = other DNA
cccatgccttatatgggctctatgcgcttacgtgggcctctatgaaccctcaaaatgtcttttgccaaataaaggccaag

SEQ ID NO: 104423 - DNA, 80 bp, synthetic construct
  misc_feature 1..80: note = Artificially Synthesized Probe
  source 1..80: mol_type = other DNA
aattaaaataaaaaatttaaaaaaacaactttgccaccctacccatcacaccccacccgcctgacctgcttcacaggctc

SEQ ID NO: 104424 - DNA, 80 bp, synthetic construct
  misc_feature 1..80: note = Artificially Synthesized Probe
  source 1..80: mol_type = other DNA
ttctggtgtctgattctgtcagcggggcaggtggcagtacctgttctagcattcaggccacttggggctgatccacgcat

SEQ ID NO: 104425 - DNA, 80 bp, synthetic construct
  misc_feature 1..80: note = Artificially Synthesized Probe
  source 1..80: mol_type = other DNA
tcccaacactttgggaggccgaggcgggtggatcacctgatgtcaggagtttaagaccagcctggccaacgtggtgaaat

SEQ ID NO: 104426 - DNA, 80 bp, synthetic construct
  misc_feature 1..80: note = Artificially Synthesized Probe
  source 1..80: mol_type = other DNA
gtaatcccagcactttgggaggctgaggtgggagaatcggttgaggccaggagtttgggaccagcctaggcaacatagca

SEQ ID NO: 104427 - DNA, 80 bp, synthetic construct; identical to SEQ ID NO: 36335
  misc_feature 1..80: note = Artificially Synthesized Probe
  source 1..80: mol_type = other DNA

SEQ ID NO: 104428 - DNA, 80 bp, synthetic construct
  misc_feature 1..80: note = Artificially Synthesized Probe
  source 1..80: mol_type = other DNA
aatattcatcataacaactcccggtgagctctttttttcattcctttcttgtttttatatttgggaagtctttcttcccg

SEQ ID NO: 104429 - DNA, 80 bp, synthetic construct
  misc_feature 1..80: note = Artificially Synthesized Probe
  source 1..80: mol_type = other DNA
actaaaaatacaaaaaaaattagccgggcgtggtggcaggtgcctgtaatcccagctacttgggaggctgaggcaggaga

SEQ ID NO: 104430 - DNA, 80 bp, synthetic construct
  misc_feature 1..80: note = Artificially Synthesized Probe
  source 1..80: mol_type = other DNA
gtcactcaggaatctagtctggcatcttttttttttttgagacggagtcttgctctgtcgcccaggctggagtgcagtgg

SEQ ID NO: 104431 - DNA, 80 bp, synthetic construct; identical to SEQ ID NO: 36336
  misc_feature 1..80: note = Artificially Synthesized Probe
  source 1..80: mol_type = other DNA

SEQ ID NO: 104432 - DNA, 80 bp, synthetic construct; identical to SEQ ID NO: 36340
  misc_feature 1..80: note = Artificially Synthesized Probe
  source 1..80: mol_type = other DNA

SEQ ID NO: 104433 - DNA, 80 bp, synthetic construct
  misc_feature 1..80: note = Artificially Synthesized Probe
  source 1..80: mol_type = other DNA
tgagaggactctttgtagccaaggcaatccttgaagaggctaagaaatgaaggccaacaggtaccaaccatacctgatac

SEQ ID NO: 104434 - DNA, 80 bp, synthetic construct
  misc_feature 1..80: note = Artificially Synthesized Probe
  source 1..80: mol_type = other DNA
caattacatcatataatctattgatggaaattccagtagaccatgatgtactaatacatctccctagtgttgaacatttg

SEQ ID NO: 104435 - DNA, 80 bp, synthetic construct; identical to SEQ ID NO: 36337
  misc_feature 1..80: note = Artificially Synthesized Probe
  source 1..80: mol_type = other DNA

SEQ ID NO: 104436 - DNA, 80 bp, synthetic construct
  misc_feature 1..80: note = Artificially Synthesized Probe
  source 1..80: mol_type = other DNA
acattgttctttgttgggggtcactgggggctgccatgtgcattacaggatgtttagcagcatcgctgactctacctact

SEQ ID NO: 104437 - DNA, 80 bp, synthetic construct
  misc_feature 1..80: note = Artificially Synthesized Probe
  source 1..80: mol_type = other DNA
tgggcaacagtgtgagaccctatctctaaaaaatctaaagcaaaaaagacgtttggagaccaagtggcagctgggcaact

SEQ ID NO: 104438 - DNA, 80 bp, synthetic construct
  misc_feature 1..80: note = Artificially Synthesized Probe
  source 1..80: mol_type = other DNA
ctcagaaataaacatgggaaggaaatttttttttttactgctttaagtactatcacccactgtccccataattggaagtt

SEQ ID NO: 104439 - DNA, 80 bp, synthetic construct
  misc_feature 1..80: note = Artificially Synthesized Probe
  source 1..80: mol_type = other DNA
tgcacgctaccacgcccagccaattttgtgtttttagtagagataggatttcgccatgttggccaggctggtctcgaaca

SEQ ID NO: 104440 - DNA, 80 bp, synthetic construct; identical to SEQ ID NO: 36338
  misc_feature 1..80: note = Artificially Synthesized Probe
  source 1..80: mol_type = other DNA

SEQ ID NO: 104441 - DNA, 80 bp, synthetic construct
  misc_feature 1..80: note = Artificially Synthesized Probe
  source 1..80: mol_type = other DNA
cacttaaaggactaaatatgtaggtattatttccatgccacttaagaagaagggatgaggcttctggagagctgggccat

SEQ ID NO: 104442 - DNA, 80 bp, synthetic construct
  misc_feature 1..80: note = Artificially Synthesized Probe
  source 1..80: mol_type = other DNA
ttggtgatgtcataatggagggatactgttttaaacctttgacaatcaaagtttaatggctcttaggaggcttatcagat

SEQ ID NO: 104443 - DNA, 80 bp, synthetic construct
  misc_feature 1..80: note = Artificially Synthesized Probe
  source 1..80: mol_type = other DNA
cacggtgaaaccctgtctctactaaaaatacaaaaaattagctgggcatggtggcacgcacctgtcgtcccagctattcc

SEQ ID NO: 104444 - DNA, 80 bp, synthetic construct; identical to SEQ ID NO: 36339
  misc_feature 1..80: note = Artificially Synthesized Probe
  source 1..80: mol_type = other DNA

SEQ ID NO: 104445 - DNA, 80 bp, synthetic construct
  misc_feature 1..80: note = Artificially Synthesized Probe
  source 1..80: mol_type = other DNA
ggcttacagtttattctcaaagggaagtagggccctgaaaagctcaggaccccgtgtttgttttctctctgaatcttgct

SEQ ID NO: 104446 - DNA, 80 bp, synthetic construct; identical to SEQ ID NO: 36324
  misc_feature 1..80: note = Artificially Synthesized Probe
  source 1..80: mol_type = other DNA

SEQ ID NO: 104447 - DNA, 80 bp, synthetic construct
  misc_feature 1..80: note = Artificially Synthesized Probe
  source 1..80: mol_type = other DNA
ctgttggccttcatttcttagcctcttcaaggattgccttggttacaaagagtcctctcaccttaggctgtgccccttcg

SEQ ID NO: 104448 - DNA, 80 bp, synthetic construct
  misc_feature 1..80: note = Artificially Synthesized Probe
  source 1..80: mol_type = other DNA
gaataaacatcctgtcctttaaacttcatctcagagtctgcctcctgcagaacctaacttgcaacagagctcagcaaaac

SEQ ID NO: 104449 - DNA, 80 bp, synthetic construct
  misc_feature 1..80: note = Artificially Synthesized Probe
  source 1..80: mol_type = other DNA
gagtttgaggctagcctggccaacatggtgaaaccccatctctacaaaaaatataaaaattagccagtcgtggtgacaca

SEQ ID NO: 104450 - DNA, 80 bp, synthetic construct
  misc_feature 1..80: note = Artificially Synthesized Probe
  source 1..80: mol_type = other DNA
agatttctataaaattgcttcactcactgaatgcagcacagttatagtgtctgcatgtttctcagacaagccaaacctac

SEQ ID NO: 104451 - DNA, 80 bp, synthetic construct
  misc_feature 1..80: note = Artificially Synthesized Probe
  source 1..80: mol_type = other DNA
ggataacagactacccaaattgtgctgtacagagatctgttgatatcaattttgcaaatagccaatggcattggattaca

SEQ ID NO: 104452 - DNA, 80 bp, synthetic construct
  misc_feature 1..80: note = Artificially Synthesized Probe
  source 1..80: mol_type = other DNA
aacttttatagcactataaaaaactaaggaaattaccaaagcctatccctgaaaagactgtaacaaaacagccatttagc

SEQ ID NO: 104453 - DNA, 80 bp, synthetic construct; identical to SEQ ID NO: 36341
  misc_feature 1..80: note = Artificially Synthesized Probe
  source 1..80: mol_type = other DNA

SEQ ID NO: 104454 - DNA, 80 bp, synthetic construct
  misc_feature 1..80: note = Artificially Synthesized Probe
  source 1..80: mol_type = other DNA
ttcagcaccctccatgccaggatgaggctgattctgtctgcaaaggaatcaactcctatacttttttttttttttttgtc

SEQ ID NO: 104455 - DNA, 80 bp, synthetic construct
  misc_feature 1..80: note = Artificially Synthesized Probe
  source 1..80: mol_type = other DNA
ggggtttcatcatgttggccaggctagtcttaaactcctgacctcaagtgatccgcctgtctccccctcccaaagtgctg

SEQ ID NO: 104456 - DNA, 80 bp, synthetic construct; identical to SEQ ID NO: 36342
  misc_feature 1..80: note = Artificially Synthesized Probe
  source 1..80: mol_type = other DNA

SEQ ID NO: 104457 - DNA, 80 bp, synthetic construct
  misc_feature 1..80: note = Artificially Synthesized Probe
  source 1..80: mol_type = other DNA
gctaacaaatctatgactgttaggatcaagttaaaaaaattcccactgaagagagacagactttattctgagccttacgt

SEQ ID NO: 104458 - DNA, 80 bp, synthetic construct
  misc_feature 1..80: note = Artificially Synthesized Probe
  source 1..80: mol_type = other DNA
cacgacccccagctaatttttgtatttttagtagagacggcatttcaccatgttgcccaggctggtctggaactcctgac

SEQ ID NO: 104459 - DNA, 80 bp, synthetic construct
  misc_feature 1..80: note = Artificially Synthesized Probe
  source 1..80: mol_type = other DNA
atccctccctacacactgggggtttacttgcaatttaagacttcacattttatattagtatgaacagggaaaatatattt

SEQ ID NO: 104460 - DNA, 80 bp, synthetic construct
  misc_feature 1..80: note = Artificially Synthesized Probe
  source 1..80: mol_type = other DNA
tggatcatgtgaggtcatgagtttgagaccagccttgccaacatggcaaaaccccatctctactaaaaatacaaaaatta

SEQ ID NO: 104461 - DNA, 80 bp, synthetic construct
  misc_feature 1..80: note = Artificially Synthesized Probe
  source 1..80: mol_type = other DNA
aattttttaaatctaatgaaggaggaaagaaaagtcctgacaggcatgctgaatcatagcatactcttgcaggtgtgaag

SEQ ID NO: 104462 - DNA, 80 bp, synthetic construct; identical to SEQ ID NO: 36343
  misc_feature 1..80: note = Artificially Synthesized Probe
  source 1..80: mol_type = other DNA

SEQ ID NO: 104463 - DNA, 80 bp, synthetic construct
  misc_feature 1..80: note = Artificially Synthesized Probe
  source 1..80: mol_type = other DNA
tgtgttacagtaccaaataacatttcagtttcatcctgatttcatcagtcaacaatttagccatgcaaaatgacattttt

SEQ ID NO: 104464 - DNA, 80 bp, synthetic construct
  misc_feature 1..80: note = Artificially Synthesized Probe
  source 1..80: mol_type = other DNA
catgcctggctagtttttgtatttttagtggagacgtggtttcgtcatgttggccaggctggtctcgaactcctgacctc

SEQ ID NO: 104465 - DNA, 80 bp, synthetic construct; identical to SEQ ID NO: 36344
  misc_feature 1..80: note = Artificially Synthesized Probe
  source 1..80: mol_type = other DNA

SEQ ID NO: 104466 - DNA, 80 bp, synthetic construct
  misc_feature 1..80: note = Artificially Synthesized Probe
  source 1..80: mol_type = other DNA
aaagtttatatcttttcctgtgcattcaactcaaagaagatagggcctagtaaatttacctgaaaaatatttaagtattc

SEQ ID NO: 104467 - DNA, 80 bp, synthetic construct
  misc_feature 1..80: note = Artificially Synthesized Probe
  source 1..80: mol_type = other DNA
taatctcggctcactgcaacctccacttcccggctcaagtgattctcctgcatcagcctctcaagtagctgggattacag

SEQ ID NO: 104468 - DNA, 80 bp, synthetic construct
  misc_feature 1..80: note = Artificially Synthesized Probe
  source 1..80: mol_type = other DNA
ctacagaagtggtttttatatgctaatttgtccctaccctccactgcttttgttttaatactccccccttagaagaattt

SEQ ID NO: 104469 - DNA, 80 bp, synthetic construct
  misc_feature 1..80: note = Artificially Synthesized Probe
  source 1..80: mol_type = other DNA
tccccgtctgcatgacgacaaggaggaattctgtggactcatgatgccaagatcatgtatttctgatgtgtgtgtcagtg

SEQ ID NO: 104470 - DNA, 80 bp, synthetic construct
  misc_feature 1..80: note = Artificially Synthesized Probe
  source 1..80: mol_type = other DNA
ccccatctctactaaaaatacaaacattagctggatgtggtggtgtgcacatgtaatccaagctacttgggaggctaagg

SEQ ID NO: 104471 - DNA, 80 bp, synthetic construct; identical to SEQ ID NO: 36345
  misc_feature 1..80: note = Artificially Synthesized Probe
  source 1..80: mol_type = other DNA

SEQ ID NO: 104472 - DNA, 80 bp, synthetic construct
  misc_feature 1..80: note = Artificially Synthesized Probe
  source 1..80: mol_type = other DNA
ccttgtgcagatgttcagattcgatttttaaagaaaaagtcatatttcagaatccctctcccttttttcccctctaagat

SEQ ID NO: 104473 - DNA, 80 bp, synthetic construct
  misc_feature 1..80: note = Artificially Synthesized Probe
  source 1..80: mol_type = other DNA
aatgattaaaatgaaatgggggacattccctctgaactgtaaaatttatatctgtgtcctgtcttcttgagcctacttat

SEQ ID NO: 104474 - DNA, 80 bp, synthetic construct; identical to SEQ ID NO: 36346
  misc_feature 1..80: note = Artificially Synthesized Probe
  source 1..80: mol_type = other DNA

SEQ ID NO: 104475 - DNA, 80 bp, synthetic construct
  misc_feature 1..80: note = Artificially Synthesized Probe
  source 1..80: mol_type = other DNA
ggctgaagtgggagaatcacttgaacctgggaggcgaaggttgtgagccaatattgcaccactgcactccagcctgggtg

SEQ ID NO: 104476 - DNA, 80 bp, synthetic construct
  misc_feature 1..80: note = Artificially Synthesized Probe
  source 1..80: mol_type = other DNA
aagaacactgttataaagatgattcttcagcccaataagatcagccagacttctgatcgtttactgtttttttggctaat

SEQ ID NO: 104477 - DNA, 80 bp, synthetic construct
  misc_feature 1..80: note = Artificially Synthesized Probe
  source 1..80: mol_type = other DNA
agttttcacaagctgattgctgagaaggttctaggcggcgtctgttaaaaagcattgctttctgttaattagacatgtgc

SEQ ID NO: 104478 - DNA, 80 bp, synthetic construct; identical to SEQ ID NO: 36347
  misc_feature 1..80: note = Artificially Synthesized Probe
  source 1..80: mol_type = other DNA

SEQ ID NO: 104479 - DNA, 80 bp, synthetic construct
  misc_feature 1..80: note = Artificially Synthesized Probe
  source 1..80: mol_type = other DNA
tatttcatgaggaatcatacgttttacttttgggcttagattacccagattcagtttaattttttaaacatttgtataat

SEQ ID NO: 104480 - DNA, 80 bp, synthetic construct
  misc_feature 1..80: note = Artificially Synthesized Probe
  source 1..80: mol_type = other DNA
attattagcattgggaatatgggaaacagggacttggtttgaggatgcatagatcctgggttgaaggatgagaataaagt

SEQ ID NO: 104481 - DNA, 80 bp, synthetic construct; identical to SEQ ID NO: 36325
  misc_feature 1..80: note = Artificially Synthesized Probe
  source 1..80: mol_type = other DNA

SEQ ID NO: 104482 - DNA, 80 bp, synthetic construct
  misc_feature 1..80: note = Artificially Synthesized Probe
  source 1..80: mol_type = other DNA
gaccagcctggccaacaaggcaaaaccctgtcaccactaaaaaaacacaaaaattagccagcgtacacctgtaatctcag

SEQ ID NO: 104483 - DNA, 80 bp, synthetic construct
  misc_feature 1..80: note = Artificially Synthesized Probe
  source 1..80: mol_type = other DNA
ccttttctctcatagatttatagtattcctggttcattcctatttaattctccttattaaaagaagagatatatgtatac

SEQ ID NO: 104484 - DNA, 80 bp, synthetic construct; identical to SEQ ID NO: 36348
  misc_feature 1..80: note = Artificially Synthesized Probe
  source 1..80: mol_type = other DNA

SEQ ID NO: 104485 - DNA, 80 bp, synthetic construct
  misc_feature 1..80: note = Artificially Synthesized Probe
  source 1..80: mol_type = other DNA
ggcgcgcggggtagctccggggtagctccggggtgggactccggagctgaggggtgctcgcggtgggacggagccgcgcg

SEQ ID NO: 104486 - DNA, 80 bp, synthetic construct
  misc_feature 1..80: note = Artificially Synthesized Probe
  source 1..80: mol_type = other DNA
agggcaggtcaaggacacatgtgccgccttcacctgcctctttcagttctgacagccatctgcttagcacagggctactt

SEQ ID NO: 104487 - DNA, 80 bp, synthetic construct
  misc_feature 1..80: note = Artificially Synthesized Probe
  source 1..80: mol_type = other DNA
ggcttccatgtcatatgctggacctttggtctctaggatctccccggccaggtgaagaaggaactaaaggccaaaggatc

SEQ ID NO: 104488 - DNA, 80 bp, synthetic construct; identical to SEQ ID NO: 36349
  misc_feature 1..80: note = Artificially Synthesized Probe
  source 1..80: mol_type = other DNA

SEQ ID NO: 104489 - DNA, 80 bp, synthetic construct
  misc_feature 1..80: note = Artificially Synthesized Probe
  source 1..80: mol_type = other DNA
aatacaaaaatacctgggcgtggtggtgtacgcttgtagtcccagctactcatgaggctgaggtggggggattgcttgaa

SEQ ID NO: 104490 - DNA, 80 bp, synthetic construct
  misc_feature 1..80: note = Artificially Synthesized Probe
  source 1..80: mol_type = other DNA
aattcaactatttatgcagtagtttataactagttgctaatacagtgtagacatccatcacagtctaaagaagactggaa

SEQ ID NO: 104491 - DNA, 80 bp, synthetic construct
  misc_feature 1..80: note = Artificially Synthesized Probe
  source 1..80: mol_type = other DNA
gaactcttggactcaagccattcccccctcccccccaccccgcttgaggattggcacacggccatgtatttgattcttac

SEQ ID NO: 104492 - DNA, 80 bp, synthetic construct
  misc_feature 1..80: note = Artificially Synthesized Probe
  source 1..80: mol_type = other DNA
tttattgaaaataacatgtatcgtgccatgctctggggtgtgctcagtactagctgagatgattcctagtctgagctccc

SEQ ID NO: 104493 - DNA, 80 bp, synthetic construct; identical to SEQ ID NO: 36350
  misc_feature 1..80: note = Artificially Synthesized Probe
  source 1..80: mol_type = other DNA

SEQ ID NO: 104494 - DNA, 80 bp, synthetic construct
  misc_feature 1..80: note = Artificially Synthesized Probe
  source 1..80: mol_type = other DNA
aagtactgtcccaaatctgtaaccgattattagaaactgggaagagtgacatggtcatctctgagagccagtccagttca

SEQ ID NO: 104495 - DNA, 80 bp, synthetic construct
  misc_feature 1..80: note = Artificially Synthesized Probe
  source 1..80: mol_type = other DNA
ccccacttccacgaagctcccttccagtcagtttcatcattggctctactgctctgatggatttttcagaacgttctgtt

SEQ ID NO: 104496 - DNA, 80 bp, synthetic construct
  misc_feature 1..80: note = Artificially Synthesized Probe
  source 1..80: mol_type = other DNA
ttattcaaccctggtgtttagccaggcaataaagccacctctcaaatgactcctttccttctttataggtgaatttcttc

SEQ ID NO: 104497 - DNA, 80 bp, synthetic construct; identical to SEQ ID NO: 36351
  misc_feature 1..80: note = Artificially Synthesized Probe
  source 1..80: mol_type = other DNA

SEQ ID NO: 104498 - DNA, 80 bp, synthetic construct
  misc_feature 1..80: note = Artificially Synthesized Probe
  source 1..80: mol_type = other DNA
cataatttctctaatgattgatatcacacacactctttctgacacttcaccttttagaaatgaagtgctctgttctttaa

SEQ ID NO: 104499 - DNA, 80 bp, synthetic construct
  misc_feature 1..80: note = Artificially Synthesized Probe
  source 1..80: mol_type = other DNA
acaaagcagtggtgtgatcttggctcactacaacctccacctcccaggttcaggcaattctcctgcctcagcttccctag

SEQ ID NO: 104500 - DNA, 80 bp, synthetic construct
  misc_feature 1..80: note = Artificially Synthesized Probe
  source 1..80: mol_type = other DNA
ttgcacctggccaatacattgcacctggccaatccttctaatatttttacatgaaatataaacaagtcctatttcttcag

SEQ ID NO: 104501 - DNA, 80 bp, synthetic construct; identical to SEQ ID NO: 36352
  misc_feature 1..80: note = Artificially Synthesized Probe
  source 1..80: mol_type = other DNA

SEQ ID NO: 104502 - DNA, 80 bp, synthetic construct
  misc_feature 1..80: note = Artificially Synthesized Probe
  source 1..80: mol_type = other DNA
ggtaaagagagcttttgctcagacctctcagatgaaaaagtctcttgctgttagtgtctctgttttgaaaagtgtcaaga

SEQ ID NO: 104503 - DNA, 80 bp, synthetic construct
  misc_feature 1..80: note = Artificially Synthesized Probe
  source 1..80: mol_type = other DNA
tctatctcgaattgtaatccccaattatatttggggaccagggagggtcaagggagggaccaggtggaggtaattggatc

SEQ ID NO: 104504 - DNA, 80 bp, synthetic construct
  misc_feature 1..80: note = Artificially Synthesized Probe
  source 1..80: mol_type = other DNA
aaattatgtgggttttttttttaaagtgagatggaagaaagtatagacacgagatgctaaataagagaatagcctatttt

SEQ ID NO: 104505 - DNA, 80 bp, synthetic construct
  misc_feature 1..80: note = Artificially Synthesized Probe
  source 1..80: mol_type = other DNA
tactaatatttatccttaagaggatgtgttaagtgaggctcattgataatttcacaatttgagactgcaaacttagaagc

SEQ ID NO: 104506 - DNA, 80 bp, synthetic construct; identical to SEQ ID NO: 36353
  misc_feature 1..80: note = Artificially Synthesized Probe
  source 1..80: mol_type = other DNA

SEQ ID NO: 104507 - DNA, 80 bp, synthetic construct
  misc_feature 1..80: note = Artificially Synthesized Probe
  source 1..80: mol_type = other DNA
ataaagatatgcacctcattcttcaaagattagcagctgaacgaacagtgaacatgttaacgtggctggacccttattaa

SEQ ID NO: 104508 - DNA, 80 bp, synthetic construct
  misc_feature 1..80: note = Artificially Synthesized Probe
  source 1..80: mol_type = other DNA
atgggtggaaatattccagaggtgttatggattcaaaatggctatttttacgtactcttggtatttaaaatgcaaagcca

SEQ ID NO: 104509 - DNA, 80 bp, synthetic construct
  misc_feature 1..80: note = Artificially Synthesized Probe
  source 1..80: mol_type = other DNA
accatttcttcatctcccttcctttttttagtgaaaataatattaaaatctaagagagggctgtctagggggattgtttt

SEQ ID NO: 104510 - DNA, 80 bp, synthetic construct
  misc_feature 1..80: note = Artificially Synthesized Probe
  source 1..80: mol_type = other DNA
acaaaaattagccgggcgtggtggtgcacgcctgtaatgccagctacttgggaagctgaggcaggagaaccgcttgaacc

SEQ ID NO: 104511 - DNA, 80 bp, synthetic construct; identical to SEQ ID NO: 36354
  misc_feature 1..80: note = Artificially Synthesized Probe
  source 1..80: mol_type = other DNA

SEQ ID NO: 104512 - DNA, 80 bp, synthetic construct
  misc_feature 1..80: note = Artificially Synthesized Probe
  source 1..80: mol_type = other DNA
tggcctggaattaatgggctctcttcctattacttgattttcaaagcctcagagtaccactacagaattgcatattgtgg

SEQ ID NO: 104513 - DNA, 80 bp, synthetic construct
  misc_feature 1..80: note = Artificially Synthesized Probe
  source 1..80: mol_type = other DNA
gctgggattacaggtgcacaccaccacatgccacacctggcctcttttttttttacaatattcatatctatctataggcc

SEQ ID NO: 104514 - DNA, 80 bp, synthetic construct
  misc_feature 1..80: note = Artificially Synthesized Probe
  source 1..80: mol_type = other DNA
agtttctgaggcctccccagccattcagaactgtgagtcaattaaacctctttcctataattatagattgcccagtcatg

SEQ ID NO: 104515 - DNA, 80 bp, synthetic construct; identical to SEQ ID NO: 36355
  misc_feature 1..80: note = Artificially Synthesized Probe
  source 1..80: mol_type = other DNA

SEQ ID NO: 104516 - DNA, 80 bp, synthetic construct
  misc_feature 1..80: note = Artificially Synthesized Probe
  source 1..80: mol_type = other DNA
agcactttggaaggccgaggtgggcagattacctgaggtcaagagttcaagaccagcctggccaacatggtaaaacccca

SEQ ID NO: 104517 - DNA, 80 bp, synthetic construct
  misc_feature 1..80: note = Artificially Synthesized Probe
  source 1..80: mol_type = other DNA
cgggcgtagtggcaggcgcctataatcccagctactctggaggctgatacaggagaattgcttgaatccgggaggcggag

SEQ ID NO: 104518 - DNA, 80 bp, synthetic construct
  misc_feature 1..80: note = Artificially Synthesized Probe
  source 1..80: mol_type = other DNA
tctgatggttgtcaaatggctgtttttctattttcatcatttcttctatatcactcttctacaagaaagttggtatccta

SEQ ID NO: 104519 - DNA, 80 bp, synthetic construct
  misc_feature 1..80: note = Artificially Synthesized Probe
  source 1..80: mol_type = other DNA
tggagtgcagtggtgcaatctcagctcactgcaacctccacctcccgggctcaggtgatcctcccacctcagcctcctga

SEQ ID NO: 104520 - DNA, 80 bp, synthetic construct; identical to SEQ ID NO: 36356
  misc_feature 1..80: note = Artificially Synthesized Probe
  source 1..80: mol_type = other DNA

SEQ ID NO: 104521 - DNA, 80 bp, synthetic construct
  misc_feature 1..80: note = Artificially Synthesized Probe
  source 1..80: mol_type = other DNA
cctgttattcactgttctccaaggagcccacattccttttggtggaaaatggtgttaagaaaccagaatttgagtactgg

SEQ ID NO: 104522 - DNA, 80 bp, synthetic construct
  misc_feature 1..80: note = Artificially Synthesized Probe
  source 1..80: mol_type = other DNA
gaggtatcaaacagatagttccaaatccatctaacaccacaggatttgtggtttattccaggattccatctttccatatt

SEQ ID NO: 104523 - DNA, 80 bp, synthetic construct; identical to SEQ ID NO: 36357
  misc_feature 1..80: note = Artificially Synthesized Probe
  source 1..80: mol_type = other DNA

SEQ ID NO: 104524 - DNA, 80 bp, synthetic construct
  misc_feature 1..80: note = Artificially Synthesized Probe
  source 1..80: mol_type = other DNA
tttgcaacctccagcataaatgggttaatagttggttccttttttttttttttttttttttttttgagacggagtcttgc

SEQ ID NO: 104525 - DNA, 80 bp, synthetic construct
  misc_feature 1..80: note = Artificially Synthesized Probe
  source 1..80: mol_type = other DNA
ccacgcccggctaattttttgtatttttagtagagatggggtttcatggtgttagccaggatggtctcgatctcctgacc

SEQ ID NO: 104526 - DNA, 80 bp, synthetic construct; identical to SEQ ID NO: 36326
  misc_feature 1..80: note = Artificially Synthesized Probe
  source 1..80: mol_type = other DNA

SEQ ID NO: 104527 - DNA, 80 bp, synthetic construct
  misc_feature 1..80: note = Artificially Synthesized Probe
  source 1..80: mol_type = other DNA
tcgtgttttggttttgagcgttttgttattgttgctgttgttttgaatgtttgaaacaacgtggctgggcacagtgtctc

SEQ ID NO: 104528 - DNA, 80 bp, synthetic construct
  misc_feature 1..80: note = Artificially Synthesized Probe
  source 1..80: mol_type = other DNA
ggctgaggtgggaggatcacctgagccctgggaggtcgaggctgcagtgagctgtgatcacaccactgcactccagcctg

SEQ ID NO: 104529 - DNA, 80 bp, synthetic construct; identical to SEQ ID NO: 36358
  misc_feature 1..80: note = Artificially Synthesized Probe
  source 1..80: mol_type = other DNA

SEQ ID NO: 104530 - DNA, 80 bp, synthetic construct
  misc_feature 1..80: note = Artificially Synthesized Probe
  source 1..80: mol_type = other DNA
atcacgaggtcaggagttcgagaccagcctggccaacatggtgaaaccccttctccactaaaaatacaaaaattagctgg

SEQ ID NO: 104531 - DNA, 80 bp, synthetic construct
  misc_feature 1..80: note = Artificially Synthesized Probe
  source 1..80: mol_type = other DNA
agctactcgggaggctgaggcacaagaatagcttgaacccgggaggtggaggttgtagtgagccaagatcacgtcactgc

SEQ ID NO: 104532 - DNA, 80 bp, synthetic construct; identical to SEQ ID NO: 36359
  misc_feature 1..80: note = Artificially Synthesized Probe
  source 1..80: mol_type = other DNA

SEQ ID NO: 104533 - DNA, 80 bp, synthetic construct
  misc_feature 1..80: note = Artificially Synthesized Probe
  source 1..80: mol_type = other DNA
gtagaggagaatgtattgcagtggagttttaatttacatctctcctttctgagtgaggtggaacatttttcagatgctta

SEQ ID NO: 104534 - DNA, 80 bp, synthetic construct
  misc_feature 1..80: note = Artificially Synthesized Probe
  source 1..80: mol_type = other DNA
tgcgcccagcccttcccagtctcgttgagacgtggcttgtaaggatgtgatgcaaggtgtgaaccttccccagaaagaag

SEQ ID NO: 104535 - DNA, 80 bp, synthetic construct
  misc_feature 1..80: note = Artificially Synthesized Probe
  source 1..80: mol_type = other DNA
cttcttgtatgttgtgctatgttgcgtccaatttgtggcagttgttttctgttttcctgctacagatctaggcagtactg

SEQ ID NO: 104536 - DNA, 80 bp, synthetic construct
  misc_feature 1..80: note = Artificially Synthesized Probe
  source 1..80: mol_type = other DNA
agtgcagacagactgcagctttatgcttacttggacacattccttgacctcttggaggttctattttgttgcccagcata

SEQ ID NO: 104537 - DNA, 80 bp, synthetic construct
  misc_feature 1..80: note = Artificially Synthesized Probe
  source 1..80: mol_type = other DNA
atttaaaggggaagcagagcataaacgtttggaaaatttgcagcctgaagatgtgatagaaaagaattttctggggagga

SEQ ID NO: 104538 - DNA, 80 bp, synthetic construct; identical to SEQ ID NO: 36360
  misc_feature 1..80: note = Artificially Synthesized Probe
  source 1..80: mol_type = other DNA

SEQ ID NO: 104539 - DNA, 80 bp, synthetic construct
  misc_feature 1..80: note = Artificially Synthesized Probe
  source 1..80: mol_type = other DNA
aggtcaggagttcgagaccagcctgaaaccccgtctctactaaaaatacaaaaattagctgggcgtggtggcatacggag

SEQ ID NO: 104540 - DNA, 80 bp, synthetic construct
  misc_feature 1..80: note = Artificially Synthesized Probe
  source 1..80: mol_type = other DNA
ctgtggctctgtgttgaggaaacagcattaatctcactacaggagactgcttcactatcagttatttctacgtggaaata

SEQ ID NO: 104541 - DNA, 80 bp, synthetic construct
  misc_feature 1..80: note = Artificially Synthesized Probe
  source 1..80: mol_type = other DNA
ctccctgacagcccaggggtcggtgcctgctcatgggaaggtggttgctgttgaaagcagttatgagcttactgttcact

SEQ ID NO: 104542 - DNA, 80 bp, synthetic construct; identical to SEQ ID NO: 36361
  misc_feature 1..80: note = Artificially Synthesized Probe
  source 1..80: mol_type = other DNA

SEQ ID NO: 104543 - DNA, 80 bp, synthetic construct
  misc_feature 1..80: note = Artificially Synthesized Probe
  source 1..80: mol_type = other DNA
caggagactgaggcggaaggaacccttgagcccaggagttcaaggttacagtgagctatgatcgcaccactgtaccccag

SEQ ID NO: 104544 - DNA, 80 bp, synthetic construct
  misc_feature 1..80: note = Artificially Synthesized Probe
  source 1..80: mol_type = other DNA
tcacagcaaccctacaaggtaagtgcttgtgatttctacattgtacagatgagcaagagagattcagtaacatgccgagg

SEQ ID NO: 104545 - DNA, 80 bp, synthetic construct
  misc_feature 1..80: note = Artificially Synthesized Probe
  source 1..80: mol_type = other DNA
aaaggcaactgtgcagtgctccagctggctttctcatggagagtcaacagagacatttcccctccagtagaacacagacc

SEQ ID NO: 104546 - DNA, 80 bp, synthetic construct; identical to SEQ ID NO: 36362
  misc_feature 1..80: note = Artificially Synthesized Probe
  source 1..80: mol_type = other DNA

SEQ ID NO: 104547 - DNA, 80 bp, synthetic construct
  misc_feature 1..80: note = Artificially Synthesized Probe
  source 1..80: mol_type = other DNA
ttagtatctcttcctgaaatgagggatacattgatagagatgattaaagccaacagtaatcgggctagcttgccgagtgc

SEQ ID NO: 104548 - DNA, 80 bp, synthetic construct
  misc_feature 1..80: note = Artificially Synthesized Probe
  source 1..80: mol_type = other DNA
ggcccagggccctgctgctctgtgcaagagcagccctgggacttggtgccctgcttcccagccgtagctaaaaggggcca

SEQ ID NO: 104549 - DNA, 80 bp, synthetic construct
  misc_feature 1..80: note = Artificially Synthesized Probe
  source 1..80: mol_type = other DNA
attttcttagaatttaacaacacaatctgagactgaaattcttgactggaaatgcggttttgtacatgcttggtgtccct

SEQ ID NO: 104550 - DNA, 80 bp, synthetic construct; identical to SEQ ID NO: 36363
  misc_feature 1..80: note = Artificially Synthesized Probe
  source 1..80: mol_type = other DNA

SEQ ID NO: 104551 - DNA, 80 bp, synthetic construct
  misc_feature 1..80: note = Artificially Synthesized Probe
  source 1..80: mol_type = other DNA
agatgggcaaaccaacatcagctgatctgaagctcgggttagccactggtcctgtcctgtttgcctgtcagcaggtaggt

SEQ ID NO: 104552 - DNA, 80 bp, synthetic construct
  misc_feature 1..80: note = Artificially Synthesized Probe
  source 1..80: mol_type = other DNA
tcatttcaccttgctaagactgtttccttatctgtgaaattgagaagatcacctttctcccagggtggttgtgaggatta

SEQ ID NO: 104553 - DNA, 80 bp, synthetic construct
  misc_feature 1..80: note = Artificially Synthesized Probe
  source 1..80: mol_type = other DNA
gcataggaagcatcaagggcctccaagcataagaaattctccggttctagaagtttaatgagactctgctgctctgagag

SEQ ID NO: 104554 - DNA, 80 bp, synthetic construct
  misc_feature 1..80: note = Artificially Synthesized Probe
  source 1..80: mol_type = other DNA
agacattctcacagcctcctccagaccctgccacatggcttgtggctgtactgaatgttacttgaaataagtgagacatt

SEQ ID NO: 104555 - DNA, 80 bp, synthetic construct; identical to SEQ ID NO: 36364
  misc_feature 1..80: note = Artificially Synthesized Probe
  source 1..80: mol_type = other DNA

SEQ ID NO: 104556 - DNA, 80 bp, synthetic construct
  misc_feature 1..80: note = Artificially Synthesized Probe
  source 1..80: mol_type = other DNA
aggctactttggcagcttgctaaggctatgaatggagatgttggggtactcggtaggaacacccaccctcattattacaa

SEQ ID NO: 104557 - DNA, 80 bp, synthetic construct
  misc_feature 1..80: note = Artificially Synthesized Probe
  source 1..80: mol_type = other DNA
cccagttttgacaaaaatttataaaacctccttttgtacattaaggcaagagtgaggaacatttgagccatgtaggtgtt

SEQ ID NO: 104558 - DNA, 80 bp, synthetic construct; identical to SEQ ID NO: 36365
  misc_feature 1..80: note = Artificially Synthesized Probe
  source 1..80: mol_type = other DNA

SEQ ID NO: 104559 - DNA, 80 bp, synthetic construct
  misc_feature 1..80: note = Artificially Synthesized Probe
  source 1..80: mol_type = other DNA
tgaatatatttcagaagaaactaacttactttcccctacacacacaaaggagtaatggctatctctgctttcatatatag

SEQ ID NO: 104560 - DNA, 80 bp, synthetic construct
  misc_feature 1..80: note = Artificially Synthesized Probe
  source 1..80: mol_type = other DNA
tgctgaaggggggagaaccctcatggagaacctctgttaggacagtgcagaaaggaaatgtggggttgcagcccccacac

SEQ ID NO: 104561 - DNA, 80 bp, synthetic construct
  misc_feature 1..80: note = Artificially Synthesized Probe
  source 1..80: mol_type = other DNA
tatggtggaaaccccgtctctactaaaaatacaaaaattagccgggcctggtggtgcatgcctgtaatcccagctactcg

SEQ ID NO: 104562 - DNA, 80 bp, synthetic construct
  misc_feature 1..80: note = Artificially Synthesized Probe
  source 1..80: mol_type = other DNA
aagattactgtacccgaagccatggttttatgtgtgctttgctgggaaatcccagtcatgaggcacctactcatgctcac

SEQ ID NO: 104563 - DNA, 80 bp, synthetic construct
  misc_feature 1..80: note = Artificially Synthesized Probe
  source 1..80: mol_type = other DNA
gaagttagccaagtatgtatttataagttgccttctaataaaacagcaaggttaggctcttttgtggaatacactgtaaa

SEQ ID NO: 104564 - DNA, 80 bp, synthetic construct; identical to SEQ ID NO: 36366
  misc_feature 1..80: note = Artificially Synthesized Probe
  source 1..80: mol_type = other DNA

SEQ ID NO: 104565 - DNA, 80 bp, synthetic construct
  misc_feature 1..80: note = Artificially Synthesized Probe
  source 1..80: mol_type = other DNA
cactgacgatactcaaagaatcatctctgtgtcatgtctttgctattgtaaacaacatacctacttggtggagtagttct

SEQ ID NO: 104566 - DNA, 80 bp, synthetic construct
  misc_feature 1..80: note = Artificially Synthesized Probe
  source 1..80: mol_type = other DNA
cagccagcacttgacagaaactccctgtcttttggaattcctttatttttaacatctctcttaaggggtttcctgataac

SEQ ID NO: 104567 - DNA, 80 bp, synthetic construct
  misc_feature 1..80: note = Artificially Synthesized Probe
  source 1..80: mol_type = other DNA
attggattttgaaagcttcagaaacaaaatggaagtgttttactttctctggtgaaacttttttaattttcaaatatctt

SEQ ID NO: 104568 - DNA, 80 bp, synthetic construct; identical to SEQ ID NO: 36367
  misc_feature 1..80: note = Artificially Synthesized Probe
  source 1..80: mol_type = other DNA

SEQ ID NO: 104569 - DNA, 80 bp, synthetic construct
  misc_feature 1..80: note = Artificially Synthesized Probe
  source 1..80: mol_type = other DNA
ccacatacacattaaggggactggggagtgcccggggaagagtttgatattttgcatattaaaattgcacacatgacatg

SEQ ID NO: 104570 - DNA, 80 bp, synthetic construct
  misc_feature 1..80: note = Artificially Synthesized Probe
  source 1..80: mol_type = other DNA
tgtcaccagatgcctacgagagaatcacatcagtgtcaacgataaaaccttctagatatccagtattggtatgtggtatt

SEQ ID NO: 104571 - DNA, 80 bp, synthetic construct; identical to SEQ ID NO: 36327
  misc_feature 1..80: note = Artificially Synthesized Probe
  source 1..80: mol_type = other DNA

SEQ ID NO: 104572 - DNA, 80 bp, synthetic construct; identical to SEQ ID NO: 36368
  misc_feature 1..80: note = Artificially Synthesized Probe
  source 1..80: mol_type = other DNA

SEQ ID NO: 104573 - DNA, 80 bp, synthetic construct
  misc_feature 1..80: note = Artificially Synthesized Probe
  source 1..80: mol_type = other DNA
cactccagcctggatgacagagcgaaactccatctcaaaaaaaaaaaaaaaaaattaaaaaattagccaggtgcgtgcct

SEQ ID NO: 104574 - DNA, 80 bp, synthetic construct
  misc_feature 1..80: note = Artificially Synthesized Probe
  source 1..80: mol_type = other DNA
gaagttgatttgggctttcctgatttctagtagcttgttttcttcttaaaagacccagtaactaaaggaaattactggtt

SEQ ID NO: 104575 - DNA, 80 bp, synthetic construct
  misc_feature 1..80: note = Artificially Synthesized Probe
  source 1..80: mol_type = other DNA
tcttctaggattactaataccatggtcatggttacaggacaacttatttcatccttcaggttcactgccagggaaaaact

SEQ ID NO: 104576 - DNA, 80 bp, synthetic construct; identical to SEQ ID NO: 36369
  misc_feature 1..80: note = Artificially Synthesized Probe
  source 1..80: mol_type = other DNA

SEQ ID NO: 104577 - DNA, 80 bp, synthetic construct
  misc_feature 1..80: note = Artificially Synthesized Probe
  source 1..80: mol_type = other DNA
tgtttgttctgtctacctctgactcttaattccatggttctcaaccttggcggcacattaaaaataccagggtgggcggg

SEQ ID NO: 104578 - DNA, 80 bp, synthetic construct
  misc_feature 1..80: note = Artificially Synthesized Probe
  source 1..80: mol_type = other DNA
cctgaggtcaggagtttgagaccagcctggccaatatggcaaaaccctgtctctactaacagtacaaaattagccgggtg

SEQ ID NO: 104579 - DNA, 80 bp, synthetic construct
  misc_feature 1..80: note = Artificially Synthesized Probe
  source 1..80: mol_type = other DNA
aaaaaaacaaaaaacactccccagctgatcccagtatgcagtcaatgtcatgcaccgctgctcagatccactctacacac

SEQ ID NO: 104580 - DNA, 80 bp, synthetic construct; identical to SEQ ID NO: 36370
  misc_feature 1..80: note = Artificially Synthesized Probe
  source 1..80: mol_type = other DNA

SEQ ID NO: 104581 - DNA, 80 bp, synthetic construct
  misc_feature 1..80: note = Artificially Synthesized Probe
  source 1..80: mol_type = other DNA
ctcactgcaacctccacctccccaggttcaagcaattctcttgcctcagcctcccgagtagctgggattacaggcgtgca

SEQ ID NO: 104582 - DNA, 80 bp, synthetic construct
  misc_feature 1..80: note = Artificially Synthesized Probe
  source 1..80: mol_type = other DNA
gtttttgattttacaggttcataggcggaagggacttgacttgtctcaggtaagactttggacttggacttttgagttaa

SEQ ID NO: 104583 - DNA, 80 bp, synthetic construct
  misc_feature 1..80: note = Artificially Synthesized Probe
  source 1..80: mol_type = other DNA
ttgttttaaagatgtactttattcctcctgcctctcttaactcagtgttggactaggataaaacatcagaataaacaagg

SEQ ID NO: 104584 - DNA, 80 bp, synthetic construct
  misc_feature 1..80: note = Artificially Synthesized Probe
  source 1..80: mol_type = other DNA
acagtttactgctcccccacatcatctagacacttagtttcatttttgttgtttcttgttatttcctattgttacaaact

SEQ ID NO: 104585 - DNA, 80 bp, synthetic construct; identical to SEQ ID NO: 36371
  misc_feature 1..80: note = Artificially Synthesized Probe
  source 1..80: mol_type = other DNA

SEQ ID NO: 104586 - DNA, 80 bp, synthetic construct
  misc_feature 1..80: note = Artificially Synthesized Probe
  source 1..80: mol_type = other DNA
ttaactggtcttaggtaaggcacagacattaatatcttttaaaaggtacctaagtgattgtggtgaactgttagtgttga

SEQ ID NO: 104587 - DNA, 80 bp, synthetic construct
  misc_feature 1..80: note = Artificially Synthesized Probe
  source 1..80: mol_type = other DNA
tagtccatcctacctgttataaaagtgtgactaaagaaatgatcattgaaaacaataaaccaacacaggcaaactataca

SEQ ID NO: 104588 - DNA, 80 bp, synthetic construct
  misc_feature 1..80: note = Artificially Synthesized Probe
  source 1..80: mol_type = other DNA
gccatttccaagttcactgtcatttgcagccaacagatctactggatgagtcggagtgagcaaaaaatcattacaaagca

SEQ ID NO: 104589 - DNA, 80 bp, synthetic construct
  misc_feature 1..80: note = Artificially Synthesized Probe
  source 1..80: mol_type = other DNA
ctgccttttttggagaatggtttaaacgtactattaaaaactatggcagggagctggagctgataaagaagtcaatattc

SEQ ID NO: 104590 - DNA, 80 bp, synthetic construct; identical to SEQ ID NO: 36372
  misc_feature 1..80: note = Artificially Synthesized Probe
  source 1..80: mol_type = other DNA

SEQ ID NO: 104591 - DNA, 80 bp, synthetic construct
  misc_feature 1..80: note = Artificially Synthesized Probe
  source 1..80: mol_type = other DNA
agtaagagcaagttctaagaaactgaaaatgactgaagaacaaactccaaagaagggctgcaatgtgaaattgtggaaat

SEQ ID NO: 104592 - DNA, 80 bp, synthetic construct
  misc_feature 1..80: note = Artificially Synthesized Probe
  source 1..80: mol_type = other DNA
tactggatactagaaggcagtggaggaaggtcttccaagtgaggatgaaacattttaaacctaggatccattaaatccga

SEQ ID NO: 104593 - DNA, 80 bp, synthetic construct
  misc_feature 1..80: note = Artificially Synthesized Probe
  source 1..80: mol_type = other DNA
ctgcaacctccgcctcccgggttcaagtgattctcctgcctcagcctcccgagtagctgggactacaggcacccgccacc

SEQ ID NO: 104594 - DNA, 80 bp, synthetic construct
  misc_feature 1..80: note = Artificially Synthesized Probe
  source 1..80: mol_type = other DNA
gagggcctatgtggaggtaattggatcctgggggcagattcccccatgctgttcttgttatagcgaattcttatgagatc

SEQ ID NO: 104595 - DNA, 80 bp, synthetic construct; identical to SEQ ID NO: 36373
  misc_feature 1..80: note = Artificially Synthesized Probe
  source 1..80: mol_type = other DNA

SEQ ID NO: 104596 - DNA, 80 bp, synthetic construct
  misc_feature 1..80: note = Artificially Synthesized Probe
  source 1..80: mol_type = other DNA
ttgaggtcaggagtttgagaccagcctggccaacatggtgaaaccccgtctctactaaaaatacaaacattagccaggcg

SEQ ID NO: 104597 - DNA, 80 bp, synthetic construct
  misc_feature 1..80: note = Artificially Synthesized Probe
  source 1..80: mol_type = other DNA
ataaatgtcagagggatcatgagccatggagaaggaaatagaattatagtatatgacttgattctgcaataaatattttt

SEQ ID NO: 104598 - DNA, 80 bp, synthetic construct; identical to SEQ ID NO: 36374
  misc_feature 1..80: note = Artificially Synthesized Probe
  source 1..80: mol_type = other DNA

SEQ ID NO: 104599 - DNA, 80 bp, synthetic construct
  misc_feature 1..80: note = Artificially Synthesized Probe
  source 1..80: mol_type = other DNA
cacttgaggccaggagttcgagaccagcctggccaacatgacaaaaccccatctctactaaaaatacaaaaattagccgg

SEQ ID NO: 104600 - DNA, 80 bp, synthetic construct; identical to SEQ ID NO: 36323
  misc_feature 1..80: note = Artificially Synthesized Probe
  source 1..80: mol_type = other DNA

SEQ ID NO: 104601 - DNA, 80 bp, synthetic construct
  misc_feature 1..80: note = Artificially Synthesized Probe
  source 1..80: mol_type = other DNA
aaaaaaactattggataaagtgagtgcctttggaagaaaggaagctgattttcatcataaaccctctgtactttcatttt

SEQ ID NO: 104602 - DNA, 80 bp, synthetic construct
  misc_feature 1..80: note = Artificially Synthesized Probe
  source 1..80: mol_type = other DNA
gctttgcatgctaatagaataaaaatttgcttcaatatgagaaaaaggcctaaaggaagttagcactatgagtcgggaaa

SEQ ID NO: 104603 - DNA, 80 bp, synthetic construct; identical to SEQ ID NO: 36375
  misc_feature 1..80: note = Artificially Synthesized Probe
  source 1..80: mol_type = other DNA

SEQ ID NO: 104604 - DNA, 80 bp, synthetic construct
  misc_feature 1..80: note = Artificially Synthesized Probe
  source 1..80: mol_type = other DNA
ataaatgacaactctttctgttctttctggcagctatcttaccagactgtgcctaaagaattttgtggaatacactttgt

SEQ ID NO: 104605 - DNA, 80 bp, synthetic construct
  misc_feature 1..80: note = Artificially Synthesized Probe
  source 1..80: mol_type = other DNA
ggtatcttgatggttatatgtggtattgtttacactgttaatatccacatgtaaggccattacacaaataaataaccaat

SEQ ID NO: 104606 - DNA, 80 bp, synthetic construct
  misc_feature 1..80: note = Artificially Synthesized Probe
  source 1..80: mol_type = other DNA
ttttataaattacccagtcttgggtatttctttatagcaatgtgaaaacatactaatacacctcgtttctaaaaatcagc

SEQ ID NO: 104607 - DNA, 80 bp, synthetic construct; identical to SEQ ID NO: 36328
  misc_feature 1..80: note = Artificially Synthesized Probe
  source 1..80: mol_type = other DNA

SEQ ID NO: 104608 - DNA, 80 bp, synthetic construct
  misc_feature 1..80: note = Artificially Synthesized Probe
  source 1..80: mol_type = other DNA
tctgagctaagagctttacatctgctctctaaattaatctccacctctctccatgagtaggtattatcagaaagacatca

SEQ ID NO: 104609 - DNA, 80 bp, synthetic construct
  misc_feature 1..80: note = Artificially Synthesized Probe
  source 1..80: mol_type = other DNA
tggtaaaaagcgtcccctgtattaattagctgtgtaattttaatccttcaacccagattaggggtctataactgaataac

SEQ ID NO: 104610 - DNA, 80 bp, synthetic construct
  misc_feature 1..80: note = Artificially Synthesized Probe
  source 1..80: mol_type = other DNA
agacctgataataattattaagtctcttactgaagaagttttactcttccattaagatgcccttatttataagtattata

SEQ ID NO: 104611 - DNA, 80 bp, synthetic construct; identical to SEQ ID NO: 36329
  misc_feature 1..80: note = Artificially Synthesized Probe
  source 1..80: mol_type = other DNA

SEQ ID NO: 104612 - DNA, 80 bp, synthetic construct
  misc_feature 1..80: note = Artificially Synthesized Probe
  source 1..80: mol_type = other DNA
tggtgggcgcctgtagtcccagctactcaggaggctgagacaggagaatggcgtgaaccctggggggcggagcctgcagt

SEQ ID NO: 104613 - DNA, 80 bp, synthetic construct
  misc_feature 1..80: note = Artificially Synthesized Probe
  source 1..80: mol_type = other DNA
tccgattcattccagaataactacttttaacaccctggtttgtgtgctttcaaactctgttctcccatttccaaaggatg

SEQ ID NO: 104614 - DNA, 80 bp, synthetic construct
  misc_feature 1..80: note = Artificially Synthesized Probe
  source 1..80: mol_type = other DNA
ctttctttgggggaagggatggactgaagatggtttttattttctccttttttcttatttatgttttctgcaatgacaag

SEQ ID NO: 104615 - DNA, 80 bp, synthetic construct
  misc_feature 1..80: note = Artificially Synthesized Probe
  source 1..80: mol_type = other DNA
ttattttatagataccctatattaatcttgtgaagcatttaacatctgcctgtccaaatgtatgtcgtatatcacggtaa

SEQ ID NO: 104616 - DNA, 80 bp, synthetic construct; identical to SEQ ID NO: 36330
  misc_feature 1..80: note = Artificially Synthesized Probe
  source 1..80: mol_type = other DNA

SEQ ID NO: 104617 - DNA, 80 bp, synthetic construct
  misc_feature 1..80: note = Artificially Synthesized Probe
  source 1..80: mol_type = other DNA
aaaggcccgaggccgtcaggaggagagaaaccctggagtcatctaaagtcagaatctcagcgatagcccattctttcagg

SEQ ID NO: 104618 - DNA, 80 bp, synthetic construct
  misc_feature 1..80: note = Artificially Synthesized Probe
  source 1..80: mol_type = other DNA
tgtgggttctcaaggccctatttataaaagtgatctattgatctgtcatttagcaagaatagaattctgtatgtttttcc

SEQ ID NO: 104619 - DNA, 80 bp, synthetic construct
  misc_feature 1..80: note = Artificially Synthesized Probe
  source 1..80: mol_type = other DNA
acagtaaaacacacagtggtgaaaaatacaccgatcctttcaaactcggttggagagacttgaaaggtctgtatgaggac

SEQ ID NO: 104620 - DNA, 80 bp, synthetic construct
  misc_feature 1..80: note = Artificially Synthesized Probe
  source 1..80: mol_type = other DNA
tcactgcaacccttgcctcccaggttcatgcaattctcctgcctcagcctcctgagtagctgagattataggcatgcgcc

SEQ ID NO: 104621 - DNA, 80 bp, synthetic construct; identical to SEQ ID NO: 36331
  misc_feature 1..80: note = Artificially Synthesized Probe
  source 1..80: mol_type = other DNA

SEQ ID NO: 104622 - DNA, 80 bp, synthetic construct
  misc_feature 1..80: note = Artificially Synthesized Probe
  source 1..80: mol_type = other DNA
atctaattctgaatgtcattgccagtctgccccaaatatggctttcttcattcaactctttttcctgaaaactttcagta

SEQ ID NO: 104623 - DNA, 80 bp, synthetic construct
  misc_feature 1..80: note = Artificially Synthesized Probe
  source 1..80: mol_type = other DNA
ttctgtctttagaaaaaaattggctgggcacggtggatcacacctataatcctagcactttgagaggacaccacttcctg

SEQ ID NO: 104624 - DNA, 80 bp, synthetic construct
  misc_feature 1..80: note = Artificially Synthesized Probe
  source 1..80: mol_type = other DNA
cctagtttcttaggaactcccccagacatggcctctccctctgtctgcaaactttcattggcatggtcttccatatccat

SEQ ID NO: 104625 - DNA, 80 bp, synthetic construct; identical to SEQ ID NO: 36332
  misc_feature 1..80: note = Artificially Synthesized Probe
  source 1..80: mol_type = other DNA

SEQ ID NO: 104626 - DNA, 80 bp, synthetic construct
  misc_feature 1..80: note = Artificially Synthesized Probe
  source 1..80: mol_type = other DNA
gtaggcccatgctattagcataaccgtgcaaaatctatggactcactgttacttaagtttatttgaatttagtactcttt

SEQ ID NO: 104627 - DNA, 80 bp, synthetic construct
  misc_feature 1..80: note = Artificially Synthesized Probe
  source 1..80: mol_type = other DNA
gccaagctggtgacctgagagaaagtgtgtggtttgaccttggaatttgggttttagatgttggcatacttccagggact

SEQ ID NO: 104628 - DNA, 80 bp, synthetic construct
  misc_feature 1..80: note = Artificially Synthesized Probe
  source 1..80: mol_type = other DNA
acatacaccaattaagctctgccattttgcctcttagtgtgcatggttgagccgactcacccaactcccgagatcttatt

SEQ ID NO: 104629 - DNA, 80 bp, synthetic construct
  misc_feature 1..80: note = Artificially Synthesized Probe
  source 1..80: mol_type = other DNA
cctgctcatgcctgactagctatctactgtaacggacacttcctggttttctgaccattgggcactattgactgtaaccc

SEQ ID NO: 104630 - DNA, 80 bp, synthetic construct; identical to SEQ ID NO: 36333
  misc_feature 1..80: note = Artificially Synthesized Probe
  source 1..80: mol_type = other DNA

SEQ ID NO: 104631 - DNA, 80 bp, synthetic construct
  misc_feature 1..80: note = Artificially Synthesized Probe
  source 1..80: mol_type = other DNA
ccctgggctgggatggtacttctgttcgtctggcattattgcccttggtcatttaccggcagccctgggcccctccttgc

SEQ ID NO: 104632 - DNA, 80 bp, synthetic construct
  misc_feature 1..80: note = Artificially Synthesized Probe
  source 1..80: mol_type = other DNA
cagagttttgtctgctttggtgtggctaagagggtcagttgaatatgggcatctctttccctttccttgatcccacactg

SEQ ID NO: 104633 - DNA, 80 bp, synthetic construct
  misc_feature 1..80: note = Artificially Synthesized Probe
  source 1..80: mol_type = other DNA
ctttccgaatcccgtgaaaggagtatggacagttttcccagcctcctccatccacgttctcgaaccaacttactttattc

SEQ ID NO: 104634 - DNA, 80 bp, synthetic construct; identical to SEQ ID NO: 36386
  misc_feature 1..80: note = Artificially Synthesized Probe
  source 1..80: mol_type = other DNA

SEQ ID NO: 104635 - DNA, 80 bp, synthetic construct
  misc_feature 1..80: note = Artificially Synthesized Probe
  source 1..80: mol_type = other DNA
ggggcccggggccgcgtccctgggccctccccacccttgcggtggcctcgcgggtcccaggggcggggctggagcggcag

SEQ ID NO: 104636 - DNA, 80 bp, synthetic construct
  misc_feature 1..80: note = Artificially Synthesized Probe
  source 1..80: mol_type = other DNA
acacagacacagcaaccatcggatttctcaatcttttccccacctttcccccttttctattccacaaaaccgccattgtc

SEQ ID NO: 104637 - DNA, 80 bp, synthetic construct
  misc_feature 1..80: note = Artificially Synthesized Probe
  source 1..80: mol_type = other DNA
tcccggacggggcggctggccgggcagggggctgacccccacctccctcccggacggggcggctggccgggcggggggct

SEQ ID NO: 104638 - DNA, 80 bp, synthetic construct
  misc_feature 1..80: note = Artificially Synthesized Probe
  source 1..80: mol_type = other DNA
ggacggggtggctgccgggcggagacgctcctcacttcccagacggggcggctgccgggcagagggtctcctcacttctc

SEQ ID NO: 104639 - DNA, 80 bp, synthetic construct; identical to SEQ ID NO: 36387
  misc_feature 1..80: note = Artificially Synthesized Probe
  source 1..80: mol_type = other DNA

SEQ ID NO: 104640 - DNA, 80 bp, synthetic construct
  misc_feature 1..80: note = Artificially Synthesized Probe
  source 1..80: mol_type = other DNA
atcacgccactgcactccagcctgggcaccattgagcactgagtgaacgagactccgtctgcaatcccggcacctcggga

SEQ ID NO: 104641 - DNA, 80 bp, synthetic construct
  misc_feature 1..80: note = Artificially Synthesized Probe
  source 1..80: mol_type = other DNA
gggaggttgcagggagccgagatggcagcagtacagtccagcttcggctcggcatcagagggagaccgtggaaagagagg

SEQ ID NO: 104642 - DNA, 80 bp, synthetic construct
  misc_feature 1..80: note = Artificially Synthesized Probe
  source 1..80: mol_type = other DNA
gcttgggcccaggaggtcaagtctagcccgaggaacacagtaagaccttgtctttaaaaaaccaaaagcgcatgcatgtg

SEQ ID NO: 104643 - DNA, 80 bp, synthetic construct
  misc_feature 1..80: note = Artificially Synthesized Probe
  source 1..80: mol_type = other DNA
gatacatgcgtacacatgtatacacacacatagacatacatgtatacacacatacacatacacatgtatatacatacaca

SEQ ID NO: 104644 - DNA, 80 bp, synthetic construct; identical to SEQ ID NO: 36388
  misc_feature 1..80: note = Artificially Synthesized Probe
  source 1..80: mol_type = other DNA

SEQ ID NO: 104645 - DNA, 80 bp, synthetic construct
  misc_feature 1..80: note = Artificially Synthesized Probe
  source 1..80: mol_type = other DNA
ggagtagcatggggagggtgatggcagactaatgtgtaaaattagttcttacccgttccaggtatgatgaatatcatcct

SEQ ID NO: 104646 - DNA, 80 bp, synthetic construct
  misc_feature 1..80: note = Artificially Synthesized Probe
  source 1..80: mol_type = other DNA
ggcaagaatcttgcttttcttaccccagtttagtttaaagagaaggagaagagatcttaggtctcttcgttcctgtctat

SEQ ID NO: 104647 - DNA, 80 bp, synthetic construct; identical to SEQ ID NO: 36377
  misc_feature 1..80: note = Artificially Synthesized Probe
  source 1..80: mol_type = other DNA

SEQ ID NO: 104648 - DNA, 80 bp, synthetic construct; identical to SEQ ID NO: 36389
  misc_feature 1..80: note = Artificially Synthesized Probe
  source 1..80: mol_type = other DNA

SEQ ID NO: 104649 - DNA, 80 bp, synthetic construct
  misc_feature 1..80: note = Artificially Synthesized Probe
  source 1..80: mol_type = other DNA
ccggtgcagggtcgggccgagctcaggcagaacagtgggcagcagagtttatacagcagcaggtaggacattgtcacttt

SEQ ID NO: 104650 - DNA, 80 bp, synthetic construct
  misc_feature 1..80: note = Artificially Synthesized Probe
  source 1..80: mol_type = other DNA
agagattctgagaatgattttctcagaagtacccaggttggtggtggttagtgggtatttagtgtgcgtctgatggatag

SEQ ID NO: 104651 - DNA, 80 bp, synthetic construct
  misc_feature 1..80: note = Artificially Synthesized Probe
  source 1..80: mol_type = other DNA
acaccccaaaagaaaacactccttggagtgagtgggtgtatgaacatcaaagatgatgcaaattgtatttcatagtggac

SEQ ID NO: 104652 - DNA, 80 bp, synthetic construct; identical to SEQ ID NO: 36390
  misc_feature 1..80: note = Artificially Synthesized Probe
  source 1..80: mol_type = other DNA

SEQ ID NO: 104653 - DNA, 80 bp, synthetic construct
  misc_feature 1..80: note = Artificially Synthesized Probe
  source 1..80: mol_type = other DNA
actgcactgcactacattacatttctggccatcaccccagactactaaatcagtatctggggatagcatctggccatttg

SEQ ID NO: 104654 - DNA, 80 bp, synthetic construct
  misc_feature 1..80: note = Artificially Synthesized Probe
  source 1..80: mol_type = other DNA
atctgctttcccttccttacagtctgatgtcgatttctgggacaagttgcaggcagagttggaggagatggcaaaacggg

SEQ ID NO: 104655 - DNA, 80 bp, synthetic construct
  misc_feature 1..80: note = Artificially Synthesized Probe
  source 1..80: mol_type = other DNA
ttgagtccctttccacgaaaagaagtctgaataattcccttgcccttcctcttcagtgattgagtataaactttattctt

SEQ ID NO: 104656 - DNA, 80 bp, synthetic construct
  misc_feature 1..80: note = Artificially Synthesized Probe
  source 1..80: mol_type = other DNA
ttggtggggagtgttagtggacagactatccctttgcctccacatcttaatatctgtttactttttaaactcacatattc

SEQ ID NO: 104657 - DNA, 80 bp, synthetic construct; identical to SEQ ID NO: 36391
  misc_feature 1..80: note = Artificially Synthesized Probe
  source 1..80: mol_type = other DNA

SEQ ID NO: 104658 - DNA, 80 bp, synthetic construct
  misc_feature 1..80: note = Artificially Synthesized Probe
  source 1..80: mol_type = other DNA
gaaaaaaggcaaaacaggaactggggatgtgagtagtgatgtctttttctcagttcagatctggttgggaaagtattgtg

SEQ ID NO: 104659 - DNA, 80 bp, synthetic construct
  misc_feature 1..80: note = Artificially Synthesized Probe
  source 1..80: mol_type = other DNA
gcggccagtgtggggcagacgcctgtgtgccttcctcagatacgggcagagttgtggatgtgagaagggtctggcttggg

SEQ ID NO: 104660 - DNA, 80 bp, synthetic construct
  misc_feature 1..80: note = Artificially Synthesized Probe
  source 1..80: mol_type = other DNA
tccagtctgatctggatttttctaactatcctgtgtgatataagggaaaagacagctgggaccttgccatgtatttcact

SEQ ID NO: 104661 - DNA, 80 bp, synthetic construct
  misc_feature 1..80: note = Artificially Synthesized Probe
  source 1..80: mol_type = other DNA
tcatacatatagacataatactagttttgtatgagcagcattttcttttatcatttattactctcgtatttatgacatgc

SEQ ID NO: 104662 - DNA, 80 bp, synthetic construct; identical to SEQ ID NO: 36392
  misc_feature 1..80: note = Artificially Synthesized Probe
  source 1..80: mol_type = other DNA

SEQ ID NO: 104663 - DNA, 80 bp, synthetic construct
  misc_feature 1..80: note = Artificially Synthesized Probe
  source 1..80: mol_type = other DNA
tacttgatatcattgatactttgggatattgcaaaattaggactagaaatacttgcattaatgttcctcaaaaagtgatg

SEQ ID NO: 104664 - DNA, 80 bp, synthetic construct
  misc_feature 1..80: note = Artificially Synthesized Probe
  source 1..80: mol_type = other DNA
gcactgtttgtttattgatagcccttatattttcagagacaatttacattgcagctcaggcagatattaatatactatta

SEQ ID NO: 104665 - DNA, 80 bp, synthetic construct
  misc_feature 1..80: note = Artificially Synthesized Probe
  source 1..80: mol_type = other DNA
gttctgtgggttgttgagggatcccccagagtactctttttccatcatctatgcaaatattctaattttggaaaattcct

SEQ ID NO: 104666 - DNA, 80 bp, synthetic construct; identical to SEQ ID NO: 36393
  misc_feature 1..80: note = Artificially Synthesized Probe
  source 1..80: mol_type = other DNA

SEQ ID NO: 104667 - DNA, 80 bp, synthetic construct
  misc_feature 1..80: note = Artificially Synthesized Probe
  source 1..80: mol_type = other DNA
gacagtaatctctgttttctgtagagtggcttaaaacacgtattaatgatgaacaatagttgaggttgaatgcagaagga

SEQ ID NO: 104668 - DNA, 80 bp, synthetic construct
  misc_feature 1..80: note = Artificially Synthesized Probe
  source 1..80: mol_type = other DNA
atataaaattcaaattttagtgtccataaataaaatgttattggaagacagccgtgctcatttgtttacttatgtctggc

SEQ ID NO: 104669 - DNA, 80 bp, synthetic construct
  misc_feature 1..80: note = Artificially Synthesized Probe
  source 1..80: mol_type = other DNA
cacttgttttcaatataaatatactttctatacatttatctcaaatctactataatatgtctttcttcttaaacccccca

SEQ ID NO: 104670 - DNA, 80 bp, synthetic construct
  misc_feature 1..80: note = Artificially Synthesized Probe
  source 1..80: mol_type = other DNA
gcccctggccccccggagccccggcctctgaggcagtgagtgttcttgaggtggaaagcccaggtgcagcctctgaggca

SEQ ID NO: 104671 - DNA, 80 bp, synthetic construct; identical to SEQ ID NO: 36394
  misc_feature 1..80: note = Artificially Synthesized Probe
  source 1..80: mol_type = other DNA

SEQ ID NO: 104672 - DNA, 80 bp, synthetic construct
  misc_feature 1..80: note = Artificially Synthesized Probe
  source 1..80: mol_type = other DNA
ctggaagagaatggtgtctttctgaagtattctctgccatctggattttgggatccagcttttgcttactgtcagataca

SEQ ID NO: 104673 - DNA, 80 bp, synthetic construct
  misc_feature 1..80: note = Artificially Synthesized Probe
  source 1..80: mol_type = other DNA
tcacattattgaaggataacaagaaatgcactttgcatagctagggacactttgtctcattactataagcagatcctgtt

SEQ ID NO: 104674 - DNA, 80 bp, synthetic construct; identical to SEQ ID NO: 36395
  misc_feature 1..80: note = Artificially Synthesized Probe
  source 1..80: mol_type = other DNA

SEQ ID NO: 104675 - DNA, 80 bp, synthetic construct
  misc_feature 1..80: note = Artificially Synthesized Probe
  source 1..80: mol_type = other DNA
tcaggagggggacctgccaaatgctgtgctgctttttgaggcagctgtgcagcaggatcctaagcacatggaagtgagtg

SEQ ID NO: 104676 - DNA, 80 bp, synthetic construct
  misc_feature 1..80: note = Artificially Synthesized Probe
  source 1..80: mol_type = other DNA
ggtgaatatggggtgatggaatctgtcaacttccctctaggcttggcagtatctgggtaccacccaggcagagaatgaac

SEQ ID NO: 104677 - DNA, 80 bp, synthetic construct
  misc_feature 1..80: note = Artificially Synthesized Probe
  source 1..80: mol_type = other DNA
actctgagggttggagtgaattccattccttcatcggcttttgattttatttgcggctttggttggctccttgcctgcta

SEQ ID NO: 104678 - DNA, 80 bp, synthetic construct
  misc_feature 1..80: note = Artificially Synthesized Probe
  source 1..80: mol_type = other DNA
caaacaggtgtctggagctaaagccagataaccagacagcactgatggcgctggctgtgagcttcaccaacgagtccctg

SEQ ID NO: 104679 - DNA, 80 bp, synthetic construct; identical to SEQ ID NO: 36396
  misc_feature 1..80: note = Artificially Synthesized Probe
  source 1..80: mol_type = other DNA

SEQ ID NO: 104680 - DNA, 80 bp, synthetic construct; identical to SEQ ID NO: 36376
  misc_feature 1..80: note = Artificially Synthesized Probe
  source 1..80: mol_type = other DNA

SEQ ID NO: 104681 - DNA, 80 bp, synthetic construct
  misc_feature 1..80: note = Artificially Synthesized Probe
  source 1..80: mol_type = other DNA
tgaagaaattaatttggggggatgggaatagagacattcatctacctactttgtgtttttttccttttcatccagctccc

SEQ ID NO: 104682 - DNA, 80 bp, synthetic construct
  misc_feature 1..80: note = Artificially Synthesized Probe
  source 1..80: mol_type = other DNA
ttactgagcgtttataaacactagaaaaccctgtgcacctttaaataaatgcaaccattttatagatgaagaagccgagg

SEQ ID NO: 104683 - DNA, 80 bp, synthetic construct
  misc_feature 1..80: note = Artificially Synthesized Probe
  source 1..80: mol_type = other DNA
tgtgagcccaggggaggaatggaaatgggacatgactgtgtaccttattgaagagccatttgttgggaagctgggtttga

SEQ ID NO: 104684 - DNA, 80 bp, synthetic construct; identical to SEQ ID NO: 36397
  misc_feature 1..80: note = Artificially Synthesized Probe
  source 1..80: mol_type = other DNA

SEQ ID NO: 104685 - DNA, 80 bp, synthetic construct
  misc_feature 1..80: note = Artificially Synthesized Probe
  source 1..80: mol_type = other DNA
tgagtcggtggagtaatgtgcagagtttgagctgagtcaagctgttcccatccgttctgcatccctatcccaggactatt

SEQ ID NO: 104686 - DNA, 80 bp, synthetic construct
  misc_feature 1..80: note = Artificially Synthesized Probe
  source 1..80: mol_type = other DNA
tctattgagaaatgaatgaatgagctttttctccctgcctttggccctagctccttattcttagatcctgtttgactaac

SEQ ID NO: 104687 - DNA, 80 bp, synthetic construct
  misc_feature 1..80: note = Artificially Synthesized Probe
  source 1..80: mol_type = other DNA
gaggtgccatgtcggagaacatctggagcaccctgcgtttggcattgtctatgttaggccagagcgatgcctatggggca

SEQ ID NO: 104688 - DNA, 80 bp, synthetic construct
  misc_feature 1..80: note = Artificially Synthesized Probe
  source 1..80: mol_type = other DNA
agcggtacggcctttcaggagctgcctcaacgtaggggtgggtagtctgtgttctagttcctacataattgtaggaaaat

SEQ ID NO: 104689 - DNA, 80 bp, synthetic construct; identical to SEQ ID NO: 36398
  misc_feature 1..80: note = Artificially Synthesized Probe
  source 1..80: mol_type = other DNA

SEQ ID NO: 104690 - DNA, 80 bp, synthetic construct
  misc_feature 1..80: note = Artificially Synthesized Probe
  source 1..80: mol_type = other DNA
agcacgatgctgatgcaatagtcctgtgtcatcactgcagcggtcctcaggagctgccagggccaattgctacagagtgt

SEQ ID NO: 104691 - DNA, 80 bp, synthetic construct
  misc_feature 1..80: note = Artificially Synthesized Probe
  source 1..80: mol_type = other DNA
tcttagaagcacctgtgaatgggaattgagccaactgttatagaaaattggttcagaaagtgcaatcttgccagatttct

SEQ ID NO: 104692 - DNA, 80 bp, synthetic construct
  misc_feature 1..80: note = Artificially Synthesized Probe
  source 1..80: mol_type = other DNA
ccccagaaatgactgctaagcctcttgccttgtctttagtagctaatgatcagagagattttttttttaaactaccatgg

SEQ ID NO: 104693 - DNA, 80 bp, synthetic construct; identical to SEQ ID NO: 36378
  misc_feature 1..80: note = Artificially Synthesized Probe
  source 1..80: mol_type = other DNA

SEQ ID NO: 104694 - DNA, 80 bp, synthetic construct; identical to SEQ ID NO: 36399
  misc_feature 1..80: note = Artificially Synthesized Probe
  source 1..80: mol_type = other DNA

SEQ ID NO: 104695 - DNA, 80 bp, synthetic construct
  misc_feature 1..80: note = Artificially Synthesized Probe
  source 1..80: mol_type = other DNA
attttgatagtttttcagtgcttagggtttctaaagcttttcatctggctctgcctgcctttatcgggaactgtatcaag

SEQ ID NO: 104696 - DNA, 80 bp, synthetic construct
  misc_feature 1..80: note = Artificially Synthesized Probe
  source 1..80: mol_type = other DNA
ggctggagtgcaatggcgtgatctcagctcactgcagcctccgcctcctgggttcaagcgattctcctgcctcagcttcc

SEQ ID NO: 104697 - DNA, 80 bp, synthetic construct; identical to SEQ ID NO: 36400
  misc_feature 1..80: note = Artificially Synthesized Probe
  source 1..80: mol_type = other DNA

SEQ ID NO: 104698 - DNA, 80 bp, synthetic construct
  misc_feature 1..80: note = Artificially Synthesized Probe
  source 1..80: mol_type = other DNA
ccaaaaaacaaaaaaaacaggtctaaaagacaactgggtaagtaaattgtccagacagtgaaatatagctattgctattt

SEQ ID NO: 104699 - DNA, 80 bp, synthetic construct
  misc_feature 1..80: note = Artificially Synthesized Probe
  source 1..80: mol_type = other DNA
taattctcaaattttcttggtgcatgtttgatacttttctagaggagaaaattaaacacctgggggaggaaaacaggaag

SEQ ID NO: 104700 - DNA, 80 bp, synthetic construct
  misc_feature 1..80: note = Artificially Synthesized Probe
  source 1..80: mol_type = other DNA
acactacataggtgcaggacatgacaaagtctggctgtgtaaatgacttaagaattaagctataaaatacctaggaatcc

SEQ ID NO: 104701 - DNA, 80 bp, synthetic construct
  misc_feature 1..80: note = Artificially Synthesized Probe
  source 1..80: mol_type = other DNA
caatgccatccccatcaagctaccaatgactttcttcacagaattggaaaaaactactttaaagttcatatggaaccaaa

SEQ ID NO: 104702 - DNA, 80 bp, synthetic construct; identical to SEQ ID NO: 36401
  misc_feature 1..80: note = Artificially Synthesized Probe
  source 1..80: mol_type = other DNA

SEQ ID NO: 104703 - DNA, 80 bp, synthetic construct
  misc_feature 1..80: note = Artificially Synthesized Probe
  source 1..80: mol_type = other DNA
caggacataggcatgggcaaggacttcatgtctaaaacaccaaaagcaatggcaacaaaagacaaaattgacaaatggga

SEQ ID NO: 104704 - DNA, 80 bp, synthetic construct
  misc_feature 1..80: note = Artificially Synthesized Probe
  source 1..80: mol_type = other DNA
accccatcaaaaagtgggcgaaggacatgaacagacacttttcaaaagaagacatttatgcagccaaaaaacacatgaaa

SEQ ID NO: 104705 - DNA, 80 bp, synthetic construct
  misc_feature 1..80: note = Artificially Synthesized Probe
  source 1..80: mol_type = other DNA
atttcccttctggcagttggtggctgaattcctgcaggaccagaatgcaccccttgtgtcccgtgcccctcagaccttca

SEQ ID NO: 104706 - DNA, 80 bp, synthetic construct
  misc_feature 1..80: note = Artificially Synthesized Probe
  source 1..80: mol_type = other DNA
tgtggagaaataggaacacttttacactgttggtgggactgtaaactagttcaaccattgtggaagtcagtgtggtgatt

SEQ ID NO: 104707 - DNA, 80 bp, synthetic construct; identical to SEQ ID NO: 36402
  misc_feature 1..80: note = Artificially Synthesized Probe
  source 1..80: mol_type = other DNA

SEQ ID NO: 104708 - DNA, 80 bp, synthetic construct
  misc_feature 1..80: note = Artificially Synthesized Probe
  source 1..80: mol_type = other DNA
gtggggggaggggggagggatagcattaggagatatacctaatgctaaatgacgagttaatgggtgcagcacaccagcat

SEQ ID NO: 104709 - DNA, 80 bp, synthetic construct
  misc_feature 1..80: note = Artificially Synthesized Probe
  source 1..80: mol_type = other DNA
attcatgtttttacattaaaaacatgaatagatgttgaaactaatttctttggaaatcttcggatatagactattaccta

SEQ ID NO: 104710 - DNA, 80 bp, synthetic construct
  misc_feature 1..80: note = Artificially Synthesized Probe
  source 1..80: mol_type = other DNA
ccaaatttatcagagacgtggcatcttaaaattttactcagattatgcatttgggtgactttgtagtccgcaaaatttgc

SEQ ID NO: 104711 - DNA, 80 bp, synthetic construct
  misc_feature 1..80: note = Artificially Synthesized Probe
  source 1..80: mol_type = other DNA
acaccagtcagaatgactattattaaaaagtcaaaaaagtaacatgttagtgaggttgcagagagaaggggacttatact

SEQ ID NO: 104712 - DNA, 80 bp, synthetic construct; identical to SEQ ID NO: 36403
  misc_feature 1..80: note = Artificially Synthesized Probe
  source 1..80: mol_type = other DNA

SEQ ID NO: 104713 - DNA, 80 bp, synthetic construct
  misc_feature 1..80: note = Artificially Synthesized Probe
  source 1..80: mol_type = other DNA
ggccattatcctaagcaaattaacacgggaacagaaaaccaaataccacagattctcacttataagtgacagctaaacat

SEQ ID NO: 104714 - DNA, 80 bp, synthetic construct
  misc_feature 1..80: note = Artificially Synthesized Probe
  source 1..80: mol_type = other DNA
aacaaacctgcatgtgtacttcagaacctggaataaaagtcaaaaacaaaacaaaagccattttacaaagacgcgattta

SEQ ID NO: 104715 - DNA, 80 bp, synthetic construct
  misc_feature 1..80: note = Artificially Synthesized Probe
  source 1..80: mol_type = other DNA
cccgagtagctgctattacaggcgcctgccaccatgccaggctaatttttgtatttttagtagagacaaggtttcaccac

SEQ ID NO: 104716 - DNA, 80 bp, synthetic construct
  misc_feature 1..80: note = Artificially Synthesized Probe
  source 1..80: mol_type = other DNA
cctgagatgcagaaggagacaaaagtaacagagtgttttcacgtggattcagggttctttaggcatgatggaatggtatg

SEQ ID NO: 104717 - DNA, 80 bp, synthetic construct; identical to SEQ ID NO: 36404
  misc_feature 1..80: note = Artificially Synthesized Probe
  source 1..80: mol_type = other DNA

SEQ ID NO: 104718 - DNA, 80 bp, synthetic construct
  misc_feature 1..80: note = Artificially Synthesized Probe
  source 1..80: mol_type = other DNA
tctattttttgtttttaagatcttaggacaaaaaggtttgtaaataaaatatctttcaatctgtaactatatatttgaat

SEQ ID NO: 104719 - DNA, 80 bp, synthetic construct
  misc_feature 1..80: note = Artificially Synthesized Probe
  source 1..80: mol_type = other DNA
gtaacacagcagggaccctgaagtcattaaaccaaagtaagatttcctttatttccatccaacaactttttaaaggagat

SEQ ID NO: 104720 - DNA, 80 bp, synthetic construct
  misc_feature 1..80: note = Artificially Synthesized Probe
  source 1..80: mol_type = other DNA
aaaaaacctttcccaagtagaaaaccttcattttaagatttagttctatgaactatcagcccatggggaatattaacata

SEQ ID NO: 104721 - DNA, 80 bp, synthetic construct; identical to SEQ ID NO: 36405
  misc_feature 1..80: note = Artificially Synthesized Probe
  source 1..80: mol_type = other DNA

SEQ ID NO: 104722 - DNA, 80 bp, synthetic construct
  misc_feature 1..80: note = Artificially Synthesized Probe
  source 1..80: mol_type = other DNA
aggaactgcaaagcctctcaaaagcaagtctctggatctcacacaatctcactcctgtcacctttcattggtcaaaacaa

SEQ ID NO: 104723 - DNA, 80 bp, synthetic construct
  misc_feature 1..80: note = Artificially Synthesized Probe
  source 1..80: mol_type = other DNA
ctggaaatgacttagggggccaacagggacactataggccctgctgcatagcgagtgtcctgcatgtgcacctgtacatt

SEQ ID NO: 104724 - DNA, 80 bp, synthetic construct; identical to SEQ ID NO: 36406
  misc_feature 1..80: note = Artificially Synthesized Probe
  source 1..80: mol_type = other DNA

SEQ ID NO: 104725 - DNA, 80 bp, synthetic construct
  misc_feature 1..80: note = Artificially Synthesized Probe
  source 1..80: mol_type = other DNA
ccaggattcatatagatgcttaatggtctttcttatatcaactaaagtaggaattcattgcaattgagacactttctggt

SEQ ID NO: 104726 - DNA, 80 bp, synthetic construct
  misc_feature 1..80: note = Artificially Synthesized Probe
  source 1..80: mol_type = other DNA
ttccttgggatcctgaactcatattggattctctacctaccatcttggacaattcatgtaggaaaacaaatcctcatttg

SEQ ID NO: 104727 - DNA, 80 bp, synthetic construct
  misc_feature 1..80: note = Artificially Synthesized Probe
  source 1..80: mol_type = other DNA
tgaagttacaggtgaaacttgttatgggaaaatctatattggcttctatgggacagaattctatacccttcccctgttca

SEQ ID NO: 104728 - DNA, 80 bp, synthetic construct
  misc_feature 1..80: note = Artificially Synthesized Probe
  source 1..80: mol_type = other DNA
tttggttggcctttttactttatcactgtggtttagtggagaggatctacagattggatggatggcagtgttgccgagga

SEQ ID NO: 104729 - DNA, 80 bp, synthetic construct; identical to SEQ ID NO: 36379
  misc_feature 1..80: note = Artificially Synthesized Probe
  source 1..80: mol_type = other DNA

SEQ ID NO: 104730 - DNA, 80 bp, synthetic construct
  misc_feature 1..80: note = Artificially Synthesized Probe
  source 1..80: mol_type = other DNA
ttggaccctattttggtctccggaatttgtcatcatgcagtgctattttccccattatgcagaggtggagagggattaag

SEQ ID NO: 104731 - DNA, 80 bp, synthetic construct
  misc_feature 1..80: note = Artificially Synthesized Probe
  source 1..80: mol_type = other DNA
ttatcttctttcttgctttgctacagacttaaaggtttcagcctaatttttcctctttgaaagcatccattgctcctgca

SEQ ID NO: 104732 - DNA, 80 bp, synthetic construct
  misc_feature 1..80: note = Artificially Synthesized Probe
  source 1..80: mol_type = other DNA
caagttccaggatctcggggagtcacatcatcatggttcctgaatttttctgagatgattaaagggactgaattggtttc

SEQ ID NO: 104733 - DNA, 80 bp, synthetic construct; identical to SEQ ID NO: 36380
  misc_feature 1..80: note = Artificially Synthesized Probe
  source 1..80: mol_type = other DNA

SEQ ID NO: 104734 - DNA, 80 bp, synthetic construct
  misc_feature 1..80: note = Artificially Synthesized Probe
  source 1..80: mol_type = other DNA
ttatagatgaggagactgagatttggaaaagttaaatactttgtgcaaaatcattgaataatagagatgatattcaaact

SEQ ID NO: 104735 - DNA, 80 bp, synthetic construct
  misc_feature 1..80: note = Artificially Synthesized Probe
  source 1..80: mol_type = other DNA
actacaggcgtgtgccaccatgcccggctaattttggtatttttagtagagacagggtttcaccatgttggccaggctgg

SEQ ID NO: 104736 - DNA, 80 bp, synthetic construct
  misc_feature 1..80: note = Artificially Synthesized Probe
  source 1..80: mol_type = other DNA
tttttcacataaaccttagacttaagtgctatctcttatcacagagaggcttctgttgtaatgtgggcattagtcatttt

SEQ ID NO: 104737 - DNA, 80 bp, synthetic construct; identical to SEQ ID NO: 36381
  misc_feature 1..80: note = Artificially Synthesized Probe
  source 1..80: mol_type = other DNA

SEQ ID NO: 104738 - DNA, 80 bp, synthetic construct
  misc_feature 1..80: note = Artificially Synthesized Probe
  source 1..80: mol_type = other DNA
tattatccttcatttttaattacagcatttgtggttgatacaattgtatgggttagctatggctttatagataagtagat

SEQ ID NO: 104739 - DNA, 80 bp, synthetic construct
  misc_feature 1..80: note = Artificially Synthesized Probe
  source 1..80: mol_type = other DNA
tataggaaggttctgtatacccttcacccagtctcctccagtggtaacattttacatagcagttatgcagagatcaaaaa

SEQ ID NO: 104740 - DNA, 80 bp, synthetic construct
  misc_feature 1..80: note = Artificially Synthesized Probe
  source 1..80: mol_type = other DNA
agttcatttttttagcttaccttattttgtaatggaatccccccgtcttaaatcttctgggtcaaataattctccatctt

SEQ ID NO: 104741 - DNA, 80 bp, synthetic construct
  misc_feature 1..80: note = Artificially Synthesized Probe
  source 1..80: mol_type = other DNA
gccccattttagaggggaaaactgaggctcagaaagggcactgaatccccttaggtcacaatgcgcccaagggaagaggc

SEQ ID NO: 104742 - DNA, 80 bp, synthetic construct
  misc_feature 1..80: note = Artificially Synthesized Probe
  source 1..80: mol_type = other DNA
cagatcttttctggatgttggaggagaggctttggaataacagtctcattgtgatgttttctgcttttgttataggtttg

SEQ ID NO: 104743 - DNA, 80 bp, synthetic construct; identical to SEQ ID NO: 36382
  misc_feature 1..80: note = Artificially Synthesized Probe
  source 1..80: mol_type = other DNA

SEQ ID NO: 104744 - DNA, 80 bp, synthetic construct
  misc_feature 1..80: note = Artificially Synthesized Probe
  source 1..80: mol_type = other DNA
aaattatatgaggtgcacattttgagtggggtatttggtgtctaggttattctcactctactaatctgtatgacctcagg

SEQ ID NO: 104745 - DNA, 80 bp, synthetic construct
  misc_feature 1..80: note = Artificially Synthesized Probe
  source 1..80: mol_type = other DNA
aaattctgggtcttgtggcgatttaatctggccaactaccaaattataggtatttgaggatagtttttctcagctctggg

SEQ ID NO: 104746 - DNA, 80 bp, synthetic construct; identical to SEQ ID NO: 36383
  misc_feature 1..80: note = Artificially Synthesized Probe
  source 1..80: mol_type = other DNA

SEQ ID NO: 104747 - DNA, 80 bp, synthetic construct
  misc_feature 1..80: note = Artificially Synthesized Probe
  source 1..80: mol_type = other DNA
gggcaaatggaagagaaatgcttcctgtaagagctagtgagcagaatctgtatttaatttttgagagtccttgaaattaa

SEQ ID NO: 104748 - DNA, 80 bp, synthetic construct
  misc_feature 1..80: note = Artificially Synthesized Probe
  source 1..80: mol_type = other DNA
atgtatttcttattacatatgttacatataatgtatttattacattatatattatatataatgtaatatatgttatgtaa

SEQ ID NO: 104749 - DNA, 80 bp, synthetic construct
  misc_feature 1..80: note = Artificially Synthesized Probe
  source 1..80: mol_type = other DNA
tataatgtaataattatgtgtcatacatatatgtgtcatatataatgtaataattatatgtgccatatataatgtaataa

SEQ ID NO: 104750 - DNA, 80 bp, synthetic construct
  misc_feature 1..80: note = Artificially Synthesized Probe
  source 1..80: mol_type = other DNA
atgtcacatataatgtaataattatatatgtcacatataatgtaataattatatatgtcacatataatgtaataattata

SEQ ID NO: 104751 - DNA, 80 bp, synthetic construct
  misc_feature 1..80: note = Artificially Synthesized Probe
  source 1..80: mol_type = other DNA
tatgtcacatataatgtaataattatatatgtcacatataatgtaataattatatatgtcacatataatgtaataattat

SEQ ID NO: 104752 - DNA, 80 bp, synthetic construct
  misc_feature 1..80: note = Artificially Synthesized Probe
  source 1..80: mol_type = other DNA
ataatgtaattatatatgtcatataatgtaataatatatgtcatatataatgtaataattatatatgtcatatataatgt

SEQ ID NO: 104753 - DNA, 80 bp, synthetic construct
  misc_feature 1..80: note = Artificially Synthesized Probe
  source 1..80: mol_type = other DNA
aggtgctcttcccctttaagactcacggctcttcccgtcaggctgcgtcgcagtcttaaggccccgccttttcagacagc

SEQ ID NO: 104754 - DNA, 80 bp, synthetic construct
  misc_feature 1..80: note = Artificially Synthesized Probe
  source 1..80: mol_type = other DNA
tgtaataattatatatgtcatatacaatgtaataattatatatgtcatatacaatgtaataattatatatatgtcatata

SEQ ID NO: 104755 - DNA, 80 bp, synthetic construct
  misc_feature 1..80: note = Artificially Synthesized Probe
  source 1..80: mol_type = other DNA
taattacttattatttataattaggtgtattctgagagtcttgatctttgtttttcacattttgacatttcatgctcaga

SEQ ID NO: 104756 - DNA, 80 bp, synthetic construct; identical to SEQ ID NO: 36384
  misc_feature 1..80: note = Artificially Synthesized Probe
  source 1..80: mol_type = other DNA

SEQ ID NO: 104757 - DNA, 80 bp, synthetic construct
  misc_feature 1..80: note = Artificially Synthesized Probe
  source 1..80: mol_type = other DNA
gaaggaaagaacaccgtaggcttgtgccttctctttgtttccttgtgttctttagtgcccgcagtcagtctccttgtttt

SEQ ID NO: 104758 - DNA, 80 bp, synthetic construct
  misc_feature 1..80: note = Artificially Synthesized Probe
  source 1..80: mol_type = other DNA
aacatagctactcaaagataatcaaaagtgagaaaagtcagaatagtgtttacttctgggggctgggagactgagggagc

SEQ ID NO: 104759 - DNA, 80 bp, synthetic construct; identical to SEQ ID NO: 36385
  misc_feature 1..80: note = Artificially Synthesized Probe
  source 1..80: mol_type = other DNA

SEQ ID NO: 104760 - DNA, 80 bp, synthetic construct
  misc_feature 1..80: note = Artificially Synthesized Probe
  source 1..80: mol_type = other DNA
ctccctgctgtacttctgaggaaagtgaaagcccttccgcttcctatttcttattgaaatatcttgcacttcaagaaaaa

SEQ ID NO: 104761 - DNA, 80 bp, synthetic construct
  misc_feature 1..80: note = Artificially Synthesized Probe
  source 1..80: mol_type = other DNA
gagcgccgtcggggccgtgggcgcctgcgcgggccggcgcgggagcaagcggcatggcgttccggcaggcgctgcagctg

SEQ ID NO: 104762 - DNA, 80 bp, synthetic construct; identical to SEQ ID NO: 36417
  misc_feature 1..80: note = Artificially Synthesized Probe
  source 1..80: mol_type = other DNA

SEQ ID NO: 104763 - DNA, 80 bp, synthetic construct
  misc_feature 1..80: note = Artificially Synthesized Probe
  source 1..80: mol_type = other DNA
aggagggcacccaggttctgttcacaactcacttcacttcatacatccttttaatttcttaaaaccctcttgtcccttaa

SEQ ID NO: 104764 - DNA, 80 bp, synthetic construct
  misc_feature 1..80: note = Artificially Synthesized Probe
  source 1..80: mol_type = other DNA
acttagctgggtgtgtcgtgggcatctagagtcccagctacttgggaggctgaggtgggtggatcacttgggcccgggag

SEQ ID NO: 104765 - DNA, 80 bp, synthetic construct
  misc_feature 1..80: note = Artificially Synthesized Probe
  source 1..80: mol_type = other DNA
gttcaagtgattctcctgcctcagctcccgagtagctgggattacagtcgcccaccaccatacctggctaattttttgta

SEQ ID NO: 104766 - DNA, 80 bp, synthetic construct; identical to SEQ ID NO: 36418
  misc_feature 1..80: note = Artificially Synthesized Probe
  source 1..80: mol_type = other DNA

SEQ ID NO: 104767 - DNA, 80 bp, synthetic construct
  misc_feature 1..80: note = Artificially Synthesized Probe
  source 1..80: mol_type = other DNA
tgagtaaaatacttcagattgacagctcaatcttagtttgcctccagttaatcttttatgcttagggattaaatgtgtgg

SEQ ID NO: 104768 - DNA, 80 bp, synthetic construct
  misc_feature 1..80: note = Artificially Synthesized Probe
  source 1..80: mol_type = other DNA
gatggttttcccagtcctaactcctcattatactcagtactttgagaaagggggcacagaattatactactgtggttgcg

SEQ ID NO: 104769 - DNA, 80 bp, synthetic construct
  misc_feature 1..80: note = Artificially Synthesized Probe
  source 1..80: mol_type = other DNA
gcgcccaccaccatgcctggctaattttttatttttagtagagatggggtttcaccgtgttggccaggctggtctcgaac

SEQ ID NO: 104770 - DNA, 80 bp, synthetic construct
  misc_feature 1..80: note = Artificially Synthesized Probe
  source 1..80: mol_type = other DNA
aagtggttgtgactattttctgtagtcaatacagttgggatatctgatctatttctctgtctactttggaaatgattgca

SEQ ID NO: 104771 - DNA, 80 bp, synthetic construct
  misc_feature 1..80: note = Artificially Synthesized Probe
  source 1..80: mol_type = other DNA
tgttaactaaggttcatgtttcattgagatttcctcagcttttacctgctgttctgttctagggtcccacatgacaagta

SEQ ID NO: 104772 - DNA, 80 bp, synthetic construct
  misc_feature 1..80: note = Artificially Synthesized Probe
  source 1..80: mol_type = other DNA
ttttccttcttttcttttttctttttccttgagacggagtttcgctcttgttgcccaggctggagtgcaatggtgcaatc

SEQ ID NO: 104773 - DNA, 80 bp, synthetic construct; identical to SEQ ID NO: 36408
  misc_feature 1..80: note = Artificially Synthesized Probe
  source 1..80: mol_type = other DNA

SEQ ID NO: 104774 - DNA, 80 bp, synthetic construct
  misc_feature 1..80: note = Artificially Synthesized Probe
  source 1..80: mol_type = other DNA
gaggtgggcggatcacttgaggtcaggagttcgagaccagcctgaccaacacggtgacactctgtatttactaaaaatac

SEQ ID NO: 104775 - DNA, 80 bp, synthetic construct
  misc_feature 1..80: note = Artificially Synthesized Probe
  source 1..80: mol_type = other DNA
cccaactgggacaggtgcgcgcggggctgtttggggccggggtcgggatgggggtcagggcaggtgttaccgttgggatc

SEQ ID NO: 104776 - DNA, 80 bp, synthetic construct
  misc_feature 1..80: note = Artificially Synthesized Probe
  source 1..80: mol_type = other DNA
aagaaaaaaaagaacttgaagtagaaccgggagctgagcccagcctttctcttttaagcaggtgttctgtatttgcttgt

SEQ ID NO: 104777 - DNA, 80 bp, synthetic construct; identical to SEQ ID NO: 36409
  misc_feature 1..80: note = Artificially Synthesized Probe
  source 1..80: mol_type = other DNA

SEQ ID NO: 104778 - DNA, 80 bp, synthetic construct
  misc_feature 1..80: note = Artificially Synthesized Probe
  source 1..80: mol_type = other DNA
tcagcgagtaaataccagcaggttcgacttttgctattcccagctctgccgcgttgaactttttttgttgctgttgagac

SEQ ID NO: 104779 - DNA, 80 bp, synthetic construct
  misc_feature 1..80: note = Artificially Synthesized Probe
  source 1..80: mol_type = other DNA
gtttttgtagagacggggtccccctgtgttgcccaggctagtcttggactcctgggctccagtgatctgcccacctcggc

SEQ ID NO: 104780 - DNA, 80 bp, synthetic construct
  misc_feature 1..80: note = Artificially Synthesized Probe
  source 1..80: mol_type = other DNA
gtggcacgatctcggctctctgcaacctccgcctcccaggttcaagcgattctcctgcctcagcctcccaagtagctggg

SEQ ID NO: 104781 - DNA, 80 bp, synthetic construct; identical to SEQ ID NO: 36410
  misc_feature 1..80: note = Artificially Synthesized Probe
  source 1..80: mol_type = other DNA

SEQ ID NO: 104782 - DNA, 80 bp, synthetic construct
  misc_feature 1..80: note = Artificially Synthesized Probe
  source 1..80: mol_type = other DNA
tggcgttctccgtaaccacagttgcgtttggggtagtctgtctcctgctgttcactgtctgcctctcattagagaagaag

SEQ ID NO: 104783 - DNA, 80 bp, synthetic construct
  misc_feature 1..80: note = Artificially Synthesized Probe
  source 1..80: mol_type = other DNA
atgctcttcccaaatagtctgacaatttggaaataacatcttgtcagaaaaactcaaacttgggaacagaggtctcaagg

SEQ ID NO: 104784 - DNA, 80 bp, synthetic construct
  misc_feature 1..80: note = Artificially Synthesized Probe
  source 1..80: mol_type = other DNA
ccagtaccacgtggatggctccctggagaaggaccgcactctgaccccgctgggtatgtggtgggttcagatcctctgtg

SEQ ID NO: 104785 - DNA, 80 bp, synthetic construct; identical to SEQ ID NO: 36411
  misc_feature 1..80: note = Artificially Synthesized Probe
  source 1..80: mol_type = other DNA

SEQ ID NO: 104786 - DNA, 80 bp, synthetic construct
  misc_feature 1..80: note = Artificially Synthesized Probe
  source 1..80: mol_type = other DNA
cgtcgcgtcctcgcccttctccccgcccctgcgagtccgccctgggtgccatcgccggagcgcgggccggggcgaggctg

SEQ ID NO: 104787 - DNA, 80 bp, synthetic construct
  misc_feature 1..80: note = Artificially Synthesized Probe
  source 1..80: mol_type = other DNA
gcctgtagtcccagctactcgggaagctgaggcaggagaatggtgtgaaccctggaggcggagcttgcagtgagctgaga

SEQ ID NO: 104788 - DNA, 80 bp, synthetic construct
  misc_feature 1..80: note = Artificially Synthesized Probe
  source 1..80: mol_type = other DNA
ttcgagaccagcctggccaacagggcgaaacctcgtcactactaaaagtacaaaaattagccgggtgcagtggcaggcac

SEQ ID NO: 104789 - DNA, 80 bp, synthetic construct
  misc_feature 1..80: note = Artificially Synthesized Probe
  source 1..80: mol_type = other DNA
gcaaatgttggacagatcttgtttgcatgagaccaaatgcagtgcatatcccagcagtgattttatacctgcttgatgcc

SEQ ID NO: 104790 - DNA, 80 bp, synthetic construct; identical to SEQ ID NO: 36412
  misc_feature 1..80: note = Artificially Synthesized Probe
  source 1..80: mol_type = other DNA

SEQ ID NO: 104791 - DNA, 80 bp, synthetic construct
  misc_feature 1..80: note = Artificially Synthesized Probe
  source 1..80: mol_type = other DNA
cgtgagccaccacacccagcctaatttttttttttttttgtatttttagtagagatggggtttcaccatattggccaggc

SEQ ID NO: 104792 - DNA, 80 bp, synthetic construct
  misc_feature 1..80: note = Artificially Synthesized Probe
  source 1..80: mol_type = other DNA
gctgcatagacagcgtccaggagggtccttccaccttgtccttgtgtccctgtgcaggtggatctgtagaagaaatgcct

SEQ ID NO: 104793 - DNA, 80 bp, synthetic construct
  misc_feature 1..80: note = Artificially Synthesized Probe
  source 1..80: mol_type = other DNA
cagagctgtcctggctgcttgtgcacaaagaaagtggagtgacagatgcaggtgtggctgcatccagtggcttcggcctt

SEQ ID NO: 104794 - DNA, 80 bp, synthetic construct; identical to SEQ ID NO: 36413
  misc_feature 1..80: note = Artificially Synthesized Probe
  source 1..80: mol_type = other DNA

SEQ ID NO: 104795 - DNA, 80 bp, synthetic construct
  misc_feature 1..80: note = Artificially Synthesized Probe
  source 1..80: mol_type = other DNA
gtttgcgggcggaggagggggtgtttgcgggcggaggagggggtgtttgagggtggaggagggcgtgtttgcgggcggag

SEQ ID NO: 104796 - DNA, 80 bp, synthetic construct
  misc_feature 1..80: note = Artificially Synthesized Probe
  source 1..80: mol_type = other DNA
cgccatagagaccaccgatatcatcagccggcacctgccaggtgagtgctgcgcgcggggcctccatgcttgcagcagtg

SEQ ID NO: 104797 - DNA, 80 bp, synthetic construct
  misc_feature 1..80: note = Artificially Synthesized Probe
  source 1..80: mol_type = other DNA
gcggtagctcaggcctgtaatcccagcgtttgggaggctgaggccggaggatcgcttgagaaatttgaaaccagcctggg

SEQ ID NO: 104798 - DNA, 80 bp, synthetic construct
  misc_feature 1..80: note = Artificially Synthesized Probe
  source 1..80: mol_type = other DNA
atcgagccagacccgcccgtgtctcattggaagccggaagctgtggtaaaaacctccccggggggcagctgtgtcaccct

SEQ ID NO: 104799 - DNA, 80 bp, synthetic construct; identical to SEQ ID NO: 36414
  misc_feature 1..80: note = Artificially Synthesized Probe
  source 1..80: mol_type = other DNA

SEQ ID NO: 104800 - DNA, 80 bp, synthetic construct
  misc_feature 1..80: note = Artificially Synthesized Probe
  source 1..80: mol_type = other DNA
gatgccaccctagtcaggcctcaccagcccccgggcgtccacttcccgcgagtcctagtcagttacgcggtaggtggcgt

SEQ ID NO: 104801 - DNA, 80 bp, synthetic construct
  misc_feature 1..80: note = Artificially Synthesized Probe
  source 1..80: mol_type = other DNA
gggtggggggtcctgggtggggtgcgtgctgggtgggggtgtcctgggtggggtgcgtgctgggtgggggtgtcctgggt

SEQ ID NO: 104802 - DNA, 80 bp, synthetic construct
  misc_feature 1..80: note = Artificially Synthesized Probe
  source 1..80: mol_type = other DNA
ctggttgttttccctttgtaattgaacgtcctgtttcccctcaaactcgaccaaccaccttctgcctccggctggatccc

SEQ ID NO: 104803 - DNA, 80 bp, synthetic construct
  misc_feature 1..80: note = Artificially Synthesized Probe
  source 1..80: mol_type = other DNA
agtcacgttgctgctcgggctgctccctcggggggcccttgtccctcaacctgctctggtgccccactctcagcaccaca

SEQ ID NO: 104804 - DNA, 80 bp, synthetic construct; identical to SEQ ID NO: 36415
  misc_feature 1..80: note = Artificially Synthesized Probe
  source 1..80: mol_type = other DNA

SEQ ID NO: 104805 - DNA, 80 bp, synthetic construct
  misc_feature 1..80: note = Artificially Synthesized Probe
  source 1..80: mol_type = other DNA
gtcaagagcagcagctcccagaaagtcgaggatgtacgggccgagattctcaagcttggctccagaccagatagagcttt

SEQ ID NO: 104806 - DNA, 80 bp, synthetic construct
  misc_feature 1..80: note = Artificially Synthesized Probe
  source 1..80: mol_type = other DNA
gtcaccccgaggtgacacaaatgctaaaaatgcacagaaataaccggggcgggagagtggagccgacctgagtccacaca

SEQ ID NO: 104807 - DNA, 80 bp, synthetic construct; identical to SEQ ID NO: 36416
  misc_feature 1..80: note = Artificially Synthesized Probe
  source 1..80: mol_type = other DNA

SEQ ID NO: 104808 - DNA, 80 bp, synthetic construct; identical to SEQ ID NO: 36407
  misc_feature 1..80: note = Artificially Synthesized Probe
  source 1..80: mol_type = other DNA

SEQ ID NO: 104809 - DNA, 80 bp, synthetic construct
  misc_feature 1..80: note = Artificially Synthesized Probe
  source 1..80: mol_type = other DNA
ctgtcctaaagagggcaggtccccaagtgtgatggctccattcatgtcgatcccagtcatcgattcacgtcgatcccagc

SEQ ID NO: 104810 - DNA, 80 bp, synthetic construct
  misc_feature 1..80: note = Artificially Synthesized Probe
  source 1..80: mol_type = other DNA
gacagagtcccctggctctagcccagcccgtttttttttttttagacagaatctcgctctgtcacccaggctggagtgca

SEQ ID NO: 104811 - DNA, 80 bp, synthetic construct
  misc_feature 1..80: note = Artificially Synthesized Probe
  source 1..80: mol_type = other DNA
agctgggatggtctcgatctcctgaccttgtgatccacccgcctggcctcccaaagtgctgggattacaggtgtgagcca

SEQ ID NO: 104812 - DNA, 80 bp, synthetic construct
  misc_feature 1..80: note = Artificially Synthesized Probe
  source 1..80: mol_type = other DNA
ggtgatccgacccaacggccgagttgcgctcaggaccctcggggacacggggttcatgcctcccgacaagatcactcgat

SEQ ID NO: 104813 - DNA, 80 bp, synthetic construct
  misc_feature 1..80: note = Artificially Synthesized Probe
  source 1..80: mol_type = other DNA
gggggccgggaagtcggggaacagcaccgcatcagctgccgggcacctgggcacccgcgtggctggggacgtgtgggaac

SEQ ID NO: 104814 - DNA, 80 bp, synthetic construct
  misc_feature 1..80: note = Artificially Synthesized Probe
  source 1..80: mol_type = other DNA
gccgcctccttggacctcagtcagggacggggaccctcagggaacagaaatgcaaagggagcccggcgagtttcccaaca

SEQ ID NO: 104815 - DNA, 80 bp, synthetic construct
  misc_feature 1..80: note = Artificially Synthesized Probe
  source 1..80: mol_type = other DNA
tgagggaggggtggccctctcctcagtaggaggaagtaagagggtatctaggccaatttattcagctggaaatcaatctg

SEQ ID NO: 104816 - DNA, 80 bp, synthetic construct; identical to SEQ ID NO: 36430
  misc_feature 1..80: note = Artificially Synthesized Probe
  source 1..80: mol_type = other DNA

SEQ ID NO: 104817 - DNA, 80 bp, synthetic construct
  misc_feature 1..80: note = Artificially Synthesized Probe
  source 1..80: mol_type = other DNA
agcgcggggtcccgtccgcctcgacccctaggacacgaagcgccccaaagggccactgtgcacccccaacccgcggcggg

SEQ ID NO: 104818 - DNA, 80 bp, synthetic construct
  misc_feature 1..80: note = Artificially Synthesized Probe
  source 1..80: mol_type = other DNA
gggggccgggcaagcagcagcagcagcagcggccccgccaccaccgcggccaccgcctcgcccccggtcccggtgccagc

SEQ ID NO: 104819 - DNA, 80 bp, synthetic construct
  misc_feature 1..80: note = Artificially Synthesized Probe
  source 1..80: mol_type = other DNA
cgtcgccccgggcacttccgcccgcaggccccgccccgcaggccgagccgggaaggcgagggcggggtcggggggcggga

SEQ ID NO: 104820 - DNA, 80 bp, synthetic construct
  misc_feature 1..80: note = Artificially Synthesized Probe
  source 1..80: mol_type = other DNA
ccaggacggagaggtcgcgccgggcgcgctcggaacacgcaggaaattctccccgaggcgtgggctccgcggggcttccc

SEQ ID NO: 104821 - DNA, 80 bp, synthetic construct; identical to SEQ ID NO: 36431
  misc_feature 1..80: note = Artificially Synthesized Probe
  source 1..80: mol_type = other DNA

SEQ ID NO: 104822 - DNA, 80 bp, synthetic construct
  misc_feature 1..80: note = Artificially Synthesized Probe
  source 1..80: mol_type = other DNA
cctagaaaactcggggaagctttttccgtcttagggccaagtcggcttttccaagcgtggcacagagtccagaagttccg

SEQ ID NO: 104823 - DNA, 80 bp, synthetic construct
  misc_feature 1..80: note = Artificially Synthesized Probe
  source 1..80: mol_type = other DNA
taataaacagctctaaatcaatcacagaaacgctcccctagaaaatactgaaggacagctgccagggatacgctgatcct

SEQ ID NO: 104824 - DNA, 80 bp, synthetic construct; identical to SEQ ID NO: 36432
  misc_feature 1..80: note = Artificially Synthesized Probe
  source 1..80: mol_type = other DNA

SEQ ID NO: 104825 - DNA, 80 bp, synthetic construct
  misc_feature 1..80: note = Artificially Synthesized Probe
  source 1..80: mol_type = other DNA
tcgtgggaacccccccgacttgtccactgaagtaacagcagcaatgaccttccctcgggaattccacctctgcgtttttc

SEQ ID NO: 104826 - DNA, 80 bp, synthetic construct
  misc_feature 1..80: note = Artificially Synthesized Probe
  source 1..80: mol_type = other DNA
cgagcaggcccagggctcggcgggctggtcaggtggcggcagcagcaaggctgcgctcccggccagcaggatgtgccaga

SEQ ID NO: 104827 - DNA, 80 bp, synthetic construct
  misc_feature 1..80: note = Artificially Synthesized Probe
  source 1..80: mol_type = other DNA
gaagcgctgtgctgcttggaaatggtccaccaggtgcagcagtagctgcaagaaaggaacaggaagaacggtgtgttcaa

SEQ ID NO: 104828 - DNA, 80 bp, synthetic construct
  misc_feature 1..80: note = Artificially Synthesized Probe
  source 1..80: mol_type = other DNA
atacctgtttgtaccttttgaacgccgcagcgggtggtgagggtttacggagcgggggaggggaagctgactccacgagc

SEQ ID NO: 104829 - DNA, 80 bp, synthetic construct; identical to SEQ ID NO: 36433
  misc_feature 1..80: note = Artificially Synthesized Probe
  source 1..80: mol_type = other DNA

SEQ ID NO: 104830 - DNA, 80 bp, synthetic construct
  misc_feature 1..80: note = Artificially Synthesized Probe
  source 1..80: mol_type = other DNA
ggagagaagcggcagagcccccacttccagtgctccagctgagggctggtgaacttgaaggtgggtaagaatccccagac

SEQ ID NO: 104831 - DNA, 80 bp, synthetic construct
  misc_feature 1..80: note = Artificially Synthesized Probe
  source 1..80: mol_type = other DNA
tgctcacactttgctggcaggcatgtgaaccccctcaaccttctgaaaattattgtgccaacattaaaatgtaatggaga

SEQ ID NO: 104832 - DNA, 80 bp, synthetic construct
  misc_feature 1..80: note = Artificially Synthesized Probe
  source 1..80: mol_type = other DNA
gtagtcccagctactccagaggctgaggcaggagaatggcgtgaacccaggaggtggaggttgcagtgagccaagattgc

SEQ ID NO: 104833 - DNA, 80 bp, synthetic construct
  misc_feature 1..80: note = Artificially Synthesized Probe
  source 1..80: mol_type = other DNA
gccaacatggcgaattatttttgtctctactaaaaatataaaaattagccaggcatggtgacatgagcctgtaatcccag

SEQ ID NO: 104834 - DNA, 80 bp, synthetic construct; identical to SEQ ID NO: 36434
  misc_feature 1..80: note = Artificially Synthesized Probe
  source 1..80: mol_type = other DNA

SEQ ID NO: 104835 - DNA, 80 bp, synthetic construct
  misc_feature 1..80: note = Artificially Synthesized Probe
  source 1..80: mol_type = other DNA
aggcgcccgctaccattcctggctaattttttttgtttttagtagagatgggatttcaccctgttagccaggatggtctc

SEQ ID NO: 104836 - DNA, 80 bp, synthetic construct
  misc_feature 1..80: note = Artificially Synthesized Probe
  source 1..80: mol_type = other DNA
ggcgcgatcctggctcactgcaagctccgcctcccaggttcacgccattctcctgcctcagcctcccgagtagctgggac

SEQ ID NO: 104837 - DNA, 80 bp, synthetic construct; identical to SEQ ID NO: 36420
  misc_feature 1..80: note = Artificially Synthesized Probe
  source 1..80: mol_type = other DNA

SEQ ID NO: 104838 - DNA, 80 bp, synthetic construct; identical to SEQ ID NO: 36435
  misc_feature 1..80: note = Artificially Synthesized Probe
  source 1..80: mol_type = other DNA

SEQ ID NO: 104839 - DNA, 80 bp, synthetic construct
  misc_feature 1..80: note = Artificially Synthesized Probe
  source 1..80: mol_type = other DNA
gtgtgggagcagctttccacagtcggtgtgctcttcgcccagcagcaataagcattattatagttgtcttggataaaaat

SEQ ID NO: 104840 - DNA, 80 bp, synthetic construct
  misc_feature 1..80: note = Artificially Synthesized Probe
  source 1..80: mol_type = other DNA
gaaaggagtttccctctgtctgttcatggccacctggtagacatgggagaccctgtcttcccactccgccccgagtttcc

SEQ ID NO: 104841 - DNA, 80 bp, synthetic construct
  misc_feature 1..80: note = Artificially Synthesized Probe
  source 1..80: mol_type = other DNA
ccccagagttttggggcttttttaggctcaactatcatgcattattattctttcataaaaaaagggtcattttcccagcc

SEQ ID NO: 104842 - DNA, 80 bp, synthetic construct
  misc_feature 1..80: note = Artificially Synthesized Probe
  source 1..80: mol_type = other DNA
gcctctcctgaagccgaagccaaagcgaaggctttaaaggccaagaaggcagcgttgaaaggtgtccacagccacataaa

SEQ ID NO: 104843 - DNA, 80 bp, synthetic construct; identical to SEQ ID NO: 36436
  misc_feature 1..80: note = Artificially Synthesized Probe
  source 1..80: mol_type = other DNA

SEQ ID NO: 104844 - DNA, 80 bp, synthetic construct
  misc_feature 1..80: note = Artificially Synthesized Probe
  source 1..80: mol_type = other DNA
cactggttggagcaggaccaggaacgtggctagagcaaggggccaggctctcttctccgagcacctgggcagcagtgcca

SEQ ID NO: 104845 - DNA, 80 bp, synthetic construct
  misc_feature 1..80: note = Artificially Synthesized Probe
  source 1..80: mol_type = other DNA
ggatgactgcagggacgtctctgagggctcaaggcccagcaggagcacgcgtaccccacggccccacagcacctctgcct

SEQ ID NO: 104846 - DNA, 80 bp, synthetic construct; identical to SEQ ID NO: 36421
  misc_feature 1..80: note = Artificially Synthesized Probe
  source 1..80: mol_type = other DNA

SEQ ID NO: 104847 - DNA, 80 bp, synthetic construct
  misc_feature 1..80: note = Artificially Synthesized Probe
  source 1..80: mol_type = other DNA
ggtgcttcccagcctcccctctgccctggctgtggggctcccatgggcacccccttggggcagtacccagcctgcagttc

SEQ ID NO: 104848 - DNA, 80 bp, synthetic construct
  misc_feature 1..80: note = Artificially Synthesized Probe
  source 1..80: mol_type = other DNA
cctggcctcccctgcctaccaccttccttcctggcatcctccaaacagctggcactgccccctcacaactgcctgcgggg

SEQ ID NO: 104849 - DNA, 80 bp, synthetic construct
  misc_feature 1..80: note = Artificially Synthesized Probe
  source 1..80: mol_type = other DNA
ccgagtggctgggaccacaggcatgtaccactacgctcggctaacttttcgattttttgtacagcccaggctgctcttga

SEQ ID NO: 104850 - DNA, 80 bp, synthetic construct
  misc_feature 1..80: note = Artificially Synthesized Probe
  source 1..80: mol_type = other DNA
aggggccgtgcccaacgccaggtccggcctctcccacggtactgcctttcgcaggctgcacttgggggccctgctccccc

SEQ ID NO: 104851 - DNA, 80 bp, synthetic construct
  misc_feature 1..80: note = Artificially Synthesized Probe
  source 1..80: mol_type = other DNA
aggtgctgctcctggtcattgcttcccccacaaggtttgcatgaggagcagagacagtccagtctcctgaacacccacag

SEQ ID NO: 104852 - DNA, 80 bp, synthetic construct; identical to SEQ ID NO: 36422
  misc_feature 1..80: note = Artificially Synthesized Probe
  source 1..80: mol_type = other DNA

SEQ ID NO: 104853 - DNA, 80 bp, synthetic construct
  misc_feature 1..80: note = Artificially Synthesized Probe
  source 1..80: mol_type = other DNA
caccgtctgggctgtgctgttgtccgtgcagctccacccacgccagcctgcggtcacaaaaccccgacgcggaggctggg

SEQ ID NO: 104854 - DNA, 80 bp, synthetic construct
  misc_feature 1..80: note = Artificially Synthesized Probe
  source 1..80: mol_type = other DNA
gcagacggattgttggtggggaatgggggagtggggaggaggctttgcccctgcattgctctgcaagggtctctctccag

SEQ ID NO: 104855 - DNA, 80 bp, synthetic construct; identical to SEQ ID NO: 36423
  misc_feature 1..80: note = Artificially Synthesized Probe
  source 1..80: mol_type = other DNA

SEQ ID NO: 104856 - DNA, 80 bp, synthetic construct
  misc_feature 1..80: note = Artificially Synthesized Probe
  source 1..80: mol_type = other DNA
cagcccggcctgtggtcctgagtgaaatgacagggtgcctggcccccgtctctgccctaggtttacttactcagcattct

SEQ ID NO: 104857 - DNA, 80 bp, synthetic construct
  misc_feature 1..80: note = Artificially Synthesized Probe
  source 1..80: mol_type = other DNA
ggggcggggggctggccggggccacgctgacggtgacgcctgcccatcatacctgtggtgcagttgagcgaagtattgaa

SEQ ID NO: 104858 - DNA, 80 bp, synthetic construct
  misc_feature 1..80: note = Artificially Synthesized Probe
  source 1..80: mol_type = other DNA
tggtgcctttctttttttttttttttctgagatggagtcttgctctgtcgcccaggctggagggcagtgccgcgatctcg

SEQ ID NO: 104859 - DNA, 80 bp, synthetic construct
  misc_feature 1..80: note = Artificially Synthesized Probe
  source 1..80: mol_type = other DNA
atctcctgacctcgtgatccaccctcctcggcctcccaaagtgctgggattacaggcgtgagccaccgcgcccggccggt

SEQ ID NO: 104860 - DNA, 80 bp, synthetic construct; identical to SEQ ID NO: 36424
  misc_feature 1..80: note = Artificially Synthesized Probe
  source 1..80: mol_type = other DNA

SEQ ID NO: 104861 - DNA, 80 bp, synthetic construct
  misc_feature 1..80: note = Artificially Synthesized Probe
  source 1..80: mol_type = other DNA
gcgtgtccgaacacaccctcaccgagaccctgtccaggggctggaagtgcaccgacaccacgtccatgtcctcccgcgtg

SEQ ID NO: 104862 - DNA, 80 bp, synthetic construct
  misc_feature 1..80: note = Artificially Synthesized Probe
  source 1..80: mol_type = other DNA
aagctcttctcagggacccaaggctccagagccaggaaaaagggaggggcggggcgggagcctgcatccccagtgcccat

SEQ ID NO: 104863 - DNA, 80 bp, synthetic construct
  misc_feature 1..80: note = Artificially Synthesized Probe
  source 1..80: mol_type = other DNA
cgtggcctgcaagctgccgagaggacaaggggtttggctggaggaaagtctggggatctggggaggggcagggccatccc

SEQ ID NO: 104864 - DNA, 80 bp, synthetic construct; identical to SEQ ID NO: 36425
  misc_feature 1..80: note = Artificially Synthesized Probe
  source 1..80: mol_type = other DNA

SEQ ID NO: 104865 - DNA, 80 bp, synthetic construct
  misc_feature 1..80: note = Artificially Synthesized Probe
  source 1..80: mol_type = other DNA
ctggtgggggccaggcatctggaccacttcccagcccaaccccaggactcagggccaggctctcgcacccactccaccga

SEQ ID NO: 104866 - DNA, 80 bp, synthetic construct
  misc_feature 1..80: note = Artificially Synthesized Probe
  source 1..80: mol_type = other DNA
tggaagacgtaggcacaggtgggagccaagccctagggaaagaacaggtgtgggcgggggcggtgtcagagaatgcaggt

SEQ ID NO: 104867 - DNA, 80 bp, synthetic construct
  misc_feature 1..80: note = Artificially Synthesized Probe
  source 1..80: mol_type = other DNA
ggcagcccccctcaccttcaactcgatcttctgggatgaggggggcaggtgggcggccacgaaccagtccccgggggccg

SEQ ID NO: 104868 - DNA, 80 bp, synthetic construct
  misc_feature 1..80: note = Artificially Synthesized Probe
  source 1..80: mol_type = other DNA
cgggagagcagcaccgggttcaggcacagggcttggccaggcgcgggagggtgggcaggcgggcgggcagccacctacac

SEQ ID NO: 104869 - DNA, 80 bp, synthetic construct; identical to SEQ ID NO: 36426
  misc_feature 1..80: note = Artificially Synthesized Probe
  source 1..80: mol_type = other DNA

SEQ ID NO: 104870 - DNA, 80 bp, synthetic construct
  misc_feature 1..80: note = Artificially Synthesized Probe
  source 1..80: mol_type = other DNA
acatcccaccctcctggcatctgggtcttttcacagctgccgcctcactgcagcagcttccaaacaagccgcagggtacc

SEQ ID NO: 104871 - DNA, 80 bp, synthetic construct
  misc_feature 1..80: note = Artificially Synthesized Probe
  source 1..80: mol_type = other DNA
gccatcgccacccgcactgccatcgccacccgcactgccatcgccacccgcactgccatcgccactctgactgccatccc

SEQ ID NO: 104872 - DNA, 80 bp, synthetic construct
  misc_feature 1..80: note = Artificially Synthesized Probe
  source 1..80: mol_type = other DNA
cactgccacccggaccccctccaaccttagaagactacactccccatggccaacccaggtcgaagccgaaggacccagca

SEQ ID NO: 104873 - DNA, 80 bp, synthetic construct; identical to SEQ ID NO: 36427
  misc_feature 1..80: note = Artificially Synthesized Probe
  source 1..80: mol_type = other DNA

SEQ ID NO: 104874 - DNA, 80 bp, synthetic construct
  misc_feature 1..80: note = Artificially Synthesized Probe
  source 1..80: mol_type = other DNA
ctgggcgccatgggtctcaccacagcctcgccagggaacaggaccatagggagtccttctccccatctctagccacccac

SEQ ID NO: 104875 - DNA, 80 bp, synthetic construct
  misc_feature 1..80: note = Artificially Synthesized Probe
  source 1..80: mol_type = other DNA
ccccgtgccagctccagcctcgtgcccttgcgaccttgggcatccttccctccctgggtcccagccttctcctgggtagg

SEQ ID NO: 104876 - DNA, 80 bp, synthetic construct
  misc_feature 1..80: note = Artificially Synthesized Probe
  source 1..80: mol_type = other DNA
cctaggtctcactggagagtggctggctcaggcccaggcccctcctgaggagggagacaggtgagcagcaggctctcctg

SEQ ID NO: 104877 - DNA, 80 bp, synthetic construct
  misc_feature 1..80: note = Artificially Synthesized Probe
  source 1..80: mol_type = other DNA
tttccaggtgtctgctggccaccaggtcccacccaccaggctgtggcctgataatgtgggcagagaaagctcaagtgctg

SEQ ID NO: 104878 - DNA, 80 bp, synthetic construct; identical to SEQ ID NO: 36428
  misc_feature 1..80: note = Artificially Synthesized Probe
  source 1..80: mol_type = other DNA

SEQ ID NO: 104879 - DNA, 80 bp, synthetic construct; identical to SEQ ID NO: 36419
  misc_feature 1..80: note = Artificially Synthesized Probe
  source 1..80: mol_type = other DNA

SEQ ID NO: 104880 - DNA, 80 bp, synthetic construct
  misc_feature 1..80: note = Artificially Synthesized Probe
  source 1..80: mol_type = other DNA
acacagccccctgcctgccccacagcccctccacggacacagggctgggtggggaaggtggtaatgcaagtccctggccc

SEQ ID NO: 104881 - DNA, 80 bp, synthetic construct
  misc_feature 1..80: note = Artificially Synthesized Probe
  source 1..80: mol_type = other DNA
ctccactgtccacacacaggggttccatctcccaggaacccctcaccaggcctgagttctgggacaggagaatttccttt

SEQ ID NO: 104882 - DNA, 80 bp, synthetic construct
  misc_feature 1..80: note = Artificially Synthesized Probe
  source 1..80: mol_type = other DNA
tttttttctttctgtctttcttttttttttttgagatggagtctcgctctgttgtccaggctggagtgcaatggagcgac

SEQ ID NO: 104883 - DNA, 80 bp, synthetic construct; identical to SEQ ID NO: 36429
  misc_feature 1..80: note = Artificially Synthesized Probe
  source 1..80: mol_type = other DNA

SEQ ID NO: 104884 - DNA, 80 bp, synthetic construct
  misc_feature 1..80: note = Artificially Synthesized Probe
  source 1..80: mol_type = other DNA
caattgggcggccggtttccaattggaagggcttctgagcctcagtcttcgggcggcgctgaccattggcgggcaggatg

SEQ ID NO: 104885 - DNA, 80 bp, synthetic construct
  misc_feature 1..80: note = Artificially Synthesized Probe
  source 1..80: mol_type = other DNA
atcatataggttttaagccaccgtcattggctttctaatgatcatttctctggagccacttcagctgtgctttttgtttg

SEQ ID NO: 104886 - DNA, 80 bp, synthetic construct
  misc_feature 1..80: note = Artificially Synthesized Probe
  source 1..80: mol_type = other DNA
accatgcctggctattttttgtattttagtagatagggggtttcacggtgttgcccaggctggtcgcgaactcctgagct

SEQ ID NO: 104887 - DNA, 80 bp, synthetic construct; identical to SEQ ID NO: 36448
  misc_feature 1..80: note = Artificially Synthesized Probe
  source 1..80: mol_type = other DNA

SEQ ID NO: 104888 - DNA, 80 bp, synthetic construct
  misc_feature 1..80: note = Artificially Synthesized Probe
  source 1..80: mol_type = other DNA
ccgtctcactctctggccacagtttgggtggctgtagccccatgtaagtcaaagacagatccagccgcacctgggaagca

SEQ ID NO: 104889 - DNA, 80 bp, synthetic construct
  misc_feature 1..80: note = Artificially Synthesized Probe
  source 1..80: mol_type = other DNA
agctgttcctctttgaagaggtcgatgctgaaaggaggccgctgtggtggtgactcggaattagaaccctgactaccttc

SEQ ID NO: 104890 - DNA, 80 bp, synthetic construct
  misc_feature 1..80: note = Artificially Synthesized Probe
  source 1..80: mol_type = other DNA
actccatggcaaaaaaggacactggtgaagtagcggtagcactcctccacgttgcccaagggggttgctggtagggaaag

SEQ ID NO: 104891 - DNA, 80 bp, synthetic construct
  misc_feature 1..80: note = Artificially Synthesized Probe
  source 1..80: mol_type = other DNA
agtgattctcctgcctcagcctcccgagtagctgggattacaggcgcgcgccaccacgccggctaatttatatttttagt

SEQ ID NO: 104892 - DNA, 80 bp, synthetic construct; identical to SEQ ID NO: 36449
  misc_feature 1..80: note = Artificially Synthesized Probe
  source 1..80: mol_type = other DNA

SEQ ID NO: 104893 - DNA, 80 bp, synthetic construct
  misc_feature 1..80: note = Artificially Synthesized Probe
  source 1..80: mol_type = other DNA
gaaagctgatggcttgtgtatgatgatgctactaataatgacatattccaggcagaaatcccctgcttctgcttcccatg

SEQ ID NO: 104894 - DNA, 80 bp, synthetic construct
  misc_feature 1..80: note = Artificially Synthesized Probe
  source 1..80: mol_type = other DNA
gcagaagaggtccagggtgatggcgtccctcaggctctgctcaggacaccctagctccagcagctcagccagcacccttg

SEQ ID NO: 104895 - DNA, 80 bp, synthetic construct
  misc_feature 1..80: note = Artificially Synthesized Probe
  source 1..80: mol_type = other DNA
gcattggtggtcttctccagctggtgcatggaatggacgtccaggtacttcctgttatagtaaaagaaaaagagtattgg

SEQ ID NO: 104896 - DNA, 80 bp, synthetic construct; identical to SEQ ID NO: 36450
  misc_feature 1..80: note = Artificially Synthesized Probe
  source 1..80: mol_type = other DNA

SEQ ID NO: 104897 - DNA, 80 bp, synthetic construct
  misc_feature 1..80: note = Artificially Synthesized Probe
  source 1..80: mol_type = other DNA
aggcctcagtctcatctgtaaaatggggatgccctggccacagacaggactgttggggagacaataaagaacgcaaatat

SEQ ID NO: 104898 - DNA, 80 bp, synthetic construct
  misc_feature 1..80: note = Artificially Synthesized Probe
  source 1..80: mol_type = other DNA
cagtggagaacacctagtgactagactcttaccttgggtcaaccccattttttcacggattcattcatttatgccttcaa

SEQ ID NO: 104899 - DNA, 80 bp, synthetic construct
  misc_feature 1..80: note = Artificially Synthesized Probe
  source 1..80: mol_type = other DNA
aggaggagtcacctttgggctgggtcttgaggtatgagtaggagttcaggggggggtctttaaaatcgcaaaaatgtatg

SEQ ID NO: 104900 - DNA, 80 bp, synthetic construct
  misc_feature 1..80: note = Artificially Synthesized Probe
  source 1..80: mol_type = other DNA
aggtggagggttttgccccacctatgatgtatgaattcagatttgtgtaaaaaaataaaaaaaaaattgcaccggccaaa

SEQ ID NO: 104901 - DNA, 80 bp, synthetic construct
  misc_feature 1..80: note = Artificially Synthesized Probe
  source 1..80: mol_type = other DNA
aggataagaaacaggatttgaggctggatcctggagggatttgctccttagtctgaggaatgtgtagggtcatatggagt

SEQ ID NO: 104902 - DNA, 80 bp, synthetic construct
  misc_feature 1..80: note = Artificially Synthesized Probe
  source 1..80: mol_type = other DNA
cgcccgaatgcgcctgcgcggcaacagccgcctgcccttgcgccccttccccctgcctcctgggcacatctccccactcc

SEQ ID NO: 104903 - DNA, 80 bp, synthetic construct; identical to SEQ ID NO: 36439
  misc_feature 1..80: note = Artificially Synthesized Probe
  source 1..80: mol_type = other DNA

SEQ ID NO: 104904 - DNA, 80 bp, synthetic construct
  misc_feature 1..80: note = Artificially Synthesized Probe
  source 1..80: mol_type = other DNA
agcctggatttgaacccaggccctacctgccttccctgtgagctttgtgttgtgccttgctgggtactcaggtttctgag

SEQ ID NO: 104905 - DNA, 80 bp, synthetic construct
  misc_feature 1..80: note = Artificially Synthesized Probe
  source 1..80: mol_type = other DNA
tcttgcagaggagtgagctctgtggtccgccgttgtgttcatcgagctactggccacgagtttgcggtgaagattatgga

SEQ ID NO: 104906 - DNA, 80 bp, synthetic construct
  misc_feature 1..80: note = Artificially Synthesized Probe
  source 1..80: mol_type = other DNA
ctgctggccctgcccatagcccacttccgccaacattgcctccacacctctcctcccttcattccactaaagagtggcca

SEQ ID NO: 104907 - DNA, 80 bp, synthetic construct; identical to SEQ ID NO: 36440
  misc_feature 1..80: note = Artificially Synthesized Probe
  source 1..80: mol_type = other DNA

SEQ ID NO: 104908 - DNA, 80 bp, synthetic construct
  misc_feature 1..80: note = Artificially Synthesized Probe
  source 1..80: mol_type = other DNA
gcaaattctttaatagtgactagtggctgggtgcagtggctcacgcctgtaatcccagcactttgggaggccgaggcggg

SEQ ID NO: 104909 - DNA, 80 bp, synthetic construct
  misc_feature 1..80: note = Artificially Synthesized Probe
  source 1..80: mol_type = other DNA
gcttgcagtgagcccagattgcgccactgcactccagcgtgggcgacagagtgagactccatctcaaaaaataaagtaat

SEQ ID NO: 104910 - DNA, 80 bp, synthetic construct
  misc_feature 1..80: note = Artificially Synthesized Probe
  source 1..80: mol_type = other DNA
ggtgcctgtaatcccagctaatcgggaggcaggagaattgcttgaacccgggaggcggaggttgcagtgagctgagttcg

SEQ ID NO: 104911 - DNA, 80 bp, synthetic construct; identical to SEQ ID NO: 36441
  misc_feature 1..80: note = Artificially Synthesized Probe
  source 1..80: mol_type = other DNA

SEQ ID NO: 104912 - DNA, 80 bp, synthetic construct
  misc_feature 1..80: note = Artificially Synthesized Probe
  source 1..80: mol_type = other DNA
cctacactccccaaaacagcacctgataatgttactttgaggactgatgcagagtgcaagtataacctcaattttgaaag

SEQ ID NO: 104913 - DNA, 80 bp, synthetic construct
  misc_feature 1..80: note = Artificially Synthesized Probe
  source 1..80: mol_type = other DNA
agcctgtgggcctccctgccctcactgccctcctcctccgcgcaggcccccgcctccttcaggatgacgctggacgtggg

SEQ ID NO: 104914 - DNA, 80 bp, synthetic construct
  misc_feature 1..80: note = Artificially Synthesized Probe
  source 1..80: mol_type = other DNA
ttactctcaacaagaacctcctataaattatattgtcacaagaagtctcttatttttgccataattgccccatcatggca

SEQ ID NO: 104915 - DNA, 80 bp, synthetic construct
  misc_feature 1..80: note = Artificially Synthesized Probe
  source 1..80: mol_type = other DNA
ccactgtgggatgcagctgcctcctatgcccctccttcccttaggatgcggaagggagagctgtttgactatctcacaga

SEQ ID NO: 104916 - DNA, 80 bp, synthetic construct; identical to SEQ ID NO: 36442
  misc_feature 1..80: note = Artificially Synthesized Probe
  source 1..80: mol_type = other DNA

SEQ ID NO: 104917 - DNA, 80 bp, synthetic construct
  misc_feature 1..80: note = Artificially Synthesized Probe
  source 1..80: mol_type = other DNA
gccaagaaaaagggagaagtcattgggcacttgccaagtatcctgtgggcgcaaagcctatgtttacctcagagtgggca

SEQ ID NO: 104918 - DNA, 80 bp, synthetic construct
  misc_feature 1..80: note = Artificially Synthesized Probe
  source 1..80: mol_type = other DNA
aagggagccacatgttcagccacgtttggggtctggagtgcaggaccacaagagcctgatgtgatgtgtccagactgcac

SEQ ID NO: 104919 - DNA, 80 bp, synthetic construct
  misc_feature 1..80: note = Artificially Synthesized Probe
  source 1..80: mol_type = other DNA
ggtttgtactagacttatgaaaagctaccgtttactgggcattcacctgtgaggcaggcaccagtctttttttttctttt

SEQ ID NO: 104920 - DNA, 80 bp, synthetic construct
  misc_feature 1..80: note = Artificially Synthesized Probe
  source 1..80: mol_type = other DNA
gctcatttttgtatttttagtagagatggaatttcacaatgttggccaggctggtcttgaactcctgacctcaagtgatc

SEQ ID NO: 104921 - DNA, 80 bp, synthetic construct; identical to SEQ ID NO: 36443
  misc_feature 1..80: note = Artificially Synthesized Probe
  source 1..80: mol_type = other DNA

SEQ ID NO: 104922 - DNA, 80 bp, synthetic construct
  misc_feature 1..80: note = Artificially Synthesized Probe
  source 1..80: mol_type = other DNA
tccccttgctttctgttctcccatcttcttcattcacaacacgtcttactgtattgttatttctcacttgccttcaggta

SEQ ID NO: 104923 - DNA, 80 bp, synthetic construct
  misc_feature 1..80: note = Artificially Synthesized Probe
  source 1..80: mol_type = other DNA
acaaggttcagaaagtactggaagaattggtgcccgagtggtagaacaaactaaaaatacagacttgagccaagcgtggt

SEQ ID NO: 104924 - DNA, 80 bp, synthetic construct
  misc_feature 1..80: note = Artificially Synthesized Probe
  source 1..80: mol_type = other DNA
ggagagttcgcgggtggtggtggtggtggtggtggtggtggtggtggtggtggtggtggtggtggtggtggtggtggtgg

SEQ ID NO: 104925 - DNA, 80 bp, synthetic construct; identical to SEQ ID NO: 36444
  misc_feature 1..80: note = Artificially Synthesized Probe
  source 1..80: mol_type = other DNA

SEQ ID NO: 104926 - DNA, 80 bp, synthetic construct
  misc_feature 1..80: note = Artificially Synthesized Probe
  source 1..80: mol_type = other DNA
aacacggtgaaagcctgtctctactaaagattcaaaaaattagccaggcgtggtggcacgtgcctgtaatcccagctact

SEQ ID NO: 104927 - DNA, 80 bp, synthetic construct
  misc_feature 1..80: note = Artificially Synthesized Probe
  source 1..80: mol_type = other DNA
cttgggttgagtgatagttggagattataggaggaggaagaggtttgggcagataggaatgcagaaaatttttttttgcg

SEQ ID NO: 104928 - DNA, 80 bp, synthetic construct
  misc_feature 1..80: note = Artificially Synthesized Probe
  source 1..80: mol_type = other DNA
aaatgatatggtggaacaaggaccttgaaatcaatccaaaacccaggttttcctaggaaggccaccaggagccatggtga

SEQ ID NO: 104929 - DNA, 80 bp, synthetic construct; identical to SEQ ID NO: 36445
  misc_feature 1..80: note = Artificially Synthesized Probe
  source 1..80: mol_type = other DNA

SEQ ID NO: 104930 - DNA, 80 bp, synthetic construct
  misc_feature 1..80: note = Artificially Synthesized Probe
  source 1..80: mol_type = other DNA
gttcacactcctggctggctcgccacccttctggcaccggcggcagatcctgatgttacgcatgatcatggagggccagt

SEQ ID NO: 104931 - DNA, 80 bp, synthetic construct
  misc_feature 1..80: note = Artificially Synthesized Probe
  source 1..80: mol_type = other DNA
aggcacgcctgacagctgagcaggccctacagcaccccttctttgagcgttgtgaaggcagccaaccctggaacctcacc

SEQ ID NO: 104932 - DNA, 80 bp, synthetic construct
  misc_feature 1..80: note = Artificially Synthesized Probe
  source 1..80: mol_type = other DNA
cacccatcgtgtacggccactgaccaagaatgcactgttgagggacccttatgcgctgcggtcagtgcggcacctcatcg

SEQ ID NO: 104933 - DNA, 80 bp, synthetic construct
  misc_feature 1..80: note = Artificially Synthesized Probe
  source 1..80: mol_type = other DNA
ccgtgcttgtgctgggctaggacctcaaccccagggattcccaggaagcagaactctccagaagaagggttttgatcatt

SEQ ID NO: 104934 - DNA, 80 bp, synthetic construct; identical to SEQ ID NO: 36446
  misc_feature 1..80: note = Artificially Synthesized Probe
  source 1..80: mol_type = other DNA

SEQ ID NO: 104935 - DNA, 80 bp, synthetic construct; identical to SEQ ID NO: 36437
  misc_feature 1..80: note = Artificially Synthesized Probe
  source 1..80: mol_type = other DNA

SEQ ID NO: 104936 - DNA, 80 bp, synthetic construct
  misc_feature 1..80: note = Artificially Synthesized Probe
  source 1..80: mol_type = other DNA
acttgctgctgagcctttcctcgctggccttgagccgctcctccaccagcccctggagctgctccagctctttgttcact

SEQ ID NO: 104937 - DNA, 80 bp, synthetic construct
  misc_feature 1..80: note = Artificially Synthesized Probe
  source 1..80: mol_type = other DNA
tagcaatgttgtttccctttaggaaatgttagcaagcccttgtgtgagaggtagttgggtagggtggctatgctggactt

SEQ ID NO: 104938 - DNA, 80 bp, synthetic construct; identical to SEQ ID NO: 36447
  misc_feature 1..80: note = Artificially Synthesized Probe
  source 1..80: mol_type = other DNA

SEQ ID NO: 104939 - DNA, 80 bp, synthetic construct
  misc_feature 1..80: note = Artificially Synthesized Probe
  source 1..80: mol_type = other DNA
actttttgtatttttagtagagacggggtttcacagtgttagccaggatggactcgatctcctgacctcgtgatccgcct

SEQ ID NO: 104940 - DNA, 80 bp, synthetic construct
  misc_feature 1..80: note = Artificially Synthesized Probe
  source 1..80: mol_type = other DNA
gaggctaacccggcccctggcttcgtttggagggcagataactgaaaccacataaggctttggaatcctgagaaacaaga

SEQ ID NO: 104941 - DNA, 80 bp, synthetic construct
  misc_feature 1..80: note = Artificially Synthesized Probe
  source 1..80: mol_type = other DNA
aatccccaaatcaatatcacagagtttagagtccaggccctcggctaaaattagaccccatagagtttctagtattaatt

SEQ ID NO: 104942 - DNA, 80 bp, synthetic construct
  misc_feature 1..80: note = Artificially Synthesized Probe
  source 1..80: mol_type = other DNA
gttcacccagcagtagagaagtccccgggctggtccaatttgagtcagtgacattccagtaaatgtctggatattcccct

SEQ ID NO: 104943 - DNA, 80 bp, synthetic construct; identical to SEQ ID NO: 36462
  misc_feature 1..80: note = Artificially Synthesized Probe
  source 1..80: mol_type = other DNA

SEQ ID NO: 104944 - DNA, 80 bp, synthetic construct
  misc_feature 1..80: note = Artificially Synthesized Probe
  source 1..80: mol_type = other DNA
cctgggatcattactgtgtccattataatctttctctttctctttgaaagctggtcaggaatgggagaagtgtcagacac

SEQ ID NO: 104945 - DNA, 80 bp, synthetic construct
  misc_feature 1..80: note = Artificially Synthesized Probe
  source 1..80: mol_type = other DNA
tgtgtaaatttaaatgtcaatttattgaagtgtaaatttcatcaaaggcattagctgacaggctggtaacagtccacaca

SEQ ID NO: 104946 - DNA, 80 bp, synthetic construct; identical to SEQ ID NO: 36463
  misc_feature 1..80: note = Artificially Synthesized Probe
  source 1..80: mol_type = other DNA

SEQ ID NO: 104947 - DNA, 80 bp, synthetic construct
  misc_feature 1..80: note = Artificially Synthesized Probe
  source 1..80: mol_type = other DNA
attgcttgaacttggaaggcggaggtttcagtgagctgagtttgcgccactgcgctccagcctgggcaacagagtgaggc

SEQ ID NO: 104948 - DNA, 80 bp, synthetic construct; identical to SEQ ID NO: 36452
  misc_feature 1..80: note = Artificially Synthesized Probe
  source 1..80: mol_type = other DNA

SEQ ID NO: 104949 - DNA, 80 bp, synthetic construct
  misc_feature 1..80: note = Artificially Synthesized Probe
  source 1..80: mol_type = other DNA
cagtaaaaccccatttaccagccatgtgacttgggagagttttcagaaccttagttaccacctctgaaaccatgggaaat

SEQ ID NO: 104950 - DNA, 80 bp, synthetic construct
  misc_feature 1..80: note = Artificially Synthesized Probe
  source 1..80: mol_type = other DNA
ggagaaaatatccagttctcctgttttcagcaattagaagaaactcctcctccaccgagtgcaactcttgggagtaattt

SEQ ID NO: 104951 - DNA, 80 bp, synthetic construct
  misc_feature 1..80: note = Artificially Synthesized Probe
  source 1..80: mol_type = other DNA
caaggtggaatgaaatggtatctgccctgcttcctggcccccgtttggtcatgagcctatcactataatggtagtaagat

SEQ ID NO: 104952 - DNA, 80 bp, synthetic construct; identical to SEQ ID NO: 36464
  misc_feature 1..80: note = Artificially Synthesized Probe
  source 1..80: mol_type = other DNA

SEQ ID NO: 104953 - DNA, 80 bp, synthetic construct
  misc_feature 1..80: note = Artificially Synthesized Probe
  source 1..80: mol_type = other DNA
tctgccaagacaccaagtgcccttcttggcaaacgatgatcacccctgccctagtgtccctccagttagttggcagaaac

SEQ ID NO: 104954 - DNA, 80 bp, synthetic construct
  misc_feature 1..80: note = Artificially Synthesized Probe
  source 1..80: mol_type = other DNA
tcctctactggaagaggtgactcagaccccacagagtaggtgtgatgtcactgctctggcagtctcagtttaaccttcac

SEQ ID NO: 104955 - DNA, 80 bp, synthetic construct
  misc_feature 1..80: note = Artificially Synthesized Probe
  source 1..80: mol_type = other DNA
taccatcctattaacagtctctttaatagtctgggagagggacatgaaggacccaaggcaggaagtttcctgtttaccct

SEQ ID NO: 104956 - DNA, 80 bp, synthetic construct; identical to SEQ ID NO: 36465
  misc_feature 1..80: note = Artificially Synthesized Probe
  source 1..80: mol_type = other DNA

SEQ ID NO: 104957 - DNA, 80 bp, synthetic construct
  misc_feature 1..80: note = Artificially Synthesized Probe
  source 1..80: mol_type = other DNA
gttcaacaggatgtcccagattctcagatagggcccaactaccctaagcatacctagcaagggcaggctgcggcatggaa

SEQ ID NO: 104958 - DNA, 80 bp, synthetic construct
  misc_feature 1..80: note = Artificially Synthesized Probe
  source 1..80: mol_type = other DNA
cctcagtttccatatccataaaatggcgatggtaattatactagcctcacagtgtctgatgagatctctggagcctattt

SEQ ID NO: 104959 - DNA, 80 bp, synthetic construct
  misc_feature 1..80: note = Artificially Synthesized Probe
  source 1..80: mol_type = other DNA
tacctgtaagcaaagtgtgggctacacacatctgtagtcgctgaggctagagcttgactcgagagaggaaaggaagaatg

SEQ ID NO: 104960 - DNA, 80 bp, synthetic construct; identical to SEQ ID NO: 36453
  misc_feature 1..80: note = Artificially Synthesized Probe
  source 1..80: mol_type = other DNA

SEQ ID NO: 104961 - DNA, 80 bp, synthetic construct
  misc_feature 1..80: note = Artificially Synthesized Probe
  source 1..80: mol_type = other DNA
gccccacttcctatgagagaaactgcttgggtgagggaggtgaaaggagccctggagggtgttctctgaggttttcttca

SEQ ID NO: 104962 - DNA, 80 bp, synthetic construct
  misc_feature 1..80: note = Artificially Synthesized Probe
  source 1..80: mol_type = other DNA
ccctttctggggaaattttattttcctgtggcttctgtgactttgtcgtcttgctcttgacatgagatatgatgggaaga

SEQ ID NO: 104963 - DNA, 80 bp, synthetic construct
  misc_feature 1..80: note = Artificially Synthesized Probe
  source 1..80: mol_type = other DNA
ttagcaacttaaataagcaatagcaataacggcaatagggcagaatgtaatgagggcatagcacactgtctagtgaggat

SEQ ID NO: 104964 - DNA, 80 bp, synthetic construct
  misc_feature 1..80: note = Artificially Synthesized Probe
  source 1..80: mol_type = other DNA
gcctctgatgcttttgctttcctttcaaatttcccaggctggtgtttgaaagttcttgaggagcctttatgactcctttt

SEQ ID NO: 104965 - DNA, 80 bp, synthetic construct; identical to SEQ ID NO: 36454
  misc_feature 1..80: note = Artificially Synthesized Probe
  source 1..80: mol_type = other DNA

SEQ ID NO: 104966 - DNA, 80 bp, synthetic construct
  misc_feature 1..80: note = Artificially Synthesized Probe
  source 1..80: mol_type = other DNA
tgagtagaacttcacactttggtctgtttcaccatcatgacaattttgtgagataggaaaaaaaaaaagtctgctcccat

SEQ ID NO: 104967 - DNA, 80 bp, synthetic construct
  misc_feature 1..80: note = Artificially Synthesized Probe
  source 1..80: mol_type = other DNA
agctgtatggaactttaccaacgacagttcagggcttcacagtgacacctactgaacccatttgctgtcaagatgctttc

SEQ ID NO: 104968 - DNA, 80 bp, synthetic construct
  misc_feature 1..80: note = Artificially Synthesized Probe
  source 1..80: mol_type = other DNA
ctggtagcaacacccctgaattcctggtggtgaaaggatgtggccccaggacccatcccggaaggaggtgctgaggtttg

SEQ ID NO: 104969 - DNA, 80 bp, synthetic construct; identical to SEQ ID NO: 36455
  misc_feature 1..80: note = Artificially Synthesized Probe
  source 1..80: mol_type = other DNA

SEQ ID NO: 104970 - DNA, 80 bp, synthetic construct
  misc_feature 1..80: note = Artificially Synthesized Probe
  source 1..80: mol_type = other DNA
tcaaagtattgccctgtgtccccttactaggagactgagcattgtgtcagttgagtgggagaaacgtggcaatgtgcaag

SEQ ID NO: 104971 - DNA, 80 bp, synthetic construct
  misc_feature 1..80: note = Artificially Synthesized Probe
  source 1..80: mol_type = other DNA
atcacgtatatatgaattatttgctgcctagcacagtgcttggtgcctagctcagtatgttcataaatgaatgaatgttg

SEQ ID NO: 104972 - DNA, 80 bp, synthetic construct; identical to SEQ ID NO: 36451
  misc_feature 1..80: note = Artificially Synthesized Probe
  source 1..80: mol_type = other DNA

SEQ ID NO: 104973 - DNA, 80 bp, synthetic construct
  misc_feature 1..80: note = Artificially Synthesized Probe
  source 1..80: mol_type = other DNA
agattagttaaacgtgtccacctgcaggctagggctgtttatctgtgactgtcactcctatcctgtttgtttttactgtt

SEQ ID NO: 104974 - DNA, 80 bp, synthetic construct; identical to SEQ ID NO: 36456
  misc_feature 1..80: note = Artificially Synthesized Probe
  source 1..80: mol_type = other DNA

SEQ ID NO: 104975 - DNA, 80 bp, synthetic construct
  misc_feature 1..80: note = Artificially Synthesized Probe
  source 1..80: mol_type = other DNA
tctcgccctgtccccccaggctggagtgcaaaggcgcgatcttggctcactgtaacctctgcctcccaggtttaaatgat

SEQ ID NO: 104976 - DNA, 80 bp, synthetic construct
  misc_feature 1..80: note = Artificially Synthesized Probe
  source 1..80: mol_type = other DNA
gctccgcttcccgggttcacgccattctcctgcctcagcctcccgagtagctgggactacaggcgcccgccaccgcgccc

SEQ ID NO: 104977 - DNA, 80 bp, synthetic construct
  misc_feature 1..80: note = Artificially Synthesized Probe
  source 1..80: mol_type = other DNA
tctaacagtaaatgcgatttaattatcatccccccacttccaatgctcaagccatcagagtatatccctaagttaccctt

SEQ ID NO: 104978 - DNA, 80 bp, synthetic construct
  misc_feature 1..80: note = Artificially Synthesized Probe
  source 1..80: mol_type = other DNA
atcacttgagtgtgagttctggggaaagggtgttagagatttgaggaaagagaaaaacatgtaacatgtaacaaattgtt

SEQ ID NO: 104979 - DNA, 80 bp, synthetic construct; identical to SEQ ID NO: 36457
  misc_feature 1..80: note = Artificially Synthesized Probe
  source 1..80: mol_type = other DNA

SEQ ID NO: 104980 - DNA, 80 bp, synthetic construct
  misc_feature 1..80: note = Artificially Synthesized Probe
  source 1..80: mol_type = other DNA
gacttctctctcttccactccattgaaatagcccttgtcaaagtcaccagttactttcacattgttaaatccagtggtca

SEQ ID NO: 104981 - DNA, 80 bp, synthetic construct
  misc_feature 1..80: note = Artificially Synthesized Probe
  source 1..80: mol_type = other DNA
ctagccttcagatgttaacatgtccagggttcagtcctcaagaagagttctaagtgtttttgaaacagggtctcatgctg

SEQ ID NO: 104982 - DNA, 80 bp, synthetic construct
  misc_feature 1..80: note = Artificially Synthesized Probe
  source 1..80: mol_type = other DNA
agtagagacaaggtcttgctacgttgcccaggctggtcttaaactcctcggctcaagtgatccttccacctcagcctccc

SEQ ID NO: 104983 - DNA, 80 bp, synthetic construct
  misc_feature 1..80: note = Artificially Synthesized Probe
  source 1..80: mol_type = other DNA
gtggcggggggccttgaaggagagcgaagtgcgagagaactcttcaggtgtcaccaaggtgggaaggtgctacgaggcga

SEQ ID NO: 104984 - DNA, 80 bp, synthetic construct; identical to SEQ ID NO: 36458
  misc_feature 1..80: note = Artificially Synthesized Probe
  source 1..80: mol_type = other DNA

SEQ ID NO: 104985 - DNA, 80 bp, synthetic construct
  misc_feature 1..80: note = Artificially Synthesized Probe
  source 1..80: mol_type = other DNA
gcctgtctcactgggatgctgaacacttcttgttcattgctgagcatggctacctgtatgagcacaactttgccttcttt

SEQ ID NO: 104986 - DNA, 80 bp, synthetic construct
  misc_feature 1..80: note = Artificially Synthesized Probe
  source 1..80: mol_type = other DNA
tgtctggttttgcactgtccccaccagtccttttatgcagctctgcttttctgtctcagccctgccaatgtcttcctggc

SEQ ID NO: 104987 - DNA, 80 bp, synthetic construct
  misc_feature 1..80: note = Artificially Synthesized Probe
  source 1..80: mol_type = other DNA
ttctcaatgccaaggctttttctcttctctaacgatgctgaatcctctgagacagctctttaagctgatggcctctctgt

SEQ ID NO: 104988 - DNA, 80 bp, synthetic construct; identical to SEQ ID NO: 36459
  misc_feature 1..80: note = Artificially Synthesized Probe
  source 1..80: mol_type = other DNA

SEQ ID NO: 104989 - DNA, 80 bp, synthetic construct
  misc_feature 1..80: note = Artificially Synthesized Probe
  source 1..80: mol_type = other DNA
aagcccgatcttggattcctcagtcctcaggtgtttgtgtacgtggtccacgctgcagtgctgctgctgtttggaggtct

SEQ ID NO: 104990 - DNA, 80 bp, synthetic construct
  misc_feature 1..80: note = Artificially Synthesized Probe
  source 1..80: mol_type = other DNA
atttagggttattctttatgccagactctgggtcagacctctaaggatgaaacataaataagacaaaattgcggccaggc

SEQ ID NO: 104991 - DNA, 80 bp, synthetic construct
  misc_feature 1..80: note = Artificially Synthesized Probe
  source 1..80: mol_type = other DNA
taatcccagctactcagaaggctgaggcagaaaattgcttgaacccgggaggtggaggttgcagtgagctgacattgcac

SEQ ID NO: 104992 - DNA, 80 bp, synthetic construct; identical to SEQ ID NO: 36460
  misc_feature 1..80: note = Artificially Synthesized Probe
  source 1..80: mol_type = other DNA

SEQ ID NO: 104993 - DNA, 80 bp, synthetic construct
  misc_feature 1..80: note = Artificially Synthesized Probe
  source 1..80: mol_type = other DNA
cacgttggccaggctggtctcgaaatcctgacctcaagtgatctgcccgcctcatcctcctaaagtgctgggattacagg

SEQ ID NO: 104994 - DNA, 80 bp, synthetic construct
  misc_feature 1..80: note = Artificially Synthesized Probe
  source 1..80: mol_type = other DNA
ctcccgagtagctgggactacaggcacctgccaccatgcctggctaattttttgtatttttagtagagacgggatttcac

SEQ ID NO: 104995 - DNA, 80 bp, synthetic construct
  misc_feature 1..80: note = Artificially Synthesized Probe
  source 1..80: mol_type = other DNA
ggttcggtccccgccggggaggtcgggacgggcaggggctgaggaccccgcgccagcttgggagccctggagttctggcg

SEQ ID NO: 104996 - DNA, 80 bp, synthetic construct; identical to SEQ ID NO: 36461
  misc_feature 1..80: note = Artificially Synthesized Probe
  source 1..80: mol_type = other DNA

SEQ ID NO: 104997 - DNA, 80 bp, synthetic construct
  misc_feature 1..80: note = Artificially Synthesized Probe
  source 1..80: mol_type = other DNA
tcttgactgttgacttcaggaggttctcaactcaggcaggcccccaatttccagaggagataaccttaaccaatgttttg

SEQ ID NO: 104998 - DNA, 80 bp, synthetic construct
  misc_feature 1..80: note = Artificially Synthesized Probe
  source 1..80: mol_type = other DNA
ctccaagctgtatggataagagacacagaggaaatagaaagtagcattccgtgtttttagctagattaaatcgtagaatg

SEQ ID NO: 104999 - DNA, 80 bp, synthetic construct
  misc_feature 1..80: note = Artificially Synthesized Probe
  source 1..80: mol_type = other DNA
gtcagacagctcttttattgactttgtctgcttggtgcgggggttgggggggtgtcgaggctctagaagcggccatgccc

SEQ ID NO: 105000 - DNA, 80 bp, synthetic construct; identical to SEQ ID NO: 36476
  misc_feature 1..80: note = Artificially Synthesized Probe
  source 1..80: mol_type = other DNA

SEQ ID NO: 105001 - DNA, 80 bp, synthetic construct
  misc_feature 1..80: note = Artificially Synthesized Probe
  source 1..80: mol_type = other DNA
ctgcccgcctcggcctcccaaagtgctgggattacaggcgtgagccaccgcgcctggccctttttaatgttttatataga

SEQ ID NO: 105002 - DNA, 80 bp, synthetic construct
  misc_feature 1..80: note = Artificially Synthesized Probe
  source 1..80: mol_type = other DNA
gatgtactgagattttcttctggagtgcatttcggaagcgtgcacagccgcgtgcttgcttcttctgagttatctggcgt

SEQ ID NO: 105003 - DNA, 80 bp, synthetic construct
  misc_feature 1..80: note = Artificially Synthesized Probe
  source 1..80: mol_type = other DNA
tggctgcagcactggaaagtggcggccctaggcatggtgccgaggcccaggctccattcccagtactcccgggtccccag

SEQ ID NO: 105004 - DNA, 80 bp, synthetic construct; identical to SEQ ID NO: 36477
  misc_feature 1..80: note = Artificially Synthesized Probe
  source 1..80: mol_type = other DNA

SEQ ID NO: 105005 - DNA, 80 bp, synthetic construct
  misc_feature 1..80: note = Artificially Synthesized Probe
  source 1..80: mol_type = other DNA
ccaccagcaggcgccggaagcgcaaaagggctgcgtcgcctagaaggcagggagggccgcactgcaggaggccacggggc

SEQ ID NO: 105006 - DNA, 80 bp, synthetic construct
  misc_feature 1..80: note = Artificially Synthesized Probe
  source 1..80: mol_type = other DNA
acgatgacgtgctgcaggaaccaggcagggctgagccctgcagaggcgcaggagggaggtcaggctcgcagggcgcccca

SEQ ID NO: 105007 - DNA, 80 bp, synthetic construct
  misc_feature 1..80: note = Artificially Synthesized Probe
  source 1..80: mol_type = other DNA
ggccgctccggctgtccaccccatacagcatgatgcccacgtgggccgtggtacctgggaggcaagagggaggggtggga

SEQ ID NO: 105008 - DNA, 80 bp, synthetic construct
  misc_feature 1..80: note = Artificially Synthesized Probe
  source 1..80: mol_type = other DNA
ctgctgctccagctggtagacgtcctctgtggcctggttgagtcggtcaaactgggtgagcagggcctcgaacacggctt

SEQ ID NO: 105009 - DNA, 80 bp, synthetic construct; identical to SEQ ID NO: 36478
  misc_feature 1..80: note = Artificially Synthesized Probe
  source 1..80: mol_type = other DNA

SEQ ID NO: 105010 - DNA, 80 bp, synthetic construct
  misc_feature 1..80: note = Artificially Synthesized Probe
  source 1..80: mol_type = other DNA
cttttttttttgagatggagtcttgctgtgtcacccaggctggagtgcagtggcgcaatctcagctcactgcaagctccg

SEQ ID NO: 105011 - DNA, 80 bp, synthetic construct
  misc_feature 1..80: note = Artificially Synthesized Probe
  source 1..80: mol_type = other DNA
cctggcctcccaaagtgctcggattacaggtgtgagccaccgcgcccggccgacagtttttaaaagtaggtaatcaaaag

SEQ ID NO: 105012 - DNA, 80 bp, synthetic construct
  misc_feature 1..80: note = Artificially Synthesized Probe
  source 1..80: mol_type = other DNA
tgggtgtggtggtgtgcacctgtactcccagctactcaggagaatcgcttaaggggaatggcttaaacccgggagctgga

SEQ ID NO: 105013 - DNA, 80 bp, synthetic construct
  misc_feature 1..80: note = Artificially Synthesized Probe
  source 1..80: mol_type = other DNA
gctggcgcctccgtctgagagacgagctatgcagtcaggatcgcgggtggatgcacagtctcccacagtggtagcgatgc

SEQ ID NO: 105014 - DNA, 80 bp, synthetic construct; identical to SEQ ID NO: 36479
  misc_feature 1..80: note = Artificially Synthesized Probe
  source 1..80: mol_type = other DNA

SEQ ID NO: 105015 - DNA, 80 bp, synthetic construct
  misc_feature 1..80: note = Artificially Synthesized Probe
  source 1..80: mol_type = other DNA
tgtaggtcaccaggcacacagcacatgtcagcatgacgatgtagtttacatccgctgtcggctcctgtgaggacacagcc

SEQ ID NO: 105016 - DNA, 80 bp, synthetic construct
  misc_feature 1..80: note = Artificially Synthesized Probe
  source 1..80: mol_type = other DNA
gcggtgaggtggcgggtgaggcagacggcctggcggggcgaggtctcctccaggggcagcagcccctctgtccgccacac

SEQ ID NO: 105017 - DNA, 80 bp, synthetic construct
  misc_feature 1..80: note = Artificially Synthesized Probe
  source 1..80: mol_type = other DNA
gccaggttggatgtcgcagtctcagagcccatacccggtccagtcccctcgctgcctgccgtccccatggggccagtaac

SEQ ID NO: 105018 - DNA, 80 bp, synthetic construct; identical to SEQ ID NO: 36480
  misc_feature 1..80: note = Artificially Synthesized Probe
  source 1..80: mol_type = other DNA

SEQ ID NO: 105019 - DNA, 80 bp, synthetic construct; identical to SEQ ID NO: 36467
  misc_feature 1..80: note = Artificially Synthesized Probe
  source 1..80: mol_type = other DNA

SEQ ID NO: 105020 - DNA, 80 bp, synthetic construct
  misc_feature 1..80: note = Artificially Synthesized Probe
  source 1..80: mol_type = other DNA
ccatgaaacagaaagcaaatttcaccagagacacccatggaagccctacgagaaacgccttccccccaagaacaaggcca

SEQ ID NO: 105021 - DNA, 80 bp, synthetic construct
  misc_feature 1..80: note = Artificially Synthesized Probe
  source 1..80: mol_type = other DNA
gcggtggccccgggcagcccagtccgagttgttgggcaccttcacggtgatggcgcgctctgaggccagccgctcgatgg

SEQ ID NO: 105022 - DNA, 80 bp, synthetic construct; identical to SEQ ID NO: 36481
  misc_feature 1..80: note = Artificially Synthesized Probe
  source 1..80: mol_type = other DNA

SEQ ID NO: 105023 - DNA, 80 bp, synthetic construct
  misc_feature 1..80: note = Artificially Synthesized Probe
  source 1..80: mol_type = other DNA
gctggccaggtggatgaggtctcctgcagacatgcgtgaggtcagtgcagagacagggaggtagagggagggtgggggca

SEQ ID NO: 105024 - DNA, 80 bp, synthetic construct
  misc_feature 1..80: note = Artificially Synthesized Probe
  source 1..80: mol_type = other DNA
ggggagagggaggaaaaaggaaggaaaagggtagagaaaagagaagggagaagaagaggagcagggggaaagggagggga

SEQ ID NO: 105025 - DNA, 80 bp, synthetic construct
  misc_feature 1..80: note = Artificially Synthesized Probe
  source 1..80: mol_type = other DNA
gggagggggatgaggatgggaattggggggaggggagggggacgaagatgggatggggcaaaggcgacgcggttgggggg

SEQ ID NO: 105026 - DNA, 80 bp, synthetic construct
  misc_feature 1..80: note = Artificially Synthesized Probe
  source 1..80: mol_type = other DNA
tgcagcgtctgcttcaggcacgagcggcatacgagctccctgctgggcccctgtgtggagccagcagtgtccagccccgc

SEQ ID NO: 105027 - DNA, 80 bp, synthetic construct; identical to SEQ ID NO: 36482
  misc_feature 1..80: note = Artificially Synthesized Probe
  source 1..80: mol_type = other DNA

SEQ ID NO: 105028 - DNA, 80 bp, synthetic construct
  misc_feature 1..80: note = Artificially Synthesized Probe
  source 1..80: mol_type = other DNA
atcttcttagtccctccccacatctgggcccctctttacaccctgggtcccccgagaggcaccctgcgttcacacaggac

SEQ ID NO: 105029 - DNA, 80 bp, synthetic construct
  misc_feature 1..80: note = Artificially Synthesized Probe
  source 1..80: mol_type = other DNA
ccatcctaccatgcactgggccagcgcagcagcgatctgctggatgtcatccacagtgtggaccctcagggacaccagag

SEQ ID NO: 105030 - DNA, 80 bp, synthetic construct
  misc_feature 1..80: note = Artificially Synthesized Probe
  source 1..80: mol_type = other DNA
ggcgtggtagcgccagcggagaataacagcccccagccgtagggcgccccacagccgcagtgcccagagccccacacaca

SEQ ID NO: 105031 - DNA, 80 bp, synthetic construct
  misc_feature 1..80: note = Artificially Synthesized Probe
  source 1..80: mol_type = other DNA
ggggtgcagttacgtgctagacgctgtgtgatgcgggcactgacccacaacactgagctgtttcttcatgggcaaaacag

SEQ ID NO: 105032 - DNA, 80 bp, synthetic construct; identical to SEQ ID NO: 36483
  misc_feature 1..80: note = Artificially Synthesized Probe
  source 1..80: mol_type = other DNA

SEQ ID NO: 105033 - DNA, 80 bp, synthetic construct
  misc_feature 1..80: note = Artificially Synthesized Probe
  source 1..80: mol_type = other DNA
cgttgggctctgggagggtgatggccaaagacctacgagcagaggggggtggtgagcaggtggcagtctcgggggcgccc

SEQ ID NO: 105034 - DNA, 80 bp, synthetic construct
  misc_feature 1..80: note = Artificially Synthesized Probe
  source 1..80: mol_type = other DNA
ggccctggcgacagcgccgcagcagcagggcgtacaccagcggggcgccagcatcctccgcgtcatgccagcctgaggga

SEQ ID NO: 105035 - DNA, 80 bp, synthetic construct; identical to SEQ ID NO: 36484
  misc_feature 1..80: note = Artificially Synthesized Probe
  source 1..80: mol_type = other DNA

SEQ ID NO: 105036 - DNA, 80 bp, synthetic construct
  misc_feature 1..80: note = Artificially Synthesized Probe
  source 1..80: mol_type = other DNA
tctgccctgtcagccccacttctgcctgcaggccccgtcccctcggccatgggacccatccccagcccgcccacaccccg

SEQ ID NO: 105037 - DNA, 80 bp, synthetic construct
  misc_feature 1..80: note = Artificially Synthesized Probe
  source 1..80: mol_type = other DNA
cgtgggagtggggttacctccaacacaggtctatttggcctgctggaaggactgggggacccatggaggatgctgctccc

SEQ ID NO: 105038 - DNA, 80 bp, synthetic construct
  misc_feature 1..80: note = Artificially Synthesized Probe
  source 1..80: mol_type = other DNA
tagcaggaggcaggcaatgctcactgagggcccctggggggatgcgtgtgagaagagacgtatgtgtgggtgtgaggacc

SEQ ID NO: 105039 - DNA, 80 bp, synthetic construct
  misc_feature 1..80: note = Artificially Synthesized Probe
  source 1..80: mol_type = other DNA
gaacagacgcccactctggggcaccagcaggccccgcctgacagcagcaggagcagccaccacgggctcagggtcaccaa

SEQ ID NO: 105040 - DNA, 80 bp, synthetic construct; identical to SEQ ID NO: 36485
  misc_feature 1..80: note = Artificially Synthesized Probe
  source 1..80: mol_type = other DNA

SEQ ID NO: 105041 - DNA, 80 bp, synthetic construct
  misc_feature 1..80: note = Artificially Synthesized Probe
  source 1..80: mol_type = other DNA
ggccttccacacggtcaggctgaaggtgtactccacgccagccgccagccgctcccgtggaatggtgaccgtgctgctcc

SEQ ID NO: 105042 - DNA, 80 bp, synthetic construct
  misc_feature 1..80: note = Artificially Synthesized Probe
  source 1..80: mol_type = other DNA
agctgagctaagacgccctccccggccgcgcagtcacctaccaggatggccagctgggcgtaggctaccccgagcaccac

SEQ ID NO: 105043 - DNA, 80 bp, synthetic construct
  misc_feature 1..80: note = Artificially Synthesized Probe
  source 1..80: mol_type = other DNA
actgaggacgggccagccctggtggcaagctgggtgttctctgggctcatgggtgtggacgggtgaggggcatggaggac

SEQ ID NO: 105044 - DNA, 80 bp, synthetic construct
  misc_feature 1..80: note = Artificially Synthesized Probe
  source 1..80: mol_type = other DNA
gggcaccaggcgctcgggggccaccgtcacattggcctggatgctctgtgtcagtggcgtgtccccaaatgacacgacaa

SEQ ID NO: 105045 - DNA, 80 bp, synthetic construct; identical to SEQ ID NO: 36486
  misc_feature 1..80: note = Artificially Synthesized Probe
  source 1..80: mol_type = other DNA

SEQ ID NO: 105046 - DNA, 80 bp, synthetic construct
  misc_feature 1..80: note = Artificially Synthesized Probe
  source 1..80: mol_type = other DNA
atccccaaagtcccagtggtaggccacacgccgggggctggggctggtggcggcctcaaactgcgccgagcggttggtga

SEQ ID NO: 105047 - DNA, 80 bp, synthetic construct
  misc_feature 1..80: note = Artificially Synthesized Probe
  source 1..80: mol_type = other DNA
cagcgagtcgccctggaccttctgcagcgagaagtaccaggcgtaggcgacccgagagccgcgctgcacgcgggctgtga

SEQ ID NO: 105048 - DNA, 80 bp, synthetic construct
  misc_feature 1..80: note = Artificially Synthesized Probe
  source 1..80: mol_type = other DNA
gtgggagaaacggggcccggggagcacctcggggttggccccgccgacctgcaggcggaaggtgacagctgagccggcag

SEQ ID NO: 105049 - DNA, 80 bp, synthetic construct; identical to SEQ ID NO: 36487
  misc_feature 1..80: note = Artificially Synthesized Probe
  source 1..80: mol_type = other DNA

SEQ ID NO: 105050 - DNA, 80 bp, synthetic construct
  misc_feature 1..80: note = Artificially Synthesized Probe
  source 1..80: mol_type = other DNA
caagtgcaggccgggtgtggggaagctatgggtggtaaatggctcggaggtctcccagctcagcccctcctccaaggacc

SEQ ID NO: 105051 - DNA, 80 bp, synthetic construct
  misc_feature 1..80: note = Artificially Synthesized Probe
  source 1..80: mol_type = other DNA
ccgcagctgcacatggtaggtgccggcctcgagcacggtgagcgagaagcctttgccgctgccggccagggccgggcccc

SEQ ID NO: 105052 - DNA, 80 bp, synthetic construct
  misc_feature 1..80: note = Artificially Synthesized Probe
  source 1..80: mol_type = other DNA
gcccacctcgttctcagccgtgacgatgatattgaaggtgcccacggagcggaaggtgtaagagatggtaggacccccag

SEQ ID NO: 105053 - DNA, 80 bp, synthetic construct
  misc_feature 1..80: note = Artificially Synthesized Probe
  source 1..80: mol_type = other DNA
ccagccctcaccttgaccaaaagcaggaagagcagcgaggccgccaggccacgggctgcggagctcagctgcgccacctg

SEQ ID NO: 105054 - DNA, 80 bp, synthetic construct; identical to SEQ ID NO: 36488
  misc_feature 1..80: note = Artificially Synthesized Probe
  source 1..80: mol_type = other DNA

SEQ ID NO: 105055 - DNA, 80 bp, synthetic construct
  misc_feature 1..80: note = Artificially Synthesized Probe
  source 1..80: mol_type = other DNA
ggctgagtcattggcagcagagatgttgttggacgcggtgactgtcacaagataggagcctgggtctcggtagatgaacg

SEQ ID NO: 105056 - DNA, 80 bp, synthetic construct
  misc_feature 1..80: note = Artificially Synthesized Probe
  source 1..80: mol_type = other DNA
tggctccacgcagatgctggtgaagtaatgcgccctgttcacgcggctggacagcaccagcgccagggggaacgtgccgc

SEQ ID NO: 105057 - DNA, 80 bp, synthetic construct; identical to SEQ ID NO: 36489
  misc_feature 1..80: note = Artificially Synthesized Probe
  source 1..80: mol_type = other DNA

SEQ ID NO: 105058 - DNA, 80 bp, synthetic construct
  misc_feature 1..80: note = Artificially Synthesized Probe
  source 1..80: mol_type = other DNA
gtccacgctgagtccgcggagctcctcaaagacgcgcacatccgcctgggccgccgcaccgctcaccgtgttgttgacct

SEQ ID NO: 105059 - DNA, 80 bp, synthetic construct
  misc_feature 1..80: note = Artificially Synthesized Probe
  source 1..80: mol_type = other DNA
caggacgccgtcactcacacccacagccacggagggcagggaggcgcgcacgctcacaggcacctgctgcgtcaggttct

SEQ ID NO: 105060 - DNA, 80 bp, synthetic construct
  misc_feature 1..80: note = Artificially Synthesized Probe
  source 1..80: mol_type = other DNA
ggtcccaggctcccaagccacgtgcgggacggagcacaggtgtagcagcactgagggctgcctggcgaggacggcaccgc

SEQ ID NO: 105061 - DNA, 80 bp, synthetic construct; identical to SEQ ID NO: 36490
  misc_feature 1..80: note = Artificially Synthesized Probe
  source 1..80: mol_type = other DNA

SEQ ID NO: 105062 - DNA, 80 bp, synthetic construct
  misc_feature 1..80: note = Artificially Synthesized Probe
  source 1..80: mol_type = other DNA
cctgccggggcggtgggacgcagtgagtgaaccgggacaggggtgggcggtggcggggcagggggtgcttgggacccagc

SEQ ID NO: 105063 - DNA, 80 bp, synthetic construct
  misc_feature 1..80: note = Artificially Synthesized Probe
  source 1..80: mol_type = other DNA
gggggtccctcggctgaggctggggctgggacaagagcctggtgcccaccccaaaccggcccccgagtcactcacaggaa

SEQ ID NO: 105064 - DNA, 80 bp, synthetic construct; identical to SEQ ID NO: 36468
  misc_feature 1..80: note = Artificially Synthesized Probe
  source 1..80: mol_type = other DNA

SEQ ID NO: 105065 - DNA, 80 bp, synthetic construct
  misc_feature 1..80: note = Artificially Synthesized Probe
  source 1..80: mol_type = other DNA
ccaccctggggtcctctgacatgcctagtcctgctacttgcccagacctgatgccagcaggcctgggcgctgctctcttg

SEQ ID NO: 105066 - DNA, 80 bp, synthetic construct
  misc_feature 1..80: note = Artificially Synthesized Probe
  source 1..80: mol_type = other DNA
gaggccgtcagctgcagggacaggcgtcagtgagcccaggtggcaggtgagaggcctggccctgattggcgtccctccct

SEQ ID NO: 105067 - DNA, 80 bp, synthetic construct; identical to SEQ ID NO: 36491
  misc_feature 1..80: note = Artificially Synthesized Probe
  source 1..80: mol_type = other DNA

SEQ ID NO: 105068 - DNA, 80 bp, synthetic construct
  misc_feature 1..80: note = Artificially Synthesized Probe
  source 1..80: mol_type = other DNA
tgggagccaagcccgggctgggacactcactgtccggctctccagccagccatgtagtactactaatgcctcaacctctc

SEQ ID NO: 105069 - DNA, 80 bp, synthetic construct
  misc_feature 1..80: note = Artificially Synthesized Probe
  source 1..80: mol_type = other DNA
caggacaggctgcacaggtcacgccatttctgatggcccctcccaaggcccctggtgaagaggcaggtacccgcaagatg

SEQ ID NO: 105070 - DNA, 80 bp, synthetic construct
  misc_feature 1..80: note = Artificially Synthesized Probe
  source 1..80: mol_type = other DNA
gagcagagttttaaattcattttgtgaaatgagacagtggaatgagttagcggagccactgtcagagccgtgactttcca

SEQ ID NO: 105071 - DNA, 80 bp, synthetic construct
  misc_feature 1..80: note = Artificially Synthesized Probe
  source 1..80: mol_type = other DNA
gcctcggccatactcaccactaggactccctgcagtacacgggcctcggggctgggcgtggcgcggaggccacagatggg

SEQ ID NO: 105072 - DNA, 80 bp, synthetic construct; identical to SEQ ID NO: 36492
  misc_feature 1..80: note = Artificially Synthesized Probe
  source 1..80: mol_type = other DNA

SEQ ID NO: 105073 - DNA, 80 bp, synthetic construct
  misc_feature 1..80: note = Artificially Synthesized Probe
  source 1..80: mol_type = other DNA
tcatagcgcccaggcagccgcagtccagggttgggcctcaagcccagcagcacggtgagctgttccgtggctgcaagcag

SEQ ID NO: 105074 - DNA, 80 bp, synthetic construct
  misc_feature 1..80: note = Artificially Synthesized Probe
  source 1..80: mol_type = other DNA
aagccaacgaggtcaccagggagcatgaggacatcctggccgtggagggtgacctgtggagagggaggcagggctgcatc

SEQ ID NO: 105075 - DNA, 80 bp, synthetic construct
  misc_feature 1..80: note = Artificially Synthesized Probe
  source 1..80: mol_type = other DNA
acaggccaagacctggcagacaggaaggagcagctgtgctgggagagaggaagaggaggcacagctcgtgccaagggccc

SEQ ID NO: 105076 - DNA, 80 bp, synthetic construct
  misc_feature 1..80: note = Artificially Synthesized Probe
  source 1..80: mol_type = other DNA
gggcggggccccgcgagggggcgggacgctgccggtgggaggcgcggggtctggccggggacgggcgtaccgaggtgagc

SEQ ID NO: 105077 - DNA, 80 bp, synthetic construct; identical to SEQ ID NO: 36493
  misc_feature 1..80: note = Artificially Synthesized Probe
  source 1..80: mol_type = other DNA

SEQ ID NO: 105078 - DNA, 80 bp, synthetic construct
  misc_feature 1..80: note = Artificially Synthesized Probe
  source 1..80: mol_type = other DNA
tgctctcaggctcgctgccgttctccggggtccctgtgaggaggggagggtgttggggccctgatttgcccacaggccac

SEQ ID NO: 105079 - DNA, 80 bp, synthetic construct
  misc_feature 1..80: note = Artificially Synthesized Probe
  source 1..80: mol_type = other DNA
gacacctggaatgagctggtgtctctggaacccctgctctgtccacctaagactgggaaccactctggtggccacaggac

SEQ ID NO: 105080 - DNA, 80 bp, synthetic construct
  misc_feature 1..80: note = Artificially Synthesized Probe
  source 1..80: mol_type = other DNA
tgaggaaggcttcacggctcagacgcaggcccgggaataccatgacctggtgggcagggggccgcctcagctccacagac

SEQ ID NO: 105081 - DNA, 80 bp, synthetic construct; identical to SEQ ID NO: 36494
  misc_feature 1..80: note = Artificially Synthesized Probe
  source 1..80: mol_type = other DNA

SEQ ID NO: 105082 - DNA, 80 bp, synthetic construct
  misc_feature 1..80: note = Artificially Synthesized Probe
  source 1..80: mol_type = other DNA
gaggccgtcctgctgtgccagaggcgtcaggggtccctgcaggtccccactgggcgctcccacgaggaggttctcggcat

SEQ ID NO: 105083 - DNA, 80 bp, synthetic construct
  misc_feature 1..80: note = Artificially Synthesized Probe
  source 1..80: mol_type = other DNA
acagccagcgtctcaggcccctgcctggccccccgcacacctccgggctgcagctcgcagacgtagctgtgcggcgctga

SEQ ID NO: 105084 - DNA, 80 bp, synthetic construct; identical to SEQ ID NO: 36495
  misc_feature 1..80: note = Artificially Synthesized Probe
  source 1..80: mol_type = other DNA

SEQ ID NO: 105085 - DNA, 80 bp, synthetic construct
  misc_feature 1..80: note = Artificially Synthesized Probe
  source 1..80: mol_type = other DNA
tggcgtgcccaggagtgtccggaggctgcccccagctcatgtccacctctgcatctgcagagctgacaggaacggcccca

SEQ ID NO: 105086 - DNA, 80 bp, synthetic construct
  misc_feature 1..80: note = Artificially Synthesized Probe
  source 1..80: mol_type = other DNA
gggtgggggcaggcacctggtgacccgggagaccaggaagcgctgcacggcgggactgtccaccattgccagggcggccc

SEQ ID NO: 105087 - DNA, 80 bp, synthetic construct
  misc_feature 1..80: note = Artificially Synthesized Probe
  source 1..80: mol_type = other DNA
ggctcctgcgcagagggtgcgggtcagtaggagcgggtggcagggcgggagctgcggggaccgcgcagtgcaggcgtggc

SEQ ID NO: 105088 - DNA, 80 bp, synthetic construct
  misc_feature 1..80: note = Artificially Synthesized Probe
  source 1..80: mol_type = other DNA
ctggagaccggtgggaacgagggtgtcaacggtcagtgtgggcccaagacgggggtaccaggctctgccccatctggatg

SEQ ID NO: 105089 - DNA, 80 bp, synthetic construct; identical to SEQ ID NO: 36496
  misc_feature 1..80: note = Artificially Synthesized Probe
  source 1..80: mol_type = other DNA

SEQ ID NO: 105090 - DNA, 80 bp, synthetic construct
  misc_feature 1..80: note = Artificially Synthesized Probe
  source 1..80: mol_type = other DNA
ggccccaccagggtggcccctggggaggcagggaagacgtgctggaggagggtggggcccctacaggtgggggcaggagg

SEQ ID NO: 105091 - DNA, 80 bp, synthetic construct
  misc_feature 1..80: note = Artificially Synthesized Probe
  source 1..80: mol_type = other DNA
gcagctgaaaaggacactgctgccacggtgcctgagctgttgtcagggaggcaggcgacatactcctcacctagaagagg

SEQ ID NO: 105092 - DNA, 80 bp, synthetic construct
  misc_feature 1..80: note = Artificially Synthesized Probe
  source 1..80: mol_type = other DNA
ctggctgggaaggacagagctggccccacccaccggcactcaccacagccactgtccagcaaggggatgccaagcagagg

SEQ ID NO: 105093 - DNA, 80 bp, synthetic construct
  misc_feature 1..80: note = Artificially Synthesized Probe
  source 1..80: mol_type = other DNA
cccactcaggtttctgcagggcaggggcaggtgttggggaccaggtctggtgggaagggtctatgccagccccccactgg

SEQ ID NO: 105094 - DNA, 80 bp, synthetic construct; identical to SEQ ID NO: 36497
  misc_feature 1..80: note = Artificially Synthesized Probe
  source 1..80: mol_type = other DNA

SEQ ID NO: 105095 - DNA, 80 bp, synthetic construct
  misc_feature 1..80: note = Artificially Synthesized Probe
  source 1..80: mol_type = other DNA
gccagcgccgagaggttcgccaggagcccaacgtccagcgcccggagcaggttgtgggagacgtctctgaggagtgagtg

SEQ ID NO: 105096 - DNA, 80 bp, synthetic construct
  misc_feature 1..80: note = Artificially Synthesized Probe
  source 1..80: mol_type = other DNA
ctggggaaaccaagccaggagaggcctgggggcctcagccctctgcacccatctcagccctatgccgagtgccacatgga

SEQ ID NO: 105097 - DNA, 80 bp, synthetic construct
  misc_feature 1..80: note = Artificially Synthesized Probe
  source 1..80: mol_type = other DNA
cccaacagggtggtcccactgtgggaccacaaccaggtatgactgtgtgagaagcaggctcactaccaggctaccaggga

SEQ ID NO: 105098 - DNA, 80 bp, synthetic construct
  misc_feature 1..80: note = Artificially Synthesized Probe
  source 1..80: mol_type = other DNA
cctccaggctcaggcccagctcctgcacgtagcccccgctgtcatacacggcacaggagccccaggaccatgccctgccg

SEQ ID NO: 105099 - DNA, 80 bp, synthetic construct; identical to SEQ ID NO: 36498
  misc_feature 1..80: note = Artificially Synthesized Probe
  source 1..80: mol_type = other DNA

SEQ ID NO: 105100 - DNA, 80 bp, synthetic construct
  misc_feature 1..80: note = Artificially Synthesized Probe
  source 1..80: mol_type = other DNA
ccatctaaaatacacaacttctacgcaaaatataaataaaattagaaaacaaactacaatctcagaaaagcactagcaac

SEQ ID NO: 105101 - DNA, 80 bp, synthetic construct
  misc_feature 1..80: note = Artificially Synthesized Probe
  source 1..80: mol_type = other DNA
acagcatagcaagaccccatctctacaaggaaaaaaagaatcagccaggcatggtagtgtgtaactgtagttccagctac

SEQ ID NO: 105102 - DNA, 80 bp, synthetic construct; identical to SEQ ID NO: 36499
  misc_feature 1..80: note = Artificially Synthesized Probe
  source 1..80: mol_type = other DNA

SEQ ID NO: 105103 - DNA, 80 bp, synthetic construct
  misc_feature 1..80: note = Artificially Synthesized Probe
  source 1..80: mol_type = other DNA
gtgacagagcgagactccatctcaaaagaaaaaaaaaagaaaagaaaagaaagaaagggaggagagagagaagaaaagga

SEQ ID NO: 105104 - DNA, 80 bp, synthetic construct
  misc_feature 1..80: note = Artificially Synthesized Probe
  source 1..80: mol_type = other DNA
ctgtctctaccaaaactacagaattagtcgggcgtggtggcaagcacctgtaattccagctactcaggaggcttaggcag

SEQ ID NO: 105105 - DNA, 80 bp, synthetic construct
  misc_feature 1..80: note = Artificially Synthesized Probe
  source 1..80: mol_type = other DNA
tccaaaaacaaaaaaagaaaaaccaggcaattagaagaagcacaattggtcacagccgtaggaaaaacatcccatgtcag

SEQ ID NO: 105106 - DNA, 80 bp, synthetic construct
  misc_feature 1..80: note = Artificially Synthesized Probe
  source 1..80: mol_type = other DNA
cacaattggtcacagccgtaggaaaaacatcccatgtcagtagtcagtgaagaaaaagcaacagaaaccacagggcggca

SEQ ID NO: 105107 - DNA, 80 bp, synthetic construct
  misc_feature 1..80: note = Artificially Synthesized Probe
  source 1..80: mol_type = other DNA
ctggtcccacgcactcccagtagtgctcctggcacaggactatggctccgcaggtctgcacaccacccccctgctcccca

SEQ ID NO: 105108 - DNA, 80 bp, synthetic construct; identical to SEQ ID NO: 36500
  misc_feature 1..80: note = Artificially Synthesized Probe
  source 1..80: mol_type = other DNA

SEQ ID NO: 105109 - DNA, 80 bp, synthetic construct
  misc_feature 1..80: note = Artificially Synthesized Probe
  source 1..80: mol_type = other DNA
ccctcacctgggctgggtgcccagacagatgagacgctgggcactggctcccggagcttctcgttccatctgcggatgga

SEQ ID NO: 105110 - DNA, 80 bp, synthetic construct
  misc_feature 1..80: note = Artificially Synthesized Probe
  source 1..80: mol_type = other DNA
ccacgtccccgagccattgtgaggactctcccagccaacgtcgtaatcgctggtgctgaagcctcctgcggccgagcacg

SEQ ID NO: 105111 - DNA, 80 bp, synthetic construct
  misc_feature 1..80: note = Artificially Synthesized Probe
  source 1..80: mol_type = other DNA
tgcttctctgccgtcccctcctctacaccaaggtagggacacgggctgaggtgctccccactgcccataaggatgggtgg

SEQ ID NO: 105112 - DNA, 80 bp, synthetic construct
  misc_feature 1..80: note = Artificially Synthesized Probe
  source 1..80: mol_type = other DNA
gaggaactgcagttagacctgaggagggactttccagcggctgcggcggcagcagaaccaatgctttagggagaaatgag

SEQ ID NO: 105113 - DNA, 80 bp, synthetic construct; identical to SEQ ID NO: 36501
  misc_feature 1..80: note = Artificially Synthesized Probe
  source 1..80: mol_type = other DNA

SEQ ID NO: 105114 - DNA, 80 bp, synthetic construct
  misc_feature 1..80: note = Artificially Synthesized Probe
  source 1..80: mol_type = other DNA
ctggccatgcactccctgcgtgccaggctccaggctggctccttctcccggccctcaccccagcccaaggcccagaaatg

SEQ ID NO: 105115 - DNA, 80 bp, synthetic construct
  misc_feature 1..80: note = Artificially Synthesized Probe
  source 1..80: mol_type = other DNA
ctgccctgggcaggactcaggtgtgggcttcagggacagggaacagcacaggggtccccgtggagtcctcacctcgcttg

SEQ ID NO: 105116 - DNA, 80 bp, synthetic construct; identical to SEQ ID NO: 36502
  misc_feature 1..80: note = Artificially Synthesized Probe
  source 1..80: mol_type = other DNA

SEQ ID NO: 105117 - DNA, 80 bp, synthetic construct
  misc_feature 1..80: note = Artificially Synthesized Probe
  source 1..80: mol_type = other DNA
gggaagctgaagccaagcttgtcgggaggagtacacccccatggggggcaggacggtgccccagccccgggacacaaggg

SEQ ID NO: 105118 - DNA, 80 bp, synthetic construct
  misc_feature 1..80: note = Artificially Synthesized Probe
  source 1..80: mol_type = other DNA
cttgccaatcctggagcaggagcagcaacagcagagggtgtggccaggcctggaggctgcccctccacacccgtcacagg

SEQ ID NO: 105119 - DNA, 80 bp, synthetic construct
  misc_feature 1..80: note = Artificially Synthesized Probe
  source 1..80: mol_type = other DNA
gccaggcgctggctctcctgccctccccctgggctctgcccacagttggcgcgagggtgggtgaagcctgaggctggcag

SEQ ID NO: 105120 - DNA, 80 bp, synthetic construct
  misc_feature 1..80: note = Artificially Synthesized Probe
  source 1..80: mol_type = other DNA
aaaccagacctgcctcagagtctcacactcagagctgagtgccccaggcgcccactccccagaccagatgctgagtgggg

SEQ ID NO: 105121 - DNA, 80 bp, synthetic construct; identical to SEQ ID NO: 36469
  misc_feature 1..80: note = Artificially Synthesized Probe
  source 1..80: mol_type = other DNA

SEQ ID NO: 105122 - DNA, 80 bp, synthetic construct; identical to SEQ ID NO: 36503
  misc_feature 1..80: note = Artificially Synthesized Probe
  source 1..80: mol_type = other DNA

SEQ ID NO: 105123 - DNA, 80 bp, synthetic construct
  misc_feature 1..80: note = Artificially Synthesized Probe
  source 1..80: mol_type = other DNA
ggccagccgagccatgacctcatctgtttccctctgcgctgtgctcctttctatttaaggagagtgaggcggcttccagg

SEQ ID NO: 105124 - DNA, 80 bp, synthetic construct
  misc_feature 1..80: note = Artificially Synthesized Probe
  source 1..80: mol_type = other DNA
ggtgggggtggcagcctctgatacaggacgaggctgccaggccccaagcaacagagccctgcacgagggtctctgggtcc

SEQ ID NO: 105125 - DNA, 80 bp, synthetic construct; identical to SEQ ID NO: 36504
  misc_feature 1..80: note = Artificially Synthesized Probe
  source 1..80: mol_type = other DNA

SEQ ID NO: 105126 - DNA, 80 bp, synthetic construct
  misc_feature 1..80: note = Artificially Synthesized Probe
  source 1..80: mol_type = other DNA
gagccaggcgttgtgacccccttgcatccctctccactcccacccttcacagcctgtgtgggcaggtgctgcactgacct

SEQ ID NO: 105127 - DNA, 80 bp, synthetic construct
  misc_feature 1..80: note = Artificially Synthesized Probe
  source 1..80: mol_type = other DNA
tgcgcccggctgtgcgggcacagcagtgccctggagagggcagcagcacagatccagcggggcagccggaatcccatcac

SEQ ID NO: 105128 - DNA, 80 bp, synthetic construct
  misc_feature 1..80: note = Artificially Synthesized Probe
  source 1..80: mol_type = other DNA
accagaaggaagagctggcttccgcctctgcctgggcacaaagccctttctgaggtggcctcacagaagccagcctgtct

SEQ ID NO: 105129 - DNA, 80 bp, synthetic construct; identical to SEQ ID NO: 36505
  misc_feature 1..80: note = Artificially Synthesized Probe
  source 1..80: mol_type = other DNA

SEQ ID NO: 105130 - DNA, 80 bp, synthetic construct
  misc_feature 1..80: note = Artificially Synthesized Probe
  source 1..80: mol_type = other DNA
tgggctgccgtggccactgcagagctccagaaaagaacatgtgtgtctccctccaaagtatattccttgctggaaagcag

SEQ ID NO: 105131 - DNA, 80 bp, synthetic construct
  misc_feature 1..80: note = Artificially Synthesized Probe
  source 1..80: mol_type = other DNA
gtggccagcgcatcacccactcatgggccaggatggcagaggagatccacagagacggctccagcaggaggccctcatag

SEQ ID NO: 105132 - DNA, 80 bp, synthetic construct
  misc_feature 1..80: note = Artificially Synthesized Probe
  source 1..80: mol_type = other DNA
cagcagcacgtgggccatccatggccagagctcctcagacctgccacagcatcagtcacacgctccagcccctactgccc

SEQ ID NO: 105133 - DNA, 80 bp, synthetic construct
  misc_feature 1..80: note = Artificially Synthesized Probe
  source 1..80: mol_type = other DNA
atcagggcgggcactgagcggaactcaggcagtgccactcgccagcttacgtcaaaagaacaaaaggagtgaggacggta

SEQ ID NO: 105134 - DNA, 80 bp, synthetic construct
  misc_feature 1..80: note = Artificially Synthesized Probe
  source 1..80: mol_type = other DNA
gctgggtgctgaggggtccataggagtccacccgcccaggctgcactggctcccgtcgtccagtgtctggtctaagcaca

SEQ ID NO: 105135 - DNA, 80 bp, synthetic construct; identical to SEQ ID NO: 36506
  misc_feature 1..80: note = Artificially Synthesized Probe
  source 1..80: mol_type = other DNA

SEQ ID NO: 105136 - DNA, 80 bp, synthetic construct
  misc_feature 1..80: note = Artificially Synthesized Probe
  source 1..80: mol_type = other DNA
aggtgggaggggctggcagggagggagaggtgggaggggctggcagggagggagaggtgggaggggctggcagggaggga

SEQ ID NO: 105137 - DNA, 80 bp, synthetic construct
  misc_feature 1..80: note = Artificially Synthesized Probe
  source 1..80: mol_type = other DNA
agaggtgggaggggctggcagggagggagaggtgggaggggctggcagggagggagaggtgggaggggctggcagggagg

SEQ ID NO: 105138 - DNA, 80 bp, synthetic construct; identical to SEQ ID NO: 36507
  misc_feature 1..80: note = Artificially Synthesized Probe
  source 1..80: mol_type = other DNA

SEQ ID NO: 105139 - DNA, 80 bp, synthetic construct
  misc_feature 1..80: note = Artificially Synthesized Probe
  source 1..80: mol_type = other DNA
ggagagacaagaacacagagggctcagcgcggagcccggcgtggccaccgcggggagagggtgcggactcttcctagacc

SEQ ID NO: 105140 - DNA, 80 bp, synthetic construct
  misc_feature 1..80: note = Artificially Synthesized Probe
  source 1..80: mol_type = other DNA
tttttttttgagacagagtctcgctctgttgaccaggctagagtgcagtggtgtgatattggctcactgcaacctccgcc

SEQ ID NO: 105141 - DNA, 80 bp, synthetic construct
  misc_feature 1..80: note = Artificially Synthesized Probe
  source 1..80: mol_type = other DNA
ggcctcccaaagtgctgagattacaggcgtgaaccaccgcgcccaccctgttttttttttttttttttaaagaccgtttc

SEQ ID NO: 105142 - DNA, 80 bp, synthetic construct; identical to SEQ ID NO: 36508
  misc_feature 1..80: note = Artificially Synthesized Probe
  source 1..80: mol_type = other DNA

SEQ ID NO: 105143 - DNA, 80 bp, synthetic construct
  misc_feature 1..80: note = Artificially Synthesized Probe
  source 1..80: mol_type = other DNA
acctgtgtccctcccctctgcctactgatgccagcagcacctacctccagttctagcagccacaaaggtatctacacatg

SEQ ID NO: 105144 - DNA, 80 bp, synthetic construct
  misc_feature 1..80: note = Artificially Synthesized Probe
  source 1..80: mol_type = other DNA
cagcctggagtgcagtggtgtgatcacagctcactgcagccttgacctcctcggctcaagtgatgtcccacctcagtctc

SEQ ID NO: 105145 - DNA, 80 bp, synthetic construct
  misc_feature 1..80: note = Artificially Synthesized Probe
  source 1..80: mol_type = other DNA
gagtgaccccttgtccatgtttaaacggggtccctgtctgttgttgaatcatagtgttccctgtatgatctggatgcaag

SEQ ID NO: 105146 - DNA, 80 bp, synthetic construct
  misc_feature 1..80: note = Artificially Synthesized Probe
  source 1..80: mol_type = other DNA
gacttcttgtccacatttttgtccacaagtttggcgagtttgcatccgcgtctaataaagaaactaccgtttctcacgca

SEQ ID NO: 105147 - DNA, 80 bp, synthetic construct; identical to SEQ ID NO: 36509
  misc_feature 1..80: note = Artificially Synthesized Probe
  source 1..80: mol_type = other DNA

SEQ ID NO: 105148 - DNA, 80 bp, synthetic construct
  misc_feature 1..80: note = Artificially Synthesized Probe
  source 1..80: mol_type = other DNA
gccttggtgacaatccctagtcctcgctctcaggatccagggaccagaaatgggagccaggggcccctccgtggcctggc

SEQ ID NO: 105149 - DNA, 80 bp, synthetic construct
  misc_feature 1..80: note = Artificially Synthesized Probe
  source 1..80: mol_type = other DNA
ggatgcaggtgggaaagggcaaggccccgggtgctcctatattttacatcagtgaaccaagcacctaccaagtccctcga

SEQ ID NO: 105150 - DNA, 80 bp, synthetic construct
  misc_feature 1..80: note = Artificially Synthesized Probe
  source 1..80: mol_type = other DNA
ggacaatgggatgtcggctccaacgaccaatttacaagaaacacaaagcacacactcacagcaccacggaggtgacacca

SEQ ID NO: 105151 - DNA, 80 bp, synthetic construct; identical to SEQ ID NO: 36510
  misc_feature 1..80: note = Artificially Synthesized Probe
  source 1..80: mol_type = other DNA

SEQ ID NO: 105152 - DNA, 80 bp, synthetic construct
  misc_feature 1..80: note = Artificially Synthesized Probe
  source 1..80: mol_type = other DNA
ggctactcaggaggctgaggcaggagaatggcgtgaacccaggaggcggagcttgcagtgagctgagatggcactgctgc

SEQ ID NO: 105153 - DNA, 80 bp, synthetic construct
  misc_feature 1..80: note = Artificially Synthesized Probe
  source 1..80: mol_type = other DNA
acatggtgaaaccccatctctactaaaaatatttttaaaaattagccgggcgtggtggcgcgcgcctctaatcccagcta

SEQ ID NO: 105154 - DNA, 80 bp, synthetic construct
  misc_feature 1..80: note = Artificially Synthesized Probe
  source 1..80: mol_type = other DNA
ttcacaacgaattgatcacagccaggtagaattcttcattctttctccagtcctactgctttgcttgaccagccttaaag

SEQ ID NO: 105155 - DNA, 80 bp, synthetic construct; identical to SEQ ID NO: 36470
  misc_feature 1..80: note = Artificially Synthesized Probe
  source 1..80: mol_type = other DNA

SEQ ID NO: 105156 - DNA, 80 bp, synthetic construct; identical to SEQ ID NO: 36511
  misc_feature 1..80: note = Artificially Synthesized Probe
  source 1..80: mol_type = other DNA

SEQ ID NO: 105157 - DNA, 80 bp, synthetic construct
  misc_feature 1..80: note = Artificially Synthesized Probe
  source 1..80: mol_type = other DNA
taatcccagcactttgggaggccgaggtgggcagatcacgaggtcaggagatcgagaccatcctggccaacacagtaaaa

SEQ ID NO: 105158 - DNA, 80 bp, synthetic construct
  misc_feature 1..80: note = Artificially Synthesized Probe
  source 1..80: mol_type = other DNA
tgcggtgagctgagatcatgccactgcactgcggcctggagacaagagcaagactccgtctcaaaaaaaaaaaaaaaaag

SEQ ID NO: 105159 - DNA, 80 bp, synthetic construct
  misc_feature 1..80: note = Artificially Synthesized Probe
  source 1..80: mol_type = other DNA
tgttaggtgggtctgcagtattgcgatgccctccaaaatgcttgcagataaaagggtggctggaatttggttcaaaacat

SEQ ID NO: 105160 - DNA, 80 bp, synthetic construct
  misc_feature 1..80: note = Artificially Synthesized Probe
  source 1..80: mol_type = other DNA
cgcctgtaatcccagctactcgggaggctgaggcaggaaaaagcgcttgaacccaggaggcggaggttgccatgagccga

SEQ ID NO: 105161 - DNA, 80 bp, synthetic construct; identical to SEQ ID NO: 36512
  misc_feature 1..80: note = Artificially Synthesized Probe
  source 1..80: mol_type = other DNA

SEQ ID NO: 105162 - DNA, 80 bp, synthetic construct
  misc_feature 1..80: note = Artificially Synthesized Probe
  source 1..80: mol_type = other DNA
cagacagcaacgctcttggacccttgaacacctgccagcagctgtgatctgtgtccttcacctctcccagcttgacccct

SEQ ID NO: 105163 - DNA, 80 bp, synthetic construct
  misc_feature 1..80: note = Artificially Synthesized Probe
  source 1..80: mol_type = other DNA
cttcctaaggccctagtttgccatgggtcccctcaccccaccttccagaactctcccagcggcggccccaggtgtgtaca

SEQ ID NO: 105164 - DNA, 80 bp, synthetic construct
  misc_feature 1..80: note = Artificially Synthesized Probe
  source 1..80: mol_type = other DNA
ggcaggggcgggggctccactgctgtgccaagggcctggagaacacgggccttgctctccgctcagcagccaccagcgcc

SEQ ID NO: 105165 - DNA, 80 bp, synthetic construct; identical to SEQ ID NO: 36513
  misc_feature 1..80: note = Artificially Synthesized Probe
  source 1..80: mol_type = other DNA

SEQ ID NO: 105166 - DNA, 80 bp, synthetic construct
  misc_feature 1..80: note = Artificially Synthesized Probe
  source 1..80: mol_type = other DNA
acctgggggcagacacacaggccactgcagtggtgcttaggggccttcagggccaggcaggagtgggcattggagctggg

SEQ ID NO: 105167 - DNA, 80 bp, synthetic construct
  misc_feature 1..80: note = Artificially Synthesized Probe
  source 1..80: mol_type = other DNA
aaaccaaatgccagaacccacccaatgtttagcaagcctggggatgtgccacgtcccccagggatccagcacgcacccaa

SEQ ID NO: 105168 - DNA, 80 bp, synthetic construct
  misc_feature 1..80: note = Artificially Synthesized Probe
  source 1..80: mol_type = other DNA
ccctgctatgcacatcccggctgtgatgcctgggacaggtcgtgtcacctctccaaacctgtttcctcatctgtgaaatg

SEQ ID NO: 105169 - DNA, 80 bp, synthetic construct
  misc_feature 1..80: note = Artificially Synthesized Probe
  source 1..80: mol_type = other DNA
ccacggcaatcccccctcacccctgttctcaggatagccttggaacccaatagcagagcgcctgaggcccttcatgaccc

SEQ ID NO: 105170 - DNA, 80 bp, synthetic construct; identical to SEQ ID NO: 36514
  misc_feature 1..80: note = Artificially Synthesized Probe
  source 1..80: mol_type = other DNA

SEQ ID NO: 105171 - DNA, 80 bp, synthetic construct
  misc_feature 1..80: note = Artificially Synthesized Probe
  source 1..80: mol_type = other DNA
cggctccaggcgttccttatttagcagggccgccgtgccgcgccggagcctcgccctgggagcgtcctggcccgcgtcct

SEQ ID NO: 105172 - DNA, 80 bp, synthetic construct
  misc_feature 1..80: note = Artificially Synthesized Probe
  source 1..80: mol_type = other DNA
gcggcgccgggcgctgggccgcagaggcaggggggctcgcagggcccgcagccgcgcccggggccccccgccagcgcccc

SEQ ID NO: 105173 - DNA, 80 bp, synthetic construct
  misc_feature 1..80: note = Artificially Synthesized Probe
  source 1..80: mol_type = other DNA
gatggggctgcggccgcgacctgctgctgagcgacgcccgctcggggctcggggccaggccgctccgggagctcggccgc

SEQ ID NO: 105174 - DNA, 80 bp, synthetic construct
  misc_feature 1..80: note = Artificially Synthesized Probe
  source 1..80: mol_type = other DNA
tggcaggggcacaggccgcacccaggctcacccgcagcatgccatgtagcctcttgaccttgcgggcttcttccttggcc

SEQ ID NO: 105175 - DNA, 80 bp, synthetic construct; identical to SEQ ID NO: 36466
  misc_feature 1..80: note = Artificially Synthesized Probe
  source 1..80: mol_type = other DNA

SEQ ID NO: 105176 - DNA, 80 bp, synthetic construct
  misc_feature 1..80: note = Artificially Synthesized Probe
  source 1..80: mol_type = other DNA
gcttcagaggggtcccccgtgatggaggcctgtagcctacccctggcagccccctcaccttcagtggctcccagccgagg

SEQ ID NO: 105177 - DNA, 80 bp, synthetic construct
  misc_feature 1..80: note = Artificially Synthesized Probe
  source 1..80: mol_type = other DNA
aaaatagtgacatacaaaaatatacacattttaacaccatataaattactgacacgagacacacagtgagacggtgcagg

SEQ ID NO: 105178 - DNA, 80 bp, synthetic construct
  misc_feature 1..80: note = Artificially Synthesized Probe
  source 1..80: mol_type = other DNA
tccgcagaccctccaccagtcctggggaagcagagacagacctgtgagaggcagctcacagggaggggctaggggcatcc

SEQ ID NO: 105179 - DNA, 80 bp, synthetic construct; identical to SEQ ID NO: 36471
  misc_feature 1..80: note = Artificially Synthesized Probe
  source 1..80: mol_type = other DNA

SEQ ID NO: 105180 - DNA, 80 bp, synthetic construct
  misc_feature 1..80: note = Artificially Synthesized Probe
  source 1..80: mol_type = other DNA
cctgaccagctgcccttacagcagtgcacagtctctcagggtgcaatgagccccccttcaaccctgcaaactatgattgg

SEQ ID NO: 105181 - DNA, 80 bp, synthetic construct
  misc_feature 1..80: note = Artificially Synthesized Probe
  source 1..80: mol_type = other DNA
aacagtgtgtagggctccctgaggccagagatctgcttgtgtctccaggagccagtgaccaccgaggctgtgccactgca

SEQ ID NO: 105182 - DNA, 80 bp, synthetic construct; identical to SEQ ID NO: 36472
  misc_feature 1..80: note = Artificially Synthesized Probe
  source 1..80: mol_type = other DNA

SEQ ID NO: 105183 - DNA, 80 bp, synthetic construct
  misc_feature 1..80: note = Artificially Synthesized Probe
  source 1..80: mol_type = other DNA
taatctcagcattttgggaggctgagatgggtggatcacgaggtcaggagttcaagaccagcctggctaagatggtgaaa

SEQ ID NO: 105184 - DNA, 80 bp, synthetic construct
  misc_feature 1..80: note = Artificially Synthesized Probe
  source 1..80: mol_type = other DNA
acagagactccatctcaaaaaaataaataaaaataaaaaataacccagcctcaactattcctttatagcaacacaaatga

SEQ ID NO: 105185 - DNA, 80 bp, synthetic construct
  misc_feature 1..80: note = Artificially Synthesized Probe
  source 1..80: mol_type = other DNA
cacgggacgcgctggaggctgcagtgaggaaggacgcagaggggtccaggacaaacccaagcctccgacctggtcagccc

SEQ ID NO: 105186 - DNA, 80 bp, synthetic construct
  misc_feature 1..80: note = Artificially Synthesized Probe
  source 1..80: mol_type = other DNA
ggtcagcatgtagtgactacccctggatttccccatactctgtatttttaaaaccaaccagcaatttattcataaagatg

SEQ ID NO: 105187 - DNA, 80 bp, synthetic construct
  misc_feature 1..80: note = Artificially Synthesized Probe
  source 1..80: mol_type = other DNA
tgtatttttaaaaccaaccagcaatttattcataaagatgccctcatgtgatggttatctgccttttgtaaatcaggaag

SEQ ID NO: 105188 - DNA, 80 bp, synthetic construct
  misc_feature 1..80: note = Artificially Synthesized Probe
  source 1..80: mol_type = other DNA
gcacagcccgctgtacctgaggactcggggaaataaattagcatctcagaggctagaaaccgtccaatactgctgtgtcc

SEQ ID NO: 105189 - DNA, 80 bp, synthetic construct; identical to SEQ ID NO: 36473
  misc_feature 1..80: note = Artificially Synthesized Probe
  source 1..80: mol_type = other DNA

SEQ ID NO: 105190 - DNA, 80 bp, synthetic construct
  misc_feature 1..80: note = Artificially Synthesized Probe
  source 1..80: mol_type = other DNA
ttttcctttttgtttgagtccaggggcagttcatacctctttagttcttggttgcttaacaatgagaagcactcaaagga

SEQ ID NO: 105191 - DNA, 80 bp, synthetic construct
  misc_feature 1..80: note = Artificially Synthesized Probe
  source 1..80: mol_type = other DNA
ttagttcttggttgcttaacaatgagaagcactcaaaggaataacacacaaatcaaactagatgtggatgcaaaagcagc

SEQ ID NO: 105192 - DNA, 80 bp, synthetic construct
  misc_feature 1..80: note = Artificially Synthesized Probe
  source 1..80: mol_type = other DNA
tgcaggccctgtggtgtggcctgtggctccggggcaccgcacctgcactgcatgccactgcactgaatcctgcaggcagc

SEQ ID NO: 105193 - DNA, 80 bp, synthetic construct
  misc_feature 1..80: note = Artificially Synthesized Probe
  source 1..80: mol_type = other DNA
tgcgtgactatgtgcgtgactacatacaaggtaacctctatatgaccatttgttgataagttacaaaacaaccaagaaat

SEQ ID NO: 105194 - DNA, 80 bp, synthetic construct
  misc_feature 1..80: note = Artificially Synthesized Probe
  source 1..80: mol_type = other DNA
gcccggctaattttttgtatttttagtagagacggggtttcgccatgttggccaggctggtctcgaactgctgacctcag

SEQ ID NO: 105195 - DNA, 80 bp, synthetic construct; identical to SEQ ID NO: 36474
  misc_feature 1..80: note = Artificially Synthesized Probe
  source 1..80: mol_type = other DNA

SEQ ID NO: 105196 - DNA, 80 bp, synthetic construct
  misc_feature 1..80: note = Artificially Synthesized Probe
  source 1..80: mol_type = other DNA
gctgagcaggtccgtttccatgtgggtgtcttgggtaggggctgggctgctgaccccctcggcaaggacctgctggatca

SEQ ID NO: 105197 - DNA, 80 bp, synthetic construct
  misc_feature 1..80: note = Artificially Synthesized Probe
  source 1..80: mol_type = other DNA
tggcccgcctggccccgtgccagctgccgcagattgctacccacaatggacgggtcactgagcaggtccggccaactgag

SEQ ID NO: 105198 - DNA, 80 bp, synthetic construct
  misc_feature 1..80: note = Artificially Synthesized Probe
  source 1..80: mol_type = other DNA
cacagacacccagcaaggacacgcagcccgcacacccccggcaccccagacacagtgacctgcaccagggctcgaggttt

SEQ ID NO: 105199 - DNA, 80 bp, synthetic construct; identical to SEQ ID NO: 36475
  misc_feature 1..80: note = Artificially Synthesized Probe
  source 1..80: mol_type = other DNA

SEQ ID NO: 105200 - DNA, 80 bp, synthetic construct
  misc_feature 1..80: note = Artificially Synthesized Probe
  source 1..80: mol_type = other DNA
atatgggacatctgcaccgtccgtgatggcagcccctcgcgacgtgtgccactgaacacttgacagcagactggtgcagc

SEQ ID NO: 105201 - DNA, 80 bp, synthetic construct
  misc_feature 1..80: note = Artificially Synthesized Probe
  source 1..80: mol_type = other DNA
atactgagcggtgtccactccgactccacggcccacccccgccaggaaggaggactaagtgctgctggggtggaccttgt

SEQ ID NO: 105202 - DNA, 80 bp, synthetic construct
  misc_feature 1..80: note = Artificially Synthesized Probe
  source 1..80: mol_type = other DNA
tgcctgccaccatgcccagctaattttttgtatttttagtagagacggggtttcactgtgttggccaggctggtcttgga

SEQ ID NO: 105203 - DNA, 80 bp, synthetic construct
  misc_feature 1..80: note = Artificially Synthesized Probe
  source 1..80: mol_type = other DNA
tggtcgcggcttatgcgccttctctgtgtgctgctggggttagtttgcatgtaacctcttgaggaccccacgtgtgcatt

SEQ ID NO: 105204 - DNA, 80 bp, synthetic construct
  misc_feature 1..80: note = Artificially Synthesized Probe
  source 1..80: mol_type = other DNA
tgtccctaactggccggctcccgcgggcgcgcggcggggaaggccagaggacctgggcgcgggcgatgtgcctcctgagc

SEQ ID NO: 105205 - DNA, 80 bp, synthetic construct; identical to SEQ ID NO: 36525
  misc_feature 1..80: note = Artificially Synthesized Probe
  source 1..80: mol_type = other DNA

SEQ ID NO: 105206 - DNA, 80 bp, synthetic construct
  misc_feature 1..80: note = Artificially Synthesized Probe
  source 1..80: mol_type = other DNA
ctagggtgtcatcggggtccaagggtaccctttggggggctcatggtgcttgggagctgcaggacagtcagcaggctcca

SEQ ID NO: 105207 - DNA, 80 bp, synthetic construct
  misc_feature 1..80: note = Artificially Synthesized Probe
  source 1..80: mol_type = other DNA
atctgacaacgccccccgctcactctccccacagggacactgcaggtccgcctcctgggctgtgaacagttgctgacagc

SEQ ID NO: 105208 - DNA, 80 bp, synthetic construct
  misc_feature 1..80: note = Artificially Synthesized Probe
  source 1..80: mol_type = other DNA
ctgccctgagtcccggctctggccctgcaggcgaggtgctggctgtgctaaaggtggacaaccgtgttgtggggcagacg

SEQ ID NO: 105209 - DNA, 80 bp, synthetic construct
  misc_feature 1..80: note = Artificially Synthesized Probe
  source 1..80: mol_type = other DNA
agcctggcctccccaatacaggcccgtgagctggagattggggtacactggcgggactggcggcagctatgtggcgtggc

SEQ ID NO: 105210 - DNA, 80 bp, synthetic construct; identical to SEQ ID NO: 36526
  misc_feature 1..80: note = Artificially Synthesized Probe
  source 1..80: mol_type = other DNA

SEQ ID NO: 105211 - DNA, 80 bp, synthetic construct
  misc_feature 1..80: note = Artificially Synthesized Probe
  source 1..80: mol_type = other DNA
gcatctgttgaccctgggggcttgggctgtaatcccaggggcagaggaggtgccatggcagatgagatgggaggcgactg

SEQ ID NO: 105212 - DNA, 80 bp, synthetic construct
  misc_feature 1..80: note = Artificially Synthesized Probe
  source 1..80: mol_type = other DNA
ccgggactaagctcccccttttctcccaggccaggacttcctgagggcttcgcagatgaacctcggcatggcggcctggg

SEQ ID NO: 105213 - DNA, 80 bp, synthetic construct; identical to SEQ ID NO: 36527
  misc_feature 1..80: note = Artificially Synthesized Probe
  source 1..80: mol_type = other DNA

SEQ ID NO: 105214 - DNA, 80 bp, synthetic construct
  misc_feature 1..80: note = Artificially Synthesized Probe
  source 1..80: mol_type = other DNA
gggaccatgggggtgttgcggggtgcgtgtagactccttgagcgcccaagccagtcgtttaggccgccttcagggctggg

SEQ ID NO: 105215 - DNA, 80 bp, synthetic construct
  misc_feature 1..80: note = Artificially Synthesized Probe
  source 1..80: mol_type = other DNA
caggagccaacatccgaggagactccggtgaggggctggagggactagtggctcctagggccggctggggctggcagggc

SEQ ID NO: 105216 - DNA, 80 bp, synthetic construct
  misc_feature 1..80: note = Artificially Synthesized Probe
  source 1..80: mol_type = other DNA
accccatcctgcgcaccttcatgtttgagacgttcgtctgcttgcttgaacatttgtgtatccattcatacattactccc

SEQ ID NO: 105217 - DNA, 80 bp, synthetic construct
  misc_feature 1..80: note = Artificially Synthesized Probe
  source 1..80: mol_type = other DNA
tggctctgggtaggggcccagccagtgccctaggggacttcatataccctctcttcctttgcaggaaaccccctcggctt

SEQ ID NO: 105218 - DNA, 80 bp, synthetic construct
  misc_feature 1..80: note = Artificially Synthesized Probe
  source 1..80: mol_type = other DNA
acaacctctctctggccccaggtcctcctggtccagttcaaggggacagggaaatactacgccatcaaagcactgaagaa

SEQ ID NO: 105219 - DNA, 80 bp, synthetic construct; identical to SEQ ID NO: 36528
  misc_feature 1..80: note = Artificially Synthesized Probe
  source 1..80: mol_type = other DNA

SEQ ID NO: 105220 - DNA, 80 bp, synthetic construct
  misc_feature 1..80: note = Artificially Synthesized Probe
  source 1..80: mol_type = other DNA
gttcaagaccaatctgaatcacatggtgaaaccccatctataaaaaatagccagacatggtggcatgtgcctttagtccc

SEQ ID NO: 105221 - DNA, 80 bp, synthetic construct
  misc_feature 1..80: note = Artificially Synthesized Probe
  source 1..80: mol_type = other DNA
ggctcatgcctgtaatcccagcacttcaggaggccaaggtgggaggattgcttgagcccaggagttcgaggccagcctgg

SEQ ID NO: 105222 - DNA, 80 bp, synthetic construct; identical to SEQ ID NO: 36529
  misc_feature 1..80: note = Artificially Synthesized Probe
  source 1..80: mol_type = other DNA

SEQ ID NO: 105223 - DNA, 80 bp, synthetic construct
  misc_feature 1..80: note = Artificially Synthesized Probe
  source 1..80: mol_type = other DNA
tgaggcacaaaaatctcttgaacccgggaggcagaggttgcaatgagctgagatcacaccacagcactccagcccaggcg

SEQ ID NO: 105224 - DNA, 80 bp, synthetic construct
  misc_feature 1..80: note = Artificially Synthesized Probe
  source 1..80: mol_type = other DNA
ctcttgctctctcctgtagcctgtactgcgagaagcggatcctggaggctgtgggctgcacagggcaccctttcctgctc

SEQ ID NO: 105225 - DNA, 80 bp, synthetic construct
  misc_feature 1..80: note = Artificially Synthesized Probe
  source 1..80: mol_type = other DNA
tgtttgctccggtctttggctctggccctgtggcctagggcggtcagaggatttcctgagcctcgcccttgccctctgac

SEQ ID NO: 105226 - DNA, 80 bp, synthetic construct
  misc_feature 1..80: note = Artificially Synthesized Probe
  source 1..80: mol_type = other DNA
aaactttgcctggttccctacacccactctctacatactgctttctccaagtgcccaacagcaggggagcaggagtcaga

SEQ ID NO: 105227 - DNA, 80 bp, synthetic construct
  misc_feature 1..80: note = Artificially Synthesized Probe
  source 1..80: mol_type = other DNA
gagtgcaatggcatgatctcggctcaccacaacctccgcctccctggttcaagccattctcctgcctcagcctcctgagt

SEQ ID NO: 105228 - DNA, 80 bp, synthetic construct; identical to SEQ ID NO: 36530
  misc_feature 1..80: note = Artificially Synthesized Probe
  source 1..80: mol_type = other DNA

SEQ ID NO: 105229 - DNA, 80 bp, synthetic construct
  misc_feature 1..80: note = Artificially Synthesized Probe
  source 1..80: mol_type = other DNA
gaatcgcttgaacccaggaggcggaggttggagtgagccgagatcccgccacttcggtctggcgacagagtgagactcca

SEQ ID NO: 105230 - DNA, 80 bp, synthetic construct
  misc_feature 1..80: note = Artificially Synthesized Probe
  source 1..80: mol_type = other DNA
aaaaaaaaaaaaaaaaaattagctgggcgtggtggcgcgtgcctgtagtctcagctacttgggaggctgaggcaggagaa

SEQ ID NO: 105231 - DNA, 80 bp, synthetic construct
  misc_feature 1..80: note = Artificially Synthesized Probe
  source 1..80: mol_type = other DNA
catttaagggcccatgaagggtgagctggaaatgcacgcaaccttggggcgaccttgggactattggagcacccccaccc

SEQ ID NO: 105232 - DNA, 80 bp, synthetic construct; identical to SEQ ID NO: 36531
  misc_feature 1..80: note = Artificially Synthesized Probe
  source 1..80: mol_type = other DNA

SEQ ID NO: 105233 - DNA, 80 bp, synthetic construct
  misc_feature 1..80: note = Artificially Synthesized Probe
  source 1..80: mol_type = other DNA
gttggataaccttctgctggatgcccagggattcctgaagatcgcagactttggactctgcaaggaaggtgggggccgcc

SEQ ID NO: 105234 - DNA, 80 bp, synthetic construct
  misc_feature 1..80: note = Artificially Synthesized Probe
  source 1..80: mol_type = other DNA
tttcttcctagtcctagaggctcgtagccccagcctgcacctggcccaagggagagcctgtggtcagggatgggagagga

SEQ ID NO: 105235 - DNA, 80 bp, synthetic construct; identical to SEQ ID NO: 36532
  misc_feature 1..80: note = Artificially Synthesized Probe
  source 1..80: mol_type = other DNA

SEQ ID NO: 105236 - DNA, 80 bp, synthetic construct
  misc_feature 1..80: note = Artificially Synthesized Probe
  source 1..80: mol_type = other DNA
ggcgcaatctcggctcactgcaacctctgcctccaaggttcaagagattctcctgcctcagcctcccgagtacctgcgat

SEQ ID NO: 105237 - DNA, 80 bp, synthetic construct
  misc_feature 1..80: note = Artificially Synthesized Probe
  source 1..80: mol_type = other DNA
aggtcacctttggcaccggttggtttgaaatgctggcggctggaaaggaggtgttcctgttcctggctccaacctgggtg

SEQ ID NO: 105238 - DNA, 80 bp, synthetic construct
  misc_feature 1..80: note = Artificially Synthesized Probe
  source 1..80: mol_type = other DNA
cgcacccagccgagttctgccttctgtgaccttagcctgtgagcttggctctgcatgcagtcaaatggcgtcataaccat

SEQ ID NO: 105239 - DNA, 80 bp, synthetic construct
  misc_feature 1..80: note = Artificially Synthesized Probe
  source 1..80: mol_type = other DNA
tagcaccttctgtggcaccccggagttcctggctcccgaggtgctgacccaggaggcatacacacgggctgtggactggt

SEQ ID NO: 105240 - DNA, 80 bp, synthetic construct; identical to SEQ ID NO: 36533
  misc_feature 1..80: note = Artificially Synthesized Probe
  source 1..80: mol_type = other DNA

SEQ ID NO: 105241 - DNA, 80 bp, synthetic construct
  misc_feature 1..80: note = Artificially Synthesized Probe
  source 1..80: mol_type = other DNA
ggcctgtggatgatggcagtgcctggggctgaatgccctaagtgagcgcctgtcctattgcccagctcctccagaagtgc

SEQ ID NO: 105242 - DNA, 80 bp, synthetic construct
  misc_feature 1..80: note = Artificially Synthesized Probe
  source 1..80: mol_type = other DNA
ctcaggcgcctctcctttgccctcagaccaccaactggcaagccctgctcgcccgcaccatccagccccccttcgtgcct

SEQ ID NO: 105243 - DNA, 80 bp, synthetic construct
  misc_feature 1..80: note = Artificially Synthesized Probe
  source 1..80: mol_type = other DNA
gaaccctgagggcatctcctggcacctctgtccccttcccccacagactgttagagcctctgctcgttcacccgtgcgcc

SEQ ID NO: 105244 - DNA, 80 bp, synthetic construct; identical to SEQ ID NO: 36534
  misc_feature 1..80: note = Artificially Synthesized Probe
  source 1..80: mol_type = other DNA

SEQ ID NO: 105245 - DNA, 80 bp, synthetic construct; identical to SEQ ID NO: 36516
  misc_feature 1..80: note = Artificially Synthesized Probe
  source 1..80: mol_type = other DNA

SEQ ID NO: 105246 - DNA, 80 bp, synthetic construct
  misc_feature 1..80: note = Artificially Synthesized Probe
  source 1..80: mol_type = other DNA
ggtggctcacacctgtaatcccagcactttgggaggccaaggcaggtggatcacctgaggtcaggattcaagaccagcct

SEQ ID NO: 105247 - DNA, 80 bp, synthetic construct
  misc_feature 1..80: note = Artificially Synthesized Probe
  source 1..80: mol_type = other DNA
atggcactccagcctgggcaacaagagcaaaactgtctcaaaaaaaaaaaaaagaaaaagaaaaagaaaaaagaaaatgg

SEQ ID NO: 105248 - DNA, 80 bp, synthetic construct
  misc_feature 1..80: note = Artificially Synthesized Probe
  source 1..80: mol_type = other DNA
aggcggcgctggtcccgcgggccagcgggtctcgggagggggcgcccgatcccgcgtctccggcgccgcttcccgggaag

SEQ ID NO: 105249 - DNA, 80 bp, synthetic construct; identical to SEQ ID NO: 36517
  misc_feature 1..80: note = Artificially Synthesized Probe
  source 1..80: mol_type = other DNA

SEQ ID NO: 105250 - DNA, 80 bp, synthetic construct
  misc_feature 1..80: note = Artificially Synthesized Probe
  source 1..80: mol_type = other DNA
ggaggtgatccgccgggccatccagaaagagctgaagatcaaggagggggtggagaacctgcggcgcgtggccacagacc

SEQ ID NO: 105251 - DNA, 80 bp, synthetic construct
  misc_feature 1..80: note = Artificially Synthesized Probe
  source 1..80: mol_type = other DNA
caggacagaaggctctaggcccatctggcccctggccttggccctggccactgtggcgagaccacctcatttcctgccta

SEQ ID NO: 105252 - DNA, 80 bp, synthetic construct
  misc_feature 1..80: note = Artificially Synthesized Probe
  source 1..80: mol_type = other DNA
ccggaggcagctgcatgtggagctgaaggtgaagcagggggctgagaacatgacccacacgtgcgccagtggcaccccca

SEQ ID NO: 105253 - DNA, 80 bp, synthetic construct; identical to SEQ ID NO: 36518
  misc_feature 1..80: note = Artificially Synthesized Probe
  source 1..80: mol_type = other DNA

SEQ ID NO: 105254 - DNA, 80 bp, synthetic construct
  misc_feature 1..80: note = Artificially Synthesized Probe
  source 1..80: mol_type = other DNA
atccccagccctgatctgatgggagaggcttagcttagcccctgccctcatctaatgggggaggcttagcttagcccctg

SEQ ID NO: 105255 - DNA, 80 bp, synthetic construct
  misc_feature 1..80: note = Artificially Synthesized Probe
  source 1..80: mol_type = other DNA
ccgtgatatgaaagaggaaatttgaccccagcccttgttggtcagatggaaaaggctcccctgacccaccaactagtcca

SEQ ID NO: 105256 - DNA, 80 bp, synthetic construct
  misc_feature 1..80: note = Artificially Synthesized Probe
  source 1..80: mol_type = other DNA
gaagctcctggcagctgcccagcagatgctgcgggacagccagctgaaggtggccctgctgcggatgaagatcagcagcc

SEQ ID NO: 105257 - DNA, 80 bp, synthetic construct; identical to SEQ ID NO: 36519
  misc_feature 1..80: note = Artificially Synthesized Probe
  source 1..80: mol_type = other DNA

SEQ ID NO: 105258 - DNA, 80 bp, synthetic construct
  misc_feature 1..80: note = Artificially Synthesized Probe
  source 1..80: mol_type = other DNA
gccatataccccacgaacctggctctacgttgtcccctctgcaggcccaggcccagctacaggagtcctctcagaaactg

SEQ ID NO: 105259 - DNA, 80 bp, synthetic construct
  misc_feature 1..80: note = Artificially Synthesized Probe
  source 1..80: mol_type = other DNA
tctgtcatcgccccggagccccgaaccgcggccgcttcccccgatcctcccctcacccgcgccccttccctgcccctgcc

SEQ ID NO: 105260 - DNA, 80 bp, synthetic construct
  misc_feature 1..80: note = Artificially Synthesized Probe
  source 1..80: mol_type = other DNA
agtcagaagttcctcccccttcaaagctctccttctttttggggggaggccggaagcacaaacaactctgatgaagagtt

SEQ ID NO: 105261 - DNA, 80 bp, synthetic construct
  misc_feature 1..80: note = Artificially Synthesized Probe
  source 1..80: mol_type = other DNA
agcacagtcagcactcggacagcgtagcttgtatttacataaataaccagaataatgcttaaagcactggtgttaggaag

SEQ ID NO: 105262 - DNA, 80 bp, synthetic construct
  misc_feature 1..80: note = Artificially Synthesized Probe
  source 1..80: mol_type = other DNA
cctggccaagatggtgaaaccctgtctctactacaaatacaaaaattagccgggcgtggtggcgggtgcctgtaatcctg

SEQ ID NO: 105263 - DNA, 80 bp, synthetic construct; identical to SEQ ID NO: 36520
  misc_feature 1..80: note = Artificially Synthesized Probe
  source 1..80: mol_type = other DNA

SEQ ID NO: 105264 - DNA, 80 bp, synthetic construct
  misc_feature 1..80: note = Artificially Synthesized Probe
  source 1..80: mol_type = other DNA
gccgctgcacttcagcctaggtaacagggcaagactccatctcaaaaaataataataataatttccttggaaaaaaaata

SEQ ID NO: 105265 - DNA, 80 bp, synthetic construct
  misc_feature 1..80: note = Artificially Synthesized Probe
  source 1..80: mol_type = other DNA
ctcaagcctgtaattccagcactttgggaggctgaggtggacgaatcatttgagcccaggatttctagacgagcctgggc

SEQ ID NO: 105266 - DNA, 80 bp, synthetic construct; identical to SEQ ID NO: 36521
  misc_feature 1..80: note = Artificially Synthesized Probe
  source 1..80: mol_type = other DNA

SEQ ID NO: 105267 - DNA, 80 bp, synthetic construct
  misc_feature 1..80: note = Artificially Synthesized Probe
  source 1..80: mol_type = other DNA
ggcggatcacgaggtcaggagatcgagaccatcctggctaacacggtgaaaccctgtctccactaaaaatacaaaaaatt

SEQ ID NO: 105268 - DNA, 80 bp, synthetic construct
  misc_feature 1..80: note = Artificially Synthesized Probe
  source 1..80: mol_type = other DNA
aaaaataaaaaaataaaaaaattagccaggtatgatggtacgtacctgtagtcccagctacttgggaggctgaggtggga

SEQ ID NO: 105269 - DNA, 80 bp, synthetic construct
  misc_feature 1..80: note = Artificially Synthesized Probe
  source 1..80: mol_type = other DNA
gatcacctgaggtcgggagttcgagagcagcctgacaaaaatggagaaaccccgtctctactaaaaaatacaaaattagc

SEQ ID NO: 105270 - DNA, 80 bp, synthetic construct; identical to SEQ ID NO: 36515
  misc_feature 1..80: note = Artificially Synthesized Probe
  source 1..80: mol_type = other DNA

SEQ ID NO: 105271 - DNA, 80 bp, synthetic construct
  misc_feature 1..80: note = Artificially Synthesized Probe
  source 1..80: mol_type = other DNA
aaaaaaaaatttgcaaaaattagctgggtgtggtggcgggcgcctgtagtcccagctactcgggaggctgaggtgggaga

SEQ ID NO: 105272 - DNA, 80 bp, synthetic construct; identical to SEQ ID NO: 36522
  misc_feature 1..80: note = Artificially Synthesized Probe
  source 1..80: mol_type = other DNA

SEQ ID NO: 105273 - DNA, 80 bp, synthetic construct
  misc_feature 1..80: note = Artificially Synthesized Probe
  source 1..80: mol_type = other DNA
gcgcccggccaaaaaagttaattttcttatcttgcactgagatctgtctccttgtagcagcagccaaatcatcatcaaca

SEQ ID NO: 105274 - DNA, 80 bp, synthetic construct
  misc_feature 1..80: note = Artificially Synthesized Probe
  source 1..80: mol_type = other DNA
agaagaggaaatgcaggctctggatggagccctctcacctggccttggggaatcgaggaatattttcttttctttttttt

SEQ ID NO: 105275 - DNA, 80 bp, synthetic construct
  misc_feature 1..80: note = Artificially Synthesized Probe
  source 1..80: mol_type = other DNA
tattagtagagacagagttttgccatgttggccaggctggtctcaaactcctgacctcaggtgatccatctgccttggcc

SEQ ID NO: 105276 - DNA, 80 bp, synthetic construct; identical to SEQ ID NO: 36523
  misc_feature 1..80: note = Artificially Synthesized Probe
  source 1..80: mol_type = other DNA

SEQ ID NO: 105277 - DNA, 80 bp, synthetic construct
  misc_feature 1..80: note = Artificially Synthesized Probe
  source 1..80: mol_type = other DNA
tgggattacaggcatgtaccaccacacctggcgaatttttatattttcagtagagatgggatttctccatgttggtcagg

SEQ ID NO: 105278 - DNA, 80 bp, synthetic construct
  misc_feature 1..80: note = Artificially Synthesized Probe
  source 1..80: mol_type = other DNA
ctcactgcaagctctgcctcccgggttcacgccattcttctgcctcagcctctcgagtagctgggactaactacaggcgc

SEQ ID NO: 105279 - DNA, 80 bp, synthetic construct; identical to SEQ ID NO: 36524
  misc_feature 1..80: note = Artificially Synthesized Probe
  source 1..80: mol_type = other DNA

SEQ ID NO: 105280 - DNA, 80 bp, synthetic construct
  misc_feature 1..80: note = Artificially Synthesized Probe
  source 1..80: mol_type = other DNA
ctcagcctaccaaagtgctgggattacaggtgtgagccaccacgcccggcctcaagtttttgttttgtttgttttttttt

SEQ ID NO: 105281 - DNA, 80 bp, synthetic construct
  misc_feature 1..80: note = Artificially Synthesized Probe
  source 1..80: mol_type = other DNA
ttagttgggatggggtttcgccatgttggtcaggctgggcttgaactcctgacctcaggtgatctgcctgccttggtctc

SEQ ID NO: 105282 - DNA, 80 bp, synthetic construct
  misc_feature 1..80: note = Artificially Synthesized Probe
  source 1..80: mol_type = other DNA
gggtacatagcgggttctagaatgcggagggggctgggtttcctgccagagctggcagtaggtgcgcgtgggcccggagg

SEQ ID NO: 105283 - DNA, 80 bp, synthetic construct
  misc_feature 1..80: note = Artificially Synthesized Probe
  source 1..80: mol_type = other DNA
gtgtcctcaaaagctgctagatccccactgctttctctaccctttgagggacaaccctctagtgacgtgacacatgaact

SEQ ID NO: 105284 - DNA, 80 bp, synthetic construct
  misc_feature 1..80: note = Artificially Synthesized Probe
  source 1..80: mol_type = other DNA
aaaaacatacttctaataacgcttacaatagcctctttgccaccagagcagaccaagtcagcagaacctggagttttaat

SEQ ID NO: 105285 - DNA, 80 bp, synthetic construct; identical to SEQ ID NO: 36546
  misc_feature 1..80: note = Artificially Synthesized Probe
  source 1..80: mol_type = other DNA

SEQ ID NO: 105286 - DNA, 80 bp, synthetic construct
  misc_feature 1..80: note = Artificially Synthesized Probe
  source 1..80: mol_type = other DNA
caaaaacaaaatctgtttctcatcttacaaatcttttctcatcttcacaacacctatcttacaggtaaggaagctggggt

SEQ ID NO: 105287 - DNA, 80 bp, synthetic construct
  misc_feature 1..80: note = Artificially Synthesized Probe
  source 1..80: mol_type = other DNA
gctcactgcaatctccacctcccaggttcaagcaattctcctgcctcagcctcctgagtagctgggactacaggagcatg

SEQ ID NO: 105288 - DNA, 80 bp, synthetic construct; identical to SEQ ID NO: 36535
  misc_feature 1..80: note = Artificially Synthesized Probe
  source 1..80: mol_type = other DNA

SEQ ID NO: 105289 - DNA, 80 bp, synthetic construct
  misc_feature 1..80: note = Artificially Synthesized Probe
  source 1..80: mol_type = other DNA
gcggtgattttcagcaaaggtagcaggatgattcaatggggaagagtctcttcaaccaagagggctgagataactggata

SEQ ID NO: 105290 - DNA, 80 bp, synthetic construct
  misc_feature 1..80: note = Artificially Synthesized Probe
  source 1..80: mol_type = other DNA
gaagaaaacttaacggtaaatatttataactttggatttggcagtggattctaaggacaccaaaaacacgagcaacaaaa

SEQ ID NO: 105291 - DNA, 80 bp, synthetic construct; identical to SEQ ID NO: 36547
  misc_feature 1..80: note = Artificially Synthesized Probe
  source 1..80: mol_type = other DNA

SEQ ID NO: 105292 - DNA, 80 bp, synthetic construct
  misc_feature 1..80: note = Artificially Synthesized Probe
  source 1..80: mol_type = other DNA
ccccgtctctactaaaaaatatataaaaattagccgggcgtggtggtgcatgcctgagacaggagaatagcttgagttca

SEQ ID NO: 105293 - DNA, 80 bp, synthetic construct
  misc_feature 1..80: note = Artificially Synthesized Probe
  source 1..80: mol_type = other DNA
tcccagcactttggaggccaatgtgggtggattgcttgaggtcaggaatttgagaccagcctgaccaacagggtgaaacc

SEQ ID NO: 105294 - DNA, 80 bp, synthetic construct; identical to SEQ ID NO: 36548
  misc_feature 1..80: note = Artificially Synthesized Probe
  source 1..80: mol_type = other DNA

SEQ ID NO: 105295 - DNA, 80 bp, synthetic construct
  misc_feature 1..80: note = Artificially Synthesized Probe
  source 1..80: mol_type = other DNA
cacatcatactgaatggggatgagttgaaagcattcattcccccaagagctggaacaagacaaggatgcccactctcacc

SEQ ID NO: 105296 - DNA, 80 bp, synthetic construct
  misc_feature 1..80: note = Artificially Synthesized Probe
  source 1..80: mol_type = other DNA
ggtatatactccaaaatattgaaaccaggtactcaaataagtatttgttcatgaatgttcatagcagcactattcacata

SEQ ID NO: 105297 - DNA, 80 bp, synthetic construct
  misc_feature 1..80: note = Artificially Synthesized Probe
  source 1..80: mol_type = other DNA
ggctcacgcctgtaatcacagcactttgggaggctgaggcaggcagatcacttgaggtcaggagttcaagaccagcctgg

SEQ ID NO: 105298 - DNA, 80 bp, synthetic construct
  misc_feature 1..80: note = Artificially Synthesized Probe
  source 1..80: mol_type = other DNA
ctgcactccagcctgggtgacaggtgagatttcgtgtcaaaaaaaaaaaaaaaagaaagaaaatgagcaaatctcaaaaa

SEQ ID NO: 105299 - DNA, 80 bp, synthetic construct; identical to SEQ ID NO: 36549
  misc_feature 1..80: note = Artificially Synthesized Probe
  source 1..80: mol_type = other DNA

SEQ ID NO: 105300 - DNA, 80 bp, synthetic construct
  misc_feature 1..80: note = Artificially Synthesized Probe
  source 1..80: mol_type = other DNA
caagcaattctcctgcctcagccttcttagtagctggaattaaaagcacccacctgtattttagtagagacgtggtttca

SEQ ID NO: 105301 - DNA, 80 bp, synthetic construct
  misc_feature 1..80: note = Artificially Synthesized Probe
  source 1..80: mol_type = other DNA
cactctgttgcccaggctgaagtgcagtggtgcaatcttggctcactacagcctcagcctccctgggcttaggtgatcct

SEQ ID NO: 105302 - DNA, 80 bp, synthetic construct
  misc_feature 1..80: note = Artificially Synthesized Probe
  source 1..80: mol_type = other DNA
ccacagcgccgagcctgttatgtctattttcaagtaacagaaaatagaaaaaaagggatggaactagtggtctggatcat

SEQ ID NO: 105303 - DNA, 80 bp, synthetic construct; identical to SEQ ID NO: 36550
  misc_feature 1..80: note = Artificially Synthesized Probe
  source 1..80: mol_type = other DNA

SEQ ID NO: 105304 - DNA, 80 bp, synthetic construct
  misc_feature 1..80: note = Artificially Synthesized Probe
  source 1..80: mol_type = other DNA
ggcctcaagtgatccacctgccttggcctcccaaagtgctggaactataggcgtgagccacagcacccggcccaaaatgg

SEQ ID NO: 105305 - DNA, 80 bp, synthetic construct
  misc_feature 1..80: note = Artificially Synthesized Probe
  source 1..80: mol_type = other DNA
aaaatattagccaggtgtagtggcaggcacctgtaatctcagctactcaggaggctgaggcaggagaatcacttgaaccc

SEQ ID NO: 105306 - DNA, 80 bp, synthetic construct
  misc_feature 1..80: note = Artificially Synthesized Probe
  source 1..80: mol_type = other DNA
agactcctagatttgaccaatgaattcaataaagtctcaggttacaaaccagtagcactgctatacatcaataaggacta

SEQ ID NO: 105307 - DNA, 80 bp, synthetic construct
  misc_feature 1..80: note = Artificially Synthesized Probe
  source 1..80: mol_type = other DNA
aaataaataatataaaaataaaataaatactacagtccttatgttattgctttgtttcaaaatcttgtaggattgcctga

SEQ ID NO: 105308 - DNA, 80 bp, synthetic construct
  misc_feature 1..80: note = Artificially Synthesized Probe
  source 1..80: mol_type = other DNA
caacctcctgggcttcaagcgatcctcccacctcagcctcccaagtagctgggatcacagatgtgtgccaccacgcctgg

SEQ ID NO: 105309 - DNA, 80 bp, synthetic construct; identical to SEQ ID NO: 36551
  misc_feature 1..80: note = Artificially Synthesized Probe
  source 1..80: mol_type = other DNA

SEQ ID NO: 105310 - DNA, 80 bp, synthetic construct
  misc_feature 1..80: note = Artificially Synthesized Probe
  source 1..80: mol_type = other DNA
cctgtagtcccagccacttgggaggctgaggcacgagaatcgcttgaacccaggaggcagaggttgtagtgagccaagat

SEQ ID NO: 105311 - DNA, 80 bp, synthetic construct
  misc_feature 1..80: note = Artificially Synthesized Probe
  source 1..80: mol_type = other DNA
ggctatgccaggatgcccaggggatactcggggtgggtggcatggtgctgctggggactcaccgcacaggacgctctgat

SEQ ID NO: 105312 - DNA, 80 bp, synthetic construct; identical to SEQ ID NO: 36552
  misc_feature 1..80: note = Artificially Synthesized Probe
  source 1..80: mol_type = other DNA

SEQ ID NO: 105313 - DNA, 80 bp, synthetic construct
  misc_feature 1..80: note = Artificially Synthesized Probe
  source 1..80: mol_type = other DNA
atttgtatttcctttgagacagcgtatctctctgttgctcaggctggagtgcaatggctcaatcagctcactttagcctt

SEQ ID NO: 105314 - DNA, 80 bp, synthetic construct
  misc_feature 1..80: note = Artificially Synthesized Probe
  source 1..80: mol_type = other DNA
acctcagcctccacaaatgctgggattacaggtgggagctactgtacacctggccttatctaagctgtttccctgaaaat

SEQ ID NO: 105315 - DNA, 80 bp, synthetic construct
  misc_feature 1..80: note = Artificially Synthesized Probe
  source 1..80: mol_type = other DNA
ccaagccctgccacttcctgactttgcccacactgtaccctctgcctggggcaacttcatgtctgcccattgacccttag

SEQ ID NO: 105316 - DNA, 80 bp, synthetic construct; identical to SEQ ID NO: 36553
  misc_feature 1..80: note = Artificially Synthesized Probe
  source 1..80: mol_type = other DNA

SEQ ID NO: 105317 - DNA, 80 bp, synthetic construct
  misc_feature 1..80: note = Artificially Synthesized Probe
  source 1..80: mol_type = other DNA
agatgacacaaacaaatggaaatacatcccatgctcatggattggaagaatcaatgtaatgaaaatgaccatactaccca

SEQ ID NO: 105318 - DNA, 80 bp, synthetic construct
  misc_feature 1..80: note = Artificially Synthesized Probe
  source 1..80: mol_type = other DNA
gattctcctgcctcagcctcccgagtagctgggattacaggcatgcgccaccatgcctggctaattttgtagttttagta

SEQ ID NO: 105319 - DNA, 80 bp, synthetic construct
  misc_feature 1..80: note = Artificially Synthesized Probe
  source 1..80: mol_type = other DNA
ctgtgaaatgggattgttgtgagaacgcaaagggattcccagggcagttcctagtgcatagtctggcttcctttgtgtgt

SEQ ID NO: 105320 - DNA, 80 bp, synthetic construct
  misc_feature 1..80: note = Artificially Synthesized Probe
  source 1..80: mol_type = other DNA
tgaatcaccacacctggtcactttatatttttattatttttttcttttgagacagggtctcgcactgtcacccaggttgg

SEQ ID NO: 105321 - DNA, 80 bp, synthetic construct
  misc_feature 1..80: note = Artificially Synthesized Probe
  source 1..80: mol_type = other DNA
atattggccaggctggtcttgaactcctgacctcaagtgatctgcccacctcggccttccaaagtgctgggattacagga

SEQ ID NO: 105322 - DNA, 80 bp, synthetic construct; identical to SEQ ID NO: 36554
  misc_feature 1..80: note = Artificially Synthesized Probe
  source 1..80: mol_type = other DNA

SEQ ID NO: 105323 - DNA, 80 bp, synthetic construct
  misc_feature 1..80: note = Artificially Synthesized Probe
  source 1..80: mol_type = other DNA
gtgcacacgtaatatcctggaggctggggggtaaacaaaggtgacaggctgcaggtcagggcttcccagacccctgggaa

SEQ ID NO: 105324 - DNA, 80 bp, synthetic construct
  misc_feature 1..80: note = Artificially Synthesized Probe
  source 1..80: mol_type = other DNA
acttcaactcatatgaatgaaatgagataatgagtataaagcccctggtgcatgaaaaggctattataatccggctgggc

SEQ ID NO: 105325 - DNA, 80 bp, synthetic construct; identical to SEQ ID NO: 36555
  misc_feature 1..80: note = Artificially Synthesized Probe
  source 1..80: mol_type = other DNA

SEQ ID NO: 105326 - DNA, 80 bp, synthetic construct
  misc_feature 1..80: note = Artificially Synthesized Probe
  source 1..80: mol_type = other DNA
tgggcatcacggacgcgcctacaggtgtctgtcaccaaggtgggctcctctgtggcagctcccgggccctggcactgccc

SEQ ID NO: 105327 - DNA, 80 bp, synthetic construct
  misc_feature 1..80: note = Artificially Synthesized Probe
  source 1..80: mol_type = other DNA
tgactggaacccctgcattggacatgtaggaaacgaggccagccgggaaaggtaaccccacattcccacagccagcagga

SEQ ID NO: 105328 - DNA, 80 bp, synthetic construct
  misc_feature 1..80: note = Artificially Synthesized Probe
  source 1..80: mol_type = other DNA
gtgggtggaacacctgaggtcagttcgagaccagcctggccaacatggtaaaaccccatttctactaaaaatacaaaaat

SEQ ID NO: 105329 - DNA, 80 bp, synthetic construct
  misc_feature 1..80: note = Artificially Synthesized Probe
  source 1..80: mol_type = other DNA
cttcctgggttagggttagggtttatacagctctgggaggttgacgcattgtgtttgatcatcttttttttttttttttg

SEQ ID NO: 105330 - DNA, 80 bp, synthetic construct
  misc_feature 1..80: note = Artificially Synthesized Probe
  source 1..80: mol_type = other DNA
tttgtatttttagtagaaaggggtttcaccatcttggccaggctggtctcgaactcctgacctcatatgatccacctggt

SEQ ID NO: 105331 - DNA, 80 bp, synthetic construct; identical to SEQ ID NO: 36556
  misc_feature 1..80: note = Artificially Synthesized Probe
  source 1..80: mol_type = other DNA

SEQ ID NO: 105332 - DNA, 80 bp, synthetic construct
  misc_feature 1..80: note = Artificially Synthesized Probe
  source 1..80: mol_type = other DNA
accatgcccagtctcatttctgttttatctagaacagttttcatcacactgacttttttgagaagtccaggccagattga

SEQ ID NO: 105333 - DNA, 80 bp, synthetic construct
  misc_feature 1..80: note = Artificially Synthesized Probe
  source 1..80: mol_type = other DNA
ggcagatcacctgaagtgagcagttccagaccagcctgaccaacatggagaaagctgtttctacgaaaaatacataatta

SEQ ID NO: 105334 - DNA, 80 bp, synthetic construct
  misc_feature 1..80: note = Artificially Synthesized Probe
  source 1..80: mol_type = other DNA
aaaaaaaaaaaagagctgagctctgatataagctgccctggcacacagtgagcttccagaaatggtcccttgacctctaa

SEQ ID NO: 105335 - DNA, 80 bp, synthetic construct
  misc_feature 1..80: note = Artificially Synthesized Probe
  source 1..80: mol_type = other DNA
agggagggttctaggcgtggggcaggcatgagcactgtgcttataaccaagcaaaacactccctctgtgccaacataggt

SEQ ID NO: 105336 - DNA, 80 bp, synthetic construct; identical to SEQ ID NO: 36557
  misc_feature 1..80: note = Artificially Synthesized Probe
  source 1..80: mol_type = other DNA

SEQ ID NO: 105337 - DNA, 80 bp, synthetic construct
  misc_feature 1..80: note = Artificially Synthesized Probe
  source 1..80: mol_type = other DNA
atgggcagtcacccacgggacctctctacagtgaccccaaaggatggatagtgagatagggacagtatgttctatttttt

SEQ ID NO: 105338 - DNA, 80 bp, synthetic construct
  misc_feature 1..80: note = Artificially Synthesized Probe
  source 1..80: mol_type = other DNA
cccaccctctggtgtctcacatctcagggacaggtggaatgaagggtaagttcgcggaccccagatcaggacaaccggga

SEQ ID NO: 105339 - DNA, 80 bp, synthetic construct
  misc_feature 1..80: note = Artificially Synthesized Probe
  source 1..80: mol_type = other DNA
gagcattagaagagcgagctgggggctctagggcaactaggaacttggagagggatgggaggcagggctgctgggtccct

SEQ ID NO: 105340 - DNA, 80 bp, synthetic construct; identical to SEQ ID NO: 36537
  misc_feature 1..80: note = Artificially Synthesized Probe
  source 1..80: mol_type = other DNA

SEQ ID NO: 105341 - DNA, 80 bp, synthetic construct; identical to SEQ ID NO: 36558
  misc_feature 1..80: note = Artificially Synthesized Probe
  source 1..80: mol_type = other DNA

SEQ ID NO: 105342 - DNA, 80 bp, synthetic construct
  misc_feature 1..80: note = Artificially Synthesized Probe
  source 1..80: mol_type = other DNA
aagcggatcacctgaggttcagtgtttgagaccagcctgaccaacatggagaaacctcgtctctactaaaaatacaaaat

SEQ ID NO: 105343 - DNA, 80 bp, synthetic construct
  misc_feature 1..80: note = Artificially Synthesized Probe
  source 1..80: mol_type = other DNA
agactcaagggaaaccagtaaagcaagaggcaggacgggtcataaattacatttctgagacacttgacagcccaccacgt

SEQ ID NO: 105344 - DNA, 80 bp, synthetic construct
  misc_feature 1..80: note = Artificially Synthesized Probe
  source 1..80: mol_type = other DNA
aaaaacactcaaaaacataaattggggaaatgacaccctattcaataaatagtactgggaaaactgaagagctgcatgta

SEQ ID NO: 105345 - DNA, 80 bp, synthetic construct; identical to SEQ ID NO: 36538
  misc_feature 1..80: note = Artificially Synthesized Probe
  source 1..80: mol_type = other DNA

SEQ ID NO: 105346 - DNA, 80 bp, synthetic construct
  misc_feature 1..80: note = Artificially Synthesized Probe
  source 1..80: mol_type = other DNA
caaaaagtgggcacatggccaggcacgatggctcacatctgtaatcccagcactttgggaggccaaggtgggcagatcat

SEQ ID NO: 105347 - DNA, 80 bp, synthetic construct
  misc_feature 1..80: note = Artificially Synthesized Probe
  source 1..80: mol_type = other DNA
aggttgcagggagctgaggttatgtcactgcgctccagcctaggtgacagagcaagactcaaaaaaaaaaaaaaaaaaaa

SEQ ID NO: 105348 - DNA, 80 bp, synthetic construct
  misc_feature 1..80: note = Artificially Synthesized Probe
  source 1..80: mol_type = other DNA
aagtcaaaatagacattgacctgaatgtgatgaaaaaagaatgcttttagactgctggtgctaagatcagttagcacaac

SEQ ID NO: 105349 - DNA, 80 bp, synthetic construct; identical to SEQ ID NO: 36539
  misc_feature 1..80: note = Artificially Synthesized Probe
  source 1..80: mol_type = other DNA

SEQ ID NO: 105350 - DNA, 80 bp, synthetic construct
  misc_feature 1..80: note = Artificially Synthesized Probe
  source 1..80: mol_type = other DNA
cagctacttgggaggctacggcaggagaatcgcttgaacccaggaggtggaggttgcagggggccaagatcacgccactg

SEQ ID NO: 105351 - DNA, 80 bp, synthetic construct
  misc_feature 1..80: note = Artificially Synthesized Probe
  source 1..80: mol_type = other DNA
ggatgaattgatgttggtattttgatagggattgcaaggaagttacgtcacttattctaactgatgaaacttaagaatgg

SEQ ID NO: 105352 - DNA, 80 bp, synthetic construct
  misc_feature 1..80: note = Artificially Synthesized Probe
  source 1..80: mol_type = other DNA
tgatgggtgcactaaaagctcagatttcaccactatacaattcatccatgtaaccaaaaaccacttgtacccctaaggct

SEQ ID NO: 105353 - DNA, 80 bp, synthetic construct; identical to SEQ ID NO: 36540
  misc_feature 1..80: note = Artificially Synthesized Probe
  source 1..80: mol_type = other DNA

SEQ ID NO: 105354 - DNA, 80 bp, synthetic construct
  misc_feature 1..80: note = Artificially Synthesized Probe
  source 1..80: mol_type = other DNA
tttttttttttttctgagatgggggcttgctctgtcgcccaggctggagtgcagtggtatgatctcagctcactgcagcc

SEQ ID NO: 105355 - DNA, 80 bp, synthetic construct
  misc_feature 1..80: note = Artificially Synthesized Probe
  source 1..80: mol_type = other DNA
cagcctcccgagtagctgggactacaggcgcacaccaccacgcctagttaatttttgtgtttttagtagagaccgggttt

SEQ ID NO: 105356 - DNA, 80 bp, synthetic construct
  misc_feature 1..80: note = Artificially Synthesized Probe
  source 1..80: mol_type = other DNA
ccatggatggatggatggatggatggatgatggatgatggacaatggatggctggatagatggatggtgggtggatggat

SEQ ID NO: 105357 - DNA, 80 bp, synthetic construct
  misc_feature 1..80: note = Artificially Synthesized Probe
  source 1..80: mol_type = other DNA
tgataggtgaatggataatggatgaatagatggcgagacagatgaatggataaacataatatgtgcgaaaattagtcata

SEQ ID NO: 105358 - DNA, 80 bp, synthetic construct
  misc_feature 1..80: note = Artificially Synthesized Probe
  source 1..80: mol_type = other DNA
atacagggctggctgaaggccggctgtccaaggacagaagagtggtcagctacagggcgacggggacaaataccccagcc

SEQ ID NO: 105359 - DNA, 80 bp, synthetic construct; identical to SEQ ID NO: 36541
  misc_feature 1..80: note = Artificially Synthesized Probe
  source 1..80: mol_type = other DNA

SEQ ID NO: 105360 - DNA, 80 bp, synthetic construct
  misc_feature 1..80: note = Artificially Synthesized Probe
  source 1..80: mol_type = other DNA
ggtggcacatacctgtgattccagctactcaggaggctgaggtgcgaggatcgcttgagcccaaaaggcagaggttgaag

SEQ ID NO: 105361 - DNA, 80 bp, synthetic construct
  misc_feature 1..80: note = Artificially Synthesized Probe
  source 1..80: mol_type = other DNA
gaatctagcccctatcactctccgacatcatcccctacttctgtcactctgggggactctgctccagcctcaccgaactc

SEQ ID NO: 105362 - DNA, 80 bp, synthetic construct; identical to SEQ ID NO: 36542
  misc_feature 1..80: note = Artificially Synthesized Probe
  source 1..80: mol_type = other DNA

SEQ ID NO: 105363 - DNA, 80 bp, synthetic construct
  misc_feature 1..80: note = Artificially Synthesized Probe
  source 1..80: mol_type = other DNA
caggagttcaagaccaacctaggcagcatagcaagacaccatctctacaaaaaatacaggccgggcgtggtgctcgtgcc

SEQ ID NO: 105364 - DNA, 80 bp, synthetic construct
  misc_feature 1..80: note = Artificially Synthesized Probe
  source 1..80: mol_type = other DNA
gggaggctgaggcaggagaatcacttgaactcgggagacggaggttgcagtgagccgagatcatgccattgcactccagc

SEQ ID NO: 105365 - DNA, 80 bp, synthetic construct
  misc_feature 1..80: note = Artificially Synthesized Probe
  source 1..80: mol_type = other DNA
tgaggctgcagtgagttgtgatcatgccactgcacccagcctgggtgacagatcgagatggtcaccacagaagaaaccca

SEQ ID NO: 105366 - DNA, 80 bp, synthetic construct; identical to SEQ ID NO: 36543
  misc_feature 1..80: note = Artificially Synthesized Probe
  source 1..80: mol_type = other DNA

SEQ ID NO: 105367 - DNA, 80 bp, synthetic construct
  misc_feature 1..80: note = Artificially Synthesized Probe
  source 1..80: mol_type = other DNA
atgcctggcctgatattacacgacttcatttggggattcctttatttaaaaataataatagtaattatttattttttgag

SEQ ID NO: 105368 - DNA, 80 bp, synthetic construct
  misc_feature 1..80: note = Artificially Synthesized Probe
  source 1..80: mol_type = other DNA
ggcacctgccaccacgaccggctaatttcatatttctagtagagacggggtttcaccatgttggcgagactgatctcgaa

SEQ ID NO: 105369 - DNA, 80 bp, synthetic construct
  misc_feature 1..80: note = Artificially Synthesized Probe
  source 1..80: mol_type = other DNA
ctggacctcctgagctcaagtgatcctcccacctcagcctcccgagtagctggaactacaggcatgcgctactatgccag

SEQ ID NO: 105370 - DNA, 80 bp, synthetic construct
  misc_feature 1..80: note = Artificially Synthesized Probe
  source 1..80: mol_type = other DNA
taattcacctgctttatctctcaacacaatagttacaaagcacttggcgcacacactacttccctgtctcctccttttta

SEQ ID NO: 105371 - DNA, 80 bp, synthetic construct
  misc_feature 1..80: note = Artificially Synthesized Probe
  source 1..80: mol_type = other DNA
gggcagatcccttgaggtcaggagttcaagaccagcctggccaacatgatgaaaccccgtctctactaaaaatacaaaaa

SEQ ID NO: 105372 - DNA, 80 bp, synthetic construct; identical to SEQ ID NO: 36544
  misc_feature 1..80: note = Artificially Synthesized Probe
  source 1..80: mol_type = other DNA

SEQ ID NO: 105373 - DNA, 80 bp, synthetic construct
  misc_feature 1..80: note = Artificially Synthesized Probe
  source 1..80: mol_type = other DNA
cagggtctcctgacccaacaacgcctctgcttgtcctcttacttttctccttgagcaacaaagattccgccaacagcaag

SEQ ID NO: 105374 - DNA, 80 bp, synthetic construct
  misc_feature 1..80: note = Artificially Synthesized Probe
  source 1..80: mol_type = other DNA
tatatttaagtcaggcccataaatggaaaatgggccaaacctgtaattaaataaacaactatgttcagaatatctccaaa

SEQ ID NO: 105375 - DNA, 80 bp, synthetic construct; identical to SEQ ID NO: 36545
  misc_feature 1..80: note = Artificially Synthesized Probe
  source 1..80: mol_type = other DNA

SEQ ID NO: 105376 - DNA, 80 bp, synthetic construct
  misc_feature 1..80: note = Artificially Synthesized Probe
  source 1..80: mol_type = other DNA
agtttccccaactctaaatgagagggttggatgagatgatagatacctggggcatgttcaggcctaaaaattgattatat

SEQ ID NO: 105377 - DNA, 80 bp, synthetic construct
  misc_feature 1..80: note = Artificially Synthesized Probe
  source 1..80: mol_type = other DNA
aggagttcaagacgagcctagccaacatggtgaaacactgtctctactaaaaatacaaaaaaattagctgggcatggtgg

SEQ ID NO: 105378 - DNA, 80 bp, synthetic construct; identical to SEQ ID NO: 36536
  misc_feature 1..80: note = Artificially Synthesized Probe
  source 1..80: mol_type = other DNA

SEQ ID NO: 105379 - DNA, 80 bp, synthetic construct
  misc_feature 1..80: note = Artificially Synthesized Probe
  source 1..80: mol_type = other DNA
ggcaagttagcactttattcccgcagcagttcctgaatggggtggcctggccccttctctgcttaaagaatgccctttat

SEQ ID NO: 105380 - DNA, 80 bp, synthetic construct
  misc_feature 1..80: note = Artificially Synthesized Probe
  source 1..80: mol_type = other DNA
attattgagaatccagtacatggccaaatgtgcatatcagatagtcctcacagttactcttatctaagtggccagcactt

SEQ ID NO: 105381 - DNA, 80 bp, synthetic construct
  misc_feature 1..80: note = Artificially Synthesized Probe
  source 1..80: mol_type = other DNA
tgcctcagcctcccacgtagctgggactacaggcacgtgccaccacgcccagctaatttttgtatttttagtagagatgg

SEQ ID NO: 105382 - DNA, 80 bp, synthetic construct; identical to SEQ ID NO: 36570
  misc_feature 1..80: note = Artificially Synthesized Probe
  source 1..80: mol_type = other DNA

SEQ ID NO: 105383 - DNA, 80 bp, synthetic construct
  misc_feature 1..80: note = Artificially Synthesized Probe
  source 1..80: mol_type = other DNA
cgcgtgcattctggagacagaggcctggcaggagacattggacactttcatccgtccagcgggatcccgggagagctcca

SEQ ID NO: 105384 - DNA, 80 bp, synthetic construct
  misc_feature 1..80: note = Artificially Synthesized Probe
  source 1..80: mol_type = other DNA
tttccacacatcctaccaaaccttcctatcaactcgtatgaaatgcatatgcctgtttctgttacacagatgaagaaacg

SEQ ID NO: 105385 - DNA, 80 bp, synthetic construct
  misc_feature 1..80: note = Artificially Synthesized Probe
  source 1..80: mol_type = other DNA
atttgaagcatcagctcctgctgtggctggaaatcgagctcggaagatgtcagttgcagctctgtgaccttcaccctaca

SEQ ID NO: 105386 - DNA, 80 bp, synthetic construct; identical to SEQ ID NO: 36571
  misc_feature 1..80: note = Artificially Synthesized Probe
  source 1..80: mol_type = other DNA

SEQ ID NO: 105387 - DNA, 80 bp, synthetic construct; identical to SEQ ID NO: 36560
  misc_feature 1..80: note = Artificially Synthesized Probe
  source 1..80: mol_type = other DNA

SEQ ID NO: 105388 - DNA, 80 bp, synthetic construct
  misc_feature 1..80: note = Artificially Synthesized Probe
  source 1..80: mol_type = other DNA
ctctaccaaaaatacaaaacttagcagaccgtggtggcacgcgcctgtagtcctagctactcgggaggctgaggcaggaa

SEQ ID NO: 105389 - DNA, 80 bp, synthetic construct
  misc_feature 1..80: note = Artificially Synthesized Probe
  source 1..80: mol_type = other DNA
tgctacacccggtcttttaatagagtccgttcactttgcctccatcacctaagctccgtctcacatctcaattccttatt

SEQ ID NO: 105390 - DNA, 80 bp, synthetic construct
  misc_feature 1..80: note = Artificially Synthesized Probe
  source 1..80: mol_type = other DNA
tccttcttggccccctctacattttcaaggccacgcccatctgcctggtcccgcctatgatgactggcttggcctttatc

SEQ ID NO: 105391 - DNA, 80 bp, synthetic construct; identical to SEQ ID NO: 36572
  misc_feature 1..80: note = Artificially Synthesized Probe
  source 1..80: mol_type = other DNA

SEQ ID NO: 105392 - DNA, 80 bp, synthetic construct
  misc_feature 1..80: note = Artificially Synthesized Probe
  source 1..80: mol_type = other DNA
acgcggatcttgcagcctgggaactctgcatgtgcgcctgccagcagcgctaggaagagggccccgaagagggccatggc

SEQ ID NO: 105393 - DNA, 80 bp, synthetic construct
  misc_feature 1..80: note = Artificially Synthesized Probe
  source 1..80: mol_type = other DNA
tatggcagatgtggaaactgaggctcagagaggcgatgcgacttgcgttctggctcccagaggatttgggacacggggga

SEQ ID NO: 105394 - DNA, 80 bp, synthetic construct; identical to SEQ ID NO: 36573
  misc_feature 1..80: note = Artificially Synthesized Probe
  source 1..80: mol_type = other DNA

SEQ ID NO: 105395 - DNA, 80 bp, synthetic construct
  misc_feature 1..80: note = Artificially Synthesized Probe
  source 1..80: mol_type = other DNA
cgccccaactcactcagcggtggagctggggggcggcgcggtcacgtgggatggcgggcagctcaggggatccgggcgac

SEQ ID NO: 105396 - DNA, 80 bp, synthetic construct
  misc_feature 1..80: note = Artificially Synthesized Probe
  source 1..80: mol_type = other DNA
ctcggggcagtcattgctgccacttgggtctccttttctccaagactgctactttttatttattgagcacctcttttttt

SEQ ID NO: 105397 - DNA, 80 bp, synthetic construct
  misc_feature 1..80: note = Artificially Synthesized Probe
  source 1..80: mol_type = other DNA
agctaattttttgtgtttttagtagagacggggtttcaccgtgttagccaggatggtctcggatttcctgaccttgtgat

SEQ ID NO: 105398 - DNA, 80 bp, synthetic construct
  misc_feature 1..80: note = Artificially Synthesized Probe
  source 1..80: mol_type = other DNA
ctaagcatatttattttctttttttatttttatttatttttgagacagcgtctcactgtgttgcccaggctggagggcag

SEQ ID NO: 105399 - DNA, 80 bp, synthetic construct
  misc_feature 1..80: note = Artificially Synthesized Probe
  source 1..80: mol_type = other DNA
atcgaactcctggcctcaagcgatctacccgccttggtctcccaaagtgttgagattacaggtgtgagccactgcaccca

SEQ ID NO: 105400 - DNA, 80 bp, synthetic construct; identical to SEQ ID NO: 36561
  misc_feature 1..80: note = Artificially Synthesized Probe
  source 1..80: mol_type = other DNA

SEQ ID NO: 105401 - DNA, 80 bp, synthetic construct
  misc_feature 1..80: note = Artificially Synthesized Probe
  source 1..80: mol_type = other DNA
ctatgaatgtgggaaaagaggggctgagaggggttggggtcctgaatgacagctgccagcttggggattgagggctcaga

SEQ ID NO: 105402 - DNA, 80 bp, synthetic construct
  misc_feature 1..80: note = Artificially Synthesized Probe
  source 1..80: mol_type = other DNA
gctagtatctaccatattggatagcacagccctagaaggcagatgctacttttgcctgtattaaacacatggagaaaatg

SEQ ID NO: 105403 - DNA, 80 bp, synthetic construct
  misc_feature 1..80: note = Artificially Synthesized Probe
  source 1..80: mol_type = other DNA
tggtagtgcatgcatgcagtcccagttactcgggaggctgaggctggacgatcacttgagcccaggaggtcaaggctgca

SEQ ID NO: 105404 - DNA, 80 bp, synthetic construct
  misc_feature 1..80: note = Artificially Synthesized Probe
  source 1..80: mol_type = other DNA
gtttgagaccagcctgaccaatatggtgaaaccctgtctctactaaaaatgcaaaaattagccgggcgtggtggcgcaca

SEQ ID NO: 105405 - DNA, 80 bp, synthetic construct; identical to SEQ ID NO: 36562
  misc_feature 1..80: note = Artificially Synthesized Probe
  source 1..80: mol_type = other DNA

SEQ ID NO: 105406 - DNA, 80 bp, synthetic construct
  misc_feature 1..80: note = Artificially Synthesized Probe
  source 1..80: mol_type = other DNA
tcagtggcttacaggtatcactgtactttaagcgcaacatccctgtggacaggtgtgattgtcctccaatcactgaggtg

SEQ ID NO: 105407 - DNA, 80 bp, synthetic construct
  misc_feature 1..80: note = Artificially Synthesized Probe
  source 1..80: mol_type = other DNA
tttccctgacccccagccagcagcccccactctgggacccgtaccatagtcatgctggacagctggacctcaggctggtc

SEQ ID NO: 105408 - DNA, 80 bp, synthetic construct
  misc_feature 1..80: note = Artificially Synthesized Probe
  source 1..80: mol_type = other DNA
cgggtcaagtccctgccatttcctttggagcccccagggaagaaggggaaggaaggcaggtgcagcttctgtcctctggg

SEQ ID NO: 105409 - DNA, 80 bp, synthetic construct; identical to SEQ ID NO: 36563
  misc_feature 1..80: note = Artificially Synthesized Probe
  source 1..80: mol_type = other DNA

SEQ ID NO: 105410 - DNA, 80 bp, synthetic construct
  misc_feature 1..80: note = Artificially Synthesized Probe
  source 1..80: mol_type = other DNA
agaaacggggtttcgccatattggccaggctagtgattcgcccacctcggcctcccaaagtgctgggattacaggcatga

SEQ ID NO: 105411 - DNA, 80 bp, synthetic construct
  misc_feature 1..80: note = Artificially Synthesized Probe
  source 1..80: mol_type = other DNA
aacagctgagaccacaggttcatgccatcacgcctggcttatttttgtatttgttttttgttttggtttttgcttttgtg

SEQ ID NO: 105412 - DNA, 80 bp, synthetic construct; identical to SEQ ID NO: 36559
  misc_feature 1..80: note = Artificially Synthesized Probe
  source 1..80: mol_type = other DNA

SEQ ID NO: 105413 - DNA, 80 bp, synthetic construct
  misc_feature 1..80: note = Artificially Synthesized Probe
  source 1..80: mol_type = other DNA
taggcagtgaaggaatactataagatgcaactgcctaatcttcaccaaacatgattctaaacactgtatatgtgttggtt

SEQ ID NO: 105414 - DNA, 80 bp, synthetic construct; identical to SEQ ID NO: 36564
  misc_feature 1..80: note = Artificially Synthesized Probe
  source 1..80: mol_type = other DNA

SEQ ID NO: 105415 - DNA, 80 bp, synthetic construct
  misc_feature 1..80: note = Artificially Synthesized Probe
  source 1..80: mol_type = other DNA
ataggttaagtaacttgtagaggttatgtagttactcagtttcagaactaggcttgaagcccaggcagtctgacaataga

SEQ ID NO: 105416 - DNA, 80 bp, synthetic construct
  misc_feature 1..80: note = Artificially Synthesized Probe
  source 1..80: mol_type = other DNA
acagcctgagcaacataatgaaactctgtctcaacaaaatataaaaattagcggggtgtggtggcacaagcctgtaattc

SEQ ID NO: 105417 - DNA, 80 bp, synthetic construct; identical to SEQ ID NO: 36565
  misc_feature 1..80: note = Artificially Synthesized Probe
  source 1..80: mol_type = other DNA

SEQ ID NO: 105418 - DNA, 80 bp, synthetic construct
  misc_feature 1..80: note = Artificially Synthesized Probe
  source 1..80: mol_type = other DNA
ctgcacccctccttggtctcactggtgtgcaggtggccctatccctgcccccgccagcactcaccagcaggacaatgctc

SEQ ID NO: 105419 - DNA, 80 bp, synthetic construct
  misc_feature 1..80: note = Artificially Synthesized Probe
  source 1..80: mol_type = other DNA
cagggcccccgcccggaagtagctctccatggcagagtcgaagaagaactcagagaaggccacatacaccatccgctctt

SEQ ID NO: 105420 - DNA, 80 bp, synthetic construct
  misc_feature 1..80: note = Artificially Synthesized Probe
  source 1..80: mol_type = other DNA
cgtgctaggcactgtggggggatggtgggaacccagctgctgttcttggaggattcacaagcacatctcttaaaaggcat

SEQ ID NO: 105421 - DNA, 80 bp, synthetic construct; identical to SEQ ID NO: 36566
  misc_feature 1..80: note = Artificially Synthesized Probe
  source 1..80: mol_type = other DNA

SEQ ID NO: 105422 - DNA, 80 bp, synthetic construct
  misc_feature 1..80: note = Artificially Synthesized Probe
  source 1..80: mol_type = other DNA
gtctcaaactcctgggctcaagcgatcctctcgcctgggcctcccaaagtattgggattacaggcatgagccactgcacc

SEQ ID NO: 105423 - DNA, 80 bp, synthetic construct
  misc_feature 1..80: note = Artificially Synthesized Probe
  source 1..80: mol_type = other DNA
gagtctaagattaaaatgggaggggcgactggtaatgggggagctggggtcaggtaatggagggcactggggagctatag

SEQ ID NO: 105424 - DNA, 80 bp, synthetic construct
  misc_feature 1..80: note = Artificially Synthesized Probe
  source 1..80: mol_type = other DNA
tagtacctgactcacagggttgtgagagaatgaaatgagattatttgtatagaaatttatgtccagctccttcgggggag

SEQ ID NO: 105425 - DNA, 80 bp, synthetic construct
  misc_feature 1..80: note = Artificially Synthesized Probe
  source 1..80: mol_type = other DNA
acctaattctgtagtaacagggagccatagcattctcagtaatgggagtggcctcatcagagctgtgctttaagaagtaa

SEQ ID NO: 105426 - DNA, 80 bp, synthetic construct
  misc_feature 1..80: note = Artificially Synthesized Probe
  source 1..80: mol_type = other DNA
gagggaatagtcaatgccaacaagctcgtccacagaactgcgcactgcaggaaggggctcaagtcactcacggctgtgtg

SEQ ID NO: 105427 - DNA, 80 bp, synthetic construct; identical to SEQ ID NO: 36567
  misc_feature 1..80: note = Artificially Synthesized Probe
  source 1..80: mol_type = other DNA

SEQ ID NO: 105428 - DNA, 80 bp, synthetic construct
  misc_feature 1..80: note = Artificially Synthesized Probe
  source 1..80: mol_type = other DNA
agctactcaggaggctgaggcaggagaatcgcttgatcctgggaggtggaggttgcagggagccaggattgcaccactgc

SEQ ID NO: 105429 - DNA, 80 bp, synthetic construct
  misc_feature 1..80: note = Artificially Synthesized Probe
  source 1..80: mol_type = other DNA
cacagtagacagaggtcatggcttagaaaaagggaattcatggccaggcacagtggctcatgcctataatcccagcactt

SEQ ID NO: 105430 - DNA, 80 bp, synthetic construct
  misc_feature 1..80: note = Artificially Synthesized Probe
  source 1..80: mol_type = other DNA
agaattgcttgaacccgggaggtggagattgcagtgagctgagatcgcgccactggactccagcctggcaacagagtgag

SEQ ID NO: 105431 - DNA, 80 bp, synthetic construct; identical to SEQ ID NO: 36568
  misc_feature 1..80: note = Artificially Synthesized Probe
  source 1..80: mol_type = other DNA

SEQ ID NO: 105432 - DNA, 80 bp, synthetic construct
  misc_feature 1..80: note = Artificially Synthesized Probe
  source 1..80: mol_type = other DNA
cacggtgtccaggagggagttgagcaggaccgtccctgcgtggtagaggacagggcagatctgcgaggtgggagccagag

SEQ ID NO: 105433 - DNA, 80 bp, synthetic construct
  misc_feature 1..80: note = Artificially Synthesized Probe
  source 1..80: mol_type = other DNA
gatgagcccagaacctgcctccaccccagtccaggtccaggagaaatcagtgactagggaaatagtggcagtaggagtcc

SEQ ID NO: 105434 - DNA, 80 bp, synthetic construct
  misc_feature 1..80: note = Artificially Synthesized Probe
  source 1..80: mol_type = other DNA
tgggcccgcccagttcacccctcctttcttcctccatcctcacaccccagccttaccattgagcatgggcatcaccccaa

SEQ ID NO: 105435 - DNA, 80 bp, synthetic construct
  misc_feature 1..80: note = Artificially Synthesized Probe
  source 1..80: mol_type = other DNA
gagcatccccacatccatcggcttactgatgccctcccttccgccctctgcattcctactctgtattttcccatctgagc

SEQ ID NO: 105436 - DNA, 80 bp, synthetic construct; identical to SEQ ID NO: 36569
  misc_feature 1..80: note = Artificially Synthesized Probe
  source 1..80: mol_type = other DNA

SEQ ID NO: 105437 - DNA, 80 bp, synthetic construct
  misc_feature 1..80: note = Artificially Synthesized Probe
  source 1..80: mol_type = other DNA
atggcgaaaccctgtctctactaaaaatacaaaaaaagtagttgggcatggtggtgcatgcctgtagtcccagctacttg

SEQ ID NO: 105438 - DNA, 80 bp, synthetic construct; identical to SEQ ID NO: 36574
  misc_feature 1..80: note = Artificially Synthesized Probe
  source 1..80: mol_type = other DNA

SEQ ID NO: 105439 - DNA, 80 bp, synthetic construct
  misc_feature 1..80: note = Artificially Synthesized Probe
  source 1..80: mol_type = other DNA
tgaagacaagactttggttttacatgatactatcacacctgacctttgtgaagtagtcagggtaaaacattccagtttgg

SEQ ID NO: 105440 - DNA, 80 bp, synthetic construct
  misc_feature 1..80: note = Artificially Synthesized Probe
  source 1..80: mol_type = other DNA
aatctcctgggctcaaacgatcctcccacctcagcctcccgaatagctgggaccacaggcacacaccatcaagtctgact

SEQ ID NO: 105441 - DNA, 80 bp, synthetic construct; identical to SEQ ID NO: 36585
  misc_feature 1..80: note = Artificially Synthesized Probe
  source 1..80: mol_type = other DNA

SEQ ID NO: 105442 - DNA, 80 bp, synthetic construct
  misc_feature 1..80: note = Artificially Synthesized Probe
  source 1..80: mol_type = other DNA
tggaatggtgatggtaacagtaacaaccccataggtttttgaggattaaaggaactaatacacatacattatttcaacag

SEQ ID NO: 105443 - DNA, 80 bp, synthetic construct
  misc_feature 1..80: note = Artificially Synthesized Probe
  source 1..80: mol_type = other DNA
ctgtcacccaggctggagtgcagtggtgcgatctcggctcactgcaacctctgtctcccaggttcaagcgattctcctac

SEQ ID NO: 105444 - DNA, 80 bp, synthetic construct
  misc_feature 1..80: note = Artificially Synthesized Probe
  source 1..80: mol_type = other DNA
ccgcctcccgggttcaagcgattctcctgcctcagcctcccaagtagctgggactacaggcgcccgccaccacgcctggc

SEQ ID NO: 105445 - DNA, 80 bp, synthetic construct
  misc_feature 1..80: note = Artificially Synthesized Probe
  source 1..80: mol_type = other DNA
tttcaccacgttggccaggctggtctccaactcctgacctcaggtgatctgcctgcctcggcctcccaaagtgctgggat

SEQ ID NO: 105446 - DNA, 80 bp, synthetic construct; identical to SEQ ID NO: 36586
  misc_feature 1..80: note = Artificially Synthesized Probe
  source 1..80: mol_type = other DNA

SEQ ID NO: 105447 - DNA, 80 bp, synthetic construct; identical to SEQ ID NO: 36575
  misc_feature 1..80: note = Artificially Synthesized Probe
  source 1..80: mol_type = other DNA

SEQ ID NO: 105448 - DNA, 80 bp, synthetic construct
  misc_feature 1..80: note = Artificially Synthesized Probe
  source 1..80: mol_type = other DNA
catttctgcaaacatcgttttactgcaggtagaaaatgttaattatcagacattttacaagattatttttctgattatgt

SEQ ID NO: 105449 - DNA, 80 bp, synthetic construct
  misc_feature 1..80: note = Artificially Synthesized Probe
  source 1..80: mol_type = other DNA
tcgagtgattcttctgcctcagcctcctgagtagctgggattacaggtgcgccaccatgcccagctaatttttgtatttt

SEQ ID NO: 105450 - DNA, 80 bp, synthetic construct; identical to SEQ ID NO: 36587
  misc_feature 1..80: note = Artificially Synthesized Probe
  source 1..80: mol_type = other DNA

SEQ ID NO: 105451 - DNA, 80 bp, synthetic construct
  misc_feature 1..80: note = Artificially Synthesized Probe
  source 1..80: mol_type = other DNA
tgcccaggctggactgcagtggcgtgaccgtggctcactgcaacctgcgcctcccaggttcgagcgattctcctgcctca

SEQ ID NO: 105452 - DNA, 80 bp, synthetic construct
  misc_feature 1..80: note = Artificially Synthesized Probe
  source 1..80: mol_type = other DNA
gcgtgagccaccgcacctggcctacttcattctttttaatggccacataggaattcattgcatggatgtaccataatttg

SEQ ID NO: 105453 - DNA, 80 bp, synthetic construct; identical to SEQ ID NO: 36588
  misc_feature 1..80: note = Artificially Synthesized Probe
  source 1..80: mol_type = other DNA

SEQ ID NO: 105454 - DNA, 80 bp, synthetic construct
  misc_feature 1..80: note = Artificially Synthesized Probe
  source 1..80: mol_type = other DNA
aatggattttccgcagtatcagcgcggtgatgacaagaaatggctctgttaaagcagccatggacgttttctggttctca

SEQ ID NO: 105455 - DNA, 80 bp, synthetic construct
  misc_feature 1..80: note = Artificially Synthesized Probe
  source 1..80: mol_type = other DNA
tggtggacacctgtactcccagctacttgggaaacgaaggcagaagaatcgtttgaacccgggaggcagagcttgcagtg

SEQ ID NO: 105456 - DNA, 80 bp, synthetic construct
  misc_feature 1..80: note = Artificially Synthesized Probe
  source 1..80: mol_type = other DNA
ggacagtttggtgaactgtgagacctccacatggcatggattactgagcccacatttcctatggtgaggggctccacaca

SEQ ID NO: 105457 - DNA, 80 bp, synthetic construct
  misc_feature 1..80: note = Artificially Synthesized Probe
  source 1..80: mol_type = other DNA
ctctgtcacccaggctggagtgcaatggcatgatcatagctcactgcagcctcaaactcctgggctcaagtgagcctcct

SEQ ID NO: 105458 - DNA, 80 bp, synthetic construct
  misc_feature 1..80: note = Artificially Synthesized Probe
  source 1..80: mol_type = other DNA
attttcagccaagttcaaacaggacaaggttccatgaaaactatttgaaaagacagacagggattcttatattcccagaa

SEQ ID NO: 105459 - DNA, 80 bp, synthetic construct; identical to SEQ ID NO: 36589
  misc_feature 1..80: note = Artificially Synthesized Probe
  source 1..80: mol_type = other DNA

SEQ ID NO: 105460 - DNA, 80 bp, synthetic construct; identical to SEQ ID NO: 40014
  misc_feature 1..80: note = Artificially Synthesized Probe
  source 1..80: mol_type = other DNA

SEQ ID NO: 105461 - DNA, 80 bp, synthetic construct
  misc_feature 1..80: note = Artificially Synthesized Probe
  source 1..80: mol_type = other DNA
gcagaaaaggaactcttgtaagaggctcctacccactcaggctgagtttcagacctccttggagcaggagtggccgcagc

SEQ ID NO: 105462 - DNA, 80 bp, synthetic construct; identical to SEQ ID NO: 36590
  misc_feature 1..80: note = Artificially Synthesized Probe
  source 1..80: mol_type = other DNA

SEQ ID NO: 105463 - DNA, 80 bp, synthetic construct
  misc_feature 1..80: note = Artificially Synthesized Probe
  source 1..80: mol_type = other DNA
ttggcctcccaaagtactgggattacaggtgtgagccaccacacctagcctcaaaatactcttaagaaaaaactttacct

SEQ ID NO: 105464 - DNA, 80 bp, synthetic construct
  misc_feature 1..80: note = Artificially Synthesized Probe
  source 1..80: mol_type = other DNA
cctgaggaaaccaaatcacagcatcaaattatgggaaatcaaactctttttgttcccctgcgaggacagcattttgcgac

SEQ ID NO: 105465 - DNA, 80 bp, synthetic construct
  misc_feature 1..80: note = Artificially Synthesized Probe
  source 1..80: mol_type = other DNA
taatcccagctactcaggaggctgaggcaggagaaacgcttgaacccgggaggtggaggctgcagtgagccaagatcatg

SEQ ID NO: 105466 - DNA, 80 bp, synthetic construct
  misc_feature 1..80: note = Artificially Synthesized Probe
  source 1..80: mol_type = other DNA
atctttgccctaaacttcctgtaattctgttccccttcactttgctgtgcttcatgatgtaactgctttattcgtttagc

SEQ ID NO: 105467 - DNA, 80 bp, synthetic construct; identical to SEQ ID NO: 36591
  misc_feature 1..80: note = Artificially Synthesized Probe
  source 1..80: mol_type = other DNA

SEQ ID NO: 105468 - DNA, 80 bp, synthetic construct
  misc_feature 1..80: note = Artificially Synthesized Probe
  source 1..80: mol_type = other DNA
ttctccacctccgctctgtccgtagggtcactgggtccgtgactggaactcactgcctctttctgaggtctcaggacgcc

SEQ ID NO: 105469 - DNA, 80 bp, synthetic construct
  misc_feature 1..80: note = Artificially Synthesized Probe
  source 1..80: mol_type = other DNA
ttttcttctccagtccttaatgaaggggattgatcctgcttttctaccatgggcttttccaaatccgctgcatgcatttt

SEQ ID NO: 105470 - DNA, 80 bp, synthetic construct
  misc_feature 1..80: note = Artificially Synthesized Probe
  source 1..80: mol_type = other DNA
tattaagttacctaagcaaacgtggacggagaagagggtcagggactatcctgaaatggtgagaggacgtgcttatgtga

SEQ ID NO: 105471 - DNA, 80 bp, synthetic construct
  misc_feature 1..80: note = Artificially Synthesized Probe
  source 1..80: mol_type = other DNA
ttcaggactggtctggacaacatggtaaaaccctgtttctactaaaaatacaaaaattagccgggtgtggtggcatatct

SEQ ID NO: 105472 - DNA, 80 bp, synthetic construct; identical to SEQ ID NO: 36592
  misc_feature 1..80: note = Artificially Synthesized Probe
  source 1..80: mol_type = other DNA

SEQ ID NO: 105473 - DNA, 80 bp, synthetic construct
  misc_feature 1..80: note = Artificially Synthesized Probe
  source 1..80: mol_type = other DNA
gccctttgaggtcaggagttcaagaccagcctgaccaacatggtgaaacctcatctctactaaaaatacaaaaaaaaaat

SEQ ID NO: 105474 - DNA, 80 bp, synthetic construct
  misc_feature 1..80: note = Artificially Synthesized Probe
  source 1..80: mol_type = other DNA
agaaagaagtgcctatctatgctcgtcaaaaagacgtggatgaggatgttcatgacagcattcttcattatagccccaaa

SEQ ID NO: 105475 - DNA, 80 bp, synthetic construct; identical to SEQ ID NO: 36593
  misc_feature 1..80: note = Artificially Synthesized Probe
  source 1..80: mol_type = other DNA

SEQ ID NO: 105476 - DNA, 80 bp, synthetic construct
  misc_feature 1..80: note = Artificially Synthesized Probe
  source 1..80: mol_type = other DNA
caaagatgaatttaattatcattaagggttgaaagttatagactaaactatgtccagccagagcagaggcctgagtaact

SEQ ID NO: 105477 - DNA, 80 bp, synthetic construct
  misc_feature 1..80: note = Artificially Synthesized Probe
  source 1..80: mol_type = other DNA
cacgcccggctaattttttgtatttttagtagagacagagtttcaccgtgttagatagtctcgatctcctgacctcgtga

SEQ ID NO: 105478 - DNA, 80 bp, synthetic construct
  misc_feature 1..80: note = Artificially Synthesized Probe
  source 1..80: mol_type = other DNA
gagaaaccccatctctaatgacaatacaaacattagccaggtgtggtggtgggcgcctgtaatcccagctactcaggagg

SEQ ID NO: 105479 - DNA, 80 bp, synthetic construct
  misc_feature 1..80: note = Artificially Synthesized Probe
  source 1..80: mol_type = other DNA
tcatatatcttatatgacttcatccgtttacagtttacaaaaaactagaggtacttggaggcagctacttgggaggctga

SEQ ID NO: 105480 - DNA, 80 bp, synthetic construct
  misc_feature 1..80: note = Artificially Synthesized Probe
  source 1..80: mol_type = other DNA
acttggaaaaaataaggaaacacattagctaaaagctttagaagctgtttgtacactgtatttttcttaccttcaacatc

SEQ ID NO: 105481 - DNA, 80 bp, synthetic construct; identical to SEQ ID NO: 36594
  misc_feature 1..80: note = Artificially Synthesized Probe
  source 1..80: mol_type = other DNA

SEQ ID NO: 105482 - DNA, 80 bp, synthetic construct
  misc_feature 1..80: note = Artificially Synthesized Probe
  source 1..80: mol_type = other DNA
tccgaagtagctaggattacaggcaagtgccaccacactggctaatttttgtatttttagtagagatggggtttcaccgt

SEQ ID NO: 105483 - DNA, 80 bp, synthetic construct
  misc_feature 1..80: note = Artificially Synthesized Probe
  source 1..80: mol_type = other DNA
agtgctattaaaaacattacagtgtccaggttaagattcataagttatgaaatcagctttttcaaataaatgagcaaaag

SEQ ID NO: 105484 - DNA, 80 bp, synthetic construct; identical to SEQ ID NO: 36595
  misc_feature 1..80: note = Artificially Synthesized Probe
  source 1..80: mol_type = other DNA

SEQ ID NO: 105485 - DNA, 80 bp, synthetic construct
  misc_feature 1..80: note = Artificially Synthesized Probe
  source 1..80: mol_type = other DNA
tcaagaccagcctggccaacatggcgaaaccccgtctctactaaaaacacaaaaaattagtcaggcatggtggcaggtgc

SEQ ID NO: 105486 - DNA, 80 bp, synthetic construct
  misc_feature 1..80: note = Artificially Synthesized Probe
  source 1..80: mol_type = other DNA
gtctcaaaaaatatctaataataaagatgcagataatgatttaattataaggaaagtatttataatttccaaaaactaaa

SEQ ID NO: 105487 - DNA, 80 bp, synthetic construct
  misc_feature 1..80: note = Artificially Synthesized Probe
  source 1..80: mol_type = other DNA
attcacatctaaggataaagagcagtatacaaaattattttctcatcccaaagaatatgggagtaggggagagagagaga

SEQ ID NO: 105488 - DNA, 80 bp, synthetic construct
  misc_feature 1..80: note = Artificially Synthesized Probe
  source 1..80: mol_type = other DNA
ggtagcggggattacaggcatgcgccagcacacctggctaattttgtatttttagtagaggcagggtttctccatgttgg

SEQ ID NO: 105489 - DNA, 80 bp, synthetic construct; identical to SEQ ID NO: 36596
  misc_feature 1..80: note = Artificially Synthesized Probe
  source 1..80: mol_type = other DNA

SEQ ID NO: 105490 - DNA, 80 bp, synthetic construct
  misc_feature 1..80: note = Artificially Synthesized Probe
  source 1..80: mol_type = other DNA
taacacggtgaaaccctgtctctactaaaaatacaaaaaattagccaggtgtggtggcacgcacctgtagtcccagctac

SEQ ID NO: 105491 - DNA, 80 bp, synthetic construct
  misc_feature 1..80: note = Artificially Synthesized Probe
  source 1..80: mol_type = other DNA
ccagtcatagcagagctgtagaatttcattttattctttgaggcattagtcactagttgtactgaaatgccaatggaact

SEQ ID NO: 105492 - DNA, 80 bp, synthetic construct
  misc_feature 1..80: note = Artificially Synthesized Probe
  source 1..80: mol_type = other DNA
atgacaaatgttcccagccccccgcattctaacaacattctattctaaccaaccagcatgttcttagaaggggatacttt

SEQ ID NO: 105493 - DNA, 80 bp, synthetic construct
  misc_feature 1..80: note = Artificially Synthesized Probe
  source 1..80: mol_type = other DNA
ttttttttcaacggagtctcgctcttgttacccagactggagtgtaatggcacgatcttggctcactgcaacctctgcct

SEQ ID NO: 105494 - DNA, 80 bp, synthetic construct; identical to SEQ ID NO: 36597
  misc_feature 1..80: note = Artificially Synthesized Probe
  source 1..80: mol_type = other DNA

SEQ ID NO: 105495 - DNA, 80 bp, synthetic construct
  misc_feature 1..80: note = Artificially Synthesized Probe
  source 1..80: mol_type = other DNA
tcatagattcctaaaactgaatatttttccaacttaaagttgctctatgagaaattctagtgaaatgcaagtgcagctta

SEQ ID NO: 105496 - DNA, 80 bp, synthetic construct
  misc_feature 1..80: note = Artificially Synthesized Probe
  source 1..80: mol_type = other DNA
actataggttaaaaaatttagaagttcaaccacatctggcagattacaagcaaactctaaagcatcattgaaaaacaggg

SEQ ID NO: 105497 - DNA, 80 bp, synthetic construct
  misc_feature 1..80: note = Artificially Synthesized Probe
  source 1..80: mol_type = other DNA
aatcccagctacttgagaggctgaggcaggagaattgcttgaacctgggagggagagcttgcagtgagccaagatcacgt

SEQ ID NO: 105498 - DNA, 80 bp, synthetic construct; identical to SEQ ID NO: 36576
  misc_feature 1..80: note = Artificially Synthesized Probe
  source 1..80: mol_type = other DNA

SEQ ID NO: 105499 - DNA, 80 bp, synthetic construct; identical to SEQ ID NO: 36598
  misc_feature 1..80: note = Artificially Synthesized Probe
  source 1..80: mol_type = other DNA

SEQ ID NO: 105500 - DNA, 80 bp, synthetic construct
  misc_feature 1..80: note = Artificially Synthesized Probe
  source 1..80: mol_type = other DNA
gcgtgcctgtagtcctagctactagagaggctggggcaggagaatggcgtgaacctgggaggcggtgcttgcagtgagca

SEQ ID NO: 105501 - DNA, 80 bp, synthetic construct
  misc_feature 1..80: note = Artificially Synthesized Probe
  source 1..80: mol_type = other DNA
tagtttttacaataataaatatactggtaatatgtgtttatatatttatgtatctatacacacaacacatataatgtata

SEQ ID NO: 105502 - DNA, 80 bp, synthetic construct
  misc_feature 1..80: note = Artificially Synthesized Probe
  source 1..80: mol_type = other DNA
tctctactaaagacacaaaaacttagccgggcgtggtggcgcgcgcctgtaatcccagctacttgggaggctgaggcagg

SEQ ID NO: 105503 - DNA, 80 bp, synthetic construct; identical to SEQ ID NO: 36599
  misc_feature 1..80: note = Artificially Synthesized Probe
  source 1..80: mol_type = other DNA

SEQ ID NO: 105504 - DNA, 80 bp, synthetic construct
  misc_feature 1..80: note = Artificially Synthesized Probe
  source 1..80: mol_type = other DNA
ggcgtgaacctgggaggcggagcttgcagtgagccgagaccacgccactgcactccagcctgggtgacaaacaagactcc

SEQ ID NO: 105505 - DNA, 80 bp, synthetic construct
  misc_feature 1..80: note = Artificially Synthesized Probe
  source 1..80: mol_type = other DNA
tgtaatttattgaatactataccgaaaaacaatggttcaataggtacttgaagtatggtatctactgcaaaaaataactt

SEQ ID NO: 105506 - DNA, 80 bp, synthetic construct
  misc_feature 1..80: note = Artificially Synthesized Probe
  source 1..80: mol_type = other DNA
atttctactattattacattgtaacatataattaaataattctacaactcaccatcacagagactcagtgggagccctga

SEQ ID NO: 105507 - DNA, 80 bp, synthetic construct
  misc_feature 1..80: note = Artificially Synthesized Probe
  source 1..80: mol_type = other DNA
tgggattacaggcgtggaacaccatgcctggttattttttgtattttagtagagacggggttttgtcatgttggccaggc

SEQ ID NO: 105508 - DNA, 80 bp, synthetic construct; identical to SEQ ID NO: 36600
  misc_feature 1..80: note = Artificially Synthesized Probe
  source 1..80: mol_type = other DNA

SEQ ID NO: 105509 - DNA, 80 bp, synthetic construct
  misc_feature 1..80: note = Artificially Synthesized Probe
  source 1..80: mol_type = other DNA
tggtaagggcaggattccagagtgaaagggattagaaatacgatcacatggcacattcttaaagtgaaatgaaaacaaaa

SEQ ID NO: 105510 - DNA, 80 bp, synthetic construct
  misc_feature 1..80: note = Artificially Synthesized Probe
  source 1..80: mol_type = other DNA
aaatgacacccaggttggcgatgtgtctcatggttggccttccatggggacagttccaggggtggtccatctcccccatg

SEQ ID NO: 105511 - DNA, 80 bp, synthetic construct
  misc_feature 1..80: note = Artificially Synthesized Probe
  source 1..80: mol_type = other DNA
ttgcagctctccttacccttcctgataaatcctcagcctctgtaagtgggtctcgcttcaaatgcattctcagaacctcc

SEQ ID NO: 105512 - DNA, 80 bp, synthetic construct; identical to SEQ ID NO: 36601
  misc_feature 1..80: note = Artificially Synthesized Probe
  source 1..80: mol_type = other DNA

SEQ ID NO: 105513 - DNA, 80 bp, synthetic construct
  misc_feature 1..80: note = Artificially Synthesized Probe
  source 1..80: mol_type = other DNA
atggcgaaaccccgtctccactaaaaatacaaaaaatcagccgggcatggtggtgaacacctgtagtcccagcttctcgg

SEQ ID NO: 105514 - DNA, 80 bp, synthetic construct
  misc_feature 1..80: note = Artificially Synthesized Probe
  source 1..80: mol_type = other DNA
tatacacacagatagatagatatctttacaggaccaatcctatttatggaagtgtctattttcttatacgaaaagtaatg

SEQ ID NO: 105515 - DNA, 80 bp, synthetic construct
  misc_feature 1..80: note = Artificially Synthesized Probe
  source 1..80: mol_type = other DNA
tgaaatataccacttactcaaaacatggtttgaattaagcaactgactcctttgtataaatcatctttcttagccacagc

SEQ ID NO: 105516 - DNA, 80 bp, synthetic construct
  misc_feature 1..80: note = Artificially Synthesized Probe
  source 1..80: mol_type = other DNA
actaaaaatacaaaattagccgggtgtggtggcacgtgcctgtaatcccagctactcaggaggctgaggcaggagaattg

SEQ ID NO: 105517 - DNA, 80 bp, synthetic construct; identical to SEQ ID NO: 36602
  misc_feature 1..80: note = Artificially Synthesized Probe
  source 1..80: mol_type = other DNA

SEQ ID NO: 105518 - DNA, 80 bp, synthetic construct
  misc_feature 1..80: note = Artificially Synthesized Probe
  source 1..80: mol_type = other DNA
gttacttcctaataaagacagagtggacttaatctgttttctttcttagtcaagctattgacattacaagcgcaaaaaaa

SEQ ID NO: 105519 - DNA, 80 bp, synthetic construct
  misc_feature 1..80: note = Artificially Synthesized Probe
  source 1..80: mol_type = other DNA
aggtgcacaccaccacacctggctaattttttaatttttttgtagagatgggatcttgccgtgttatccaagctggtctt

SEQ ID NO: 105520 - DNA, 80 bp, synthetic construct; identical to SEQ ID NO: 36603
  misc_feature 1..80: note = Artificially Synthesized Probe
  source 1..80: mol_type = other DNA

SEQ ID NO: 105521 - DNA, 80 bp, synthetic construct
  misc_feature 1..80: note = Artificially Synthesized Probe
  source 1..80: mol_type = other DNA
gcagtgcagtggtgcaatctcagctcactgcaacctccatctcccgggttccagcgactctcctgcctcagcctcctgag

SEQ ID NO: 105522 - DNA, 80 bp, synthetic construct
  misc_feature 1..80: note = Artificially Synthesized Probe
  source 1..80: mol_type = other DNA
caaaaactaccttccctgaaaaaccttcccccagagaagcctaggttctagatctcagccctccacccttctgtgaaatc

SEQ ID NO: 105523 - DNA, 80 bp, synthetic construct
  misc_feature 1..80: note = Artificially Synthesized Probe
  source 1..80: mol_type = other DNA
tcagcctcccaaagtgctgggattacagacgtgagccactgcgccgggccttgtgataggcactttaaaaatcaattctt

SEQ ID NO: 105524 - DNA, 80 bp, synthetic construct
  misc_feature 1..80: note = Artificially Synthesized Probe
  source 1..80: mol_type = other DNA
taaaaatacaaaaaattagctgggcctggtggcatgtgcctgtaatcccagctactcaggaggctaaggtaggagaattg

SEQ ID NO: 105525 - DNA, 80 bp, synthetic construct
  misc_feature 1..80: note = Artificially Synthesized Probe
  source 1..80: mol_type = other DNA
tcacgaggtcaggaattcgagaccagcctggccaacacggtgaaaccccgtctctactaaagatacaaaaaattagcctg

SEQ ID NO: 105526 - DNA, 80 bp, synthetic construct; identical to SEQ ID NO: 36604
  misc_feature 1..80: note = Artificially Synthesized Probe
  source 1..80: mol_type = other DNA

SEQ ID NO: 105527 - DNA, 80 bp, synthetic construct
  misc_feature 1..80: note = Artificially Synthesized Probe
  source 1..80: mol_type = other DNA
acttacacggatgcctgctgaaatgatacagtatgcatgtaagacctggaccattttggcatactcctgtttaaaaaaca

SEQ ID NO: 105528 - DNA, 80 bp, synthetic construct
  misc_feature 1..80: note = Artificially Synthesized Probe
  source 1..80: mol_type = other DNA
cagagcttttggctcctggtcacagtcctctcacttcccaatgtgccatgcatcctggtaaaacaactaaaaagtacagc

SEQ ID NO: 105529 - DNA, 80 bp, synthetic construct
  misc_feature 1..80: note = Artificially Synthesized Probe
  source 1..80: mol_type = other DNA
ggaggctgaggtgggaggatcgcttgagcctaggagttcaaggctgcagtgagccatgattgcaccactgcactccagcc

SEQ ID NO: 105530 - DNA, 80 bp, synthetic construct; identical to SEQ ID NO: 36605
  misc_feature 1..80: note = Artificially Synthesized Probe
  source 1..80: mol_type = other DNA

SEQ ID NO: 105531 - DNA, 80 bp, synthetic construct
  misc_feature 1..80: note = Artificially Synthesized Probe
  source 1..80: mol_type = other DNA
ttcgagacctgcctgggcaacacagaaggacccatctctacaaaaaaaacaaaaattagccgggcatggtagcacgggcc

SEQ ID NO: 105532 - DNA, 80 bp, synthetic construct
  misc_feature 1..80: note = Artificially Synthesized Probe
  source 1..80: mol_type = other DNA
aaccacatacaattctgtattacttgcatgttgtacattctatattacttgctttcattatattaacttatgaatttatc

SEQ ID NO: 105533 - DNA, 80 bp, synthetic construct; identical to SEQ ID NO: 36577
  misc_feature 1..80: note = Artificially Synthesized Probe
  source 1..80: mol_type = other DNA

SEQ ID NO: 105534 - DNA, 80 bp, synthetic construct; identical to SEQ ID NO: 36606
  misc_feature 1..80: note = Artificially Synthesized Probe
  source 1..80: mol_type = other DNA

SEQ ID NO: 105535 - DNA, 80 bp, synthetic construct
  misc_feature 1..80: note = Artificially Synthesized Probe
  source 1..80: mol_type = other DNA
gcgtggtggcgcacacctataatcccagctactcgagaggctgaggcaggagaatcacttgaacccaggaggtggaggtt

SEQ ID NO: 105536 - DNA, 80 bp, synthetic construct
  misc_feature 1..80: note = Artificially Synthesized Probe
  source 1..80: mol_type = other DNA
cacatacaaaatgggaaggcacaaagaagacagcaaaaactgcatgagatctcacatccaaggataactgctgagaacat

SEQ ID NO: 105537 - DNA, 80 bp, synthetic construct
  misc_feature 1..80: note = Artificially Synthesized Probe
  source 1..80: mol_type = other DNA
atataacatttagctattttcatttgcattcaaattcataagggttctaatagctcatttctcagaaaaccaagagaaat

SEQ ID NO: 105538 - DNA, 80 bp, synthetic construct; identical to SEQ ID NO: 36607
  misc_feature 1..80: note = Artificially Synthesized Probe
  source 1..80: mol_type = other DNA

SEQ ID NO: 105539 - DNA, 80 bp, synthetic construct
  misc_feature 1..80: note = Artificially Synthesized Probe
  source 1..80: mol_type = other DNA
ggtcaggaattcgagaccagcctggccagcctggacaacatggtgaaaccccgtctctactaaaaatacaaaaattagcc

SEQ ID NO: 105540 - DNA, 80 bp, synthetic construct
  misc_feature 1..80: note = Artificially Synthesized Probe
  source 1..80: mol_type = other DNA
aaaaataaaaaatatatatatatgtatatatatttttccagacaggatcttattctgtctcccagtcttaagtgcagtgg

SEQ ID NO: 105541 - DNA, 80 bp, synthetic construct
  misc_feature 1..80: note = Artificially Synthesized Probe
  source 1..80: mol_type = other DNA
aataaacactatgtgatgaaaagaaaaaagtaaatcatcctaaagttaagtctttaatgttaaatctttaatgagaaatg

SEQ ID NO: 105542 - DNA, 80 bp, synthetic construct
  misc_feature 1..80: note = Artificially Synthesized Probe
  source 1..80: mol_type = other DNA
ggtagtgtggaaaataactgctgcacgctgactgtggtccctctggggcgggggtagggggttttctggataattttccc

SEQ ID NO: 105543 - DNA, 80 bp, synthetic construct; identical to SEQ ID NO: 36608
  misc_feature 1..80: note = Artificially Synthesized Probe
  source 1..80: mol_type = other DNA

SEQ ID NO: 105544 - DNA, 80 bp, synthetic construct
  misc_feature 1..80: note = Artificially Synthesized Probe
  source 1..80: mol_type = other DNA
ctcccccaatgggtgcaggcgtcactccccctctgtcgagctccgacctgctgcccatagcactccagccctggccctgc

SEQ ID NO: 105545 - DNA, 80 bp, synthetic construct
  misc_feature 1..80: note = Artificially Synthesized Probe
  source 1..80: mol_type = other DNA
ttaaagaatctaacaaatattataattaaaatgtatatgtagggcagagcgtggtggctcatgcctgttatcccagcact

SEQ ID NO: 105546 - DNA, 80 bp, synthetic construct
  misc_feature 1..80: note = Artificially Synthesized Probe
  source 1..80: mol_type = other DNA
cttgaacctggaaggcagagattgcagtgagccgagactgtgccactgcactccagcctgggtgacaaagagagactctg

SEQ ID NO: 105547 - DNA, 80 bp, synthetic construct
  misc_feature 1..80: note = Artificially Synthesized Probe
  source 1..80: mol_type = other DNA
tgagaattactgttttaataagggtaaccatctttttaacaatactatttgcttcatttcattcatttattgctcacatt

SEQ ID NO: 105548 - DNA, 80 bp, synthetic construct; identical to SEQ ID NO: 36609
  misc_feature 1..80: note = Artificially Synthesized Probe
  source 1..80: mol_type = other DNA

SEQ ID NO: 105549 - DNA, 80 bp, synthetic construct
  misc_feature 1..80: note = Artificially Synthesized Probe
  source 1..80: mol_type = other DNA
gacccaattattttataataggattagaaaaagtcaacttacttaagccttcgaagttttcttcttctaccccacatcca

SEQ ID NO: 105550 - DNA, 80 bp, synthetic construct
  misc_feature 1..80: note = Artificially Synthesized Probe
  source 1..80: mol_type = other DNA
agttaaacatactagtgtcattttgtatatttcattgttataaagtcctttctggctatttactagcccagactaaatag

SEQ ID NO: 105551 - DNA, 80 bp, synthetic construct
  misc_feature 1..80: note = Artificially Synthesized Probe
  source 1..80: mol_type = other DNA
aacatacccaataaagagaacggggaccgggtgcagtggttcatgcctgtaattccagcactttgggaggccaaagcgag

SEQ ID NO: 105552 - DNA, 80 bp, synthetic construct; identical to SEQ ID NO: 36610
  misc_feature 1..80: note = Artificially Synthesized Probe
  source 1..80: mol_type = other DNA

SEQ ID NO: 105553 - DNA, 80 bp, synthetic construct
  misc_feature 1..80: note = Artificially Synthesized Probe
  source 1..80: mol_type = other DNA
ttttttttattttattattcttttcttttcttttgagatggagttttgctcgtcacccaggctggagtgcagtggtacga

SEQ ID NO: 105554 - DNA, 80 bp, synthetic construct
  misc_feature 1..80: note = Artificially Synthesized Probe
  source 1..80: mol_type = other DNA
cctgacctcaaatgatcagcccccctcagcctcccaaagtgctggtattacagatgtgagccactactccagccctattt

SEQ ID NO: 105555 - DNA, 80 bp, synthetic construct
  misc_feature 1..80: note = Artificially Synthesized Probe
  source 1..80: mol_type = other DNA
agtcaacagagaaccaagacaggtggcaccaggcgaggcggcctgctcaggtgtggggatggggtgaagggtgacggtgg

SEQ ID NO: 105556 - DNA, 80 bp, synthetic construct
  misc_feature 1..80: note = Artificially Synthesized Probe
  source 1..80: mol_type = other DNA
aatttttgtatttttagtagagacagagtttcaccactttggacaggctggtctcgaactcctgacctcaggtatccacc

SEQ ID NO: 105557 - DNA, 80 bp, synthetic construct; identical to SEQ ID NO: 36611
  misc_feature 1..80: note = Artificially Synthesized Probe
  source 1..80: mol_type = other DNA

SEQ ID NO: 105558 - DNA, 80 bp, synthetic construct
  misc_feature 1..80: note = Artificially Synthesized Probe
  source 1..80: mol_type = other DNA
tcacagatcatttcttgtggcttaaaactctcccaaacttaccaatattagtggcaccagcatccagactgttttctact

SEQ ID NO: 105559 - DNA, 80 bp, synthetic construct
  misc_feature 1..80: note = Artificially Synthesized Probe
  source 1..80: mol_type = other DNA
ttttaactgtgggaaatgactcaacactgtaaataatttatgggtctaatctattcatttattatattagcaaatacatt

SEQ ID NO: 105560 - DNA, 80 bp, synthetic construct
  misc_feature 1..80: note = Artificially Synthesized Probe
  source 1..80: mol_type = other DNA
tggcaacaatggtgtcttctttcttgaaaagtgaaagcatggctggctgtggtggctcatgcctgtaatcccagcacttt

SEQ ID NO: 105561 - DNA, 80 bp, synthetic construct; identical to SEQ ID NO: 36612
  misc_feature 1..80: note = Artificially Synthesized Probe
  source 1..80: mol_type = other DNA

SEQ ID NO: 105562 - DNA, 80 bp, synthetic construct
  misc_feature 1..80: note = Artificially Synthesized Probe
  source 1..80: mol_type = other DNA
gctgctgtcttagcaaagaccctcaaagctcttgctgtactagctttaagagttttataaaggttttatctccccttatt

SEQ ID NO: 105563 - DNA, 80 bp, synthetic construct
  misc_feature 1..80: note = Artificially Synthesized Probe
  source 1..80: mol_type = other DNA
aaaatttactagtgccccacttcctactatatgaaagttaaaatttagtcatcattggggccaaaactaccttcttttca

SEQ ID NO: 105564 - DNA, 80 bp, synthetic construct
  misc_feature 1..80: note = Artificially Synthesized Probe
  source 1..80: mol_type = other DNA
ggttcaagcgattctcctatctcagcctcccaagtagctgggattacaggcgcccaccatcacacccagctaatttttgt

SEQ ID NO: 105565 - DNA, 80 bp, synthetic construct; identical to SEQ ID NO: 36613
  misc_feature 1..80: note = Artificially Synthesized Probe
  source 1..80: mol_type = other DNA

SEQ ID NO: 105566 - DNA, 80 bp, synthetic construct
  misc_feature 1..80: note = Artificially Synthesized Probe
  source 1..80: mol_type = other DNA
ttcctacagcatttaacacatcgtaggcctttaataaacccttctgaaataaacaaacctctttactcttcattccacct

SEQ ID NO: 105567 - DNA, 80 bp, synthetic construct
  misc_feature 1..80: note = Artificially Synthesized Probe
  source 1..80: mol_type = other DNA
gcagtgacaacaccggagatggacgggtaggccagggcgagagggaaggagcagcctgtggttccccgggccactgagtc

SEQ ID NO: 105568 - DNA, 80 bp, synthetic construct
  misc_feature 1..80: note = Artificially Synthesized Probe
  source 1..80: mol_type = other DNA
tgctgcgttgcccaggccggactgcagtggcacgatctcagctcactgcaacctccgcctcctgggttccagcgattctc

SEQ ID NO: 105569 - DNA, 80 bp, synthetic construct; identical to SEQ ID NO: 36614
  misc_feature 1..80: note = Artificially Synthesized Probe
  source 1..80: mol_type = other DNA

SEQ ID NO: 105570 - DNA, 80 bp, synthetic construct
  misc_feature 1..80: note = Artificially Synthesized Probe
  source 1..80: mol_type = other DNA
gtagaaacgtattgcatttttaaaaactgcgcagctatgcaaataaggatgtgtctggacgctctaccgtccccaaaata

SEQ ID NO: 105571 - DNA, 80 bp, synthetic construct
  misc_feature 1..80: note = Artificially Synthesized Probe
  source 1..80: mol_type = other DNA
actataaaaataaaaataaaaggggagagagaacaggtagaaaggaaatgcattcagtctatggggatttcacgctcccg

SEQ ID NO: 105572 - DNA, 80 bp, synthetic construct
  misc_feature 1..80: note = Artificially Synthesized Probe
  source 1..80: mol_type = other DNA
ggcctcaaggcgcacccaaggggcacgagatcgctgcaacactgaggtcgccactccggggcctccagggggctgcctcg

SEQ ID NO: 105573 - DNA, 80 bp, synthetic construct; identical to SEQ ID NO: 36615
  misc_feature 1..80: note = Artificially Synthesized Probe
  source 1..80: mol_type = other DNA

SEQ ID NO: 105574 - DNA, 80 bp, synthetic construct
  misc_feature 1..80: note = Artificially Synthesized Probe
  source 1..80: mol_type = other DNA
tctcagctcactgcaactccgcctcccagattcaagcaattctcccgcttcagcctcccgagtagctgggattacaggcg

SEQ ID NO: 105575 - DNA, 80 bp, synthetic construct; identical to SEQ ID NO: 36578
  misc_feature 1..80: note = Artificially Synthesized Probe
  source 1..80: mol_type = other DNA

SEQ ID NO: 105576 - DNA, 80 bp, synthetic construct
  misc_feature 1..80: note = Artificially Synthesized Probe
  source 1..80: mol_type = other DNA
cagtctgttctctctccagcagctgcaatcacgggactccttcccgtctgttctctccagtggctcgtgccacacacagc

SEQ ID NO: 105577 - DNA, 80 bp, synthetic construct
  misc_feature 1..80: note = Artificially Synthesized Probe
  source 1..80: mol_type = other DNA
ttctaccttttttttttttttttttgagacaaggtcttactctgtcacccaggctggagtgcagttgcgtgatgttggct

SEQ ID NO: 105578 - DNA, 80 bp, synthetic construct
  misc_feature 1..80: note = Artificially Synthesized Probe
  source 1..80: mol_type = other DNA
gatgtgacaggaggcggagctcgggtggtaacgccagcgacggggagtggctataaatacagatgaagcttcgctggctt

SEQ ID NO: 105579 - DNA, 80 bp, synthetic construct
  misc_feature 1..80: note = Artificially Synthesized Probe
  source 1..80: mol_type = other DNA
tcaagcaatcctcctgccttggcctcccaaaatgctgggattacacgtgtgagccaccatgcctggcttccatcccacct

SEQ ID NO: 105580 - DNA, 80 bp, synthetic construct; identical to SEQ ID NO: 36579
  misc_feature 1..80: note = Artificially Synthesized Probe
  source 1..80: mol_type = other DNA

SEQ ID NO: 105581 - DNA, 80 bp, synthetic construct
  misc_feature 1..80: note = Artificially Synthesized Probe
  source 1..80: mol_type = other DNA
aaaatgctgtttgaatctcttgactgtgcttactggcatctaatgcgtgtcatttatttgtggtgatgcctatttctccc

SEQ ID NO: 105582 - DNA, 80 bp, synthetic construct
  misc_feature 1..80: note = Artificially Synthesized Probe
  source 1..80: mol_type = other DNA
gtcacttttcttggacatcaggctaatccccactgcaggcagaaccactgctgccaccttcccacaccaaccgaagcagc

SEQ ID NO: 105583 - DNA, 80 bp, synthetic construct; identical to SEQ ID NO: 36580
  misc_feature 1..80: note = Artificially Synthesized Probe
  source 1..80: mol_type = other DNA

SEQ ID NO: 105584 - DNA, 80 bp, synthetic construct
  misc_feature 1..80: note = Artificially Synthesized Probe
  source 1..80: mol_type = other DNA
gcagtgagctgtgattgtgccactgcactccagcctgggggacagagggagaatctgtctaaaaaaaaaaaaaagaagaa

SEQ ID NO: 105585 - DNA, 80 bp, synthetic construct
  misc_feature 1..80: note = Artificially Synthesized Probe
  source 1..80: mol_type = other DNA
acgcccggctaatttttttgtatttttagtagagacgggctttcaccatgttagccaggatggtctcgatctcctgaact

SEQ ID NO: 105586 - DNA, 80 bp, synthetic construct
  misc_feature 1..80: note = Artificially Synthesized Probe
  source 1..80: mol_type = other DNA
cacgtagctctctgtgtaaaatgacccctggcaatcacaaaggcgtttacaaccttgaccaaatcaggagctgggctgag

SEQ ID NO: 105587 - DNA, 80 bp, synthetic construct; identical to SEQ ID NO: 36581
  misc_feature 1..80: note = Artificially Synthesized Probe
  source 1..80: mol_type = other DNA

SEQ ID NO: 105588 - DNA, 80 bp, synthetic construct
  misc_feature 1..80: note = Artificially Synthesized Probe
  source 1..80: mol_type = other DNA
taacatggtgaaaccccgtctctactaaaaaatagaaaaaattagctgggtgtggtggcaggcacctgtagtcccagcta

SEQ ID NO: 105589 - DNA, 80 bp, synthetic construct
  misc_feature 1..80: note = Artificially Synthesized Probe
  source 1..80: mol_type = other DNA
gccagcagggaaaggtctccacctttgaaggactcacccaatggactgggcccacccagacaatccaggataatctctct

SEQ ID NO: 105590 - DNA, 80 bp, synthetic construct
  misc_feature 1..80: note = Artificially Synthesized Probe
  source 1..80: mol_type = other DNA
ttttggaggaactttttaatcttttataaaattaaaaaaaactggtctatatgacctgaaagattattcccagctctaaa

SEQ ID NO: 105591 - DNA, 80 bp, synthetic construct
  misc_feature 1..80: note = Artificially Synthesized Probe
  source 1..80: mol_type = other DNA
acaggcacccgccaccacgcccggctactttttgtattttcagtagagatggggtttcaccatgttagccaggctggtct

SEQ ID NO: 105592 - DNA, 80 bp, synthetic construct; identical to SEQ ID NO: 36582
  misc_feature 1..80: note = Artificially Synthesized Probe
  source 1..80: mol_type = other DNA

SEQ ID NO: 105593 - DNA, 80 bp, synthetic construct
  misc_feature 1..80: note = Artificially Synthesized Probe
  source 1..80: mol_type = other DNA
cctgagaagttccttttaattttctctttcttaaagttctttttagaagttaaagtagctacaggccaggtgcggtggct

SEQ ID NO: 105594 - DNA, 80 bp, synthetic construct
  misc_feature 1..80: note = Artificially Synthesized Probe
  source 1..80: mol_type = other DNA
ggaggcttaggcatgagattcgtttgaacccaggagggaggcagaggttgtagtgagagccaagatcacgccactgtact

SEQ ID NO: 105595 - DNA, 80 bp, synthetic construct
  misc_feature 1..80: note = Artificially Synthesized Probe
  source 1..80: mol_type = other DNA
gcagtgagccaagatcacaccactgcactccagcctgggcaacagggcaagactctgtctcaaaaaaaaaaaaaaagttc

SEQ ID NO: 105596 - DNA, 80 bp, synthetic construct
  misc_feature 1..80: note = Artificially Synthesized Probe
  source 1..80: mol_type = other DNA
tgtaaacagaatgaacagacagcttttattttgctatcctgttccttcctctgcctgtattatatctccatccctctctc

SEQ ID NO: 105597 - DNA, 80 bp, synthetic construct; identical to SEQ ID NO: 36583
  misc_feature 1..80: note = Artificially Synthesized Probe
  source 1..80: mol_type = other DNA

SEQ ID NO: 105598 - DNA, 80 bp, synthetic construct
  misc_feature 1..80: note = Artificially Synthesized Probe
  source 1..80: mol_type = other DNA
atactcaggcaagtcgattatgatgagaaacgacaggaaggtcaggaagaaaaagcagccagtgtcatagagagacttca

SEQ ID NO: 105599 - DNA, 80 bp, synthetic construct
  misc_feature 1..80: note = Artificially Synthesized Probe
  source 1..80: mol_type = other DNA
cataaagatatccttcattctgcttagtggccacatagggattcatcaggcctgccaagggaaaaagaaagacagccaga

SEQ ID NO: 105600 - DNA, 80 bp, synthetic construct; identical to SEQ ID NO: 36584
  misc_feature 1..80: note = Artificially Synthesized Probe
  source 1..80: mol_type = other DNA

SEQ ID NO: 105601 - DNA, 80 bp, synthetic construct
  misc_feature 1..80: note = Artificially Synthesized Probe
  source 1..80: mol_type = other DNA
tatggttctggacacctgtaatcccagctactcgggaggctgaggtgggagaatcacttgaacctgggaggcagaggctg

SEQ ID NO: 105602 - DNA, 80 bp, synthetic construct
  misc_feature 1..80: note = Artificially Synthesized Probe
  source 1..80: mol_type = other DNA
attagccaggtgtggtggcgggtgcctgtaatcccagctactcgggaggctgaggcaggagaatcacttgaacccgagag

SEQ ID NO: 105603 - DNA, 80 bp, synthetic construct
  misc_feature 1..80: note = Artificially Synthesized Probe
  source 1..80: mol_type = other DNA
actgagaataaaaacaattcacgcattccacaggagagtactcagcaaactacacaggagagtactcagcaaactacaca

SEQ ID NO: 105604 - DNA, 80 bp, synthetic construct; identical to SEQ ID NO: 36616
  misc_feature 1..80: note = Artificially Synthesized Probe
  source 1..80: mol_type = other DNA

SEQ ID NO: 105605 - DNA, 80 bp, synthetic construct; identical to SEQ ID NO: 36626
  misc_feature 1..80: note = Artificially Synthesized Probe
  source 1..80: mol_type = other DNA

SEQ ID NO: 105606 - DNA, 80 bp, synthetic construct
  misc_feature 1..80: note = Artificially Synthesized Probe
  source 1..80: mol_type = other DNA
ctagcacgtccctgccctgccacctgtgccctgcgatgcccactgccagcagtgcccctccccgtcttgctccacgtagg

SEQ ID NO: 105607 - DNA, 80 bp, synthetic construct
  misc_feature 1..80: note = Artificially Synthesized Probe
  source 1..80: mol_type = other DNA
atctgggctggggtttcagtcatgttccaatcagacctctgccgctgacaaactatgagcaagaggttttgcttccctag

SEQ ID NO: 105608 - DNA, 80 bp, synthetic construct
  misc_feature 1..80: note = Artificially Synthesized Probe
  source 1..80: mol_type = other DNA
gcacctagtactgcctccactacagcccccgtcacccggagctgggcctgtcccctcgcaggatgggacccggagaccca

SEQ ID NO: 105609 - DNA, 80 bp, synthetic construct; identical to SEQ ID NO: 36627
  misc_feature 1..80: note = Artificially Synthesized Probe
  source 1..80: mol_type = other DNA

SEQ ID NO: 105610 - DNA, 80 bp, synthetic construct
  misc_feature 1..80: note = Artificially Synthesized Probe
  source 1..80: mol_type = other DNA
ggaggctcagtgaagggtgaggaggacccacctaggccagcagagcccagcccaggagcttcaaacaggggttgctacaa

SEQ ID NO: 105611 - DNA, 80 bp, synthetic construct
  misc_feature 1..80: note = Artificially Synthesized Probe
  source 1..80: mol_type = other DNA
tctataaatagagacgctcctggaaaggagaggccttctctataaggcactaggacacatggtaaggctgcaattgttaa

SEQ ID NO: 105612 - DNA, 80 bp, synthetic construct; identical to SEQ ID NO: 36617
  misc_feature 1..80: note = Artificially Synthesized Probe
  source 1..80: mol_type = other DNA

SEQ ID NO: 105613 - DNA, 80 bp, synthetic construct
  misc_feature 1..80: note = Artificially Synthesized Probe
  source 1..80: mol_type = other DNA
tgcccctcaccggcccattctcctcatctgatgaccgcgcctctgtcctcttctccttgaagccccagacgggcacagac

SEQ ID NO: 105614 - DNA, 80 bp, synthetic construct
  misc_feature 1..80: note = Artificially Synthesized Probe
  source 1..80: mol_type = other DNA
ctcaggtcgggaggggaacagcctgggacactcaccatctgtactctcggggtctgactcacagaaggggggaaggtcct

SEQ ID NO: 105615 - DNA, 80 bp, synthetic construct; identical to SEQ ID NO: 36628
  misc_feature 1..80: note = Artificially Synthesized Probe
  source 1..80: mol_type = other DNA

SEQ ID NO: 105616 - DNA, 80 bp, synthetic construct
  misc_feature 1..80: note = Artificially Synthesized Probe
  source 1..80: mol_type = other DNA
aagttaagtcacttgcccgaggtcccatggctactaagggacaccaccaggatttgaactcaggatgcctgcccttcacc

SEQ ID NO: 105617 - DNA, 80 bp, synthetic construct
  misc_feature 1..80: note = Artificially Synthesized Probe
  source 1..80: mol_type = other DNA
ccccccaaaacagctggctgctccctccctggcttcctcagatgttggctgcatcccagacaactctttaactcctgctt

SEQ ID NO: 105618 - DNA, 80 bp, synthetic construct; identical to SEQ ID NO: 36629
  misc_feature 1..80: note = Artificially Synthesized Probe
  source 1..80: mol_type = other DNA

SEQ ID NO: 105619 - DNA, 80 bp, synthetic construct
  misc_feature 1..80: note = Artificially Synthesized Probe
  source 1..80: mol_type = other DNA
actaatgcccagctgctccccggaggtctctgtctctgtgggctcatcctcgtcctcctcgttgtcctctctggccaggg

SEQ ID NO: 105620 - DNA, 80 bp, synthetic construct
  misc_feature 1..80: note = Artificially Synthesized Probe
  source 1..80: mol_type = other DNA
cataggcacaggggcccgggcggggtggtggcggcggggccgcggtcagcagcaccagctccgtgccagtccgggcccgg

SEQ ID NO: 105621 - DNA, 80 bp, synthetic construct
  misc_feature 1..80: note = Artificially Synthesized Probe
  source 1..80: mol_type = other DNA
gatggcactcaccaccctccacccaccttgtcccagcggtgctgtgtgtcctccccaaacctgctactccccaggattct

SEQ ID NO: 105622 - DNA, 80 bp, synthetic construct
  misc_feature 1..80: note = Artificially Synthesized Probe
  source 1..80: mol_type = other DNA
ggcagggagtcctagcagagagtcctagcagagaggcctctaacaataaaacctgcactgggttctgaagactgagtaca

SEQ ID NO: 105623 - DNA, 80 bp, synthetic construct
  misc_feature 1..80: note = Artificially Synthesized Probe
  source 1..80: mol_type = other DNA
cagtacagccgccccagcctcggctccacccatagccggaacgggatctccaggatggcagagaagccttcagccagcgt

SEQ ID NO: 105624 - DNA, 80 bp, synthetic construct; identical to SEQ ID NO: 36630
  misc_feature 1..80: note = Artificially Synthesized Probe
  source 1..80: mol_type = other DNA

SEQ ID NO: 105625 - DNA, 80 bp, synthetic construct
  misc_feature 1..80: note = Artificially Synthesized Probe
  source 1..80: mol_type = other DNA
ccagagcctctgaggcccgaggccttcagaaaacgtggtccctgaccttgatgacttgtgctccattccccaccaacctt

SEQ ID NO: 105626 - DNA, 80 bp, synthetic construct
  misc_feature 1..80: note = Artificially Synthesized Probe
  source 1..80: mol_type = other DNA
aaatggtgctggcgctgctctctgtgctgggaaatccacacggcttttcctacaagactgttctggcaggtcctctgttg

SEQ ID NO: 105627 - DNA, 80 bp, synthetic construct; identical to SEQ ID NO: 36631
  misc_feature 1..80: note = Artificially Synthesized Probe
  source 1..80: mol_type = other DNA

SEQ ID NO: 105628 - DNA, 80 bp, synthetic construct
  misc_feature 1..80: note = Artificially Synthesized Probe
  source 1..80: mol_type = other DNA
gccactgcacggattcaggcacagctgtggtccagcccaccagggtgaagggagcagggagtctggagtctgaatgaaat

SEQ ID NO: 105629 - DNA, 80 bp, synthetic construct
  misc_feature 1..80: note = Artificially Synthesized Probe
  source 1..80: mol_type = other DNA
cagaagccacgcaaggacccaagatgggatcaaccttctcatcccaccctttcacctacactatgagacaggagctttag

SEQ ID NO: 105630 - DNA, 80 bp, synthetic construct
  misc_feature 1..80: note = Artificially Synthesized Probe
  source 1..80: mol_type = other DNA
cctttaggagggcagatattctaatccagatggaaaagtgaggctcagagagcttaggacactggcaaaaaagcacacag

SEQ ID NO: 105631 - DNA, 80 bp, synthetic construct; identical to SEQ ID NO: 36632
  misc_feature 1..80: note = Artificially Synthesized Probe
  source 1..80: mol_type = other DNA

SEQ ID NO: 105632 - DNA, 80 bp, synthetic construct
  misc_feature 1..80: note = Artificially Synthesized Probe
  source 1..80: mol_type = other DNA
agtgaaatagggtgagtgagttgtgagggctcccccaactcaggagacatgagcaaaaaggacagggcgacttccacaga

SEQ ID NO: 105633 - DNA, 80 bp, synthetic construct
  misc_feature 1..80: note = Artificially Synthesized Probe
  source 1..80: mol_type = other DNA
gagtttcgtgtaagatcagggagagattagaggaaagtgagacgtgttccccacaggagggggagcacgatgtggctgtc

SEQ ID NO: 105634 - DNA, 80 bp, synthetic construct
  misc_feature 1..80: note = Artificially Synthesized Probe
  source 1..80: mol_type = other DNA
gtcatctctcgaaactgtggggaacatcagaggggcggcaggcccaggggtcaggggaggaggggggtcagggggtgcag

SEQ ID NO: 105635 - DNA, 80 bp, synthetic construct
  misc_feature 1..80: note = Artificially Synthesized Probe
  source 1..80: mol_type = other DNA
agctgccccgagacctcccaacctcgcccggggtccagggaggacccactggtctaggaagaaaacaggaaatcccgccc

SEQ ID NO: 105636 - DNA, 80 bp, synthetic construct; identical to SEQ ID NO: 36633
  misc_feature 1..80: note = Artificially Synthesized Probe
  source 1..80: mol_type = other DNA

SEQ ID NO: 105637 - DNA, 80 bp, synthetic construct
  misc_feature 1..80: note = Artificially Synthesized Probe
  source 1..80: mol_type = other DNA
caccgccctcaaaagacatggcggcgccttgcgtcacgtccgcgcagttgccccgcctcctctccgcacactccgcctcc

SEQ ID NO: 105638 - DNA, 80 bp, synthetic construct
  misc_feature 1..80: note = Artificially Synthesized Probe
  source 1..80: mol_type = other DNA
caatcatgaccacagtaaacgaaggcaagcgacctgacgtccctgacccacaataaacttcttcgacaaaagtagaggaa

SEQ ID NO: 105639 - DNA, 80 bp, synthetic construct
  misc_feature 1..80: note = Artificially Synthesized Probe
  source 1..80: mol_type = other DNA
caaaatggcggctcagcccgctttctcgcgacggtgactcagaaattcgtccggggccgcttcgtttctgggggcactga

SEQ ID NO: 105640 - DNA, 80 bp, synthetic construct; identical to SEQ ID NO: 36634
  misc_feature 1..80: note = Artificially Synthesized Probe
  source 1..80: mol_type = other DNA

SEQ ID NO: 105641 - DNA, 80 bp, synthetic construct
  misc_feature 1..80: note = Artificially Synthesized Probe
  source 1..80: mol_type = other DNA
tccagtggaataacccccttctgaaaaatggtttcacccgctccttctctagaacgggtcgggccgctaccactgtccgg

SEQ ID NO: 105642 - DNA, 80 bp, synthetic construct
  misc_feature 1..80: note = Artificially Synthesized Probe
  source 1..80: mol_type = other DNA
tagtgatcagctcttctctcaggccttggctctcgagaatccggcacggccttggcaaacaccgatctcttataaacgcg

SEQ ID NO: 105643 - DNA, 80 bp, synthetic construct
  misc_feature 1..80: note = Artificially Synthesized Probe
  source 1..80: mol_type = other DNA
atggccctcccggccccgccccctgagggtggctcctccctgggcccgtccctattggctccccaggctggtcccctcgc

SEQ ID NO: 105644 - DNA, 80 bp, synthetic construct; identical to SEQ ID NO: 36635
  misc_feature 1..80: note = Artificially Synthesized Probe
  source 1..80: mol_type = other DNA

SEQ ID NO: 105645 - DNA, 80 bp, synthetic construct
  misc_feature 1..80: note = Artificially Synthesized Probe
  source 1..80: mol_type = other DNA
gccgcaggccacctacggccccgcggtcacgctacctggcgcggctcgcggcgtctgggtttgtgttgtcgatggcgacc

SEQ ID NO: 105646 - DNA, 80 bp, synthetic construct; identical to SEQ ID NO: 36618
  misc_feature 1..80: note = Artificially Synthesized Probe
  source 1..80: mol_type = other DNA

SEQ ID NO: 105647 - DNA, 80 bp, synthetic construct
  misc_feature 1..80: note = Artificially Synthesized Probe
  source 1..80: mol_type = other DNA
gcgtgtcattgccaaccagcagcaggtcctgcagcggaacctggagcaggagcaacagcaacgaggggtgaggtggccgg

SEQ ID NO: 105648 - DNA, 80 bp, synthetic construct
  misc_feature 1..80: note = Artificially Synthesized Probe
  source 1..80: mol_type = other DNA
gggctggcgctcaggagggccctggactcggggaggcagagaggccctgagcgggagacagtcctctgcgaggggcgggg

SEQ ID NO: 105649 - DNA, 80 bp, synthetic construct
  misc_feature 1..80: note = Artificially Synthesized Probe
  source 1..80: mol_type = other DNA
gggcaaactaggggttgaggacgaacatcagacacaggccagggtcgggctcgggcgcggggcagggggcaggggcctca

SEQ ID NO: 105650 - DNA, 80 bp, synthetic construct
  misc_feature 1..80: note = Artificially Synthesized Probe
  source 1..80: mol_type = other DNA
aaagatgctgtccccgatggatatgggcgtgccgtcgttggcctacgggagacggtagtgaggaggcccttcccacaaat

SEQ ID NO: 105651 - DNA, 80 bp, synthetic construct
  misc_feature 1..80: note = Artificially Synthesized Probe
  source 1..80: mol_type = other DNA
ctccaggtctcccgacttcacctcctcccgttccccacgcggccaccggagggcacccaccctgctacagctccagcctc

SEQ ID NO: 105652 - DNA, 80 bp, synthetic construct; identical to SEQ ID NO: 36619
  misc_feature 1..80: note = Artificially Synthesized Probe
  source 1..80: mol_type = other DNA

SEQ ID NO: 105653 - DNA, 80 bp, synthetic construct
  misc_feature 1..80: note = Artificially Synthesized Probe
  source 1..80: mol_type = other DNA
ataccttcagctcaagaatgcgctaaacttcagaacaaatgcacacacaaacgaatgaacgaaggaatgaacagcttccc

SEQ ID NO: 105654 - DNA, 80 bp, synthetic construct
  misc_feature 1..80: note = Artificially Synthesized Probe
  source 1..80: mol_type = other DNA
agtgaggaaaaggaggggggccgggcaggctgcaagactcacctgctcctgcagatggtcccacatgcccgtcaccggct

SEQ ID NO: 105655 - DNA, 80 bp, synthetic construct; identical to SEQ ID NO: 36620
  misc_feature 1..80: note = Artificially Synthesized Probe
  source 1..80: mol_type = other DNA

SEQ ID NO: 105656 - DNA, 80 bp, synthetic construct
  misc_feature 1..80: note = Artificially Synthesized Probe
  source 1..80: mol_type = other DNA
tggtctgactgcggtcggaccgccacgtgcacgtgcccatgcagacaggcggctgcacataccttgtagccctcggcttc

SEQ ID NO: 105657 - DNA, 80 bp, synthetic construct
  misc_feature 1..80: note = Artificially Synthesized Probe
  source 1..80: mol_type = other DNA
aaagaccttcccagagcgtgtggtgatgagcgtcccgtccagatcaaagccagccacctggtgtcaccaaggaaagacaa

SEQ ID NO: 105658 - DNA, 80 bp, synthetic construct
  misc_feature 1..80: note = Artificially Synthesized Probe
  source 1..80: mol_type = other DNA
accctgtcatgtacaggagggaccctggggcatgtggggggggtggggttgggaaagaagcagggcgaccttggccttgg

SEQ ID NO: 105659 - DNA, 80 bp, synthetic construct
  misc_feature 1..80: note = Artificially Synthesized Probe
  source 1..80: mol_type = other DNA
tcttaaccttactgtctcctgttactccttatgacgccagccccaggattacagtctttaaaatgggggttaatgtctta

SEQ ID NO: 105660 - DNA, 80 bp, synthetic construct; identical to SEQ ID NO: 36621
  misc_feature 1..80: note = Artificially Synthesized Probe
  source 1..80: mol_type = other DNA

SEQ ID NO: 105661 - DNA, 80 bp, synthetic construct
  misc_feature 1..80: note = Artificially Synthesized Probe
  source 1..80: mol_type = other DNA
ttatcattaggcccatttctcagaaaagtaagtagaggctaaaaagttgagagcacgcaacaaacgtgggattgggtccc

SEQ ID NO: 105662 - DNA, 80 bp, synthetic construct
  misc_feature 1..80: note = Artificially Synthesized Probe
  source 1..80: mol_type = other DNA
tctcatcttgggacaccagaggggtgccaggcggagtatctggctgggattctggtgtgcgggtctcttcccagcgcagg

SEQ ID NO: 105663 - DNA, 80 bp, synthetic construct
  misc_feature 1..80: note = Artificially Synthesized Probe
  source 1..80: mol_type = other DNA
ttcctccaatcaaatacccagcggaaaaatcagcccttctccaccactatcagacccttaggccccacctcttcactttg

SEQ ID NO: 105664 - DNA, 80 bp, synthetic construct
  misc_feature 1..80: note = Artificially Synthesized Probe
  source 1..80: mol_type = other DNA
gattctcctgcctcagctacccgagtagctgggattacaggcacccgccaccatgccccgctaatttttgtatttttagt

SEQ ID NO: 105665 - DNA, 80 bp, synthetic construct; identical to SEQ ID NO: 36622
  misc_feature 1..80: note = Artificially Synthesized Probe
  source 1..80: mol_type = other DNA

SEQ ID NO: 105666 - DNA, 80 bp, synthetic construct
  misc_feature 1..80: note = Artificially Synthesized Probe
  source 1..80: mol_type = other DNA
tttttagagagacaggtttcaccatgtcgctcaggctggtctcgaactcctgggttcaagcgatccgcccgcctcggcct

SEQ ID NO: 105667 - DNA, 80 bp, synthetic construct
  misc_feature 1..80: note = Artificially Synthesized Probe
  source 1..80: mol_type = other DNA
ccgggtctcaggatctgcgaccagctccactgaggattggaggggtggagtcaggatttgcatccttgtgtgattgggtc

SEQ ID NO: 105668 - DNA, 80 bp, synthetic construct; identical to SEQ ID NO: 36623
  misc_feature 1..80: note = Artificially Synthesized Probe
  source 1..80: mol_type = other DNA

SEQ ID NO: 105669 - DNA, 80 bp, synthetic construct
  misc_feature 1..80: note = Artificially Synthesized Probe
  source 1..80: mol_type = other DNA
ctgtggccagcagcccccactgcacccctgcccccaggtgacacgcttctgagcaggggcccctggggacttcaactgcc

SEQ ID NO: 105670 - DNA, 80 bp, synthetic construct
  misc_feature 1..80: note = Artificially Synthesized Probe
  source 1..80: mol_type = other DNA
aggatctagctaattctaaatcaagcacaaactttatcttcctgtactccctagagagcaccttccgacttcggggctgg

SEQ ID NO: 105671 - DNA, 80 bp, synthetic construct
  misc_feature 1..80: note = Artificially Synthesized Probe
  source 1..80: mol_type = other DNA
cttgcccgtccgagggcaggaagatggggggcgctcccccaggggggctctcgagccacaagcggcccggggcctccacc

SEQ ID NO: 105672 - DNA, 80 bp, synthetic construct
  misc_feature 1..80: note = Artificially Synthesized Probe
  source 1..80: mol_type = other DNA
acccgtttcccaggcgacgacgcgtgctccatccctccccgagttgcaatccccactttccagcgtacaggcagagagcc

SEQ ID NO: 105673 - DNA, 80 bp, synthetic construct
  misc_feature 1..80: note = Artificially Synthesized Probe
  source 1..80: mol_type = other DNA
ctcgtgggtggggggcggggcctggcctcctcccacagcagccacgccccttccccgactcccggcccccagggtctctc

SEQ ID NO: 105674 - DNA, 80 bp, synthetic construct; identical to SEQ ID NO: 36624
  misc_feature 1..80: note = Artificially Synthesized Probe
  source 1..80: mol_type = other DNA

SEQ ID NO: 105675 - DNA, 80 bp, synthetic construct
  misc_feature 1..80: note = Artificially Synthesized Probe
  source 1..80: mol_type = other DNA
agtgcagtggcgcgatctcggctcacctgcaagctccgcctcccgggttgacgccattctcctgtctcagcctcccgagt

SEQ ID NO: 105676 - DNA, 80 bp, synthetic construct
  misc_feature 1..80: note = Artificially Synthesized Probe
  source 1..80: mol_type = other DNA
agtcttatttagtgttagcattctttcggtagtggtctggtgggactacgtttacctagtcctaatttcggacgaggttc

SEQ ID NO: 105677 - DNA, 80 bp, synthetic construct
  misc_feature 1..80: note = Artificially Synthesized Probe
  source 1..80: mol_type = other DNA
cagtccttttataatagaagactcccggctggagttcctggctttgctggtgaatatgtgggctctgtctccaacactca

SEQ ID NO: 105678 - DNA, 80 bp, synthetic construct
  misc_feature 1..80: note = Artificially Synthesized Probe
  source 1..80: mol_type = other DNA
aggtcaggagttcaagaccatcctgaccaacatgatgaaaccctgtttctactgaaaatacaaaaattacccgggcggca

SEQ ID NO: 105679 - DNA, 80 bp, synthetic construct; identical to SEQ ID NO: 36625
  misc_feature 1..80: note = Artificially Synthesized Probe
  source 1..80: mol_type = other DNA

SEQ ID NO: 105680 - DNA, 80 bp, synthetic construct
  misc_feature 1..80: note = Artificially Synthesized Probe
  source 1..80: mol_type = other DNA
tggacagcccgggaactcactgggtctggctctcggctgtccacaccctcttcccccccgaatctccagacccgcaggcc

SEQ ID NO: 105681 - DNA, 80 bp, synthetic construct
  misc_feature 1..80: note = Artificially Synthesized Probe
  source 1..80: mol_type = other DNA
cgggcttcgattggcaggctgttgtggggatggatggaaccaatgaaagggggtgccagaggcagggacagtttggggcc

SEQ ID NO: 105682 - DNA, 80 bp, synthetic construct
  misc_feature 1..80: note = Artificially Synthesized Probe
  source 1..80: mol_type = other DNA
agggagaactcaggaaaagcggacggtgactatgtagagactggtcaagccctttacaggatttgagccaatcaaaaaaa

SEQ ID NO: 105683 - DNA, 80 bp, synthetic construct
  misc_feature 1..80: note = Artificially Synthesized Probe
  source 1..80: mol_type = other DNA
cgacagacccaatcgggaaacgggacagatgccgctcctcggcgcggcaggtcgtgggctggaaggacggcggggattgg

SEQ ID NO: 105684 - DNA, 80 bp, synthetic construct
  misc_feature 1..80: note = Artificially Synthesized Probe
  source 1..80: mol_type = other DNA
agagaagaatatttattatacaaatataaaaatctatacattcttagctgatgatatatacttaatcaaaaagtctttta

SEQ ID NO: 105685 - DNA, 80 bp, synthetic construct
  misc_feature 1..80: note = Artificially Synthesized Probe
  source 1..80: mol_type = other DNA
ttgaaaattggatatccaacaatgtcaggatatctggtggcaactcttccaacaatatctgatttctcacactatccaga

SEQ ID NO: 105686 - DNA, 80 bp, synthetic construct
  misc_feature 1..80: note = Artificially Synthesized Probe
  source 1..80: mol_type = other DNA
ttgggaggctaaggcaggaggattgcttgagcccaggagttcaagaccagcctgagcaacacagcgagaccccatctcta

SEQ ID NO: 105687 - DNA, 80 bp, synthetic construct; identical to SEQ ID NO: 36647
  misc_feature 1..80: note = Artificially Synthesized Probe
  source 1..80: mol_type = other DNA

SEQ ID NO: 105688 - DNA, 80 bp, synthetic construct
  misc_feature 1..80: note = Artificially Synthesized Probe
  source 1..80: mol_type = other DNA
ttgagagctgagtaccccaaaatgaagtgtgatggtggtggagttaaaggaaaatgttcaccagttaataagccttctag

SEQ ID NO: 105689 - DNA, 80 bp, synthetic construct
  misc_feature 1..80: note = Artificially Synthesized Probe
  source 1..80: mol_type = other DNA
cctgggaatcgcgacactgcactccagcctgggcaacagagtgagatgctgtctcaaaaaataaaaaaataaaaattaat

SEQ ID NO: 105690 - DNA, 80 bp, synthetic construct; identical to SEQ ID NO: 36648
  misc_feature 1..80: note = Artificially Synthesized Probe
  source 1..80: mol_type = other DNA

SEQ ID NO: 105691 - DNA, 80 bp, synthetic construct; identical to SEQ ID NO: 36637
  misc_feature 1..80: note = Artificially Synthesized Probe
  source 1..80: mol_type = other DNA

SEQ ID NO: 105692 - DNA, 80 bp, synthetic construct
  misc_feature 1..80: note = Artificially Synthesized Probe
  source 1..80: mol_type = other DNA
aaaaaagggaaggggaaaaaaacaccattggcaaacctcatcgtagtaactgatttgagcaagaatcatcaagggatgct

SEQ ID NO: 105693 - DNA, 80 bp, synthetic construct
  misc_feature 1..80: note = Artificially Synthesized Probe
  source 1..80: mol_type = other DNA
atattaaaccatcagtcgggcatggtgatacatgcttgtagtcctagctacttgggaggctgaggcaggattgcttgagc

SEQ ID NO: 105694 - DNA, 80 bp, synthetic construct
  misc_feature 1..80: note = Artificially Synthesized Probe
  source 1..80: mol_type = other DNA
gatgctgcaaccagtaaggcaaaatttggtgacaaagaaattgtctgcatcatcttaaagtatctgcccacaacacttat

SEQ ID NO: 105695 - DNA, 80 bp, synthetic construct
  misc_feature 1..80: note = Artificially Synthesized Probe
  source 1..80: mol_type = other DNA
gactataagggcaagccaccacatccagctaatttttgtatttttagtagagatggggtttcaccacattggccaggatg

SEQ ID NO: 105696 - DNA, 80 bp, synthetic construct; identical to SEQ ID NO: 36649
  misc_feature 1..80: note = Artificially Synthesized Probe
  source 1..80: mol_type = other DNA

SEQ ID NO: 105697 - DNA, 80 bp, synthetic construct
  misc_feature 1..80: note = Artificially Synthesized Probe
  source 1..80: mol_type = other DNA
agacaagatcttggacctataaatgccattattgagataatcagttcaatttgtagggctctgtggcaatagtggattac

SEQ ID NO: 105698 - DNA, 80 bp, synthetic construct
  misc_feature 1..80: note = Artificially Synthesized Probe
  source 1..80: mol_type = other DNA
tccaggtaaaacatacatgtaatttagacacattgccaggatacatgtgtaaaagttcgtgatctcctaggttccacagg

SEQ ID NO: 105699 - DNA, 80 bp, synthetic construct
  misc_feature 1..80: note = Artificially Synthesized Probe
  source 1..80: mol_type = other DNA
ttaactcccataattatctgtaagaatttaaattgtccgatactttttattcagcaaatgtgcgaaactagtcaagtccc

SEQ ID NO: 105700 - DNA, 80 bp, synthetic construct; identical to SEQ ID NO: 36650
  misc_feature 1..80: note = Artificially Synthesized Probe
  source 1..80: mol_type = other DNA

SEQ ID NO: 105701 - DNA, 80 bp, synthetic construct
  misc_feature 1..80: note = Artificially Synthesized Probe
  source 1..80: mol_type = other DNA
tctttggacatcatctgaaaggtgttttttttttttttttttgagaaggagtctcgctctgtcacccaggatggagtgca

SEQ ID NO: 105702 - DNA, 80 bp, synthetic construct
  misc_feature 1..80: note = Artificially Synthesized Probe
  source 1..80: mol_type = other DNA
actatgtctctaaaaaaaccaagatggagtcagttgtaccagtgaaggacaagaaacttctggaggtcaaactaggggag

SEQ ID NO: 105703 - DNA, 80 bp, synthetic construct
  misc_feature 1..80: note = Artificially Synthesized Probe
  source 1..80: mol_type = other DNA
ttcatctactgcctttcctacaaggagctcaagcacgagcggctatgcaagtaccactgaagaagacatgctctgcactc

SEQ ID NO: 105704 - DNA, 80 bp, synthetic construct
  misc_feature 1..80: note = Artificially Synthesized Probe
  source 1..80: mol_type = other DNA
acaacaaaaataaaataaaataaaaagtgaaaatactgagtatattgcttaacatattgttttttagtaggaaagaacta

SEQ ID NO: 105705 - DNA, 80 bp, synthetic construct; identical to SEQ ID NO: 36651
  misc_feature 1..80: note = Artificially Synthesized Probe
  source 1..80: mol_type = other DNA

SEQ ID NO: 105706 - DNA, 80 bp, synthetic construct
  misc_feature 1..80: note = Artificially Synthesized Probe
  source 1..80: mol_type = other DNA
tgctaggtgagggctttgaattttaccttacacagaaaggctaattaacaaacacatctgagcccaacaaatgtttttac

SEQ ID NO: 105707 - DNA, 80 bp, synthetic construct
  misc_feature 1..80: note = Artificially Synthesized Probe
  source 1..80: mol_type = other DNA
ttaaattaaaggtaattattgcagtacctttctccaccactggagtcgatgacgtaaccagaaatcaagccactggtttg

SEQ ID NO: 105708 - DNA, 80 bp, synthetic construct
  misc_feature 1..80: note = Artificially Synthesized Probe
  source 1..80: mol_type = other DNA
ccaagttatttgccactttttataccttttaacaccatttcgtatctgcttagtgtcaaaaacaggatgaaaacacactc

SEQ ID NO: 105709 - DNA, 80 bp, synthetic construct; identical to SEQ ID NO: 36652
  misc_feature 1..80: note = Artificially Synthesized Probe
  source 1..80: mol_type = other DNA

SEQ ID NO: 105710 - DNA, 80 bp, synthetic construct
  misc_feature 1..80: note = Artificially Synthesized Probe
  source 1..80: mol_type = other DNA
ttggaaagctgggaggtggatcactttagtctgggaggccaaggttgcagtgagctgggatggtgccactgtgctccagc

SEQ ID NO: 105711 - DNA, 80 bp, synthetic construct
  misc_feature 1..80: note = Artificially Synthesized Probe
  source 1..80: mol_type = other DNA
agtggcagggtctcggctcattgcaacctccgcctcccgggttcatgccattctcctgcctcagcctcccgagtagctgg

SEQ ID NO: 105712 - DNA, 80 bp, synthetic construct
  misc_feature 1..80: note = Artificially Synthesized Probe
  source 1..80: mol_type = other DNA
gccaccgcgcccgacaaagattttcaaatctataagaaagttgaaaaaataataaacatccatatacaatgaacacttgt

SEQ ID NO: 105713 - DNA, 80 bp, synthetic construct
  misc_feature 1..80: note = Artificially Synthesized Probe
  source 1..80: mol_type = other DNA
ggccaggctggtcttgaactcctgacctcaggtgatctgcccgcctcaacctcccaaagtgctgggattacaggtgtgag

SEQ ID NO: 105714 - DNA, 80 bp, synthetic construct; identical to SEQ ID NO: 36653
  misc_feature 1..80: note = Artificially Synthesized Probe
  source 1..80: mol_type = other DNA

SEQ ID NO: 105715 - DNA, 80 bp, synthetic construct
  misc_feature 1..80: note = Artificially Synthesized Probe
  source 1..80: mol_type = other DNA
ctacatagtagatgtgtgtatcttattgcatcataacatgaggaacatgttatcaaattattccactactgaagacacca

SEQ ID NO: 105716 - DNA, 80 bp, synthetic construct
  misc_feature 1..80: note = Artificially Synthesized Probe
  source 1..80: mol_type = other DNA
tctaatgtatctttccttctacatttattccatagcttctgtaaaaacataagctttctctacctcttccccccgccccc

SEQ ID NO: 105717 - DNA, 80 bp, synthetic construct
  misc_feature 1..80: note = Artificially Synthesized Probe
  source 1..80: mol_type = other DNA
cctcctcaagccagcatctgtgacctttttatatgacccattagtcttcaagcaattctttgctttttagcaccataaag

SEQ ID NO: 105718 - DNA, 80 bp, synthetic construct
  misc_feature 1..80: note = Artificially Synthesized Probe
  source 1..80: mol_type = other DNA
gatcacaaggtcaggagatagagaccatcctggctaacaaggtgaaaccccgtctctactaaaaatacaaaaaattagcc

SEQ ID NO: 105719 - DNA, 80 bp, synthetic construct; identical to SEQ ID NO: 36654
  misc_feature 1..80: note = Artificially Synthesized Probe
  source 1..80: mol_type = other DNA

SEQ ID NO: 105720 - DNA, 80 bp, synthetic construct
  misc_feature 1..80: note = Artificially Synthesized Probe
  source 1..80: mol_type = other DNA
caaaacctcatctctacaaaaaacacaaaaattagctgggtgtggtggcatgtgcctgtagtccagctacttgggaggct

SEQ ID NO: 105721 - DNA, 80 bp, synthetic construct
  misc_feature 1..80: note = Artificially Synthesized Probe
  source 1..80: mol_type = other DNA
ttatacgtaccttcttttacatattatctcttcttttacaatgaatatcttggttcctaataacaactaacccaactatt

SEQ ID NO: 105722 - DNA, 80 bp, synthetic construct
  misc_feature 1..80: note = Artificially Synthesized Probe
  source 1..80: mol_type = other DNA
cgtcacggccggctaatttttgtctttttagtagagacggggtttcaccatgttggccaggctagtctcgaactcctgac

SEQ ID NO: 105723 - DNA, 80 bp, synthetic construct; identical to SEQ ID NO: 36655
  misc_feature 1..80: note = Artificially Synthesized Probe
  source 1..80: mol_type = other DNA

SEQ ID NO: 105724 - DNA, 80 bp, synthetic construct
  misc_feature 1..80: note = Artificially Synthesized Probe
  source 1..80: mol_type = other DNA
aattaatgaaatagcatggggtgagactagacacagagagctcaattaggagatgatttcaataatccaggcaagagata

SEQ ID NO: 105725 - DNA, 80 bp, synthetic construct
  misc_feature 1..80: note = Artificially Synthesized Probe
  source 1..80: mol_type = other DNA
taatatatccgactacttcaaaaagatgagaactaactaacttccttgcatgggaatacagggccagttgcaatccccaa

SEQ ID NO: 105726 - DNA, 80 bp, synthetic construct
  misc_feature 1..80: note = Artificially Synthesized Probe
  source 1..80: mol_type = other DNA
ttgtcttgcaagatttcgcgtagagtttctgcagaaactaacctgaaggcactgtccccgggtagcaaagggcctggttt

SEQ ID NO: 105727 - DNA, 80 bp, synthetic construct
  misc_feature 1..80: note = Artificially Synthesized Probe
  source 1..80: mol_type = other DNA
cttgcttccacttaggaaatgccttctctgacagatctctaacagcgcctcgcttccctctccagacccgggggcttctg

SEQ ID NO: 105728 - DNA, 80 bp, synthetic construct; identical to SEQ ID NO: 36656
  misc_feature 1..80: note = Artificially Synthesized Probe
  source 1..80: mol_type = other DNA

SEQ ID NO: 105729 - DNA, 80 bp, synthetic construct
  misc_feature 1..80: note = Artificially Synthesized Probe
  source 1..80: mol_type = other DNA
caattgggtgaacagaggtgccaatcccttagaagactagaacagaccatccctccagaatagaattcccttccactcag

SEQ ID NO: 105730 - DNA, 80 bp, synthetic construct; identical to SEQ ID NO: 36638
  misc_feature 1..80: note = Artificially Synthesized Probe
  source 1..80: mol_type = other DNA

SEQ ID NO: 105731 - DNA, 80 bp, synthetic construct; identical to SEQ ID NO: 36636
  misc_feature 1..80: note = Artificially Synthesized Probe
  source 1..80: mol_type = other DNA

SEQ ID NO: 105732 - DNA, 80 bp, synthetic construct
  misc_feature 1..80: note = Artificially Synthesized Probe
  source 1..80: mol_type = other DNA
gaggactgcatagtttccaaataaccaggccacacagaaatcccattttctagtaactcattaaatagcccttgacaaac

SEQ ID NO: 105733 - DNA, 80 bp, synthetic construct
  misc_feature 1..80: note = Artificially Synthesized Probe
  source 1..80: mol_type = other DNA
atcatatactttataaatcgtatacttcttctgaaaatgaagtaattaagcatagcaaagctgaatactaaatgccaatc

SEQ ID NO: 105734 - DNA, 80 bp, synthetic construct; identical to SEQ ID NO: 36639
  misc_feature 1..80: note = Artificially Synthesized Probe
  source 1..80: mol_type = other DNA

SEQ ID NO: 105735 - DNA, 80 bp, synthetic construct
  misc_feature 1..80: note = Artificially Synthesized Probe
  source 1..80: mol_type = other DNA
tttctttacaagcaatagggaagcaaaacaaagcaaaatttaaaaaccccttaacagtctagcaccaacagtccagagca

SEQ ID NO: 105736 - DNA, 80 bp, synthetic construct
  misc_feature 1..80: note = Artificially Synthesized Probe
  source 1..80: mol_type = other DNA
tcctagcttataagggtattagggaggctgccataccctgggagaaaatgtgggacatacgccattatcttctccttctt

SEQ ID NO: 105737 - DNA, 80 bp, synthetic construct
  misc_feature 1..80: note = Artificially Synthesized Probe
  source 1..80: mol_type = other DNA
ggagtctctggaacgaaatgaaagccatcccccatggcctttcttaagagtatttaatcattagaacaaattagaaaaat

SEQ ID NO: 105738 - DNA, 80 bp, synthetic construct
  misc_feature 1..80: note = Artificially Synthesized Probe
  source 1..80: mol_type = other DNA
ggagaccagcctggccaacatggtgaaaccctgtctctactaaaaatactaaaaaattagccaggtgtggcggtgtgtac

SEQ ID NO: 105739 - DNA, 80 bp, synthetic construct; identical to SEQ ID NO: 36640
  misc_feature 1..80: note = Artificially Synthesized Probe
  source 1..80: mol_type = other DNA

SEQ ID NO: 105740 - DNA, 80 bp, synthetic construct
  misc_feature 1..80: note = Artificially Synthesized Probe
  source 1..80: mol_type = other DNA
gtcttgctctgtcacccaggctggagtgcagtgctgcgatctcggctcactgcaacctccacctcccaggttcaagtgat

SEQ ID NO: 105741 - DNA, 80 bp, synthetic construct
  misc_feature 1..80: note = Artificially Synthesized Probe
  source 1..80: mol_type = other DNA
ggagtgcagtggtgctatctcagctcactgcaacctctgcctcctaggttcaagtgattctcctgccttagcctcctgag

SEQ ID NO: 105742 - DNA, 80 bp, synthetic construct
  misc_feature 1..80: note = Artificially Synthesized Probe
  source 1..80: mol_type = other DNA
atcatttggggtgatatcacagaagaaccgcataataacctcagccttttggttcttggatgcaatccaagaacaattat

SEQ ID NO: 105743 - DNA, 80 bp, synthetic construct
  misc_feature 1..80: note = Artificially Synthesized Probe
  source 1..80: mol_type = other DNA
gagccaccacgcccgacctaaaacattttaaaaagcaaatgaatcaaaataaaattttaaatggcaagctatcaagttta

SEQ ID NO: 105744 - DNA, 80 bp, synthetic construct; identical to SEQ ID NO: 36641
  misc_feature 1..80: note = Artificially Synthesized Probe
  source 1..80: mol_type = other DNA

SEQ ID NO: 105745 - DNA, 80 bp, synthetic construct
  misc_feature 1..80: note = Artificially Synthesized Probe
  source 1..80: mol_type = other DNA
aagtttaaatataacacaagtattaacaaacagtttcttaacagttataattttctgtgtgaaaacagaagttagctgag

SEQ ID NO: 105746 - DNA, 80 bp, synthetic construct
  misc_feature 1..80: note = Artificially Synthesized Probe
  source 1..80: mol_type = other DNA
gctcaggagtttgagaccagcctgggcaacacggtgaaaacttctctctaccaaaaaaatacaaaaaaattagctaggta

SEQ ID NO: 105747 - DNA, 80 bp, synthetic construct; identical to SEQ ID NO: 36642
  misc_feature 1..80: note = Artificially Synthesized Probe
  source 1..80: mol_type = other DNA

SEQ ID NO: 105748 - DNA, 80 bp, synthetic construct
  misc_feature 1..80: note = Artificially Synthesized Probe
  source 1..80: mol_type = other DNA
ggctagaatgctccactcactgcctcactgcaacccccacctctgggctcaagccatcctcccacttcagcctcctaagt

SEQ ID NO: 105749 - DNA, 80 bp, synthetic construct
  misc_feature 1..80: note = Artificially Synthesized Probe
  source 1..80: mol_type = other DNA
taggcgtgagccattcagcccagccttctcttctcattcattagtccatccaacaaacattttaatgcctctgataccag

SEQ ID NO: 105750 - DNA, 80 bp, synthetic construct
  misc_feature 1..80: note = Artificially Synthesized Probe
  source 1..80: mol_type = other DNA
ttttcagcaactttaaggtggtcagaaaaggttctctccctatggtgacacttgagcaaacactcgaaagaaggtggggg

SEQ ID NO: 105751 - DNA, 80 bp, synthetic construct; identical to SEQ ID NO: 36643
  misc_feature 1..80: note = Artificially Synthesized Probe
  source 1..80: mol_type = other DNA

SEQ ID NO: 105752 - DNA, 80 bp, synthetic construct
  misc_feature 1..80: note = Artificially Synthesized Probe
  source 1..80: mol_type = other DNA
acggctgaccttctgtatgcttaccaagtcacactatctcattactgtttatttcctttgtaggactccatcagaaactt

SEQ ID NO: 105753 - DNA, 80 bp, synthetic construct
  misc_feature 1..80: note = Artificially Synthesized Probe
  source 1..80: mol_type = other DNA
gaagtggagtgtaagaaaaagaaaggattcctttttttgttagctacaaaccatttataaaccccattccccagaataat

SEQ ID NO: 105754 - DNA, 80 bp, synthetic construct
  misc_feature 1..80: note = Artificially Synthesized Probe
  source 1..80: mol_type = other DNA
agcttccttttatgttcaaagggtatatgactattccccactcgtgccatttaaacccccactcttccacatttaaacta

SEQ ID NO: 105755 - DNA, 80 bp, synthetic construct
  misc_feature 1..80: note = Artificially Synthesized Probe
  source 1..80: mol_type = other DNA
ttgggctcttgatcccatcctgacccctccggtttccttcatcttgccccattaatcatttcttttctctcctataactt

SEQ ID NO: 105756 - DNA, 80 bp, synthetic construct; identical to SEQ ID NO: 36644
  misc_feature 1..80: note = Artificially Synthesized Probe
  source 1..80: mol_type = other DNA

SEQ ID NO: 105757 - DNA, 80 bp, synthetic construct
  misc_feature 1..80: note = Artificially Synthesized Probe
  source 1..80: mol_type = other DNA
aaaactgaaaaatacttagactacatgcactaaatttattatttagagtttatgttagaaaccgagcacactaacattaa

SEQ ID NO: 105758 - DNA, 80 bp, synthetic construct
  misc_feature 1..80: note = Artificially Synthesized Probe
  source 1..80: mol_type = other DNA
catttacagagagaacacaaggaaccacattttttcgtccatctcggcccttcacagaaaaacagaagaaaaataatcat

SEQ ID NO: 105759 - DNA, 80 bp, synthetic construct
  misc_feature 1..80: note = Artificially Synthesized Probe
  source 1..80: mol_type = other DNA
attttagacttacacaatcagaatacaaaagtaaagtttcattttacaaagcacccactctgtaccaggcctgtggtagg

SEQ ID NO: 105760 - DNA, 80 bp, synthetic construct; identical to SEQ ID NO: 36645
  misc_feature 1..80: note = Artificially Synthesized Probe
  source 1..80: mol_type = other DNA

SEQ ID NO: 105761 - DNA, 80 bp, synthetic construct
  misc_feature 1..80: note = Artificially Synthesized Probe
  source 1..80: mol_type = other DNA
tacaggcacacaccaccatgtctggctaatttttttctatttttagtagggacggggtttcaccatgttggccaggttgt

SEQ ID NO: 105762 - DNA, 80 bp, synthetic construct
  misc_feature 1..80: note = Artificially Synthesized Probe
  source 1..80: mol_type = other DNA
atggtgtgctttagggaaaggggtttggagtataattttctgaaacgtaaagttattttcataaaaaagaaatctttcaa

SEQ ID NO: 105763 - DNA, 80 bp, synthetic construct
  misc_feature 1..80: note = Artificially Synthesized Probe
  source 1..80: mol_type = other DNA
agcctggccaacatagtgaaaccccatctctaccaaaactacaaaaaattagctgggcgtggtggcaggcgcatgtaatc

SEQ ID NO: 105764 - DNA, 80 bp, synthetic construct
  misc_feature 1..80: note = Artificially Synthesized Probe
  source 1..80: mol_type = other DNA
cttaagttttggataaaaacagttccactttcatctttctttttttgtaaatcattgttcacctggatattcatgtaatt

SEQ ID NO: 105765 - DNA, 80 bp, synthetic construct; identical to SEQ ID NO: 36646
  misc_feature 1..80: note = Artificially Synthesized Probe
  source 1..80: mol_type = other DNA

SEQ ID NO: 105766 - DNA, 80 bp, synthetic construct
  misc_feature 1..80: note = Artificially Synthesized Probe
  source 1..80: mol_type = other DNA
cctggccaacatggtaaaaccccacctctactaaaaagacaaaaattagctgggcatggtggtgcatgcttgtaatccca

SEQ ID NO: 105767 - DNA, 80 bp, synthetic construct
  misc_feature 1..80: note = Artificially Synthesized Probe
  source 1..80: mol_type = other DNA
actgaaagattctgtggtgcgctttgaatcaaacaaaatctaaatctgaatctttatgaagaatgctttaggctgggcac

SEQ ID NO: 105768 - DNA, 80 bp, synthetic construct
  misc_feature 1..80: note = Artificially Synthesized Probe
  source 1..80: mol_type = other DNA
tgcagacgccaccgccgaggaaaaccgtgtactattagccatggtcaaccccaccgtgttcttcgacattgccgtcgacg

SEQ ID NO: 105769 - DNA, 80 bp, synthetic construct
  misc_feature 1..80: note = Artificially Synthesized Probe
  source 1..80: mol_type = other DNA
tggagtgcaatgatgcaatctcggctcaccgcaaccctccgcctcccaggttcaagcgattctcctgcctcagcctcccg

SEQ ID NO: 105770 - DNA, 80 bp, synthetic construct
  misc_feature 1..80: note = Artificially Synthesized Probe
  source 1..80: mol_type = other DNA
gcccatgattccaatttttgtgttcatcaatctctagcacctgtgtccctaaaaacatattgagaaaaagtgagaagcaa

SEQ ID NO: 105771 - DNA, 80 bp, synthetic construct
  misc_feature 1..80: note = Artificially Synthesized Probe
  source 1..80: mol_type = other DNA
gaactatttctgggaaagtcagccaatgcctttctccacctcagaaaatctgtaaaatctataatatctggttcacagtc

SEQ ID NO: 105772 - DNA, 80 bp, synthetic construct
  misc_feature 1..80: note = Artificially Synthesized Probe
  source 1..80: mol_type = other DNA
catggtgaaattccatctctactcaaaatacaaaattagccaggcatggtggtgcatgtctgtaatcccagctactcagg

SEQ ID NO: 105773 - DNA, 80 bp, synthetic construct; identical to SEQ ID NO: 36668
  misc_feature 1..80: note = Artificially Synthesized Probe
  source 1..80: mol_type = other DNA

SEQ ID NO: 105774 - DNA, 80 bp, synthetic construct
  misc_feature 1..80: note = Artificially Synthesized Probe
  source 1..80: mol_type = other DNA
tattcctttaaatcacatctcaaaaggccaccaatggctagtttgggatcttattccgaaaatagattgatcctcatgca

SEQ ID NO: 105775 - DNA, 80 bp, synthetic construct
  misc_feature 1..80: note = Artificially Synthesized Probe
  source 1..80: mol_type = other DNA
gtttcactatgttgatcaggctgacctcgaactcctgacctcaggtgatctgcccacctcggcctcccaaagtgctggga

SEQ ID NO: 105776 - DNA, 80 bp, synthetic construct
  misc_feature 1..80: note = Artificially Synthesized Probe
  source 1..80: mol_type = other DNA
ttataactgttcctcctctctccaccattcccaggatctaatttagttttacacattacatttgactgttaggtgtcttt

SEQ ID NO: 105777 - DNA, 80 bp, synthetic construct
  misc_feature 1..80: note = Artificially Synthesized Probe
  source 1..80: mol_type = other DNA
cactcaggctggagtgcagtggccttgatcttggctcactgcaaccaccccctcctggattcaagtgattctcccacctc

SEQ ID NO: 105778 - DNA, 80 bp, synthetic construct; identical to SEQ ID NO: 36669
  misc_feature 1..80: note = Artificially Synthesized Probe
  source 1..80: mol_type = other DNA

SEQ ID NO: 105779 - DNA, 80 bp, synthetic construct
  misc_feature 1..80: note = Artificially Synthesized Probe
  source 1..80: mol_type = other DNA
agtgcaatggcacgaacatcattcactaacaccttgacctcctgggctcaagtgatcctcctgcctcagcctcccaagta

SEQ ID NO: 105780 - DNA, 80 bp, synthetic construct
  misc_feature 1..80: note = Artificially Synthesized Probe
  source 1..80: mol_type = other DNA
ggcctggctggacttttacagtgaatcatacactgtgtggtctttgctccttcccactttgtttgtttgtttgtttagag

SEQ ID NO: 105781 - DNA, 80 bp, synthetic construct
  misc_feature 1..80: note = Artificially Synthesized Probe
  source 1..80: mol_type = other DNA
caattttaggaaatataaatattcatcttaggggactggctaaatctcagtctcttgagtagctgggattacaggtgcat

SEQ ID NO: 105782 - DNA, 80 bp, synthetic construct; identical to SEQ ID NO: 36670
  misc_feature 1..80: note = Artificially Synthesized Probe
  source 1..80: mol_type = other DNA

SEQ ID NO: 105783 - DNA, 80 bp, synthetic construct
  misc_feature 1..80: note = Artificially Synthesized Probe
  source 1..80: mol_type = other DNA
ctcactgcaacctccgcctcccaggttcaagtaattctccttccgcagcctcccaagtagctgggattagaggctgatgc

SEQ ID NO: 105784 - DNA, 80 bp, synthetic construct
  misc_feature 1..80: note = Artificially Synthesized Probe
  source 1..80: mol_type = other DNA
ttttaaaagttcaggacaggctgggcgcagtggctcacgcctgtaatcccagcactttgggaggctgaggcaggtggatc

SEQ ID NO: 105785 - DNA, 80 bp, synthetic construct
  misc_feature 1..80: note = Artificially Synthesized Probe
  source 1..80: mol_type = other DNA
taatgttgggcatcaggttacccaaagagcttcagggaaatgagaaaggacttgcaggtcttgatgagaatggaggggta

SEQ ID NO: 105786 - DNA, 80 bp, synthetic construct
  misc_feature 1..80: note = Artificially Synthesized Probe
  source 1..80: mol_type = other DNA
gcactccagcctggagacagagcgagactgtgtatcaaagaaaaaaaaaaagttcaggacagctgggcacggtggctcac

SEQ ID NO: 105787 - DNA, 80 bp, synthetic construct; identical to SEQ ID NO: 36671
  misc_feature 1..80: note = Artificially Synthesized Probe
  source 1..80: mol_type = other DNA

SEQ ID NO: 105788 - DNA, 80 bp, synthetic construct
  misc_feature 1..80: note = Artificially Synthesized Probe
  source 1..80: mol_type = other DNA
ggtgaaaccccatctctactaaaaaataaaaaattagccgggcgtggtggcacatgcctgtaatcccagctactcaggag

SEQ ID NO: 105789 - DNA, 80 bp, synthetic construct
  misc_feature 1..80: note = Artificially Synthesized Probe
  source 1..80: mol_type = other DNA
gactttgtggaatgtccattattctggagctaattgtttcctgtttttctcttttagctcctgtattttctgtaaattgg

SEQ ID NO: 105790 - DNA, 80 bp, synthetic construct
  misc_feature 1..80: note = Artificially Synthesized Probe
  source 1..80: mol_type = other DNA
ggtaatgcctgccagactgctccactggaaaggtatcttttcccttttctgaaaattaggtaatcttgaggggtgatatt

SEQ ID NO: 105791 - DNA, 80 bp, synthetic construct; identical to SEQ ID NO: 36672
  misc_feature 1..80: note = Artificially Synthesized Probe
  source 1..80: mol_type = other DNA

SEQ ID NO: 105792 - DNA, 80 bp, synthetic construct
  misc_feature 1..80: note = Artificially Synthesized Probe
  source 1..80: mol_type = other DNA
cctcaggcgattctcctatctcagcctcctggtagctggaactacaggcatgtgccacccaccacacctggctaatatta

SEQ ID NO: 105793 - DNA, 80 bp, synthetic construct
  misc_feature 1..80: note = Artificially Synthesized Probe
  source 1..80: mol_type = other DNA
actagtttttgtatttttagtagaggcagggtttcaccatgtgggccaggctggtctcaaagtcctgaccgtaagtgatc

SEQ ID NO: 105794 - DNA, 80 bp, synthetic construct
  misc_feature 1..80: note = Artificially Synthesized Probe
  source 1..80: mol_type = other DNA
aaagtgctaggactacaggcatgagccaccgttcttcttctttttttttttttttttttttttttgagacagagtctcac

SEQ ID NO: 105795 - DNA, 80 bp, synthetic construct; identical to SEQ ID NO: 36673
  misc_feature 1..80: note = Artificially Synthesized Probe
  source 1..80: mol_type = other DNA

SEQ ID NO: 105796 - DNA, 80 bp, synthetic construct
  misc_feature 1..80: note = Artificially Synthesized Probe
  source 1..80: mol_type = other DNA
tagctgggattacaggcgcccaccaccacgcccggctaattttttgtattttttagtagagacggggtttcgccatgttg

SEQ ID NO: 105797 - DNA, 80 bp, synthetic construct
  misc_feature 1..80: note = Artificially Synthesized Probe
  source 1..80: mol_type = other DNA
cgggcggatcacgaagtcaggagattgagaccgtcctggccaacatggtgaaaccccacctctattaaaaatacaaaaat

SEQ ID NO: 105798 - DNA, 80 bp, synthetic construct
  misc_feature 1..80: note = Artificially Synthesized Probe
  source 1..80: mol_type = other DNA
gaaatctggagactactgcatcatccaggagtgaggaaaggggcttgggccaggatagtaatgtcagtggtgaaaagtaa

SEQ ID NO: 105799 - DNA, 80 bp, synthetic construct
  misc_feature 1..80: note = Artificially Synthesized Probe
  source 1..80: mol_type = other DNA
caacagagcaagactgtctcaaaaaaaatacggcagggcgcagtgcttcacgcctgtaatcccagcactttgggaggcca

SEQ ID NO: 105800 - DNA, 80 bp, synthetic construct
  misc_feature 1..80: note = Artificially Synthesized Probe
  source 1..80: mol_type = other DNA
gggaggtggaggttgcagtgagccaagatcgcgccattgcactccagcctaggcaacaagagcgaaactccatctcaaaa

SEQ ID NO: 105801 - DNA, 80 bp, synthetic construct; identical to SEQ ID NO: 36674
  misc_feature 1..80: note = Artificially Synthesized Probe
  source 1..80: mol_type = other DNA

SEQ ID NO: 105802 - DNA, 80 bp, synthetic construct
  misc_feature 1..80: note = Artificially Synthesized Probe
  source 1..80: mol_type = other DNA
tgagattacagatgcccgccaccatgcccagctaatttttgtaattttagtagagacggggtttcaccatgttggccagg

SEQ ID NO: 105803 - DNA, 80 bp, synthetic construct
  misc_feature 1..80: note = Artificially Synthesized Probe
  source 1..80: mol_type = other DNA
ttcttacaacatttttaaagatcagtaaggtctaactagacaataaaggacaaaggaaagggaaatccctgatgatgaaa

SEQ ID NO: 105804 - DNA, 80 bp, synthetic construct
  misc_feature 1..80: note = Artificially Synthesized Probe
  source 1..80: mol_type = other DNA
gtagctgggattacaggcatgcgccaccacacccagctaattttgtatttttagtagagacggggtttctccatgttggt

SEQ ID NO: 105805 - DNA, 80 bp, synthetic construct; identical to SEQ ID NO: 36675
  misc_feature 1..80: note = Artificially Synthesized Probe
  source 1..80: mol_type = other DNA

SEQ ID NO: 105806 - DNA, 80 bp, synthetic construct
  misc_feature 1..80: note = Artificially Synthesized Probe
  source 1..80: mol_type = other DNA
tctttcagtatctcaggtgacaccagctgacttccagaagtgatgaacaactcaacaaaattccaaacaatgaaggtgaa

SEQ ID NO: 105807 - DNA, 80 bp, synthetic construct
  misc_feature 1..80: note = Artificially Synthesized Probe
  source 1..80: mol_type = other DNA
aataaagttcattcttctctctgattacacagcagtttacaggcctggagaatgtcagggatgttaaaacttttaacaag

SEQ ID NO: 105808 - DNA, 80 bp, synthetic construct
  misc_feature 1..80: note = Artificially Synthesized Probe
  source 1..80: mol_type = other DNA
agagttctagacttaggcaatgataaatgagttattcatgtacatgaacatctggctggacatttcagtcatgtggacag

SEQ ID NO: 105809 - DNA, 80 bp, synthetic construct; identical to SEQ ID NO: 36658
  misc_feature 1..80: note = Artificially Synthesized Probe
  source 1..80: mol_type = other DNA

SEQ ID NO: 105810 - DNA, 80 bp, synthetic construct
  misc_feature 1..80: note = Artificially Synthesized Probe
  source 1..80: mol_type = other DNA
atgcctgtaatctcagcagtttgggaggccaaggtgggaggatcacttgagcctaggagttcgagaccagcctgggaaac

SEQ ID NO: 105811 - DNA, 80 bp, synthetic construct; identical to SEQ ID NO: 36676
  misc_feature 1..80: note = Artificially Synthesized Probe
  source 1..80: mol_type = other DNA

SEQ ID NO: 105812 - DNA, 80 bp, synthetic construct
  misc_feature 1..80: note = Artificially Synthesized Probe
  source 1..80: mol_type = other DNA
tgtaatgcaggtaaaaataagtcctctctagccacagtcattgagcctctacttggagacacccactgtgaaacatttct

SEQ ID NO: 105813 - DNA, 80 bp, synthetic construct
  misc_feature 1..80: note = Artificially Synthesized Probe
  source 1..80: mol_type = other DNA
agatcgtgccactgcactccagcccaggcgacagagcgagactccgcctcaaaaaaaaaaaaaaaaaaaaagacagacgt

SEQ ID NO: 105814 - DNA, 80 bp, synthetic construct
  misc_feature 1..80: note = Artificially Synthesized Probe
  source 1..80: mol_type = other DNA
atgtatctttatgcttgcatgtgactataatatccttgggaggacagagaagaaatgtttcacagtgggtgtctccaagt

SEQ ID NO: 105815 - DNA, 80 bp, synthetic construct; identical to SEQ ID NO: 36677
  misc_feature 1..80: note = Artificially Synthesized Probe
  source 1..80: mol_type = other DNA

SEQ ID NO: 105816 - DNA, 80 bp, synthetic construct
  misc_feature 1..80: note = Artificially Synthesized Probe
  source 1..80: mol_type = other DNA
ttatttttatttttatttttttcgagatggagttttgccctgtcgcccaggctggagtgcagtggcgcaatctttgctca

SEQ ID NO: 105817 - DNA, 80 bp, synthetic construct
  misc_feature 1..80: note = Artificially Synthesized Probe
  source 1..80: mol_type = other DNA
actgcaacctgcgcctcctgggttcaagtgattctcctgcctcagcctcctgagtagctgggattacaggtgcccgccac

SEQ ID NO: 105818 - DNA, 80 bp, synthetic construct
  misc_feature 1..80: note = Artificially Synthesized Probe
  source 1..80: mol_type = other DNA
tttattttttaccccactactaggtaaggggcctggataccaagaagtgactgctcatctaatccataaagctatgttaa

SEQ ID NO: 105819 - DNA, 80 bp, synthetic construct; identical to SEQ ID NO: 36678
  misc_feature 1..80: note = Artificially Synthesized Probe
  source 1..80: mol_type = other DNA

SEQ ID NO: 105820 - DNA, 80 bp, synthetic construct
  misc_feature 1..80: note = Artificially Synthesized Probe
  source 1..80: mol_type = other DNA
ggaggatcacttgaggtcaggagttcaagaccagcctggccaacatggtgaaaccccatctccactaaaaatacaaaatt

SEQ ID NO: 105821 - DNA, 80 bp, synthetic construct
  misc_feature 1..80: note = Artificially Synthesized Probe
  source 1..80: mol_type = other DNA
aaaaagaaagaaaaagatcaggcgaggtggctcacccctgtaatcccagcactttgggaggctgaggcgggaggatcacc

SEQ ID NO: 105822 - DNA, 80 bp, synthetic construct
  misc_feature 1..80: note = Artificially Synthesized Probe
  source 1..80: mol_type = other DNA
gagccaagatcaagccattgcactccagcctgggcaacaagagactctgtctcaaaaaaaaaaaaaaaattagtcaggtg

SEQ ID NO: 105823 - DNA, 80 bp, synthetic construct
  misc_feature 1..80: note = Artificially Synthesized Probe
  source 1..80: mol_type = other DNA
ccactctttttaaatctgcttttcatagaaaaaacttttttcatatttatttcataatagatttacataattgctaactg

SEQ ID NO: 105824 - DNA, 80 bp, synthetic construct; identical to SEQ ID NO: 36679
  misc_feature 1..80: note = Artificially Synthesized Probe
  source 1..80: mol_type = other DNA

SEQ ID NO: 105825 - DNA, 80 bp, synthetic construct
  misc_feature 1..80: note = Artificially Synthesized Probe
  source 1..80: mol_type = other DNA
tgaggccaggagtttgagaccagcctggccaacgtggtgaaaccctgtctctactaaaaattcaaaaattagctgggcgt

SEQ ID NO: 105826 - DNA, 80 bp, synthetic construct
  misc_feature 1..80: note = Artificially Synthesized Probe
  source 1..80: mol_type = other DNA
ggctcacacatgtaatcctagtactttgggaggccgaggtcaggagtttgagaccagcttggccaacatagtgaaacccc

SEQ ID NO: 105827 - DNA, 80 bp, synthetic construct
  misc_feature 1..80: note = Artificially Synthesized Probe
  source 1..80: mol_type = other DNA
aactccgtctcaaaaacaaacaaacaaacccgcccaccctgcccgcaaaaaaaaaaaaaaaaaaaaaaaaaaagactgtt

SEQ ID NO: 105828 - DNA, 80 bp, synthetic construct
  misc_feature 1..80: note = Artificially Synthesized Probe
  source 1..80: mol_type = other DNA
gggggtggtgatagacatttaagaagccatatatcttttcagaagtaggtgtgatgtactaaaagtttgagacactttct

SEQ ID NO: 105829 - DNA, 80 bp, synthetic construct
  misc_feature 1..80: note = Artificially Synthesized Probe
  source 1..80: mol_type = other DNA
ttctaaccctagctacaaccagtcaacccccagcactagctgaagctgcagtgggaggagacatccagaggtgggagatg

SEQ ID NO: 105830 - DNA, 80 bp, synthetic construct; identical to SEQ ID NO: 36680
  misc_feature 1..80: note = Artificially Synthesized Probe
  source 1..80: mol_type = other DNA

SEQ ID NO: 105831 - DNA, 80 bp, synthetic construct
  misc_feature 1..80: note = Artificially Synthesized Probe
  source 1..80: mol_type = other DNA
tttgttttatgtacaacattttaaaaaaatattgtataagccgggcgtggtggctcaggcctgtaatcccagctctttgg

SEQ ID NO: 105832 - DNA, 80 bp, synthetic construct
  misc_feature 1..80: note = Artificially Synthesized Probe
  source 1..80: mol_type = other DNA
agaatggcgtgaacccgggaggcggaccttgcagtgagccgagatcgtgctactgcactccagcctgggcgacagagcaa

SEQ ID NO: 105833 - DNA, 80 bp, synthetic construct; identical to SEQ ID NO: 36681
  misc_feature 1..80: note = Artificially Synthesized Probe
  source 1..80: mol_type = other DNA

SEQ ID NO: 105834 - DNA, 80 bp, synthetic construct
  misc_feature 1..80: note = Artificially Synthesized Probe
  source 1..80: mol_type = other DNA
accaccgtgcccagctaatttttgtatttttaggagagatggggttttgctatgttggccaggctggtctcgaactcctg

SEQ ID NO: 105835 - DNA, 80 bp, synthetic construct
  misc_feature 1..80: note = Artificially Synthesized Probe
  source 1..80: mol_type = other DNA
atttcctgacgaggggccattttgggaggtccgcgagtcgcggggaggaggccgggacggcggcggacaaaggcaggcgg

SEQ ID NO: 105836 - DNA, 80 bp, synthetic construct
  misc_feature 1..80: note = Artificially Synthesized Probe
  source 1..80: mol_type = other DNA
tgtttttgtttttgtttttgagacagggtctcattcttttgcccaggctggagtgcagtggtgtgatcatgactcactgt

SEQ ID NO: 105837 - DNA, 80 bp, synthetic construct
  misc_feature 1..80: note = Artificially Synthesized Probe
  source 1..80: mol_type = other DNA
tgtactttttttaaaaggtgtttccattaaagtcccgtgtgtcctgggacacataaacttttttttttttcgaaatggag

SEQ ID NO: 105838 - DNA, 80 bp, synthetic construct
  misc_feature 1..80: note = Artificially Synthesized Probe
  source 1..80: mol_type = other DNA
agatggggtttcaccatgttagccaggatggtctcgatctcctgaccttgtgatctgcccgccttggcctcctaaagtgc

SEQ ID NO: 105839 - DNA, 80 bp, synthetic construct; identical to SEQ ID NO: 36682
  misc_feature 1..80: note = Artificially Synthesized Probe
  source 1..80: mol_type = other DNA

SEQ ID NO: 105840 - DNA, 80 bp, synthetic construct; identical to SEQ ID NO: 36659
  misc_feature 1..80: note = Artificially Synthesized Probe
  source 1..80: mol_type = other DNA

SEQ ID NO: 105841 - DNA, 80 bp, synthetic construct
  misc_feature 1..80: note = Artificially Synthesized Probe
  source 1..80: mol_type = other DNA
gcacatgccaccacgcttgactaatatttgattttttgtagagacagggcctcactatgttgcctaggctggtcttgaac

SEQ ID NO: 105842 - DNA, 80 bp, synthetic construct
  misc_feature 1..80: note = Artificially Synthesized Probe
  source 1..80: mol_type = other DNA
tagtacgattcaccccgacgcttttttcctttcttactctggtgataattttgtgatctttttttccagtgtgtctctat

SEQ ID NO: 105843 - DNA, 80 bp, synthetic construct; identical to SEQ ID NO: 36683
  misc_feature 1..80: note = Artificially Synthesized Probe
  source 1..80: mol_type = other DNA

SEQ ID NO: 105844 - DNA, 80 bp, synthetic construct
  misc_feature 1..80: note = Artificially Synthesized Probe
  source 1..80: mol_type = other DNA
gtagtcccagctacttgagaggctgagacacgagaatcacttgaacctgggaggtggaggttgcagtgagcctagattgc

SEQ ID NO: 105845 - DNA, 80 bp, synthetic construct
  misc_feature 1..80: note = Artificially Synthesized Probe
  source 1..80: mol_type = other DNA
ccggagttcaagaccagcctgaccaatatggtgaaaccccatctctactaaaaatacaaaaattagccgggcgtggtggc

SEQ ID NO: 105846 - DNA, 80 bp, synthetic construct
  misc_feature 1..80: note = Artificially Synthesized Probe
  source 1..80: mol_type = other DNA
atgtgattgctcatctctggactgtactggagaaaacaggaagttttgttttcttttcttcctgacgaaggaaggatgaa

SEQ ID NO: 105847 - DNA, 80 bp, synthetic construct; identical to SEQ ID NO: 36684
  misc_feature 1..80: note = Artificially Synthesized Probe
  source 1..80: mol_type = other DNA

SEQ ID NO: 105848 - DNA, 80 bp, synthetic construct
  misc_feature 1..80: note = Artificially Synthesized Probe
  source 1..80: mol_type = other DNA
cctgctactggacttgtctttgtactctcaaagcagtgtgaggagattcatcaaccggtggtgtggacatgtgaacagcg

SEQ ID NO: 105849 - DNA, 80 bp, synthetic construct
  misc_feature 1..80: note = Artificially Synthesized Probe
  source 1..80: mol_type = other DNA
tgccacagttctcattctcttctggaatgcctgcctgtctgtgctccctccctctctcaatctctccttccctccacttc

SEQ ID NO: 105850 - DNA, 80 bp, synthetic construct
  misc_feature 1..80: note = Artificially Synthesized Probe
  source 1..80: mol_type = other DNA
gtggaaatctccgcctttaaactctgaggtgtttatatttgggtactttcgaacacttaaaaacattttttttcccttag

SEQ ID NO: 105851 - DNA, 80 bp, synthetic construct
  misc_feature 1..80: note = Artificially Synthesized Probe
  source 1..80: mol_type = other DNA
tctgagcactggagagaaaggatttggttataagggttcctgctttcacagaattattccagggtttatgtgtcaggtac

SEQ ID NO: 105852 - DNA, 80 bp, synthetic construct; identical to SEQ ID NO: 36685
  misc_feature 1..80: note = Artificially Synthesized Probe
  source 1..80: mol_type = other DNA

SEQ ID NO: 105853 - DNA, 80 bp, synthetic construct
  misc_feature 1..80: note = Artificially Synthesized Probe
  source 1..80: mol_type = other DNA
aggagaatcgcccaaacctgggaaacagagattgcagtgagctggatcgcgccactgctctccagcctgggcaacaagag

SEQ ID NO: 105854 - DNA, 80 bp, synthetic construct
  misc_feature 1..80: note = Artificially Synthesized Probe
  source 1..80: mol_type = other DNA
gtggcagccagacagtagcagtttgtgtgcaaagcccctgcagtggcatatggaagactttcaatacatcaggaccagag

SEQ ID NO: 105855 - DNA, 80 bp, synthetic construct
  misc_feature 1..80: note = Artificially Synthesized Probe
  source 1..80: mol_type = other DNA
tttggcacacttcatggttatgttgtcagaagtgacatttttcctatatgttgacagggtggtgacttcacacgccataa

SEQ ID NO: 105856 - DNA, 80 bp, synthetic construct
  misc_feature 1..80: note = Artificially Synthesized Probe
  source 1..80: mol_type = other DNA
aacatggcacactaaccacctgactaaatgaaaagttgccctggggggaacggaacaaacactacttttcttcaaccttt

SEQ ID NO: 105857 - DNA, 80 bp, synthetic construct
  misc_feature 1..80: note = Artificially Synthesized Probe
  source 1..80: mol_type = other DNA
gcttccacagactttttcatccctaagatactagaagaagagcatacataaacgacaaatatagccaatgtgatacagaa

SEQ ID NO: 105858 - DNA, 80 bp, synthetic construct; identical to SEQ ID NO: 36660
  misc_feature 1..80: note = Artificially Synthesized Probe
  source 1..80: mol_type = other DNA

SEQ ID NO: 105859 - DNA, 80 bp, synthetic construct
  misc_feature 1..80: note = Artificially Synthesized Probe
  source 1..80: mol_type = other DNA
ccaggttggagtgcagtggtgccatctcagctcactgcaacctcctcccgggttcaagcaattcttctgcctcagcctct

SEQ ID NO: 105860 - DNA, 80 bp, synthetic construct
  misc_feature 1..80: note = Artificially Synthesized Probe
  source 1..80: mol_type = other DNA
ccactgtgcccacccaattaagtgctgcttttatgttactattaataacatgcggttggttgggttttttgtttctttgg

SEQ ID NO: 105861 - DNA, 80 bp, synthetic construct
  misc_feature 1..80: note = Artificially Synthesized Probe
  source 1..80: mol_type = other DNA
ctcctgcctcagcctcccgagtagctgggactataggcacacgccaccatgcccggctaattttttgtatttttagtaga

SEQ ID NO: 105862 - DNA, 80 bp, synthetic construct; identical to SEQ ID NO: 36661
  misc_feature 1..80: note = Artificially Synthesized Probe
  source 1..80: mol_type = other DNA

SEQ ID NO: 105863 - DNA, 80 bp, synthetic construct
  misc_feature 1..80: note = Artificially Synthesized Probe
  source 1..80: mol_type = other DNA
tgtggacaactcgaataagtttgacttgtgttttatcttaaccaccagatcattccttctgtagctcaggagagcacccc

SEQ ID NO: 105864 - DNA, 80 bp, synthetic construct
  misc_feature 1..80: note = Artificially Synthesized Probe
  source 1..80: mol_type = other DNA
ggagccagaagcacgctcgcgggggcttgcgaccgccttcctgggaagctgtcccctggcaggcatgggtgctttacatc

SEQ ID NO: 105865 - DNA, 80 bp, synthetic construct
  misc_feature 1..80: note = Artificially Synthesized Probe
  source 1..80: mol_type = other DNA
taagagtgttgatgtaggctttattttaagcagtaatgggttacttctgaaacatcacttgtttgcttaattctacacag

SEQ ID NO: 105866 - DNA, 80 bp, synthetic construct
  misc_feature 1..80: note = Artificially Synthesized Probe
  source 1..80: mol_type = other DNA
agaagaccacctgagggtaggagtcaagatcagcctgggcaacatagtgagacgctgtctctacaaaaaataattagcct

SEQ ID NO: 105867 - DNA, 80 bp, synthetic construct; identical to SEQ ID NO: 36662
  misc_feature 1..80: note = Artificially Synthesized Probe
  source 1..80: mol_type = other DNA

SEQ ID NO: 105868 - DNA, 80 bp, synthetic construct
  misc_feature 1..80: note = Artificially Synthesized Probe
  source 1..80: mol_type = other DNA
ataatgggcgtgtgccaccatgcccagctaatttttgtatttttagtatagatggggtttcatcattttgaccaggctgg

SEQ ID NO: 105869 - DNA, 80 bp, synthetic construct
  misc_feature 1..80: note = Artificially Synthesized Probe
  source 1..80: mol_type = other DNA
tcaagtttatacatcttaattatggtggaattcctatgtagagtctaaaaagccaggtacttggtgctacagtcagtctc

SEQ ID NO: 105870 - DNA, 80 bp, synthetic construct; identical to SEQ ID NO: 36663
  misc_feature 1..80: note = Artificially Synthesized Probe
  source 1..80: mol_type = other DNA

SEQ ID NO: 105871 - DNA, 80 bp, synthetic construct
  misc_feature 1..80: note = Artificially Synthesized Probe
  source 1..80: mol_type = other DNA
cttgtgtgttgtctggttacgtattccctgggtgataccattcaatgtcttaatgtacttgtggctcagacctgagtgca

SEQ ID NO: 105872 - DNA, 80 bp, synthetic construct
  misc_feature 1..80: note = Artificially Synthesized Probe
  source 1..80: mol_type = other DNA
caggctggagtgcaatggcactatctccactcactgcatcctctgcctcccaggttcaaacgattctcctgtctcagctt

SEQ ID NO: 105873 - DNA, 80 bp, synthetic construct
  misc_feature 1..80: note = Artificially Synthesized Probe
  source 1..80: mol_type = other DNA
gagccaccgcgtccagccccattccttttttttttttttttttaatttctccagtgcccagcgtgatccctgacatctgg

SEQ ID NO: 105874 - DNA, 80 bp, synthetic construct; identical to SEQ ID NO: 36657
  misc_feature 1..80: note = Artificially Synthesized Probe
  source 1..80: mol_type = other DNA

SEQ ID NO: 105875 - DNA, 80 bp, synthetic construct
  misc_feature 1..80: note = Artificially Synthesized Probe
  source 1..80: mol_type = other DNA
ttctgtaatcccagctatttgggaggctgaggcaggagaactgcttgaaaccagaaagcacaatgagccaagatcgtgcc

SEQ ID NO: 105876 - DNA, 80 bp, synthetic construct; identical to SEQ ID NO: 36664
  misc_feature 1..80: note = Artificially Synthesized Probe
  source 1..80: mol_type = other DNA

SEQ ID NO: 105877 - DNA, 80 bp, synthetic construct
  misc_feature 1..80: note = Artificially Synthesized Probe
  source 1..80: mol_type = other DNA
aacctgggaggtggaggttgcggtgagctgagattgggccattgcactccagcctgggggacaagagtgagactttgtct

SEQ ID NO: 105878 - DNA, 80 bp, synthetic construct
  misc_feature 1..80: note = Artificially Synthesized Probe
  source 1..80: mol_type = other DNA
tcttgctatgttgtccaggttagtctgaaaaactggcctcggccgggcacggtgtctcacacttgaaatcccagcacctt

SEQ ID NO: 105879 - DNA, 80 bp, synthetic construct
  misc_feature 1..80: note = Artificially Synthesized Probe
  source 1..80: mol_type = other DNA
gaacctgggaggcagagcttgcagtgagccaagatcatgccactgcactccagcctgggtgacagagtgagactcttgtc

SEQ ID NO: 105880 - DNA, 80 bp, synthetic construct; identical to SEQ ID NO: 36665
  misc_feature 1..80: note = Artificially Synthesized Probe
  source 1..80: mol_type = other DNA

SEQ ID NO: 105881 - DNA, 80 bp, synthetic construct
  misc_feature 1..80: note = Artificially Synthesized Probe
  source 1..80: mol_type = other DNA
aaaaagaaaaaggaaagtgagtcagatgccaagctggtattgcggcatcagcttgtgtagtaagatttgacctggtcaga

SEQ ID NO: 105882 - DNA, 80 bp, synthetic construct
  misc_feature 1..80: note = Artificially Synthesized Probe
  source 1..80: mol_type = other DNA
gagaggcgggagtttgcctagaccacactgtgagtttgctgtatatatccacgccttacacagtgaataagaagatactc

SEQ ID NO: 105883 - DNA, 80 bp, synthetic construct; identical to SEQ ID NO: 36666
  misc_feature 1..80: note = Artificially Synthesized Probe
  source 1..80: mol_type = other DNA

SEQ ID NO: 105884 - DNA, 80 bp, synthetic construct
  misc_feature 1..80: note = Artificially Synthesized Probe
  source 1..80: mol_type = other DNA
gatcacctgagatcaggagtttgagaccaccctggacaacatggtgaaaccccgtctctactaaaaatacaaaaattagc

SEQ ID NO: 105885 - DNA, 80 bp, synthetic construct
  misc_feature 1..80: note = Artificially Synthesized Probe
  source 1..80: mol_type = other DNA
ggcctcttccgaccaaggtggattaccagtgattacctaattagttttgagagcgttaaatgagttcttaaagatcagtt

SEQ ID NO: 105886 - DNA, 80 bp, synthetic construct
  misc_feature 1..80: note = Artificially Synthesized Probe
  source 1..80: mol_type = other DNA
aaaactaaaaactctgcttctcagagttgtggggattagatatgaagtacttagaagagtggttagcacatggtacatgc

SEQ ID NO: 105887 - DNA, 80 bp, synthetic construct
  misc_feature 1..80: note = Artificially Synthesized Probe
  source 1..80: mol_type = other DNA
aggctgggcatggtggctcacgcccgtaatcccagcacccaggaggccaatgcaggcagatcgcttgaacccaggtgttc

SEQ ID NO: 105888 - DNA, 80 bp, synthetic construct; identical to SEQ ID NO: 36667
  misc_feature 1..80: note = Artificially Synthesized Probe
  source 1..80: mol_type = other DNA

SEQ ID NO: 105889 - DNA, 80 bp, synthetic construct
  misc_feature 1..80: note = Artificially Synthesized Probe
  source 1..80: mol_type = other DNA
caccaccattctcattagtttatatttattgagcactcataatgttccagcccccgactccaatgaccgcattacccctc

SEQ ID NO: 105890 - DNA, 80 bp, synthetic construct
  misc_feature 1..80: note = Artificially Synthesized Probe
  source 1..80: mol_type = other DNA
ccaacagaaaaggttgctggctcaaatggctggtatagtgtgataccactaatgagaaaattaatcacatgttgctggtg

SEQ ID NO: 105891 - DNA, 80 bp, synthetic construct; identical to SEQ ID NO: 36696
  misc_feature 1..80: note = Artificially Synthesized Probe
  source 1..80: mol_type = other DNA

SEQ ID NO: 105892 - DNA, 80 bp, synthetic construct
  misc_feature 1..80: note = Artificially Synthesized Probe
  source 1..80: mol_type = other DNA
actatatacatagtatcaatatcactgtagtatcaatatcactattaacaattaaactactgaataaggattacaattat

SEQ ID NO: 105893 - DNA, 80 bp, synthetic construct
  misc_feature 1..80: note = Artificially Synthesized Probe
  source 1..80: mol_type = other DNA
aaaaacatttacaggctcacaagtcaaagctatacaaaaaggcacactcagagaaactgcatttccttcatgcccttcag

SEQ ID NO: 105894 - DNA, 80 bp, synthetic construct
  misc_feature 1..80: note = Artificially Synthesized Probe
  source 1..80: mol_type = other DNA
ggcacactcagagaaactgcatttccttcatgcccttcagccccattccctattgttaaatctgaggtaataaattttgt

SEQ ID NO: 105895 - DNA, 80 bp, synthetic construct
  misc_feature 1..80: note = Artificially Synthesized Probe
  source 1..80: mol_type = other DNA
catatagagcttcctcattagttttaacagatgcatagtattcaattgagtggacacaccacagctttttcaactactct

SEQ ID NO: 105896 - DNA, 80 bp, synthetic construct; identical to SEQ ID NO: 36697
  misc_feature 1..80: note = Artificially Synthesized Probe
  source 1..80: mol_type = other DNA

SEQ ID NO: 105897 - DNA, 80 bp, synthetic construct
  misc_feature 1..80: note = Artificially Synthesized Probe
  source 1..80: mol_type = other DNA
aataagcaaatgttatttcaactttgcatagaaatggcttcagaatagattcttaaaagtggattattggggccgggcgt

SEQ ID NO: 105898 - DNA, 80 bp, synthetic construct
  misc_feature 1..80: note = Artificially Synthesized Probe
  source 1..80: mol_type = other DNA
actcaggaggctgaggcaagagaatgacgtgaacccaggaggcagagcttgcagtgagccgagatggcactactgcactc

SEQ ID NO: 105899 - DNA, 80 bp, synthetic construct
  misc_feature 1..80: note = Artificially Synthesized Probe
  source 1..80: mol_type = other DNA
ccattttgtacccccaccaacaatgtacaggatttctagtttcaccagacttgccaagagagtatattgtcaaacttttg

SEQ ID NO: 105900 - DNA, 80 bp, synthetic construct
  misc_feature 1..80: note = Artificially Synthesized Probe
  source 1..80: mol_type = other DNA
tacacttcttttttttttttttttttttagtgatggggttgttcaggtagtagtagctgattgtgtagtagcacaatcac

SEQ ID NO: 105901 - DNA, 80 bp, synthetic construct; identical to SEQ ID NO: 36698
  misc_feature 1..80: note = Artificially Synthesized Probe
  source 1..80: mol_type = other DNA

SEQ ID NO: 105902 - DNA, 80 bp, synthetic construct
  misc_feature 1..80: note = Artificially Synthesized Probe
  source 1..80: mol_type = other DNA
cagatcaatctcctcagggaactcttgggatggtttatcaatctcagggatgccctgagataacagattgatcgcagaag

SEQ ID NO: 105903 - DNA, 80 bp, synthetic construct
  misc_feature 1..80: note = Artificially Synthesized Probe
  source 1..80: mol_type = other DNA
aagaaaccccatatccattaagaagtcaatcccggctgctctgcctatggagcagccattcttttattcctttactttct

SEQ ID NO: 105904 - DNA, 80 bp, synthetic construct
  misc_feature 1..80: note = Artificially Synthesized Probe
  source 1..80: mol_type = other DNA
tttgtgtttggtttcttgcatttggcataatgtttttaaggttcatccacattttaatatgtatcggtacttcattcctt

SEQ ID NO: 105905 - DNA, 80 bp, synthetic construct
  misc_feature 1..80: note = Artificially Synthesized Probe
  source 1..80: mol_type = other DNA
cctgggttcaagtgatcctcccgcctcagcctccagagtagctaagactacaggtgcacaccaccatgactggctaattt

SEQ ID NO: 105906 - DNA, 80 bp, synthetic construct; identical to SEQ ID NO: 36699
  misc_feature 1..80: note = Artificially Synthesized Probe
  source 1..80: mol_type = other DNA

SEQ ID NO: 105907 - DNA, 80 bp, synthetic construct
  misc_feature 1..80: note = Artificially Synthesized Probe
  source 1..80: mol_type = other DNA
caggctggtcttgaactcctgtgctcaagtgatccgcccaccttggcctcccaaagagctgggattacaggcatgagcca

SEQ ID NO: 105908 - DNA, 80 bp, synthetic construct
  misc_feature 1..80: note = Artificially Synthesized Probe
  source 1..80: mol_type = other DNA
agtggtatgtcactgtggtttagatttgtatatccctaaactaatgagagttagcatcttttcatgtgcttcttagctat

SEQ ID NO: 105909 - DNA, 80 bp, synthetic construct
  misc_feature 1..80: note = Artificially Synthesized Probe
  source 1..80: mol_type = other DNA
gatgcacaaatatttttagttttggtgaagtctaattattttttcttttgttgcttatgcttttgttctacaaatccatt

SEQ ID NO: 105910 - DNA, 80 bp, synthetic construct; identical to SEQ ID NO: 36700
  misc_feature 1..80: note = Artificially Synthesized Probe
  source 1..80: mol_type = other DNA

SEQ ID NO: 105911 - DNA, 80 bp, synthetic construct
  misc_feature 1..80: note = Artificially Synthesized Probe
  source 1..80: mol_type = other DNA
tcaggccctcttacagttccctatgaattagaggagtcagcttttccatttctgaagaaaagacattaaaattctgatag

SEQ ID NO: 105912 - DNA, 80 bp, synthetic construct
  misc_feature 1..80: note = Artificially Synthesized Probe
  source 1..80: mol_type = other DNA
gtagctgggctacaggcatgcatcaccacacccagctaattttttttttcaagatggagtcttgctctgtcacccaggct

SEQ ID NO: 105913 - DNA, 80 bp, synthetic construct
  misc_feature 1..80: note = Artificially Synthesized Probe
  source 1..80: mol_type = other DNA
agagaccccctggcatggctggctgacctcctcggagttctccagacatagctggcaaacttcctcagagactttctggc

SEQ ID NO: 105914 - DNA, 80 bp, synthetic construct; identical to SEQ ID NO: 36701
  misc_feature 1..80: note = Artificially Synthesized Probe
  source 1..80: mol_type = other DNA

SEQ ID NO: 105915 - DNA, 80 bp, synthetic construct
  misc_feature 1..80: note = Artificially Synthesized Probe
  source 1..80: mol_type = other DNA
gcgttgttttttttttttttaagcaagacagggtttcactctgttgcccaggctggagtacagtggtgcaatcatggctc

SEQ ID NO: 105916 - DNA, 80 bp, synthetic construct
  misc_feature 1..80: note = Artificially Synthesized Probe
  source 1..80: mol_type = other DNA
gatgccaaggcggtggatcacctgaggtcaggagttcgagagcagccttgccaacatggtgaaaccctgtctctactaaa

SEQ ID NO: 105917 - DNA, 80 bp, synthetic construct
  misc_feature 1..80: note = Artificially Synthesized Probe
  source 1..80: mol_type = other DNA
caaaaaaaaaaaaaaaaaaaaaaaaaaaaaatatatatatatatatatatatatacatatatataatttgtagagacagg

SEQ ID NO: 105918 - DNA, 80 bp, synthetic construct; identical to SEQ ID NO: 36702
  misc_feature 1..80: note = Artificially Synthesized Probe
  source 1..80: mol_type = other DNA

SEQ ID NO: 105919 - DNA, 80 bp, synthetic construct
  misc_feature 1..80: note = Artificially Synthesized Probe
  source 1..80: mol_type = other DNA
gccagccgtggtggcacatgcctgtggtcctacctacttgggaggttcaggtgggaggatcacttgagcctgggaggcag

SEQ ID NO: 105920 - DNA, 80 bp, synthetic construct
  misc_feature 1..80: note = Artificially Synthesized Probe
  source 1..80: mol_type = other DNA
gatcacttgattccaggaattcgagaccagcctgggcaacatggcaaaaccccatctctacaaaaaatacaaaaattagc

SEQ ID NO: 105921 - DNA, 80 bp, synthetic construct
  misc_feature 1..80: note = Artificially Synthesized Probe
  source 1..80: mol_type = other DNA
atagagacaaggtcttgctatgttgaccacactggtcttgaactcctggcctcaaatgatcctcccgccttagcctctca

SEQ ID NO: 105922 - DNA, 80 bp, synthetic construct
  misc_feature 1..80: note = Artificially Synthesized Probe
  source 1..80: mol_type = other DNA
ctatgctcaagccatcctcctccctcagcctctcaattagctgggactacaggtgcgcaccaacatgcctggctaattta

SEQ ID NO: 105923 - DNA, 80 bp, synthetic construct; identical to SEQ ID NO: 36703
  misc_feature 1..80: note = Artificially Synthesized Probe
  source 1..80: mol_type = other DNA

SEQ ID NO: 105924 - DNA, 80 bp, synthetic construct
  misc_feature 1..80: note = Artificially Synthesized Probe
  source 1..80: mol_type = other DNA
gtcagggacctcctgacatggctggctgacctcctcgtatggctggctggtttccataggtggcacctgtggggactgat

SEQ ID NO: 105925 - DNA, 80 bp, synthetic construct
  misc_feature 1..80: note = Artificially Synthesized Probe
  source 1..80: mol_type = other DNA
agtgttacactactgagtatgatgtgtgctttggctttcataaatgccctttatcatgttcattaagttcccttctattc

SEQ ID NO: 105926 - DNA, 80 bp, synthetic construct
  misc_feature 1..80: note = Artificially Synthesized Probe
  source 1..80: mol_type = other DNA
cagttttcttgtattgaatcactcttgcattcctgagataaatctcatcagccctggtgtataattcttttattgtgctg

SEQ ID NO: 105927 - DNA, 80 bp, synthetic construct; identical to SEQ ID NO: 36704
  misc_feature 1..80: note = Artificially Synthesized Probe
  source 1..80: mol_type = other DNA

SEQ ID NO: 105928 - DNA, 80 bp, synthetic construct
  misc_feature 1..80: note = Artificially Synthesized Probe
  source 1..80: mol_type = other DNA
cagtgcctgtaatcccagctacttgggaggctgaggcaggagaatcgtttgaatgtaggaggcagagattgcagtgagct

SEQ ID NO: 105929 - DNA, 80 bp, synthetic construct
  misc_feature 1..80: note = Artificially Synthesized Probe
  source 1..80: mol_type = other DNA
gagtctcgctctgtcgcccaggctggagtgcagtggcgggatctcggctcactgcaagctccgcctcccgggttcatgcc

SEQ ID NO: 105930 - DNA, 80 bp, synthetic construct
  misc_feature 1..80: note = Artificially Synthesized Probe
  source 1..80: mol_type = other DNA
tgctgggattacaggcgtgagccaccacgcccggctccttttgctttttgagtttagtttactcttctttttctagtgtc

SEQ ID NO: 105931 - DNA, 80 bp, synthetic construct; identical to SEQ ID NO: 36705
  misc_feature 1..80: note = Artificially Synthesized Probe
  source 1..80: mol_type = other DNA

SEQ ID NO: 105932 - DNA, 80 bp, synthetic construct
  misc_feature 1..80: note = Artificially Synthesized Probe
  source 1..80: mol_type = other DNA
tcattcatctcaaagtataatctaatttcccttgtgagttcttcttcgactcatttgtcatttaagagtatgttgttggc

SEQ ID NO: 105933 - DNA, 80 bp, synthetic construct
  misc_feature 1..80: note = Artificially Synthesized Probe
  source 1..80: mol_type = other DNA
gtgtgtgcctgtagtccagctactcagggggtgagtagctggaggtcgaggttgcactgagccatgatcgtaccactgca

SEQ ID NO: 105934 - DNA, 80 bp, synthetic construct
  misc_feature 1..80: note = Artificially Synthesized Probe
  source 1..80: mol_type = other DNA
gatcactgaagccaaattgggagttaccatctactgtagtaggggaagaaggaccagcactggacacagtgctagaaggg

SEQ ID NO: 105935 - DNA, 80 bp, synthetic construct
  misc_feature 1..80: note = Artificially Synthesized Probe
  source 1..80: mol_type = other DNA
gaggtcaggagtttgagaccagcctggccaacatggtgaaacctcgtcgctactaaaaatacaaaaattagttggggatg

SEQ ID NO: 105936 - DNA, 80 bp, synthetic construct
  misc_feature 1..80: note = Artificially Synthesized Probe
  source 1..80: mol_type = other DNA
ttaatttctatacttgtgaattttccagttttctcttctgttattaattctagcatcattccattgtggttggagaaggt

SEQ ID NO: 105937 - DNA, 80 bp, synthetic construct; identical to SEQ ID NO: 36706
  misc_feature 1..80: note = Artificially Synthesized Probe
  source 1..80: mol_type = other DNA

SEQ ID NO: 105938 - DNA, 80 bp, synthetic construct
  misc_feature 1..80: note = Artificially Synthesized Probe
  source 1..80: mol_type = other DNA
tacccagactggtctcagattcctgggcttaagcgacactcctgcttatcctttcttgtcctcccaaagtgctgggattt

SEQ ID NO: 105939 - DNA, 80 bp, synthetic construct
  misc_feature 1..80: note = Artificially Synthesized Probe
  source 1..80: mol_type = other DNA
ggtgcccgccaccacgcccggctaatttttttgtatttttagtagagatggagtttcaccatgttagccaggatggtctc

SEQ ID NO: 105940 - DNA, 80 bp, synthetic construct; identical to SEQ ID NO: 36707
  misc_feature 1..80: note = Artificially Synthesized Probe
  source 1..80: mol_type = other DNA

SEQ ID NO: 105941 - DNA, 80 bp, synthetic construct
  misc_feature 1..80: note = Artificially Synthesized Probe
  source 1..80: mol_type = other DNA
ttatcttccaataaattgacctcattatcaatatatgactttctcttacttgtaacaactttttttaaagagacagggtc

SEQ ID NO: 105942 - DNA, 80 bp, synthetic construct
  misc_feature 1..80: note = Artificially Synthesized Probe
  source 1..80: mol_type = other DNA
gctctcttttggttactatttgcacagaatatgtttttctatccttttactttcaacctatttgtgtcttcggacctaat

SEQ ID NO: 105943 - DNA, 80 bp, synthetic construct
  misc_feature 1..80: note = Artificially Synthesized Probe
  source 1..80: mol_type = other DNA
catgagagaatattactaaaattacagttcaaggtataagttggaagtctgtcttattagacttttcatttgtttataat

SEQ ID NO: 105944 - DNA, 80 bp, synthetic construct
  misc_feature 1..80: note = Artificially Synthesized Probe
  source 1..80: mol_type = other DNA
tacctcagcctcctgagtagctgggattacaggtgcctgccaccatgcctcgctgatttgtgtattttttagtagagaca

SEQ ID NO: 105945 - DNA, 80 bp, synthetic construct; identical to SEQ ID NO: 36687
  misc_feature 1..80: note = Artificially Synthesized Probe
  source 1..80: mol_type = other DNA

SEQ ID NO: 105946 - DNA, 80 bp, synthetic construct; identical to SEQ ID NO: 36708
  misc_feature 1..80: note = Artificially Synthesized Probe
  source 1..80: mol_type = other DNA

SEQ ID NO: 105947 - DNA, 80 bp, synthetic construct
  misc_feature 1..80: note = Artificially Synthesized Probe
  source 1..80: mol_type = other DNA
caccatacctggctaattttatttttatttttatttttttgtagaggtggggttttgccatgttgcccaggctgatcttg

SEQ ID NO: 105948 - DNA, 80 bp, synthetic construct
  misc_feature 1..80: note = Artificially Synthesized Probe
  source 1..80: mol_type = other DNA
cacgatctcagctcacgcaacttctgcctccccagttctagcaattctcctgcctcggcctcccaagtagctgggactac

SEQ ID NO: 105949 - DNA, 80 bp, synthetic construct
  misc_feature 1..80: note = Artificially Synthesized Probe
  source 1..80: mol_type = other DNA
taaaatttttactttaagtaatattctattttctataaaaatatttaagaacagcaaattagaaaataaaccaattcaac

SEQ ID NO: 105950 - DNA, 80 bp, synthetic construct; identical to SEQ ID NO: 36709
  misc_feature 1..80: note = Artificially Synthesized Probe
  source 1..80: mol_type = other DNA

SEQ ID NO: 105951 - DNA, 80 bp, synthetic construct
  misc_feature 1..80: note = Artificially Synthesized Probe
  source 1..80: mol_type = other DNA
gcacctttggaaggccgaggtgggtggatcacccaaggtcaggagtccaagaccagcctggccaacatggcgaaatcctg

SEQ ID NO: 105952 - DNA, 80 bp, synthetic construct
  misc_feature 1..80: note = Artificially Synthesized Probe
  source 1..80: mol_type = other DNA
cacttttctgccctgaataagttagagttaggcaaaacaaatgtaggcactttgtgtcaatccttcaagtagcccaccaa

SEQ ID NO: 105953 - DNA, 80 bp, synthetic construct
  misc_feature 1..80: note = Artificially Synthesized Probe
  source 1..80: mol_type = other DNA
cttttctgccatttttaggttgcctctttctggattcagcattttcctggttactgaaaatcttttactattctccagag

SEQ ID NO: 105954 - DNA, 80 bp, synthetic construct; identical to SEQ ID NO: 36710
  misc_feature 1..80: note = Artificially Synthesized Probe
  source 1..80: mol_type = other DNA

SEQ ID NO: 105955 - DNA, 80 bp, synthetic construct
  misc_feature 1..80: note = Artificially Synthesized Probe
  source 1..80: mol_type = other DNA
catggtggcttgtccctgtaatcccagctactcaggaggctgaggcagggagaactgcttgaacccaggagatggaggtt

SEQ ID NO: 105956 - DNA, 80 bp, synthetic construct
  misc_feature 1..80: note = Artificially Synthesized Probe
  source 1..80: mol_type = other DNA
atttccagttttcaactccagagattctaattctataggtttagcgtaaaggtgtagtttggaggagggaggaggaagaa

SEQ ID NO: 105957 - DNA, 80 bp, synthetic construct
  misc_feature 1..80: note = Artificially Synthesized Probe
  source 1..80: mol_type = other DNA
actgcaaaaatcaaaactaaaatgagattttatagaatgatttaaaatgtggtagggctagtatttgctcactgctcttc

SEQ ID NO: 105958 - DNA, 80 bp, synthetic construct
  misc_feature 1..80: note = Artificially Synthesized Probe
  source 1..80: mol_type = other DNA
cttgaactcctgggttcaagtgatcctcccgtttcaacatcccaagtagatgagactacaggcacacaccaccatgcata

SEQ ID NO: 105959 - DNA, 80 bp, synthetic construct; identical to SEQ ID NO: 36711
  misc_feature 1..80: note = Artificially Synthesized Probe
  source 1..80: mol_type = other DNA

SEQ ID NO: 105960 - DNA, 80 bp, synthetic construct
  misc_feature 1..80: note = Artificially Synthesized Probe
  source 1..80: mol_type = other DNA
gctgggactacaggcacacaccaacatgctcagctaatgtttgtatttttttttttttttgagatggagtctcactctgt

SEQ ID NO: 105961 - DNA, 80 bp, synthetic construct
  misc_feature 1..80: note = Artificially Synthesized Probe
  source 1..80: mol_type = other DNA
catattggccaggatggtctccatcacttgacctcgtgatccacccgcctagccctcccaaagtgctgggattacaggca

SEQ ID NO: 105962 - DNA, 80 bp, synthetic construct
  misc_feature 1..80: note = Artificially Synthesized Probe
  source 1..80: mol_type = other DNA
catttttaagtgtacttttgtgtctttgtggattgcctaactagctttctaatttactactttcttatattctaggaagc

SEQ ID NO: 105963 - DNA, 80 bp, synthetic construct
  misc_feature 1..80: note = Artificially Synthesized Probe
  source 1..80: mol_type = other DNA
aggcaccatggaacacccttcaaaccctgtttgaaaagagatgggcaaagtcaatgttactcctgccagatataccccaa

SEQ ID NO: 105964 - DNA, 80 bp, synthetic construct; identical to SEQ ID NO: 36712
  misc_feature 1..80: note = Artificially Synthesized Probe
  source 1..80: mol_type = other DNA

SEQ ID NO: 105965 - DNA, 80 bp, synthetic construct
  misc_feature 1..80: note = Artificially Synthesized Probe
  source 1..80: mol_type = other DNA
gcagattttgggtatcatgaataagagaaccagattaaggagaaggacatggaatctgagaaggggttcatgcaaattta

SEQ ID NO: 105966 - DNA, 80 bp, synthetic construct
  misc_feature 1..80: note = Artificially Synthesized Probe
  source 1..80: mol_type = other DNA
atgataagttggcagaagaatgtagaaaaaccatgtaaatcagaacaataggaaagaaaatggtttacctggctgggtgc

SEQ ID NO: 105967 - DNA, 80 bp, synthetic construct
  misc_feature 1..80: note = Artificially Synthesized Probe
  source 1..80: mol_type = other DNA
gaaaaccccagacttgctagggtctttctacttcatcagaaaaatgaggcaaatgccctagaaaaaagaaaaagtactga

SEQ ID NO: 105968 - DNA, 80 bp, synthetic construct
  misc_feature 1..80: note = Artificially Synthesized Probe
  source 1..80: mol_type = other DNA
cagtctttcctatgcctcttcaacatctccttaaagggactaaggatacacgggacaacgaagtctatgcaagacagctt

SEQ ID NO: 105969 - DNA, 80 bp, synthetic construct; identical to SEQ ID NO: 36713
  misc_feature 1..80: note = Artificially Synthesized Probe
  source 1..80: mol_type = other DNA

SEQ ID NO: 105970 - DNA, 80 bp, synthetic construct
  misc_feature 1..80: note = Artificially Synthesized Probe
  source 1..80: mol_type = other DNA
ccatccaagtgactaaatgcaagttacataaacttagggcaaataggagaaagaaataggtgggctctcctgccagaagt

SEQ ID NO: 105971 - DNA, 80 bp, synthetic construct
  misc_feature 1..80: note = Artificially Synthesized Probe
  source 1..80: mol_type = other DNA
ggcatccaaggagactggccggccccctgtacagtcagaggaaaaactgcgcagcaaccggaccacagggtgctggtcat

SEQ ID NO: 105972 - DNA, 80 bp, synthetic construct
  misc_feature 1..80: note = Artificially Synthesized Probe
  source 1..80: mol_type = other DNA
agagccactgggcatctcttgcagggaagaacagtggtgtcatcatacaatgagtctgaaagaagggataagtgagatct

SEQ ID NO: 105973 - DNA, 80 bp, synthetic construct; identical to SEQ ID NO: 36714
  misc_feature 1..80: note = Artificially Synthesized Probe
  source 1..80: mol_type = other DNA

SEQ ID NO: 105974 - DNA, 80 bp, synthetic construct
  misc_feature 1..80: note = Artificially Synthesized Probe
  source 1..80: mol_type = other DNA
aataccaatattgactaaccatcctgtaccttactgttgtttaaacaatcagttaaaaaaaaaaagtacactaaaactcc

SEQ ID NO: 105975 - DNA, 80 bp, synthetic construct
  misc_feature 1..80: note = Artificially Synthesized Probe
  source 1..80: mol_type = other DNA
atgtaattcagctacaaaaggttgaaggcagtcaaagccatgtggagaggggtgtaagaggaacaatagtgaaaagatct

SEQ ID NO: 105976 - DNA, 80 bp, synthetic construct
  misc_feature 1..80: note = Artificially Synthesized Probe
  source 1..80: mol_type = other DNA
gatctctgctgattgcttaaaatagaacctgattatctctactactacagcatctcctaagccaaacagccccaccacag

SEQ ID NO: 105977 - DNA, 80 bp, synthetic construct; identical to SEQ ID NO: 36715
  misc_feature 1..80: note = Artificially Synthesized Probe
  source 1..80: mol_type = other DNA

SEQ ID NO: 105978 - DNA, 80 bp, synthetic construct
  misc_feature 1..80: note = Artificially Synthesized Probe
  source 1..80: mol_type = other DNA
tactcaggaggctgaggcaggtgaatcacttgaaccccagaggtggaggttgcagtgagccgaaattgtgccactatact

SEQ ID NO: 105979 - DNA, 80 bp, synthetic construct
  misc_feature 1..80: note = Artificially Synthesized Probe
  source 1..80: mol_type = other DNA
ggtgaattcagtgtgcagcttagtaacaggctatacttgtgtgctggatatagttacaggatataagagcagcttattag

SEQ ID NO: 105980 - DNA, 80 bp, synthetic construct
  misc_feature 1..80: note = Artificially Synthesized Probe
  source 1..80: mol_type = other DNA
tgcaactacagacaaaacatccactttgtaattgctggtcagtcaagcaagatcttggccatggagaagagccttcatat

SEQ ID NO: 105981 - DNA, 80 bp, synthetic construct
  misc_feature 1..80: note = Artificially Synthesized Probe
  source 1..80: mol_type = other DNA
tgaggaagtgtgcagggcattggagatcttaaatttgttttcctgcacaacacctgcattttccagctcttttttcctca

SEQ ID NO: 105982 - DNA, 80 bp, synthetic construct; identical to SEQ ID NO: 36716
  misc_feature 1..80: note = Artificially Synthesized Probe
  source 1..80: mol_type = other DNA

SEQ ID NO: 105983 - DNA, 80 bp, synthetic construct
  misc_feature 1..80: note = Artificially Synthesized Probe
  source 1..80: mol_type = other DNA
cagcagtgccttgtgaagatgtacaacctgactgggctaaaatctagcagctgtcacttgctagccaataggagattagc

SEQ ID NO: 105984 - DNA, 80 bp, synthetic construct
  misc_feature 1..80: note = Artificially Synthesized Probe
  source 1..80: mol_type = other DNA
tacagagagacaaataaggataccaaggataaaactttgaaagagagtgagcctgggttctcctgctataccctacaaag

SEQ ID NO: 105985 - DNA, 80 bp, synthetic construct
  misc_feature 1..80: note = Artificially Synthesized Probe
  source 1..80: mol_type = other DNA
tttatcataggtaggctggtgccacatggaaactacacttaaaaactcaaggtacagtcctttttcttttacctactacc

SEQ ID NO: 105986 - DNA, 80 bp, synthetic construct
  misc_feature 1..80: note = Artificially Synthesized Probe
  source 1..80: mol_type = other DNA
atatactcaagactaacacccatataagtaggcttaggagctgggaactgcagcattgctccgaaagaggaacaaactag

SEQ ID NO: 105987 - DNA, 80 bp, synthetic construct; identical to SEQ ID NO: 36717
  misc_feature 1..80: note = Artificially Synthesized Probe
  source 1..80: mol_type = other DNA

SEQ ID NO: 105988 - DNA, 80 bp, synthetic construct
  misc_feature 1..80: note = Artificially Synthesized Probe
  source 1..80: mol_type = other DNA
agtgtcgaaactcagagttaagtgtctagaggtgacatggtgaggaggaatgacattgagtcagaagcaaacgtaccgtt

SEQ ID NO: 105989 - DNA, 80 bp, synthetic construct
  misc_feature 1..80: note = Artificially Synthesized Probe
  source 1..80: mol_type = other DNA
gacctgctcccctccccatcccttggatttctaactaacacacgtcaatctcttttcctttgataaatctcttaggaatc

SEQ ID NO: 105990 - DNA, 80 bp, synthetic construct; identical to SEQ ID NO: 36688
  misc_feature 1..80: note = Artificially Synthesized Probe
  source 1..80: mol_type = other DNA

SEQ ID NO: 105991 - DNA, 80 bp, synthetic construct
  misc_feature 1..80: note = Artificially Synthesized Probe
  source 1..80: mol_type = other DNA
cttccctaaacccaatttgctggattttaatcgaggttccaccactttcttcccaactatgcatcatcctccttggtcct

SEQ ID NO: 105992 - DNA, 80 bp, synthetic construct; identical to SEQ ID NO: 36718
  misc_feature 1..80: note = Artificially Synthesized Probe
  source 1..80: mol_type = other DNA

SEQ ID NO: 105993 - DNA, 80 bp, synthetic construct
  misc_feature 1..80: note = Artificially Synthesized Probe
  source 1..80: mol_type = other DNA
gtgagcctgcaaggccgggagtgcgttagtagccacgtaaagccacaactatcacacagaactatacacaacttcacatg

SEQ ID NO: 105994 - DNA, 80 bp, synthetic construct
  misc_feature 1..80: note = Artificially Synthesized Probe
  source 1..80: mol_type = other DNA
gaagagctacatggcagaaacaacaggccactacaaatgcagggttagtcatattaggggattcaaagctactggaaggg

SEQ ID NO: 105995 - DNA, 80 bp, synthetic construct; identical to SEQ ID NO: 36719
  misc_feature 1..80: note = Artificially Synthesized Probe
  source 1..80: mol_type = other DNA

SEQ ID NO: 105996 - DNA, 80 bp, synthetic construct
  misc_feature 1..80: note = Artificially Synthesized Probe
  source 1..80: mol_type = other DNA
gcagccttggtctcccaagctcaagtgatcctcccatcttagcttcccaagtagctgggattgcaagtacacaccatcat

SEQ ID NO: 105997 - DNA, 80 bp, synthetic construct
  misc_feature 1..80: note = Artificially Synthesized Probe
  source 1..80: mol_type = other DNA
ggtgtgagccacagccccctgcctcattgaattttttaagctagaagggactcatagatcatccagtccaactttcttat

SEQ ID NO: 105998 - DNA, 80 bp, synthetic construct
  misc_feature 1..80: note = Artificially Synthesized Probe
  source 1..80: mol_type = other DNA
tctaaagtcaagatggacacaaattgaagggcatgtgaagaatcagttgattatatgtagagcatgcctattatgtgagg

SEQ ID NO: 105999 - DNA, 80 bp, synthetic construct; identical to SEQ ID NO: 36720
  misc_feature 1..80: note = Artificially Synthesized Probe
  source 1..80: mol_type = other DNA

SEQ ID NO: 106000 - DNA, 80 bp, synthetic construct
  misc_feature 1..80: note = Artificially Synthesized Probe
  source 1..80: mol_type = other DNA
cctgggtttggcttgggacttaacattcataggggaaatggatggagtggaaaggagttcaattcccttgaggccaccaa

SEQ ID NO: 106001 - DNA, 80 bp, synthetic construct
  misc_feature 1..80: note = Artificially Synthesized Probe
  source 1..80: mol_type = other DNA
tactccatcctctactgcttcatcgccctctagtacttgactaacctacttttcccttggtaaacatcatttttgttgat

SEQ ID NO: 106002 - DNA, 80 bp, synthetic construct
  misc_feature 1..80: note = Artificially Synthesized Probe
  source 1..80: mol_type = other DNA
gagagtaataacagttgctaaatatgactgcttttcttcagagaagctaaaactagctggctctatcccagaccacccca

SEQ ID NO: 106003 - DNA, 80 bp, synthetic construct
  misc_feature 1..80: note = Artificially Synthesized Probe
  source 1..80: mol_type = other DNA
agcattcccacggcccacttaactgggacagacacacctatcctcttttctagtctgtctgaaacctattctttactggg

SEQ ID NO: 106004 - DNA, 80 bp, synthetic construct
  misc_feature 1..80: note = Artificially Synthesized Probe
  source 1..80: mol_type = other DNA
gtgtctcaacctcccaagtagctgggattacaggcatgcgtcaccatgctcagctaatttttgtatttttagtagagatg

SEQ ID NO: 106005 - DNA, 80 bp, synthetic construct; identical to SEQ ID NO: 36721
  misc_feature 1..80: note = Artificially Synthesized Probe
  source 1..80: mol_type = other DNA

SEQ ID NO: 106006 - DNA, 80 bp, synthetic construct
  misc_feature 1..80: note = Artificially Synthesized Probe
  source 1..80: mol_type = other DNA
ggacaaaggcaacagaacaattagaggcgctaaatagagagaataataggacaagacagaaacagccagaggaccaagac

SEQ ID NO: 106007 - DNA, 80 bp, synthetic construct
  misc_feature 1..80: note = Artificially Synthesized Probe
  source 1..80: mol_type = other DNA
gtgatgttctctacccctttccagggatccaaaaatcaagagacatttcctcaaagtcctgagagatgcctctgccacta

SEQ ID NO: 106008 - DNA, 80 bp, synthetic construct; identical to SEQ ID NO: 36722
  misc_feature 1..80: note = Artificially Synthesized Probe
  source 1..80: mol_type = other DNA

SEQ ID NO: 106009 - DNA, 80 bp, synthetic construct
  misc_feature 1..80: note = Artificially Synthesized Probe
  source 1..80: mol_type = other DNA
gatggaataatcatctgagatccaagttcacatctaactatggcttctcccacttcatcctccctacctccacctgatga

SEQ ID NO: 106010 - DNA, 80 bp, synthetic construct
  misc_feature 1..80: note = Artificially Synthesized Probe
  source 1..80: mol_type = other DNA
aagagccggtagccaccaggcctcgaggatgaagtctcagaaagtacctgcagaaaaaggactctatattaatcattttg

SEQ ID NO: 106011 - DNA, 80 bp, synthetic construct
  misc_feature 1..80: note = Artificially Synthesized Probe
  source 1..80: mol_type = other DNA
aaaggctcaatccatcattgagttgaaggtatgctagttatctctcttctgtaaacaatcaaaggaggggctggacacgg

SEQ ID NO: 106012 - DNA, 80 bp, synthetic construct
  misc_feature 1..80: note = Artificially Synthesized Probe
  source 1..80: mol_type = other DNA
tctatactagaaggcacttctattttcaagatgcctttccccacagccctcccattcccaatctgagtttgagaaatcat

SEQ ID NO: 106013 - DNA, 80 bp, synthetic construct; identical to SEQ ID NO: 36723
  misc_feature 1..80: note = Artificially Synthesized Probe
  source 1..80: mol_type = other DNA

SEQ ID NO: 106014 - DNA, 80 bp, synthetic construct
  misc_feature 1..80: note = Artificially Synthesized Probe
  source 1..80: mol_type = other DNA
gctgtaggccaatggctagggaaggctgggggaggtctcccgacctcctgcagcgccgtccccgcaaggggatgaggtcc

SEQ ID NO: 106015 - DNA, 80 bp, synthetic construct
  misc_feature 1..80: note = Artificially Synthesized Probe
  source 1..80: mol_type = other DNA
aggtcgtaagttttataatctaaaatagttaaaaagtatgagatgacaagaggagaagaagggatggagggaaggataag

SEQ ID NO: 106016 - DNA, 80 bp, synthetic construct
  misc_feature 1..80: note = Artificially Synthesized Probe
  source 1..80: mol_type = other DNA
ttgaaaagaaagcctgtgattacaataggaagcttcccataggcctgaaagaagtcaatcttatcaagtctgagagatga

SEQ ID NO: 106017 - DNA, 80 bp, synthetic construct
  misc_feature 1..80: note = Artificially Synthesized Probe
  source 1..80: mol_type = other DNA
caggtgtgatccaccacacgcagctgtctatgtcttatgactgcataaaccagaaaaaaatggttgggggatgggggacg

SEQ ID NO: 106018 - DNA, 80 bp, synthetic construct; identical to SEQ ID NO: 36724
  misc_feature 1..80: note = Artificially Synthesized Probe
  source 1..80: mol_type = other DNA

SEQ ID NO: 106019 - DNA, 80 bp, synthetic construct
  misc_feature 1..80: note = Artificially Synthesized Probe
  source 1..80: mol_type = other DNA
gatatatccctaaaatggaaaaaccaattcctctaagatagagacctggcaccgagccagggtgaacacggtcattagga

SEQ ID NO: 106020 - DNA, 80 bp, synthetic construct
  misc_feature 1..80: note = Artificially Synthesized Probe
  source 1..80: mol_type = other DNA
acaaaaacctcagatggttagctggacacaatatgagattaataacacttactgcctttaggctagagagctagaaccag

SEQ ID NO: 106021 - DNA, 80 bp, synthetic construct; identical to SEQ ID NO: 36725
  misc_feature 1..80: note = Artificially Synthesized Probe
  source 1..80: mol_type = other DNA

SEQ ID NO: 106022 - DNA, 80 bp, synthetic construct
  misc_feature 1..80: note = Artificially Synthesized Probe
  source 1..80: mol_type = other DNA
cactgggattttggcccggagttcaagctgtttccactagatttccttttaaagaactaccttttcaaattcatccagag

SEQ ID NO: 106023 - DNA, 80 bp, synthetic construct; identical to SEQ ID NO: 36689
  misc_feature 1..80: note = Artificially Synthesized Probe
  source 1..80: mol_type = other DNA

SEQ ID NO: 106024 - DNA, 80 bp, synthetic construct
  misc_feature 1..80: note = Artificially Synthesized Probe
  source 1..80: mol_type = other DNA
gagagattaagtaaaacatatcaatcagagcaggaggactctgcttcaagtcccaagagaccccccaaggggatctagtg

SEQ ID NO: 106025 - DNA, 80 bp, synthetic construct
  misc_feature 1..80: note = Artificially Synthesized Probe
  source 1..80: mol_type = other DNA
ctggttcatctgatgcctttcctggacacaggttctccatactgccttggttggttttcatctcctcattctatacaaca

SEQ ID NO: 106026 - DNA, 80 bp, synthetic construct
  misc_feature 1..80: note = Artificially Synthesized Probe
  source 1..80: mol_type = other DNA
cacagccagccggggcactgccttcttcctcaacacctttcactccggggctgaagtgtagctccacatggaaccgttcc

SEQ ID NO: 106027 - DNA, 80 bp, synthetic construct; identical to SEQ ID NO: 36726
  misc_feature 1..80: note = Artificially Synthesized Probe
  source 1..80: mol_type = other DNA

SEQ ID NO: 106028 - DNA, 80 bp, synthetic construct
  misc_feature 1..80: note = Artificially Synthesized Probe
  source 1..80: mol_type = other DNA
agtttgacaccaccctgggcaacatgttgagaccctatctctacaaaaaattagccgggcatggtggcacatgtctgtca

SEQ ID NO: 106029 - DNA, 80 bp, synthetic construct
  misc_feature 1..80: note = Artificially Synthesized Probe
  source 1..80: mol_type = other DNA
tggagccgtatgcagaaggtatatgtataaccatgtttgaggaaataagactcataacattgtcccaaattccatactct

SEQ ID NO: 106030 - DNA, 80 bp, synthetic construct; identical to SEQ ID NO: 36727
  misc_feature 1..80: note = Artificially Synthesized Probe
  source 1..80: mol_type = other DNA

SEQ ID NO: 106031 - DNA, 80 bp, synthetic construct
  misc_feature 1..80: note = Artificially Synthesized Probe
  source 1..80: mol_type = other DNA
gagaatggagaaagctttcatttgagaagagtaaaagaatgctgggaaaaagctgttcacaggctaaagaagaaggagga

SEQ ID NO: 106032 - DNA, 80 bp, synthetic construct
  misc_feature 1..80: note = Artificially Synthesized Probe
  source 1..80: mol_type = other DNA
cctgttcccacccttctgcaaactccctcctcccacctcaaagacttctctcctttccatcccaaaatcttgtctattct

SEQ ID NO: 106033 - DNA, 80 bp, synthetic construct
  misc_feature 1..80: note = Artificially Synthesized Probe
  source 1..80: mol_type = other DNA
tcgtgggttctctgcaggtcaagtagtatcttccgcaacagtggaagacagaagcccacagcaatttccagtttctcctc

SEQ ID NO: 106034 - DNA, 80 bp, synthetic construct
  misc_feature 1..80: note = Artificially Synthesized Probe
  source 1..80: mol_type = other DNA
tcacttgagatcaggagttcgaaaccagcctggccaacatggcaaaaccccgtctctactaaaaatacaaaaattagcca

SEQ ID NO: 106035 - DNA, 80 bp, synthetic construct
  misc_feature 1..80: note = Artificially Synthesized Probe
  source 1..80: mol_type = other DNA
ctcctgaattagcctcctgtacttaccaagagccagagtggaccctgagaaatgtagcaactcaacctattccttctctg

SEQ ID NO: 106036 - DNA, 80 bp, synthetic construct; identical to SEQ ID NO: 36728
  misc_feature 1..80: note = Artificially Synthesized Probe
  source 1..80: mol_type = other DNA

SEQ ID NO: 106037 - DNA, 80 bp, synthetic construct
  misc_feature 1..80: note = Artificially Synthesized Probe
  source 1..80: mol_type = other DNA
gcaggtctggaagaaaggcaggaatcagataagaatcaaagattttacctccaacaaaagaccctgacaactctgaagta

SEQ ID NO: 106038 - DNA, 80 bp, synthetic construct
  misc_feature 1..80: note = Artificially Synthesized Probe
  source 1..80: mol_type = other DNA
ggttttcgatcagggcaaatacctgatcacagaccttcacaggattctggatgatagtcatggagttgagcagggaagta

SEQ ID NO: 106039 - DNA, 80 bp, synthetic construct
  misc_feature 1..80: note = Artificially Synthesized Probe
  source 1..80: mol_type = other DNA
ctagcagttctaggccttcaggtaagggcactgctctagcatatagtcgtctaagagggattgattttaagagtccagag

SEQ ID NO: 106040 - DNA, 80 bp, synthetic construct; identical to SEQ ID NO: 36729
  misc_feature 1..80: note = Artificially Synthesized Probe
  source 1..80: mol_type = other DNA

SEQ ID NO: 106041 - DNA, 80 bp, synthetic construct
  misc_feature 1..80: note = Artificially Synthesized Probe
  source 1..80: mol_type = other DNA
gtttgacagtgagcaatggattgggaaataaaggagcaaggtcctgttccttatcaagtcctactcagagaacacagaaa

SEQ ID NO: 106042 - DNA, 80 bp, synthetic construct
  misc_feature 1..80: note = Artificially Synthesized Probe
  source 1..80: mol_type = other DNA
agaacatatcagaaatgaggagtgggaagagtagaaaaccactgcctggtcatttgtggcctagatatgcaggaaaaaga

SEQ ID NO: 106043 - DNA, 80 bp, synthetic construct; identical to SEQ ID NO: 36730
  misc_feature 1..80: note = Artificially Synthesized Probe
  source 1..80: mol_type = other DNA

SEQ ID NO: 106044 - DNA, 80 bp, synthetic construct
  misc_feature 1..80: note = Artificially Synthesized Probe
  source 1..80: mol_type = other DNA
gctaccatttaatacttctggctatcatgctacggaaaccatatgaagaaccatgtggagaaaagaggcactgaggttac

SEQ ID NO: 106045 - DNA, 80 bp, synthetic construct
  misc_feature 1..80: note = Artificially Synthesized Probe
  source 1..80: mol_type = other DNA
ttaggttactacgttttggggtagtttattatgcaacaatggataactgaaacgttcttttgttcaggatccttgggatc

SEQ ID NO: 106046 - DNA, 80 bp, synthetic construct
  misc_feature 1..80: note = Artificially Synthesized Probe
  source 1..80: mol_type = other DNA
agagagagagagagagagagagagaagatcatggttttgaaccaacaaggctttaagagatgtggagcctatttctgatg

SEQ ID NO: 106047 - DNA, 80 bp, synthetic construct
  misc_feature 1..80: note = Artificially Synthesized Probe
  source 1..80: mol_type = other DNA
ccacaaaatgcacgactatttacactaagtgggaaaactaaggattataaaagtcttatgacagttcgtgtcaggtttag

SEQ ID NO: 106048 - DNA, 80 bp, synthetic construct; identical to SEQ ID NO: 36731
  misc_feature 1..80: note = Artificially Synthesized Probe
  source 1..80: mol_type = other DNA

SEQ ID NO: 106049 - DNA, 80 bp, synthetic construct
  misc_feature 1..80: note = Artificially Synthesized Probe
  source 1..80: mol_type = other DNA
atttgcaccaaaatgggtgtcagctccccttctagagccagaaggccctaaagagaaagcacaaggtctatttgtttccc

SEQ ID NO: 106050 - DNA, 80 bp, synthetic construct
  misc_feature 1..80: note = Artificially Synthesized Probe
  source 1..80: mol_type = other DNA
ctgaaatgctccaactggttctccaaactctctgcttctctacctaatggaaactgggactacagaactgtagtatgcac

SEQ ID NO: 106051 - DNA, 80 bp, synthetic construct
  misc_feature 1..80: note = Artificially Synthesized Probe
  source 1..80: mol_type = other DNA
aaatactcgtggaagaaaaaatattcattcccccactgtctctgtcccttcattttccccaacttactctctaatcattt

SEQ ID NO: 106052 - DNA, 80 bp, synthetic construct
  misc_feature 1..80: note = Artificially Synthesized Probe
  source 1..80: mol_type = other DNA
tccctctgtggatctgaaggaataagaggcagtgaatggtctagatctaagaaaaatagtgggaacatctaaaccttagg

SEQ ID NO: 106053 - DNA, 80 bp, synthetic construct; identical to SEQ ID NO: 36732
  misc_feature 1..80: note = Artificially Synthesized Probe
  source 1..80: mol_type = other DNA

SEQ ID NO: 106054 - DNA, 80 bp, synthetic construct
  misc_feature 1..80: note = Artificially Synthesized Probe
  source 1..80: mol_type = other DNA
acagccttgtgatatccagcacctcctagaggaaataataaggtatccatgcagaaggccaagtcctagacagttacctt

SEQ ID NO: 106055 - DNA, 80 bp, synthetic construct
  misc_feature 1..80: note = Artificially Synthesized Probe
  source 1..80: mol_type = other DNA
agtaaagaagtagccttaatatcctgctagtggtctgattcaggcaaatcaaaaaggtcaaacagaaacagaagagggag

SEQ ID NO: 106056 - DNA, 80 bp, synthetic construct
  misc_feature 1..80: note = Artificially Synthesized Probe
  source 1..80: mol_type = other DNA
ttccctgtcttgtagccaccatgtttttcaaacagagcaaaaaacctgaagaagtaacgagaagcttcagtgtggcatga

SEQ ID NO: 106057 - DNA, 80 bp, synthetic construct; identical to SEQ ID NO: 36733
  misc_feature 1..80: note = Artificially Synthesized Probe
  source 1..80: mol_type = other DNA

SEQ ID NO: 106058 - DNA, 80 bp, synthetic construct
  misc_feature 1..80: note = Artificially Synthesized Probe
  source 1..80: mol_type = other DNA
ttatccaggcatggtgccacacgcctgtggtcccagctatttgggaggctgaggtgggagcatcacttgagcccaggaga

SEQ ID NO: 106059 - DNA, 80 bp, synthetic construct
  misc_feature 1..80: note = Artificially Synthesized Probe
  source 1..80: mol_type = other DNA
gtaatcccagctcgttggaaggccgaggcgggtggatcacttgacgtcaggagttcaagatcagcctggtcacatgatga

SEQ ID NO: 106060 - DNA, 80 bp, synthetic construct
  misc_feature 1..80: note = Artificially Synthesized Probe
  source 1..80: mol_type = other DNA
cgggggaatataagtggagttaagaagactgtgtataagaggcctaggctccgttagtcagatagtgtggggtcaggaag

SEQ ID NO: 106061 - DNA, 80 bp, synthetic construct; identical to SEQ ID NO: 36734
  misc_feature 1..80: note = Artificially Synthesized Probe
  source 1..80: mol_type = other DNA

SEQ ID NO: 106062 - DNA, 80 bp, synthetic construct
  misc_feature 1..80: note = Artificially Synthesized Probe
  source 1..80: mol_type = other DNA
gttactagggaggagtacataggggcttcgattatatacacacacacacacacacacacacacacacacacacacacgta

SEQ ID NO: 106063 - DNA, 80 bp, synthetic construct
  misc_feature 1..80: note = Artificially Synthesized Probe
  source 1..80: mol_type = other DNA
atatatgtgtacgtgtgtgtgtgtgtgtgtgtgtgtgtgtgtgtgtatatatatatatatatatatattttttttttttt

SEQ ID NO: 106064 - DNA, 80 bp, synthetic construct
  misc_feature 1..80: note = Artificially Synthesized Probe
  source 1..80: mol_type = other DNA
taattttttttttttttgggtttttttttttgagatggagtctcactcttgtcacccaggctggagtacagcggcatgat

SEQ ID NO: 106065 - DNA, 80 bp, synthetic construct; identical to SEQ ID NO: 36690
  misc_feature 1..80: note = Artificially Synthesized Probe
  source 1..80: mol_type = other DNA

SEQ ID NO: 106066 - DNA, 80 bp, synthetic construct
  misc_feature 1..80: note = Artificially Synthesized Probe
  source 1..80: mol_type = other DNA
aagtcctgacctcaggtgatccacgcaccctggcctcccaaagtgctgggattacaggcggaagccactgagcctggcca

SEQ ID NO: 106067 - DNA, 80 bp, synthetic construct; identical to SEQ ID NO: 36735
  misc_feature 1..80: note = Artificially Synthesized Probe
  source 1..80: mol_type = other DNA

SEQ ID NO: 106068 - DNA, 80 bp, synthetic construct
  misc_feature 1..80: note = Artificially Synthesized Probe
  source 1..80: mol_type = other DNA
gaggagcccttcctttcttatttttattttttaatttaattaattaattaatttatttatttattgggacgcagttttgc

SEQ ID NO: 106069 - DNA, 80 bp, synthetic construct
  misc_feature 1..80: note = Artificially Synthesized Probe
  source 1..80: mol_type = other DNA
tttcaccatgttgaccaggctggtctctaactcctgacctcaggtgacccacccgcctcagcctctcaaagtgctgagtt

SEQ ID NO: 106070 - DNA, 80 bp, synthetic construct; identical to SEQ ID NO: 36736
  misc_feature 1..80: note = Artificially Synthesized Probe
  source 1..80: mol_type = other DNA

SEQ ID NO: 106071 - DNA, 80 bp, synthetic construct
  misc_feature 1..80: note = Artificially Synthesized Probe
  source 1..80: mol_type = other DNA
atggcagtcagcatgactggatatcgaatctctttcccctcactgtctcgttcaaccttcccatccaaagctggagattt

SEQ ID NO: 106072 - DNA, 80 bp, synthetic construct
  misc_feature 1..80: note = Artificially Synthesized Probe
  source 1..80: mol_type = other DNA
aaatcctgagcattaaggagactgaccaacatttttcctactgagccttactgaagtatcattatgaatttctcctcggg

SEQ ID NO: 106073 - DNA, 80 bp, synthetic construct
  misc_feature 1..80: note = Artificially Synthesized Probe
  source 1..80: mol_type = other DNA
ttatcttcacctgaatatgaaagccaatcacattcacatcatgttattttctaggacctcctccccatatacttccacct

SEQ ID NO: 106074 - DNA, 80 bp, synthetic construct; identical to SEQ ID NO: 36737
  misc_feature 1..80: note = Artificially Synthesized Probe
  source 1..80: mol_type = other DNA

SEQ ID NO: 106075 - DNA, 80 bp, synthetic construct
  misc_feature 1..80: note = Artificially Synthesized Probe
  source 1..80: mol_type = other DNA
agggcttgggaaagacagctccattgacctctacttggtcttcaccttctatcaggttgcattctgaaaggtggatgtgt

SEQ ID NO: 106076 - DNA, 80 bp, synthetic construct
  misc_feature 1..80: note = Artificially Synthesized Probe
  source 1..80: mol_type = other DNA
aactctgtgtggctccactgttcacattgttaccaaaaataactagtgatagattagagataataaacaagatgggaaaa

SEQ ID NO: 106077 - DNA, 80 bp, synthetic construct
  misc_feature 1..80: note = Artificially Synthesized Probe
  source 1..80: mol_type = other DNA
aaccccacccataatccaataaccaaaaccccacatagataggtggtatacaggagatgtctagaagatggaaacgtggc

SEQ ID NO: 106078 - DNA, 80 bp, synthetic construct
  misc_feature 1..80: note = Artificially Synthesized Probe
  source 1..80: mol_type = other DNA
aatagctgggagaggtgggagtaactaaggggagaggctggggatttcatttgcacaggattaaaagacaccagggcaca

SEQ ID NO: 106079 - DNA, 80 bp, synthetic construct; identical to SEQ ID NO: 36738
  misc_feature 1..80: note = Artificially Synthesized Probe
  source 1..80: mol_type = other DNA

SEQ ID NO: 106080 - DNA, 80 bp, synthetic construct
  misc_feature 1..80: note = Artificially Synthesized Probe
  source 1..80: mol_type = other DNA
acccattcaacccatcacttattcttcttcccagctccccaagtctaggatatttatcaagaaaaagtaaaacagaagtt

SEQ ID NO: 106081 - DNA, 80 bp, synthetic construct
  misc_feature 1..80: note = Artificially Synthesized Probe
  source 1..80: mol_type = other DNA
aactccttggcaccattctctagtgtgtcacaagtagctgacggctctttactaaggaaataagacaataagaacctcat

SEQ ID NO: 106082 - DNA, 80 bp, synthetic construct
  misc_feature 1..80: note = Artificially Synthesized Probe
  source 1..80: mol_type = other DNA
tctgcagagtcgctctaggatttgagtcattggcttggacttggatttcttggtcatggcacagatgccaacaatgatct

SEQ ID NO: 106083 - DNA, 80 bp, synthetic construct; identical to SEQ ID NO: 36739
  misc_feature 1..80: note = Artificially Synthesized Probe
  source 1..80: mol_type = other DNA

SEQ ID NO: 106084 - DNA, 80 bp, synthetic construct
  misc_feature 1..80: note = Artificially Synthesized Probe
  source 1..80: mol_type = other DNA
tctcctgcctagacctcccgagtagctgggattacaggcgcccaccaccacacccagctaatttttgtatttttagtaga

SEQ ID NO: 106085 - DNA, 80 bp, synthetic construct
  misc_feature 1..80: note = Artificially Synthesized Probe
  source 1..80: mol_type = other DNA
aggatagggcctgtttatgacagggagtctatgcattcggaaagaacagagaggtatctctaaccaatagaatcttaact

SEQ ID NO: 106086 - DNA, 80 bp, synthetic construct
  misc_feature 1..80: note = Artificially Synthesized Probe
  source 1..80: mol_type = other DNA
gtggtactctcgccctcactggccgtcaatgaccacatccctgccggaacacccactcatcccgctctgcagaggggggt

SEQ ID NO: 106087 - DNA, 80 bp, synthetic construct
  misc_feature 1..80: note = Artificially Synthesized Probe
  source 1..80: mol_type = other DNA
cgccatctcagctcactgcaagctctgccattctcctgcctcagccttccgagtagctgggactacaggcacccaccacc

SEQ ID NO: 106088 - DNA, 80 bp, synthetic construct
  misc_feature 1..80: note = Artificially Synthesized Probe
  source 1..80: mol_type = other DNA
gccataaaagaaaagcaaggtatcccttttcctccctgctcaccccaccccaaccaataaattagtaagaggatcagata

SEQ ID NO: 106089 - DNA, 80 bp, synthetic construct; identical to SEQ ID NO: 36740
  misc_feature 1..80: note = Artificially Synthesized Probe
  source 1..80: mol_type = other DNA

SEQ ID NO: 106090 - DNA, 80 bp, synthetic construct
  misc_feature 1..80: note = Artificially Synthesized Probe
  source 1..80: mol_type = other DNA
ggatcacttgagtccaggagttcaagaccagccaggcaacatgtcaaaacccagtttctacaaaaacattcaaaaattag

SEQ ID NO: 106091 - DNA, 80 bp, synthetic construct
  misc_feature 1..80: note = Artificially Synthesized Probe
  source 1..80: mol_type = other DNA
aaaataataaaacccccatgctctctctctccttcatctactccaccttaaaagacagttgcacagccagataccatggt

SEQ ID NO: 106092 - DNA, 80 bp, synthetic construct; identical to SEQ ID NO: 36686
  misc_feature 1..80: note = Artificially Synthesized Probe
  source 1..80: mol_type = other DNA

SEQ ID NO: 106093 - DNA, 80 bp, synthetic construct; identical to SEQ ID NO: 36741
  misc_feature 1..80: note = Artificially Synthesized Probe
  source 1..80: mol_type = other DNA

SEQ ID NO: 106094 - DNA, 80 bp, synthetic construct
  misc_feature 1..80: note = Artificially Synthesized Probe
  source 1..80: mol_type = other DNA
tcggccaggcacggtggctcacgcctgtaatcccagcactttgggacgccgaggcgggtgatcacgaggtcaggagatcg

SEQ ID NO: 106095 - DNA, 80 bp, synthetic construct
  misc_feature 1..80: note = Artificially Synthesized Probe
  source 1..80: mol_type = other DNA
catgtcactgcactccagcctgggcaaaagagcaagactccgtctcaaaaaaaaaaaaaataccgtttcaaaaggaaaaa

SEQ ID NO: 106096 - DNA, 80 bp, synthetic construct
  misc_feature 1..80: note = Artificially Synthesized Probe
  source 1..80: mol_type = other DNA
ccaatttttgtattttttttttttagtagagacggggtttcaccatgcggtccaggctagtctcgaactcctgacctcat

SEQ ID NO: 106097 - DNA, 80 bp, synthetic construct
  misc_feature 1..80: note = Artificially Synthesized Probe
  source 1..80: mol_type = other DNA
actcaatagactgaggtggaaggtttgtttaagcccaagaggtcaaggctgcagtgagctgtgatcgtgccactgcactc

SEQ ID NO: 106098 - DNA, 80 bp, synthetic construct; identical to SEQ ID NO: 36742
  misc_feature 1..80: note = Artificially Synthesized Probe
  source 1..80: mol_type = other DNA

SEQ ID NO: 106099 - DNA, 80 bp, synthetic construct
  misc_feature 1..80: note = Artificially Synthesized Probe
  source 1..80: mol_type = other DNA
ctgtgtacacacaagtaatgtagttgttctcaaccagctgtgattttgctacacaggggacttttggcaggagacatttt

SEQ ID NO: 106100 - DNA, 80 bp, synthetic construct
  misc_feature 1..80: note = Artificially Synthesized Probe
  source 1..80: mol_type = other DNA
ttctaaatatctaggttgtctgctagtcatctttactggagaaaactgtagagatcaaatagggatgaaaggggaatgaa

SEQ ID NO: 106101 - DNA, 80 bp, synthetic construct
  misc_feature 1..80: note = Artificially Synthesized Probe
  source 1..80: mol_type = other DNA
tctcctacataagacttttgtgaggaacttcttaatcctcttcatctctctgttggtaatgagaaaaactgaaaacagtt

SEQ ID NO: 106102 - DNA, 80 bp, synthetic construct
  misc_feature 1..80: note = Artificially Synthesized Probe
  source 1..80: mol_type = other DNA
tacatatggtttatgactgcatatataattagtagaagtataaaaacagggactggaaagaaagacatcaaattcatgat

SEQ ID NO: 106103 - DNA, 80 bp, synthetic construct; identical to SEQ ID NO: 36743
  misc_feature 1..80: note = Artificially Synthesized Probe
  source 1..80: mol_type = other DNA

SEQ ID NO: 106104 - DNA, 80 bp, synthetic construct
  misc_feature 1..80: note = Artificially Synthesized Probe
  source 1..80: mol_type = other DNA
tttcaaactctttcattacaactggggtttgcagttttgactagaaagttctagctgaccaccaggcacagtggctcaca

SEQ ID NO: 106105 - DNA, 80 bp, synthetic construct
  misc_feature 1..80: note = Artificially Synthesized Probe
  source 1..80: mol_type = other DNA
gctggggctggagaatcgcttgaaaccaggaggcagaggttgcagtgagccgagatcacgccactgcactccagcctggg

SEQ ID NO: 106106 - DNA, 80 bp, synthetic construct
  misc_feature 1..80: note = Artificially Synthesized Probe
  source 1..80: mol_type = other DNA
tatttcttgttgtgcactgcaggtctcacacacacactcttacccctgataaaaacgctatttttttgaattccttttca

SEQ ID NO: 106107 - DNA, 80 bp, synthetic construct; identical to SEQ ID NO: 36744
  misc_feature 1..80: note = Artificially Synthesized Probe
  source 1..80: mol_type = other DNA

SEQ ID NO: 106108 - DNA, 80 bp, synthetic construct
  misc_feature 1..80: note = Artificially Synthesized Probe
  source 1..80: mol_type = other DNA
cagagccgcttccctgttttccatgctcttctccccatccgcctctcccccaagctttgttgtgaaagaaaagaaaactt

SEQ ID NO: 106109 - DNA, 80 bp, synthetic construct
  misc_feature 1..80: note = Artificially Synthesized Probe
  source 1..80: mol_type = other DNA
atggagaaaccccgtctctactaaaaatacaaaatttagctgggcgtggtggtgcatgcctgtaatcccagctacttggg

SEQ ID NO: 106110 - DNA, 80 bp, synthetic construct
  misc_feature 1..80: note = Artificially Synthesized Probe
  source 1..80: mol_type = other DNA
caggaacatctatgttagatctggagaaggggtagaagggagggtaaacggtgtaacttctttaacccttagaatttagg

SEQ ID NO: 106111 - DNA, 80 bp, synthetic construct; identical to SEQ ID NO: 36745
  misc_feature 1..80: note = Artificially Synthesized Probe
  source 1..80: mol_type = other DNA

SEQ ID NO: 106112 - DNA, 80 bp, synthetic construct
  misc_feature 1..80: note = Artificially Synthesized Probe
  source 1..80: mol_type = other DNA
tattaaactccttcaccctctcgcacgagtcatcatacttggtaacatctttatattgacccctcagtgaccccccacaa

SEQ ID NO: 106113 - DNA, 80 bp, synthetic construct
  misc_feature 1..80: note = Artificially Synthesized Probe
  source 1..80: mol_type = other DNA
ccgctcctccatcctcccacaggaccccctcttcctcacgcagacccccacatacctatctcctctcccgccgaccccct

SEQ ID NO: 106114 - DNA, 80 bp, synthetic construct
  misc_feature 1..80: note = Artificially Synthesized Probe
  source 1..80: mol_type = other DNA
gaaccccagccctgggaacccaccaagcccactctaccgcgcccacccggtccgataccgcccccagccccagccactcc

SEQ ID NO: 106115 - DNA, 80 bp, synthetic construct; identical to SEQ ID NO: 36691
  misc_feature 1..80: note = Artificially Synthesized Probe
  source 1..80: mol_type = other DNA

SEQ ID NO: 106116 - DNA, 80 bp, synthetic construct
  misc_feature 1..80: note = Artificially Synthesized Probe
  source 1..80: mol_type = other DNA
tcttcatgacttttgtctaggcagttccaaaaggattacttacaccaagggggcttctcagagcgctgctggagttgcag

SEQ ID NO: 106117 - DNA, 80 bp, synthetic construct
  misc_feature 1..80: note = Artificially Synthesized Probe
  source 1..80: mol_type = other DNA
gtcaaagccaacttacccttccttggctgagaagtagcatttcctggggacccttcaaccaaaccattttcaatttttta

SEQ ID NO: 106118 - DNA, 80 bp, synthetic construct; identical to SEQ ID NO: 36692
  misc_feature 1..80: note = Artificially Synthesized Probe
  source 1..80: mol_type = other DNA

SEQ ID NO: 106119 - DNA, 80 bp, synthetic construct
  misc_feature 1..80: note = Artificially Synthesized Probe
  source 1..80: mol_type = other DNA
gccggcatggtggcacatgcctgtaatcccagctatttggaaggctgaggcttgagaatcgcttgaacttgggaggcaga

SEQ ID NO: 106120 - DNA, 80 bp, synthetic construct
  misc_feature 1..80: note = Artificially Synthesized Probe
  source 1..80: mol_type = other DNA
tgaggccagaagctcaagacaagcctggtcaacatggagaaaccccgtctactaaaaatgtaaaaattaaggccgggcac

SEQ ID NO: 106121 - DNA, 80 bp, synthetic construct
  misc_feature 1..80: note = Artificially Synthesized Probe
  source 1..80: mol_type = other DNA
tttaggaggctgaggcaggagaattgcttgaacccaggaaacagaggttgcagtgagccgagatcgcatcattgcactcc

SEQ ID NO: 106122 - DNA, 80 bp, synthetic construct
  misc_feature 1..80: note = Artificially Synthesized Probe
  source 1..80: mol_type = other DNA
actctaccatgggcgacagagagagactctgtctcaaaaaaaaaaaaaaaaaaaagagaagagaaaagatatatataaag

SEQ ID NO: 106123 - DNA, 80 bp, synthetic construct; identical to SEQ ID NO: 36693
  misc_feature 1..80: note = Artificially Synthesized Probe
  source 1..80: mol_type = other DNA

SEQ ID NO: 106124 - DNA, 80 bp, synthetic construct
  misc_feature 1..80: note = Artificially Synthesized Probe
  source 1..80: mol_type = other DNA
gtgaagcggcatttcctttaacaatctgtgatttcctaggatgctcagagaaggctgggtaatgacagaccaacccaccc

SEQ ID NO: 106125 - DNA, 80 bp, synthetic construct
  misc_feature 1..80: note = Artificially Synthesized Probe
  source 1..80: mol_type = other DNA
cactcctggctaattttttgtattttagtagagatgggcttttaccatgctgcctaggctgatcttgaactcctgggctc

SEQ ID NO: 106126 - DNA, 80 bp, synthetic construct
  misc_feature 1..80: note = Artificially Synthesized Probe
  source 1..80: mol_type = other DNA
ctacccactcccattcccatccctggatctttggaaaaagcttcataatcatatctggccctcagacacaatgatataag

SEQ ID NO: 106127 - DNA, 80 bp, synthetic construct
  misc_feature 1..80: note = Artificially Synthesized Probe
  source 1..80: mol_type = other DNA
aggaattcaagaccagcctggccaatatggagaaattccatttctacaaaaaatacaaaaactagccaggcgtggtggtg

SEQ ID NO: 106128 - DNA, 80 bp, synthetic construct; identical to SEQ ID NO: 36694
  misc_feature 1..80: note = Artificially Synthesized Probe
  source 1..80: mol_type = other DNA

SEQ ID NO: 106129 - DNA, 80 bp, synthetic construct
  misc_feature 1..80: note = Artificially Synthesized Probe
  source 1..80: mol_type = other DNA
ccattataagtaaggctaagtttactaactaggttaaggtggcaccaacaagatctcattgtgaagctttccccttctga

SEQ ID NO: 106130 - DNA, 80 bp, synthetic construct
  misc_feature 1..80: note = Artificially Synthesized Probe
  source 1..80: mol_type = other DNA
agtagagagttagtgaaaaatattttccaatagtgctggatgagtattaatttgtcttatttacttaattttggcggggg

SEQ ID NO: 106131 - DNA, 80 bp, synthetic construct
  misc_feature 1..80: note = Artificially Synthesized Probe
  source 1..80: mol_type = other DNA
tttttgtagagatggggtttcaccatgttgcccaggctggtctcgaactcctgaactcaagtgattcccctgccttggcc

SEQ ID NO: 106132 - DNA, 80 bp, synthetic construct
  misc_feature 1..80: note = Artificially Synthesized Probe
  source 1..80: mol_type = other DNA
aggctcttactctgtcagtggctggaatgcagtgatgctagcacagttcactgcagcctcaaactcctgggctcaagcaa

SEQ ID NO: 106133 - DNA, 80 bp, synthetic construct; identical to SEQ ID NO: 36695
  misc_feature 1..80: note = Artificially Synthesized Probe
  source 1..80: mol_type = other DNA

SEQ ID NO: 106134 - DNA, 80 bp, synthetic construct
  misc_feature 1..80: note = Artificially Synthesized Probe
  source 1..80: mol_type = other DNA
attccaaacaaaattggttcttggtgggggtaacaaaatcttagctattccaatggtaaatggtcacaatacataaacag

SEQ ID NO: 106135 - DNA, 80 bp, synthetic construct
  misc_feature 1..80: note = Artificially Synthesized Probe
  source 1..80: mol_type = other DNA
gtggcacatgtatacatatgtaacaaacctgcacgttgtacacatgtaccctaaaacttaaagtataataaacaaacaaa

SEQ ID NO: 106136 - DNA, 80 bp, synthetic construct
  misc_feature 1..80: note = Artificially Synthesized Probe
  source 1..80: mol_type = other DNA
attggacaatggtgacttcaaggtcacaactcctgacacgtctaccacccaacacaataaagtcagcacatctcccaaga

SEQ ID NO: 106137 - DNA, 80 bp, synthetic construct
  misc_feature 1..80: note = Artificially Synthesized Probe
  source 1..80: mol_type = other DNA
agaagactacttccgctaaagagacacaaagtatagagaaaacatctgctaaagatttagcacccacatctaaagtgctg

SEQ ID NO: 106138 - DNA, 80 bp, synthetic construct
  misc_feature 1..80: note = Artificially Synthesized Probe
  source 1..80: mol_type = other DNA
taaaatcaaataaattattgataaataacttattttggcatcatttagacatagataccatattataataaactatagtg

SEQ ID NO: 106139 - DNA, 80 bp, synthetic construct
  misc_feature 1..80: note = Artificially Synthesized Probe
  source 1..80: mol_type = other DNA
cacccaccaccaccaagtctgcacccaccactcccaaggagcctgcacccaccaccaccaaggagcctgcacccaccact

SEQ ID NO: 106140 - DNA, 80 bp, synthetic construct
  misc_feature 1..80: note = Artificially Synthesized Probe
  source 1..80: mol_type = other DNA
cctacacccaccactcccaaggagcctgcacccaccaccaaggagcctgcacccaccactcccaaagagcctgcacccac

SEQ ID NO: 106141 - DNA, 80 bp, synthetic construct
  misc_feature 1..80: note = Artificially Synthesized Probe
  source 1..80: mol_type = other DNA
ggattatgtttatgcaatacacctgttggaagcctttgaatttatattgagaattaagaaaaagttggaacagtaactcc

SEQ ID NO: 106142 - DNA, 80 bp, synthetic construct; identical to SEQ ID NO: 36757
  misc_feature 1..80: note = Artificially Synthesized Probe
  source 1..80: mol_type = other DNA

SEQ ID NO: 106143 - DNA, 80 bp, synthetic construct
  misc_feature 1..80: note = Artificially Synthesized Probe
  source 1..80: mol_type = other DNA
accacccccaagaagctcacgcccaccacccccgagaagctcgcacccaccacccctgagaagcccgcacccaccacccc

SEQ ID NO: 106144 - DNA, 80 bp, synthetic construct
  misc_feature 1..80: note = Artificially Synthesized Probe
  source 1..80: mol_type = other DNA
actacccctaaggagactgctccaactacccctaaagggactgctccaactaccctcaaggaacctgcacccactactcc

SEQ ID NO: 106145 - DNA, 80 bp, synthetic construct
  misc_feature 1..80: note = Artificially Synthesized Probe
  source 1..80: mol_type = other DNA
aactacccctaaggggactgctccaactaccctcaaggaacctgcacccactactcccaagaagcctgcccccaaggagc

SEQ ID NO: 106146 - DNA, 80 bp, synthetic construct; identical to SEQ ID NO: 36758
  misc_feature 1..80: note = Artificially Synthesized Probe
  source 1..80: mol_type = other DNA

SEQ ID NO: 106147 - DNA, 80 bp, synthetic construct
  misc_feature 1..80: note = Artificially Synthesized Probe
  source 1..80: mol_type = other DNA
gaaactacaactgctgcacctaagatgacaaaagagacagcaactacaacagaaaaaactaccgaatccaaaataacagc

SEQ ID NO: 106148 - DNA, 80 bp, synthetic construct
  misc_feature 1..80: note = Artificially Synthesized Probe
  source 1..80: mol_type = other DNA
taaaccaaaagacagagctactaattctaaagcgacaactcctaaacctcaaaagccaaccaaagcacccaaaaaaccca

SEQ ID NO: 106149 - DNA, 80 bp, synthetic construct; identical to SEQ ID NO: 36759
  misc_feature 1..80: note = Artificially Synthesized Probe
  source 1..80: mol_type = other DNA

SEQ ID NO: 106150 - DNA, 80 bp, synthetic construct; identical to SEQ ID NO: 36747
  misc_feature 1..80: note = Artificially Synthesized Probe
  source 1..80: mol_type = other DNA

SEQ ID NO: 106151 - DNA, 80 bp, synthetic construct
  misc_feature 1..80: note = Artificially Synthesized Probe
  source 1..80: mol_type = other DNA
tatctgaaccagaatgccttagtttagtatcactcaactgagatatattacctgaccttgttagcttgtgaagttttaca

SEQ ID NO: 106152 - DNA, 80 bp, synthetic construct
  misc_feature 1..80: note = Artificially Synthesized Probe
  source 1..80: mol_type = other DNA
agtacaatgcaaagcaaaaatctgtagtatcattttccaaactaacccaaagggagggcaatcagaactgaaagatgcaa

SEQ ID NO: 106153 - DNA, 80 bp, synthetic construct
  misc_feature 1..80: note = Artificially Synthesized Probe
  source 1..80: mol_type = other DNA
tgcaaacaggtcaaactgtgtccttcaagatcttagaaaaggtaaacaggaaatagaaccatgtggaaagacttgaaaag

SEQ ID NO: 106154 - DNA, 80 bp, synthetic construct; identical to SEQ ID NO: 36760
  misc_feature 1..80: note = Artificially Synthesized Probe
  source 1..80: mol_type = other DNA

SEQ ID NO: 106155 - DNA, 80 bp, synthetic construct
  misc_feature 1..80: note = Artificially Synthesized Probe
  source 1..80: mol_type = other DNA
tgaactgatactactgaggttttttcctactgttaagatttaaaaagtagttcattttttttggggggggggggtagtta

SEQ ID NO: 106156 - DNA, 80 bp, synthetic construct
  misc_feature 1..80: note = Artificially Synthesized Probe
  source 1..80: mol_type = other DNA
tctctgctgtactctgctagtccagtcttgaaacatatttagattaaatctgaaagcaattccttttcgtacagtagagg

SEQ ID NO: 106157 - DNA, 80 bp, synthetic construct
  misc_feature 1..80: note = Artificially Synthesized Probe
  source 1..80: mol_type = other DNA
gcaattacggctcaatgcaggctcgatctcctgggcccaagtgatcctcccatctcagccacctgagtagctgggactac

SEQ ID NO: 106158 - DNA, 80 bp, synthetic construct
  misc_feature 1..80: note = Artificially Synthesized Probe
  source 1..80: mol_type = other DNA
agccactgcacctggcccaaccaataggctctttctaaagaaactagaaaactaaagtatctcaaaggttatgctaaatt

SEQ ID NO: 106159 - DNA, 80 bp, synthetic construct; identical to SEQ ID NO: 36761
  misc_feature 1..80: note = Artificially Synthesized Probe
  source 1..80: mol_type = other DNA

SEQ ID NO: 106160 - DNA, 80 bp, synthetic construct
  misc_feature 1..80: note = Artificially Synthesized Probe
  source 1..80: mol_type = other DNA
cttttaaatactctgtcatcaaaatttaatcataattcaacagtttgataacagtaatggtcaaaattcaaccgtttaac

SEQ ID NO: 106161 - DNA, 80 bp, synthetic construct
  misc_feature 1..80: note = Artificially Synthesized Probe
  source 1..80: mol_type = other DNA
gattcttatgaaacctgaacatgagtggtaactgtctgcataggcataagttgcagaattgtttagataagaaaagacag

SEQ ID NO: 106162 - DNA, 80 bp, synthetic construct
  misc_feature 1..80: note = Artificially Synthesized Probe
  source 1..80: mol_type = other DNA
ccaattttcaaaggatttggaggactaactggacaaatagtggcagcgctttcaacagctaaatataagaactggcctga

SEQ ID NO: 106163 - DNA, 80 bp, synthetic construct; identical to SEQ ID NO: 36762
  misc_feature 1..80: note = Artificially Synthesized Probe
  source 1..80: mol_type = other DNA

SEQ ID NO: 106164 - DNA, 80 bp, synthetic construct
  misc_feature 1..80: note = Artificially Synthesized Probe
  source 1..80: mol_type = other DNA
gtaatttgctgcatctattcattcaacaagtatttcagtttaataattatttttataatacccttgactaatagccatta

SEQ ID NO: 106165 - DNA, 80 bp, synthetic construct
  misc_feature 1..80: note = Artificially Synthesized Probe
  source 1..80: mol_type = other DNA
tatttataaacaggaacctgtacagaagtgccctggaagaaggcctgctctaaattatccagtgtatggagaaacgacac

SEQ ID NO: 106166 - DNA, 80 bp, synthetic construct
  misc_feature 1..80: note = Artificially Synthesized Probe
  source 1..80: mol_type = other DNA
cagtttcttatacagtaaggcttatgaaatatggatactgatcaaacagccctaataatttaagcttactgatgaaaaac

SEQ ID NO: 106167 - DNA, 80 bp, synthetic construct
  misc_feature 1..80: note = Artificially Synthesized Probe
  source 1..80: mol_type = other DNA
caatagttctacatcagagggctaaaactgagattaaaactcagatgtctggctctttccaagatagtacattgcctttt

SEQ ID NO: 106168 - DNA, 80 bp, synthetic construct; identical to SEQ ID NO: 36763
  misc_feature 1..80: note = Artificially Synthesized Probe
  source 1..80: mol_type = other DNA

SEQ ID NO: 106169 - DNA, 80 bp, synthetic construct
  misc_feature 1..80: note = Artificially Synthesized Probe
  source 1..80: mol_type = other DNA
atgatggcactgcaattcaattctgctctaaccttcatgagattacgataaaacatccagttactagagtaaacttgcta

SEQ ID NO: 106170 - DNA, 80 bp, synthetic construct
  misc_feature 1..80: note = Artificially Synthesized Probe
  source 1..80: mol_type = other DNA
ggatgcttttctttgaaatgcccagaaatctaagttattctgcctgtaatttcataatatgaatgacattggcatgtatt

SEQ ID NO: 106171 - DNA, 80 bp, synthetic construct
  misc_feature 1..80: note = Artificially Synthesized Probe
  source 1..80: mol_type = other DNA
ttgtttttctttttgttataaagttcaaattaattagtaaaaacatctctattaaaatgataaacattgtctttgagcat

SEQ ID NO: 106172 - DNA, 80 bp, synthetic construct; identical to SEQ ID NO: 36764
  misc_feature 1..80: note = Artificially Synthesized Probe
  source 1..80: mol_type = other DNA

SEQ ID NO: 106173 - DNA, 80 bp, synthetic construct
  misc_feature 1..80: note = Artificially Synthesized Probe
  source 1..80: mol_type = other DNA
tgttcactaaaacagtgttactttcattttaattgtgattaaataaatcaaattaaaattaatggggctgggtgtggtgg

SEQ ID NO: 106174 - DNA, 80 bp, synthetic construct
  misc_feature 1..80: note = Artificially Synthesized Probe
  source 1..80: mol_type = other DNA
ttcctcctctccctcccattgcatggctcacacctgtaaaagaaaaaagaatcaaattgaatatatcttttaagaattca

SEQ ID NO: 106175 - DNA, 80 bp, synthetic construct
  misc_feature 1..80: note = Artificially Synthesized Probe
  source 1..80: mol_type = other DNA
tggaaatattaaaattttacacttttactagctaaaacataatcacaaagctttatcgtgttgtataaaaaaattaacaa

SEQ ID NO: 106176 - DNA, 80 bp, synthetic construct
  misc_feature 1..80: note = Artificially Synthesized Probe
  source 1..80: mol_type = other DNA
tacagattggtaaatatcacctgctcaacatgtaattatttaataaaactttggaacattaaaaaaataaattggaggct

SEQ ID NO: 106177 - DNA, 80 bp, synthetic construct
  misc_feature 1..80: note = Artificially Synthesized Probe
  source 1..80: mol_type = other DNA
tcccagctattcggaggctgaggcaagaggatatcttgaatccaggaggtggaggttgcattaagctgagcttgcatcat

SEQ ID NO: 106178 - DNA, 80 bp, synthetic construct
  misc_feature 1..80: note = Artificially Synthesized Probe
  source 1..80: mol_type = other DNA
cttttgagacagggtcttgctttgtctcccagtctggagtgcagtggcacaatcttggctcactgcaacctccacctacg

SEQ ID NO: 106179 - DNA, 80 bp, synthetic construct; identical to SEQ ID NO: 36748
  misc_feature 1..80: note = Artificially Synthesized Probe
  source 1..80: mol_type = other DNA

SEQ ID NO: 106180 - DNA, 80 bp, synthetic construct
  misc_feature 1..80: note = Artificially Synthesized Probe
  source 1..80: mol_type = other DNA
gcatattcagactttggcattcctggactctattcttttaagatttgttttcagtgtgtttcaacattcctttgtggatt

SEQ ID NO: 106181 - DNA, 80 bp, synthetic construct
  misc_feature 1..80: note = Artificially Synthesized Probe
  source 1..80: mol_type = other DNA
tatttgttgcctggaaaacctctgttcatgacctttatagttatgcccagttattttaagggttctcacttcagcagtgg

SEQ ID NO: 106182 - DNA, 80 bp, synthetic construct
  misc_feature 1..80: note = Artificially Synthesized Probe
  source 1..80: mol_type = other DNA
aagcgacaggtggaaacatctcaggcttaaaataagatatatcagagttcaaattctggatggattgtttacttaaggtg

SEQ ID NO: 106183 - DNA, 80 bp, synthetic construct; identical to SEQ ID NO: 36749
  misc_feature 1..80: note = Artificially Synthesized Probe
  source 1..80: mol_type = other DNA

SEQ ID NO: 106184 - DNA, 80 bp, synthetic construct
  misc_feature 1..80: note = Artificially Synthesized Probe
  source 1..80: mol_type = other DNA
gtggctgagggtgacttgatttgttctgcataagattaagtctaatggccaaatattttctataaaattaaagctgattt

SEQ ID NO: 106185 - DNA, 80 bp, synthetic construct
  misc_feature 1..80: note = Artificially Synthesized Probe
  source 1..80: mol_type = other DNA
agtgaagaataaagtgacataattgagatcacctaagacatcagccaaatatcagctgggcctattgctgacatcattcc

SEQ ID NO: 106186 - DNA, 80 bp, synthetic construct
  misc_feature 1..80: note = Artificially Synthesized Probe
  source 1..80: mol_type = other DNA
ggtattctagagatgccacctgcaactgtgattataactgtcaacactacatggagtgctgccctgatttcaagagagtc

SEQ ID NO: 106187 - DNA, 80 bp, synthetic construct; identical to SEQ ID NO: 36750
  misc_feature 1..80: note = Artificially Synthesized Probe
  source 1..80: mol_type = other DNA

SEQ ID NO: 106188 - DNA, 80 bp, synthetic construct
  misc_feature 1..80: note = Artificially Synthesized Probe
  source 1..80: mol_type = other DNA
tcctcgactagtaatgaggactttcaatagtttcatcaaaagaatacatgagcatggaataatcttgtctaccattggac

SEQ ID NO: 106189 - DNA, 80 bp, synthetic construct
  misc_feature 1..80: note = Artificially Synthesized Probe
  source 1..80: mol_type = other DNA
agaaacatttcctattcaatttaagaaaattgtaattaaagttatttgaaaggtgtatttgctttagaatttgaatgtga

SEQ ID NO: 106190 - DNA, 80 bp, synthetic construct
  misc_feature 1..80: note = Artificially Synthesized Probe
  source 1..80: mol_type = other DNA
aggctgaaagctttcaactatacaccttccccagtttgtcataataagggcctctgcattacaaatgatttttaagcctc

SEQ ID NO: 106191 - DNA, 80 bp, synthetic construct; identical to SEQ ID NO: 36751
  misc_feature 1..80: note = Artificially Synthesized Probe
  source 1..80: mol_type = other DNA

SEQ ID NO: 106192 - DNA, 80 bp, synthetic construct
  misc_feature 1..80: note = Artificially Synthesized Probe
  source 1..80: mol_type = other DNA
tggctgtcaaatacgtgggcctggcttcacaatgaataatctgtaacttcttgttttgctctgggtagagctttcctgta

SEQ ID NO: 106193 - DNA, 80 bp, synthetic construct
  misc_feature 1..80: note = Artificially Synthesized Probe
  source 1..80: mol_type = other DNA
atctgtgcacctaccttagcatcactgataatgtctaacacgcagtccatcttaggccttgattttactaacatataagc

SEQ ID NO: 106194 - DNA, 80 bp, synthetic construct
  misc_feature 1..80: note = Artificially Synthesized Probe
  source 1..80: mol_type = other DNA
tatggttcaatttcaggttaaatcaacagtaatcaaatcacttgatgatttcttgtctcacccttgctgacttcacgaag

SEQ ID NO: 106195 - DNA, 80 bp, synthetic construct; identical to SEQ ID NO: 36746
  misc_feature 1..80: note = Artificially Synthesized Probe
  source 1..80: mol_type = other DNA

SEQ ID NO: 106196 - DNA, 80 bp, synthetic construct; identical to SEQ ID NO: 36752
  misc_feature 1..80: note = Artificially Synthesized Probe
  source 1..80: mol_type = other DNA

SEQ ID NO: 106197 - DNA, 80 bp, synthetic construct
  misc_feature 1..80: note = Artificially Synthesized Probe
  source 1..80: mol_type = other DNA
cttaaattctactttgttaaaacaagaatatttgtggaggtaaaagtgaaaataagctttgcttgcataatcaatcttat

SEQ ID NO: 106198 - DNA, 80 bp, synthetic construct
  misc_feature 1..80: note = Artificially Synthesized Probe
  source 1..80: mol_type = other DNA
gtaataaaaaccttagagctcacccttcctgcagattttagcaggccccatgatgagtgacacatatttactcattaccc

SEQ ID NO: 106199 - DNA, 80 bp, synthetic construct
  misc_feature 1..80: note = Artificially Synthesized Probe
  source 1..80: mol_type = other DNA
ctaaagtttaggtagaactctgaaaaaaaaatgatgaaggcgatgctggccaactttctttacagaattcataagacagt

SEQ ID NO: 106200 - DNA, 80 bp, synthetic construct; identical to SEQ ID NO: 36753
  misc_feature 1..80: note = Artificially Synthesized Probe
  source 1..80: mol_type = other DNA

SEQ ID NO: 106201 - DNA, 80 bp, synthetic construct
  misc_feature 1..80: note = Artificially Synthesized Probe
  source 1..80: mol_type = other DNA
catgatttatcacaacccttctgtacccagagagtccccagtgctgttttcttatccttcattagtccctcttcttgttc

SEQ ID NO: 106202 - DNA, 80 bp, synthetic construct
  misc_feature 1..80: note = Artificially Synthesized Probe
  source 1..80: mol_type = other DNA
agggcagggcattttgaggaaaagcacaatgtgaaggtgtgaacttttcacaagaatattcatgtagaacttttgtaatt

SEQ ID NO: 106203 - DNA, 80 bp, synthetic construct
  misc_feature 1..80: note = Artificially Synthesized Probe
  source 1..80: mol_type = other DNA
aagttcaagataattatttgcctaaggtcacaatggtagaggctcgcaggcctaggactggaatttaggtcttctgattc

SEQ ID NO: 106204 - DNA, 80 bp, synthetic construct; identical to SEQ ID NO: 36754
  misc_feature 1..80: note = Artificially Synthesized Probe
  source 1..80: mol_type = other DNA

SEQ ID NO: 106205 - DNA, 80 bp, synthetic construct
  misc_feature 1..80: note = Artificially Synthesized Probe
  source 1..80: mol_type = other DNA
ggagctttcttagatgaagtaacttgtaggtgactgcttatctaagcccattctcagagaacagggtaatcttaggaatc

SEQ ID NO: 106206 - DNA, 80 bp, synthetic construct
  misc_feature 1..80: note = Artificially Synthesized Probe
  source 1..80: mol_type = other DNA
catgtagcctgtttgtaagtgctttggaattctcatctttttctccttttgagagttttgagcttgtataaagaataatt

SEQ ID NO: 106207 - DNA, 80 bp, synthetic construct
  misc_feature 1..80: note = Artificially Synthesized Probe
  source 1..80: mol_type = other DNA
aaaaaccaccccatgattttctttgtagaataatttgattctgtgttttggaggatatgggaaagttgagagatactagt

SEQ ID NO: 106208 - DNA, 80 bp, synthetic construct
  misc_feature 1..80: note = Artificially Synthesized Probe
  source 1..80: mol_type = other DNA
atcacagttggtgtgatcaaactttctatttgatttatagaacattctgtttctgaaaatcaagagtcctcctcctcctc

SEQ ID NO: 106209 - DNA, 80 bp, synthetic construct
  misc_feature 1..80: note = Artificially Synthesized Probe
  source 1..80: mol_type = other DNA
aaagtaatgcgtgttggcagaatgaggacatcttaatatgggggggaatataactttatgaatattatcttagaaagtac

SEQ ID NO: 106210 - DNA, 80 bp, synthetic construct; identical to SEQ ID NO: 36755
  misc_feature 1..80: note = Artificially Synthesized Probe
  source 1..80: mol_type = other DNA

SEQ ID NO: 106211 - DNA, 80 bp, synthetic construct
  misc_feature 1..80: note = Artificially Synthesized Probe
  source 1..80: mol_type = other DNA
actgtgctacagaataggctattattgcctgaaaagagatttcctttgctgtttattatttcctgaagttctggttctaa

SEQ ID NO: 106212 - DNA, 80 bp, synthetic construct
  misc_feature 1..80: note = Artificially Synthesized Probe
  source 1..80: mol_type = other DNA
gctttgtagtccacatgtggggcagctgctatgggaaagccttgataaatactgtctttttgctgcccatcacaccctaa

SEQ ID NO: 106213 - DNA, 80 bp, synthetic construct; identical to SEQ ID NO: 36756
  misc_feature 1..80: note = Artificially Synthesized Probe
  source 1..80: mol_type = other DNA

SEQ ID NO: 106214 - DNA, 80 bp, synthetic construct
  misc_feature 1..80: note = Artificially Synthesized Probe
  source 1..80: mol_type = other DNA
gataggttgagtatttgccattttacaacaaattaaaggacatagtagagattagcaatttgcttagaaacacacaacta

SEQ ID NO: 106215 - DNA, 80 bp, synthetic construct
  misc_feature 1..80: note = Artificially Synthesized Probe
  source 1..80: mol_type = other DNA
taggtcggtttcggggccatccccgccgcctatccttcgccctaggtcacctggaggtggctggaaggccagtggactcc

SEQ ID NO: 106216 - DNA, 80 bp, synthetic construct
  misc_feature 1..80: note = Artificially Synthesized Probe
  source 1..80: mol_type = other DNA
tcaatcccccaacttctggtggtccccatccctgcctcattttttctccagagcacccattaccaaccatcaaactatat

SEQ ID NO: 106217 - DNA, 80 bp, synthetic construct
  misc_feature 1..80: note = Artificially Synthesized Probe
  source 1..80: mol_type = other DNA
ctggcacacagcaggtgctcaatgattattggtacatagagtgaaagagatggagcctcaggctgacctagagagcaagg

SEQ ID NO: 106218 - DNA, 80 bp, synthetic construct; identical to SEQ ID NO: 36776
  misc_feature 1..80: note = Artificially Synthesized Probe
  source 1..80: mol_type = other DNA

SEQ ID NO: 106219 - DNA, 80 bp, synthetic construct
  misc_feature 1..80: note = Artificially Synthesized Probe
  source 1..80: mol_type = other DNA
agcgccgcgggcgcctgcagctggagatccgggctcccacagcagatgagatccacgtaactggtgaggccccgccccct

SEQ ID NO: 106220 - DNA, 80 bp, synthetic construct
  misc_feature 1..80: note = Artificially Synthesized Probe
  source 1..80: mol_type = other DNA
tggctcgaagccccgcctccaacctggcttcttgcaactttctgcacctgttaatgactttgactttctttttttttttg

SEQ ID NO: 106221 - DNA, 80 bp, synthetic construct
  misc_feature 1..80: note = Artificially Synthesized Probe
  source 1..80: mol_type = other DNA
agagagacatagagagacattcatagagccagagacacagagagattcatagacatatagagagattcagagagcctgaa

SEQ ID NO: 106222 - DNA, 80 bp, synthetic construct
  misc_feature 1..80: note = Artificially Synthesized Probe
  source 1..80: mol_type = other DNA
tttagtacaaacggggtttcaccatgttagccaggctggtctcgaactcctgaccccaggtgatcccctcgactcggcct

SEQ ID NO: 106223 - DNA, 80 bp, synthetic construct
  misc_feature 1..80: note = Artificially Synthesized Probe
  source 1..80: mol_type = other DNA
gggttcaagggattctcctgcctcagcctcccgagtagctggaattacaggcgcctgccaccacatccggctaatttttt

SEQ ID NO: 106224 - DNA, 80 bp, synthetic construct; identical to SEQ ID NO: 36777
  misc_feature 1..80: note = Artificially Synthesized Probe
  source 1..80: mol_type = other DNA

SEQ ID NO: 106225 - DNA, 80 bp, synthetic construct
  misc_feature 1..80: note = Artificially Synthesized Probe
  source 1..80: mol_type = other DNA
aatggagagaagggctctggatctgatttcagggtcactggttgcggaaagggctctatgccctgtcttctgggttctgg

SEQ ID NO: 106226 - DNA, 80 bp, synthetic construct
  misc_feature 1..80: note = Artificially Synthesized Probe
  source 1..80: mol_type = other DNA
gcctcctgagtagctgggaccacagacacctgccaccacgcccagctaatttttttttttttttgtatttttagtggaga

SEQ ID NO: 106227 - DNA, 80 bp, synthetic construct; identical to SEQ ID NO: 36778
  misc_feature 1..80: note = Artificially Synthesized Probe
  source 1..80: mol_type = other DNA

SEQ ID NO: 106228 - DNA, 80 bp, synthetic construct
  misc_feature 1..80: note = Artificially Synthesized Probe
  source 1..80: mol_type = other DNA
gatctgagggtcctagtggcccccagagagcagctgatgggaggggttaggatagagggaacccagaaaagggcagaaga

SEQ ID NO: 106229 - DNA, 80 bp, synthetic construct
  misc_feature 1..80: note = Artificially Synthesized Probe
  source 1..80: mol_type = other DNA
acccaaagagagacacagatggagagggaggggagaagatgggggatggcagggagacagagatcagttgacaggaagac

SEQ ID NO: 106230 - DNA, 80 bp, synthetic construct
  misc_feature 1..80: note = Artificially Synthesized Probe
  source 1..80: mol_type = other DNA
agagcccggctgggaaggtcagaggtcggagaccgacaaagcaggagaggagccccagctggctgggtttgcccccacct

SEQ ID NO: 106231 - DNA, 80 bp, synthetic construct
  misc_feature 1..80: note = Artificially Synthesized Probe
  source 1..80: mol_type = other DNA
tcatagagacatagagattcatagagccagagacacagagattcagagagtcagagagacatagaaagacattcatagag

SEQ ID NO: 106232 - DNA, 80 bp, synthetic construct
  misc_feature 1..80: note = Artificially Synthesized Probe
  source 1..80: mol_type = other DNA
ccatgtcctttggcgtctcggagctgctcaaggcgcccgtggatggctggtgaggagcagggctggggcctggggatgga

SEQ ID NO: 106233 - DNA, 80 bp, synthetic construct; identical to SEQ ID NO: 36779
  misc_feature 1..80: note = Artificially Synthesized Probe
  source 1..80: mol_type = other DNA

SEQ ID NO: 106234 - DNA, 80 bp, synthetic construct
  misc_feature 1..80: note = Artificially Synthesized Probe
  source 1..80: mol_type = other DNA
ggtacccagaccctggcttcctcaagggagcccagcccagcctcccacggttcagagctggcctttccttccacccctga

SEQ ID NO: 106235 - DNA, 80 bp, synthetic construct
  misc_feature 1..80: note = Artificially Synthesized Probe
  source 1..80: mol_type = other DNA
tcccctgcatctcttgggaccctgactctctctttcttttctcccaggcttgtaactaccccctggaattgtatgaggtg

SEQ ID NO: 106236 - DNA, 80 bp, synthetic construct; identical to SEQ ID NO: 36780
  misc_feature 1..80: note = Artificially Synthesized Probe
  source 1..80: mol_type = other DNA

SEQ ID NO: 106237 - DNA, 80 bp, synthetic construct
  misc_feature 1..80: note = Artificially Synthesized Probe
  source 1..80: mol_type = other DNA
ccaggctggagtgcaatggcacaatctcgcctcactgcaacctccagctcccgggttcaagcaattctcttgcctcagcc

SEQ ID NO: 106238 - DNA, 80 bp, synthetic construct
  misc_feature 1..80: note = Artificially Synthesized Probe
  source 1..80: mol_type = other DNA
gcatgagccactgcgcccgaccgattcttgagttttttattttttttttgagacggagtctcgctgtgacgcccaggctg

SEQ ID NO: 106239 - DNA, 80 bp, synthetic construct
  misc_feature 1..80: note = Artificially Synthesized Probe
  source 1..80: mol_type = other DNA
caggatggtctcgatctcctgacctggtgatccacccgcctcagcctcccaaagtgctgggattacaggcgtgagccacc

SEQ ID NO: 106240 - DNA, 80 bp, synthetic construct
  misc_feature 1..80: note = Artificially Synthesized Probe
  source 1..80: mol_type = other DNA
attcagagtcagagagacatagatttatagagccagagacacagattcagggagtcagagagacatagagagacattcat

SEQ ID NO: 106241 - DNA, 80 bp, synthetic construct
  misc_feature 1..80: note = Artificially Synthesized Probe
  source 1..80: mol_type = other DNA
agtgatgcagtctcagctcactgcaacctctgcctcccagattcaagtgattctcctgcctcagcctcctgagtagttgg

SEQ ID NO: 106242 - DNA, 80 bp, synthetic construct; identical to SEQ ID NO: 36781
  misc_feature 1..80: note = Artificially Synthesized Probe
  source 1..80: mol_type = other DNA

SEQ ID NO: 106243 - DNA, 80 bp, synthetic construct
  misc_feature 1..80: note = Artificially Synthesized Probe
  source 1..80: mol_type = other DNA
caaaggagagaccagattttcaggcaggaggaagtaatgctctctccctcatttaccctttcaaaaaatactttacagag

SEQ ID NO: 106244 - DNA, 80 bp, synthetic construct
  misc_feature 1..80: note = Artificially Synthesized Probe
  source 1..80: mol_type = other DNA
aacaaaatatataagcatatgatagactgggcacgatgcctcatgtctgtgatcctagtaaggcgggcggatcacctgag

SEQ ID NO: 106245 - DNA, 80 bp, synthetic construct
  misc_feature 1..80: note = Artificially Synthesized Probe
  source 1..80: mol_type = other DNA
cccagatcgctccactgcactccagcctggatgacagagggagactctgtctcaaaaaaaaaaaaaaaaaaaaagaagac

SEQ ID NO: 106246 - DNA, 80 bp, synthetic construct; identical to SEQ ID NO: 36782
  misc_feature 1..80: note = Artificially Synthesized Probe
  source 1..80: mol_type = other DNA

SEQ ID NO: 106247 - DNA, 80 bp, synthetic construct
  misc_feature 1..80: note = Artificially Synthesized Probe
  source 1..80: mol_type = other DNA
cggtgaatccccgtctctactaaaaatacaaaaaaattagctgggcgtggtggtgggtgcctgtagtcccaggtactcag

SEQ ID NO: 106248 - DNA, 80 bp, synthetic construct
  misc_feature 1..80: note = Artificially Synthesized Probe
  source 1..80: mol_type = other DNA
aggacattctgagccaaagaggtagagtcttttgagatcagcagggatgatcctcccgtacaaacccaagaaacccagca

SEQ ID NO: 106249 - DNA, 80 bp, synthetic construct; identical to SEQ ID NO: 36783
  misc_feature 1..80: note = Artificially Synthesized Probe
  source 1..80: mol_type = other DNA

SEQ ID NO: 106250 - DNA, 80 bp, synthetic construct
  misc_feature 1..80: note = Artificially Synthesized Probe
  source 1..80: mol_type = other DNA
tcacagacacagagggacggggagatccccagaaacagaaagagattcatagagccagagagacaaatagagattgggtc

SEQ ID NO: 106251 - DNA, 80 bp, synthetic construct
  misc_feature 1..80: note = Artificially Synthesized Probe
  source 1..80: mol_type = other DNA
gactacaggcatgtgccaccatgtcctactaatttttatattgctagtagagatggggcttcgccatgttggccaggctg

SEQ ID NO: 106252 - DNA, 80 bp, synthetic construct
  misc_feature 1..80: note = Artificially Synthesized Probe
  source 1..80: mol_type = other DNA
ttagggagctcacaggcagaaagcagatagtcacacagatagatgtaaattactaagaataaaagtgccaggaaggtgct

SEQ ID NO: 106253 - DNA, 80 bp, synthetic construct
  misc_feature 1..80: note = Artificially Synthesized Probe
  source 1..80: mol_type = other DNA
ggaaggggaggggagagctttacaggaagacctaacggcacatccagaggccctgaggtgggagggaggacaatgagtgt

SEQ ID NO: 106254 - DNA, 80 bp, synthetic construct; identical to SEQ ID NO: 36784
  misc_feature 1..80: note = Artificially Synthesized Probe
  source 1..80: mol_type = other DNA

SEQ ID NO: 106255 - DNA, 80 bp, synthetic construct
  misc_feature 1..80: note = Artificially Synthesized Probe
  source 1..80: mol_type = other DNA
agaagctttttacacataacgattctcaggtcccaccccagatttatagagttagaaaatctggcagtgggacccagcaa

SEQ ID NO: 106256 - DNA, 80 bp, synthetic construct
  misc_feature 1..80: note = Artificially Synthesized Probe
  source 1..80: mol_type = other DNA
caagttacttaacgtctctgtgctagtctcctcttctgtaaaatggaaacgatagcagggttttctggaaacagcatatg

SEQ ID NO: 106257 - DNA, 80 bp, synthetic construct
  misc_feature 1..80: note = Artificially Synthesized Probe
  source 1..80: mol_type = other DNA
agtgtttgttgaataataaataaaccctccaggctatggggagtcagagaaaattaagccaaggacagggtaggagggtg

SEQ ID NO: 106258 - DNA, 80 bp, synthetic construct
  misc_feature 1..80: note = Artificially Synthesized Probe
  source 1..80: mol_type = other DNA
tccccttcccctagtcccaccgaccccaagcgctgcttcttcggggcgagtccaggacgcctgcacatctccgacttcag

SEQ ID NO: 106259 - DNA, 80 bp, synthetic construct; identical to SEQ ID NO: 36785
  misc_feature 1..80: note = Artificially Synthesized Probe
  source 1..80: mol_type = other DNA

SEQ ID NO: 106260 - DNA, 80 bp, synthetic construct
  misc_feature 1..80: note = Artificially Synthesized Probe
  source 1..80: mol_type = other DNA
cataggtgatgctggccgagcgcaggggctctgatgagctctacgccatcaagatcttgaaaaaggacgtgatcgtccag

SEQ ID NO: 106261 - DNA, 80 bp, synthetic construct
  misc_feature 1..80: note = Artificially Synthesized Probe
  source 1..80: mol_type = other DNA
cagttctggacatctgcgttgggattctgagtttagggcgaggcaagagaactttgtgctctctgagtgggcgaggccag

SEQ ID NO: 106262 - DNA, 80 bp, synthetic construct; identical to SEQ ID NO: 36767
  misc_feature 1..80: note = Artificially Synthesized Probe
  source 1..80: mol_type = other DNA

SEQ ID NO: 106263 - DNA, 80 bp, synthetic construct
  misc_feature 1..80: note = Artificially Synthesized Probe
  source 1..80: mol_type = other DNA
gggggcgtggccaggcagaggggctcttcgcggggcgtggtcaggcggatgaaatctttgggggggtggtttagaggggc

SEQ ID NO: 106264 - DNA, 80 bp, synthetic construct; identical to SEQ ID NO: 36786
  misc_feature 1..80: note = Artificially Synthesized Probe
  source 1..80: mol_type = other DNA

SEQ ID NO: 106265 - DNA, 80 bp, synthetic construct
  misc_feature 1..80: note = Artificially Synthesized Probe
  source 1..80: mol_type = other DNA
agtgacggggtcatcacttttggattctgactgaaggacacatcagaaacaggacattatttccttaggattgcgactta

SEQ ID NO: 106266 - DNA, 80 bp, synthetic construct
  misc_feature 1..80: note = Artificially Synthesized Probe
  source 1..80: mol_type = other DNA
ggagtgcaatggcgcgatctcggctcactgcaacctccgcctcccgggtttaagcaattctcccgtctcagcctcctgag

SEQ ID NO: 106267 - DNA, 80 bp, synthetic construct; identical to SEQ ID NO: 36787
  misc_feature 1..80: note = Artificially Synthesized Probe
  source 1..80: mol_type = other DNA

SEQ ID NO: 106268 - DNA, 80 bp, synthetic construct
  misc_feature 1..80: note = Artificially Synthesized Probe
  source 1..80: mol_type = other DNA
ctgaatttctggttgggtgcatctggaaccttccacgtctgtcctgagtgatcaggaaagaaattctcctactctgggta

SEQ ID NO: 106269 - DNA, 80 bp, synthetic construct
  misc_feature 1..80: note = Artificially Synthesized Probe
  source 1..80: mol_type = other DNA
gtggtggaagggggcaggatccagccactgaccttctgacgtccccacccaccccgtcctccaggttctacgcggcagaa

SEQ ID NO: 106270 - DNA, 80 bp, synthetic construct
  misc_feature 1..80: note = Artificially Synthesized Probe
  source 1..80: mol_type = other DNA
cccctgcatcgtccagggacctgaagctggacaatgtgatgctggatgctgagggacacatcaagatcactgactttggc

SEQ ID NO: 106271 - DNA, 80 bp, synthetic construct
  misc_feature 1..80: note = Artificially Synthesized Probe
  source 1..80: mol_type = other DNA
ctgaccctcagaccttgtcatgagttgtggccttcttacacagccagtcgttcctccagcctccagcacaggtgagcttg

SEQ ID NO: 106272 - DNA, 80 bp, synthetic construct; identical to SEQ ID NO: 36788
  misc_feature 1..80: note = Artificially Synthesized Probe
  source 1..80: mol_type = other DNA

SEQ ID NO: 106273 - DNA, 80 bp, synthetic construct
  misc_feature 1..80: note = Artificially Synthesized Probe
  source 1..80: mol_type = other DNA
gggagacagagtcacagcctgagagagaatagagattcacagagccagagagacaaagacagggaaagaaacaaactcag

SEQ ID NO: 106274 - DNA, 80 bp, synthetic construct
  misc_feature 1..80: note = Artificially Synthesized Probe
  source 1..80: mol_type = other DNA
aggtggatcacttgaggtcaggagtttgagaccagcctggccaacatggtgaaacctcatctctaacaaaattacacaaa

SEQ ID NO: 106275 - DNA, 80 bp, synthetic construct
  misc_feature 1..80: note = Artificially Synthesized Probe
  source 1..80: mol_type = other DNA
aaaaaaaaaaaaaaaaagccgggtgcagtggctcacacctgtaattccagcacttgggaggctgaggcgggcggatcaca

SEQ ID NO: 106276 - DNA, 80 bp, synthetic construct
  misc_feature 1..80: note = Artificially Synthesized Probe
  source 1..80: mol_type = other DNA
agctgagatcgcgccactgcactccagtctgggcaacagagtgagaccctgtctcaaaaaaaaaaaaaaaaagaaaaaga

SEQ ID NO: 106277 - DNA, 80 bp, synthetic construct; identical to SEQ ID NO: 36789
  misc_feature 1..80: note = Artificially Synthesized Probe
  source 1..80: mol_type = other DNA

SEQ ID NO: 106278 - DNA, 80 bp, synthetic construct
  misc_feature 1..80: note = Artificially Synthesized Probe
  source 1..80: mol_type = other DNA
gaaaccccgtctctactaaaaatacaaaaattagctggacatggtgatgtgtgcctgtcaacccagctactcaggaggct

SEQ ID NO: 106279 - DNA, 80 bp, synthetic construct
  misc_feature 1..80: note = Artificially Synthesized Probe
  source 1..80: mol_type = other DNA
aatttgaaaactacacacatattcctgactctgacacaaatattctaggtgggtggaaccagtgacttggccgttaggta

SEQ ID NO: 106280 - DNA, 80 bp, synthetic construct
  misc_feature 1..80: note = Artificially Synthesized Probe
  source 1..80: mol_type = other DNA
gcttgagtccgggagtttgagaccagcctgggcaacatagtgaggacctatcttcactaaaagtgcaaaaattagccagg

SEQ ID NO: 106281 - DNA, 80 bp, synthetic construct; identical to SEQ ID NO: 36790
  misc_feature 1..80: note = Artificially Synthesized Probe
  source 1..80: mol_type = other DNA

SEQ ID NO: 106282 - DNA, 80 bp, synthetic construct
  misc_feature 1..80: note = Artificially Synthesized Probe
  source 1..80: mol_type = other DNA
tcctttggagttctgctgtatgagatgttggcaggacaggtaagggaaggtggggagaagctggcttggctaaaagagac

SEQ ID NO: 106283 - DNA, 80 bp, synthetic construct
  misc_feature 1..80: note = Artificially Synthesized Probe
  source 1..80: mol_type = other DNA
ctcgcggggcacgccgggaggcggagttctcggtcgtgtcccgagagtggctggtccgcaggctcggactaccagtccca

SEQ ID NO: 106284 - DNA, 80 bp, synthetic construct
  misc_feature 1..80: note = Artificially Synthesized Probe
  source 1..80: mol_type = other DNA
gttttgttttgtttgttctgttaccatggattctttctccctagatggtaaagtagcagtctggttaagcctatggatcc

SEQ ID NO: 106285 - DNA, 80 bp, synthetic construct; identical to SEQ ID NO: 36791
  misc_feature 1..80: note = Artificially Synthesized Probe
  source 1..80: mol_type = other DNA

SEQ ID NO: 106286 - DNA, 80 bp, synthetic construct
  misc_feature 1..80: note = Artificially Synthesized Probe
  source 1..80: mol_type = other DNA
gaaagaaatagaaacagcatttctcggagacagggaaaagaaaacagatccactgagaggcagaaacagagacacatcga

SEQ ID NO: 106287 - DNA, 80 bp, synthetic construct
  misc_feature 1..80: note = Artificially Synthesized Probe
  source 1..80: mol_type = other DNA
aaacaaaagaaatcaatcattttgaaagatagtcaccaaaacttttaaaatttaattgaatctaacaaccaactaaattc

SEQ ID NO: 106288 - DNA, 80 bp, synthetic construct
  misc_feature 1..80: note = Artificially Synthesized Probe
  source 1..80: mol_type = other DNA
ctcatgtgatgagaaaatacctgtgattactattgataatgaagccacaagcactgctgctgcctgcattcataactgaa

SEQ ID NO: 106289 - DNA, 80 bp, synthetic construct
  misc_feature 1..80: note = Artificially Synthesized Probe
  source 1..80: mol_type = other DNA
ctttgccttggtatcattttttgtaacctcagaagactgtgaactactcatccaaccaggagaatgcttttagggtgttt

SEQ ID NO: 106290 - DNA, 80 bp, synthetic construct; identical to SEQ ID NO: 36792
  misc_feature 1..80: note = Artificially Synthesized Probe
  source 1..80: mol_type = other DNA

SEQ ID NO: 106291 - DNA, 80 bp, synthetic construct
  misc_feature 1..80: note = Artificially Synthesized Probe
  source 1..80: mol_type = other DNA
tgggcatgtccctgactctctatcccctccactttgatagcctcccttcgatggggaggacgaggaggagctgtttcagg

SEQ ID NO: 106292 - DNA, 80 bp, synthetic construct
  misc_feature 1..80: note = Artificially Synthesized Probe
  source 1..80: mol_type = other DNA
aagtcactttacttccatctgttggaaaagttgatatgatgcataggttttgttagaacaatgatttccagccctgttgc

SEQ ID NO: 106293 - DNA, 80 bp, synthetic construct
  misc_feature 1..80: note = Artificially Synthesized Probe
  source 1..80: mol_type = other DNA
gggtgagtcaccaaaactttgtgagcttaactctcttcaggggttatggagttgacacagaagaaagcacctggcccata

SEQ ID NO: 106294 - DNA, 80 bp, synthetic construct
  misc_feature 1..80: note = Artificially Synthesized Probe
  source 1..80: mol_type = other DNA
ctacacttttgggcctttgtccaacccccctaccccccatctctgtcccctcctgtgtccactctcatacacacacgcta

SEQ ID NO: 106295 - DNA, 80 bp, synthetic construct; identical to SEQ ID NO: 36793
  misc_feature 1..80: note = Artificially Synthesized Probe
  source 1..80: mol_type = other DNA

SEQ ID NO: 106296 - DNA, 80 bp, synthetic construct
  misc_feature 1..80: note = Artificially Synthesized Probe
  source 1..80: mol_type = other DNA
ccttttccctctcctcttctccatctccctcatgatttgttctgtttctctgtgtgtccctgggtctctgggtatgaatt

SEQ ID NO: 106297 - DNA, 80 bp, synthetic construct
  misc_feature 1..80: note = Artificially Synthesized Probe
  source 1..80: mol_type = other DNA
gacccctagcgtggagcataaagtttgttgaaggaaggagaggggcagggtcagacacagggaccccagggcgcccacag

SEQ ID NO: 106298 - DNA, 80 bp, synthetic construct
  misc_feature 1..80: note = Artificially Synthesized Probe
  source 1..80: mol_type = other DNA
cctcctccctcctcctcctcctcctcctcctcctcctcctcctcctcctccttcttcttcttcttcttcttcttcttctt

SEQ ID NO: 106299 - DNA, 80 bp, synthetic construct; identical to SEQ ID NO: 36794
  misc_feature 1..80: note = Artificially Synthesized Probe
  source 1..80: mol_type = other DNA

SEQ ID NO: 106300 - DNA, 80 bp, synthetic construct
  misc_feature 1..80: note = Artificially Synthesized Probe
  source 1..80: mol_type = other DNA
caacaaaaacctggtccctgaaggggtggggttcccctgggcctcaatatacctgtatgtgggggtggggttccctctgc

SEQ ID NO: 106301 - DNA, 80 bp, synthetic construct
  misc_feature 1..80: note = Artificially Synthesized Probe
  source 1..80: mol_type = other DNA
cagcggcgagaactttgacaagttcttcacgcgggcggcgccagcgctgacccctccagaccgcctagtcctggccagca

SEQ ID NO: 106302 - DNA, 80 bp, synthetic construct
  misc_feature 1..80: note = Artificially Synthesized Probe
  source 1..80: mol_type = other DNA
acttcacccccaacttcaccaccccctgtcccattctagatcctgcaccccagcattccagctctgcccccgcgggttct

SEQ ID NO: 106303 - DNA, 80 bp, synthetic construct
  misc_feature 1..80: note = Artificially Synthesized Probe
  source 1..80: mol_type = other DNA
ccaatcgggtccagagaccacaccactaaccatccccaactccatggggttcgagactccatcttggtagttctgtgcct

SEQ ID NO: 106304 - DNA, 80 bp, synthetic construct; identical to SEQ ID NO: 36795
  misc_feature 1..80: note = Artificially Synthesized Probe
  source 1..80: mol_type = other DNA

SEQ ID NO: 106305 - DNA, 80 bp, synthetic construct
  misc_feature 1..80: note = Artificially Synthesized Probe
  source 1..80: mol_type = other DNA
tgccactctctgggactctcctcctcccctcctcttcccttagcctctcccacccggccacagctgctggagaataaatt

SEQ ID NO: 106306 - DNA, 80 bp, synthetic construct; identical to SEQ ID NO: 36768
  misc_feature 1..80: note = Artificially Synthesized Probe
  source 1..80: mol_type = other DNA

SEQ ID NO: 106307 - DNA, 80 bp, synthetic construct
  misc_feature 1..80: note = Artificially Synthesized Probe
  source 1..80: mol_type = other DNA
cctgtggctcctttgatccttcgagtctccagctcctctcccttccacctgtttcccccaagaaaggcaggatcctggtc

SEQ ID NO: 106308 - DNA, 80 bp, synthetic construct
  misc_feature 1..80: note = Artificially Synthesized Probe
  source 1..80: mol_type = other DNA
cttctgcagccactgcaccgacttcatctggtgagggaagggggctgggggactgggggacgaggggactaggggtgcag

SEQ ID NO: 106309 - DNA, 80 bp, synthetic construct
  misc_feature 1..80: note = Artificially Synthesized Probe
  source 1..80: mol_type = other DNA
ggaggacagaggtcctggagtcttgggtctgagggaggaagggcctggggggctgggagcctggattcctgggtctgaag

SEQ ID NO: 106310 - DNA, 80 bp, synthetic construct; identical to SEQ ID NO: 36769
  misc_feature 1..80: note = Artificially Synthesized Probe
  source 1..80: mol_type = other DNA

SEQ ID NO: 106311 - DNA, 80 bp, synthetic construct
  misc_feature 1..80: note = Artificially Synthesized Probe
  source 1..80: mol_type = other DNA
gctttgatggtggggccaccgcggaggtggtgctgggggcccctccctcggccggctccaggtggggacagatatttgga

SEQ ID NO: 106312 - DNA, 80 bp, synthetic construct
  misc_feature 1..80: note = Artificially Synthesized Probe
  source 1..80: mol_type = other DNA
ccaatgggcgagtgggggccgggcggggccggcagttctggggggcgggagaggggggcgagtccttgagcaccagctgc

SEQ ID NO: 106313 - DNA, 80 bp, synthetic construct
  misc_feature 1..80: note = Artificially Synthesized Probe
  source 1..80: mol_type = other DNA
ccgtgggcctgtgtctgtttgtcaatgggatcctattttctttctctctttttccatctcccttccctgagctctgtgct

SEQ ID NO: 106314 - DNA, 80 bp, synthetic construct
  misc_feature 1..80: note = Artificially Synthesized Probe
  source 1..80: mol_type = other DNA
gccggaagagactgaccgcgccggcccttggagagacccctttcctgagagggggcgcacagagaggatgccgaagccag

SEQ ID NO: 106315 - DNA, 80 bp, synthetic construct; identical to SEQ ID NO: 36770
  misc_feature 1..80: note = Artificially Synthesized Probe
  source 1..80: mol_type = other DNA

SEQ ID NO: 106316 - DNA, 80 bp, synthetic construct
  misc_feature 1..80: note = Artificially Synthesized Probe
  source 1..80: mol_type = other DNA
atttctcctgctatttttatggctgggaggggaggggggctggagagatagggggagctatctggcccagattccttgcc

SEQ ID NO: 106317 - DNA, 80 bp, synthetic construct
  misc_feature 1..80: note = Artificially Synthesized Probe
  source 1..80: mol_type = other DNA
cggagaaaaatatcagtgcaggtgcggagatgccaacataagacagagggaatctcagggagaggaacagagacagaaga

SEQ ID NO: 106318 - DNA, 80 bp, synthetic construct
  misc_feature 1..80: note = Artificially Synthesized Probe
  source 1..80: mol_type = other DNA
aaaatggtggatacagacaacagcttaggagatgctgagaggagacccagggaagtcccacagtacacttgcacacatgt

SEQ ID NO: 106319 - DNA, 80 bp, synthetic construct; identical to SEQ ID NO: 36771
  misc_feature 1..80: note = Artificially Synthesized Probe
  source 1..80: mol_type = other DNA

SEQ ID NO: 106320 - DNA, 80 bp, synthetic construct
  misc_feature 1..80: note = Artificially Synthesized Probe
  source 1..80: mol_type = other DNA
ctggagtgcagtggcgcagtctcagctcaatgcaacttccgtttcccaggttcaagcaattcttctacctcagcctcctg

SEQ ID NO: 106321 - DNA, 80 bp, synthetic construct
  misc_feature 1..80: note = Artificially Synthesized Probe
  source 1..80: mol_type = other DNA
ccaccgcgcccggcagaactgacttaaatttaaacagccacatgtagttagtggccaccaaatgggacagcacacatctg

SEQ ID NO: 106322 - DNA, 80 bp, synthetic construct
  misc_feature 1..80: note = Artificially Synthesized Probe
  source 1..80: mol_type = other DNA
ataacagaagtctacatagaagatgtgacttcatagaacatatattgagcaccactgtctaccagcacgtgtatgtgatt

SEQ ID NO: 106323 - DNA, 80 bp, synthetic construct
  misc_feature 1..80: note = Artificially Synthesized Probe
  source 1..80: mol_type = other DNA
gaggttgcagtgagccaagatcacgccactgcactccagcctgggtgacagagcaagactttgtcttggaaaaaaaaaaa

SEQ ID NO: 106324 - DNA, 80 bp, synthetic construct; identical to SEQ ID NO: 36765
  misc_feature 1..80: note = Artificially Synthesized Probe
  source 1..80: mol_type = other DNA

SEQ ID NO: 106325 - DNA, 80 bp, synthetic construct; identical to SEQ ID NO: 36772
  misc_feature 1..80: note = Artificially Synthesized Probe
  source 1..80: mol_type = other DNA

SEQ ID NO: 106326 - DNA, 80 bp, synthetic construct
  misc_feature 1..80: note = Artificially Synthesized Probe
  source 1..80: mol_type = other DNA
tcactgcagccttgaattctccaggctcaagtgctcctcctgccccagcttctcaagtagctgggactataggcacaagc

SEQ ID NO: 106327 - DNA, 80 bp, synthetic construct
  misc_feature 1..80: note = Artificially Synthesized Probe
  source 1..80: mol_type = other DNA
agtattttgtatacagtataggttggatccacacaacagcttatttggttatttttccctgtctatctggtttgaatccc

SEQ ID NO: 106328 - DNA, 80 bp, synthetic construct; identical to SEQ ID NO: 36773
  misc_feature 1..80: note = Artificially Synthesized Probe
  source 1..80: mol_type = other DNA

SEQ ID NO: 106329 - DNA, 80 bp, synthetic construct
  misc_feature 1..80: note = Artificially Synthesized Probe
  source 1..80: mol_type = other DNA
aggctggagtgcaatagtgctatcactgctcactgcagtcttgacctccggggctcaagtgattcactgctggcagttga

SEQ ID NO: 106330 - DNA, 80 bp, synthetic construct
  misc_feature 1..80: note = Artificially Synthesized Probe
  source 1..80: mol_type = other DNA
ggcgtggtggcacacgcctgtaatcccagctactcaggaggctgaggcaggagaatcacttgaacccaggaggcggaggt

SEQ ID NO: 106331 - DNA, 80 bp, synthetic construct
  misc_feature 1..80: note = Artificially Synthesized Probe
  source 1..80: mol_type = other DNA
ctgaggcaagcggatcacgaggtcaggagatccaaaccatcctggctaacgcggtgaaaccccgtctctactaaaaatac

SEQ ID NO: 106332 - DNA, 80 bp, synthetic construct; identical to SEQ ID NO: 36774
  misc_feature 1..80: note = Artificially Synthesized Probe
  source 1..80: mol_type = other DNA

SEQ ID NO: 106333 - DNA, 80 bp, synthetic construct
  misc_feature 1..80: note = Artificially Synthesized Probe
  source 1..80: mol_type = other DNA
cagcagcctctgtctgtggatggtttgtgtgtcaggcagcctgctgagaaccttcacacacagcatcttatttagtgcgg

SEQ ID NO: 106334 - DNA, 80 bp, synthetic construct
  misc_feature 1..80: note = Artificially Synthesized Probe
  source 1..80: mol_type = other DNA
tgtgataatccttttaatggattcttagaatcaagttatttaacaagcagatattgtcccgggggtagtgggtggcaggg

SEQ ID NO: 106335 - DNA, 80 bp, synthetic construct; identical to SEQ ID NO: 36766
  misc_feature 1..80: note = Artificially Synthesized Probe
  source 1..80: mol_type = other DNA

SEQ ID NO: 106336 - DNA, 80 bp, synthetic construct
  misc_feature 1..80: note = Artificially Synthesized Probe
  source 1..80: mol_type = other DNA
ggcctagctcttacttacattcagggctatgtagggacttcaataaaatccctaacaataaccacagtaatagtattggg

SEQ ID NO: 106337 - DNA, 80 bp, synthetic construct; identical to SEQ ID NO: 36775
  misc_feature 1..80: note = Artificially Synthesized Probe
  source 1..80: mol_type = other DNA

SEQ ID NO: 106338 - DNA, 80 bp, synthetic construct
  misc_feature 1..80: note = Artificially Synthesized Probe
  source 1..80: mol_type = other DNA
ctcggcctcctggattcaagcaattctcatgcctcagcctcctgagtagctgggattacaggcatgcaccaccatgtccg

SEQ ID NO: 106339 - DNA, 80 bp, synthetic construct
  misc_feature 1..80: note = Artificially Synthesized Probe
  source 1..80: mol_type = other DNA
gcaggaacagtggtttattgaccaggcaggcctccccagcccggccactgctccccaaggggctcgggctgtgtgggctg

SEQ ID NO: 106340 - DNA, 80 bp, synthetic construct
  misc_feature 1..80: note = Artificially Synthesized Probe
  source 1..80: mol_type = other DNA
gcaggcctgaatgccatctgcacacgcccctgcccaccccagtcccccacacagcccctgtggccagctcaggcctctaa

SEQ ID NO: 106341 - DNA, 80 bp, synthetic construct; identical to SEQ ID NO: 26596
  misc_feature 1..80: note = Artificially Synthesized Probe
  source 1..80: mol_type = other DNA

SEQ ID NO: 106342 - DNA, 80 bp, synthetic construct
  misc_feature 1..80: note = Artificially Synthesized Probe
  source 1..80: mol_type = other DNA
ccctgccaagcagcccccacaggctccctgcctcggtttccttccctgtgccaccagcaccacaggctgctcacacgtgg

SEQ ID NO: 106343 - DNA, 80 bp, synthetic construct
  misc_feature 1..80: note = Artificially Synthesized Probe
  source 1..80: mol_type = other DNA
ccaggccagccctcctgcagcattcttgcccctgacacttctttccaagcaacaaccagaaatgttcctttaaagtgaaa

SEQ ID NO: 106344 - DNA, 80 bp, synthetic construct; identical to SEQ ID NO: 26597
  misc_feature 1..80: note = Artificially Synthesized Probe
  source 1..80: mol_type = other DNA

SEQ ID NO: 106345 - DNA, 80 bp, synthetic construct
  misc_feature 1..80: note = Artificially Synthesized Probe
  source 1..80: mol_type = other DNA
agaagctcctcagctctcctgccatcccttcctcaagcccctccagggttctgtggtatgactggtctccggcccctgcc

SEQ ID NO: 106346 - DNA, 80 bp, synthetic construct
  misc_feature 1..80: note = Artificially Synthesized Probe
  source 1..80: mol_type = other DNA
aggccaaccagggcaacatagtgagacctcattttttttttttttttttgagatggagtctcactctgtcgcccaggctg

SEQ ID NO: 106347 - DNA, 80 bp, synthetic construct
  misc_feature 1..80: note = Artificially Synthesized Probe
  source 1..80: mol_type = other DNA
aggctggtcttgaactgagctcaggcaatccacccgccttggcctcccaaattgctgggattagaggcgtgagcactcca

SEQ ID NO: 106348 - DNA, 80 bp, synthetic construct
  misc_feature 1..80: note = Artificially Synthesized Probe
  source 1..80: mol_type = other DNA
tctggcttctctatccctggaaacacctgctgcccccaccgctggcccccagaggctgtgtcagggaaggacagaagatg

SEQ ID NO: 106349 - DNA, 80 bp, synthetic construct
  misc_feature 1..80: note = Artificially Synthesized Probe
  source 1..80: mol_type = other DNA
agatgccttctgggaggcagtggggcccctcaggaaggggctgaacagtgagggacccaagtgtggtcagaacccagccc

SEQ ID NO: 106350 - DNA, 80 bp, synthetic construct; identical to SEQ ID NO: 26598
  misc_feature 1..80: note = Artificially Synthesized Probe
  source 1..80: mol_type = other DNA

SEQ ID NO: 106351 - DNA, 80 bp, synthetic construct
  misc_feature 1..80: note = Artificially Synthesized Probe
  source 1..80: mol_type = other DNA
catggttcccatccccaagcccaccctcctgtctacaccgcggctcttccacctggagtgctgcatccccctggctaagc

SEQ ID NO: 106352 - DNA, 80 bp, synthetic construct
  misc_feature 1..80: note = Artificially Synthesized Probe
  source 1..80: mol_type = other DNA
cgtcaccccaaggcccacttgtgccccagcctagactctcctgagccaccaaggggtgtgcggagtcgggagggagtctg

SEQ ID NO: 106353 - DNA, 80 bp, synthetic construct; identical to SEQ ID NO: 26599
  misc_feature 1..80: note = Artificially Synthesized Probe
  source 1..80: mol_type = other DNA

SEQ ID NO: 106354 - DNA, 80 bp, synthetic construct
  misc_feature 1..80: note = Artificially Synthesized Probe
  source 1..80: mol_type = other DNA
caaatacacacgggatttaggagactttgtagaaaaataatgcacgatgccgcgttgcttttctaaaagcaactggaata

SEQ ID NO: 106355 - DNA, 80 bp, synthetic construct
  misc_feature 1..80: note = Artificially Synthesized Probe
  source 1..80: mol_type = other DNA
agggctgagaggaacggaggcgggaaggcaccagcacacagaggtccccaaatccccagcgaggcccccttactcaggcc

SEQ ID NO: 106356 - DNA, 80 bp, synthetic construct
  misc_feature 1..80: note = Artificially Synthesized Probe
  source 1..80: mol_type = other DNA
ttaaagtgaaagcagatcttaccatctcatcttgtttcacgccaccccacccagggttcccatcatttcctagtaatgcc

SEQ ID NO: 106357 - DNA, 80 bp, synthetic construct
  misc_feature 1..80: note = Artificially Synthesized Probe
  source 1..80: mol_type = other DNA
ctcccttctctagggtacctggctcccctcccccaccagccctgcacccctgccagagcctcctcttcttcctcctcctc

SEQ ID NO: 106358 - DNA, 80 bp, synthetic construct; identical to SEQ ID NO: 26600
  misc_feature 1..80: note = Artificially Synthesized Probe
  source 1..80: mol_type = other DNA

SEQ ID NO: 106359 - DNA, 80 bp, synthetic construct
  misc_feature 1..80: note = Artificially Synthesized Probe
  source 1..80: mol_type = other DNA
gcaagccctgggccaggagcccccgccaggaggccttccctcccacccactcctgggcagccccacatgggccagggact

SEQ ID NO: 106360 - DNA, 80 bp, synthetic construct
  misc_feature 1..80: note = Artificially Synthesized Probe
  source 1..80: mol_type = other DNA
gacagggagctcctgggcccctggcttgggcacctcaagaccagtcatgagatcagccctaagaccttcacgccaaggct

SEQ ID NO: 106361 - DNA, 80 bp, synthetic construct
  misc_feature 1..80: note = Artificially Synthesized Probe
  source 1..80: mol_type = other DNA
cccatcctgaaaccacacagcccacagtttggataacacgggacttaaccacacaggtgtctgcctgtgaggcagctcac

SEQ ID NO: 106362 - DNA, 80 bp, synthetic construct
  misc_feature 1..80: note = Artificially Synthesized Probe
  source 1..80: mol_type = other DNA
acaccataggctaccgctgctcctctccgtgaacttccagagcacagaccaggctgacacagccaagcagtggccaagat

SEQ ID NO: 106363 - DNA, 80 bp, synthetic construct; identical to SEQ ID NO: 26601
  misc_feature 1..80: note = Artificially Synthesized Probe
  source 1..80: mol_type = other DNA

SEQ ID NO: 106364 - DNA, 80 bp, synthetic construct
  misc_feature 1..80: note = Artificially Synthesized Probe
  source 1..80: mol_type = other DNA
cgtgctcccccagtcccacccctcatcatgcccagggcatagtctgttgaagggcacatgatcgcacacatgggcacgac

SEQ ID NO: 106365 - DNA, 80 bp, synthetic construct
  misc_feature 1..80: note = Artificially Synthesized Probe
  source 1..80: mol_type = other DNA
tctgtcctgtcttcacaccaccccgtatagcgtcttacaaagattctcagggtctgaaatatccacgcagtggcagttct

SEQ ID NO: 106366 - DNA, 80 bp, synthetic construct
  misc_feature 1..80: note = Artificially Synthesized Probe
  source 1..80: mol_type = other DNA
gaaacaagcagagcatgggggtccacaccccgcccttgtccaactctctcctggagggaagcctggcaagccgcttccta

SEQ ID NO: 106367 - DNA, 80 bp, synthetic construct
  misc_feature 1..80: note = Artificially Synthesized Probe
  source 1..80: mol_type = other DNA
ggaagatgccttggccccttccccatccccaagccctcagcctgcttcggggatccctgggactcctctcctggggttgg

SEQ ID NO: 106368 - DNA, 80 bp, synthetic construct; identical to SEQ ID NO: 26602
  misc_feature 1..80: note = Artificially Synthesized Probe
  source 1..80: mol_type = other DNA

SEQ ID NO: 106369 - DNA, 80 bp, synthetic construct
  misc_feature 1..80: note = Artificially Synthesized Probe
  source 1..80: mol_type = other DNA
cacaaagcagctgagctcggtaggtgtcctcagcatgcacccctgtgaggacaggagggaaccctgttcacttcccagag

SEQ ID NO: 106370 - DNA, 80 bp, synthetic construct
  misc_feature 1..80: note = Artificially Synthesized Probe
  source 1..80: mol_type = other DNA
ccaggcaggaccaccctgggaaaggagtcttttcataccagaggcgcctgagaggaaaatcccattgtgaaaccaagtcc

SEQ ID NO: 106371 - DNA, 80 bp, synthetic construct; identical to SEQ ID NO: 26603
  misc_feature 1..80: note = Artificially Synthesized Probe
  source 1..80: mol_type = other DNA

SEQ ID NO: 106372 - DNA, 80 bp, synthetic construct
  misc_feature 1..80: note = Artificially Synthesized Probe
  source 1..80: mol_type = other DNA
aggggacccaaatacataggaagacatagggagatcccatctttacaaaaaaaaattaaaacttagccaggtatggtggt

SEQ ID NO: 106373 - DNA, 80 bp, synthetic construct
  misc_feature 1..80: note = Artificially Synthesized Probe
  source 1..80: mol_type = other DNA
aatattttgtgacacaagaaaattatatgaaattctaattactatggccctactgaggcagagtgaagccgttgtggcag

SEQ ID NO: 106374 - DNA, 80 bp, synthetic construct
  misc_feature 1..80: note = Artificially Synthesized Probe
  source 1..80: mol_type = other DNA
gttgtggaacctcccaggcctggcccctgccccattgtcagtggagaagggaattgaagccaggagcagtgtagcaggcc

SEQ ID NO: 106375 - DNA, 80 bp, synthetic construct; identical to SEQ ID NO: 26587
  misc_feature 1..80: note = Artificially Synthesized Probe
  source 1..80: mol_type = other DNA

SEQ ID NO: 106376 - DNA, 80 bp, synthetic construct; identical to SEQ ID NO: 26604
  misc_feature 1..80: note = Artificially Synthesized Probe
  source 1..80: mol_type = other DNA

SEQ ID NO: 106377 - DNA, 80 bp, synthetic construct
  misc_feature 1..80: note = Artificially Synthesized Probe
  source 1..80: mol_type = other DNA
caagctctcctagccttggcctctgcccagctgaggctgaagcccagcagctggatacatcccacctgctcccactgggt

SEQ ID NO: 106378 - DNA, 80 bp, synthetic construct
  misc_feature 1..80: note = Artificially Synthesized Probe
  source 1..80: mol_type = other DNA
cctggtcctccccggctacaaaatgcccatagaaggtcatcttcatgagcttgttgaatagcctctgtcctagaagtttc

SEQ ID NO: 106379 - DNA, 80 bp, synthetic construct
  misc_feature 1..80: note = Artificially Synthesized Probe
  source 1..80: mol_type = other DNA
ttcatggtgaagaccagctaaagccgcttgcttctccaccctgtccatcactccagttcccatccagggcagagagacca

SEQ ID NO: 106380 - DNA, 80 bp, synthetic construct; identical to SEQ ID NO: 26605
  misc_feature 1..80: note = Artificially Synthesized Probe
  source 1..80: mol_type = other DNA

SEQ ID NO: 106381 - DNA, 80 bp, synthetic construct
  misc_feature 1..80: note = Artificially Synthesized Probe
  source 1..80: mol_type = other DNA
ccaagtcccttaaacagtgtgactggcatgaggccagcccccgaatggatgctaaataacaaacgtgtgaaactcaggct

SEQ ID NO: 106382 - DNA, 80 bp, synthetic construct
  misc_feature 1..80: note = Artificially Synthesized Probe
  source 1..80: mol_type = other DNA
ctgtctgtctcctccaatcatatttcaccacgtcgctcattcagatgtcccaagctgccatgcaccaagcaccttttata

SEQ ID NO: 106383 - DNA, 80 bp, synthetic construct
  misc_feature 1..80: note = Artificially Synthesized Probe
  source 1..80: mol_type = other DNA
ggcttgccaaggcgaggagatggcatggacaactgtgggagctccagcacgggggacagccagggcagaaaggacaggga

SEQ ID NO: 106384 - DNA, 80 bp, synthetic construct; identical to SEQ ID NO: 26606
  misc_feature 1..80: note = Artificially Synthesized Probe
  source 1..80: mol_type = other DNA

SEQ ID NO: 106385 - DNA, 80 bp, synthetic construct
  misc_feature 1..80: note = Artificially Synthesized Probe
  source 1..80: mol_type = other DNA
ctccaagcagaatctgactttaaggcattttgttcttttatcaagaggattagaaactggaaaatgaacaggctgacatg

SEQ ID NO: 106386 - DNA, 80 bp, synthetic construct
  misc_feature 1..80: note = Artificially Synthesized Probe
  source 1..80: mol_type = other DNA
cacaagcagaggcttgccctctccaggccttctggaagcctgagcccaccacgtgctcaagcctgggctggcctgtggga

SEQ ID NO: 106387 - DNA, 80 bp, synthetic construct
  misc_feature 1..80: note = Artificially Synthesized Probe
  source 1..80: mol_type = other DNA
ccgctctgagagaaccatcagaaaacaacaggagggagggtgggcaactgtcgactgccgcacggggccacgcagtctcc

SEQ ID NO: 106388 - DNA, 80 bp, synthetic construct
  misc_feature 1..80: note = Artificially Synthesized Probe
  source 1..80: mol_type = other DNA
aggcagggctggcaagttttttatttatttatttttagaggcagggtctcactcctgggctcaagcgacactcctatctc

SEQ ID NO: 106389 - DNA, 80 bp, synthetic construct
  misc_feature 1..80: note = Artificially Synthesized Probe
  source 1..80: mol_type = other DNA
tctcccgcctcagcctcccaagtagcagagattacaggcgcacaccaccatgcccagctaatttttatatttttagtaga

SEQ ID NO: 106390 - DNA, 80 bp, synthetic construct; identical to SEQ ID NO: 26607
  misc_feature 1..80: note = Artificially Synthesized Probe
  source 1..80: mol_type = other DNA

SEQ ID NO: 106391 - DNA, 80 bp, synthetic construct
  misc_feature 1..80: note = Artificially Synthesized Probe
  source 1..80: mol_type = other DNA
aggatttagaaacctgcaccagtaacacatacacttgtaccccctgtgaaagactcaaccaaatgtgtgcagagtaacac

SEQ ID NO: 106392 - DNA, 80 bp, synthetic construct
  misc_feature 1..80: note = Artificially Synthesized Probe
  source 1..80: mol_type = other DNA
acccaacctcagtgctgttgtcatggaaatcctgggactttcctaaaccctcctcaataagtctggctttcaggcaaggg

SEQ ID NO: 106393 - DNA, 80 bp, synthetic construct
  misc_feature 1..80: note = Artificially Synthesized Probe
  source 1..80: mol_type = other DNA
actcccctctggcccgctcacaggaccaggttctagtgagcagctcacaagcccaggacctggcctctgccttcttccag

SEQ ID NO: 106394 - DNA, 80 bp, synthetic construct; identical to SEQ ID NO: 26608
  misc_feature 1..80: note = Artificially Synthesized Probe
  source 1..80: mol_type = other DNA

SEQ ID NO: 106395 - DNA, 80 bp, synthetic construct
  misc_feature 1..80: note = Artificially Synthesized Probe
  source 1..80: mol_type = other DNA
tgtgcctacagaaacctgacctggtgccttcctagtccccactccatcccggccacaaggtgggcatggcttctgcacga

SEQ ID NO: 106396 - DNA, 80 bp, synthetic construct
  misc_feature 1..80: note = Artificially Synthesized Probe
  source 1..80: mol_type = other DNA
ccccaaagcctccacatcgccgtccctcaccttgccagttcctctacctgggatgtcccttctcgccctcctgtctcctt

SEQ ID NO: 106397 - DNA, 80 bp, synthetic construct
  misc_feature 1..80: note = Artificially Synthesized Probe
  source 1..80: mol_type = other DNA
ttccagcctctaagtttggggctggtttgttccttggccaaagccaactccgattgtttgagggtgggtggtgtggcagt

SEQ ID NO: 106398 - DNA, 80 bp, synthetic construct
  misc_feature 1..80: note = Artificially Synthesized Probe
  source 1..80: mol_type = other DNA
cccatgggattcgggccaacagcatctgactctgagttcgtggatccctgccctcacctcgcacccgccgaggcctcacc

SEQ ID NO: 106399 - DNA, 80 bp, synthetic construct; identical to SEQ ID NO: 26609
  misc_feature 1..80: note = Artificially Synthesized Probe
  source 1..80: mol_type = other DNA

SEQ ID NO: 106400 - DNA, 80 bp, synthetic construct
  misc_feature 1..80: note = Artificially Synthesized Probe
  source 1..80: mol_type = other DNA
caggctatgagccctacaccaggattctcttgtctcaacatgaagaatactccattttaaattccaagtgataactctgt

SEQ ID NO: 106401 - DNA, 80 bp, synthetic construct
  misc_feature 1..80: note = Artificially Synthesized Probe
  source 1..80: mol_type = other DNA
attgtttttagttggtagacatcgacaaataggaaaatttgcgaggtccgagagggactgcaggaaacgcctcccttcct

SEQ ID NO: 106402 - DNA, 80 bp, synthetic construct; identical to SEQ ID NO: 26610
  misc_feature 1..80: note = Artificially Synthesized Probe
  source 1..80: mol_type = other DNA

SEQ ID NO: 106403 - DNA, 80 bp, synthetic construct
  misc_feature 1..80: note = Artificially Synthesized Probe
  source 1..80: mol_type = other DNA
gcgggcagggcgcgcctcagagccatggcgggacggcggtacccgcccgggccgcttaagtgtgcgctgttggtcccgcc

SEQ ID NO: 106404 - DNA, 80 bp, synthetic construct
  misc_feature 1..80: note = Artificially Synthesized Probe
  source 1..80: mol_type = other DNA
ggaccctctgccggcagggctgaggccaaggcccactggcttctcaaagcctctgctcctgctctccgtgaagacagcaa

SEQ ID NO: 106405 - DNA, 80 bp, synthetic construct
  misc_feature 1..80: note = Artificially Synthesized Probe
  source 1..80: mol_type = other DNA
cagggctgggaggcacctgacctcacctccagcagctctgcaagtgtggggtgaaaaaaggtgaatctgtgtgaggatgg

SEQ ID NO: 106406 - DNA, 80 bp, synthetic construct
  misc_feature 1..80: note = Artificially Synthesized Probe
  source 1..80: mol_type = other DNA
gggtccagcctctcaggcagggatgtgagcgtggtactgggggagcctggcacagggcccttggggccaagaggagagag

SEQ ID NO: 106407 - DNA, 80 bp, synthetic construct
  misc_feature 1..80: note = Artificially Synthesized Probe
  source 1..80: mol_type = other DNA
aggctgtcctttcggagttggatggtgatgtgtctagtcaggctgtgagtccaccagcattgagagtccacccagaggct

SEQ ID NO: 106408 - DNA, 80 bp, synthetic construct; identical to SEQ ID NO: 26588
  misc_feature 1..80: note = Artificially Synthesized Probe
  source 1..80: mol_type = other DNA

SEQ ID NO: 106409 - DNA, 80 bp, synthetic construct
  misc_feature 1..80: note = Artificially Synthesized Probe
  source 1..80: mol_type = other DNA
ggaaggcgagagccagcgaggccactgcccaggcccccgagggttctagggggtcccatccctgggaaggcggaatctgg

SEQ ID NO: 106410 - DNA, 80 bp, synthetic construct
  misc_feature 1..80: note = Artificially Synthesized Probe
  source 1..80: mol_type = other DNA
tttaaagagaaaacaaaccgttacattccagatgtagttaaaatgttaagggcgtattaatgaggtggcactgtggaggc

SEQ ID NO: 106411 - DNA, 80 bp, synthetic construct
  misc_feature 1..80: note = Artificially Synthesized Probe
  source 1..80: mol_type = other DNA
gaggccaagaagggaggatcacttgaggccaggagtttgagaccagtctggccaacacggtgaaaccctgtctctgctaa

SEQ ID NO: 106412 - DNA, 80 bp, synthetic construct; identical to SEQ ID NO: 26589
  misc_feature 1..80: note = Artificially Synthesized Probe
  source 1..80: mol_type = other DNA

SEQ ID NO: 106413 - DNA, 80 bp, synthetic construct
  misc_feature 1..80: note = Artificially Synthesized Probe
  source 1..80: mol_type = other DNA
gtttcggtgcagggtggggcacacctacctgcgcagtgcaaagcgcactgtgtcctcattgtgggaggccaccatcacct

SEQ ID NO: 106414 - DNA, 80 bp, synthetic construct
  misc_feature 1..80: note = Artificially Synthesized Probe
  source 1..80: mol_type = other DNA
ctctttccaagggtatccacaggatcaggaggaacaggagcagcatctgcccctcccagcacctcatgaaaaagaaagac

SEQ ID NO: 106415 - DNA, 80 bp, synthetic construct; identical to SEQ ID NO: 26590
  misc_feature 1..80: note = Artificially Synthesized Probe
  source 1..80: mol_type = other DNA

SEQ ID NO: 106416 - DNA, 80 bp, synthetic construct
  misc_feature 1..80: note = Artificially Synthesized Probe
  source 1..80: mol_type = other DNA
tgacggtatgtccagcgagtccattacaataaccagactaaaaaccaataagatcaaagatgctggacacatagccccgg

SEQ ID NO: 106417 - DNA, 80 bp, synthetic construct
  misc_feature 1..80: note = Artificially Synthesized Probe
  source 1..80: mol_type = other DNA
catgaggctgctgttctccagggcacggcgggacaagtagggcagcacctccatcacggggccatagggcacgtacttgt

SEQ ID NO: 106418 - DNA, 80 bp, synthetic construct
  misc_feature 1..80: note = Artificially Synthesized Probe
  source 1..80: mol_type = other DNA
ggaggggagctggagccaaccaggagacacttggggtctctctgaatttgcagcatgcacacacgcctctaagaggaaaa

SEQ ID NO: 106419 - DNA, 80 bp, synthetic construct
  misc_feature 1..80: note = Artificially Synthesized Probe
  source 1..80: mol_type = other DNA
tggatctaagtgtctgcaggagcaagctcagggaactgtggccaattttgctttgttcaataggcttttctatatttata

SEQ ID NO: 106420 - DNA, 80 bp, synthetic construct
  misc_feature 1..80: note = Artificially Synthesized Probe
  source 1..80: mol_type = other DNA
aaagaataaccttaatgcttttgaaaaagtaacacatgacataaaagctgaggaaataccagttctgacctggggacaca

SEQ ID NO: 106421 - DNA, 80 bp, synthetic construct; identical to SEQ ID NO: 26591
  misc_feature 1..80: note = Artificially Synthesized Probe
  source 1..80: mol_type = other DNA

SEQ ID NO: 106422 - DNA, 80 bp, synthetic construct
  misc_feature 1..80: note = Artificially Synthesized Probe
  source 1..80: mol_type = other DNA
acctggagcaggtgtgggtgaggatgggcctccaacctctgtccccaaggagcaatggcagtggggacgtctgcaacttc

SEQ ID NO: 106423 - DNA, 80 bp, synthetic construct
  misc_feature 1..80: note = Artificially Synthesized Probe
  source 1..80: mol_type = other DNA
agagctctggacctgctaacatccctgagcagtttggggcccaaaggctagggtgggctccctgaatacatgtgacatcc

SEQ ID NO: 106424 - DNA, 80 bp, synthetic construct
  misc_feature 1..80: note = Artificially Synthesized Probe
  source 1..80: mol_type = other DNA
cttagacactcttggctggttctgagaaccaggggagaggttgcgggcagcgggtctttcttgctactctgaggcagtca

SEQ ID NO: 106425 - DNA, 80 bp, synthetic construct; identical to SEQ ID NO: 26592
  misc_feature 1..80: note = Artificially Synthesized Probe
  source 1..80: mol_type = other DNA

SEQ ID NO: 106426 - DNA, 80 bp, synthetic construct
  misc_feature 1..80: note = Artificially Synthesized Probe
  source 1..80: mol_type = other DNA
ccatctctgtggctttctgagaggcgcagggggtgggagagtgggagcaactgttgctcaagtgaggcaggtgccctctt

SEQ ID NO: 106427 - DNA, 80 bp, synthetic construct
  misc_feature 1..80: note = Artificially Synthesized Probe
  source 1..80: mol_type = other DNA
acatgcctagcagctgtccaaagtacacccggtggtcagcaggatgcaggcccagctcctccatcctgtgcaggtgaagc

SEQ ID NO: 106428 - DNA, 80 bp, synthetic construct
  misc_feature 1..80: note = Artificially Synthesized Probe
  source 1..80: mol_type = other DNA
gccacagcaagggcgggaaagtgccaccctgaggcccaggctaaacctctctcagtattcccagcccacaggaaccctct

SEQ ID NO: 106429 - DNA, 80 bp, synthetic construct; identical to SEQ ID NO: 26593
  misc_feature 1..80: note = Artificially Synthesized Probe
  source 1..80: mol_type = other DNA

SEQ ID NO: 106430 - DNA, 80 bp, synthetic construct
  misc_feature 1..80: note = Artificially Synthesized Probe
  source 1..80: mol_type = other DNA
ttcaagttgctggtgctcagaggccgtggggacccatcccgcagggcctcccgctcacccctttgctggccccagcagcc

SEQ ID NO: 106431 - DNA, 80 bp, synthetic construct
  misc_feature 1..80: note = Artificially Synthesized Probe
  source 1..80: mol_type = other DNA
ggctagatgtgtcatggaaagctgcctctgcaggatgttttctgaaggtgcttctgttctttctttgaatcccagtttaa

SEQ ID NO: 106432 - DNA, 80 bp, synthetic construct
  misc_feature 1..80: note = Artificially Synthesized Probe
  source 1..80: mol_type = other DNA
aaggtcacccagcttctgcctggctctcacgtctcaggtgacactggcccttagagcccagctgccatgttgggaaaaag

SEQ ID NO: 106433 - DNA, 80 bp, synthetic construct
  misc_feature 1..80: note = Artificially Synthesized Probe
  source 1..80: mol_type = other DNA
ctgctgccgtttcaggcctctgaagtttggggtgacctgatgcacaagacagatgacttggggaaggcccccagaccccc

SEQ ID NO: 106434 - DNA, 80 bp, synthetic construct; identical to SEQ ID NO: 26594
  misc_feature 1..80: note = Artificially Synthesized Probe
  source 1..80: mol_type = other DNA

SEQ ID NO: 106435 - DNA, 80 bp, synthetic construct
  misc_feature 1..80: note = Artificially Synthesized Probe
  source 1..80: mol_type = other DNA
cctgtccgttcaccacccaccacaaaacccacctcggtgttcagttttaaaagacagaggaaatataaatattgttttct

SEQ ID NO: 106436 - DNA, 80 bp, synthetic construct
  misc_feature 1..80: note = Artificially Synthesized Probe
  source 1..80: mol_type = other DNA
ttaaaaccaaaacacaaacagtcctgcatctaggcggctctgaaaacactgagtaccctaggctgttttgggcttgtgga

SEQ ID NO: 106437 - DNA, 80 bp, synthetic construct
  misc_feature 1..80: note = Artificially Synthesized Probe
  source 1..80: mol_type = other DNA
agcccctggctccaaggatggggcatggggctctgatccttcacctgccggcgtggactccagggagggctgagagtgcc

SEQ ID NO: 106438 - DNA, 80 bp, synthetic construct
  misc_feature 1..80: note = Artificially Synthesized Probe
  source 1..80: mol_type = other DNA
gccccagtgaggcctcttcccagcaggactctgctgggctgccctactcgtctccctggggaggcctcagcccttggcca

SEQ ID NO: 106439 - DNA, 80 bp, synthetic construct; identical to SEQ ID NO: 26595
  misc_feature 1..80: note = Artificially Synthesized Probe
  source 1..80: mol_type = other DNA

SEQ ID NO: 106440 - DNA, 80 bp, synthetic construct
  misc_feature 1..80: note = Artificially Synthesized Probe
  source 1..80: mol_type = other DNA
cacccattggcctctggtgctgtttctggctttattacatcgttagtaagaacaggatccatgtctggtttgtttctact

SEQ ID NO: 106441 - DNA, 80 bp, synthetic construct
  misc_feature 1..80: note = Artificially Synthesized Probe
  source 1..80: mol_type = other DNA
gccctgggtgagttcccaaaaccacctccgaccactgcccaccatgccccgtgtgaccccacggtgcccaccccctcaca

SEQ ID NO: 106442 - DNA, 80 bp, synthetic construct
  misc_feature 1..80: note = Artificially Synthesized Probe
  source 1..80: mol_type = other DNA
gggtgggaatggcaggctgcgtcccactgctccagggcctggtcctggtcctcgccctccatcgtgtggagccctcaggt

SEQ ID NO: 106443 - DNA, 80 bp, synthetic construct
  misc_feature 1..80: note = Artificially Synthesized Probe
  source 1..80: mol_type = other DNA
ttcttgcacatagggtttgttgagattcttgtatttgtgggctaatatcgcttgtcaaatttgaaaaatatttggtcata

SEQ ID NO: 106444 - DNA, 80 bp, synthetic construct
  misc_feature 1..80: note = Artificially Synthesized Probe
  source 1..80: mol_type = other DNA
cacacacagctaatttttaaatttcatgtagagatggggtcttgctatgttgctcaggctggtctcaaactcctgggctc

SEQ ID NO: 106445 - DNA, 80 bp, synthetic construct; identical to SEQ ID NO: 36807
  misc_feature 1..80: note = Artificially Synthesized Probe
  source 1..80: mol_type = other DNA

SEQ ID NO: 106446 - DNA, 80 bp, synthetic construct
  misc_feature 1..80: note = Artificially Synthesized Probe
  source 1..80: mol_type = other DNA
tttgaacatttggactacagttacaatcactgtttaattgtccttgtctactaatatctgtcagtgctgactcagttttg

SEQ ID NO: 106447 - DNA, 80 bp, synthetic construct
  misc_feature 1..80: note = Artificially Synthesized Probe
  source 1..80: mol_type = other DNA
atactttcatcctttggcacattgctcttaagatttgtcagtaggaccagggcagcgctcaagtctagagctagttattc

SEQ ID NO: 106448 - DNA, 80 bp, synthetic construct
  misc_feature 1..80: note = Artificially Synthesized Probe
  source 1..80: mol_type = other DNA
cggccataattagtctccatgtacacgtgatcaccactgctctgctgaaaactgctaggcatgtggccatcctccagcat

SEQ ID NO: 106449 - DNA, 80 bp, synthetic construct; identical to SEQ ID NO: 36797
  misc_feature 1..80: note = Artificially Synthesized Probe
  source 1..80: mol_type = other DNA

SEQ ID NO: 106450 - DNA, 80 bp, synthetic construct; identical to SEQ ID NO: 36808
  misc_feature 1..80: note = Artificially Synthesized Probe
  source 1..80: mol_type = other DNA

SEQ ID NO: 106451 - DNA, 80 bp, synthetic construct
  misc_feature 1..80: note = Artificially Synthesized Probe
  source 1..80: mol_type = other DNA
ctaagcaaacaaaagcttagactgtcaacaattcgttaacaatcctgtaccatttgagtgctggggcaagaatcaaatac

SEQ ID NO: 106452 - DNA, 80 bp, synthetic construct
  misc_feature 1..80: note = Artificially Synthesized Probe
  source 1..80: mol_type = other DNA
aggaaaagacttctgtggtggtgttataatacgggaaaattttgtactgacaacagcaaaatgttcactgttacacagga

SEQ ID NO: 106453 - DNA, 80 bp, synthetic construct
  misc_feature 1..80: note = Artificially Synthesized Probe
  source 1..80: mol_type = other DNA
agatacttatcaactcaggaagcatatgtaaaataccagcagaagcctgggcccagcgacaggcaagtgctaactcacac

SEQ ID NO: 106454 - DNA, 80 bp, synthetic construct
  misc_feature 1..80: note = Artificially Synthesized Probe
  source 1..80: mol_type = other DNA
ggccttctcatcggcttatctgtgcctatttctttcttttttttttttgagacagagtctcactcaatccctcaggctgg

SEQ ID NO: 106455 - DNA, 80 bp, synthetic construct; identical to SEQ ID NO: 36809
  misc_feature 1..80: note = Artificially Synthesized Probe
  source 1..80: mol_type = other DNA

SEQ ID NO: 106456 - DNA, 80 bp, synthetic construct
  misc_feature 1..80: note = Artificially Synthesized Probe
  source 1..80: mol_type = other DNA
aaaacagaagaactaaccttgactgtttttaaaggctgtggcacttggttgcaatcgtgcaatctgtgagtggcctttct

SEQ ID NO: 106457 - DNA, 80 bp, synthetic construct
  misc_feature 1..80: note = Artificially Synthesized Probe
  source 1..80: mol_type = other DNA
catgatttcagattttaacagaacgagccaagacccgctgatgatcaagataacgcacgtccatgtgcacatgcggtatg

SEQ ID NO: 106458 - DNA, 80 bp, synthetic construct
  misc_feature 1..80: note = Artificially Synthesized Probe
  source 1..80: mol_type = other DNA
cacgcaatggcactgacctgggcaactcgctgaccacgcggcctgtcacacttgtggagggggaggagtgcgggcaggtc

SEQ ID NO: 106459 - DNA, 80 bp, synthetic construct; identical to SEQ ID NO: 36810
  misc_feature 1..80: note = Artificially Synthesized Probe
  source 1..80: mol_type = other DNA

SEQ ID NO: 106460 - DNA, 80 bp, synthetic construct
  misc_feature 1..80: note = Artificially Synthesized Probe
  source 1..80: mol_type = other DNA
ctcgtctgtagtatttctcccggcctccaaagcaaacgacgttctggtgaggtggaagcgtgcgggctcctatcttctgg

SEQ ID NO: 106461 - DNA, 80 bp, synthetic construct
  misc_feature 1..80: note = Artificially Synthesized Probe
  source 1..80: mol_type = other DNA
taccgagcactgtgacctttctttccctggaactctttatctcaatagagaccttaaaagaaaacatgagatacgttaaa

SEQ ID NO: 106462 - DNA, 80 bp, synthetic construct
  misc_feature 1..80: note = Artificially Synthesized Probe
  source 1..80: mol_type = other DNA
ccagggagcatcatttctcagagattaagcttaattaattagcctatttacttaccgatgaggttgacacaatcccagtt

SEQ ID NO: 106463 - DNA, 80 bp, synthetic construct
  misc_feature 1..80: note = Artificially Synthesized Probe
  source 1..80: mol_type = other DNA
ctttctaggcttcaagtctgaataattctcctaattttagatactcctaccccaaactaagtgtccccactccctacaga

SEQ ID NO: 106464 - DNA, 80 bp, synthetic construct; identical to SEQ ID NO: 36796
  misc_feature 1..80: note = Artificially Synthesized Probe
  source 1..80: mol_type = other DNA

SEQ ID NO: 106465 - DNA, 80 bp, synthetic construct; identical to SEQ ID NO: 36798
  misc_feature 1..80: note = Artificially Synthesized Probe
  source 1..80: mol_type = other DNA

SEQ ID NO: 106466 - DNA, 80 bp, synthetic construct
  misc_feature 1..80: note = Artificially Synthesized Probe
  source 1..80: mol_type = other DNA
acatttttatgttttaactctaaaggatgaattctggagacgatataagggtaagtggtttccttcgtctcctcagaagt

SEQ ID NO: 106467 - DNA, 80 bp, synthetic construct
  misc_feature 1..80: note = Artificially Synthesized Probe
  source 1..80: mol_type = other DNA
cgggctctgccaccagggccacaggcagtgcctggtttgtcttgcccagtgtctgggtagtttcttggcactctgggaca

SEQ ID NO: 106468 - DNA, 80 bp, synthetic construct
  misc_feature 1..80: note = Artificially Synthesized Probe
  source 1..80: mol_type = other DNA
ctcccaagggaggagctctaggtgggcaactgcagaagagcatgggacagaagtaacacagatggagacccacggggctg

SEQ ID NO: 106469 - DNA, 80 bp, synthetic construct; identical to SEQ ID NO: 36799
  misc_feature 1..80: note = Artificially Synthesized Probe
  source 1..80: mol_type = other DNA

SEQ ID NO: 106470 - DNA, 80 bp, synthetic construct
  misc_feature 1..80: note = Artificially Synthesized Probe
  source 1..80: mol_type = other DNA
cccccatcctcctcctgctcaggtccccgtccctgccacgtccccacatcctcctcctgctcaggtccccgtccctgcca

SEQ ID NO: 106471 - DNA, 80 bp, synthetic construct
  misc_feature 1..80: note = Artificially Synthesized Probe
  source 1..80: mol_type = other DNA
aggtcctcgtccctgccacctccccccatcctcctcctgctcaggtccccgtccctgccacgtccccacatcctcctcct

SEQ ID NO: 106472 - DNA, 80 bp, synthetic construct
  misc_feature 1..80: note = Artificially Synthesized Probe
  source 1..80: mol_type = other DNA
tccccacatcctcctcctgctcaggtccccgtccctgccacctccccacatcctcctcctgctcaggtccccgtccctgc

SEQ ID NO: 106473 - DNA, 80 bp, synthetic construct
  misc_feature 1..80: note = Artificially Synthesized Probe
  source 1..80: mol_type = other DNA
tcaggtccccgtccctgccacctccccacatcctcctcctgctcaggtccccgtccctgccacgtcccctcatcctcctc

SEQ ID NO: 106474 - DNA, 80 bp, synthetic construct; identical to SEQ ID NO: 36800
  misc_feature 1..80: note = Artificially Synthesized Probe
  source 1..80: mol_type = other DNA

SEQ ID NO: 106475 - DNA, 80 bp, synthetic construct
  misc_feature 1..80: note = Artificially Synthesized Probe
  source 1..80: mol_type = other DNA
actgcaatgtgggcagagagagccttggccaggccagccaggaatgcccagtcttgagtcaggagacatagccagggagc

SEQ ID NO: 106476 - DNA, 80 bp, synthetic construct
  misc_feature 1..80: note = Artificially Synthesized Probe
  source 1..80: mol_type = other DNA
catcctcctcctgcaggcggctccccgtgcatctcccagccctgcctccacaacggctcttgccaggacagcatctgggg

SEQ ID NO: 106477 - DNA, 80 bp, synthetic construct
  misc_feature 1..80: note = Artificially Synthesized Probe
  source 1..80: mol_type = other DNA
tgaaggtgcctgtgtgaaccgcgatttggctcaccccaggggattcctctcatcccaaccagattctcctccagaaacca

SEQ ID NO: 106478 - DNA, 80 bp, synthetic construct; identical to SEQ ID NO: 36801
  misc_feature 1..80: note = Artificially Synthesized Probe
  source 1..80: mol_type = other DNA

SEQ ID NO: 106479 - DNA, 80 bp, synthetic construct
  misc_feature 1..80: note = Artificially Synthesized Probe
  source 1..80: mol_type = other DNA
gctaatgccttcacagacaccccaaatttaccacgtaccaaagggggctttgaccttcacccaccatgtgcccctttctt

SEQ ID NO: 106480 - DNA, 80 bp, synthetic construct
  misc_feature 1..80: note = Artificially Synthesized Probe
  source 1..80: mol_type = other DNA
aacaggcgcgtggattagtccatgtggaaaaaggacaaatagaagtgtcatcactcatggagtctttttttttttttaat

SEQ ID NO: 106481 - DNA, 80 bp, synthetic construct
  misc_feature 1..80: note = Artificially Synthesized Probe
  source 1..80: mol_type = other DNA
ctaatttttgtatttttagtagagatggggtttcaccatgttggccaggctggtcttgatctcctgacctcgtgatccgc

SEQ ID NO: 106482 - DNA, 80 bp, synthetic construct; identical to SEQ ID NO: 36802
  misc_feature 1..80: note = Artificially Synthesized Probe
  source 1..80: mol_type = other DNA

SEQ ID NO: 106483 - DNA, 80 bp, synthetic construct
  misc_feature 1..80: note = Artificially Synthesized Probe
  source 1..80: mol_type = other DNA
gtgtgccccacggtgagtgctcagaccacagcggcctccagcttccaatgccagcgaccccgtccacatcctccttcctt

SEQ ID NO: 106484 - DNA, 80 bp, synthetic construct
  misc_feature 1..80: note = Artificially Synthesized Probe
  source 1..80: mol_type = other DNA
ggggtggtttaactccagtctgtgtgtctgtgaattactgcacattcatcagcattaaggataagattataatggttagt

SEQ ID NO: 106485 - DNA, 80 bp, synthetic construct
  misc_feature 1..80: note = Artificially Synthesized Probe
  source 1..80: mol_type = other DNA
cgtggcaggtaacagagcgctctccgcgtgcttcaatttattgttatgactttcacctcacttgtcatttcctaaataga

SEQ ID NO: 106486 - DNA, 80 bp, synthetic construct
  misc_feature 1..80: note = Artificially Synthesized Probe
  source 1..80: mol_type = other DNA
gccccatggtctcccaccctgagagggtgatccccccgccctgccctgcccagcacttaccgtagccggacttagctgag

SEQ ID NO: 106487 - DNA, 80 bp, synthetic construct; identical to SEQ ID NO: 36803
  misc_feature 1..80: note = Artificially Synthesized Probe
  source 1..80: mol_type = other DNA

SEQ ID NO: 106488 - DNA, 80 bp, synthetic construct
  misc_feature 1..80: note = Artificially Synthesized Probe
  source 1..80: mol_type = other DNA
cagtcccggctcactgcaacctctgcctcctgggcacaagcgctttccctgcctccacctcctgagtagctgggattaca

SEQ ID NO: 106489 - DNA, 80 bp, synthetic construct
  misc_feature 1..80: note = Artificially Synthesized Probe
  source 1..80: mol_type = other DNA
gcctggcctcatcattcactttctgtttacttaatggtcactcttgacacataaacatccatatttagcacaagtagtca

SEQ ID NO: 106490 - DNA, 80 bp, synthetic construct
  misc_feature 1..80: note = Artificially Synthesized Probe
  source 1..80: mol_type = other DNA
ggctttgatttacttacctcattttccactttccttgcctttcaggcctctaacacaattatctcctgcctgagtatatc

SEQ ID NO: 106491 - DNA, 80 bp, synthetic construct; identical to SEQ ID NO: 36804
  misc_feature 1..80: note = Artificially Synthesized Probe
  source 1..80: mol_type = other DNA

SEQ ID NO: 106492 - DNA, 80 bp, synthetic construct
  misc_feature 1..80: note = Artificially Synthesized Probe
  source 1..80: mol_type = other DNA
ttctggcagttgtgtggactggcagagaacaggatggagctcaaggacttgaagccacccagctccaaggtggagaggaa

SEQ ID NO: 106493 - DNA, 80 bp, synthetic construct
  misc_feature 1..80: note = Artificially Synthesized Probe
  source 1..80: mol_type = other DNA
ccatgagtgcgctgagggtcggtacttgggaggcccagagtgcagtggtcctccataggtagtgacagggtctggctcta

SEQ ID NO: 106494 - DNA, 80 bp, synthetic construct
  misc_feature 1..80: note = Artificially Synthesized Probe
  source 1..80: mol_type = other DNA
agaggacactgacttaggcaggctacatactattagattttttacttcagtattataaattgttctgaagttatttaact

SEQ ID NO: 106495 - DNA, 80 bp, synthetic construct; identical to SEQ ID NO: 36805
  misc_feature 1..80: note = Artificially Synthesized Probe
  source 1..80: mol_type = other DNA

SEQ ID NO: 106496 - DNA, 80 bp, synthetic construct
  misc_feature 1..80: note = Artificially Synthesized Probe
  source 1..80: mol_type = other DNA
cagtacccgtgctatgtgggcacatgctttatttcatttaatctttcaaacaacttctcgttttctccttttgtatccct

SEQ ID NO: 106497 - DNA, 80 bp, synthetic construct
  misc_feature 1..80: note = Artificially Synthesized Probe
  source 1..80: mol_type = other DNA
gccttctcctcctggaaatcgcagagcctgctgcaatgtataagtttcttctttatgtgttttatcaagatgttaaatgc

SEQ ID NO: 106498 - DNA, 80 bp, synthetic construct
  misc_feature 1..80: note = Artificially Synthesized Probe
  source 1..80: mol_type = other DNA
taaggtacatgttttataggtagtatataattggctttcatttttatccagtgtgaaaaacctctgccttttaattgggg

SEQ ID NO: 106499 - DNA, 80 bp, synthetic construct
  misc_feature 1..80: note = Artificially Synthesized Probe
  source 1..80: mol_type = other DNA
tttatcatctctggttctttgttggcggttgcttcacagtttggagaatgcatctttaccctatcacagtccactccact

SEQ ID NO: 106500 - DNA, 80 bp, synthetic construct; identical to SEQ ID NO: 36806
  misc_feature 1..80: note = Artificially Synthesized Probe
  source 1..80: mol_type = other DNA

SEQ ID NO: 106501 - DNA, 80 bp, synthetic construct
  misc_feature 1..80: note = Artificially Synthesized Probe
  source 1..80: mol_type = other DNA
ggcgcagagccccaggctggcagcagtcctctcctctctgcacttgggcctgccccactgccttcctgtctgccttgtgc

SEQ ID NO: 106502 - DNA, 80 bp, synthetic construct
  misc_feature 1..80: note = Artificially Synthesized Probe
  source 1..80: mol_type = other DNA
ttaaatataaccccaatagtaaaatatattcctaaacagccaggccattctccctccttctaaccctcatctcctcggcc

SEQ ID NO: 106503 - DNA, 80 bp, synthetic construct
  misc_feature 1..80: note = Artificially Synthesized Probe
  source 1..80: mol_type = other DNA
ctacccctaacatgctactgacttgccttctcctttcccatctccactccagttgcttcccctttcgacgacgatgacaa

SEQ ID NO: 106504 - DNA, 80 bp, synthetic construct
  misc_feature 1..80: note = Artificially Synthesized Probe
  source 1..80: mol_type = other DNA
atactgatgcaagaccataggaaggggaaagctgcaggtgtgtttgtgctgggaggagcagtgaccctcacctcacagac

SEQ ID NO: 106505 - DNA, 80 bp, synthetic construct; identical to SEQ ID NO: 36822
  misc_feature 1..80: note = Artificially Synthesized Probe
  source 1..80: mol_type = other DNA

SEQ ID NO: 106506 - DNA, 80 bp, synthetic construct
  misc_feature 1..80: note = Artificially Synthesized Probe
  source 1..80: mol_type = other DNA
cccatgaaatgaagcagtaggcttcaggcttggctctgacagcaccacaatagcaccactatagctgctcttaacctcga

SEQ ID NO: 106507 - DNA, 80 bp, synthetic construct
  misc_feature 1..80: note = Artificially Synthesized Probe
  source 1..80: mol_type = other DNA
tgcagccaaggttaagaattgctgttgttttgaccaataataacgtatacctttgttctgcaaaagtgagcctggggctt

SEQ ID NO: 106508 - DNA, 80 bp, synthetic construct
  misc_feature 1..80: note = Artificially Synthesized Probe
  source 1..80: mol_type = other DNA
aaaagagagaagacttcagtgcttgagacagccacatcccaaatcctatcccactggaagtattgtgaggatattccttg

SEQ ID NO: 106509 - DNA, 80 bp, synthetic construct; identical to SEQ ID NO: 36823
  misc_feature 1..80: note = Artificially Synthesized Probe
  source 1..80: mol_type = other DNA

SEQ ID NO: 106510 - DNA, 80 bp, synthetic construct
  misc_feature 1..80: note = Artificially Synthesized Probe
  source 1..80: mol_type = other DNA
gtgtcagcaggtcactgctacaagtcgtaagtgtggggcccctgactgcaaaactcccagccaggctgcctgggagagct

SEQ ID NO: 106511 - DNA, 80 bp, synthetic construct
  misc_feature 1..80: note = Artificially Synthesized Probe
  source 1..80: mol_type = other DNA
agggttgtggtcataaaagcaggcagggatgatcttggggtggtgagagctagtgagaagagcaggctagtacttttgct

SEQ ID NO: 106512 - DNA, 80 bp, synthetic construct
  misc_feature 1..80: note = Artificially Synthesized Probe
  source 1..80: mol_type = other DNA
tatagacagagctgagaactgctgcctacaccaagaactcttaaacctgagtatgcatcagaactccctgcaggcttgtt

SEQ ID NO: 106513 - DNA, 80 bp, synthetic construct; identical to SEQ ID NO: 36824
  misc_feature 1..80: note = Artificially Synthesized Probe
  source 1..80: mol_type = other DNA

SEQ ID NO: 106514 - DNA, 80 bp, synthetic construct
  misc_feature 1..80: note = Artificially Synthesized Probe
  source 1..80: mol_type = other DNA
actgcaaagctcccagccaggctgcctgggagagcttggcttcagcccagggaactactgaggttgggtaagatggatgg

SEQ ID NO: 106515 - DNA, 80 bp, synthetic construct
  misc_feature 1..80: note = Artificially Synthesized Probe
  source 1..80: mol_type = other DNA
tgcactgacccacattgctctcctgcccatgcaatatggccacacaccccaccccatgcctccagagctgtccatgagca

SEQ ID NO: 106516 - DNA, 80 bp, synthetic construct
  misc_feature 1..80: note = Artificially Synthesized Probe
  source 1..80: mol_type = other DNA
gcggccaagatcatccgccaccccaaatacaacagccggactctggacaatgacatcctgctgatcaagctctcctcacc

SEQ ID NO: 106517 - DNA, 80 bp, synthetic construct
  misc_feature 1..80: note = Artificially Synthesized Probe
  source 1..80: mol_type = other DNA
tttccagaacaaaccatgccccttaacttaaatcctctcgcctccaggcttaagacacatttctagtgcccattacacac

SEQ ID NO: 106518 - DNA, 80 bp, synthetic construct
  misc_feature 1..80: note = Artificially Synthesized Probe
  source 1..80: mol_type = other DNA
ccaggacttatgttttggagtcctctccaggggcagtgttcctcttcaatgttccatcctagactattgtctctttctct

SEQ ID NO: 106519 - DNA, 80 bp, synthetic construct; identical to SEQ ID NO: 36825
  misc_feature 1..80: note = Artificially Synthesized Probe
  source 1..80: mol_type = other DNA

SEQ ID NO: 106520 - DNA, 80 bp, synthetic construct
  misc_feature 1..80: note = Artificially Synthesized Probe
  source 1..80: mol_type = other DNA
ccacagagctggctggaaagggctcttttaaggttcagagcaaatgtaggtgtattcctcctccatctctctcttcatac

SEQ ID NO: 106521 - DNA, 80 bp, synthetic construct
  misc_feature 1..80: note = Artificially Synthesized Probe
  source 1..80: mol_type = other DNA
gactggattaaggacaccatagctgccaacagctaaagcccctggtccctctgcagtctctataccaataaagtgaccct

SEQ ID NO: 106522 - DNA, 80 bp, synthetic construct; identical to SEQ ID NO: 36812
  misc_feature 1..80: note = Artificially Synthesized Probe
  source 1..80: mol_type = other DNA

SEQ ID NO: 106523 - DNA, 80 bp, synthetic construct
  misc_feature 1..80: note = Artificially Synthesized Probe
  source 1..80: mol_type = other DNA
aacctgagtttgcctcagaaccacctgcagggttgttaaagcacaaatcactgggacccatccccaaggttctgagcagt

SEQ ID NO: 106524 - DNA, 80 bp, synthetic construct
  misc_feature 1..80: note = Artificially Synthesized Probe
  source 1..80: mol_type = other DNA
ggcctggggtgaagaatgctgggaaaacttcaaagagctccttgtgcccacagtgctagtgactgtggagattgtgggaa

SEQ ID NO: 106525 - DNA, 80 bp, synthetic construct
  misc_feature 1..80: note = Artificially Synthesized Probe
  source 1..80: mol_type = other DNA
cacaccccacccgatgcctccagagctgcccatgagcagggagcttgaggaccctggggaaagtaagatgggtgtcccag

SEQ ID NO: 106526 - DNA, 80 bp, synthetic construct; identical to SEQ ID NO: 36813
  misc_feature 1..80: note = Artificially Synthesized Probe
  source 1..80: mol_type = other DNA

SEQ ID NO: 106527 - DNA, 80 bp, synthetic construct
  misc_feature 1..80: note = Artificially Synthesized Probe
  source 1..80: mol_type = other DNA
ctccaggcttaagacacatttctagtgcccattacacacaggctgtacagtggatggacatcagagagatgcaaagtctc

SEQ ID NO: 106528 - DNA, 80 bp, synthetic construct
  misc_feature 1..80: note = Artificially Synthesized Probe
  source 1..80: mol_type = other DNA
gttcctcttcaatgttccatcctagattattgtctccttctctggcctgatctacacttctactttctttgttctcttgc

SEQ ID NO: 106529 - DNA, 80 bp, synthetic construct
  misc_feature 1..80: note = Artificially Synthesized Probe
  source 1..80: mol_type = other DNA
tggtttgaccccttcccatgctgaggttcccactgatacccaggccccacccaggaaaaagatttgaactcccaaggtgg

SEQ ID NO: 106530 - DNA, 80 bp, synthetic construct; identical to SEQ ID NO: 36811
  misc_feature 1..80: note = Artificially Synthesized Probe
  source 1..80: mol_type = other DNA

SEQ ID NO: 106531 - DNA, 80 bp, synthetic construct; identical to SEQ ID NO: 36814
  misc_feature 1..80: note = Artificially Synthesized Probe
  source 1..80: mol_type = other DNA

SEQ ID NO: 106532 - DNA, 80 bp, synthetic construct
  misc_feature 1..80: note = Artificially Synthesized Probe
  source 1..80: mol_type = other DNA
cagtctctataccaataaagtgaccttgctttcactgtctgtgtctgtgcctgctccctcacactgcttcacactggaaa

SEQ ID NO: 106533 - DNA, 80 bp, synthetic construct
  misc_feature 1..80: note = Artificially Synthesized Probe
  source 1..80: mol_type = other DNA
ctgttttctagagaaatgtgtgtttcagaaagttggtctttggtgggggggtactgatttttatttgggcttctcacagt

SEQ ID NO: 106534 - DNA, 80 bp, synthetic construct
  misc_feature 1..80: note = Artificially Synthesized Probe
  source 1..80: mol_type = other DNA
tcattcacctggaaaattagactcaagcaaagctccctggcctcctacctcttccctcagttccctagttccatctctgt

SEQ ID NO: 106535 - DNA, 80 bp, synthetic construct; identical to SEQ ID NO: 36815
  misc_feature 1..80: note = Artificially Synthesized Probe
  source 1..80: mol_type = other DNA

SEQ ID NO: 106536 - DNA, 80 bp, synthetic construct
  misc_feature 1..80: note = Artificially Synthesized Probe
  source 1..80: mol_type = other DNA
gcacctgccaaagcctcttccaggcaattctgagagggaccatgttggggctgtagctcatccaagcttgtcaccgaaga

SEQ ID NO: 106537 - DNA, 80 bp, synthetic construct
  misc_feature 1..80: note = Artificially Synthesized Probe
  source 1..80: mol_type = other DNA
cctccaagtgtccacagagcagtgtgcaaattgcagggatgagtagaggaaaacctctacatggagcacagcattcctgg

SEQ ID NO: 106538 - DNA, 80 bp, synthetic construct
  misc_feature 1..80: note = Artificially Synthesized Probe
  source 1..80: mol_type = other DNA
actcactatcttcagaggaaaacagggctcagggcttgcacacaatggagatacacacaggtcacccagaacgtcaatac

SEQ ID NO: 106539 - DNA, 80 bp, synthetic construct
  misc_feature 1..80: note = Artificially Synthesized Probe
  source 1..80: mol_type = other DNA
tactgtaacgtcagtgcctcgtctgaatatcatcatcactcaagaatcaagggaagaacaaaatgcttcatataaacagg

SEQ ID NO: 106540 - DNA, 80 bp, synthetic construct
  misc_feature 1..80: note = Artificially Synthesized Probe
  source 1..80: mol_type = other DNA
ttctattggccaataacaatgtctacctttgttctgccaaagtgagcctgggggctgccctcaactctgccctgactaca

SEQ ID NO: 106541 - DNA, 80 bp, synthetic construct; identical to SEQ ID NO: 36816
  misc_feature 1..80: note = Artificially Synthesized Probe
  source 1..80: mol_type = other DNA

SEQ ID NO: 106542 - DNA, 80 bp, synthetic construct
  misc_feature 1..80: note = Artificially Synthesized Probe
  source 1..80: mol_type = other DNA
gctttcccattccatgtgctcacatggaccgtgagatgtgaaagtctgcagggcgtgtgctcgggatcgaggctggtact

SEQ ID NO: 106543 - DNA, 80 bp, synthetic construct
  misc_feature 1..80: note = Artificially Synthesized Probe
  source 1..80: mol_type = other DNA
gaacaacagccaggctggagtgccgtggcatgatctctgctcactacaacctccacctcccgggttcaagtgattcagtc

SEQ ID NO: 106544 - DNA, 80 bp, synthetic construct
  misc_feature 1..80: note = Artificially Synthesized Probe
  source 1..80: mol_type = other DNA
aggtgtgagccacagcttctggcccaggccccattttttaaaaaataatttcaaattttattttagattcatggggtaca

SEQ ID NO: 106545 - DNA, 80 bp, synthetic construct; identical to SEQ ID NO: 36817
  misc_feature 1..80: note = Artificially Synthesized Probe
  source 1..80: mol_type = other DNA

SEQ ID NO: 106546 - DNA, 80 bp, synthetic construct
  misc_feature 1..80: note = Artificially Synthesized Probe
  source 1..80: mol_type = other DNA
ggttgattccatggctttgctactgtgaatagtgctgtgatggacatgcaagagcatgagtctttttggcagaacaatta

SEQ ID NO: 106547 - DNA, 80 bp, synthetic construct
  misc_feature 1..80: note = Artificially Synthesized Probe
  source 1..80: mol_type = other DNA
tccactgcagcctcatgagcatcttctattctgtggacattttaataataaccacactgcagccaagctctttcaagccc

SEQ ID NO: 106548 - DNA, 80 bp, synthetic construct; identical to SEQ ID NO: 36818
  misc_feature 1..80: note = Artificially Synthesized Probe
  source 1..80: mol_type = other DNA

SEQ ID NO: 106549 - DNA, 80 bp, synthetic construct
  misc_feature 1..80: note = Artificially Synthesized Probe
  source 1..80: mol_type = other DNA
cctgtcctaggcagagacacagcaacattctcttaagctgaaattaagcataaacccacttcaccaataatcatctgagg

SEQ ID NO: 106550 - DNA, 80 bp, synthetic construct
  misc_feature 1..80: note = Artificially Synthesized Probe
  source 1..80: mol_type = other DNA
cacatcccaaaatatacttggagatggggaaaaaagcaggagaggagaagggtaaaaaaggaggacaaagtgtctgaaag

SEQ ID NO: 106551 - DNA, 80 bp, synthetic construct
  misc_feature 1..80: note = Artificially Synthesized Probe
  source 1..80: mol_type = other DNA
cttcagaaagctcatttgctcatctgtaaagtgggcaattccataggtggttgtgatgataaaatgaaaaaaaagttctt

SEQ ID NO: 106552 - DNA, 80 bp, synthetic construct
  misc_feature 1..80: note = Artificially Synthesized Probe
  source 1..80: mol_type = other DNA
acatcccaattcctatcccactggaagcattgtgaggacattccttgaatcctcagcctggtgaccccggggagaactga

SEQ ID NO: 106553 - DNA, 80 bp, synthetic construct
  misc_feature 1..80: note = Artificially Synthesized Probe
  source 1..80: mol_type = other DNA
gaaatctatagttcagaatgaacagtaccaagaatgacatgtcccccaaattgagcatgggtagctggatctgaacctat

SEQ ID NO: 106554 - DNA, 80 bp, synthetic construct
  misc_feature 1..80: note = Artificially Synthesized Probe
  source 1..80: mol_type = other DNA
aaccaccccctttcctggcagacacttgccctgccattcttgccacctttcccattttgactgtgttctgatattctatt

SEQ ID NO: 106555 - DNA, 80 bp, synthetic construct; identical to SEQ ID NO: 36819
  misc_feature 1..80: note = Artificially Synthesized Probe
  source 1..80: mol_type = other DNA

SEQ ID NO: 106556 - DNA, 80 bp, synthetic construct
  misc_feature 1..80: note = Artificially Synthesized Probe
  source 1..80: mol_type = other DNA
aatgaaataacatgttcagcgacaacacagcaaaaccccatattatcaatgctctaaaacctagctacctcaggcttggc

SEQ ID NO: 106557 - DNA, 80 bp, synthetic construct
  misc_feature 1..80: note = Artificially Synthesized Probe
  source 1..80: mol_type = other DNA
aggaatcagatgtacagtttgtcctctggggacctctgccttgatcctcaataaatctccttttagatgccacgtgcagc

SEQ ID NO: 106558 - DNA, 80 bp, synthetic construct; identical to SEQ ID NO: 36820
  misc_feature 1..80: note = Artificially Synthesized Probe
  source 1..80: mol_type = other DNA

SEQ ID NO: 106559 - DNA, 80 bp, synthetic construct
  misc_feature 1..80: note = Artificially Synthesized Probe
  source 1..80: mol_type = other DNA
gagctgaacctgaaggtactctgtgtgtcctctcaacaccatggaccctattttggtatttttttccagttacctctggt

SEQ ID NO: 106560 - DNA, 80 bp, synthetic construct
  misc_feature 1..80: note = Artificially Synthesized Probe
  source 1..80: mol_type = other DNA
catcaccaacattagctcagagttgatgagaagggaaagcaccctcataaggaagcccctcctttccttacattattaga

SEQ ID NO: 106561 - DNA, 80 bp, synthetic construct
  misc_feature 1..80: note = Artificially Synthesized Probe
  source 1..80: mol_type = other DNA
actacatctaaaatagaaaattctagacccacccctccacatctttgttattgaacccaatatgtcacccatttaccatg

SEQ ID NO: 106562 - DNA, 80 bp, synthetic construct
  misc_feature 1..80: note = Artificially Synthesized Probe
  source 1..80: mol_type = other DNA
gtttcaatcaccctgagtgcaggttgcaagggcaaccatgaggctgcataaaaagaacctatgacaggatgcacatgaga

SEQ ID NO: 106563 - DNA, 80 bp, synthetic construct; identical to SEQ ID NO: 36821
  misc_feature 1..80: note = Artificially Synthesized Probe
  source 1..80: mol_type = other DNA

SEQ ID NO: 106564 - DNA, 80 bp, synthetic construct
  misc_feature 1..80: note = Artificially Synthesized Probe
  source 1..80: mol_type = other DNA
caaatccgttctgacatacggataaacttttattgacataccaaagagaaaccaatattcactgaaggctgccgaatccg

SEQ ID NO: 106565 - DNA, 80 bp, synthetic construct
  misc_feature 1..80: note = Artificially Synthesized Probe
  source 1..80: mol_type = other DNA
agtagaaaagcttcctcagctctgagtgggagaccatcgctggaagaattttcctcctacaagaaaaaagataaatgtat

SEQ ID NO: 106566 - DNA, 80 bp, synthetic construct
  misc_feature 1..80: note = Artificially Synthesized Probe
  source 1..80: mol_type = other DNA
cctactaagccaatctaatttgtgtcaaagtcagtgcaggccacataagagtgttctcacagattcatttttttttcctt

SEQ ID NO: 106567 - DNA, 80 bp, synthetic construct
  misc_feature 1..80: note = Artificially Synthesized Probe
  source 1..80: mol_type = other DNA
agcctcctgagtagctcaaatacctgtgcctccttgaagccatctttcttttcttttagatatatatatagttgtttttt

SEQ ID NO: 106568 - DNA, 80 bp, synthetic construct
  misc_feature 1..80: note = Artificially Synthesized Probe
  source 1..80: mol_type = other DNA
caggagatccgagaacatcctggctaacacagtgaaaccctgtctctactaaaaatataaaaaaattagccgggcgtggt

SEQ ID NO: 106569 - DNA, 80 bp, synthetic construct; identical to SEQ ID NO: 36837
  misc_feature 1..80: note = Artificially Synthesized Probe
  source 1..80: mol_type = other DNA

SEQ ID NO: 106570 - DNA, 80 bp, synthetic construct
  misc_feature 1..80: note = Artificially Synthesized Probe
  source 1..80: mol_type = other DNA
tcccagctacttgggagactgaagcaggagaattacttgaacccaggaggtagagctgcagtgagctgagatcgtgccac

SEQ ID NO: 106571 - DNA, 80 bp, synthetic construct
  misc_feature 1..80: note = Artificially Synthesized Probe
  source 1..80: mol_type = other DNA
ggagagggagcgggggtggagacaaggagggaggcttgtgatggcagagcgaggagtgtgagcaaagacaaggagaagga

SEQ ID NO: 106572 - DNA, 80 bp, synthetic construct
  misc_feature 1..80: note = Artificially Synthesized Probe
  source 1..80: mol_type = other DNA
aaatatgagggctaaacatacacaatgtcgccaatgtacaggggctagttgaagacatggtctgattaaagtccaggaag

SEQ ID NO: 106573 - DNA, 80 bp, synthetic construct
  misc_feature 1..80: note = Artificially Synthesized Probe
  source 1..80: mol_type = other DNA
gtagtcccagcttctcagaaggctgaggcaggagactctcttgaacctgggaggcggagattgcagtgagccaagatcac

SEQ ID NO: 106574 - DNA, 80 bp, synthetic construct
  misc_feature 1..80: note = Artificially Synthesized Probe
  source 1..80: mol_type = other DNA
gtcatggctcactgcagccttgaacttctgggctcaagtgatcatcctgcctcagcctcctgagtagccgggatgacagg

SEQ ID NO: 106575 - DNA, 80 bp, synthetic construct; identical to SEQ ID NO: 36838
  misc_feature 1..80: note = Artificially Synthesized Probe
  source 1..80: mol_type = other DNA

SEQ ID NO: 106576 - DNA, 80 bp, synthetic construct
  misc_feature 1..80: note = Artificially Synthesized Probe
  source 1..80: mol_type = other DNA
gcttggctaatttataaatttttttttgaagagatgggggtcttgctatgttgcccagaatggtcttcaactcctggact

SEQ ID NO: 106577 - DNA, 80 bp, synthetic construct
  misc_feature 1..80: note = Artificially Synthesized Probe
  source 1..80: mol_type = other DNA
atacaaggctacacagatgatgtaagtaatctatatttagaatagactgcagttaaaaacagactcaaagcagttgaaca

SEQ ID NO: 106578 - DNA, 80 bp, synthetic construct; identical to SEQ ID NO: 36839
  misc_feature 1..80: note = Artificially Synthesized Probe
  source 1..80: mol_type = other DNA

SEQ ID NO: 106579 - DNA, 80 bp, synthetic construct
  misc_feature 1..80: note = Artificially Synthesized Probe
  source 1..80: mol_type = other DNA
cgatctcctgacctcgtgatccgcccgcctcggcctctcaaagtgctgggattacaagcgtgagccaccgcgcccggcct

SEQ ID NO: 106580 - DNA, 80 bp, synthetic construct
  misc_feature 1..80: note = Artificially Synthesized Probe
  source 1..80: mol_type = other DNA
tgatttttacattttaaacagttgaaaaaaaaatcaaaagaagaataatattttttgacatgtaaaaactaatgaaattc

SEQ ID NO: 106581 - DNA, 80 bp, synthetic construct
  misc_feature 1..80: note = Artificially Synthesized Probe
  source 1..80: mol_type = other DNA
cacacacctatagacctagctactcaggagggtgaggcagaaggattgcttgagcacaggagtttgaggctgcagtgagc

SEQ ID NO: 106582 - DNA, 80 bp, synthetic construct
  misc_feature 1..80: note = Artificially Synthesized Probe
  source 1..80: mol_type = other DNA
tgcagtggcacaatcttgactcactgcaacctctgcctcccaggttcaagtgattctcctgcctcagcctcccaagtagc

SEQ ID NO: 106583 - DNA, 80 bp, synthetic construct; identical to SEQ ID NO: 36840
  misc_feature 1..80: note = Artificially Synthesized Probe
  source 1..80: mol_type = other DNA

SEQ ID NO: 106584 - DNA, 80 bp, synthetic construct
  misc_feature 1..80: note = Artificially Synthesized Probe
  source 1..80: mol_type = other DNA
ggtgcaatctcagctcactgcaacctctgcctccctggctcagcctcctgagcagctgggactacaggcaggcatgatat

SEQ ID NO: 106585 - DNA, 80 bp, synthetic construct
  misc_feature 1..80: note = Artificially Synthesized Probe
  source 1..80: mol_type = other DNA
tgaaaatgagattgggagctccctgagaaatctcttcattttacttttatgcattcctcattaaactagtagcccaatgt

SEQ ID NO: 106586 - DNA, 80 bp, synthetic construct
  misc_feature 1..80: note = Artificially Synthesized Probe
  source 1..80: mol_type = other DNA
ggcgtgagcaactgcgcctggtgacacacacaatttatggctcaaggaatactaaggacttttttttttttgagacggag

SEQ ID NO: 106587 - DNA, 80 bp, synthetic construct
  misc_feature 1..80: note = Artificially Synthesized Probe
  source 1..80: mol_type = other DNA
tagagacaaggtttcaccatgttgcccaggctggtctcgaattcctgacctcaggcaatccacctgccttggcctcccaa

SEQ ID NO: 106588 - DNA, 80 bp, synthetic construct; identical to SEQ ID NO: 36841
  misc_feature 1..80: note = Artificially Synthesized Probe
  source 1..80: mol_type = other DNA

SEQ ID NO: 106589 - DNA, 80 bp, synthetic construct
  misc_feature 1..80: note = Artificially Synthesized Probe
  source 1..80: mol_type = other DNA
acttgaggtcaggagttcgagacccgcctggccaacatggtgaaaccccatctctactaaaaatacaaaaattagccggg

SEQ ID NO: 106590 - DNA, 80 bp, synthetic construct; identical to SEQ ID NO: 36827
  misc_feature 1..80: note = Artificially Synthesized Probe
  source 1..80: mol_type = other DNA

SEQ ID NO: 106591 - DNA, 80 bp, synthetic construct
  misc_feature 1..80: note = Artificially Synthesized Probe
  source 1..80: mol_type = other DNA
tgcagcctgggtgacagagcgagactccatctcaaaaaaaaaaaaaaaaaaaaaagaactcaacaagggccagcatggtg

SEQ ID NO: 106592 - DNA, 80 bp, synthetic construct; identical to SEQ ID NO: 36842
  misc_feature 1..80: note = Artificially Synthesized Probe
  source 1..80: mol_type = other DNA

SEQ ID NO: 106593 - DNA, 80 bp, synthetic construct
  misc_feature 1..80: note = Artificially Synthesized Probe
  source 1..80: mol_type = other DNA
ggtgtaagaggagctaaaatgaggtaagtgggataagctaaagaactttttaagaaggtacatgagaaggcccggcacgg

SEQ ID NO: 106594 - DNA, 80 bp, synthetic construct
  misc_feature 1..80: note = Artificially Synthesized Probe
  source 1..80: mol_type = other DNA
tcaggaggctgaggcaagagaatcgcttgaacccgggaggcagaagttgcggcgagccgagattgcgctattgcacccca

SEQ ID NO: 106595 - DNA, 80 bp, synthetic construct
  misc_feature 1..80: note = Artificially Synthesized Probe
  source 1..80: mol_type = other DNA
cccaaagaggaatgcataatgcatgggtgccatcttcaagaggtttccagtcttgtcgaaatgattagacaaataattac

SEQ ID NO: 106596 - DNA, 80 bp, synthetic construct
  misc_feature 1..80: note = Artificially Synthesized Probe
  source 1..80: mol_type = other DNA
actcaggatgctgaggcaggagaattgcttgaacgcgggaggtggagtttgcagtgagccgagatcccaccactgcactc

SEQ ID NO: 106597 - DNA, 80 bp, synthetic construct; identical to SEQ ID NO: 36843
  misc_feature 1..80: note = Artificially Synthesized Probe
  source 1..80: mol_type = other DNA

SEQ ID NO: 106598 - DNA, 80 bp, synthetic construct
  misc_feature 1..80: note = Artificially Synthesized Probe
  source 1..80: mol_type = other DNA
aaaaaaagcaagaccatcagccttgagtttgaaaggaaaggtacatttcctccactaaaagtgagaactgatttacacat

SEQ ID NO: 106599 - DNA, 80 bp, synthetic construct
  misc_feature 1..80: note = Artificially Synthesized Probe
  source 1..80: mol_type = other DNA
gctcactgtggcctcaacctcctaggtgaagtgatcctcctgcctcagcctcctgagtagcagagaccacaggcacgcac

SEQ ID NO: 106600 - DNA, 80 bp, synthetic construct
  misc_feature 1..80: note = Artificially Synthesized Probe
  source 1..80: mol_type = other DNA
agaatgttagagactcactttacattgaatttacttggaaggctgattctttttccacaccctccctaggagactgagct

SEQ ID NO: 106601 - DNA, 80 bp, synthetic construct
  misc_feature 1..80: note = Artificially Synthesized Probe
  source 1..80: mol_type = other DNA
aactcctggcctcaggtgatccacctgcctcagcctcccaaagtgctgggattacaggcgtgagccactgcgcctggcca

SEQ ID NO: 106602 - DNA, 80 bp, synthetic construct; identical to SEQ ID NO: 36844
  misc_feature 1..80: note = Artificially Synthesized Probe
  source 1..80: mol_type = other DNA

SEQ ID NO: 106603 - DNA, 80 bp, synthetic construct
  misc_feature 1..80: note = Artificially Synthesized Probe
  source 1..80: mol_type = other DNA
ctaattcttctgtatttttagtagagatggggtttcaccatattggccaggctggtctcaaactcctgacctcaagtgat

SEQ ID NO: 106604 - DNA, 80 bp, synthetic construct
  misc_feature 1..80: note = Artificially Synthesized Probe
  source 1..80: mol_type = other DNA
ttctcgtggctatagggggaaaaagtctgctgagtaaggtcagttgcttcaaagtaaattgtgtacattagaattccaca

SEQ ID NO: 106605 - DNA, 80 bp, synthetic construct
  misc_feature 1..80: note = Artificially Synthesized Probe
  source 1..80: mol_type = other DNA
tctgcagctcagaacagaacttctgcctggctggccccagctagttcatctcttggcaagcaaaggaccaactgattaaa

SEQ ID NO: 106606 - DNA, 80 bp, synthetic construct; identical to SEQ ID NO: 36845
  misc_feature 1..80: note = Artificially Synthesized Probe
  source 1..80: mol_type = other DNA

SEQ ID NO: 106607 - DNA, 80 bp, synthetic construct
  misc_feature 1..80: note = Artificially Synthesized Probe
  source 1..80: mol_type = other DNA
tagttgcgagaaccaagcttatttgctttggtagtagggataaatttgttcaggtccccgggcattgaaagagtacaaag

SEQ ID NO: 106608 - DNA, 80 bp, synthetic construct
  misc_feature 1..80: note = Artificially Synthesized Probe
  source 1..80: mol_type = other DNA
gtagattctgaaaaggttctgaatcagaggagagtcaaagaggttccctgtaacaagggctgggatccccagcacatgca

SEQ ID NO: 106609 - DNA, 80 bp, synthetic construct
  misc_feature 1..80: note = Artificially Synthesized Probe
  source 1..80: mol_type = other DNA
tgcgccaccacacccaggtaatttttgtatttttagtggagatggggtttcaccatgttggacaggctagtcttgaactc

SEQ ID NO: 106610 - DNA, 80 bp, synthetic construct; identical to SEQ ID NO: 36846
  misc_feature 1..80: note = Artificially Synthesized Probe
  source 1..80: mol_type = other DNA

SEQ ID NO: 106611 - DNA, 80 bp, synthetic construct
  misc_feature 1..80: note = Artificially Synthesized Probe
  source 1..80: mol_type = other DNA
taaatatacaaaaattagccaggcatggtggtgggcacctgtaatcccagctactcaggaggctgaggcaggagaatcac

SEQ ID NO: 106612 - DNA, 80 bp, synthetic construct
  misc_feature 1..80: note = Artificially Synthesized Probe
  source 1..80: mol_type = other DNA
ctgaggcgggtggatcatgaggtcaggagatcgagaccatcctggctaacaaggtgaaaccccgtctctactaaaaatat

SEQ ID NO: 106613 - DNA, 80 bp, synthetic construct
  misc_feature 1..80: note = Artificially Synthesized Probe
  source 1..80: mol_type = other DNA
tgtatatgtgtatgtatatatttatatacacacatatatatacatatgtgtgtatatatttatatacacacacatatata

SEQ ID NO: 106614 - DNA, 80 bp, synthetic construct
  misc_feature 1..80: note = Artificially Synthesized Probe
  source 1..80: mol_type = other DNA
tcaaaaaaaaaaaaaacaaacaaaacaaacaaacaaaaaaaactgaggactacaagaaggcaggggaaggagggcaagga

SEQ ID NO: 106615 - DNA, 80 bp, synthetic construct; identical to SEQ ID NO: 36847
  misc_feature 1..80: note = Artificially Synthesized Probe
  source 1..80: mol_type = other DNA

SEQ ID NO: 106616 - DNA, 80 bp, synthetic construct
  misc_feature 1..80: note = Artificially Synthesized Probe
  source 1..80: mol_type = other DNA
tacgaaaattagccaggtgtggtggcccacacctgtaatcccaactactcaggaggctgagacaggagatatcacttgaa

SEQ ID NO: 106617 - DNA, 80 bp, synthetic construct
  misc_feature 1..80: note = Artificially Synthesized Probe
  source 1..80: mol_type = other DNA
aaacaaaaccaagaaaaggcaaatcagactcacgtttctccagtgctagatttctaggagacgacactcttctgttcctt

SEQ ID NO: 106618 - DNA, 80 bp, synthetic construct
  misc_feature 1..80: note = Artificially Synthesized Probe
  source 1..80: mol_type = other DNA
tagaaagagagaatgaggaaatgaacatcgaagtccatacacaaaacaggaaagagggagactggcttcactctctctcc

SEQ ID NO: 106619 - DNA, 80 bp, synthetic construct; identical to SEQ ID NO: 36848
  misc_feature 1..80: note = Artificially Synthesized Probe
  source 1..80: mol_type = other DNA

SEQ ID NO: 106620 - DNA, 80 bp, synthetic construct
  misc_feature 1..80: note = Artificially Synthesized Probe
  source 1..80: mol_type = other DNA
tgtagtcccagctactcgggaggctgaggcaggagaatggcatgaacccaggaggcagagcttgcagtgagctgagatcg

SEQ ID NO: 106621 - DNA, 80 bp, synthetic construct
  misc_feature 1..80: note = Artificially Synthesized Probe
  source 1..80: mol_type = other DNA
tgccatctccacaaaaaataaaataaatgagccaggcatggtggtgcgtatttgtagtcccagctacttgggaggctgag

SEQ ID NO: 106622 - DNA, 80 bp, synthetic construct; identical to SEQ ID NO: 36849
  misc_feature 1..80: note = Artificially Synthesized Probe
  source 1..80: mol_type = other DNA

SEQ ID NO: 106623 - DNA, 80 bp, synthetic construct
  misc_feature 1..80: note = Artificially Synthesized Probe
  source 1..80: mol_type = other DNA
cagaggtggaggcaggtggatcgcttgaggccaggagtttgagaccagcctggctaacatggtgaaaccctgtctctact

SEQ ID NO: 106624 - DNA, 80 bp, synthetic construct
  misc_feature 1..80: note = Artificially Synthesized Probe
  source 1..80: mol_type = other DNA
atcacttaagccaggagttcaagattagcctgggcaacatagtgagacctcatctctacaaaacataaacaaaattagat

SEQ ID NO: 106625 - DNA, 80 bp, synthetic construct
  misc_feature 1..80: note = Artificially Synthesized Probe
  source 1..80: mol_type = other DNA
tgaaaaaaaaaaaaataaataaaaataaaaaaagaaaagaaaatataataaatatatttaatgaatgaaagcatgattta

SEQ ID NO: 106626 - DNA, 80 bp, synthetic construct
  misc_feature 1..80: note = Artificially Synthesized Probe
  source 1..80: mol_type = other DNA
gcatcattcattcatgctgtttggcaacaggcagctgctgtaagattagacaagtgaagctacccaaaaaataaatcaat

SEQ ID NO: 106627 - DNA, 80 bp, synthetic construct
  misc_feature 1..80: note = Artificially Synthesized Probe
  source 1..80: mol_type = other DNA
tccggggctcctgcggctgcaaccttccggctgcagggggccagcgccggctccgacgctcgggcgagcagttcccaggg

SEQ ID NO: 106628 - DNA, 80 bp, synthetic construct; identical to SEQ ID NO: 36850
  misc_feature 1..80: note = Artificially Synthesized Probe
  source 1..80: mol_type = other DNA

SEQ ID NO: 106629 - DNA, 80 bp, synthetic construct
  misc_feature 1..80: note = Artificially Synthesized Probe
  source 1..80: mol_type = other DNA
tccacgtttggcattatacgcttgcagcagtgtaggtcccaaaagaacttcaaagactacttatattcttttttttttga

SEQ ID NO: 106630 - DNA, 80 bp, synthetic construct
  misc_feature 1..80: note = Artificially Synthesized Probe
  source 1..80: mol_type = other DNA
cgggcgcccgccaccacgcccggctaattttttgtattttttaatagagacggggtttcaccgtgttagccaggatggtc

SEQ ID NO: 106631 - DNA, 80 bp, synthetic construct
  misc_feature 1..80: note = Artificially Synthesized Probe
  source 1..80: mol_type = other DNA
tttatttatgtttttaaatagagatgggggggggtctcactgtgtttcccaggctgggctcaaacacctgggctcaagcg

SEQ ID NO: 106632 - DNA, 80 bp, synthetic construct
  misc_feature 1..80: note = Artificially Synthesized Probe
  source 1..80: mol_type = other DNA
gaggcaggcggatcacaaggtcaggagatcaagaccatcctggctaacacggtcaaaccccgtctctactaaaaatacaa

SEQ ID NO: 106633 - DNA, 80 bp, synthetic construct
  misc_feature 1..80: note = Artificially Synthesized Probe
  source 1..80: mol_type = other DNA
ttcgagaccagcctggccaacatggcaaaactccatctccagcaaaaatacaaaaattagcggggcatggtggtgcatgc

SEQ ID NO: 106634 - DNA, 80 bp, synthetic construct; identical to SEQ ID NO: 36851
  misc_feature 1..80: note = Artificially Synthesized Probe
  source 1..80: mol_type = other DNA

SEQ ID NO: 106635 - DNA, 80 bp, synthetic construct
  misc_feature 1..80: note = Artificially Synthesized Probe
  source 1..80: mol_type = other DNA
cacagcatctctacccttagctacaggaccctccccaccaaaacacaatttttttttcccccgagactgagtctcactct

SEQ ID NO: 106636 - DNA, 80 bp, synthetic construct
  misc_feature 1..80: note = Artificially Synthesized Probe
  source 1..80: mol_type = other DNA
caccatgttggccaggctggtctcaaactcctgacctcaaatgatctgcccacctcggcctcccaaagtgctgggattac

SEQ ID NO: 106637 - DNA, 80 bp, synthetic construct; identical to SEQ ID NO: 36828
  misc_feature 1..80: note = Artificially Synthesized Probe
  source 1..80: mol_type = other DNA

SEQ ID NO: 106638 - DNA, 80 bp, synthetic construct
  misc_feature 1..80: note = Artificially Synthesized Probe
  source 1..80: mol_type = other DNA
ccatctctactacaaatataaacattagcctggcatggtggtgcatggataatcccagctactcgggaggctgaggcaga

SEQ ID NO: 106639 - DNA, 80 bp, synthetic construct; identical to SEQ ID NO: 36852
  misc_feature 1..80: note = Artificially Synthesized Probe
  source 1..80: mol_type = other DNA

SEQ ID NO: 106640 - DNA, 80 bp, synthetic construct
  misc_feature 1..80: note = Artificially Synthesized Probe
  source 1..80: mol_type = other DNA
ggaggatcatttgagcccaggatttcgaggttacagtgagccgtgatcatgccactgtactccagtctgggtaacagagc

SEQ ID NO: 106641 - DNA, 80 bp, synthetic construct
  misc_feature 1..80: note = Artificially Synthesized Probe
  source 1..80: mol_type = other DNA
tatatatatagttgcctagaagacactaatgagtggtcacatacaagtgtaacaaccaggaggtaatcttgccagacaag

SEQ ID NO: 106642 - DNA, 80 bp, synthetic construct; identical to SEQ ID NO: 36853
  misc_feature 1..80: note = Artificially Synthesized Probe
  source 1..80: mol_type = other DNA

SEQ ID NO: 106643 - DNA, 80 bp, synthetic construct
  misc_feature 1..80: note = Artificially Synthesized Probe
  source 1..80: mol_type = other DNA
acaaaggcataattactggaataatagcacataagaaccaaatacaatacagcataatgaaggtgtaataaaaatattag

SEQ ID NO: 106644 - DNA, 80 bp, synthetic construct
  misc_feature 1..80: note = Artificially Synthesized Probe
  source 1..80: mol_type = other DNA
gaagcttcgaactcctgggctcaagcaatcttcctgcctcagccttccgagtaggttggaccacaggtgtgtgccaccac

SEQ ID NO: 106645 - DNA, 80 bp, synthetic construct
  misc_feature 1..80: note = Artificially Synthesized Probe
  source 1..80: mol_type = other DNA
ggagtcttgctctgtcacccaggctggagtgcagtagcgtgatcttggctctctgcaacctctgcctcctgggttcaagt

SEQ ID NO: 106646 - DNA, 80 bp, synthetic construct; identical to SEQ ID NO: 36854
  misc_feature 1..80: note = Artificially Synthesized Probe
  source 1..80: mol_type = other DNA

SEQ ID NO: 106647 - DNA, 80 bp, synthetic construct
  misc_feature 1..80: note = Artificially Synthesized Probe
  source 1..80: mol_type = other DNA
atcacaaagtcaggagatggaaaccatcctggctaacacggtgaaaccccgtctctactaaaaatacaaaaaatacaaaa

SEQ ID NO: 106648 - DNA, 80 bp, synthetic construct
  misc_feature 1..80: note = Artificially Synthesized Probe
  source 1..80: mol_type = other DNA
atgttacaggtaaatcatataatctctgcaagcctcagttcccctatcagtaagaagaacacaacatttggccaggcatg

SEQ ID NO: 106649 - DNA, 80 bp, synthetic construct
  misc_feature 1..80: note = Artificially Synthesized Probe
  source 1..80: mol_type = other DNA
ctaaaaaacaaacagacaaaaaacactgaacacgtgcaatttctatgacccagcaatcccacctgaggaagacactcagg

SEQ ID NO: 106650 - DNA, 80 bp, synthetic construct
  misc_feature 1..80: note = Artificially Synthesized Probe
  source 1..80: mol_type = other DNA
cgtgcacacacctcgaggcacacacctcgaatcccaggtacttgggaggctgaggtgggaggatggcttgagcctgggag

SEQ ID NO: 106651 - DNA, 80 bp, synthetic construct
  misc_feature 1..80: note = Artificially Synthesized Probe
  source 1..80: mol_type = other DNA
gagttcaagaccagcctgaccaacatggagaaaccccgtctccactaaaaatacaaaattagctgggtgtagtggtgcat

SEQ ID NO: 106652 - DNA, 80 bp, synthetic construct; identical to SEQ ID NO: 36855
  misc_feature 1..80: note = Artificially Synthesized Probe
  source 1..80: mol_type = other DNA

SEQ ID NO: 106653 - DNA, 80 bp, synthetic construct
  misc_feature 1..80: note = Artificially Synthesized Probe
  source 1..80: mol_type = other DNA
ctttttatatctgtgtgtataaaatatttgctaacaattgtaatatttcttatcaatacgttaaataccaatacattgct
